United States Patent Application Publication US 2011/0177960 A1 - sequence listing, part 3

SEQ ID NO: 9438 - DNA, 25 bp, Artificial
  probe
  misc_feature (1)..(25): SEQ ID NO: 7765; CRE3_at; Start 255; Stop 279
cggcgctaaggatgactctggtcag

SEQ ID NO: 9439 - DNA, 25 bp, Artificial
  probe
  misc_feature (1)..(25): SEQ ID NO: 7765; CRE3_at; Start 272; Stop 296
ctggtcagagatacctggcctggtc

SEQ ID NO: 9440 - DNA, 25 bp, Artificial
  probe
  misc_feature (1)..(25): SEQ ID NO: 7765; CRE3_at; Start 235; Stop 259
gcaactcatcgattgatttacggcg

SEQ ID NO: 9441 - DNA, 25 bp, Artificial
  probe
  misc_feature (1)..(25): SEQ ID NO: 7765; CRE3_at; Start 114; Stop 138
cgtctctggtgtagctgatgatccg

SEQ ID NO: 9442 - DNA, 25 bp, Artificial
  probe
  misc_feature (1)..(25): SEQ ID NO: 7765; CRE3_at; Start 89; Stop 113
ctaaactggtcgagcgatggatttc

SEQ ID NO: 9443 - DNA, 25 bp, Artificial
  probe
  misc_feature (1)..(25): SEQ ID NO: 7765; CRE3_at; Start 45; Stop 69
ggttagcaccgcaggtgtagagaag

SEQ ID NO: 9444 - DNA, 25 bp, Artificial
  probe
  misc_feature (1)..(25): SEQ ID NO: 7765; CRE3_at; Start 444; Stop 468
gcgcctgctggaagatgccgattag

SEQ ID NO: 9445 - DNA, 25 bp, Artificial
  probe
  misc_feature (1)..(25): SEQ ID NO: 7765; CRE3_at; Start 391; Stop 415
aatattgtcatgaactatatccgta

SEQ ID NO: 9446 - DNA, 25 bp, Artificial
  probe
  misc_feature (1)..(25): SEQ ID NO: 7765; CRE3_at; Start 351; Stop 375
aataccggagatcatgcaagctggt

SEQ ID NO: 9447 - DNA, 25 bp, Artificial
  probe
  misc_feature (1)..(25): SEQ ID NO: 7765; CRE3_at; Start 439; Stop 463
atggtgcgcctgctggaagatgccg

SEQ ID NO: 9448 - DNA, 25 bp, Artificial
  probe
  misc_feature (1)..(25): SEQ ID NO: 7765; CRE3_at; Start 10; Stop 34
agaatgttaatccatattggcagaa

SEQ ID NO: 9449 - DNA, 25 bp, Artificial
  probe
  misc_feature (1)..(25): SEQ ID NO: 7765; CRE3_at; Start 171; Stop 195
tggtgttgccgcgccatctgccacc

SEQ ID NO: 9450 - DNA, 25 bp, Artificial
  probe
  misc_feature (1)..(25): SEQ ID NO: 7765; CRE3_at; Start 237; Stop 261
aactcatcgattgatttacggcgct

SEQ ID NO: 9451 - DNA, 25 bp, Artificial
  probe
  misc_feature (1)..(25): SEQ ID NO: 7765; CRE3_at; Start 228; Stop 252
ttttgaagcaactcatcgattgatt

SEQ ID NO: 9452 - DNA, 25 bp, Artificial
  probe
  misc_feature (1)..(25): SEQ ID NO: 7765; CRE3_at; Start 329; Stop 353
atatggcccgcgctggagtttcaat

SEQ ID NO: 9453 - DNA, 25 bp, Artificial
  probe
  misc_feature (1)..(25): SEQ ID NO: 7765; CRE3_at; Start 11; Stop 35
gaatgttaatccatattggcagaac

SEQ ID NO: 9454 - DNA, 25 bp, Artificial
  probe
  misc_feature (1)..(25): SEQ ID NO: 7765; CRE3_at; Start 199; Stop 223
cagctatcaactcgcgccctggaag

SEQ ID NO: 9455 - DNA, 25 bp, Artificial
  probe
  misc_feature (1)..(25): SEQ ID NO: 7765; CRE3_at; Start 356; Stop 380
cggagatcatgcaagctggtggctg

SEQ ID NO: 9456 - DNA, 25 bp, Artificial
  probe
  misc_feature (1)..(25): SEQ ID NO: 7765; CRE3_at; Start 282; Stop 306
atacctggcctggtctggacacagt

SEQ ID NO: 9457 - DNA, 25 bp, Artificial
  probe
  misc_feature (1)..(25): SEQ ID NO: 7765; CRE3_at; Start 367; Stop 391
caagctggtggctggaccaatgtaa

SEQ ID NO: 9458 - DNA, 25 bp, Artificial
  probe
  misc_feature (1)..(25): SEQ ID NO: 7765; CRE3_at; Start 17; Stop 41
taatccatattggcagaacgaaaac

SEQ ID NO: 9459 - DNA, 25 bp, Artificial
  probe
  misc_feature (1)..(25): SEQ ID NO: 7765; CRE3_at; Start 355; Stop 379
ccggagatcatgcaagctggtggct

SEQ ID NO: 9460 - DNA, 25 bp, Artificial
  probe
  misc_feature (1)..(25): SEQ ID NO: 7765; CRE3_at; Start 429; Stop 453
aacaggggcaatggtgcgcctgctg

SEQ ID NO: 9461 - DNA, 25 bp, Artificial
  probe
  misc_feature (1)..(25): SEQ ID NO: 7765; CRE3_at; Start 401; Stop 425
tgaactatatccgtaacctggatag

SEQ ID NO: 9462 - DNA, 25 bp, Artificial
  probe
  misc_feature (1)..(25): SEQ ID NO: 7765; CRE3_at; Start 243; Stop 267
tcgattgatttacggcgctaaggat

SEQ ID NO: 9463 - DNA, 25 bp, Artificial
  probe
  misc_feature (1)..(25): SEQ ID NO: 7765; CRE3_at; Start 115; Stop 139
gtctctggtgtagctgatgatccga

SEQ ID NO: 9464 - DNA, 25 bp, Artificial
  probe
  misc_feature (1)..(25): SEQ ID NO: 7765; CRE3_at; Start 229; Stop 253
tttgaagcaactcatcgattgattt

SEQ ID NO: 9465 - DNA, 25 bp, Artificial
  probe
  misc_feature (1)..(25): SEQ ID NO: 7765; CRE3_at; Start 129; Stop 153
tgatgatccgaataactacctgttt

SEQ ID NO: 9466 - DNA, 25 bp, Artificial
  probe
  misc_feature (1)..(25): SEQ ID NO: 7765; CRE3_at; Start 443; Stop 467
tgcgcctgctggaagatgccgatta

SEQ ID NO: 9467 - DNA, 25 bp, Artificial
  probe
  misc_feature (1)..(25): SEQ ID NO: 7765; CRE3_at; Start 249; Stop 273
gatttacggcgctaaggatgactct

SEQ ID NO: 9468 - DNA, 25 bp, Artificial
  probe
  misc_feature (1)..(25): SEQ ID NO: 7765; CRE3_at; Start 397; Stop 421
gtcatgaactatatccgtaacctgg

SEQ ID NO: 9469 - DNA, 25 bp, Artificial
  probe
  misc_feature (1)..(25): SEQ ID NO: 7765; CRE3_at; Start 117; Stop 141
ctctggtgtagctgatgatccgaat

SEQ ID NO: 9470 - DNA, 25 bp, Artificial
  probe
  misc_feature (1)..(25): SEQ ID NO: 7765; CRE3_at; Start 345; Stop 369
agtttcaataccggagatcatgcaa

SEQ ID NO: 9471 - DNA, 25 bp, Artificial
  probe
  misc_feature (1)..(25): SEQ ID NO: 7765; CRE3_at; Start 15; Stop 39
gttaatccatattggcagaacgaaa

SEQ ID NO: 9472 - DNA, 25 bp, Artificial
  probe
  misc_feature (1)..(25): SEQ ID NO: 7765; CRE3_at; Start 295; Stop 319
tctggacacagtgcccgtgtcggag

SEQ ID NO: 9473 - DNA, 25 bp, Artificial
  probe
  misc_feature (1)..(25): SEQ ID NO: 7765; CRE3_at; Start 291; Stop 315
ctggtctggacacagtgcccgtgtc

SEQ ID NO: 9474 - DNA, 25 bp, Artificial
  probe
  misc_feature (1)..(25): SEQ ID NO: 7765; CRE3_at; Start 85; Stop 109
gtaactaaactggtcgagcgatgga

SEQ ID NO: 9475 - DNA, 25 bp, Artificial
  probe
  misc_feature (1)..(25): SEQ ID NO: 7765; CRE3_at; Start 241; Stop 265
catcgattgatttacggcgctaagg

SEQ ID NO: 9476 - DNA, 25 bp, Artificial
  probe
  misc_feature (1)..(25): SEQ ID NO: 7765; CRE3_at; Start 101; Stop 125
agcgatggatttccgtctctggtgt

SEQ ID NO: 9477 - DNA, 25 bp, Artificial
  probe
  misc_feature (1)..(25): SEQ ID NO: 7765; CRE3_at; Start 275; Stop 299
gtcagagatacctggcctggtctgg

SEQ ID NO: 9478 - DNA, 25 bp, Artificial
  probe
  misc_feature (1)..(25): SEQ ID NO: 7765; CRE3_at; Start 109; Stop 133
atttccgtctctggtgtagctgatg

SEQ ID NO: 9479 - DNA, 25 bp, Artificial
  probe
  misc_feature (1)..(25): SEQ ID NO: 7765; CRE3_at; Start 437; Stop 461
caatggtgcgcctgctggaagatgc

SEQ ID NO: 9480 - DNA, 25 bp, Artificial
  probe
  misc_feature (1)..(25): SEQ ID NO: 7765; CRE3_at; Start 309; Stop 333
ccgtgtcggagccgcgcgagatatg

SEQ ID NO: 9481 - DNA, 25 bp, Artificial
  probe
  misc_feature (1)..(25): SEQ ID NO: 7765; CRE3_at; Start 339; Stop 363
cgctggagtttcaataccggagatc

SEQ ID NO: 9482 - DNA, 25 bp, Artificial
  probe
  misc_feature (1)..(25): SEQ ID NO: 7765; CRE3_at; Start 302; Stop 326
acagtgcccgtgtcggagccgcgcg

SEQ ID NO: 9483 - DNA, 25 bp, Artificial
  probe
  misc_feature (1)..(25): SEQ ID NO: 7765; CRE3_at; Start 395; Stop 419
ttgtcatgaactatatccgtaacct

SEQ ID NO: 9484 - DNA, 25 bp, Artificial
  probe
  misc_feature (1)..(25): SEQ ID NO: 7765; CRE3_at; Start 41; Stop 65
cgctggttagcaccgcaggtgtaga

SEQ ID NO: 9485 - DNA, 25 bp, Artificial
  probe
  misc_feature (1)..(25): SEQ ID NO: 7765; CRE3_at; Start 347; Stop 371
tttcaataccggagatcatgcaagc

SEQ ID NO: 9486 - DNA, 25 bp, Artificial
  probe
  misc_feature (1)..(25): SEQ ID NO: 7765; CRE3_at; Start 323; Stop 347
cgcgagatatggcccgcgctggagt

SEQ ID NO: 9487 - DNA, 25 bp, Artificial
  probe
  misc_feature (1)..(25): SEQ ID NO: 7765; CRE3_at; Start 301; Stop 325
cacagtgcccgtgtcggagccgcgc

SEQ ID NO: 9488 - DNA, 25 bp, Artificial
  probe
  misc_feature (1)..(25): SEQ ID NO: 7765; CRE3_at; Start 441; Stop 465
ggtgcgcctgctggaagatgccgat

SEQ ID NO: 9489 - DNA, 25 bp, Artificial
  probe
  misc_feature (1)..(25): SEQ ID NO: 7765; CRE3_at; Start 197; Stop 221
gccagctatcaactcgcgccctgga

SEQ ID NO: 9490 - DNA, 25 bp, Artificial
  probe
  misc_feature (1)..(25): SEQ ID NO: 7765; CRE3_at; Start 317; Stop 341
gagccgcgcgagatatggcccgcgc

SEQ ID NO: 9491 - DNA, 25 bp, Artificial
  probe
  misc_feature (1)..(25): SEQ ID NO: 7765; CRE3_at; Start 289; Stop 313
gcctggtctggacacagtgcccgtg

SEQ ID NO: 9492 - DNA, 25 bp, Artificial
  probe
  misc_feature (1)..(25): SEQ ID NO: 7765; CRE3_at; Start 281; Stop 305
gatacctggcctggtctggacacag

SEQ ID NO: 9493 - DNA, 25 bp, Artificial
  probe
  misc_feature (1)..(25): SEQ ID NO: 7765; CRE3_at; Start 361; Stop 385
atcatgcaagctggtggctggacca

SEQ ID NO: 9494 - DNA, 25 bp, Artificial
  probe
  misc_feature (1)..(25): SEQ ID NO: 7765; CRE3_at; Start 427; Stop 451
gaaacaggggcaatggtgcgcctgc

SEQ ID NO: 9495 - DNA, 25 bp, Artificial
  probe
  misc_feature (1)..(25): SEQ ID NO: 7765; CRE3_at; Start 341; Stop 365
ctggagtttcaataccggagatcat

SEQ ID NO: 9496 - DNA, 25 bp, Artificial
  probe
  misc_feature (1)..(25): SEQ ID NO: 7765; CRE3_at; Start 393; Stop 417
tattgtcatgaactatatccgtaac

SEQ ID NO: 9497 - DNA, 25 bp, Artificial
  probe
  misc_feature (1)..(25): SEQ ID NO: 7765; CRE3_at; Start 364; Stop 388
atgcaagctggtggctggaccaatg

SEQ ID NO: 9498 - DNA, 25 bp, Artificial
  probe
  misc_feature (1)..(25): SEQ ID NO: 7765; CRE3_at; Start 315; Stop 339
cggagccgcgcgagatatggcccgc

SEQ ID NO: 9499 - DNA, 25 bp, Artificial
  probe
  misc_feature (1)..(25): SEQ ID NO: 7765; CRE3_at; Start 365; Stop 389
tgcaagctggtggctggaccaatgt

SEQ ID NO: 9500 - DNA, 25 bp, Artificial
  probe
  misc_feature (1)..(25): SEQ ID NO: 7765; CRE3_at; Start 325; Stop 349
cgagatatggcccgcgctggagttt

SEQ ID NO: 9501 - DNA, 25 bp, Artificial
  probe
  misc_feature (1)..(25): SEQ ID NO: 7765; CRE3_at; Start 225; Stop 249
gatttttgaagcaactcatcgattg

SEQ ID NO: 9502 - DNA, 25 bp, Artificial
  probe
  misc_feature (1)..(25): SEQ ID NO: 7765; CRE3_at; Start 257; Stop 281
gcgctaaggatgactctggtcagag

SEQ ID NO: 9503 - DNA, 25 bp, Artificial
  probe
  misc_feature (1)..(25): SEQ ID NO: 7765; CRE3_at; Start 127; Stop 151
gctgatgatccgaataactacctgt

SEQ ID NO: 9504 - DNA, 25 bp, Artificial
  probe
  misc_feature (1)..(25): SEQ ID NO: 7765; CRE3_at; Start 259; Stop 283
gctaaggatgactctggtcagagat

SEQ ID NO: 9505 - DNA, 25 bp, Artificial
  probe
  misc_feature (1)..(25): SEQ ID NO: 7765; CRE3_at; Start 47; Stop 71
ttagcaccgcaggtgtagagaaggc

SEQ ID NO: 9506 - DNA, 25 bp, Artificial
  probe
  misc_feature (1)..(25): SEQ ID NO: 7765; CRE3_at; Start 332; Stop 356
tggcccgcgctggagtttcaatacc

SEQ ID NO: 9507 - DNA, 25 bp, Artificial
  probe
  misc_feature (1)..(25): SEQ ID NO: 7765; CRE3_at; Start 247; Stop 271
ttgatttacggcgctaaggatgact

SEQ ID NO: 9508 - DNA, 25 bp, Artificial
  probe
  misc_feature (1)..(25): SEQ ID NO: 7765; CRE3_at; Start 39; Stop 63
aacgctggttagcaccgcaggtgta

SEQ ID NO: 9509 - DNA, 25 bp, Artificial
  probe
  misc_feature (1)..(25): SEQ ID NO: 7765; CRE3_at; Start 349; Stop 373
tcaataccggagatcatgcaagctg

SEQ ID NO: 9510 - DNA, 25 bp, Artificial
  probe
  misc_feature (1)..(25): SEQ ID NO: 7765; CRE3_at; Start 405; Stop 429
ctatatccgtaacctggatagtgaa

SEQ ID NO: 9511 - DNA, 25 bp, Artificial
  probe
  misc_feature (1)..(25): SEQ ID NO: 7765; CRE3_at; Start 331; Stop 355
atggcccgcgctggagtttcaatac

SEQ ID NO: 9512 - DNA, 25 bp, Artificial
  probe
  misc_feature (1)..(25): SEQ ID NO: 7765; CRE3_at; Start 95; Stop 119
tggtcgagcgatggatttccgtctc

SEQ ID NO: 9513 - DNA, 25 bp, Artificial
  probe
  misc_feature (1)..(25): SEQ ID NO: 7765; CRE3_at; Start 169; Stop 193
aatggtgttgccgcgccatctgcca

SEQ ID NO: 9514 - DNA, 25 bp, Artificial
  probe
  misc_feature (1)..(25): SEQ ID NO: 7765; CRE3_at; Start 123; Stop 147
tgtagctgatgatccgaataactac

SEQ ID NO: 9515 - DNA, 25 bp, Artificial
  probe
  misc_feature (1)..(25): SEQ ID NO: 7765; CRE3_at; Start 51; Stop 75
caccgcaggtgtagagaaggcactt

SEQ ID NO: 9516 - DNA, 25 bp, Artificial
  probe
  misc_feature (1)..(25): SEQ ID NO: 7765; CRE3_at; Start 107; Stop 131
ggatttccgtctctggtgtagctga

SEQ ID NO: 9517 - DNA, 25 bp, Artificial
  probe
  misc_feature (1)..(25): SEQ ID NO: 7765; CRE3_at; Start 271; Stop 295
tctggtcagagatacctggcctggt

SEQ ID NO: 9518 - DNA, 25 bp, Artificial
  probe
  misc_feature (1)..(25): SEQ ID NO: 7765; CRE3_at; Start 293; Stop 317
ggtctggacacagtgcccgtgtcgg

SEQ ID NO: 9519 - DNA, 25 bp, Artificial
  probe
  misc_feature (1)..(25): SEQ ID NO: 7765; CRE3_at; Start 277; Stop 301
cagagatacctggcctggtctggac

SEQ ID NO: 9520 - DNA, 25 bp, Artificial
  probe
  misc_feature (1)..(25): SEQ ID NO: 7765; CRE3_at; Start 227; Stop 251
tttttgaagcaactcatcgattgat

SEQ ID NO: 9521 - DNA, 25 bp, Artificial
  probe
  misc_feature (1)..(25): SEQ ID NO: 7765; CRE3_at; Start 267; Stop 291
tgactctggtcagagatacctggcc

SEQ ID NO: 9522 - DNA, 25 bp, Artificial
  probe
  misc_feature (1)..(25): SEQ ID NO: 7765; CRE3_at; Start 279; Stop 303
gagatacctggcctggtctggacac

SEQ ID NO: 9523 - DNA, 25 bp, Artificial
  probe
  misc_feature (1)..(25): SEQ ID NO: 7765; CRE3_at; Start 348; Stop 372
ttcaataccggagatcatgcaagct

SEQ ID NO: 9524 - DNA, 25 bp, Artificial
  probe
  misc_feature (1)..(25): SEQ ID NO: 7765; CRE3_at; Start 313; Stop 337
gtcggagccgcgcgagatatggccc

SEQ ID NO: 9525 - DNA, 25 bp, Artificial
  probe
  misc_feature (1)..(25): SEQ ID NO: 7765; CRE3_at; Start 19; Stop 43
atccatattggcagaacgaaaacgc

SEQ ID NO: 9526 - DNA, 25 bp, Artificial
  probe
  misc_feature (1)..(25): SEQ ID NO: 7766; CRE5_at; Start 102; Stop 126
ccaggcgttttctgagcatacctgg

SEQ ID NO: 9527 - DNA, 25 bp, Artificial
  probe
  misc_feature (1)..(25): SEQ ID NO: 7766; CRE5_at; Start 101; Stop 125
gccaggcgttttctgagcatacctg

SEQ ID NO: 9528 - DNA, 25 bp, Artificial
  probe
  misc_feature (1)..(25): SEQ ID NO: 7766; CRE5_at; Start 91; Stop 115
ttcagggatcgccaggcgttttctg

SEQ ID NO: 9529 - DNA, 25 bp, Artificial
  probe
  misc_feature (1)..(25): SEQ ID NO: 7766; CRE5_at; Start 232; Stop 256
cttcaggcgcgcggtctggcagtaa

SEQ ID NO: 9530 - DNA, 25 bp, Artificial
  probe
  misc_feature (1)..(25): SEQ ID NO: 7766; CRE5_at; Start 205; Stop 229
gaagatgttcgcgattatcttctat

SEQ ID NO: 9531 - DNA, 25 bp, Artificial
  probe
  misc_feature (1)..(25): SEQ ID NO: 7766; CRE5_at; Start 211; Stop 235
gttcgcgattatcttctatatcttc

SEQ ID NO: 9532 - DNA, 25 bp, Artificial
  probe
  misc_feature (1)..(25): SEQ ID NO: 7766; CRE5_at; Start 455; Stop 479
gcgatcgctgccaggatatacgtaa

SEQ ID NO: 9533 - DNA, 25 bp, Artificial
  probe
  misc_feature (1)..(25): SEQ ID NO: 7766; CRE5_at; Start 457; Stop 481
gatcgctgccaggatatacgtaatc

SEQ ID NO: 9534 - DNA, 25 bp, Artificial
  probe
  misc_feature (1)..(25): SEQ ID NO: 7766; CRE5_at; Start 287; Stop 311
acatgcttcatcgtcggtccgggct

SEQ ID NO: 9535 - DNA, 25 bp, Artificial
  probe
  misc_feature (1)..(25): SEQ ID NO: 7766; CRE5_at; Start 36; Stop 60
tgcattaccggtcgatgcaacgagt

SEQ ID NO: 9536 - DNA, 25 bp, Artificial
  probe
  misc_feature (1)..(25): SEQ ID NO: 7766; CRE5_at; Start 371; Stop 395
acgttgatgccggtgaacgtgcaaa

SEQ ID NO: 9537 - DNA, 25 bp, Artificial
  probe
  misc_feature (1)..(25): SEQ ID NO: 7766; CRE5_at; Start 31; Stop 55
ttgcctgcattaccggtcgatgcaa

SEQ ID NO: 9538 - DNA, 25 bp, Artificial
  probe
  misc_feature (1)..(25): SEQ ID NO: 7766; CRE5_at; Start 77; Stop 101
acctgatggacatgttcagggatcg

SEQ ID NO: 9539 - DNA, 25 bp, Artificial
  probe
  misc_feature (1)..(25): SEQ ID NO: 7766; CRE5_at; Start 297; Stop 321
tcgtcggtccgggctgccacgacca

SEQ ID NO: 9540 - DNA, 25 bp, Artificial
  probe
  misc_feature (1)..(25): SEQ ID NO: 7766; CRE5_at; Start 74; Stop 98
agaacctgatggacatgttcaggga

SEQ ID NO: 9541 - DNA, 25 bp, Artificial
  probe
  misc_feature (1)..(25): SEQ ID NO: 7766; CRE5_at; Start 225; Stop 249
tctatatcttcaggcgcgcggtctg

SEQ ID NO: 9542 - DNA, 25 bp, Artificial
  probe
  misc_feature (1)..(25): SEQ ID NO: 7766; CRE5_at; Start 331; Stop 355
aatgctgtttcactggttatgcggc

SEQ ID NO: 9543 - DNA, 25 bp, Artificial
  probe
  misc_feature (1)..(25): SEQ ID NO: 7766; CRE5_at; Start 267; Stop 291
gcaacatttgggccagctaaacatg

SEQ ID NO: 9544 - DNA, 25 bp, Artificial
  probe
  misc_feature (1)..(25): SEQ ID NO: 7766; CRE5_at; Start 309; Stop 333
gctgccacgaccaagtgacagcaat

SEQ ID NO: 9545 - DNA, 25 bp, Artificial
  probe
  misc_feature (1)..(25): SEQ ID NO: 7766; CRE5_at; Start 2; Stop 26
tgtccaatttactgaccgtacacca

SEQ ID NO: 9546 - DNA, 25 bp, Artificial
  probe
  misc_feature (1)..(25): SEQ ID NO: 7766; CRE5_at; Start 416; Stop 440
gcactgatttcgaccaggttcgttc

SEQ ID NO: 9547 - DNA, 25 bp, Artificial
  probe
  misc_feature (1)..(25): SEQ ID NO: 7766; CRE5_at; Start 265; Stop 289
cagcaacatttgggccagctaaaca

SEQ ID NO: 9548 - DNA, 25 bp, Artificial
  probe
  misc_feature (1)..(25): SEQ ID NO: 7766; CRE5_at; Start 344; Stop 368
tggttatgcggcggatccgaaaaga

SEQ ID NO: 9549 - DNA, 25 bp, Artificial
  probe
  misc_feature (1)..(25): SEQ ID NO: 7766; CRE5_at; Start 453; Stop 477
tagcgatcgctgccaggatatacgt

SEQ ID NO: 9550 - DNA, 25 bp, Artificial
  probe
  misc_feature (1)..(25): SEQ ID NO: 7766; CRE5_at; Start 451; Stop 475
aatagcgatcgctgccaggatatac

SEQ ID NO: 9551 - DNA, 25 bp, Artificial
  probe
  misc_feature (1)..(25): SEQ ID NO: 7766; CRE5_at; Start 484; Stop 508
gcatttctggggattgcttataaca

SEQ ID NO: 9552 - DNA, 25 bp, Artificial
  probe
  misc_feature (1)..(25): SEQ ID NO: 7766; CRE5_at; Start 227; Stop 251
tatatcttcaggcgcgcggtctggc

SEQ ID NO: 9553 - DNA, 25 bp, Artificial
  probe
  misc_feature (1)..(25): SEQ ID NO: 7766; CRE5_at; Start 65; Stop 89
aggttcgcaagaacctgatggacat

SEQ ID NO: 9554 - DNA, 25 bp, Artificial
  probe
  misc_feature (1)..(25): SEQ ID NO: 7766; CRE5_at; Start 218; Stop 242
attatcttctatatcttcaggcgcg

SEQ ID NO: 9555 - DNA, 25 bp, Artificial
  probe
  misc_feature (1)..(25): SEQ ID NO: 7766; CRE5_at; Start 294; Stop 318
tcatcgtcggtccgggctgccacga

SEQ ID NO: 9556 - DNA, 25 bp, Artificial
  probe
  misc_feature (1)..(25): SEQ ID NO: 7766; CRE5_at; Start 99; Stop 123
tcgccaggcgttttctgagcatacc

SEQ ID NO: 9557 - DNA, 25 bp, Artificial
  probe
  misc_feature (1)..(25): SEQ ID NO: 7766; CRE5_at; Start 315; Stop 339
acgaccaagtgacagcaatgctgtt

SEQ ID NO: 9558 - DNA, 25 bp, Artificial
  probe
  misc_feature (1)..(25): SEQ ID NO: 7766; CRE5_at; Start 281; Stop 305
agctaaacatgcttcatcgtcggtc

SEQ ID NO: 9559 - DNA, 25 bp, Artificial
  probe
  misc_feature (1)..(25): SEQ ID NO: 7766; CRE5_at; Start 399; Stop 423
ggctctagcgttcgaacgcactgat

SEQ ID NO: 9560 - DNA, 25 bp, Artificial
  probe
  misc_feature (1)..(25): SEQ ID NO: 7766; CRE5_at; Start 219; Stop 243
ttatcttctatatcttcaggcgcgc

SEQ ID NO: 9561 - DNA, 25 bp, Artificial
  probe
  misc_feature (1)..(25): SEQ ID NO: 7766; CRE5_at; Start 221; Stop 245
atcttctatatcttcaggcgcgcgg

SEQ ID NO: 9562 - DNA, 25 bp, Artificial
  probe
  misc_feature (1)..(25): SEQ ID NO: 7766; CRE5_at; Start 317; Stop 341
gaccaagtgacagcaatgctgtttc

SEQ ID NO: 9563 - DNA, 25 bp, Artificial
  probe
  misc_feature (1)..(25): SEQ ID NO: 7766; CRE5_at; Start 87; Stop 111
catgttcagggatcgccaggcgttt

SEQ ID NO: 9564 - DNA, 25 bp, Artificial
  probe
  misc_feature (1)..(25): SEQ ID NO: 7766; CRE5_at; Start 69; Stop 93
tcgcaagaacctgatggacatgttc

SEQ ID NO: 9565 - DNA, 25 bp, Artificial
  probe
  misc_feature (1)..(25): SEQ ID NO: 7766; CRE5_at; Start 404; Stop 428
tagcgttcgaacgcactgatttcga

SEQ ID NO: 9566 - DNA, 25 bp, Artificial
  probe
  misc_feature (1)..(25): SEQ ID NO: 7766; CRE5_at; Start 417; Stop 441
cactgatttcgaccaggttcgttca

SEQ ID NO: 9567 - DNA, 25 bp, Artificial
  probe
  misc_feature (1)..(25): SEQ ID NO: 7766; CRE5_at; Start 311; Stop 335
tgccacgaccaagtgacagcaatgc

SEQ ID NO: 9568 - DNA, 25 bp, Artificial
  probe
  misc_feature (1)..(25): SEQ ID NO: 7766; CRE5_at; Start 395; Stop 419
aacaggctctagcgttcgaacgcac

SEQ ID NO: 9569 - DNA, 25 bp, Artificial
  probe
  misc_feature (1)..(25): SEQ ID NO: 7766; CRE5_at; Start 15; Stop 39
gaccgtacaccaaaatttgcctgca

SEQ ID NO: 9570 - DNA, 25 bp, Artificial
  probe
  misc_feature (1)..(25): SEQ ID NO: 7766; CRE5_at; Start 217; Stop 241
gattatcttctatatcttcaggcgc

SEQ ID NO: 9571 - DNA, 25 bp, Artificial
  probe
  misc_feature (1)..(25): SEQ ID NO: 7766; CRE5_at; Start 387; Stop 411
acgtgcaaaacaggctctagcgttc

SEQ ID NO: 9572 - DNA, 25 bp, Artificial
  probe
  misc_feature (1)..(25): SEQ ID NO: 7766; CRE5_at; Start 93; Stop 117
cagggatcgccaggcgttttctgag

SEQ ID NO: 9573 - DNA, 25 bp, Artificial
  probe
  misc_feature (1)..(25): SEQ ID NO: 7766; CRE5_at; Start 305; Stop 329
ccgggctgccacgaccaagtgacag

SEQ ID NO: 9574 - DNA, 25 bp, Artificial
  probe
  misc_feature (1)..(25): SEQ ID NO: 7766; CRE5_at; Start 334; Stop 358
gctgtttcactggttatgcggcgga

SEQ ID NO: 9575 - DNA, 25 bp, Artificial
  probe
  misc_feature (1)..(25): SEQ ID NO: 7766; CRE5_at; Start 276; Stop 300
gggccagctaaacatgcttcatcgt

SEQ ID NO: 9576 - DNA, 25 bp, Artificial
  probe
  misc_feature (1)..(25): SEQ ID NO: 7766; CRE5_at; Start 435; Stop 459
tcgttcactcatggaaaatagcgat

SEQ ID NO: 9577 - DNA, 25 bp, Artificial
  probe
  misc_feature (1)..(25): SEQ ID NO: 7766; CRE5_at; Start 335; Stop 359
ctgtttcactggttatgcggcggat

SEQ ID NO: 9578 - DNA, 25 bp, Artificial
  probe
  misc_feature (1)..(25): SEQ ID NO: 7766; CRE5_at; Start 67; Stop 91
gttcgcaagaacctgatggacatgt

SEQ ID NO: 9579 - DNA, 25 bp, Artificial
  probe
  misc_feature (1)..(25): SEQ ID NO: 7766; CRE5_at; Start 56; Stop 80
cgagtgatgaggttcgcaagaacct

SEQ ID NO: 9580 - DNA, 25 bp, Artificial
  probe
  misc_feature (1)..(25): SEQ ID NO: 7766; CRE5_at; Start 39; Stop 63
attaccggtcgatgcaacgagtgat

SEQ ID NO: 9581 - DNA, 25 bp, Artificial
  probe
  misc_feature (1)..(25): SEQ ID NO: 7766; CRE5_at; Start 110; Stop 134
tttctgagcatacctggaaaatgct

SEQ ID NO: 9582 - DNA, 25 bp, Artificial
  probe
  misc_feature (1)..(25): SEQ ID NO: 7766; CRE5_at; Start 339; Stop 363
ttcactggttatgcggcggatccga

SEQ ID NO: 9583 - DNA, 25 bp, Artificial
  probe
  misc_feature (1)..(25): SEQ ID NO: 7766; CRE5_at; Start 97; Stop 121
gatcgccaggcgttttctgagcata

SEQ ID NO: 9584 - DNA, 25 bp, Artificial
  probe
  misc_feature (1)..(25): SEQ ID NO: 7766; CRE5_at; Start 250; Stop 274
gcagtaaaaactatccagcaacatt

SEQ ID NO: 9585 - DNA, 25 bp, Artificial
  probe
  misc_feature (1)..(25): SEQ ID NO: 7766; CRE5_at; Start 316; Stop 340
cgaccaagtgacagcaatgctgttt

SEQ ID NO: 9586 - DNA, 25 bp, Artificial
  probe
  misc_feature (1)..(25): SEQ ID NO: 7766; CRE5_at; Start 191; Stop 215
ttcccgcagaacctgaagatgttcg

SEQ ID NO: 9587 - DNA, 25 bp, Artificial
  probe
  misc_feature (1)..(25): SEQ ID NO: 7766; CRE5_at; Start 46; Stop 70
gtcgatgcaacgagtgatgaggttc

SEQ ID NO: 9588 - DNA, 25 bp, Artificial
  probe
  misc_feature (1)..(25): SEQ ID NO: 7766; CRE5_at; Start 279; Stop 303
ccagctaaacatgcttcatcgtcgg

SEQ ID NO: 9589 - DNA, 25 bp, Artificial
  probe
  misc_feature (1)..(25): SEQ ID NO: 7766; CRE5_at; Start 117; Stop 141
gcatacctggaaaatgcttctgtcc

SEQ ID NO: 9590 - DNA, 25 bp, Artificial
  probe
  misc_feature (1)..(25): SEQ ID NO: 7766; CRE5_at; Start 308; Stop 332
ggctgccacgaccaagtgacagcaa

SEQ ID NO: 9591 - DNA, 25 bp, Artificial
  probe
  misc_feature (1)..(25): SEQ ID NO: 7766; CRE5_at; Start 37; Stop 61
gcattaccggtcgatgcaacgagtg

SEQ ID NO: 9592 - DNA, 25 bp, Artificial
  probe
  misc_feature (1)..(25): SEQ ID NO: 7766; CRE5_at; Start 325; Stop 349
gacagcaatgctgtttcactggtta

SEQ ID NO: 9593 - DNA, 25 bp, Artificial
  probe
  misc_feature (1)..(25): SEQ ID NO: 7766; CRE5_at; Start 79; Stop 103
ctgatggacatgttcagggatcgcc

SEQ ID NO: 9594 - DNA, 25 bp, Artificial
  probe
  misc_feature (1)..(25): SEQ ID NO: 7766; CRE5_at; Start 374; Stop 398
ttgatgccggtgaacgtgcaaaaca

SEQ ID NO: 9595 - DNA, 25 bp, Artificial
  probe
  misc_feature (1)..(25): SEQ ID NO: 7766; CRE5_at; Start 201; Stop 225
acctgaagatgttcgcgattatctt

SEQ ID NO: 9596 - DNA, 25 bp, Artificial
  probe
  misc_feature (1)..(25): SEQ ID NO: 7766; CRE5_at; Start 28; Stop 52
aatttgcctgcattaccggtcgatg

SEQ ID NO: 9597 - DNA, 25 bp, Artificial
  probe
  misc_feature (1)..(25): SEQ ID NO: 7766; CRE5_at; Start 226; Stop 250
ctatatcttcaggcgcgcggtctgg

SEQ ID NO: 9598 - DNA, 25 bp, Artificial
  probe
  misc_feature (1)..(25): SEQ ID NO: 7766; CRE5_at; Start 319; Stop 343
ccaagtgacagcaatgctgtttcac

SEQ ID NO: 9599 - DNA, 25 bp, Artificial
  probe
  misc_feature (1)..(25): SEQ ID NO: 7766; CRE5_at; Start 95; Stop 119
gggatcgccaggcgttttctgagca

SEQ ID NO: 9600 - DNA, 25 bp, Artificial
  probe
  misc_feature (1)..(25): SEQ ID NO: 7766; CRE5_at; Start 337; Stop 361
gtttcactggttatgcggcggatcc

SEQ ID NO: 9601 - DNA, 25 bp, Artificial
  probe
  misc_feature (1)..(25): SEQ ID NO: 7766; CRE5_at; Start 259; Stop 283
actatccagcaacatttgggccagc

SEQ ID NO: 9602 - DNA, 25 bp, Artificial
  probe
  misc_feature (1)..(25): SEQ ID NO: 7766; CRE5_at; Start 307; Stop 331
gggctgccacgaccaagtgacagca

SEQ ID NO: 9603 - DNA, 25 bp, Artificial
  probe
  misc_feature (1)..(25): SEQ ID NO: 7766; CRE5_at; Start 291; Stop 315
gcttcatcgtcggtccgggctgcca

SEQ ID NO: 9604 - DNA, 25 bp, Artificial
  probe
  misc_feature (1)..(25): SEQ ID NO: 7766; CRE5_at; Start 85; Stop 109
gacatgttcagggatcgccaggcgt

SEQ ID NO: 9605 - DNA, 25 bp, Artificial
  probe
  misc_feature (1)..(25): SEQ ID NO: 7766; CRE5_at; Start 327; Stop 351
cagcaatgctgtttcactggttatg

SEQ ID NO: 9606 - DNA, 25 bp, Artificial
  probe
  misc_feature (1)..(25): SEQ ID NO: 7766; CRE5_at; Start 105; Stop 129
ggcgttttctgagcatacctggaaa

SEQ ID NO: 9607 - DNA, 25 bp, Artificial
  probe
  misc_feature (1)..(25): SEQ ID NO: 7766; CRE5_at; Start 263; Stop 287
tccagcaacatttgggccagctaaa

SEQ ID NO: 9608 - DNA, 25 bp, Artificial
  probe
  misc_feature (1)..(25): SEQ ID NO: 7766; CRE5_at; Start 199; Stop 223
gaacctgaagatgttcgcgattatc

SEQ ID NO: 9609 - DNA, 25 bp, Artificial
  probe
  misc_feature (1)..(25): SEQ ID NO: 7766; CRE5_at; Start 286; Stop 310
aacatgcttcatcgtcggtccgggc

SEQ ID NO: 9610 - DNA, 25 bp, Artificial
  probe
  misc_feature (1)..(25): SEQ ID NO: 7766; CRE5_at; Start 270; Stop 294
acatttgggccagctaaacatgctt

SEQ ID NO: 9611 - DNA, 25 bp, Artificial
  probe
  misc_feature (1)..(25): SEQ ID NO: 7766; CRE5_at; Start 421; Stop 445
gatttcgaccaggttcgttcactca

SEQ ID NO: 9612 - DNA, 25 bp, Artificial
  probe
  misc_feature (1)..(25): SEQ ID NO: 7766; CRE5_at; Start 427; Stop 451
gaccaggttcgttcactcatggaaa

SEQ ID NO: 9613 - DNA, 25 bp, Artificial
  probe
  misc_feature (1)..(25): SEQ ID NO: 7766; CRE5_at; Start 82; Stop 106
atggacatgttcagggatcgccagg

SEQ ID NO: 9614 - DNA, 25 bp, Artificial
  probe
  misc_feature (1)..(25): SEQ ID NO: 7766; CRE5_at; Start 235; Stop 259
caggcgcgcggtctggcagtaaaaa

SEQ ID NO: 9615 - DNA, 25 bp, Artificial
  probe
  misc_feature (1)..(25): SEQ ID NO: 7766; CRE5_at; Start 154; Stop 178
tgggcggcatggtgcaagttgaata

SEQ ID NO: 9616 - DNA, 25 bp, Artificial
  probe
  misc_feature (1)..(25): SEQ ID NO: 7766; CRE5_at; Start 275; Stop 299
tgggccagctaaacatgcttcatcg

SEQ ID NO: 9617 - DNA, 25 bp, Artificial
  probe
  misc_feature (1)..(25): SEQ ID NO: 7766; CRE5_at; Start 41; Stop 65
taccggtcgatgcaacgagtgatga

SEQ ID NO: 9618 - DNA, 25 bp, Artificial
  probe
  misc_feature (1)..(25): SEQ ID NO: 7766; CRE5_at; Start 45; Stop 69
ggtcgatgcaacgagtgatgaggtt

SEQ ID NO: 9619 - DNA, 25 bp, Artificial
  probe
  misc_feature (1)..(25): SEQ ID NO: 7766; CRE5_at; Start 405; Stop 429
agcgttcgaacgcactgatttcgac

SEQ ID NO: 9620 - DNA, 25 bp, Artificial
  probe
  misc_feature (1)..(25): SEQ ID NO: 7766; CRE5_at; Start 329; Stop 353
gcaatgctgtttcactggttatgcg

SEQ ID NO: 9621 - DNA, 25 bp, Artificial
  probe
  misc_feature (1)..(25): SEQ ID NO: 7766; CRE5_at; Start 409; Stop 433
ttcgaacgcactgatttcgaccagg

SEQ ID NO: 9622 - DNA, 25 bp, Artificial
  probe
  misc_feature (1)..(25): SEQ ID NO: 7766; CRE5_at; Start 35; Stop 59
ctgcattaccggtcgatgcaacgag

SEQ ID NO: 9623 - DNA, 25 bp, Artificial
  probe
  misc_feature (1)..(25): SEQ ID NO: 7766; CRE5_at; Start 29; Stop 53
atttgcctgcattaccggtcgatgc

SEQ ID NO: 9624 - DNA, 25 bp, Artificial
  probe
  misc_feature (1)..(25): SEQ ID NO: 7766; CRE5_at; Start 389; Stop 413
gtgcaaaacaggctctagcgttcga

SEQ ID NO: 9625 - DNA, 25 bp, Artificial
  probe
  misc_feature (1)..(25): SEQ ID NO: 7766; CRE5_at; Start 192; Stop 216
tcccgcagaacctgaagatgttcgc

SEQ ID NO: 9626 - DNA, 25 bp, Artificial
  probe
  misc_feature (1)..(25): SEQ ID NO: 7766; CRE5_at; Start 111; Stop 135
ttctgagcatacctggaaaatgctt

SEQ ID NO: 9627 - DNA, 25 bp, Artificial
  probe
  misc_feature (1)..(25): SEQ ID NO: 7766; CRE5_at; Start 209; Stop 233
atgttcgcgattatcttctatatct

SEQ ID NO: 9628 - DNA, 25 bp, Artificial
  probe
  misc_feature (1)..(25): SEQ ID NO: 7766; CRE5_at; Start 375; Stop 399
tgatgccggtgaacgtgcaaaacag

SEQ ID NO: 9629 - DNA, 25 bp, Artificial
  probe
  misc_feature (1)..(25): SEQ ID NO: 7766; CRE5_at; Start 109; Stop 133
ttttctgagcatacctggaaaatgc

SEQ ID NO: 9630 - DNA, 25 bp, Artificial
  probe
  misc_feature (1)..(25): SEQ ID NO: 7766; CRE5_at; Start 289; Stop 313
atgcttcatcgtcggtccgggctgc

SEQ ID NO: 9631 - DNA, 25 bp, Artificial
  probe
  misc_feature (1)..(25): SEQ ID NO: 7766; CRE5_at; Start 426; Stop 450
cgaccaggttcgttcactcatggaa

SEQ ID NO: 9632 - DNA, 25 bp, Artificial
  probe
  misc_feature (1)..(25): SEQ ID NO: 7766; CRE5_at; Start 436; Stop 460
cgttcactcatggaaaatagcgatc

SEQ ID NO: 9633 - DNA, 25 bp, Artificial
  probe
  misc_feature (1)..(25): SEQ ID NO: 7766; CRE5_at; Start 115; Stop 139
gagcatacctggaaaatgcttctgt

SEQ ID NO: 9634 - DNA, 25 bp, Artificial
  probe
  misc_feature (1)..(25): SEQ ID NO: 7766; CRE5_at; Start 261; Stop 285
tatccagcaacatttgggccagcta

SEQ ID NO: 9635 - DNA, 25 bp, Artificial
  probe
  misc_feature (1)..(25): SEQ ID NO: 7766; CRE5_at; Start 277; Stop 301
ggccagctaaacatgcttcatcgtc

SEQ ID NO: 9636 - DNA, 25 bp, Artificial
  probe
  misc_feature (1)..(25): SEQ ID NO: 7767; DAP3_at; Start 345; Stop 369
agtcagcaaggtttactattatatg

SEQ ID NO: 9637 - DNA, 25 bp, Artificial
  probe
  misc_feature (1)..(25): SEQ ID NO: 7767; DAP3_at; Start 95; Stop 119
aagcagcccgcatattaggcgcaga

SEQ ID NO: 9638 - DNA, 25 bp, Artificial
  probe
  misc_feature (1)..(25): SEQ ID NO: 7767; DAP3_at; Start 172; Stop 196
gcaattcggtcaattgtcactgtca

SEQ ID NO: 9639 - DNA, 25 bp, Artificial
  probe
  misc_feature (1)..(25): SEQ ID NO: 7767; DAP3_at; Start 403; Stop 427
gatatctcggatacaatagaggcaa

SEQ ID NO: 9640 - DNA, 25 bp, Artificial
  probe
  misc_feature (1)..(25): SEQ ID NO: 7767; DAP3_at; Start 237; Stop 261
aaaggatcgccatccggatcacggc

SEQ ID NO: 9641 - DNA, 25 bp, Artificial
  probe
  misc_feature (1)..(25): SEQ ID NO: 7767; DAP3_at; Start 327; Stop 351
aagccttccggcgcataaagtcagc

SEQ ID NO: 9642 - DNA, 25 bp, Artificial
  probe
  misc_feature (1)..(25): SEQ ID NO: 7767; DAP3_at; Start 171; Stop 195
ggcaattcggtcaattgtcactgtc

SEQ ID NO: 9643 - DNA, 25 bp, Artificial
  probe
  misc_feature (1)..(25): SEQ ID NO: 7767; DAP3_at; Start 129; Stop 153
tcagctaacgcttccagaccgcggc

SEQ ID NO: 9644 - DNA, 25 bp, Artificial
  probe
  misc_feature (1)..(25): SEQ ID NO: 7767; DAP3_at; Start 176; Stop 200
ttcggtcaattgtcactgtcatcag

SEQ ID NO: 9645 - DNA, 25 bp, Artificial
  probe
  misc_feature (1)..(25): SEQ ID NO: 7767; DAP3_at; Start 165; Stop 189
tgatcaggcaattcggtcaattgtc

SEQ ID NO: 9646 - DNA, 25 bp, Artificial
  probe
  misc_feature (1)..(25): SEQ ID NO: 7767; DAP3_at; Start 100; Stop 124
gcccgcatattaggcgcagataaaa

SEQ ID NO: 9647 - DNA, 25 bp, Artificial
  probe
  misc_feature (1)..(25): SEQ ID NO: 7767; DAP3_at; Start 239; Stop 263
aggatcgccatccggatcacggcaa

SEQ ID NO: 9648 - DNA, 25 bp, Artificial
  probe
  misc_feature (1)..(25): SEQ ID NO: 7767; DAP3_at; Start 93; Stop 117
tgaagcagcccgcatattaggcgca

SEQ ID NO: 9649 - DNA, 25 bp, Artificial
  probe
  misc_feature (1)..(25): SEQ ID NO: 7767; DAP3_at; Start 92; Stop 116
ctgaagcagcccgcatattaggcgc

SEQ ID NO: 9650 - DNA, 25 bp, Artificial
  probe
  misc_feature (1)..(25): SEQ ID NO: 7767; DAP3_at; Start 125; Stop 149
gaattcagctaacgcttccagaccg

SEQ ID NO: 9651 - DNA, 25 bp, Artificial
  probe
  misc_feature (1)..(25): SEQ ID NO: 7767; DAP3_at; Start 394; Stop 418
tttgttattgatatctcggatacaa

SEQ ID NO: 9652 - DNA, 25 bp, Artificial
  probe
  misc_feature (1)..(25): SEQ ID NO: 7767; DAP3_at; Start 507; Stop 531
tattgaaatcgttgaagcgagagaa

SEQ ID NO: 9653 - DNA, 25 bp, Artificial
  probe
  misc_feature (1)..(25): SEQ ID NO: 7767; DAP3_at; Start 91; Stop 115
gctgaagcagcccgcatattaggcg

SEQ ID NO: 9654 - DNA, 25 bp, Artificial
  probe
  misc_feature (1)..(25): SEQ ID NO: 7767; DAP3_at; Start 510; Stop 534
tgaaatcgttgaagcgagagaaaag

SEQ ID NO: 9655 - DNA, 25 bp, Artificial
  probe
  misc_feature (1)..(25): SEQ ID NO: 7767; DAP3_at; Start 249; Stop 273
tccggatcacggcaatgcggctgca

SEQ ID NO: 9656 - DNA, 25 bp, Artificial
  probe
  misc_feature (1)..(25): SEQ ID NO: 7767; DAP3_at; Start 180; Stop 204
gtcaattgtcactgtcatcagaatc

SEQ ID NO: 9657 - DNA, 25 bp, Artificial
  probe
  misc_feature (1)..(25): SEQ ID NO: 7767; DAP3_at; Start 105; Stop 129
catattaggcgcagataaaagaatt

SEQ ID NO: 9658 - DNA, 25 bp, Artificial
  probe
  misc_feature (1)..(25): SEQ ID NO: 7767; DAP3_at; Start 139; Stop 163
cttccagaccgcggcctaataatga

SEQ ID NO: 9659 - DNA, 25 bp, Artificial
  probe
  misc_feature (1)..(25): SEQ ID NO: 7767; DAP3_at; Start 36; Stop 60
gacagaagcggaactctcttctaac

SEQ ID NO: 9660 - DNA, 25 bp, Artificial
  probe
  misc_feature (1)..(25): SEQ ID NO: 7767; DAP3_at; Start 383; Stop 407
atcagccggattttgttattgatat

SEQ ID NO: 9661 - DNA, 25 bp, Artificial
  probe
  misc_feature (1)..(25): SEQ ID NO: 7767; DAP3_at; Start 262; Stop 286
aatgcggctgcactggtggaagaag

SEQ ID NO: 9662 - DNA, 25 bp, Artificial
  probe
  misc_feature (1)..(25): SEQ ID NO: 7767; DAP3_at; Start 191; Stop 215
ctgtcatcagaatctgtcggccaaa

SEQ ID NO: 9663 - DNA, 25 bp, Artificial
  probe
  misc_feature (1)..(25): SEQ ID NO: 7767; DAP3_at; Start 482; Stop 506
tttctactcctctgacgaatgggta

SEQ ID NO: 9664 - DNA, 25 bp, Artificial
  probe
  misc_feature (1)..(25): SEQ ID NO: 7767; DAP3_at; Start 267; Stop 291
ggctgcactggtggaagaagcgatc

SEQ ID NO: 9665 - DNA, 25 bp, Artificial
  probe
  misc_feature (1)..(25): SEQ ID NO: 7767; DAP3_at; Start 385; Stop 409
cagccggattttgttattgatatct

SEQ ID NO: 9666 - DNA, 25 bp, Artificial
  probe
  misc_feature (1)..(25): SEQ ID NO: 7767; DAP3_at; Start 175; Stop 199
attcggtcaattgtcactgtcatca

SEQ ID NO: 9667 - DNA, 25 bp, Artificial
  probe
  misc_feature (1)..(25): SEQ ID NO: 7767; DAP3_at; Start 85; Stop 109
gaagcagctgaagcagcccgcatat

SEQ ID NO: 9668 - DNA, 25 bp, Artificial
  probe
  misc_feature (1)..(25): SEQ ID NO: 7767; DAP3_at; Start 187; Stop 211
gtcactgtcatcagaatctgtcggc

SEQ ID NO: 9669 - DNA, 25 bp, Artificial
  probe
  misc_feature (1)..(25): SEQ ID NO: 7767; DAP3_at; Start 25; Stop 49
atatgcgatttgacagaagcggaac

SEQ ID NO: 9670 - DNA, 25 bp, Artificial
  probe
  misc_feature (1)..(25): SEQ ID NO: 7767; DAP3_at; Start 179; Stop 203
ggtcaattgtcactgtcatcagaat

SEQ ID NO: 9671 - DNA, 25 bp, Artificial
  probe
  misc_feature (1)..(25): SEQ ID NO: 7767; DAP3_at; Start 127; Stop 151
attcagctaacgcttccagaccgcg

SEQ ID NO: 9672 - DNA, 25 bp, Artificial
  probe
  misc_feature (1)..(25): SEQ ID NO: 7767; DAP3_at; Start 251; Stop 275
cggatcacggcaatgcggctgcact

SEQ ID NO: 9673 - DNA, 25 bp, Artificial
  probe
  misc_feature (1)..(25): SEQ ID NO: 7767; DAP3_at; Start 485; Stop 509
ctactcctctgacgaatgggtatat

SEQ ID NO: 9674 - DNA, 25 bp, Artificial
  probe
  misc_feature (1)..(25): SEQ ID NO: 7767; DAP3_at; Start 90; Stop 114
agctgaagcagcccgcatattaggc

SEQ ID NO: 9675 - DNA, 25 bp, Artificial
  probe
  misc_feature (1)..(25): SEQ ID NO: 7767; DAP3_at; Start 163; Stop 187
agtgatcaggcaattcggtcaattg

SEQ ID NO: 9676 - DNA, 25 bp, Artificial
  probe
  misc_feature (1)..(25): SEQ ID NO: 7767; DAP3_at; Start 379; Stop 403
tttcatcagccggattttgttattg

SEQ ID NO: 9677 - DNA, 25 bp, Artificial
  probe
  misc_feature (1)..(25): SEQ ID NO: 7767; DAP3_at; Start 406; Stop 430
atctcggatacaatagaggcaaaga

SEQ ID NO: 9678 - DNA, 25 bp, Artificial
  probe
  misc_feature (1)..(25): SEQ ID NO: 7767; DAP3_at; Start 181; Stop 205
tcaattgtcactgtcatcagaatct

SEQ ID NO: 9679 - DNA, 25 bp, Artificial
  probe
  misc_feature (1)..(25): SEQ ID NO: 7767; DAP3_at; Start 27; Stop 51
atgcgatttgacagaagcggaactc

SEQ ID NO: 9680 - DNA, 25 bp, Artificial
  probe
  misc_feature (1)..(25): SEQ ID NO: 7767; DAP3_at; Start 196; Stop 220
atcagaatctgtcggccaaaagcgg

SEQ ID NO: 9681 - DNA, 25 bp, Artificial
  probe
  misc_feature (1)..(25): SEQ ID NO: 7767; DAP3_at; Start 402; Stop 426
tgatatctcggatacaatagaggca

SEQ ID NO: 9682 - DNA, 25 bp, Artificial
  probe
  misc_feature (1)..(25): SEQ ID NO: 7767; DAP3_at; Start 247; Stop 271
catccggatcacggcaatgcggctg

SEQ ID NO: 9683 - DNA, 25 bp, Artificial
  probe
  misc_feature (1)..(25): SEQ ID NO: 7767; DAP3_at; Start 250; Stop 274
ccggatcacggcaatgcggctgcac

SEQ ID NO: 9684 - DNA, 25 bp, Artificial
  probe
  misc_feature (1)..(25): SEQ ID NO: 7767; DAP3_at; Start 132; Stop 156
gctaacgcttccagaccgcggccta

SEQ ID NO: 9685 - DNA, 25 bp, Artificial
  probe
  misc_feature (1)..(25): SEQ ID NO: 7767; DAP3_at; Start 194; Stop 218
tcatcagaatctgtcggccaaaagc

SEQ ID NO: 9686 - DNA, 25 bp, Artificial
  probe
  misc_feature (1)..(25): SEQ ID NO: 7767; DAP3_at; Start 96; Stop 120
agcagcccgcatattaggcgcagat

SEQ ID NO: 9687 - DNA, 25 bp, Artificial
  probe
  misc_feature (1)..(25): SEQ ID NO: 7767; DAP3_at; Start 97; Stop 121
gcagcccgcatattaggcgcagata

SEQ ID NO: 9688 - DNA, 25 bp, Artificial
  probe
  misc_feature (1)..(25): SEQ ID NO: 7767; DAP3_at; Start 166; Stop 190
gatcaggcaattcggtcaattgtca

SEQ ID NO: 9689 - DNA, 25 bp, Artificial
  probe
  misc_feature (1)..(25): SEQ ID NO: 7767; DAP3_at; Start 511; Stop 535
gaaatcgttgaagcgagagaaaagc

SEQ ID NO: 9690 - DNA, 25 bp, Artificial
  probe
  misc_feature (1)..(25): SEQ ID NO: 7767; DAP3_at; Start 190; Stop 214
actgtcatcagaatctgtcggccaa

SEQ ID NO: 9691 - DNA, 25 bp, Artificial
  probe
  misc_feature (1)..(25): SEQ ID NO: 7767; DAP3_at; Start 475; Stop 499
gattccgtttctactcctctgacga

SEQ ID NO: 9692 - DNA, 25 bp, Artificial
  probe
  misc_feature (1)..(25): SEQ ID NO: 7767; DAP3_at; Start 241; Stop 265
gatcgccatccggatcacggcaatg

SEQ ID NO: 9693 - DNA, 25 bp, Artificial
  probe
  misc_feature (1)..(25): SEQ ID NO: 7767; DAP3_at; Start 184; Stop 208
attgtcactgtcatcagaatctgtc

SEQ ID NO: 9694 - DNA, 25 bp, Artificial
  probe
  misc_feature (1)..(25): SEQ ID NO: 7767; DAP3_at; Start 329; Stop 353
gccttccggcgcataaagtcagcaa

SEQ ID NO: 9695 - DNA, 25 bp, Artificial
  probe
  misc_feature (1)..(25): SEQ ID NO: 7767; DAP3_at; Start 146; Stop 170
accgcggcctaataatgagtgatca

SEQ ID NO: 9696 - DNA, 25 bp, Artificial
  probe
  misc_feature (1)..(25): SEQ ID NO: 7767; DAP3_at; Start 254; Stop 278
atcacggcaatgcggctgcactggt

SEQ ID NO: 9697 - DNA, 25 bp, Artificial
  probe
  misc_feature (1)..(25): SEQ ID NO: 7767; DAP3_at; Start 330; Stop 354
ccttccggcgcataaagtcagcaag

SEQ ID NO: 9698 - DNA, 25 bp, Artificial
  probe
  misc_feature (1)..(25): SEQ ID NO: 7767; DAP3_at; Start 162; Stop 186
gagtgatcaggcaattcggtcaatt

SEQ ID NO: 9699 - DNA, 25 bp, Artificial
  probe
  misc_feature (1)..(25): SEQ ID NO: 7767; DAP3_at; Start 140; Stop 164
ttccagaccgcggcctaataatgag

SEQ ID NO: 9700 - DNA, 25 bp, Artificial
  probe
  misc_feature (1)..(25): SEQ ID NO: 7767; DAP3_at; Start 185; Stop 209
ttgtcactgtcatcagaatctgtcg

SEQ ID NO: 9701 - DNA, 25 bp, Artificial
  probe
  misc_feature (1)..(25): SEQ ID NO: 7767; DAP3_at; Start 33; Stop 57
tttgacagaagcggaactctcttct

SEQ ID NO: 9702 - DNA, 25 bp, Artificial
  probe
  misc_feature (1)..(25): SEQ ID NO: 7767; DAP3_at; Start 161; Stop 185
tgagtgatcaggcaattcggtcaat

SEQ ID NO: 9703 - DNA, 25 bp, Artificial
  probe
  misc_feature (1)..(25): SEQ ID NO: 7767; DAP3_at; Start 270; Stop 294
tgcactggtggaagaagcgatcttt

SEQ ID NO: 9704 - DNA, 25 bp, Artificial
  probe
  misc_feature (1)..(25): SEQ ID NO: 7767; DAP3_at; Start 263; Stop 287
atgcggctgcactggtggaagaagc

SEQ ID NO: 9705 - DNA, 25 bp, Artificial
  probe
  misc_feature (1)..(25): SEQ ID NO: 7767; DAP3_at; Start 268; Stop 292
gctgcactggtggaagaagcgatct

SEQ ID NO: 9706 - DNA, 25 bp, Artificial
  probe
  misc_feature (1)..(25): SEQ ID NO: 7767; DAP3_at; Start 189; Stop 213
cactgtcatcagaatctgtcggcca

SEQ ID NO: 9707 - DNA, 25 bp, Artificial
  probe
  misc_feature (1)..(25): SEQ ID NO: 7767; DAP3_at; Start 255; Stop 279
tcacggcaatgcggctgcactggtg

SEQ ID NO: 9708 - DNA, 25 bp, Artificial
  probe
  misc_feature (1)..(25): SEQ ID NO: 7767; DAP3_at; Start 260; Stop 284
gcaatgcggctgcactggtggaaga

SEQ ID NO: 9709 - DNA, 25 bp, Artificial
  probe
  misc_feature (1)..(25): SEQ ID NO: 7767; DAP3_at; Start 141; Stop 165
tccagaccgcggcctaataatgagt

SEQ ID NO: 9710 - DNA, 25 bp, Artificial
  probe
  misc_feature (1)..(25): SEQ ID NO: 7767; DAP3_at; Start 257; Stop 281
acggcaatgcggctgcactggtgga

SEQ ID NO: 9711 - DNA, 25 bp, Artificial
  probe
  misc_feature (1)..(25): SEQ ID NO: 7767; DAP3_at; Start 486; Stop 510
tactcctctgacgaatgggtatatt

SEQ ID NO: 9712 - DNA, 25 bp, Artificial
  probe
  misc_feature (1)..(25): SEQ ID NO: 7767; DAP3_at; Start 395; Stop 419
ttgttattgatatctcggatacaat

SEQ ID NO: 9713 - DNA, 25 bp, Artificial
  probe
  misc_feature (1)..(25): SEQ ID NO: 7767; DAP3_at; Start 381; Stop 405
tcatcagccggattttgttattgat

SEQ ID NO: 9714 - DNA, 25 bp, Artificial
  probe
  misc_feature (1)..(25): SEQ ID NO: 7767; DAP3_at; Start 404; Stop 428
atatctcggatacaatagaggcaaa

SEQ ID NO: 9715 - DNA, 25 bp, Artificial
  probe
  misc_feature (1)..(25): SEQ ID NO: 7767; DAP3_at; Start 143; Stop 167
cagaccgcggcctaataatgagtga

SEQ ID NO: 9716 - DNA, 25 bp, Artificial
  probe
  misc_feature (1)..(25): SEQ ID NO: 7767; DAP3_at; Start 331; Stop 355
cttccggcgcataaagtcagcaagg

SEQ ID NO: 9717 - DNA, 25 bp, Artificial
  probe
  misc_feature (1)..(25): SEQ ID NO: 7767; DAP3_at; Start 506; Stop 530
atattgaaatcgttgaagcgagaga

SEQ ID NO: 9718 - DNA, 25 bp, Artificial
  probe
  misc_feature (1)..(25): SEQ ID NO: 7767; DAP3_at; Start 84; Stop 108
agaagcagctgaagcagcccgcata

SEQ ID NO: 9719 - DNA, 25 bp, Artificial
  probe
  misc_feature (1)..(25): SEQ ID NO: 7767; DAP3_at; Start 333; Stop 357
tccggcgcataaagtcagcaaggtt

SEQ ID NO: 9720 - DNA, 25 bp, Artificial
  probe
  misc_feature (1)..(25): SEQ ID NO: 7767; DAP3_at; Start 490; Stop 514
cctctgacgaatgggtatattgaaa

SEQ ID NO: 9721 - DNA, 25 bp, Artificial
  probe
  misc_feature (1)..(25): SEQ ID NO: 7767; DAP3_at; Start 128; Stop 152
ttcagctaacgcttccagaccgcgg

SEQ ID NO: 9722 - DNA, 25 bp, Artificial
  probe
  misc_feature (1)..(25): SEQ ID NO: 7767; DAP3_at; Start 380; Stop 404
ttcatcagccggattttgttattga

SEQ ID NO: 9723 - DNA, 25 bp, Artificial
  probe
  misc_feature (1)..(25): SEQ ID NO: 7767; DAP3_at; Start 144; Stop 168
agaccgcggcctaataatgagtgat

SEQ ID NO: 9724 - DNA, 25 bp, Artificial
  probe
  misc_feature (1)..(25): SEQ ID NO: 7767; DAP3_at; Start 88; Stop 112
gcagctgaagcagcccgcatattag

SEQ ID NO: 9725 - DNA, 25 bp, Artificial
  probe
  misc_feature (1)..(25): SEQ ID NO: 7767; DAP3_at; Start 21; Stop 45
aatgatatgcgatttgacagaagcg

SEQ ID NO: 9726 - DNA, 25 bp, Artificial
  probe
  misc_feature (1)..(25): SEQ ID NO: 7767; DAP3_at; Start 197; Stop 221
tcagaatctgtcggccaaaagcggt

SEQ ID NO: 9727 - DNA, 25 bp, Artificial
  probe
  misc_feature (1)..(25): SEQ ID NO: 7767; DAP3_at; Start 195; Stop 219
catcagaatctgtcggccaaaagcg

SEQ ID NO: 9728 - DNA, 25 bp, Artificial
  probe
  misc_feature (1)..(25): SEQ ID NO: 7767; DAP3_at; Start 253; Stop 277
gatcacggcaatgcggctgcactgg

SEQ ID NO: 9729 - DNA, 25 bp, Artificial
  probe
  misc_feature (1)..(25): SEQ ID NO: 7767; DAP3_at; Start 400; Stop 424
attgatatctcggatacaatagagg

SEQ ID NO: 9730 - DNA, 25 bp, Artificial
  probe
  misc_feature (1)..(25): SEQ ID NO: 7767; DAP3_at; Start 193; Stop 217
gtcatcagaatctgtcggccaaaag

SEQ ID NO: 9731 - DNA, 25 bp, Artificial
  probe
  misc_feature (1)..(25): SEQ ID NO: 7767; DAP3_at; Start 393; Stop 417
ttttgttattgatatctcggataca

SEQ ID NO: 9732 - DNA, 25 bp, Artificial
  probe
  misc_feature (1)..(25): SEQ ID NO: 7767; DAP3_at; Start 183; Stop 207
aattgtcactgtcatcagaatctgt

SEQ ID NO: 9733 - DNA, 25 bp, Artificial
  probe
  misc_feature (1)..(25): SEQ ID NO: 7767; DAP3_at; Start 102; Stop 126
ccgcatattaggcgcagataaaaga

SEQ ID NO: 9734 - DNA, 25 bp, Artificial
  probe
  misc_feature (1)..(25): SEQ ID NO: 7767; DAP3_at; Start 22; Stop 46
atgatatgcgatttgacagaagcgg

SEQ ID NO: 9735 - DNA, 25 bp, Artificial
  probe
  misc_feature (1)..(25): SEQ ID NO: 7767; DAP3_at; Start 487; Stop 511
actcctctgacgaatgggtatattg

SEQ ID NO: 9736 - DNA, 25 bp, Artificial
  probe
  misc_feature (1)..(25): SEQ ID NO: 7767; DAP3_at; Start 483; Stop 507
ttctactcctctgacgaatgggtat

SEQ ID NO: 9737 - DNA, 25 bp, Artificial
  probe
  misc_feature (1)..(25): SEQ ID NO: 7767; DAP3_at; Start 99; Stop 123
agcccgcatattaggcgcagataaa

SEQ ID NO: 9738 - DNA, 25 bp, Artificial
  probe
  misc_feature (1)..(25): SEQ ID NO: 7767; DAP3_at; Start 397; Stop 421
gttattgatatctcggatacaatag

SEQ ID NO: 9739 - DNA, 25 bp, Artificial
  probe
  misc_feature (1)..(25): SEQ ID NO: 7767; DAP3_at; Start 87; Stop 111
agcagctgaagcagcccgcatatta

SEQ ID NO: 9740 - DNA, 25 bp, Artificial
  probe
  misc_feature (1)..(25): SEQ ID NO: 7767; DAP3_at; Start 124; Stop 148
agaattcagctaacgcttccagacc

SEQ ID NO: 9741 - DNA, 25 bp, Artificial
  probe
  misc_feature (1)..(25): SEQ ID NO: 7767; DAP3_at; Start 246; Stop 270
ccatccggatcacggcaatgcggct

SEQ ID NO: 9742 - DNA, 25 bp, Artificial
  probe
  misc_feature (1)..(25): SEQ ID NO: 7767; DAP3_at; Start 173; Stop 197
caattcggtcaattgtcactgtcat

SEQ ID NO: 9743 - DNA, 25 bp, Artificial
  probe
  misc_feature (1)..(25): SEQ ID NO: 7767; DAP3_at; Start 240; Stop 264
ggatcgccatccggatcacggcaat

SEQ ID NO: 9744 - DNA, 25 bp, Artificial
  probe
  misc_feature (1)..(25): SEQ ID NO: 7767; DAP3_at; Start 177; Stop 201
tcggtcaattgtcactgtcatcaga

SEQ ID NO: 9745 - DNA, 25 bp, Artificial
  probe
  misc_feature (1)..(25): SEQ ID NO: 7767; DAP3_at; Start 489; Stop 513
tcctctgacgaatgggtatattgaa

SEQ ID NO: 9746 - DNA, 25 bp, Artificial
  probe
  misc_feature (1)..(25): SEQ ID NO: 7768; DAP5_at; Start 24; Stop 48
agtcattgcgggaccgcgtggaaga

SEQ ID NO: 9747 - DNA, 25 bp, Artificial
  probe
  misc_feature (1)..(25): SEQ ID NO: 7768; DAP5_at; Start 92; Stop 116
ttgaccttgtaggggccatagacca

SEQ ID NO: 9748 - DNA, 25 bp, Artificial
  probe
  misc_feature (1)..(25): SEQ ID NO: 7768; DAP5_at; Start 478; Stop 502
aagcttgacgcaccaagcggaactg

SEQ ID NO: 9749 - DNA, 25 bp, Artificial
  probe
  misc_feature (1)..(25): SEQ ID NO: 7768; DAP5_at; Start 429; Stop 453
tgccaactattttgaggatgttgag

SEQ ID NO: 9750 - DNA, 25 bp, Artificial
  probe
  misc_feature (1)..(25): SEQ ID NO: 7768; DAP5_at; Start 137; Stop 161
tatctgatgtgatgcctgttgagtc

SEQ ID NO: 9751 - DNA, 25 bp, Artificial
  probe
  misc_feature (1)..(25): SEQ ID NO: 7768; DAP5_at; Start 465; Stop 489
tcatcatgaccagaagcttgacgca

SEQ ID NO: 9752 - DNA, 25 bp, Artificial
  probe
  misc_feature (1)..(25): SEQ ID NO: 7768; DAP5_at; Start 155; Stop 179
ttgagtcagatgctttcatttacac

SEQ ID NO: 9753 - DNA, 25 bp, Artificial
  probe
  misc_feature (1)..(25): SEQ ID NO: 7768; DAP5_at; Start 479; Stop 503
agcttgacgcaccaagcggaactgc

SEQ ID NO: 9754 - DNA, 25 bp, Artificial
  probe
  misc_feature (1)..(25): SEQ ID NO: 7768; DAP5_at; Start 461; Stop 485
agcttcatcatgaccagaagcttga

SEQ ID NO: 9755 - DNA, 25 bp, Artificial
  probe
  misc_feature (1)..(25): SEQ ID NO: 7768; DAP5_at; Start 385; Stop 409
tttgcgctcggtgcgatactgatga

SEQ ID NO: 9756 - DNA, 25 bp, Artificial
  probe
  misc_feature (1)..(25): SEQ ID NO: 7768; DAP5_at; Start 140; Stop 164
ctgatgtgatgcctgttgagtcaga

SEQ ID NO: 9757 - DNA, 25 bp, Artificial
  probe
  misc_feature (1)..(25): SEQ ID NO: 7768; DAP5_at; Start 265; Stop 289
attgcattagagcacggagtccgtc

SEQ ID NO: 9758 - DNA, 25 bp, Artificial
  probe
  misc_feature (1)..(25): SEQ ID NO: 7768; DAP5_at; Start 469; Stop 493
catgaccagaagcttgacgcaccaa

SEQ ID NO: 9759 - DNA, 25 bp, Artificial
  probe
  misc_feature (1)..(25): SEQ ID NO: 7768; DAP5_at; Start 543; Stop 567
aaagcagcaaggacatccggatgaa

SEQ ID NO: 9760 - DNA, 25 bp, Artificial
  probe
  misc_feature (1)..(25): SEQ ID NO: 7768; DAP5_at; Start 577; Stop 601
ctcccaggagcaagaggagcggagc

SEQ ID NO: 9761 - DNA, 25 bp, Artificial
  probe
  misc_feature (1)..(25): SEQ ID NO: 7768; DAP5_at; Start 371; Stop 395
tcatcgcgccaaattttgcgctcgg

SEQ ID NO: 9762 - DNA, 25 bp, Artificial
  probe
  misc_feature (1)..(25): SEQ ID NO: 7768; DAP5_at; Start 501; Stop 525
tgcgcttaaaacagcggaaatgatt

SEQ ID NO: 9763 - DNA, 25 bp, Artificial
  probe
  misc_feature (1)..(25): SEQ ID NO: 7768; DAP5_at; Start 271; Stop 295
ttagagcacggagtccgtccagttg

SEQ ID NO: 9764 - DNA, 25 bp, Artificial
  probe
  misc_feature (1)..(25): SEQ ID NO: 7768; DAP5_at; Start 157; Stop 181
gagtcagatgctttcatttacacag

SEQ ID NO: 9765 - DNA, 25 bp, Artificial
  probe
  misc_feature (1)..(25): SEQ ID NO: 7768; DAP5_at; Start 380; Stop 404
caaattttgcgctcggtgcgatact

SEQ ID NO: 9766 - DNA, 25 bp, Artificial
  probe
  misc_feature (1)..(25): SEQ ID NO: 7768; DAP5_at; Start 99; Stop 123
tgtaggggccatagaccatacatac

SEQ ID NO: 9767 - DNA, 25 bp, Artificial
  probe
  misc_feature (1)..(25): SEQ ID NO: 7768; DAP5_at; Start 355; Stop 379
aaagggatcggagccatcatcgcgc

SEQ ID NO: 9768 - DNA, 25 bp, Artificial
  probe
  misc_feature (1)..(25): SEQ ID NO: 7768; DAP5_at; Start 170; Stop 194
tcatttacacagatatccatgcctg

SEQ ID NO: 9769 - DNA, 25 bp, Artificial
  probe
  misc_feature (1)..(25): SEQ ID NO: 7768; DAP5_at; Start 266; Stop 290
ttgcattagagcacggagtccgtcc

SEQ ID NO: 9770 - DNA, 25 bp, Artificial
  probe
  misc_feature (1)..(25): SEQ ID NO: 7768; DAP5_at; Start 435; Stop 459
ctattttgaggatgttgagattatt

SEQ ID NO: 9771 - DNA, 25 bp, Artificial
  probe
  misc_feature (1)..(25): SEQ ID NO: 7768; DAP5_at; Start 471; Stop 495
tgaccagaagcttgacgcaccaagc

SEQ ID NO: 9772 - DNA, 25 bp, Artificial
  probe
  misc_feature (1)..(25): SEQ ID NO: 7768; DAP5_at; Start 545; Stop 569
agcagcaaggacatccggatgaaaa

SEQ ID NO: 9773 - DNA, 25 bp, Artificial
  probe
  misc_feature (1)..(25): SEQ ID NO: 7768; DAP5_at; Start 310; Stop 334
ttctcagaagctgatttaaaagagc

SEQ ID NO: 9774 - DNA, 25 bp, Artificial
  probe
  misc_feature (1)..(25): SEQ ID NO: 7768; DAP5_at; Start 141; Stop 165
tgatgtgatgcctgttgagtcagat

SEQ ID NO: 9775 - DNA, 25 bp, Artificial
  probe
  misc_feature (1)..(25): SEQ ID NO: 7768; DAP5_at; Start 487; Stop 511
gcaccaagcggaactgcgcttaaaa

SEQ ID NO: 9776 - DNA, 25 bp, Artificial
  probe
  misc_feature (1)..(25): SEQ ID NO: 7768; DAP5_at; Start 484; Stop 508
gacgcaccaagcggaactgcgctta

SEQ ID NO: 9777 - DNA, 25 bp, Artificial
  probe
  misc_feature (1)..(25): SEQ ID NO: 7768; DAP5_at; Start 485; Stop 509
acgcaccaagcggaactgcgcttaa

SEQ ID NO: 9778 - DNA, 25 bp, Artificial
  probe
  misc_feature (1)..(25): SEQ ID NO: 7768; DAP5_at; Start 185; Stop 209
tccatgcctgttttacagaaacaca

SEQ ID NO: 9779 - DNA, 25 bp, Artificial
  probe
  misc_feature (1)..(25): SEQ ID NO: 7768; DAP5_at; Start 177; Stop 201
cacagatatccatgcctgttttaca

SEQ ID NO: 9780 - DNA, 25 bp, Artificial
  probe
  misc_feature (1)..(25): SEQ ID NO: 7768; DAP5_at; Start 254; Stop 278
tacatacaaaaattgcattagagca

SEQ ID NO: 9781 - DNA, 25 bp, Artificial
  probe
  misc_feature (1)..(25): SEQ ID NO: 7768; DAP5_at; Start 164; Stop 188
atgctttcatttacacagatatcca

SEQ ID NO: 9782 - DNA, 25 bp, Artificial
  probe
  misc_feature (1)..(25): SEQ ID NO: 7768; DAP5_at; Start 105; Stop 129
ggccatagaccatacatacgatcag

SEQ ID NO: 9783 - DNA, 25 bp, Artificial
  probe
  misc_feature (1)..(25): SEQ ID NO: 7768; DAP5_at; Start 387; Stop 411
tgcgctcggtgcgatactgatgatg

SEQ ID NO: 9784 - DNA, 25 bp, Artificial
  probe
  misc_feature (1)..(25): SEQ ID NO: 7768; DAP5_at; Start 135; Stop 159
attatctgatgtgatgcctgttgag

SEQ ID NO: 9785 - DNA, 25 bp, Artificial
  probe
  misc_feature (1)..(25): SEQ ID NO: 7768; DAP5_at; Start 431; Stop 455
ccaactattttgaggatgttgagat

SEQ ID NO: 9786 - DNA, 25 bp, Artificial
  probe
  misc_feature (1)..(25): SEQ ID NO: 7768; DAP5_at; Start 430; Stop 454
gccaactattttgaggatgttgaga

SEQ ID NO: 9787 - DNA, 25 bp, Artificial
  probe
  misc_feature (1)..(25): SEQ ID NO: 7768; DAP5_at; Start 145; Stop 169
gtgatgcctgttgagtcagatgctt

SEQ ID NO: 9788 - DNA, 25 bp, Artificial
  probe
  misc_feature (1)..(25): SEQ ID NO: 7768; DAP5_at; Start 494; Stop 518
gcggaactgcgcttaaaacagcgga

SEQ ID NO: 9789 - DNA, 25 bp, Artificial
  probe
  misc_feature (1)..(25): SEQ ID NO: 7768; DAP5_at; Start 161; Stop 185
cagatgctttcatttacacagatat

SEQ ID NO: 9790 - DNA, 25 bp, Artificial
  probe
  misc_feature (1)..(25): SEQ ID NO: 7768; DAP5_at; Start 147; Stop 171
gatgcctgttgagtcagatgctttc

SEQ ID NO: 9791 - DNA, 25 bp, Artificial
  probe
  misc_feature (1)..(25): SEQ ID NO: 7768; DAP5_at; Start 572; Stop 596
aaattctcccaggagcaagaggagc

SEQ ID NO: 9792 - DNA, 25 bp, Artificial
  probe
  misc_feature (1)..(25): SEQ ID NO: 7768; DAP5_at; Start 475; Stop 499
cagaagcttgacgcaccaagcggaa

SEQ ID NO: 9793 - DNA, 25 bp, Artificial
  probe
  misc_feature (1)..(25): SEQ ID NO: 7768; DAP5_at; Start 362; Stop 386
tcggagccatcatcgcgccaaattt

SEQ ID NO: 9794 - DNA, 25 bp, Artificial
  probe
  misc_feature (1)..(25): SEQ ID NO: 7768; DAP5_at; Start 392; Stop 416
tcggtgcgatactgatgatgaaatt

SEQ ID NO: 9795 - DNA, 25 bp, Artificial
  probe
  misc_feature (1)..(25): SEQ ID NO: 7768; DAP5_at; Start 110; Stop 134
tagaccatacatacgatcagcaaaa

SEQ ID NO: 9796 - DNA, 25 bp, Artificial
  probe
  misc_feature (1)..(25): SEQ ID NO: 7768; DAP5_at; Start 107; Stop 131
ccatagaccatacatacgatcagca

SEQ ID NO: 9797 - DNA, 25 bp, Artificial
  probe
  misc_feature (1)..(25): SEQ ID NO: 7768; DAP5_at; Start 457; Stop 481
attgagcttcatcatgaccagaagc

SEQ ID NO: 9798 - DNA, 25 bp, Artificial
  probe
  misc_feature (1)..(25): SEQ ID NO: 7768; DAP5_at; Start 477; Stop 501
gaagcttgacgcaccaagcggaact

SEQ ID NO: 9799 - DNA, 25 bp, Artificial
  probe
  misc_feature (1)..(25): SEQ ID NO: 7768; DAP5_at; Start 472; Stop 496
gaccagaagcttgacgcaccaagcg

SEQ ID NO: 9800 - DNA, 25 bp, Artificial
  probe
  misc_feature (1)..(25): SEQ ID NO: 7768; DAP5_at; Start 427; Stop 451
gctgccaactattttgaggatgttg

SEQ ID NO: 9801 - DNA, 25 bp, Artificial
  probe
  misc_feature (1)..(25): SEQ ID NO: 7768; DAP5_at; Start 357; Stop 381
agggatcggagccatcatcgcgcca

SEQ ID NO: 9802 - DNA, 25 bp, Artificial
  probe
  misc_feature (1)..(25): SEQ ID NO: 7768; DAP5_at; Start 158; Stop 182
agtcagatgctttcatttacacaga

SEQ ID NO: 9803 - DNA, 25 bp, Artificial
  probe
  misc_feature (1)..(25): SEQ ID NO: 7768; DAP5_at; Start 167; Stop 191
ctttcatttacacagatatccatgc

SEQ ID NO: 9804 - DNA, 25 bp, Artificial
  probe
  misc_feature (1)..(25): SEQ ID NO: 7768; DAP5_at; Start 206; Stop 230
cacaaccggatgtcttgattgattt

SEQ ID NO: 9805 - DNA, 25 bp, Artificial
  probe
  misc_feature (1)..(25): SEQ ID NO: 7768; DAP5_at; Start 70; Stop 94
ttggcagaacgaacaccacattttg

SEQ ID NO: 9806 - DNA, 25 bp, Artificial
  probe
  misc_feature (1)..(25): SEQ ID NO: 7768; DAP5_at; Start 368; Stop 392
ccatcatcgcgccaaattttgcgct

SEQ ID NO: 9807 - DNA, 25 bp, Artificial
  probe
  misc_feature (1)..(25): SEQ ID NO: 7768; DAP5_at; Start 207; Stop 231
acaaccggatgtcttgattgattta

SEQ ID NO: 9808 - DNA, 25 bp, Artificial
  probe
  misc_feature (1)..(25): SEQ ID NO: 7768; DAP5_at; Start 367; Stop 391
gccatcatcgcgccaaattttgcgc

SEQ ID NO: 9809 - DNA, 25 bp, Artificial
  probe
  misc_feature (1)..(25): SEQ ID NO: 7768; DAP5_at; Start 369; Stop 393
catcatcgcgccaaattttgcgctc

SEQ ID NO: 9810 - DNA, 25 bp, Artificial
  probe
  misc_feature (1)..(25): SEQ ID NO: 7768; DAP5_at; Start 424; Stop 448
atggctgccaactattttgaggatg

SEQ ID NO: 9811 - DNA, 25 bp, Artificial
  probe
  misc_feature (1)..(25): SEQ ID NO: 7768; DAP5_at; Start 109; Stop 133
atagaccatacatacgatcagcaaa

SEQ ID NO: 9812 - DNA, 25 bp, Artificial
  probe
  misc_feature (1)..(25): SEQ ID NO: 7768; DAP5_at; Start 580; Stop 604
ccaggagcaagaggagcggagcaaa

SEQ ID NO: 9813 - DNA, 25 bp, Artificial
  probe
  misc_feature (1)..(25): SEQ ID NO: 7768; DAP5_at; Start 169; Stop 193
ttcatttacacagatatccatgcct

SEQ ID NO: 9814 - DNA, 25 bp, Artificial
  probe
  misc_feature (1)..(25): SEQ ID NO: 7768; DAP5_at; Start 389; Stop 413
cgctcggtgcgatactgatgatgaa

SEQ ID NO: 9815 - DNA, 25 bp, Artificial
  probe
  misc_feature (1)..(25): SEQ ID NO: 7768; DAP5_at; Start 133; Stop 157
aaattatctgatgtgatgcctgttg

SEQ ID NO: 9816 - DNA, 25 bp, Artificial
  probe
  misc_feature (1)..(25): SEQ ID NO: 7768; DAP5_at; Start 21; Stop 45
attagtcattgcgggaccgcgtgga

SEQ ID NO: 9817 - DNA, 25 bp, Artificial
  probe
  misc_feature (1)..(25): SEQ ID NO: 7768; DAP5_at; Start 454; Stop 478
attattgagcttcatcatgaccaga

SEQ ID NO: 9818 - DNA, 25 bp, Artificial
  probe
  misc_feature (1)..(25): SEQ ID NO: 7768; DAP5_at; Start 379; Stop 403
ccaaattttgcgctcggtgcgatac

SEQ ID NO: 9819 - DNA, 25 bp, Artificial
  probe
  misc_feature (1)..(25): SEQ ID NO: 7768; DAP5_at; Start 276; Stop 300
gcacggagtccgtccagttgtcgga

SEQ ID NO: 9820 - DNA, 25 bp, Artificial
  probe
  misc_feature (1)..(25): SEQ ID NO: 7768; DAP5_at; Start 139; Stop 163
tctgatgtgatgcctgttgagtcag

SEQ ID NO: 9821 - DNA, 25 bp, Artificial
  probe
  misc_feature (1)..(25): SEQ ID NO: 7768; DAP5_at; Start 467; Stop 491
atcatgaccagaagcttgacgcacc

SEQ ID NO: 9822 - DNA, 25 bp, Artificial
  probe
  misc_feature (1)..(25): SEQ ID NO: 7768; DAP5_at; Start 103; Stop 127
ggggccatagaccatacatacgatc

SEQ ID NO: 9823 - DNA, 25 bp, Artificial
  probe
  misc_feature (1)..(25): SEQ ID NO: 7768; DAP5_at; Start 329; Stop 353
aagagctcacatctttaacagaaga

SEQ ID NO: 9824 - DNA, 25 bp, Artificial
  probe
  misc_feature (1)..(25): SEQ ID NO: 7768; DAP5_at; Start 149; Stop 173
tgcctgttgagtcagatgctttcat

SEQ ID NO: 9825 - DNA, 25 bp, Artificial
  probe
  misc_feature (1)..(25): SEQ ID NO: 7768; DAP5_at; Start 199; Stop 223
acagaaacacaaccggatgtcttga

SEQ ID NO: 9826 - DNA, 25 bp, Artificial
  probe
  misc_feature (1)..(25): SEQ ID NO: 7768; DAP5_at; Start 299; Stop 323
gaacaaccggtttctcagaagctga

SEQ ID NO: 9827 - DNA, 25 bp, Artificial
  probe
  misc_feature (1)..(25): SEQ ID NO: 7768; DAP5_at; Start 365; Stop 389
gagccatcatcgcgccaaattttgc

SEQ ID NO: 9828 - DNA, 25 bp, Artificial
  probe
  misc_feature (1)..(25): SEQ ID NO: 7768; DAP5_at; Start 455; Stop 479
ttattgagcttcatcatgaccagaa

SEQ ID NO: 9829 - DNA, 25 bp, Artificial
  probe
  misc_feature (1)..(25): SEQ ID NO: 7768; DAP5_at; Start 97; Stop 121
cttgtaggggccatagaccatacat

SEQ ID NO: 9830 - DNA, 25 bp, Artificial
  probe
  misc_feature (1)..(25): SEQ ID NO: 7768; DAP5_at; Start 101; Stop 125
taggggccatagaccatacatacga

SEQ ID NO: 9831 - DNA, 25 bp, Artificial
  probe
  misc_feature (1)..(25): SEQ ID NO: 7768; DAP5_at; Start 460; Stop 484
gagcttcatcatgaccagaagcttg

SEQ ID NO: 9832 - DNA, 25 bp, Artificial
  probe
  misc_feature (1)..(25): SEQ ID NO: 7768; DAP5_at; Start 331; Stop 355
gagctcacatctttaacagaagaaa

SEQ ID NO: 9833 - DNA, 25 bp, Artificial
  probe
  misc_feature (1)..(25): SEQ ID NO: 7768; DAP5_at; Start 375; Stop 399
cgcgccaaattttgcgctcggtgcg

SEQ ID NO: 9834 - DNA, 25 bp, Artificial
  probe
  misc_feature (1)..(25): SEQ ID NO: 7768; DAP5_at; Start 377; Stop 401
cgccaaattttgcgctcggtgcgat

SEQ ID NO: 9835 - DNA, 25 bp, Artificial
  probe
  misc_feature (1)..(25): SEQ ID NO: 7768; DAP5_at; Start 361; Stop 385
atcggagccatcatcgcgccaaatt

SEQ ID NO: 9836 - DNA, 25 bp, Artificial
  probe
  misc_feature (1)..(25): SEQ ID NO: 7768; DAP5_at; Start 181; Stop 205
gatatccatgcctgttttacagaaa

SEQ ID NO: 9837 - DNA, 25 bp, Artificial
  probe
  misc_feature (1)..(25): SEQ ID NO: 7768; DAP5_at; Start 165; Stop 189
tgctttcatttacacagatatccat

SEQ ID NO: 9838 - DNA, 25 bp, Artificial
  probe
  misc_feature (1)..(25): SEQ ID NO: 7768; DAP5_at; Start 547; Stop 571
cagcaaggacatccggatgaaaaag

SEQ ID NO: 9839 - DNA, 25 bp, Artificial
  probe
  misc_feature (1)..(25): SEQ ID NO: 7768; DAP5_at; Start 386; Stop 410
ttgcgctcggtgcgatactgatgat

SEQ ID NO: 9840 - DNA, 25 bp, Artificial
  probe
  misc_feature (1)..(25): SEQ ID NO: 7768; DAP5_at; Start 151; Stop 175
cctgttgagtcagatgctttcattt

SEQ ID NO: 9841 - DNA, 25 bp, Artificial
  probe
  misc_feature (1)..(25): SEQ ID NO: 7768; DAP5_at; Start 205; Stop 229
acacaaccggatgtcttgattgatt

SEQ ID NO: 9842 - DNA, 25 bp, Artificial
  probe
  misc_feature (1)..(25): SEQ ID NO: 7768; DAP5_at; Start 571; Stop 595
gaaattctcccaggagcaagaggag

SEQ ID NO: 9843 - DNA, 25 bp, Artificial
  probe
  misc_feature (1)..(25): SEQ ID NO: 7768; DAP5_at; Start 575; Stop 599
ttctcccaggagcaagaggagcgga

SEQ ID NO: 9844 - DNA, 25 bp, Artificial
  probe
  misc_feature (1)..(25): SEQ ID NO: 7768; DAP5_at; Start 359; Stop 383
ggatcggagccatcatcgcgccaaa

SEQ ID NO: 9845 - DNA, 25 bp, Artificial
  probe
  misc_feature (1)..(25): SEQ ID NO: 7768; DAP5_at; Start 425; Stop 449
tggctgccaactattttgaggatgt

SEQ ID NO: 9846 - DNA, 25 bp, Artificial
  probe
  misc_feature (1)..(25): SEQ ID NO: 7768; DAP5_at; Start 179; Stop 203
cagatatccatgcctgttttacaga

SEQ ID NO: 9847 - DNA, 25 bp, Artificial
  probe
  misc_feature (1)..(25): SEQ ID NO: 7768; DAP5_at; Start 381; Stop 405
aaattttgcgctcggtgcgatactg

SEQ ID NO: 9848 - DNA, 25 bp, Artificial
  probe
  misc_feature (1)..(25): SEQ ID NO: 7768; DAP5_at; Start 159; Stop 183
gtcagatgctttcatttacacagat

SEQ ID NO: 9849 - DNA, 25 bp, Artificial
  probe
  misc_feature (1)..(25): SEQ ID NO: 7768; DAP5_at; Start 464; Stop 488
ttcatcatgaccagaagcttgacgc

SEQ ID NO: 9850 - DNA, 25 bp, Artificial
  probe
  misc_feature (1)..(25): SEQ ID NO: 7768; DAP5_at; Start 144; Stop 168
tgtgatgcctgttgagtcagatgct

SEQ ID NO: 9851 - DNA, 25 bp, Artificial
  probe
  misc_feature (1)..(25): SEQ ID NO: 7768; DAP5_at; Start 200; Stop 224
cagaaacacaaccggatgtcttgat

SEQ ID NO: 9852 - DNA, 25 bp, Artificial
  probe
  misc_feature (1)..(25): SEQ ID NO: 7768; DAP5_at; Start 374; Stop 398
tcgcgccaaattttgcgctcggtgc

SEQ ID NO: 9853 - DNA, 25 bp, Artificial
  probe
  misc_feature (1)..(25): SEQ ID NO: 7768; DAP5_at; Start 267; Stop 291
tgcattagagcacggagtccgtcca

SEQ ID NO: 9854 - DNA, 25 bp, Artificial
  probe
  misc_feature (1)..(25): SEQ ID NO: 7768; DAP5_at; Start 481; Stop 505
cttgacgcaccaagcggaactgcgc

SEQ ID NO: 9855 - DNA, 25 bp, Artificial
  probe
  misc_feature (1)..(25): SEQ ID NO: 7769; DAPM_at; Start 42; Stop 66
ttaaactgtcagtcgaacaagtcat

SEQ ID NO: 9856 - DNA, 25 bp, Artificial
  probe
  misc_feature (1)..(25): SEQ ID NO: 7769; DAPM_at; Start 247; Stop 271
aattcatgaggcgacaggtcttcaa

SEQ ID NO: 9857 - DNA, 25 bp, Artificial
  probe
  misc_feature (1)..(25): SEQ ID NO: 7769; DAPM_at; Start 49; Stop 73
gtcagtcgaacaagtcatgaagatt

SEQ ID NO: 9858 - DNA, 25 bp, Artificial
  probe
  misc_feature (1)..(25): SEQ ID NO: 7769; DAPM_at; Start 331; Stop 355
tgccaatgcactcgatcttgtcatt

SEQ ID NO: 9859 - DNA, 25 bp, Artificial
  probe
  misc_feature (1)..(25): SEQ ID NO: 7769; DAPM_at; Start 555; Stop 579
gcttttggcgcccacagtgatgatg

SEQ ID NO: 9860 - DNA, 25 bp, Artificial
  probe
  misc_feature (1)..(25): SEQ ID NO: 7769; DAPM_at; Start 307; Stop 331
ccagcaaatcggtgcactgatcgct

SEQ ID NO: 9861 - DNA, 25 bp, Artificial
  probe
  misc_feature (1)..(25): SEQ ID NO: 7769; DAPM_at; Start 129; Stop 153
tgaaaattgctttgatcgcgcatga

SEQ ID NO: 9862 - DNA, 25 bp, Artificial
  probe
  misc_feature (1)..(25): SEQ ID NO: 7769; DAPM_at; Start 71; Stop 95
attgatcagcttgtgtatggtttag

SEQ ID NO: 9863 - DNA, 25 bp, Artificial
  probe
  misc_feature (1)..(25): SEQ ID NO: 7769; DAPM_at; Start 45; Stop 69
aactgtcagtcgaacaagtcatgaa

SEQ ID NO: 9864 - DNA, 25 bp, Artificial
  probe
  misc_feature (1)..(25): SEQ ID NO: 7769; DAPM_at; Start 175; Stop 199
tcaatttacgactgcctatcgggat

SEQ ID NO: 9865 - DNA, 25 bp, Artificial
  probe
  misc_feature (1)..(25): SEQ ID NO: 7769; DAPM_at; Start 68; Stop 92
aagattgatcagcttgtgtatggtt

SEQ ID NO: 9866 - DNA, 25 bp, Artificial
  probe
  misc_feature (1)..(25): SEQ ID NO: 7769; DAPM_at; Start 137; Stop 161
gctttgatcgcgcatgacaagaaaa

SEQ ID NO: 9867 - DNA, 25 bp, Artificial
  probe
  misc_feature (1)..(25): SEQ ID NO: 7769; DAPM_at; Start 335; Stop 359
aatgcactcgatcttgtcatttttt

SEQ ID NO: 9868 - DNA, 25 bp, Artificial
  probe
  misc_feature (1)..(25): SEQ ID NO: 7769; DAPM_at; Start 370; Stop 394
gctgaccgcgcagccgcatgaaccg

SEQ ID NO: 9869 - DNA, 25 bp, Artificial
  probe
  misc_feature (1)..(25): SEQ ID NO: 7769; DAPM_at; Start 323; Stop 347
ctgatcgctgccaatgcactcgatc

SEQ ID NO: 9870 - DNA, 25 bp, Artificial
  probe
  misc_feature (1)..(25): SEQ ID NO: 7769; DAPM_at; Start 379; Stop 403
gcagccgcatgaaccggatgtctcg

SEQ ID NO: 9871 - DNA, 25 bp, Artificial
  probe
  misc_feature (1)..(25): SEQ ID NO: 7769; DAPM_at; Start 556; Stop 580
cttttggcgcccacagtgatgatgt

SEQ ID NO: 9872 - DNA, 25 bp, Artificial
  probe
  misc_feature (1)..(25): SEQ ID NO: 7769; DAPM_at; Start 451; Stop 475
tatgggtactgcggaaattcttgtg

SEQ ID NO: 9873 - DNA, 25 bp, Artificial
  probe
  misc_feature (1)..(25): SEQ ID NO: 7769; DAPM_at; Start 21; Stop 45
gtgcttctttcatgtcaggcgttaa

SEQ ID NO: 9874 - DNA, 25 bp, Artificial
  probe
  misc_feature (1)..(25): SEQ ID NO: 7769; DAPM_at; Start 543; Stop 567
gctgacgttcttgcttttggcgccc

SEQ ID NO: 9875 - DNA, 25 bp, Artificial
  probe
  misc_feature (1)..(25): SEQ ID NO: 7769; DAPM_at; Start 334; Stop 358
caatgcactcgatcttgtcattttt

SEQ ID NO: 9876 - DNA, 25 bp, Artificial
  probe
  misc_feature (1)..(25): SEQ ID NO: 7769; DAPM_at; Start 441; Stop 465
tcgccacaaatatgggtactgcgga

SEQ ID NO: 9877 - DNA, 25 bp, Artificial
  probe
  misc_feature (1)..(25): SEQ ID NO: 7769; DAPM_at; Start 5; Stop 29
catgattcttataaccgtgcttctt

SEQ ID NO: 9878 - DNA, 25 bp, Artificial
  probe
  misc_feature (1)..(25): SEQ ID NO: 7769; DAPM_at; Start 207; Stop 231
agaatcatgatctatacgcaaccgg

SEQ ID NO: 9879 - DNA, 25 bp, Artificial
  probe
  misc_feature (1)..(25): SEQ ID NO: 7769; DAPM_at; Start 181; Stop 205
tacgactgcctatcgggatatttta

SEQ ID NO: 9880 - DNA, 25 bp, Artificial
  probe
  misc_feature (1)..(25): SEQ ID NO: 7769; DAPM_at; Start 22; Stop 46
tgcttctttcatgtcaggcgttaaa

SEQ ID NO: 9881 - DNA, 25 bp, Artificial
  probe
  misc_feature (1)..(25): SEQ ID NO: 7769; DAPM_at; Start 399; Stop 423
tctcggcattaatccgtttatgtga

SEQ ID NO: 9882 - DNA, 25 bp, Artificial
  probe
  misc_feature (1)..(25): SEQ ID NO: 7769; DAPM_at; Start 251; Stop 275
catgaggcgacaggtcttcaaattg

SEQ ID NO: 9883 - DNA, 25 bp, Artificial
  probe
  misc_feature (1)..(25): SEQ ID NO: 7769; DAPM_at; Start 309; Stop 333
agcaaatcggtgcactgatcgctgc

SEQ ID NO: 9884 - DNA, 25 bp, Artificial
  probe
  misc_feature (1)..(25): SEQ ID NO: 7769; DAPM_at; Start 551; Stop 575
tcttgcttttggcgcccacagtgat

SEQ ID NO: 9885 - DNA, 25 bp, Artificial
  probe
  misc_feature (1)..(25): SEQ ID NO: 7769; DAPM_at; Start 401; Stop 425
tcggcattaatccgtttatgtgatg

SEQ ID NO: 9886 - DNA, 25 bp, Artificial
  probe
  misc_feature (1)..(25): SEQ ID NO: 7769; DAPM_at; Start 250; Stop 274
tcatgaggcgacaggtcttcaaatt

SEQ ID NO: 9887 - DNA, 25 bp, Artificial
  probe
  misc_feature (1)..(25): SEQ ID NO: 7769; DAPM_at; Start 474; Stop 498
tgcgcacacttgatgaaggtgtttt

SEQ ID NO: 9888 - DNA, 25 bp, Artificial
  probe
  misc_feature (1)..(25): SEQ ID NO: 7769; DAPM_at; Start 302; Stop 326
ggagaccagcaaatcggtgcactga

SEQ ID NO: 9889 - DNA, 25 bp, Artificial
  probe
  misc_feature (1)..(25): SEQ ID NO: 7769; DAPM_at; Start 17; Stop 41
aaccgtgcttctttcatgtcaggcg

SEQ ID NO: 9890 - DNA, 25 bp, Artificial
  probe
  misc_feature (1)..(25): SEQ ID NO: 7769; DAPM_at; Start 396; Stop 420
atgtctcggcattaatccgtttatg

SEQ ID NO: 9891 - DNA, 25 bp, Artificial
  probe
  misc_feature (1)..(25): SEQ ID NO: 7769; DAPM_at; Start 389; Stop 413
gaaccggatgtctcggcattaatcc

SEQ ID NO: 9892 - DNA, 25 bp, Artificial
  probe
  misc_feature (1)..(25): SEQ ID NO: 7769; DAPM_at; Start 329; Stop 353
gctgccaatgcactcgatcttgtca

SEQ ID NO: 9893 - DNA, 25 bp, Artificial
  probe
  misc_feature (1)..(25): SEQ ID NO: 7769; DAPM_at; Start 475; Stop 499
gcgcacacttgatgaaggtgttttc

SEQ ID NO: 9894 - DNA, 25 bp, Artificial
  probe
  misc_feature (1)..(25): SEQ ID NO: 7769; DAPM_at; Start 74; Stop 98
gatcagcttgtgtatggtttagaaa

SEQ ID NO: 9895 - DNA, 25 bp, Artificial
  probe
  misc_feature (1)..(25): SEQ ID NO: 7769; DAPM_at; Start 374; Stop 398
accgcgcagccgcatgaaccggatg

SEQ ID NO: 9896 - DNA, 25 bp, Artificial
  probe
  misc_feature (1)..(25): SEQ ID NO: 7769; DAPM_at; Start 538; Stop 562
ataatgctgacgttcttgcttttgg

SEQ ID NO: 9897 - DNA, 25 bp, Artificial
  probe
  misc_feature (1)..(25): SEQ ID NO: 7769; DAPM_at; Start 421; Stop 445
tgatgtgtattccattccgctcgcc

SEQ ID NO: 9898 - DNA, 25 bp, Artificial
  probe
  misc_feature (1)..(25): SEQ ID NO: 7769; DAPM_at; Start 377; Stop 401
gcgcagccgcatgaaccggatgtct

SEQ ID NO: 9899 - DNA, 25 bp, Artificial
  probe
  misc_feature (1)..(25): SEQ ID NO: 7769; DAPM_at; Start 328; Stop 352
cgctgccaatgcactcgatcttgtc

SEQ ID NO: 9900 - DNA, 25 bp, Artificial
  probe
  misc_feature (1)..(25): SEQ ID NO: 7769; DAPM_at; Start 317; Stop 341
ggtgcactgatcgctgccaatgcac

SEQ ID NO: 9901 - DNA, 25 bp, Artificial
  probe
  misc_feature (1)..(25): SEQ ID NO: 7769; DAPM_at; Start 457; Stop 481
tactgcggaaattcttgtgcgcaca

SEQ ID NO: 9902 - DNA, 25 bp, Artificial
  probe
  misc_feature (1)..(25): SEQ ID NO: 7769; DAPM_at; Start 27; Stop 51
ctttcatgtcaggcgttaaactgtc

SEQ ID NO: 9903 - DNA, 25 bp, Artificial
  probe
  misc_feature (1)..(25): SEQ ID NO: 7769; DAPM_at; Start 171; Stop 195
tggttcaatttacgactgcctatcg

SEQ ID NO: 9904 - DNA, 25 bp, Artificial
  probe
  misc_feature (1)..(25): SEQ ID NO: 7769; DAPM_at; Start 214; Stop 238
tgatctatacgcaaccggaaccaca

SEQ ID NO: 9905 - DNA, 25 bp, Artificial
  probe
  misc_feature (1)..(25): SEQ ID NO: 7769; DAPM_at; Start 514; Stop 538
tcttcggggagaagagccgaatgta

SEQ ID NO: 9906 - DNA, 25 bp, Artificial
  probe
  misc_feature (1)..(25): SEQ ID NO: 7769; DAPM_at; Start 463; Stop 487
ggaaattcttgtgcgcacacttgat

SEQ ID NO: 9907 - DNA, 25 bp, Artificial
  probe
  misc_feature (1)..(25): SEQ ID NO: 7769; DAPM_at; Start 469; Stop 493
tcttgtgcgcacacttgatgaaggt

SEQ ID NO: 9908 - DNA, 25 bp, Artificial
  probe
  misc_feature (1)..(25): SEQ ID NO: 7769; DAPM_at; Start 541; Stop 565
atgctgacgttcttgcttttggcgc

SEQ ID NO: 9909 - DNA, 25 bp, Artificial
  probe
  misc_feature (1)..(25): SEQ ID NO: 7769; DAPM_at; Start 305; Stop 329
gaccagcaaatcggtgcactgatcg

SEQ ID NO: 9910 - DNA, 25 bp, Artificial
  probe
  misc_feature (1)..(25): SEQ ID NO: 7769; DAPM_at; Start 311; Stop 335
caaatcggtgcactgatcgctgcca

SEQ ID NO: 9911 - DNA, 25 bp, Artificial
  probe
  misc_feature (1)..(25): SEQ ID NO: 7769; DAPM_at; Start 29; Stop 53
ttcatgtcaggcgttaaactgtcag

SEQ ID NO: 9912 - DNA, 25 bp, Artificial
  probe
  misc_feature (1)..(25): SEQ ID NO: 7769; DAPM_at; Start 561; Stop 585
ggcgcccacagtgatgatgtcgaga

SEQ ID NO: 9913 - DNA, 25 bp, Artificial
  probe
  misc_feature (1)..(25): SEQ ID NO: 7769; DAPM_at; Start 437; Stop 461
ccgctcgccacaaatatgggtactg

SEQ ID NO: 9914 - DNA, 25 bp, Artificial
  probe
  misc_feature (1)..(25): SEQ ID NO: 7769; DAPM_at; Start 69; Stop 93
agattgatcagcttgtgtatggttt

SEQ ID NO: 9915 - DNA, 25 bp, Artificial
  probe
  misc_feature (1)..(25): SEQ ID NO: 7769; DAPM_at; Start 465; Stop 489
aaattcttgtgcgcacacttgatga

SEQ ID NO: 9916 - DNA, 25 bp, Artificial
  probe
  misc_feature (1)..(25): SEQ ID NO: 7769; DAPM_at; Start 169; Stop 193
tatggttcaatttacgactgcctat

SEQ ID NO: 9917 - DNA, 25 bp, Artificial
  probe
  misc_feature (1)..(25): SEQ ID NO: 7769; DAPM_at; Start 434; Stop 458
attccgctcgccacaaatatgggta

SEQ ID NO: 9918 - DNA, 25 bp, Artificial
  probe
  misc_feature (1)..(25): SEQ ID NO: 7769; DAPM_at; Start 549; Stop 573
gttcttgcttttggcgcccacagtg

SEQ ID NO: 9919 - DNA, 25 bp, Artificial
  probe
  misc_feature (1)..(25): SEQ ID NO: 7769; DAPM_at; Start 440; Stop 464
ctcgccacaaatatgggtactgcgg

SEQ ID NO: 9920 - DNA, 25 bp, Artificial
  probe
  misc_feature (1)..(25): SEQ ID NO: 7769; DAPM_at; Start 459; Stop 483
ctgcggaaattcttgtgcgcacact

SEQ ID NO: 9921 - DNA, 25 bp, Artificial
  probe
  misc_feature (1)..(25): SEQ ID NO: 7769; DAPM_at; Start 381; Stop 405
agccgcatgaaccggatgtctcggc

SEQ ID NO: 9922 - DNA, 25 bp, Artificial
  probe
  misc_feature (1)..(25): SEQ ID NO: 7769; DAPM_at; Start 15; Stop 39
ataaccgtgcttctttcatgtcagg

SEQ ID NO: 9923 - DNA, 25 bp, Artificial
  probe
  misc_feature (1)..(25): SEQ ID NO: 7769; DAPM_at; Start 11; Stop 35
tcttataaccgtgcttctttcatgt

SEQ ID NO: 9924 - DNA, 25 bp, Artificial
  probe
  misc_feature (1)..(25): SEQ ID NO: 7769; DAPM_at; Start 16; Stop 40
taaccgtgcttctttcatgtcaggc

SEQ ID NO: 9925 - DNA, 25 bp, Artificial
  probe
  misc_feature (1)..(25): SEQ ID NO: 7769; DAPM_at; Start 132; Stop 156
aaattgctttgatcgcgcatgacaa

SEQ ID NO: 9926 - DNA, 25 bp, Artificial
  probe
  misc_feature (1)..(25): SEQ ID NO: 7769; DAPM_at; Start 30; Stop 54
tcatgtcaggcgttaaactgtcagt

SEQ ID NO: 9927 - DNA, 25 bp, Artificial
  probe
  misc_feature (1)..(25): SEQ ID NO: 7769; DAPM_at; Start 424; Stop 448
tgtgtattccattccgctcgccaca

SEQ ID NO: 9928 - DNA, 25 bp, Artificial
  probe
  misc_feature (1)..(25): SEQ ID NO: 7769; DAPM_at; Start 31; Stop 55
catgtcaggcgttaaactgtcagtc

SEQ ID NO: 9929 - DNA, 25 bp, Artificial
  probe
  misc_feature (1)..(25): SEQ ID NO: 7769; DAPM_at; Start 301; Stop 325
gggagaccagcaaatcggtgcactg

SEQ ID NO: 9930 - DNA, 25 bp, Artificial
  probe
  misc_feature (1)..(25): SEQ ID NO: 7769; DAPM_at; Start 435; Stop 459
ttccgctcgccacaaatatgggtac

SEQ ID NO: 9931 - DNA, 25 bp, Artificial
  probe
  misc_feature (1)..(25): SEQ ID NO: 7769; DAPM_at; Start 25; Stop 49
ttctttcatgtcaggcgttaaactg

SEQ ID NO: 9932 - DNA, 25 bp, Artificial
  probe
  misc_feature (1)..(25): SEQ ID NO: 7769; DAPM_at; Start 208; Stop 232
gaatcatgatctatacgcaaccgga

SEQ ID NO: 9933 - DNA, 25 bp, Artificial
  probe
  misc_feature (1)..(25): SEQ ID NO: 7769; DAPM_at; Start 415; Stop 439
tttatgtgatgtgtattccattccg

SEQ ID NO: 9934 - DNA, 25 bp, Artificial
  probe
  misc_feature (1)..(25): SEQ ID NO: 7769; DAPM_at; Start 471; Stop 495
ttgtgcgcacacttgatgaaggtgt

SEQ ID NO: 9935 - DNA, 25 bp, Artificial
  probe
  misc_feature (1)..(25): SEQ ID NO: 7769; DAPM_at; Start 209; Stop 233
aatcatgatctatacgcaaccggaa

SEQ ID NO: 9936 - DNA, 25 bp, Artificial
  probe
  misc_feature (1)..(25): SEQ ID NO: 7769; DAPM_at; Start 468; Stop 492
ttcttgtgcgcacacttgatgaagg

SEQ ID NO: 9937 - DNA, 25 bp, Artificial
  probe
  misc_feature (1)..(25): SEQ ID NO: 7769; DAPM_at; Start 382; Stop 406
gccgcatgaaccggatgtctcggca

SEQ ID NO: 9938 - DNA, 25 bp, Artificial
  probe
  misc_feature (1)..(25): SEQ ID NO: 7769; DAPM_at; Start 402; Stop 426
cggcattaatccgtttatgtgatgt

SEQ ID NO: 9939 - DNA, 25 bp, Artificial
  probe
  misc_feature (1)..(25): SEQ ID NO: 7769; DAPM_at; Start 211; Stop 235
tcatgatctatacgcaaccggaacc

SEQ ID NO: 9940 - DNA, 25 bp, Artificial
  probe
  misc_feature (1)..(25): SEQ ID NO: 7769; DAPM_at; Start 375; Stop 399
ccgcgcagccgcatgaaccggatgt

SEQ ID NO: 9941 - DNA, 25 bp, Artificial
  probe
  misc_feature (1)..(25): SEQ ID NO: 7769; DAPM_at; Start 310; Stop 334
gcaaatcggtgcactgatcgctgcc

SEQ ID NO: 9942 - DNA, 25 bp, Artificial
  probe
  misc_feature (1)..(25): SEQ ID NO: 7769; DAPM_at; Start 319; Stop 343
tgcactgatcgctgccaatgcactc

SEQ ID NO: 9943 - DNA, 25 bp, Artificial
  probe
  misc_feature (1)..(25): SEQ ID NO: 7769; DAPM_at; Start 545; Stop 569
tgacgttcttgcttttggcgcccac

SEQ ID NO: 9944 - DNA, 25 bp, Artificial
  probe
  misc_feature (1)..(25): SEQ ID NO: 7769; DAPM_at; Start 563; Stop 587
cgcccacagtgatgatgtcgagatc

SEQ ID NO: 9945 - DNA, 25 bp, Artificial
  probe
  misc_feature (1)..(25): SEQ ID NO: 7769; DAPM_at; Start 315; Stop 339
tcggtgcactgatcgctgccaatgc

SEQ ID NO: 9946 - DNA, 25 bp, Artificial
  probe
  misc_feature (1)..(25): SEQ ID NO: 7769; DAPM_at; Start 1; Stop 25
acgccatgattcttataaccgtgct

SEQ ID NO: 9947 - DNA, 25 bp, Artificial
  probe
  misc_feature (1)..(25): SEQ ID NO: 7769; DAPM_at; Start 41; Stop 65
gttaaactgtcagtcgaacaagtca

SEQ ID NO: 9948 - DNA, 25 bp, Artificial
  probe
  misc_feature (1)..(25): SEQ ID NO: 7769; DAPM_at; Start 35; Stop 59
tcaggcgttaaactgtcagtcgaac

SEQ ID NO: 9949 - DNA, 25 bp, Artificial
  probe
  misc_feature (1)..(25): SEQ ID NO: 7769; DAPM_at; Start 455; Stop 479
ggtactgcggaaattcttgtgcgca

SEQ ID NO: 9950 - DNA, 25 bp, Artificial
  probe
  misc_feature (1)..(25): SEQ ID NO: 7769; DAPM_at; Start 559; Stop 583
ttggcgcccacagtgatgatgtcga

SEQ ID NO: 9951 - DNA, 25 bp, Artificial
  probe
  misc_feature (1)..(25): SEQ ID NO: 7769; DAPM_at; Start 168; Stop 192
atatggttcaatttacgactgccta

SEQ ID NO: 9952 - DNA, 25 bp, Artificial
  probe
  misc_feature (1)..(25): SEQ ID NO: 7769; DAPM_at; Start 535; Stop 559
tgtataatgctgacgttcttgcttt

SEQ ID NO: 9953 - DNA, 25 bp, Artificial
  probe
  misc_feature (1)..(25): SEQ ID NO: 7769; DAPM_at; Start 249; Stop 273
ttcatgaggcgacaggtcttcaaat

SEQ ID NO: 9954 - DNA, 25 bp, Artificial
  probe
  misc_feature (1)..(25): SEQ ID NO: 7769; DAPM_at; Start 321; Stop 345
cactgatcgctgccaatgcactcga

SEQ ID NO: 9955 - DNA, 25 bp, Artificial
  probe
  misc_feature (1)..(25): SEQ ID NO: 7769; DAPM_at; Start 395; Stop 419
gatgtctcggcattaatccgtttat

SEQ ID NO: 9956 - DNA, 25 bp, Artificial
  probe
  misc_feature (1)..(25): SEQ ID NO: 7769; DAPM_at; Start 408; Stop 432
taatccgtttatgtgatgtgtattc

SEQ ID NO: 9957 - DNA, 25 bp, Artificial
  probe
  misc_feature (1)..(25): SEQ ID NO: 7769; DAPM_at; Start 570; Stop 594
agtgatgatgtcgagatcggaatgg

SEQ ID NO: 9958 - DNA, 25 bp, Artificial
  probe
  misc_feature (1)..(25): SEQ ID NO: 7769; DAPM_at; Start 557; Stop 581
ttttggcgcccacagtgatgatgtc

SEQ ID NO: 9959 - DNA, 25 bp, Artificial
  probe
  misc_feature (1)..(25): SEQ ID NO: 7769; DAPM_at; Start 386; Stop 410
catgaaccggatgtctcggcattaa

SEQ ID NO: 9960 - DNA, 25 bp, Artificial
  probe
  misc_feature (1)..(25): SEQ ID NO: 7769; DAPM_at; Start 316; Stop 340
cggtgcactgatcgctgccaatgca

SEQ ID NO: 9961 - DNA, 25 bp, Artificial
  probe
  misc_feature (1)..(25): SEQ ID NO: 7769; DAPM_at; Start 325; Stop 349
gatcgctgccaatgcactcgatctt

SEQ ID NO: 9962 - DNA, 25 bp, Artificial
  probe
  misc_feature (1)..(25): SEQ ID NO: 7769; DAPM_at; Start 405; Stop 429
cattaatccgtttatgtgatgtgta

SEQ ID NO: 9963 - DNA, 25 bp, Artificial
  probe
  misc_feature (1)..(25): SEQ ID NO: ; LYSA3_at; Start 128; Stop 152
cttcatgccactgaatacgttgaaa

SEQ ID NO: 9964 - DNA, 25 bp, Artificial
  probe
  misc_feature (1)..(25): SEQ ID NO: ; LYSA3_at; Start 239; Stop 263
ggagacgcaggcacaactctttata

SEQ ID NO: 9965 - DNA, 25 bp, Artificial
  probe
  misc_feature (1)..(25): SEQ ID NO: ; LYSA3_at; Start 125; Stop 149
ccgcttcatgccactgaatacgttg

SEQ ID NO: 9966 - DNA, 25 bp, Artificial
  probe
  misc_feature (1)..(25): SEQ ID NO: ; LYSA3_at; Start 131; Stop 155
catgccactgaatacgttgaaaaaa

SEQ ID NO: 9967 - DNA, 25 bp, Artificial
  probe
  misc_feature (1)..(25): SEQ ID NO: ; LYSA3_at; Start 294; Stop 318
tgtacaatcgtttcatcattcggcg

SEQ ID NO: 9968 - DNA, 25 bp, Artificial
  probe
  misc_feature (1)..(25): SEQ ID NO: ; LYSA3_at; Start 54; Stop 78
catattcatttgtatccaaggtgct

SEQ ID NO: 9969 - DNA, 25 bp, Artificial
  probe
  misc_feature (1)..(25): SEQ ID NO: ; LYSA3_at; Start 302; Stop 326
cgtttcatcattcggcgtgcgaatt

SEQ ID NO: 9970 - DNA, 25 bp, Artificial
  probe
  misc_feature (1)..(25): SEQ ID NO: ; LYSA3_at; Start 229; Stop 253
ttctctcgtgggagacgcaggcaca

SEQ ID NO: 9971 - DNA, 25 bp, Artificial
  probe
  misc_feature (1)..(25): SEQ ID NO: ; LYSA3_at; Start 127; Stop 151
gcttcatgccactgaatacgttgaa

SEQ ID NO: 9972 - DNA, 25 bp, Artificial
  probe
  misc_feature (1)..(25): SEQ ID NO: ; LYSA3_at; Start 228; Stop 252
gttctctcgtgggagacgcaggcac

SEQ ID NO: 9973 - DNA, 25 bp, Artificial
  probe
  misc_feature (1)..(25): SEQ ID NO: ; LYSA3_at; Start 129; Stop 153
ttcatgccactgaatacgttgaaaa

SEQ ID NO: 9974 - DNA, 25 bp, Artificial
  probe
  misc_feature (1)..(25): SEQ ID NO: ; LYSA3_at; Start 97; Stop 121
cggcattcgttatacggaagatgat

SEQ ID NO: 9975 - DNA, 25 bp, Artificial
  probe
  misc_feature (1)..(25): SEQ ID NO: ; LYSA3_at; Start 225; Stop 249
gccgttctctcgtgggagacgcagg

SEQ ID NO: 9976 - DNA, 25 bp, Artificial
  probe
  misc_feature (1)..(25): SEQ ID NO: ; LYSA3_at; Start 121; Stop 145
tgaaccgcttcatgccactgaatac

SEQ ID NO: 9977 - DNA, 25 bp, Artificial
  probe
  misc_feature (1)..(25): SEQ ID NO: ; LYSA3_at; Start 56; Stop 80
tattcatttgtatccaaggtgctga

SEQ ID NO: 9978 - DNA, 25 bp, Artificial
  probe
  misc_feature (1)..(25): SEQ ID NO: ; LYSA3_at; Start 61; Stop 85
atttgtatccaaggtgctgaatctt

SEQ ID NO: 9979 - DNA, 25 bp, Artificial
  probe
  misc_feature (1)..(25): SEQ ID NO: ; LYSA3_at; Start 116; Stop 140
gatgatgaaccgcttcatgccactg

SEQ ID NO: 9980 - DNA, 25 bp, Artificial
  probe
  misc_feature (1)..(25): SEQ ID NO: ; LYSA3_at; Start 252; Stop 276
caactctttatacggttggctctca

SEQ ID NO: 9981 - DNA, 25 bp, Artificial
  probe
  misc_feature (1)..(25): SEQ ID NO: ; LYSA3_at; Start 240; Stop 264
gagacgcaggcacaactctttatac

SEQ ID NO: 9982 - DNA, 25 bp, Artificial
  probe
  misc_feature (1)..(25): SEQ ID NO: ; LYSA3_at; Start 123; Stop 147
aaccgcttcatgccactgaatacgt

SEQ ID NO: 9983 - DNA, 25 bp, Artificial
  probe
  misc_feature (1)..(25): SEQ ID NO: ; LYSA3_at; Start 245; Stop 269
gcaggcacaactctttatacggttg

SEQ ID NO: 9984 - DNA, 25 bp, Artificial
  probe
  misc_feature (1)..(25): SEQ ID NO: ; LYSA3_at; Start 101; Stop 125
attcgttatacggaagatgatgaac

SEQ ID NO: 9985 - DNA, 25 bp, Artificial
  probe
  misc_feature (1)..(25): SEQ ID NO: ; LYSA3_at; Start 299; Stop 323
aatcgtttcatcattcggcgtgcga

SEQ ID NO: 9986 - DNA, 25 bp, Artificial
  probe
  misc_feature (1)..(25): SEQ ID NO: ; LYSA3_at; Start 52; Stop 76
ttcatattcatttgtatccaaggtg

SEQ ID NO: 9987 - DNA, 25 bp, Artificial
  probe
  misc_feature (1)..(25): SEQ ID NO: ; LYSA3_at; Start 95; Stop 119
ttcggcattcgttatacggaagatg

SEQ ID NO: 9988 - DNA, 25 bp, Artificial
  probe
  misc_feature (1)..(25): SEQ ID NO: ; LYSA3_at; Start 50; Stop 74
gattcatattcatttgtatccaagg

SEQ ID NO: 9989 - DNA, 25 bp, Artificial
  probe
  misc_feature (1)..(25): SEQ ID NO: ; LYSA3_at; Start 304; Stop 328
tttcatcattcggcgtgcgaattaa

SEQ ID NO: 9990 - DNA, 25 bp, Artificial
  probe
  misc_feature (1)..(25): SEQ ID NO: ; LYSA3_at; Start 297; Stop 321
acaatcgtttcatcattcggcgtgc

SEQ ID NO: 9991 - DNA, 25 bp, Artificial
  probe
  misc_feature (1)..(25): SEQ ID NO: ; LYSA3_at; Start 301; Stop 325
tcgtttcatcattcggcgtgcgaat

SEQ ID NO: 9992 - DNA, 25 bp, Artificial
  probe
  misc_feature (1)..(25): SEQ ID NO: ; LYSA3_at; Start 227; Stop 251
cgttctctcgtgggagacgcaggca

SEQ ID NO: 9993 - DNA, 25 bp, Artificial
  probe
  misc_feature (1)..(25): SEQ ID NO: ; LYSA3_at; Start 233; Stop 257
ctcgtgggagacgcaggcacaactc

SEQ ID NO: 9994 - DNA, 25 bp, Artificial
  probe
  misc_feature (1)..(25): SEQ ID NO: ; LYSA3_at; Start 231; Stop 255
ctctcgtgggagacgcaggcacaac

SEQ ID NO: 9995 - DNA, 25 bp, Artificial
  probe
  misc_feature (1)..(25): SEQ ID NO: ; LYSA3_at; Start 65; Stop 89
gtatccaaggtgctgaatcttggag

SEQ ID NO: 9996 - DNA, 25 bp, Artificial
  probe
  misc_feature (1)..(25): SEQ ID NO: ; LYSA3_at; Start 298; Stop 322
caatcgtttcatcattcggcgtgcg

SEQ ID NO: 9997 - DNA, 25 bp, Artificial
  probe
  misc_feature (1)..(25): SEQ ID NO: ; LYSA3_at; Start 59; Stop 83
tcatttgtatccaaggtgctgaatc

SEQ ID NO: 9998 - DNA, 25 bp, Artificial
  probe
  misc_feature (1)..(25): SEQ ID NO: ; LYSA3_at; Start 249; Stop 273
gcacaactctttatacggttggctc

SEQ ID NO: 9999 - DNA, 25 bp, Artificial
  probe
  misc_feature (1)..(25): SEQ ID NO: ; LYSA3_at; Start 289; Stop 313
taagctgtacaatcgtttcatcatt

SEQ ID NO: 10000 - DNA, 25 bp, Artificial
  probe
  misc_feature (1)..(25): SEQ ID NO: ; LYSA3_at; Start 224; Stop 248
ggccgttctctcgtgggagacgcag

SEQ ID NO: 10001 - DNA, 25 bp, Artificial
  probe
  misc_feature (1)..(25): SEQ ID NO: ; LYSA3_at; Start 295; Stop 319
gtacaatcgtttcatcattcggcgt

SEQ ID NO: 10002 - DNA, 25 bp, Artificial
  probe
  misc_feature (1)..(25): SEQ ID NO: ; LYSA3_at; Start 290; Stop 314
aagctgtacaatcgtttcatcattc

SEQ ID NO: 10003 - DNA, 25 bp, Artificial
  probe
  misc_feature (1)..(25): SEQ ID NO: ; LYSA3_at; Start 63; Stop 87
ttgtatccaaggtgctgaatcttgg

SEQ ID NO: 10004 - DNA, 25 bp, Artificial
  probe
  misc_feature (1)..(25): SEQ ID NO: ; LYSA3_at; Start 195; Stop 219
ttgacattccggaaatttggatcga

SEQ ID NO: 10005 - DNA, 25 bp, Artificial
  probe
  misc_feature (1)..(25): SEQ ID NO: ; LYSA3_at; Start 196; Stop 220
tgacattccggaaatttggatcgaa

SEQ ID NO: 10006 - DNA, 25 bp, Artificial
  probe
  misc_feature (1)..(25): SEQ ID NO: ; LYSA3_at; Start 120; Stop 144
atgaaccgcttcatgccactgaata

SEQ ID NO: 10007 - DNA, 25 bp, Artificial
  probe
  misc_feature (1)..(25): SEQ ID NO: ; LYSA3_at; Start 241; Stop 265
agacgcaggcacaactctttatacg

SEQ ID NO: 10008 - DNA, 25 bp, Artificial
  probe
  misc_feature (1)..(25): SEQ ID NO: ; LYSA3_at; Start 99; Stop 123
gcattcgttatacggaagatgatga

SEQ ID NO: 10009 - DNA, 25 bp, Artificial
  probe
  misc_feature (1)..(25): SEQ ID NO: ; LYSA3_at; Start 118; Stop 142
tgatgaaccgcttcatgccactgaa

SEQ ID NO: 10010 - DNA, 25 bp, Artificial
  probe
  misc_feature (1)..(25): SEQ ID NO: ; LYSA3_at; Start 291; Stop 315
agctgtacaatcgtttcatcattcg

SEQ ID NO: 10011 - DNA, 25 bp, Artificial
  probe
  misc_feature (1)..(25): SEQ ID NO: ; LYSA3_at; Start 68; Stop 92
tccaaggtgctgaatcttggaggag

SEQ ID NO: 10012 - DNA, 25 bp, Artificial
  probe
  misc_feature (1)..(25): SEQ ID NO: ; LYSA5_at; Start 153; Stop 177
gcaggcgtttatttctgcagggctg

SEQ ID NO: 10013 - DNA, 25 bp, Artificial
  probe
  misc_feature (1)..(25): SEQ ID NO: ; LYSA5_at; Start 99; Stop 123
acctctttacgtatatgatgtggct

SEQ ID NO: 10014 - DNA, 25 bp, Artificial
  probe
  misc_feature (1)..(25): SEQ ID NO: ; LYSA5_at; Start 297; Stop 321
gcaggctttccggcagaacgcatcc

SEQ ID NO: 10015 - DNA, 25 bp, Artificial
  probe
  misc_feature (1)..(25): SEQ ID NO: ; LYSA5_at; Start 225; Stop 249
gattcagctcgctgaggaagaggga

SEQ ID NO: 10016 - DNA, 25 bp, Artificial
  probe
  misc_feature (1)..(25): SEQ ID NO: ; LYSA5_at; Start 285; Stop 309
acggctgttgcagcaggctttccgg

SEQ ID NO: 10017 - DNA, 25 bp, Artificial
  probe
  misc_feature (1)..(25): SEQ ID NO: ; LYSA5_at; Start 304; Stop 328
ttccggcagaacgcatccactttca

SEQ ID NO: 10018 - DNA, 25 bp, Artificial
  probe
  misc_feature (1)..(25): SEQ ID NO: ; LYSA5_at; Start 303; Stop 327
tttccggcagaacgcatccactttc

SEQ ID NO: 10019 - DNA, 25 bp, Artificial
  probe
  misc_feature (1)..(25): SEQ ID NO: ; LYSA5_at; Start 255; Stop 279
tttagatgtcgtatccggagagagc

SEQ ID NO: 10020 - DNA, 25 bp, Artificial
  probe
  misc_feature (1)..(25): SEQ ID NO: ; LYSA5_at; Start 216; Stop 240
agtcgcaatgattcagctcgctgag

SEQ ID NO: 10021 - DNA, 25 bp, Artificial
  probe
  misc_feature (1)..(25): SEQ ID NO: ; LYSA5_at; Start 96; Stop 120
tacacctctttacgtatatgatgtg

SEQ ID NO: 10022 - DNA, 25 bp, Artificial
  probe
  misc_feature (1)..(25): SEQ ID NO: ; LYSA5_at; Start 256; Stop 280
ttagatgtcgtatccggagagagct

SEQ ID NO: 10023 - DNA, 25 bp, Artificial
  probe
  misc_feature (1)..(25): SEQ ID NO: ; LYSA5_at; Start 276; Stop 300
gagctatatacggctgttgcagcag

SEQ ID NO: 10024 - DNA, 25 bp, Artificial
  probe
  misc_feature (1)..(25): SEQ ID NO: ; LYSA5_at; Start 199; Stop 223
agcaaagcattctcatcagtcgcaa

SEQ ID NO: 10025 - DNA, 25 bp, Artificial
  probe
  misc_feature (1)..(25): SEQ ID NO: ; LYSA5_at; Start 201; Stop 225
caaagcattctcatcagtcgcaatg

SEQ ID NO: 10026 - DNA, 25 bp, Artificial
  probe
  misc_feature (1)..(25): SEQ ID NO: ; LYSA5_at; Start 156; Stop 180
ggcgtttatttctgcagggctgaaa

SEQ ID NO: 10027 - DNA, 25 bp, Artificial
  probe
  misc_feature (1)..(25): SEQ ID NO: ; LYSA5_at; Start 204; Stop 228
agcattctcatcagtcgcaatgatt

SEQ ID NO: 10028 - DNA, 25 bp, Artificial
  probe
  misc_feature (1)..(25): SEQ ID NO: ; LYSA5_at; Start 175; Stop 199
ctgaaagcacaggtggcatatgcga

SEQ ID NO: 10029 - DNA, 25 bp, Artificial
  probe
  misc_feature (1)..(25): SEQ ID NO: ; LYSA5_at; Start 288; Stop 312
gctgttgcagcaggctttccggcag

SEQ ID NO: 10030 - DNA, 25 bp, Artificial
  probe
  misc_feature (1)..(25): SEQ ID NO: ; LYSA5_at; Start 123; Stop 147
tttaatacgtgagcgtgctaaaagc

SEQ ID NO: 10031 - DNA, 25 bp, Artificial
  probe
  misc_feature (1)..(25): SEQ ID NO: ; LYSA5_at; Start 60; Stop 84
aggtgtggatgctctctatttagcg

SEQ ID NO: 10032 - DNA, 25 bp, Artificial
  probe
  misc_feature (1)..(25): SEQ ID NO: ; LYSA5_at; Start 279; Stop 303
ctatatacggctgttgcagcaggct

SEQ ID NO: 10033 - DNA, 25 bp, Artificial
  probe
  misc_feature (1)..(25): SEQ ID NO: ; LYSA5_at; Start 171; Stop 195
agggctgaaagcacaggtggcatat

SEQ ID NO: 10034 - DNA, 25 bp, Artificial
  probe
  misc_feature (1)..(25): SEQ ID NO: ; LYSA5_at; Start 252; Stop 276
ttctttagatgtcgtatccggagag

SEQ ID NO: 10035 - DNA, 25 bp, Artificial
  probe
  misc_feature (1)..(25): SEQ ID NO: ; LYSA5_at; Start 207; Stop 231
attctcatcagtcgcaatgattcag

SEQ ID NO: 10036 - DNA, 25 bp, Artificial
  probe
  misc_feature (1)..(25): SEQ ID NO: ; LYSA5_at; Start 110; Stop 134
tatatgatgtggctttaatacgtga

SEQ ID NO: 10037 - DNA, 25 bp, Artificial
  probe
  misc_feature (1)..(25): SEQ ID NO: ; LYSA5_at; Start 195; Stop 219
tgcgagcaaagcattctcatcagtc

SEQ ID NO: 10038 - DNA, 25 bp, Artificial
  probe
  misc_feature (1)..(25): SEQ ID NO: ; LYSA5_at; Start 1; Stop 25
atgacattgttcttacacggcacaa

SEQ ID NO: 10039 - DNA, 25 bp, Artificial
  probe
  misc_feature (1)..(25): SEQ ID NO: ; LYSA5_at; Start 63; Stop 87
tgtggatgctctctatttagcggag

SEQ ID NO: 10040 - DNA, 25 bp, Artificial
  probe
  misc_feature (1)..(25): SEQ ID NO: ; LYSA5_at; Start 19; Stop 43
ggcacaagcagacaaaatcaacatg

SEQ ID NO: 10041 - DNA, 25 bp, Artificial
  probe
  misc_feature (1)..(25): SEQ ID NO: ; LYSA5_at; Start 151; Stop 175
aagcaggcgtttatttctgcagggc

SEQ ID NO: 10042 - DNA, 25 bp, Artificial
  probe
  misc_feature (1)..(25): SEQ ID NO: ; LYSA5_at; Start 24; Stop 48
aagcagacaaaatcaacatggtcat

SEQ ID NO: 10043 - DNA, 25 bp, Artificial
  probe
  misc_feature (1)..(25): SEQ ID NO: ; LYSA5_at; Start 177; Stop 201
gaaagcacaggtggcatatgcgagc

SEQ ID NO: 10044 - DNA, 25 bp, Artificial
  probe
  misc_feature (1)..(25): SEQ ID NO: ; LYSA5_at; Start 73; Stop 97
ctctatttagcggagaaatatggta

SEQ ID NO: 10045 - DNA, 25 bp, Artificial
  probe
  misc_feature (1)..(25): SEQ ID NO: ; LYSA5_at; Start 218; Stop 242
tcgcaatgattcagctcgctgagga

SEQ ID NO: 10046 - DNA, 25 bp, Artificial
  probe
  misc_feature (1)..(25): SEQ ID NO: ; LYSA5_at; Start 147; Stop 171
ctttaagcaggcgtttatttctgca

SEQ ID NO: 10047 - DNA, 25 bp, Artificial
  probe
  misc_feature (1)..(25): SEQ ID NO: ; LYSA5_at; Start 192; Stop 216
atatgcgagcaaagcattctcatca

SEQ ID NO: 10048 - DNA, 25 bp, Artificial
  probe
  misc_feature (1)..(25): SEQ ID NO: ; LYSA5_at; Start 219; Stop 243
cgcaatgattcagctcgctgaggaa

SEQ ID NO: 10049 - DNA, 25 bp, Artificial
  probe
  misc_feature (1)..(25): SEQ ID NO: ; LYSA5_at; Start 300; Stop 324
ggctttccggcagaacgcatccact

SEQ ID NO: 10050 - DNA, 25 bp, Artificial
  probe
  misc_feature (1)..(25): SEQ ID NO: ; LYSA5_at; Start 282; Stop 306
tatacggctgttgcagcaggctttc

SEQ ID NO: 10051 - DNA, 25 bp, Artificial
  probe
  misc_feature (1)..(25): SEQ ID NO: ; LYSA5_at; Start 120; Stop 144
ggctttaatacgtgagcgtgctaaa

SEQ ID NO: 10052 - DNA, 25 bp, Artificial
  probe
  misc_feature (1)..(25): SEQ ID NO: ; LYSA5_at; Start 45; Stop 69
tcatttagaaatcggaggtgtggat

SEQ ID NO: 10053 - DNA, 25 bp, Artificial
  probe
  misc_feature (1)..(25): SEQ ID NO: ; LYSA5_at; Start 261; Stop 285
tgtcgtatccggagagagctatata

SEQ ID NO: 10054 - DNA, 25 bp, Artificial
  probe
  misc_feature (1)..(25): SEQ ID NO: ; LYSA5_at; Start 183; Stop 207
acaggtggcatatgcgagcaaagca

SEQ ID NO: 10055 - DNA, 25 bp, Artificial
  probe
  misc_feature (1)..(25): SEQ ID NO: ; LYSA5_at; Start 69; Stop 93
tgctctctatttagcggagaaatat

SEQ ID NO: 10056 - DNA, 25 bp, Artificial
  probe
  misc_feature (1)..(25): SEQ ID NO: ; LYSA5_at; Start 159; Stop 183
gtttatttctgcagggctgaaagca

SEQ ID NO: 10057 - DNA, 25 bp, Artificial
  probe
  misc_feature (1)..(25): SEQ ID NO: ; LYSA5_at; Start 291; Stop 315
gttgcagcaggctttccggcagaac

SEQ ID NO: 10058 - DNA, 25 bp, Artificial
  probe
  misc_feature (1)..(25): SEQ ID NO: ; LYSA5_at; Start 180; Stop 204
agcacaggtggcatatgcgagcaaa

SEQ ID NO: 10059 - DNA, 25 bp, Artificial
  probe
  misc_feature (1)..(25): SEQ ID NO: ; LYSA5_at; Start 93; Stop 117
tggtacacctctttacgtatatgat

SEQ ID NO: 10060 - DNA, 25 bp, Artificial
  probe
  misc_feature (1)..(25): SEQ ID NO: ; LYSA5_at; Start 49; Stop 73
ttagaaatcggaggtgtggatgctc

SEQ ID NO: 10061 - DNA, 25 bp, Artificial
  probe
  misc_feature (1)..(25): SEQ ID NO: ; LYSA5_at; Start 165; Stop 189
ttctgcagggctgaaagcacaggtg

SEQ ID NO: 10062 - DNA, 25 bp, Artificial
  probe
  misc_feature (1)..(25): SEQ ID NO: ; LYSAM_at; Start 33; Stop 57
tggcgcttgagcaccgcatcggctg

SEQ ID NO: 10063 - DNA, 25 bp, Artificial
  probe
  misc_feature (1)..(25): SEQ ID NO: ; LYSAM_at; Start 214; Stop 238
tcgatcttcataacggacaaactga

SEQ ID NO: 10064 - DNA, 25 bp, Artificial
  probe
  misc_feature (1)..(25): SEQ ID NO: ; LYSAM_at; Start 165; Stop 189
catacgcatgactacattacaacgg

SEQ ID NO: 10065 - DNA, 25 bp, Artificial
  probe
  misc_feature (1)..(25): SEQ ID NO: ; LYSAM_at; Start 201; Stop 225
tcaaagtttggtttcgatcttcata

SEQ ID NO: 10066 - DNA, 25 bp, Artificial
  probe
  misc_feature (1)..(25): SEQ ID NO: ; LYSAM_at; Start 120; Stop 144
cactccatcgatgttcttcttcgga

SEQ ID NO: 10067 - DNA, 25 bp, Artificial
  probe
  misc_feature (1)..(25): SEQ ID NO: ; LYSAM_at; Start 48; Stop 72
gcatcggctgcattgtggtggataa

SEQ ID NO: 10068 - DNA, 25 bp, Artificial
  probe
  misc_feature (1)..(25): SEQ ID NO: ; LYSAM_at; Start 300; Stop 324
atcggctcgcaaatctttgatacgg

SEQ ID NO: 10069 - DNA, 25 bp, Artificial
  probe
  misc_feature (1)..(25): SEQ ID NO: ; LYSAM_at; Start 20; Stop 44
gaagaactgcggatggcgcttgagc

SEQ ID NO: 10070 - DNA, 25 bp, Artificial
  probe
  misc_feature (1)..(25): SEQ ID NO: ; LYSAM_at; Start 267; Stop 291
gaacacattcagctgctgggtgtcc

SEQ ID NO: 10071 - DNA, 25 bp, Artificial
  probe
  misc_feature (1)..(25): SEQ ID NO: ; LYSAM_at; Start 128; Stop 152
cgatgttcttcttcggatcacgccc

SEQ ID NO: 10072 - DNA, 25 bp, Artificial
  probe
  misc_feature (1)..(25): SEQ ID NO: ; LYSAM_at; Start 159; Stop 183
gaagcgcatacgcatgactacatta

SEQ ID NO: 10073 - DNA, 25 bp, Artificial
  probe
  misc_feature (1)..(25): SEQ ID NO: ; LYSAM_at; Start 279; Stop 303
ctgctgggtgtccattgccatatcg

SEQ ID NO: 10074 - DNA, 25 bp, Artificial
  probe
  misc_feature (1)..(25): SEQ ID NO: ; LYSAM_at; Start 304; Stop 328
gctcgcaaatctttgatacggccgg

SEQ ID NO: 10075 - DNA, 25 bp, Artificial
  probe
  misc_feature (1)..(25): SEQ ID NO: ; LYSAM_at; Start 87; Stop 111
tcgcttcttgaagacctatgtaaag

SEQ ID NO: 10076 - DNA, 25 bp, Artificial
  probe
  misc_feature (1)..(25): SEQ ID NO: ; LYSAM_at; Start 75; Stop 99
tctatgaaatcgtcgcttcttgaag

SEQ ID NO: 10077 - DNA, 25 bp, Artificial
  probe
  misc_feature (1)..(25): SEQ ID NO: ; LYSAM_at; Start 264; Stop 288
tcggaacacattcagctgctgggtg

SEQ ID NO: 10078 - DNA, 25 bp, Artificial
  probe
  misc_feature (1)..(25): SEQ ID NO: ; LYSAM_at; Start 285; Stop 309
ggtgtccattgccatatcggctcgc

SEQ ID NO: 10079 - DNA, 25 bp, Artificial
  probe
  misc_feature (1)..(25): SEQ ID NO: ; LYSAM_at; Start 37; Stop 61
gcttgagcaccgcatcggctgcatt

SEQ ID NO: 10080 - DNA, 25 bp, Artificial
  probe
  misc_feature (1)..(25): SEQ ID NO: ; LYSAM_at; Start 168; Stop 192
acgcatgactacattacaacgggcc

SEQ ID NO: 10081 - DNA, 25 bp, Artificial
  probe
  misc_feature (1)..(25): SEQ ID NO: ; LYSAM_at; Start 45; Stop 69
accgcatcggctgcattgtggtgga

SEQ ID NO: 10082 - DNA, 25 bp, Artificial
  probe
  misc_feature (1)..(25): SEQ ID NO: ; LYSAM_at; Start 36; Stop 60
cgcttgagcaccgcatcggctgcat

SEQ ID NO: 10083 - DNA, 25 bp, Artificial
  probe
  misc_feature (1)..(25): SEQ ID NO: ; LYSAM_at; Start 276; Stop 300
cagctgctgggtgtccattgccata

SEQ ID NO: 10084 - DNA, 25 bp, Artificial
  probe
  misc_feature (1)..(25): SEQ ID NO: ; LYSAM_at; Start 255; Stop 279
gtattacaatcggaacacattcagc

SEQ ID NO: 10085 - DNA, 25 bp, Artificial
  probe
  misc_feature (1)..(25): SEQ ID NO: ; LYSAM_at; Start 111; Stop 135
gaaacgggtcactccatcgatgttc

SEQ ID NO: 10086 - DNA, 25 bp, Artificial
  probe
  misc_feature (1)..(25): SEQ ID NO: ; LYSAM_at; Start 273; Stop 297
attcagctgctgggtgtccattgcc

SEQ ID NO: 10087 - DNA, 25 bp, Artificial
  probe
  misc_feature (1)..(25): SEQ ID NO: ; LYSAM_at; Start 297; Stop 321
catatcggctcgcaaatctttgata

SEQ ID NO: 10088 - DNA, 25 bp, Artificial
  probe
  misc_feature (1)..(25): SEQ ID NO: ; LYSAM_at; Start 291; Stop 315
cattgccatatcggctcgcaaatct

SEQ ID NO: 10089 - DNA, 25 bp, Artificial
  probe
  misc_feature (1)..(25): SEQ ID NO: ; LYSAM_at; Start 69; Stop 93
ataatttctatgaaatcgtcgcttc

SEQ ID NO: 10090 - DNA, 25 bp, Artificial
  probe
  misc_feature (1)..(25): SEQ ID NO: ; LYSAM_at; Start 171; Stop 195
catgactacattacaacgggccagg

SEQ ID NO: 10091 - DNA, 25 bp, Artificial
  probe
  misc_feature (1)..(25): SEQ ID NO: ; LYSAM_at; Start 72; Stop 96
atttctatgaaatcgtcgcttcttg

SEQ ID NO: 10092 - DNA, 25 bp, Artificial
  probe
  misc_feature (1)..(25): SEQ ID NO: ; LYSAM_at; Start 144; Stop 168
atcacgcccggagtagaagcgcata

SEQ ID NO: 10093 - DNA, 25 bp, Artificial
  probe
  misc_feature (1)..(25): SEQ ID NO: ; LYSAM_at; Start 49; Stop 73
catcggctgcattgtggtggataat

SEQ ID NO: 10094 - DNA, 25 bp, Artificial
  probe
  misc_feature (1)..(25): SEQ ID NO: ; LYSAM_at; Start 290; Stop 314
ccattgccatatcggctcgcaaatc

SEQ ID NO: 10095 - DNA, 25 bp, Artificial
  probe
  misc_feature (1)..(25): SEQ ID NO: ; LYSAM_at; Start 156; Stop 180
gtagaagcgcatacgcatgactaca

SEQ ID NO: 10096 - DNA, 25 bp, Artificial
  probe
  misc_feature (1)..(25): SEQ ID NO: ; LYSAM_at; Start 277; Stop 301
agctgctgggtgtccattgccatat

SEQ ID NO: 10097 - DNA, 25 bp, Artificial
  probe
  misc_feature (1)..(25): SEQ ID NO: ; LYSAM_at; Start 261; Stop 285
caatcggaacacattcagctgctgg

SEQ ID NO: 10098 - DNA, 25 bp, Artificial
  probe
  misc_feature (1)..(25): SEQ ID NO: ; LYSAM_at; Start 115; Stop 139
cgggtcactccatcgatgttcttct

SEQ ID NO: 10099 - DNA, 25 bp, Artificial
  probe
  misc_feature (1)..(25): SEQ ID NO: ; LYSAM_at; Start 303; Stop 327
ggctcgcaaatctttgatacggccg

SEQ ID NO: 10100 - DNA, 25 bp, Artificial
  probe
  misc_feature (1)..(25): SEQ ID NO: ; LYSAM_at; Start 288; Stop 312
gtccattgccatatcggctcgcaaa

SEQ ID NO: 10101 - DNA, 25 bp, Artificial
  probe
  misc_feature (1)..(25): SEQ ID NO: ; LYSAM_at; Start 216; Stop 240
gatcttcataacggacaaactgaac

SEQ ID NO: 10102 - DNA, 25 bp, Artificial
  probe
  misc_feature (1)..(25): SEQ ID NO: ; LYSAM_at; Start 78; Stop 102
atgaaatcgtcgcttcttgaagacc

SEQ ID NO: 10103 - DNA, 25 bp, Artificial
  probe
  misc_feature (1)..(25): SEQ ID NO: ; LYSAM_at; Start 123; Stop 147
tccatcgatgttcttcttcggatca

SEQ ID NO: 10104 - DNA, 25 bp, Artificial
  probe
  misc_feature (1)..(25): SEQ ID NO: ; LYSAM_at; Start 145; Stop 169
tcacgcccggagtagaagcgcatac

SEQ ID NO: 10105 - DNA, 25 bp, Artificial
  probe
  misc_feature (1)..(25): SEQ ID NO: ; LYSAM_at; Start 213; Stop 237
ttcgatcttcataacggacaaactg

SEQ ID NO: 10106 - DNA, 25 bp, Artificial
  probe
  misc_feature (1)..(25): SEQ ID NO: ; LYSAM_at; Start 141; Stop 165
cggatcacgcccggagtagaagcgc

SEQ ID NO: 10107 - DNA, 25 bp, Artificial
  probe
  misc_feature (1)..(25): SEQ ID NO: ; LYSAM_at; Start 117; Stop 141
ggtcactccatcgatgttcttcttc

SEQ ID NO: 10108 - DNA, 25 bp, Artificial
  probe
  misc_feature (1)..(25): SEQ ID NO: ; LYSAM_at; Start 263; Stop 287
atcggaacacattcagctgctgggt

SEQ ID NO: 10109 - DNA, 25 bp, Artificial
  probe
  misc_feature (1)..(25): SEQ ID NO: ; LYSAM_at; Start 164; Stop 188
gcatacgcatgactacattacaacg

SEQ ID NO: 10110 - DNA, 25 bp, Artificial
  probe
  misc_feature (1)..(25): SEQ ID NO: ; LYSAM_at; Start 84; Stop 108
tcgtcgcttcttgaagacctatgta

SEQ ID NO: 10111 - DNA, 25 bp, Artificial
  probe
  misc_feature (1)..(25): SEQ ID NO: ; LYSAM_at; Start 24; Stop 48
aactgcggatggcgcttgagcaccg

SEQ ID NO: 10112 - DNA, 25 bp, Artificial
  probe
  misc_feature (1)..(25): SEQ ID NO: 7773; PHE3_at; Start 360; Stop 384
gatgtattgattccaggggccatgc

SEQ ID NO: 10113 - DNA, 25 bp, Artificial
  probe
  misc_feature (1)..(25): SEQ ID NO: 7773; PHE3_at; Start 420; Stop 444
ctgggtgcataccagtcttaccaat

SEQ ID NO: 10114 - DNA, 25 bp, Artificial
  probe
  misc_feature (1)..(25): SEQ ID NO: 7773; PHE3_at; Start 216; Stop 240
caggatgatcagtccggggcgctgc

SEQ ID NO: 10115 - DNA, 25 bp, Artificial
  probe
  misc_feature (1)..(25): SEQ ID NO: 7773; PHE3_at; Start 27; Stop 51
aatatcggggtcattgccaatgata

SEQ ID NO: 10116 - DNA, 25 bp, Artificial
  probe
  misc_feature (1)..(25): SEQ ID NO: 7773; PHE3_at; Start 195; Stop 219
accttaatggtcatgctgccgcagg

SEQ ID NO: 10117 - DNA, 25 bp, Artificial
  probe
  misc_feature (1)..(25): SEQ ID NO: 7773; PHE3_at; Start 129; Stop 153
atcctgtctcccgatgaaaacatat

SEQ ID NO: 10118 - DNA, 25 bp, Artificial
  probe
  misc_feature (1)..(25): SEQ ID NO: 7773; PHE3_at; Start 376; Stop 400
gggccatgcaggagcttgaagcact

SEQ ID NO: 10119 - DNA, 25 bp, Artificial
  probe
  misc_feature (1)..(25): SEQ ID NO: 7773; PHE3_at; Start 192; Stop 216
acgaccttaatggtcatgctgccgc

SEQ ID NO: 10120 - DNA, 25 bp, Artificial
  probe
  misc_feature (1)..(25): SEQ ID NO: 7773; PHE3_at; Start 132; Stop 156
ctgtctcccgatgaaaacatatctt

SEQ ID NO: 10121 - DNA, 25 bp, Artificial
  probe
  misc_feature (1)..(25): SEQ ID NO: 7773; PHE3_at; Start 237; Stop 261
ctgcatagagtgctgtctgcatttt

SEQ ID NO: 10122 - DNA, 25 bp, Artificial
  probe
  misc_feature (1)..(25): SEQ ID NO: 7773; PHE3_at; Start 36; Stop 60
gtcattgccaatgatatggcagctt

SEQ ID NO: 10123 - DNA, 25 bp, Artificial
  probe
  misc_feature (1)..(25): SEQ ID NO: 7773; PHE3_at; Start 9; Stop 33
agtgaccatcccgagctgaatatcg

SEQ ID NO: 10124 - DNA, 25 bp, Artificial
  probe
  misc_feature (1)..(25): SEQ ID NO: 7773; PHE3_at; Start 204; Stop 228
gtcatgctgccgcaggatgatcagt

SEQ ID NO: 10125 - DNA, 25 bp, Artificial
  probe
  misc_feature (1)..(25): SEQ ID NO: 7773; PHE3_at; Start 51; Stop 75
atggcagcttctacatacgaattaa

SEQ ID NO: 10126 - DNA, 25 bp, Artificial
  probe
  misc_feature (1)..(25): SEQ ID NO: 7773; PHE3_at; Start 396; Stop 420
gcactcggctgcaaagtgaggcttc

SEQ ID NO: 10127 - DNA, 25 bp, Artificial
  probe
  misc_feature (1)..(25): SEQ ID NO: 7773; PHE3_at; Start 408; Stop 432
aaagtgaggcttctgggtgcatacc

SEQ ID NO: 10128 - DNA, 25 bp, Artificial
  probe
  misc_feature (1)..(25): SEQ ID NO: 7773; PHE3_at; Start 135; Stop 159
tctcccgatgaaaacatatcttttg

SEQ ID NO: 10129 - DNA, 25 bp, Artificial
  probe
  misc_feature (1)..(25): SEQ ID NO: 7773; PHE3_at; Start 24; Stop 48
ctgaatatcggggtcattgccaatg

SEQ ID NO: 10130 - DNA, 25 bp, Artificial
  probe
  misc_feature (1)..(25): SEQ ID NO: 7773; PHE3_at; Start 165; Stop 189
aattcaaaattgagctctaggccca

SEQ ID NO: 10131 - DNA, 25 bp, Artificial
  probe
  misc_feature (1)..(25): SEQ ID NO: 7773; PHE3_at; Start 213; Stop 237
ccgcaggatgatcagtccggggcgc

SEQ ID NO: 10132 - DNA, 25 bp, Artificial
  probe
  misc_feature (1)..(25): SEQ ID NO: 7773; PHE3_at; Start 411; Stop 435
gtgaggcttctgggtgcataccagt

SEQ ID NO: 10133 - DNA, 25 bp, Artificial
  probe
  misc_feature (1)..(25): SEQ ID NO: 7773; PHE3_at; Start 12; Stop 36
gaccatcccgagctgaatatcgggg

SEQ ID NO: 10134 - DNA, 25 bp, Artificial
  probe
  misc_feature (1)..(25): SEQ ID NO: 7773; PHE3_at; Start 252; Stop 276
tctgcattttcttggagaaatttaa

SEQ ID NO: 10135 - DNA, 25 bp, Artificial
  probe
  misc_feature (1)..(25): SEQ ID NO: 7773; PHE3_at; Start 228; Stop 252
tccggggcgctgcatagagtgctgt

SEQ ID NO: 10136 - DNA, 25 bp, Artificial
  probe
  misc_feature (1)..(25): SEQ ID NO: 7773; PHE3_at; Start 425; Stop 449
tgcataccagtcttaccaattataa

SEQ ID NO: 10137 - DNA, 25 bp, Artificial
  probe
  misc_feature (1)..(25): SEQ ID NO: 7773; PHE3_at; Start 249; Stop 273
ctgtctgcattttcttggagaaatt

SEQ ID NO: 10138 - DNA, 25 bp, Artificial
  probe
  misc_feature (1)..(25): SEQ ID NO: 7773; PHE3_at; Start 248; Stop 272
gctgtctgcattttcttggagaaat

SEQ ID NO: 10139 - DNA, 25 bp, Artificial
  probe
  misc_feature (1)..(25): SEQ ID NO: 7773; PHE3_at; Start 381; Stop 405
atgcaggagcttgaagcactcggct

SEQ ID NO: 10140 - DNA, 25 bp, Artificial
  probe
  misc_feature (1)..(25): SEQ ID NO: 7773; PHE3_at; Start 207; Stop 231
atgctgccgcaggatgatcagtccg

SEQ ID NO: 10141 - DNA, 25 bp, Artificial
  probe
  misc_feature (1)..(25): SEQ ID NO: 7773; PHE3_at; Start 45; Stop 69
aatgatatggcagcttctacatacg

SEQ ID NO: 10142 - DNA, 25 bp, Artificial
  probe
  misc_feature (1)..(25): SEQ ID NO: 7773; PHE3_at; Start 200; Stop 224
aatggtcatgctgccgcaggatgat

SEQ ID NO: 10143 - DNA, 25 bp, Artificial
  probe
  misc_feature (1)..(25): SEQ ID NO: 7773; PHE3_at; Start 168; Stop 192
tcaaaattgagctctaggcccaaaa

SEQ ID NO: 10144 - DNA, 25 bp, Artificial
  probe
  misc_feature (1)..(25): SEQ ID NO: 7773; PHE3_at; Start 15; Stop 39
catcccgagctgaatatcggggtca

SEQ ID NO: 10145 - DNA, 25 bp, Artificial
  probe
  misc_feature (1)..(25): SEQ ID NO: 7773; PHE3_at; Start 33; Stop 57
ggggtcattgccaatgatatggcag

SEQ ID NO: 10146 - DNA, 25 bp, Artificial
  probe
  misc_feature (1)..(25): SEQ ID NO: 7773; PHE3_at; Start 130; Stop 154
tcctgtctcccgatgaaaacatatc

SEQ ID NO: 10147 - DNA, 25 bp, Artificial
  probe
  misc_feature (1)..(25): SEQ ID NO: 7773; PHE3_at; Start 384; Stop 408
caggagcttgaagcactcggctgca

SEQ ID NO: 10148 - DNA, 25 bp, Artificial
  probe
  misc_feature (1)..(25): SEQ ID NO: 7773; PHE3_at; Start 225; Stop 249
cagtccggggcgctgcatagagtgc

SEQ ID NO: 10149 - DNA, 25 bp, Artificial
  probe
  misc_feature (1)..(25): SEQ ID NO: 7773; PHE3_at; Start 48; Stop 72
gatatggcagcttctacatacgaat

SEQ ID NO: 10150 - DNA, 25 bp, Artificial
  probe
  misc_feature (1)..(25): SEQ ID NO: 7773; PHE3_at; Start 219; Stop 243
gatgatcagtccggggcgctgcata

SEQ ID NO: 10151 - DNA, 25 bp, Artificial
  probe
  misc_feature (1)..(25): SEQ ID NO: 7773; PHE3_at; Start 405; Stop 429
tgcaaagtgaggcttctgggtgcat

SEQ ID NO: 10152 - DNA, 25 bp, Artificial
  probe
  misc_feature (1)..(25): SEQ ID NO: 7773; PHE3_at; Start 417; Stop 441
cttctgggtgcataccagtcttacc

SEQ ID NO: 10153 - DNA, 25 bp, Artificial
  probe
  misc_feature (1)..(25): SEQ ID NO: 7773; PHE3_at; Start 369; Stop 393
attccaggggccatgcaggagcttg

SEQ ID NO: 10154 - DNA, 25 bp, Artificial
  probe
  misc_feature (1)..(25): SEQ ID NO: 7773; PHE3_at; Start 375; Stop 399
ggggccatgcaggagcttgaagcac

SEQ ID NO: 10155 - DNA, 25 bp, Artificial
  probe
  misc_feature (1)..(25): SEQ ID NO: 7773; PHE3_at; Start 363; Stop 387
gtattgattccaggggccatgcagg

SEQ ID NO: 10156 - DNA, 25 bp, Artificial
  probe
  misc_feature (1)..(25): SEQ ID NO: 7773; PHE3_at; Start 50; Stop 74
tatggcagcttctacatacgaatta

SEQ ID NO: 10157 - DNA, 25 bp, Artificial
  probe
  misc_feature (1)..(25): SEQ ID NO: 7773; PHE3_at; Start 423; Stop 447
ggtgcataccagtcttaccaattat

SEQ ID NO: 10158 - DNA, 25 bp, Artificial
  probe
  misc_feature (1)..(25): SEQ ID NO: 7773; PHE3_at; Start 1; Stop 25
agtttgtcagtgaccatcccgagct

SEQ ID NO: 10159 - DNA, 25 bp, Artificial
  probe
  misc_feature (1)..(25): SEQ ID NO: 7773; PHE3_at; Start 393; Stop 417
gaagcactcggctgcaaagtgaggc

SEQ ID NO: 10160 - DNA, 25 bp, Artificial
  probe
  misc_feature (1)..(25): SEQ ID NO: 7773; PHE3_at; Start 25; Stop 49
tgaatatcggggtcattgccaatga

SEQ ID NO: 10161 - DNA, 25 bp, Artificial
  probe
  misc_feature (1)..(25): SEQ ID NO: 7773; PHE3_at; Start 401; Stop 425
cggctgcaaagtgaggcttctgggt

SEQ ID NO: 10162 - DNA, 25 bp, Artificial
  probe
  misc_feature (1)..(25): SEQ ID NO: 7774; PHE5_at; Start 99; Stop 123
agattcagtagcagatgccgttcaa

SEQ ID NO: 10163 - DNA, 25 bp, Artificial
  probe
  misc_feature (1)..(25): SEQ ID NO: 7774; PHE5_at; Start 303; Stop 327
gaccattccgcttcaaggcagagca

SEQ ID NO: 10164 - DNA, 25 bp, Artificial
  probe
  misc_feature (1)..(25): SEQ ID NO: 7774; PHE5_at; Start 309; Stop 333
tccgcttcaaggcagagcaaatgtg

SEQ ID NO: 10165 - DNA, 25 bp, Artificial
  probe
  misc_feature (1)..(25): SEQ ID NO: 7774; PHE5_at; Start 265; Stop 289
gtagctgattctggaagcaacgttc

SEQ ID NO: 10166 - DNA, 25 bp, Artificial
  probe
  misc_feature (1)..(25): SEQ ID NO: 7774; PHE5_at; Start 102; Stop 126
ttcagtagcagatgccgttcaaaag

SEQ ID NO: 10167 - DNA, 25 bp, Artificial
  probe
  misc_feature (1)..(25): SEQ ID NO: 7774; PHE5_at; Start 10; Stop 34
gagacattttatcttgtccgtgaag

SEQ ID NO: 10168 - DNA, 25 bp, Artificial
  probe
  misc_feature (1)..(25): SEQ ID NO: 7774; PHE5_at; Start 106; Stop 130
gtagcagatgccgttcaaaaggtcg

SEQ ID NO: 10169 - DNA, 25 bp, Artificial
  probe
  misc_feature (1)..(25): SEQ ID NO: 7774; PHE5_at; Start 162; Stop 186
ggatgctgtttttccattctacacc

SEQ ID NO: 10170 - DNA, 25 bp, Artificial
  probe
  misc_feature (1)..(25): SEQ ID NO: 7774; PHE5_at; Start 264; Stop 288
ggtagctgattctggaagcaacgtt

SEQ ID NO: 10171 - DNA, 25 bp, Artificial
  probe
  misc_feature (1)..(25): SEQ ID NO: 7774; PHE5_at; Start 261; Stop 285
ggcggtagctgattctggaagcaac

SEQ ID NO: 10172 - DNA, 25 bp, Artificial
  probe
  misc_feature (1)..(25): SEQ ID NO: 7774; PHE5_at; Start 339; Stop 363
gtctatcagtacgtcggcaatggaa

SEQ ID NO: 10173 - DNA, 25 bp, Artificial
  probe
  misc_feature (1)..(25): SEQ ID NO: 7774; PHE5_at; Start 300; Stop 324
ccagaccattccgcttcaaggcaga

SEQ ID NO: 10174 - DNA, 25 bp, Artificial
  probe
  misc_feature (1)..(25): SEQ ID NO: 7774; PHE5_at; Start 286; Stop 310
gttctttccattcaccagaccattc

SEQ ID NO: 10175 - DNA, 25 bp, Artificial
  probe
  misc_feature (1)..(25): SEQ ID NO: 7774; PHE5_at; Start 252; Stop 276
gcttcttcaggcggtagctgattct

SEQ ID NO: 10176 - DNA, 25 bp, Artificial
  probe
  misc_feature (1)..(25): SEQ ID NO: 7774; PHE5_at; Start 105; Stop 129
agtagcagatgccgttcaaaaggtc

SEQ ID NO: 10177 - DNA, 25 bp, Artificial
  probe
  misc_feature (1)..(25): SEQ ID NO: 7774; PHE5_at; Start 306; Stop 330
cattccgcttcaaggcagagcaaat

SEQ ID NO: 10178 - DNA, 25 bp, Artificial
  probe
  misc_feature (1)..(25): SEQ ID NO: 7774; PHE5_at; Start 255; Stop 279
tcttcaggcggtagctgattctgga

SEQ ID NO: 10179 - DNA, 25 bp, Artificial
  probe
  misc_feature (1)..(25): SEQ ID NO: 7774; PHE5_at; Start 302; Stop 326
agaccattccgcttcaaggcagagc

SEQ ID NO: 10180 - DNA, 25 bp, Artificial
  probe
  misc_feature (1)..(25): SEQ ID NO: 7774; PHE5_at; Start 36; Stop 60
tgtattgcccgatgcaatgagaaaa

SEQ ID NO: 10181 - DNA, 25 bp, Artificial
  probe
  misc_feature (1)..(25): SEQ ID NO: 7774; PHE5_at; Start 231; Stop 255
taggtcaggtgcgttatctcagctt

SEQ ID NO: 10182 - DNA, 25 bp, Artificial
  probe
  misc_feature (1)..(25): SEQ ID NO: 7774; PHE5_at; Start 345; Stop 369
cagtacgtcggcaatggaagaagac

SEQ ID NO: 10183 - DNA, 25 bp, Artificial
  probe
  misc_feature (1)..(25): SEQ ID NO: 7774; PHE5_at; Start 270; Stop 294
tgattctggaagcaacgttctttcc

SEQ ID NO: 10184 - DNA, 25 bp, Artificial
  probe
  misc_feature (1)..(25): SEQ ID NO: 7774; PHE5_at; Start 250; Stop 274
cagcttcttcaggcggtagctgatt

SEQ ID NO: 10185 - DNA, 25 bp, Artificial
  probe
  misc_feature (1)..(25): SEQ ID NO: 7774; PHE5_at; Start 297; Stop 321
tcaccagaccattccgcttcaaggc

SEQ ID NO: 10186 - DNA, 25 bp, Artificial
  probe
  misc_feature (1)..(25): SEQ ID NO: 7774; PHE5_at; Start 340; Stop 364
tctatcagtacgtcggcaatggaag

SEQ ID NO: 10187 - DNA, 25 bp, Artificial
  probe
  misc_feature (1)..(25): SEQ ID NO: 7774; PHE5_at; Start 217; Stop 241
tttcatttggaggataggtcaggtg

SEQ ID NO: 10188 - DNA, 25 bp, Artificial
  probe
  misc_feature (1)..(25): SEQ ID NO: 7774; PHE5_at; Start 237; Stop 261
aggtgcgttatctcagcttcttcag

SEQ ID NO: 10189 - DNA, 25 bp, Artificial
  probe
  misc_feature (1)..(25): SEQ ID NO: 7774; PHE5_at; Start 30; Stop 54
tgaagatgtattgcccgatgcaatg

SEQ ID NO: 10190 - DNA, 25 bp, Artificial
  probe
  misc_feature (1)..(25): SEQ ID NO: 7774; PHE5_at; Start 369; Stop 393
cattcatacattaatgaataagctc

SEQ ID NO: 10191 - DNA, 25 bp, Artificial
  probe
  misc_feature (1)..(25): SEQ ID NO: 7774; PHE5_at; Start 325; Stop 349
gcaaatgtgacactgtctatcagta

SEQ ID NO: 10192 - DNA, 25 bp, Artificial
  probe
  misc_feature (1)..(25): SEQ ID NO: 7774; PHE5_at; Start 12; Stop 36
gacattttatcttgtccgtgaagat

SEQ ID NO: 10193 - DNA, 25 bp, Artificial
  probe
  misc_feature (1)..(25): SEQ ID NO: 7774; PHE5_at; Start 15; Stop 39
attttatcttgtccgtgaagatgta

SEQ ID NO: 10194 - DNA, 25 bp, Artificial
  probe
  misc_feature (1)..(25): SEQ ID NO: 7774; PHE5_at; Start 236; Stop 260
caggtgcgttatctcagcttcttca

SEQ ID NO: 10195 - DNA, 25 bp, Artificial
  probe
  misc_feature (1)..(25): SEQ ID NO: 7774; PHE5_at; Start 156; Stop 180
atacagggatgctgtttttccattc

SEQ ID NO: 10196 - DNA, 25 bp, Artificial
  probe
  misc_feature (1)..(25): SEQ ID NO: 7774; PHE5_at; Start 336; Stop 360
actgtctatcagtacgtcggcaatg

SEQ ID NO: 10197 - DNA, 25 bp, Artificial
  probe
  misc_feature (1)..(25): SEQ ID NO: 7774; PHE5_at; Start 96; Stop 120
agcagattcagtagcagatgccgtt

SEQ ID NO: 10198 - DNA, 25 bp, Artificial
  probe
  misc_feature (1)..(25): SEQ ID NO: 7774; PHE5_at; Start 174; Stop 198
tccattctacaccatggtaaaagaa

SEQ ID NO: 10199 - DNA, 25 bp, Artificial
  probe
  misc_feature (1)..(25): SEQ ID NO: 7774; PHE5_at; Start 276; Stop 300
tggaagcaacgttctttccattcac

SEQ ID NO: 10200 - DNA, 25 bp, Artificial
  probe
  misc_feature (1)..(25): SEQ ID NO: 7774; PHE5_at; Start 234; Stop 258
gtcaggtgcgttatctcagcttctt

SEQ ID NO: 10201 - DNA, 25 bp, Artificial
  probe
  misc_feature (1)..(25): SEQ ID NO: 7774; PHE5_at; Start 267; Stop 291
agctgattctggaagcaacgttctt

SEQ ID NO: 10202 - DNA, 25 bp, Artificial
  probe
  misc_feature (1)..(25): SEQ ID NO: 7774; PHE5_at; Start 333; Stop 357
gacactgtctatcagtacgtcggca

SEQ ID NO: 10203 - DNA, 25 bp, Artificial
  probe
  misc_feature (1)..(25): SEQ ID NO: 7774; PHE5_at; Start 41; Stop 65
tgcccgatgcaatgagaaaaacatt

SEQ ID NO: 10204 - DNA, 25 bp, Artificial
  probe
  misc_feature (1)..(25): SEQ ID NO: 7774; PHE5_at; Start 22; Stop 46
cttgtccgtgaagatgtattgcccg

SEQ ID NO: 10205 - DNA, 25 bp, Artificial
  probe
  misc_feature (1)..(25): SEQ ID NO: 7774; PHE5_at; Start 249; Stop 273
tcagcttcttcaggcggtagctgat

SEQ ID NO: 10206 - DNA, 25 bp, Artificial
  probe
  misc_feature (1)..(25): SEQ ID NO: 7774; PHE5_at; Start 240; Stop 264
tgcgttatctcagcttcttcaggcg

SEQ ID NO: 10207 - DNA, 25 bp, Artificial
  probe
  misc_feature (1)..(25): SEQ ID NO: 7774; PHE5_at; Start 327; Stop 351
aaatgtgacactgtctatcagtacg

SEQ ID NO: 10208 - DNA, 25 bp, Artificial
  probe
  misc_feature (1)..(25): SEQ ID NO: 7774; PHE5_at; Start 165; Stop 189
tgctgtttttccattctacaccatg

SEQ ID NO: 10209 - DNA, 25 bp, Artificial
  probe
  misc_feature (1)..(25): SEQ ID NO: 7774; PHE5_at; Start 324; Stop 348
agcaaatgtgacactgtctatcagt

SEQ ID NO: 10210 - DNA, 25 bp, Artificial
  probe
  misc_feature (1)..(25): SEQ ID NO: 7774; PHE5_at; Start 342; Stop 366
tatcagtacgtcggcaatggaagaa

SEQ ID NO: 10211 - DNA, 25 bp, Artificial
  probe
  misc_feature (1)..(25): SEQ ID NO: 7774; PHE5_at; Start 246; Stop 270
atctcagcttcttcaggcggtagct

SEQ ID NO: 10212 - DNA, 25 bp, Artificial
  probe
  misc_feature (1)..(25): SEQ ID NO: 7775; PHEM_at; Start 375; Stop 399
gcgcaatgccataaatttcttcatc

SEQ ID NO: 10213 - DNA, 25 bp, Artificial
  probe
  misc_feature (1)..(25): SEQ ID NO: 7775; PHEM_at; Start 357; Stop 381
tcacattcacacgcgattgcgcaat

SEQ ID NO: 10214 - DNA, 25 bp, Artificial
  probe
  misc_feature (1)..(25): SEQ ID NO: 7775; PHEM_at; Start 8; Stop 32
atattaggttcaggtgcataaggga

SEQ ID NO: 10215 - DNA, 25 bp, Artificial
  probe
  misc_feature (1)..(25): SEQ ID NO: 7775; PHEM_at; Start 153; Stop 177
atagatgcagccgttgcaggcgaag

SEQ ID NO: 10216 - DNA, 25 bp, Artificial
  probe
  misc_feature (1)..(25): SEQ ID NO: 7775; PHEM_at; Start 290; Stop 314
gattcaccagcacttgctcgtccat

SEQ ID NO: 10217 - DNA, 25 bp, Artificial
  probe
  misc_feature (1)..(25): SEQ ID NO: 7775; PHEM_at; Start 285; Stop 309
ttgccgattcaccagcacttgctcg

SEQ ID NO: 10218 - DNA, 25 bp, Artificial
  probe
  misc_feature (1)..(25): SEQ ID NO: 7775; PHEM_at; Start 87; Stop 111
ctagcagtcagttcttgttttcaaa

SEQ ID NO: 10219 - DNA, 25 bp, Artificial
  probe
  misc_feature (1)..(25): SEQ ID NO: 7775; PHEM_at; Start 351; Stop 375
atttactcacattcacacgcgattg

SEQ ID NO: 10220 - DNA, 25 bp, Artificial
  probe
  misc_feature (1)..(25): SEQ ID NO: 7775; PHEM_at; Start 133; Stop 157
accgcaccattccggagtgtataga

SEQ ID NO: 10221 - DNA, 25 bp, Artificial
  probe
  misc_feature (1)..(25): SEQ ID NO: 7775; PHEM_at; Start 372; Stop 396
attgcgcaatgccataaatttcttc

SEQ ID NO: 10222 - DNA, 25 bp, Artificial
  probe
  misc_feature (1)..(25): SEQ ID NO: 7775; PHEM_at; Start 243; Stop 267
ttaatacatgaacagcctttgccaa

SEQ ID NO: 10223 - DNA, 25 bp, Artificial
  probe
  misc_feature (1)..(25): SEQ ID NO: 7775; PHEM_at; Start 60; Stop 84
ttaggtccagcagctacatttacac

SEQ ID NO: 10224 - DNA, 25 bp, Artificial
  probe
  misc_feature (1)..(25): SEQ ID NO: 7775; PHEM_at; Start 368; Stop 392
cgcgattgcgcaatgccataaattt

SEQ ID NO: 10225 - DNA, 25 bp, Artificial
  probe
  misc_feature (1)..(25): SEQ ID NO: 7775; PHEM_at; Start 129; Stop 153
gcttaccgcaccattccggagtgta

SEQ ID NO: 10226 - DNA, 25 bp, Artificial
  probe
  misc_feature (1)..(25): SEQ ID NO: 7775; PHEM_at; Start 117; Stop 141
gccgaacatgttgcttaccgcacca

SEQ ID NO: 10227 - DNA, 25 bp, Artificial
  probe
  misc_feature (1)..(25): SEQ ID NO: 7775; PHEM_at; Start 315; Stop 339
ccctcaagagagaatgcatggaaag

SEQ ID NO: 10228 - DNA, 25 bp, Artificial
  probe
  misc_feature (1)..(25): SEQ ID NO: 7775; PHEM_at; Start 84; Stop 108
catctagcagtcagttcttgttttc

SEQ ID NO: 10229 - DNA, 25 bp, Artificial
  probe
  misc_feature (1)..(25): SEQ ID NO: 7775; PHEM_at; Start 156; Stop 180
gatgcagccgttgcaggcgaagttg

SEQ ID NO: 10230 - DNA, 25 bp, Artificial
  probe
  misc_feature (1)..(25): SEQ ID NO: 7775; PHEM_at; Start 381; Stop 405
tgccataaatttcttcatcgacatt

SEQ ID NO: 10231 - DNA, 25 bp, Artificial
  probe
  misc_feature (1)..(25): SEQ ID NO: 7775; PHEM_at; Start 53; Stop 77
cggttatttaggtccagcagctaca

SEQ ID NO: 10232 - DNA, 25 bp, Artificial
  probe
  misc_feature (1)..(25): SEQ ID NO: 7775; PHEM_at; Start 81; Stop 105
acacatctagcagtcagttcttgtt

SEQ ID NO: 10233 - DNA, 25 bp, Artificial
  probe
  misc_feature (1)..(25): SEQ ID NO: 7775; PHEM_at; Start 279; Stop 303
atgacgttgccgattcaccagcact

SEQ ID NO: 10234 - DNA, 25 bp, Artificial
  probe
  misc_feature (1)..(25): SEQ ID NO: 7775; PHEM_at; Start 252; Stop 276
gaacagcctttgccaatcgtgggtg

SEQ ID NO: 10235 - DNA, 25 bp, Artificial
  probe
  misc_feature (1)..(25): SEQ ID NO: 7775; PHEM_at; Start 51; Stop 75
gtcggttatttaggtccagcagcta

SEQ ID NO: 10236 - DNA, 25 bp, Artificial
  probe
  misc_feature (1)..(25): SEQ ID NO: 7775; PHEM_at; Start 123; Stop 147
catgttgcttaccgcaccattccgg

SEQ ID NO: 10237 - DNA, 25 bp, Artificial
  probe
  misc_feature (1)..(25): SEQ ID NO: 7775; PHEM_at; Start 400; Stop 424
gacattttccttccgttccatatga

SEQ ID NO: 10238 - DNA, 25 bp, Artificial
  probe
  misc_feature (1)..(25): SEQ ID NO: 7775; PHEM_at; Start 275; Stop 299
tgaaatgacgttgccgattcaccag

SEQ ID NO: 10239 - DNA, 25 bp, Artificial
  probe
  misc_feature (1)..(25): SEQ ID NO: 7775; PHEM_at; Start 360; Stop 384
cattcacacgcgattgcgcaatgcc

SEQ ID NO: 10240 - DNA, 25 bp, Artificial
  probe
  misc_feature (1)..(25): SEQ ID NO: 7775; PHEM_at; Start 255; Stop 279
cagcctttgccaatcgtgggtgaaa

SEQ ID NO: 10241 - DNA, 25 bp, Artificial
  probe
  misc_feature (1)..(25): SEQ ID NO: 7775; PHEM_at; Start 63; Stop 87
ggtccagcagctacatttacacatc

SEQ ID NO: 10242 - DNA, 25 bp, Artificial
  probe
  misc_feature (1)..(25): SEQ ID NO: 7775; PHEM_at; Start 219; Stop 243
tctgttaatctaacaatagactatt

SEQ ID NO: 10243 - DNA, 25 bp, Artificial
  probe
  misc_feature (1)..(25): SEQ ID NO: 7775; PHEM_at; Start 150; Stop 174
tgtatagatgcagccgttgcaggcg

SEQ ID NO: 10244 - DNA, 25 bp, Artificial
  probe
  misc_feature (1)..(25): SEQ ID NO: 7775; PHEM_at; Start 120; Stop 144
gaacatgttgcttaccgcaccattc

SEQ ID NO: 10245 - DNA, 25 bp, Artificial
  probe
  misc_feature (1)..(25): SEQ ID NO: 7775; PHEM_at; Start 312; Stop 336
catccctcaagagagaatgcatgga

SEQ ID NO: 10246 - DNA, 25 bp, Artificial
  probe
  misc_feature (1)..(25): SEQ ID NO: 7775; PHEM_at; Start 384; Stop 408
cataaatttcttcatcgacattttc

SEQ ID NO: 10247 - DNA, 25 bp, Artificial
  probe
  misc_feature (1)..(25): SEQ ID NO: 7775; PHEM_at; Start 72; Stop 96
gctacatttacacatctagcagtca

SEQ ID NO: 10248 - DNA, 25 bp, Artificial
  probe
  misc_feature (1)..(25): SEQ ID NO: 7775; PHEM_at; Start 276; Stop 300
gaaatgacgttgccgattcaccagc

SEQ ID NO: 10249 - DNA, 25 bp, Artificial
  probe
  misc_feature (1)..(25): SEQ ID NO: 7775; PHEM_at; Start 67; Stop 91
cagcagctacatttacacatctagc

SEQ ID NO: 10250 - DNA, 25 bp, Artificial
  probe
  misc_feature (1)..(25): SEQ ID NO: 7775; PHEM_at; Start 75; Stop 99
acatttacacatctagcagtcagtt

SEQ ID NO: 10251 - DNA, 25 bp, Artificial
  probe
  misc_feature (1)..(25): SEQ ID NO: 7775; PHEM_at; Start 57; Stop 81
tatttaggtccagcagctacattta

SEQ ID NO: 10252 - DNA, 25 bp, Artificial
  probe
  misc_feature (1)..(25): SEQ ID NO: 7775; PHEM_at; Start 159; Stop 183
gcagccgttgcaggcgaagttgatt

SEQ ID NO: 10253 - DNA, 25 bp, Artificial
  probe
  misc_feature (1)..(25): SEQ ID NO: 7775; PHEM_at; Start 369; Stop 393
gcgattgcgcaatgccataaatttc

SEQ ID NO: 10254 - DNA, 25 bp, Artificial
  probe
  misc_feature (1)..(25): SEQ ID NO: 7775; PHEM_at; Start 80; Stop 104
tacacatctagcagtcagttcttgt

SEQ ID NO: 10255 - DNA, 25 bp, Artificial
  probe
  misc_feature (1)..(25): SEQ ID NO: 7775; PHEM_at; Start 303; Stop 327
ttgctcgtccatccctcaagagaga

SEQ ID NO: 10256 - DNA, 25 bp, Artificial
  probe
  misc_feature (1)..(25): SEQ ID NO: 7775; PHEM_at; Start 249; Stop 273
catgaacagcctttgccaatcgtgg

SEQ ID NO: 10257 - DNA, 25 bp, Artificial
  probe
  misc_feature (1)..(25): SEQ ID NO: 7775; PHEM_at; Start 354; Stop 378
tactcacattcacacgcgattgcgc

SEQ ID NO: 10258 - DNA, 25 bp, Artificial
  probe
  misc_feature (1)..(25): SEQ ID NO: 7775; PHEM_at; Start 204; Stop 228
aatgctttagaaggatctgttaatc

SEQ ID NO: 10259 - DNA, 25 bp, Artificial
  probe
  misc_feature (1)..(25): SEQ ID NO: 7775; PHEM_at; Start 363; Stop 387
tcacacgcgattgcgcaatgccata

SEQ ID NO: 10260 - DNA, 25 bp, Artificial
  probe
  misc_feature (1)..(25): SEQ ID NO: 7775; PHEM_at; Start 251; Stop 275
tgaacagcctttgccaatcgtgggt

SEQ ID NO: 10261 - DNA, 25 bp, Artificial
  probe
  misc_feature (1)..(25): SEQ ID NO: 7775; PHEM_at; Start 116; Stop 140
cgccgaacatgttgcttaccgcacc

SEQ ID NO: 10262 - DNA, 25 bp, Artificial
  probe
  misc_feature (1)..(25): SEQ ID NO: 7776; THR3_at; Start 435; Stop 459
tcagcggagcaggcccaacgattct

SEQ ID NO: 10263 - DNA, 25 bp, Artificial
  probe
  misc_feature (1)..(25): SEQ ID NO: 7776; THR3_at; Start 159; Stop 183
atgctgacattgacgtagtcgttgt

SEQ ID NO: 10264 - DNA, 25 bp, Artificial
  probe
  misc_feature (1)..(25): SEQ ID NO: 7776; THR3_at; Start 225; Stop 249
tgcttccgaaggagtttccatatgc

SEQ ID NO: 10265 - DNA, 25 bp, Artificial
  probe
  misc_feature (1)..(25): SEQ ID NO: 7776; THR3_at; Start 447; Stop 471
gcccaacgattctcgtcatgaccga

SEQ ID NO: 10266 - DNA, 25 bp, Artificial
  probe
  misc_feature (1)..(25): SEQ ID NO: 7776; THR3_at; Start 369; Stop 393
tgcttgtgcctgagctgtcaaaagt

SEQ ID NO: 10267 - DNA, 25 bp, Artificial
  probe
  misc_feature (1)..(25): SEQ ID NO: 7776; THR3_at; Start 279; Stop 303
atatcctcattgctgcgatcatgtc

SEQ ID NO: 10268 - DNA, 25 bp, Artificial
  probe
  misc_feature (1)..(25): SEQ ID NO: 7776; THR3_at; Start 429; Stop 453
cggctctcagcggagcaggcccaac

SEQ ID NO: 10269 - DNA, 25 bp, Artificial
  probe
  misc_feature (1)..(25): SEQ ID NO: 7776; THR3_at; Start 21; Stop 45
taaagctgtctgaagcggacaagct

SEQ ID NO: 10270 - DNA, 25 bp, Artificial
  probe
  misc_feature (1)..(25): SEQ ID NO: 7776; THR3_at; Start 569; Stop 593
gagcgaaatcctttatatcaagtaa

SEQ ID NO: 10271 - DNA, 25 bp, Artificial
  probe
  misc_feature (1)..(25): SEQ ID NO: 7776; THR3_at; Start 75; Stop 99
cggacaatgctggcgcttctctcgt

SEQ ID NO: 10272 - DNA, 25 bp, Artificial
  probe
  misc_feature (1)..(25): SEQ ID NO: 7776; THR3_at; Start 160; Stop 184
tgctgacattgacgtagtcgttgtc

SEQ ID NO: 10273 - DNA, 25 bp, Artificial
  probe
  misc_feature (1)..(25): SEQ ID NO: 7776; THR3_at; Start 449; Stop 473
ccaacgattctcgtcatgaccgaaa

SEQ ID NO: 10274 - DNA, 25 bp, Artificial
  probe
  misc_feature (1)..(25): SEQ ID NO: 7776; THR3_at; Start 87; Stop 111
gcgcttctctcgtcggcggacttgt

SEQ ID NO: 10275 - DNA, 25 bp, Artificial
  probe
  misc_feature (1)..(25): SEQ ID NO: 7776; THR3_at; Start 165; Stop 189
acattgacgtagtcgttgtcattcc

SEQ ID NO: 10276 - DNA, 25 bp, Artificial
  probe
  misc_feature (1)..(25): SEQ ID NO: 7776; THR3_at; Start 36; Stop 60
cggacaagctgcatttagcgagtct

SEQ ID NO: 10277 - DNA, 25 bp, Artificial
  probe
  misc_feature (1)..(25): SEQ ID NO: 7776; THR3_at; Start 237; Stop 261
agtttccatatgccgatgccgtaaa

SEQ ID NO: 10278 - DNA, 25 bp, Artificial
  probe
  misc_feature (1)..(25): SEQ ID NO: 7776; THR3_at; Start 291; Stop 315
ctgcgatcatgtccaaggattggcc

SEQ ID NO: 10279 - DNA, 25 bp, Artificial
  probe
  misc_feature (1)..(25): SEQ ID NO: 7776; THR3_at; Start 339; Stop 363
aggatatgttccatcagccgtaccg

SEQ ID NO: 10280 - DNA, 25 bp, Artificial
  probe
  misc_feature (1)..(25): SEQ ID NO: 7776; THR3_at; Start 351; Stop 375
atcagccgtaccgggcgatgcttgt

SEQ ID NO: 10281 - DNA, 25 bp, Artificial
  probe
  misc_feature (1)..(25): SEQ ID NO: 7776; THR3_at; Start 345; Stop 369
tgttccatcagccgtaccgggcgat

SEQ ID NO: 10282 - DNA, 25 bp, Artificial
  probe
  misc_feature (1)..(25): SEQ ID NO: 7776; THR3_at; Start 207; Stop 231
caagagacgcgagagacgtgcttcc

SEQ ID NO: 10283 - DNA, 25 bp, Artificial
  probe
  misc_feature (1)..(25): SEQ ID NO: 7776; THR3_at; Start 81; Stop 105
atgctggcgcttctctcgtcggcgg

SEQ ID NO: 10284 - DNA, 25 bp, Artificial
  probe
  misc_feature (1)..(25): SEQ ID NO: 7776; THR3_at; Start 9; Stop 33
aattatgcggcttaaagctgtctga

SEQ ID NO: 10285 - DNA, 25 bp, Artificial
  probe
  misc_feature (1)..(25): SEQ ID NO: 7776; THR3_at; Start 441; Stop 465
gagcaggcccaacgattctcgtcat

SEQ ID NO: 10286 - DNA, 25 bp, Artificial
  probe
  misc_feature (1)..(25): SEQ ID NO: 7776; THR3_at; Start 141; Stop 165
aaatgatccgcgtcccgaatgctga

SEQ ID NO: 10287 - DNA, 25 bp, Artificial
  probe
  misc_feature (1)..(25): SEQ ID NO: 7776; THR3_at; Start 267; Stop 291
gtgctgtcagcaatatcctcattgc

SEQ ID NO: 10288 - DNA, 25 bp, Artificial
  probe
  misc_feature (1)..(25): SEQ ID NO: 7776; THR3_at; Start 210; Stop 234
gagacgcgagagacgtgcttccgaa

SEQ ID NO: 10289 - DNA, 25 bp, Artificial
  probe
  misc_feature (1)..(25): SEQ ID NO: 7776; THR3_at; Start 501; Stop 525
agctcgcgcttcatttccctcattg

SEQ ID NO: 10290 - DNA, 25 bp, Artificial
  probe
  misc_feature (1)..(25): SEQ ID NO: 7776; THR3_at; Start 399; Stop 423
acgtcgccgagatgaagggcgcata

SEQ ID NO: 10291 - DNA, 25 bp, Artificial
  probe
  misc_feature (1)..(25): SEQ ID NO: 7776; THR3_at; Start 299; Stop 323
atgtccaaggattggccgcttgtcg

SEQ ID NO: 10292 - DNA, 25 bp, Artificial
  probe
  misc_feature (1)..(25): SEQ ID NO: 7776; THR3_at; Start 82; Stop 106
tgctggcgcttctctcgtcggcgga

SEQ ID NO: 10293 - DNA, 25 bp, Artificial
  probe
  misc_feature (1)..(25): SEQ ID NO: 7776; THR3_at; Start 261; Stop 285
aagcaagtgctgtcagcaatatcct

SEQ ID NO: 10294 - DNA, 25 bp, Artificial
  probe
  misc_feature (1)..(25): SEQ ID NO: 7776; THR3_at; Start 361; Stop 385
ccgggcgatgcttgtgcctgagctg

SEQ ID NO: 10295 - DNA, 25 bp, Artificial
  probe
  misc_feature (1)..(25): SEQ ID NO: 7776; THR3_at; Start 129; Stop 153
atgacgagacccaaatgatccgcgt

SEQ ID NO: 10296 - DNA, 25 bp, Artificial
  probe
  misc_feature (1)..(25): SEQ ID NO: 7776; THR3_at; Start 297; Stop 321
tcatgtccaaggattggccgcttgt

SEQ ID NO: 10297 - DNA, 25 bp, Artificial
  probe
  misc_feature (1)..(25): SEQ ID NO: 7776; THR3_at; Start 260; Stop 284
aaagcaagtgctgtcagcaatatcc

SEQ ID NO: 10298 - DNA, 25 bp, Artificial
  probe
  misc_feature (1)..(25): SEQ ID NO: 7776; THR3_at; Start 105; Stop 129
gacttgtgatcggcctgcatgagga

SEQ ID NO: 10299 - DNA, 25 bp, Artificial
  probe
  misc_feature (1)..(25): SEQ ID NO: 7776; THR3_at; Start 69; Stop 93
gacacccggacaatgctggcgcttc

SEQ ID NO: 10300 - DNA, 25 bp, Artificial
  probe
  misc_feature (1)..(25): SEQ ID NO: 7776; THR3_at; Start 115; Stop 139
cggcctgcatgaggatgacgagacc

SEQ ID NO: 10301 - DNA, 25 bp, Artificial
  probe
  misc_feature (1)..(25): SEQ ID NO: 7776; THR3_at; Start 111; Stop 135
tgatcggcctgcatgaggatgacga

SEQ ID NO: 10302 - DNA, 25 bp, Artificial
  probe
  misc_feature (1)..(25): SEQ ID NO: 7776; THR3_at; Start 147; Stop 171
tccgcgtcccgaatgctgacattga

SEQ ID NO: 10303 - DNA, 25 bp, Artificial
  probe
  misc_feature (1)..(25): SEQ ID NO: 7776; THR3_at; Start 507; Stop 531
cgcttcatttccctcattgtgaagt

SEQ ID NO: 10304 - DNA, 25 bp, Artificial
  probe
  misc_feature (1)..(25): SEQ ID NO: 7776; THR3_at; Start 285; Stop 309
tcattgctgcgatcatgtccaagga

SEQ ID NO: 10305 - DNA, 25 bp, Artificial
  probe
  misc_feature (1)..(25): SEQ ID NO: 7776; THR3_at; Start 99; Stop 123
tcggcggacttgtgatcggcctgca

SEQ ID NO: 10306 - DNA, 25 bp, Artificial
  probe
  misc_feature (1)..(25): SEQ ID NO: 7776; THR3_at; Start 6; Stop 30
atgaattatgcggcttaaagctgtc

SEQ ID NO: 10307 - DNA, 25 bp, Artificial
  probe
  misc_feature (1)..(25): SEQ ID NO: 7776; THR3_at; Start 411; Stop 435
tgaagggcgcatatggaacggctct

SEQ ID NO: 10308 - DNA, 25 bp, Artificial
  probe
  misc_feature (1)..(25): SEQ ID NO: 7776; THR3_at; Start 189; Stop 213
ctttttatgaagtgctgacaagaga

SEQ ID NO: 10309 - DNA, 25 bp, Artificial
  probe
  misc_feature (1)..(25): SEQ ID NO: 7776; THR3_at; Start 45; Stop 69
tgcatttagcgagtctagaagaagg

SEQ ID NO: 10310 - DNA, 25 bp, Artificial
  probe
  misc_feature (1)..(25): SEQ ID NO: 7776; THR3_at; Start 414; Stop 438
agggcgcatatggaacggctctcag

SEQ ID NO: 10311 - DNA, 25 bp, Artificial
  probe
  misc_feature (1)..(25): SEQ ID NO: 7776; THR3_at; Start 357; Stop 381
cgtaccgggcgatgcttgtgcctga

SEQ ID NO: 10312 - DNA, 25 bp, Artificial
  probe
  misc_feature (1)..(25): SEQ ID NO: 7777; THR5_at; Start 129; Stop 153
tgagcttcatgtcaaaacggaaggc

SEQ ID NO: 10313 - DNA, 25 bp, Artificial
  probe
  misc_feature (1)..(25): SEQ ID NO: 7777; THR5_at; Start 105; Stop 129
gaagctgtctgagcagctcggaatt

SEQ ID NO: 10314 - DNA, 25 bp, Artificial
  probe
  misc_feature (1)..(25): SEQ ID NO: 7777; THR5_at; Start 489; Stop 513
aactgctgccttcgaagtgtgcgaa

SEQ ID NO: 10315 - DNA, 25 bp, Artificial
  probe
  misc_feature (1)..(25): SEQ ID NO: 7777; THR5_at; Start 267; Stop 291
tgcggcagcatatgcagcccgtgct

SEQ ID NO: 10316 - DNA, 25 bp, Artificial
  probe
  misc_feature (1)..(25): SEQ ID NO: 7777; THR5_at; Start 297; Stop 321
gaaatgcattgtcatcatcccgaac

SEQ ID NO: 10317 - DNA, 25 bp, Artificial
  probe
  misc_feature (1)..(25): SEQ ID NO: 7777; THR5_at; Start 87; Stop 111
acctcttattcacctgccgaagctg

SEQ ID NO: 10318 - DNA, 25 bp, Artificial
  probe
  misc_feature (1)..(25): SEQ ID NO: 7777; THR5_at; Start 152; Stop 176
gcgtcaatcctacgggatcatttaa

SEQ ID NO: 10319 - DNA, 25 bp, Artificial
  probe
  misc_feature (1)..(25): SEQ ID NO: 7777; THR5_at; Start 555; Stop 579
aaatgctggaaacatcactgcgtac

SEQ ID NO: 10320 - DNA, 25 bp, Artificial
  probe
  misc_feature (1)..(25): SEQ ID NO: 7777; THR5_at; Start 237; Stop 261
gtgcgcgtcaacaggtaacacttcc

SEQ ID NO: 10321 - DNA, 25 bp, Artificial
  probe
  misc_feature (1)..(25): SEQ ID NO: 7777; THR5_at; Start 177; Stop 201
agatcgcggaatggttatggctgtg

SEQ ID NO: 10322 - DNA, 25 bp, Artificial
  probe
  misc_feature (1)..(25): SEQ ID NO: 7777; THR5_at; Start 488; Stop 512
aaactgctgccttcgaagtgtgcga

SEQ ID NO: 10323 - DNA, 25 bp, Artificial
  probe
  misc_feature (1)..(25): SEQ ID NO: 7777; THR5_at; Start 111; Stop 135
gtctgagcagctcggaattgagctt

SEQ ID NO: 10324 - DNA, 25 bp, Artificial
  probe
  misc_feature (1)..(25): SEQ ID NO: 7777; THR5_at; Start 253; Stop 277
aacacttccgctgctgcggcagcat

SEQ ID NO: 10325 - DNA, 25 bp, Artificial
  probe
  misc_feature (1)..(25): SEQ ID NO: 7777; THR5_at; Start 249; Stop 273
aggtaacacttccgctgctgcggca

SEQ ID NO: 10326 - DNA, 25 bp, Artificial
  probe
  misc_feature (1)..(25): SEQ ID NO: 7777; THR5_at; Start 147; Stop 171
ggaaggcgtcaatcctacgggatca

SEQ ID NO: 10327 - DNA, 25 bp, Artificial
  probe
  misc_feature (1)..(25): SEQ ID NO: 7777; THR5_at; Start 99; Stop 123
cctgccgaagctgtctgagcagctc

SEQ ID NO: 10328 - DNA, 25 bp, Artificial
  probe
  misc_feature (1)..(25): SEQ ID NO: 7777; THR5_at; Start 261; Stop 285
cgctgctgcggcagcatatgcagcc

SEQ ID NO: 10329 - DNA, 25 bp, Artificial
  probe
  misc_feature (1)..(25): SEQ ID NO: 7777; THR5_at; Start 694; Stop 718
gaaacaatagcgacagccattcgta

SEQ ID NO: 10330 - DNA, 25 bp, Artificial
  probe
  misc_feature (1)..(25): SEQ ID NO: 7777; THR5_at; Start 299; Stop 323
aatgcattgtcatcatcccgaacgg

SEQ ID NO: 10331 - DNA, 25 bp, Artificial
  probe
  misc_feature (1)..(25): SEQ ID NO: 7777; THR5_at; Start 654; Stop 678
tgcggcggcaatcgtgcgcaatgaa

SEQ ID NO: 10332 - DNA, 25 bp, Artificial
  probe
  misc_feature (1)..(25): SEQ ID NO: 7777; THR5_at; Start 234; Stop 258
tatgtgcgcgtcaacaggtaacact

SEQ ID NO: 10333 - DNA, 25 bp, Artificial
  probe
  misc_feature (1)..(25): SEQ ID NO: 7777; THR5_at; Start 255; Stop 279
cacttccgctgctgcggcagcatat

SEQ ID NO: 10334 - DNA, 25 bp, Artificial
  probe
  misc_feature (1)..(25): SEQ ID NO: 7777; THR5_at; Start 570; Stop 594
cactgcgtactggaagggcttcaag

SEQ ID NO: 10335 - DNA, 25 bp, Artificial
  probe
  misc_feature (1)..(25): SEQ ID NO: 7777; THR5_at; Start 345; Stop 369
cgctcaagctgtcatgtacggagcc

SEQ ID NO: 10336 - DNA, 25 bp, Artificial
  probe
  misc_feature (1)..(25): SEQ ID NO: 7777; THR5_at; Start 341; Stop 365
aactcgctcaagctgtcatgtacgg

SEQ ID NO: 10337 - DNA, 25 bp, Artificial
  probe
  misc_feature (1)..(25): SEQ ID NO: 7777; THR5_at; Start 417; Stop 441
ccgttccatctgtgagaaatcaccg

SEQ ID NO: 10338 - DNA, 25 bp, Artificial
  probe
  misc_feature (1)..(25): SEQ ID NO: 7777; THR5_at; Start 279; Stop 303
tgcagcccgtgctaacatgaaatgc

SEQ ID NO: 10339 - DNA, 25 bp, Artificial
  probe
  misc_feature (1)..(25): SEQ ID NO: 7777; THR5_at; Start 375; Stop 399
tatcgcaattgacggaaactttgac

SEQ ID NO: 10340 - DNA, 25 bp, Artificial
  probe
  misc_feature (1)..(25): SEQ ID NO: 7777; THR5_at; Start 73; Stop 97
catgaaggaaacacacctcttattc

SEQ ID NO: 10341 - DNA, 25 bp, Artificial
  probe
  misc_feature (1)..(25): SEQ ID NO: 7777; THR5_at; Start 407; Stop 431
ttaaaattgtccgttccatctgtga

SEQ ID NO: 10342 - DNA, 25 bp, Artificial
  probe
  misc_feature (1)..(25): SEQ ID NO: 7777; THR5_at; Start 191; Stop 215
ttatggctgtggcaaaggcaaaaga

SEQ ID NO: 10343 - DNA, 25 bp, Artificial
  probe
  misc_feature (1)..(25): SEQ ID NO: 7777; THR5_at; Start 94; Stop 118
attcacctgccgaagctgtctgagc

SEQ ID NO: 10344 - DNA, 25 bp, Artificial
  probe
  misc_feature (1)..(25): SEQ ID NO: 7777; THR5_at; Start 432; Stop 456
gaaatcaccgattgcccttgtcaac

SEQ ID NO: 10345 - DNA, 25 bp, Artificial
  probe
  misc_feature (1)..(25): SEQ ID NO: 7777; THR5_at; Start 225; Stop 249
tgacacgattatgtgcgcgtcaaca

SEQ ID NO: 10346 - DNA, 25 bp, Artificial
  probe
  misc_feature (1)..(25): SEQ ID NO: 7777; THR5_at; Start 135; Stop 159
tcatgtcaaaacggaaggcgtcaat

SEQ ID NO: 10347 - DNA, 25 bp, Artificial
  probe
  misc_feature (1)..(25): SEQ ID NO: 7777; THR5_at; Start 567; Stop 591
catcactgcgtactggaagggcttc

SEQ ID NO: 10348 - DNA, 25 bp, Artificial
  probe
  misc_feature (1)..(25): SEQ ID NO: 7777; THR5_at; Start 531; Stop 555
tgatgttttagcgatcccggtcgga

SEQ ID NO: 10349 - DNA, 25 bp, Artificial
  probe
  misc_feature (1)..(25): SEQ ID NO: 7777; THR5_at; Start 351; Stop 375
agctgtcatgtacggagccgagatt

SEQ ID NO: 10350 - DNA, 25 bp, Artificial
  probe
  misc_feature (1)..(25): SEQ ID NO: 7777; THR5_at; Start 441; Stop 465
gattgcccttgtcaactcagtcaac

SEQ ID NO: 10351 - DNA, 25 bp, Artificial
  probe
  misc_feature (1)..(25): SEQ ID NO: 7777; THR5_at; Start 360; Stop 384
gtacggagccgagattatcgcaatt

SEQ ID NO: 10352 - DNA, 25 bp, Artificial
  probe
  misc_feature (1)..(25): SEQ ID NO: 7777; THR5_at; Start 5; Stop 29
ggaaaggacttatccatcaatataa

SEQ ID NO: 10353 - DNA, 25 bp, Artificial
  probe
  misc_feature (1)..(25): SEQ ID NO: 7777; THR5_at; Start 435; Stop 459
atcaccgattgcccttgtcaactca

SEQ ID NO: 10354 - DNA, 25 bp, Artificial
  probe
  misc_feature (1)..(25): SEQ ID NO: 7777; THR5_at; Start 357; Stop 381
catgtacggagccgagattatcgca

SEQ ID NO: 10355 - DNA, 25 bp, Artificial
  probe
  misc_feature (1)..(25): SEQ ID NO: 7777; THR5_at; Start 272; Stop 296
cagcatatgcagcccgtgctaacat

SEQ ID NO: 10356 - DNA, 25 bp, Artificial
  probe
  misc_feature (1)..(25): SEQ ID NO: 7777; THR5_at; Start 657; Stop 681
ggcggcaatcgtgcgcaatgaagtg

SEQ ID NO: 10357 - DNA, 25 bp, Artificial
  probe
  misc_feature (1)..(25): SEQ ID NO: 7777; THR5_at; Start 429; Stop 453
tgagaaatcaccgattgcccttgtc

SEQ ID NO: 10358 - DNA, 25 bp, Artificial
  probe
  misc_feature (1)..(25): SEQ ID NO: 7777; THR5_at; Start 538; Stop 562
ttagcgatcccggtcggaaatgctg

SEQ ID NO: 10359 - DNA, 25 bp, Artificial
  probe
  misc_feature (1)..(25): SEQ ID NO: 7777; THR5_at; Start 615; Stop 639
cacaggccttccgaaaatgcgcggc

SEQ ID NO: 10360 - DNA, 25 bp, Artificial
  probe
  misc_feature (1)..(25): SEQ ID NO: 7777; THR5_at; Start 119; Stop 143
agctcggaattgagcttcatgtcaa

SEQ ID NO: 10361 - DNA, 25 bp, Artificial
  probe
  misc_feature (1)..(25): SEQ ID NO: 7777; THR5_at; Start 189; Stop 213
ggttatggctgtggcaaaggcaaaa

SEQ ID NO: 10362 - DNA, 25 bp, Artificial
  probe
  misc_feature (1)..(25): SEQ ID NO: 7778; THRM_at; Start 321; Stop 345
ccgacatgctgttctctgtcactgt

SEQ ID NO: 10363 - DNA, 25 bp, Artificial
  probe
  misc_feature (1)..(25): SEQ ID NO: 7778; THRM_at; Start 549; Stop 573
ctgtccatgtgaaggtgtggagcga

SEQ ID NO: 10364 - DNA, 25 bp, Artificial
  probe
  misc_feature (1)..(25): SEQ ID NO: 7778; THRM_at; Start 413; Stop 437
aagctgaccgtctttgaaagcgaca

SEQ ID NO: 10365 - DNA, 25 bp, Artificial
  probe
  misc_feature (1)..(25): SEQ ID NO: 7778; THRM_at; Start 580; Stop 604
gcttgcacgcggccttggcagcagc

SEQ ID NO: 10366 - DNA, 25 bp, Artificial
  probe
  misc_feature (1)..(25): SEQ ID NO: 7778; THRM_at; Start 546; Stop 570
ctcctgtccatgtgaaggtgtggag

SEQ ID NO: 10367 - DNA, 25 bp, Artificial
  probe
  misc_feature (1)..(25): SEQ ID NO: 7778; THRM_at; Start 489; Stop 513
ataacctgatctaccaagtggctaa

SEQ ID NO: 10368 - DNA, 25 bp, Artificial
  probe
  misc_feature (1)..(25): SEQ ID NO: 7778; THRM_at; Start 111; Stop 135
ggttcttgcgcgtctatcgcaggag

SEQ ID NO: 10369 - DNA, 25 bp, Artificial
  probe
  misc_feature (1)..(25): SEQ ID NO: 7778; THRM_at; Start 297; Stop 321
ggagcggcccgtgtatgaacgaagc

SEQ ID NO: 10370 - DNA, 25 bp, Artificial
  probe
  misc_feature (1)..(25): SEQ ID NO: 7778; THRM_at; Start 381; Stop 405
attcagtcggaatggcgctcagcag

SEQ ID NO: 10371 - DNA, 25 bp, Artificial
  probe
  misc_feature (1)..(25): SEQ ID NO: 7778; THRM_at; Start 387; Stop 411
tcggaatggcgctcagcagatattt

SEQ ID NO: 10372 - DNA, 25 bp, Artificial
  probe
  misc_feature (1)..(25): SEQ ID NO: 7778; THRM_at; Start 382; Stop 406
ttcagtcggaatggcgctcagcaga

SEQ ID NO: 10373 - DNA, 25 bp, Artificial
  probe
  misc_feature (1)..(25): SEQ ID NO: 7778; THRM_at; Start 495; Stop 519
tgatctaccaagtggctaaacggac

SEQ ID NO: 10374 - DNA, 25 bp, Artificial
  probe
  misc_feature (1)..(25): SEQ ID NO: 7778; THRM_at; Start 1; Stop 25
ctgtaaaggcagccgaggaatccaa

SEQ ID NO: 10375 - DNA, 25 bp, Artificial
  probe
  misc_feature (1)..(25): SEQ ID NO: 7778; THRM_at; Start 304; Stop 328
cccgtgtatgaacgaagccgacatg

SEQ ID NO: 10376 - DNA, 25 bp, Artificial
  probe
  misc_feature (1)..(25): SEQ ID NO: 7778; THRM_at; Start 81; Stop 105
gcccgtgtagaaggcgtgtttgcag

SEQ ID NO: 10377 - DNA, 25 bp, Artificial
  probe
  misc_feature (1)..(25): SEQ ID NO: 7778; THRM_at; Start 331; Stop 355
gttctctgtcactgttcccggaagc

SEQ ID NO: 10378 - DNA, 25 bp, Artificial
  probe
  misc_feature (1)..(25): SEQ ID NO: 7778; THRM_at; Start 237; Stop 261
tcagaaatcaagcctgtcacattgc

SEQ ID NO: 10379 - DNA, 25 bp, Artificial
  probe
  misc_feature (1)..(25): SEQ ID NO: 7778; THRM_at; Start 117; Stop 141
tgcgcgtctatcgcaggagtgctga

SEQ ID NO: 10380 - DNA, 25 bp, Artificial
  probe
  misc_feature (1)..(25): SEQ ID NO: 7778; THRM_at; Start 339; Stop 363
tcactgttcccggaagcacagctaa

SEQ ID NO: 10381 - DNA, 25 bp, Artificial
  probe
  misc_feature (1)..(25): SEQ ID NO: 7778; THRM_at; Start 255; Stop 279
acattgccgactgatgaagacagca

SEQ ID NO: 10382 - DNA, 25 bp, Artificial
  probe
  misc_feature (1)..(25): SEQ ID NO: 7778; THRM_at; Start 579; Stop 603
cgcttgcacgcggccttggcagcag

SEQ ID NO: 10383 - DNA, 25 bp, Artificial
  probe
  misc_feature (1)..(25): SEQ ID NO: 7778; THRM_at; Start 71; Stop 95
tcagctgatcgcccgtgtagaaggc

SEQ ID NO: 10384 - DNA, 25 bp, Artificial
  probe
  misc_feature (1)..(25): SEQ ID NO: 7778; THRM_at; Start 465; Stop 489
cagtcgccggaattcgcggtacaga

SEQ ID NO: 10385 - DNA, 25 bp, Artificial
  probe
  misc_feature (1)..(25): SEQ ID NO: 7778; THRM_at; Start 561; Stop 585
aggtgtggagcgacatcccgcttgc

SEQ ID NO: 10386 - DNA, 25 bp, Artificial
  probe
  misc_feature (1)..(25): SEQ ID NO: 7778; THRM_at; Start 105; Stop 129
gaaccaggttcttgcgcgtctatcg

SEQ ID NO: 10387 - DNA, 25 bp, Artificial
  probe
  misc_feature (1)..(25): SEQ ID NO: 7778; THRM_at; Start 206; Stop 230
actgaaagatccgaacacagcggtc

SEQ ID NO: 10388 - DNA, 25 bp, Artificial
  probe
  misc_feature (1)..(25): SEQ ID NO: 7778; THRM_at; Start 393; Stop 417
tggcgctcagcagatatttgaagct

SEQ ID NO: 10389 - DNA, 25 bp, Artificial
  probe
  misc_feature (1)..(25): SEQ ID NO: 7778; THRM_at; Start 327; Stop 351
tgctgttctctgtcactgttcccgg

SEQ ID NO: 10390 - DNA, 25 bp, Artificial
  probe
  misc_feature (1)..(25): SEQ ID NO: 7778; THRM_at; Start 51; Stop 75
gatgaaatccttcacgcatatcagc

SEQ ID NO: 10391 - DNA, 25 bp, Artificial
  probe
  misc_feature (1)..(25): SEQ ID NO: 7778; THRM_at; Start 123; Stop 147
tctatcgcaggagtgctgaaacagg

SEQ ID NO: 10392 - DNA, 25 bp, Artificial
  probe
  misc_feature (1)..(25): SEQ ID NO: 7778; THRM_at; Start 483; Stop 507
gtacagataacctgatctaccaagt

SEQ ID NO: 10393 - DNA, 25 bp, Artificial
  probe
  misc_feature (1)..(25): SEQ ID NO: 7778; THRM_at; Start 249; Stop 273
cctgtcacattgccgactgatgaag

SEQ ID NO: 10394 - DNA, 25 bp, Artificial
  probe
  misc_feature (1)..(25): SEQ ID NO: 7778; THRM_at; Start 225; Stop 249
gcggtcgacatttcagaaatcaagc

SEQ ID NO: 10395 - DNA, 25 bp, Artificial
  probe
  misc_feature (1)..(25): SEQ ID NO: 7778; THRM_at; Start 411; Stop 435
tgaagctgaccgtctttgaaagcga

SEQ ID NO: 10396 - DNA, 25 bp, Artificial
  probe
  misc_feature (1)..(25): SEQ ID NO: 7778; THRM_at; Start 315; Stop 339
acgaagccgacatgctgttctctgt

SEQ ID NO: 10397 - DNA, 25 bp, Artificial
  probe
  misc_feature (1)..(25): SEQ ID NO: 7778; THRM_at; Start 121; Stop 145
cgtctatcgcaggagtgctgaaaca

SEQ ID NO: 10398 - DNA, 25 bp, Artificial
  probe
  misc_feature (1)..(25): SEQ ID NO: 7778; THRM_at; Start 405; Stop 429
gatatttgaagctgaccgtctttga

SEQ ID NO: 10399 - DNA, 25 bp, Artificial
  probe
  misc_feature (1)..(25): SEQ ID NO: 7778; THRM_at; Start 99; Stop 123
tttgcagaaccaggttcttgcgcgt

SEQ ID NO: 10400 - DNA, 25 bp, Artificial
  probe
  misc_feature (1)..(25): SEQ ID NO: 7778; THRM_at; Start 213; Stop 237
gatccgaacacagcggtcgacattt

SEQ ID NO: 10401 - DNA, 25 bp, Artificial
  probe
  misc_feature (1)..(25): SEQ ID NO: 7778; THRM_at; Start 267; Stop 291
gatgaagacagcatccttgaatatg

SEQ ID NO: 10402 - DNA, 25 bp, Artificial
  probe
  misc_feature (1)..(25): SEQ ID NO: 7778; THRM_at; Start 477; Stop 501
ttcgcggtacagataacctgatcta

SEQ ID NO: 10403 - DNA, 25 bp, Artificial
  probe
  misc_feature (1)..(25): SEQ ID NO: 7778; THRM_at; Start 254; Stop 278
cacattgccgactgatgaagacagc

SEQ ID NO: 10404 - DNA, 25 bp, Artificial
  probe
  misc_feature (1)..(25): SEQ ID NO: 7778; THRM_at; Start 273; Stop 297
gacagcatccttgaatatgtaaaag

SEQ ID NO: 10405 - DNA, 25 bp, Artificial
  probe
  misc_feature (1)..(25): SEQ ID NO: 7778; THRM_at; Start 417; Stop 441
tgaccgtctttgaaagcgacaaatg

SEQ ID NO: 10406 - DNA, 25 bp, Artificial
  probe
  misc_feature (1)..(25): SEQ ID NO: 7778; THRM_at; Start 309; Stop 333
gtatgaacgaagccgacatgctgtt

SEQ ID NO: 10407 - DNA, 25 bp, Artificial
  probe
  misc_feature (1)..(25): SEQ ID NO: 7778; THRM_at; Start 233; Stop 257
catttcagaaatcaagcctgtcaca

SEQ ID NO: 10408 - DNA, 25 bp, Artificial
  probe
  misc_feature (1)..(25): SEQ ID NO: 7778; THRM_at; Start 333; Stop 357
tctctgtcactgttcccggaagcac

SEQ ID NO: 10409 - DNA, 25 bp, Artificial
  probe
  misc_feature (1)..(25): SEQ ID NO: 7778; THRM_at; Start 219; Stop 243
aacacagcggtcgacatttcagaaa

SEQ ID NO: 10410 - DNA, 25 bp, Artificial
  probe
  misc_feature (1)..(25): SEQ ID NO: 7778; THRM_at; Start 171; Stop 195
ggcagcaaggtcgtagctgtgttaa

SEQ ID NO: 10411 - DNA, 25 bp, Artificial
  probe
  misc_feature (1)..(25): SEQ ID NO: 7778; THRM_at; Start 69; Stop 93
tatcagctgatcgcccgtgtagaag

SEQ ID NO: 10412 - DNA, 25 bp, Artificial
  probe
  misc_feature (1)..(25): SEQ ID NO: 7779; TRP3_at; Start 492; Stop 516
tgattgattcatctgtaaaagggtc

SEQ ID NO: 10413 - DNA, 25 bp, Artificial
  probe
  misc_feature (1)..(25): SEQ ID NO: 7779; TRP3_at; Start 27; Stop 51
gcgagctgtacttatcggtgaatca

SEQ ID NO: 10414 - DNA, 25 bp, Artificial
  probe
  misc_feature (1)..(25): SEQ ID NO: 7779; TRP3_at; Start 531; Stop 555
gtgttgcattttcttgggaatgtgt

SEQ ID NO: 10415 - DNA, 25 bp, Artificial
  probe
  misc_feature (1)..(25): SEQ ID NO: 7779; TRP3_at; Start 550; Stop 574
atgtgtgccggaatatcagcaggcg

SEQ ID NO: 10416 - DNA, 25 bp, Artificial
  probe
  misc_feature (1)..(25): SEQ ID NO: 7779; TRP3_at; Start 165; Stop 189
ttgcggcggaatcacaggctgatta

SEQ ID NO: 10417 - DNA, 25 bp, Artificial
  probe
  misc_feature (1)..(25): SEQ ID NO: 7779; TRP3_at; Start 350; Stop 374
attcagcttcacggtgatgaaaaac

SEQ ID NO: 10418 - DNA, 25 bp, Artificial
  probe
  misc_feature (1)..(25): SEQ ID NO: 7779; TRP3_at; Start 151; Stop 175
aaaggatttgcagcttgcggcggaa

SEQ ID NO: 10419 - DNA, 25 bp, Artificial
  probe
  misc_feature (1)..(25): SEQ ID NO: 7779; TRP3_at; Start 339; Stop 363
agctcgacgtcattcagcttcacgg

SEQ ID NO: 10420 - DNA, 25 bp, Artificial
  probe
  misc_feature (1)..(25): SEQ ID NO: 7779; TRP3_at; Start 396; Stop 420
gcaagctgacaggctgtgaaatatg

SEQ ID NO: 10421 - DNA, 25 bp, Artificial
  probe
  misc_feature (1)..(25): SEQ ID NO: 7779; TRP3_at; Start 324; Stop 348
ttgccaagagcttgaagctcgacgt

SEQ ID NO: 10422 - DNA, 25 bp, Artificial
  probe
  misc_feature (1)..(25): SEQ ID NO: 7779; TRP3_at; Start 384; Stop 408
ctgctgctcttcgcaagctgacagg

SEQ ID NO: 10423 - DNA, 25 bp, Artificial
  probe
  misc_feature (1)..(25): SEQ ID NO: 7779; TRP3_at; Start 566; Stop 590
cagcaggcggctattggtaaacgct

SEQ ID NO: 10424 - DNA, 25 bp, Artificial
  probe
  misc_feature (1)..(25): SEQ ID NO: 7779; TRP3_at; Start 315; Stop 339
tgtcacgtattgccaagagcttgaa

SEQ ID NO: 10425 - DNA, 25 bp, Artificial
  probe
  misc_feature (1)..(25): SEQ ID NO: 7779; TRP3_at; Start 552; Stop 576
gtgtgccggaatatcagcaggcggc

SEQ ID NO: 10426 - DNA, 25 bp, Artificial
  probe
  misc_feature (1)..(25): SEQ ID NO: 7779; TRP3_at; Start 399; Stop 423
agctgacaggctgtgaaatatggaa

SEQ ID NO: 10427 - DNA, 25 bp, Artificial
  probe
  misc_feature (1)..(25): SEQ ID NO: 7779; TRP3_at; Start 417; Stop 441
tatggaaggcgcttcaccatcaaga

SEQ ID NO: 10428 - DNA, 25 bp, Artificial
  probe
  misc_feature (1)..(25): SEQ ID NO: 7779; TRP3_at; Start 375; Stop 399
cggcggatgctgctgctcttcgcaa

SEQ ID NO: 10429 - DNA, 25 bp, Artificial
  probe
  misc_feature (1)..(25): SEQ ID NO: 7779; TRP3_at; Start 425; Stop 449
gcgcttcaccatcaagataacacaa

SEQ ID NO: 10430 - DNA, 25 bp, Artificial
  probe
  misc_feature (1)..(25): SEQ ID NO: 7779; TRP3_at; Start 351; Stop 375
ttcagcttcacggtgatgaaaaacc

SEQ ID NO: 10431 - DNA, 25 bp, Artificial
  probe
  misc_feature (1)..(25): SEQ ID NO: 7779; TRP3_at; Start 477; Stop 501
atgttgacggctttgtgattgattc

SEQ ID NO: 10432 - DNA, 25 bp, Artificial
  probe
  misc_feature (1)..(25): SEQ ID NO: 7779; TRP3_at; Start 345; Stop 369
acgtcattcagcttcacggtgatga

SEQ ID NO: 10433 - DNA, 25 bp, Artificial
  probe
  misc_feature (1)..(25): SEQ ID NO: 7779; TRP3_at; Start 381; Stop 405
atgctgctgctcttcgcaagctgac

SEQ ID NO: 10434 - DNA, 25 bp, Artificial
  probe
  misc_feature (1)..(25): SEQ ID NO: 7779; TRP3_at; Start 372; Stop 396
aaccggcggatgctgctgctcttcg

SEQ ID NO: 10435 - DNA, 25 bp, Artificial
  probe
  misc_feature (1)..(25): SEQ ID NO: 7779; TRP3_at; Start 177; Stop 201
cacaggctgattacctaggatttat

SEQ ID NO: 10436 - DNA, 25 bp, Artificial
  probe
  misc_feature (1)..(25): SEQ ID NO: 7779; TRP3_at; Start 77; Stop 101
aagcaatccatgctttgtttaggga

SEQ ID NO: 10437 - DNA, 25 bp, Artificial
  probe
  misc_feature (1)..(25): SEQ ID NO: 7779; TRP3_at; Start 420; Stop 444
ggaaggcgcttcaccatcaagataa

SEQ ID NO: 10438 - DNA, 25 bp, Artificial
  probe
  misc_feature (1)..(25): SEQ ID NO: 7779; TRP3_at; Start 555; Stop 579
tgccggaatatcagcaggcggctat

SEQ ID NO: 10439 - DNA, 25 bp, Artificial
  probe
  misc_feature (1)..(25): SEQ ID NO: 7779; TRP3_at; Start 312; Stop 336
cgatgtcacgtattgccaagagctt

SEQ ID NO: 10440 - DNA, 25 bp, Artificial
  probe
  misc_feature (1)..(25): SEQ ID NO: 7779; TRP3_at; Start 81; Stop 105
aatccatgctttgtttagggagtga

SEQ ID NO: 10441 - DNA, 25 bp, Artificial
  probe
  misc_feature (1)..(25): SEQ ID NO: 7779; TRP3_at; Start 380; Stop 404
gatgctgctgctcttcgcaagctga

SEQ ID NO: 10442 - DNA, 25 bp, Artificial
  probe
  misc_feature (1)..(25): SEQ ID NO: 7779; TRP3_at; Start 395; Stop 419
cgcaagctgacaggctgtgaaatat

SEQ ID NO: 10443 - DNA, 25 bp, Artificial
  probe
  misc_feature (1)..(25): SEQ ID NO: 7779; TRP3_at; Start 248; Stop 272
tggctgaaccaagttcgtgtcgaaa

SEQ ID NO: 10444 - DNA, 25 bp, Artificial
  probe
  misc_feature (1)..(25): SEQ ID NO: 7779; TRP3_at; Start 1; Stop 25
ttaacatttgtcaatgaacatgggg

SEQ ID NO: 10445 - DNA, 25 bp, Artificial
  probe
  misc_feature (1)..(25): SEQ ID NO: 7779; TRP3_at; Start 475; Stop 499
taatgttgacggctttgtgattgat

SEQ ID NO: 10446 - DNA, 25 bp, Artificial
  probe
  misc_feature (1)..(25): SEQ ID NO: 7779; TRP3_at; Start 567; Stop 591
agcaggcggctattggtaaacgctg

SEQ ID NO: 10447 - DNA, 25 bp, Artificial
  probe
  misc_feature (1)..(25): SEQ ID NO: 7779; TRP3_at; Start 36; Stop 60
acttatcggtgaatcattgatgaga

SEQ ID NO: 10448 - DNA, 25 bp, Artificial
  probe
  misc_feature (1)..(25): SEQ ID NO: 7779; TRP3_at; Start 540; Stop 564
tttcttgggaatgtgtgccggaata

SEQ ID NO: 10449 - DNA, 25 bp, Artificial
  probe
  misc_feature (1)..(25): SEQ ID NO: 7779; TRP3_at; Start 166; Stop 190
tgcggcggaatcacaggctgattac

SEQ ID NO: 10450 - DNA, 25 bp, Artificial
  probe
  misc_feature (1)..(25): SEQ ID NO: 7779; TRP3_at; Start 156; Stop 180
atttgcagcttgcggcggaatcaca

SEQ ID NO: 10451 - DNA, 25 bp, Artificial
  probe
  misc_feature (1)..(25): SEQ ID NO: 7779; TRP3_at; Start 319; Stop 343
acgtattgccaagagcttgaagctc

SEQ ID NO: 10452 - DNA, 25 bp, Artificial
  probe
  misc_feature (1)..(25): SEQ ID NO: 7779; TRP3_at; Start 564; Stop 588
atcagcaggcggctattggtaaacg

SEQ ID NO: 10453 - DNA, 25 bp, Artificial
  probe
  misc_feature (1)..(25): SEQ ID NO: 7779; TRP3_at; Start 61; Stop 85
caaacttctcagcgtaaagcaatcc

SEQ ID NO: 10454 - DNA, 25 bp, Artificial
  probe
  misc_feature (1)..(25): SEQ ID NO: 7779; TRP3_at; Start 334; Stop 358
cttgaagctcgacgtcattcagctt

SEQ ID NO: 10455 - DNA, 25 bp, Artificial
  probe
  misc_feature (1)..(25): SEQ ID NO: 7779; TRP3_at; Start 33; Stop 57
tgtacttatcggtgaatcattgatg

SEQ ID NO: 10456 - DNA, 25 bp, Artificial
  probe
  misc_feature (1)..(25): SEQ ID NO: 7779; TRP3_at; Start 496; Stop 520
tgattcatctgtaaaagggtctaga

SEQ ID NO: 10457 - DNA, 25 bp, Artificial
  probe
  misc_feature (1)..(25): SEQ ID NO: 7779; TRP3_at; Start 549; Stop 573
aatgtgtgccggaatatcagcaggc

SEQ ID NO: 10458 - DNA, 25 bp, Artificial
  probe
  misc_feature (1)..(25): SEQ ID NO: 7779; TRP3_at; Start 561; Stop 585
aatatcagcaggcggctattggtaa

SEQ ID NO: 10459 - DNA, 25 bp, Artificial
  probe
  misc_feature (1)..(25): SEQ ID NO: 7779; TRP3_at; Start 309; Stop 333
agacgatgtcacgtattgccaagag

SEQ ID NO: 10460 - DNA, 25 bp, Artificial
  probe
  misc_feature (1)..(25): SEQ ID NO: 7779; TRP3_at; Start 387; Stop 411
ctgctcttcgcaagctgacaggctg

SEQ ID NO: 10461 - DNA, 25 bp, Artificial
  probe
  misc_feature (1)..(25): SEQ ID NO: 7779; TRP3_at; Start 321; Stop 345
gtattgccaagagcttgaagctcga

SEQ ID NO: 10462 - DNA, 25 bp, Artificial
  probe
  misc_feature (1)..(25): SEQ ID NO: 7780; TRP5_at; Start 357; Stop 381
gatattgtcaattcttgctcatcgg

SEQ ID NO: 10463 - DNA, 25 bp, Artificial
  probe
  misc_feature (1)..(25): SEQ ID NO: 7780; TRP5_at; Start 166; Stop 190
gctgtaataaagccggtgcgctgct

SEQ ID NO: 10464 - DNA, 25 bp, Artificial
  probe
  misc_feature (1)..(25): SEQ ID NO: 7780; TRP5_at; Start 249; Stop 273
cagatttctacaattgtgcgttgac

SEQ ID NO: 10465 - DNA, 25 bp, Artificial
  probe
  misc_feature (1)..(25): SEQ ID NO: 7780; TRP5_at; Start 506; Stop 530
atatctcaacggcctcggcaattgt

SEQ ID NO: 10466 - DNA, 25 bp, Artificial
  probe
  misc_feature (1)..(25): SEQ ID NO: 7780; TRP5_at; Start 111; Stop 135
caggcaggtgctggcattgttgctg

SEQ ID NO: 10467 - DNA, 25 bp, Artificial
  probe
  misc_feature (1)..(25): SEQ ID NO: 7780; TRP5_at; Start 285; Stop 309
tactgccggtgaggctgaaacgctg

SEQ ID NO: 10468 - DNA, 25 bp, Artificial
  probe
  misc_feature (1)..(25): SEQ ID NO: 7780; TRP5_at; Start 573; Stop 597
ctctgtctcttctaaaagcggaagc

SEQ ID NO: 10469 - DNA, 25 bp, Artificial
  probe
  misc_feature (1)..(25): SEQ ID NO: 7780; TRP5_at; Start 327; Stop 351
agcggaaatgactccttctgaaatg

SEQ ID NO: 10470 - DNA, 25 bp, Artificial
  probe
  misc_feature (1)..(25): SEQ ID NO: 7780; TRP5_at; Start 91; Stop 115
agaacggtgttgcatcgatacaggc

SEQ ID NO: 10471 - DNA, 25 bp, Artificial
  probe
  misc_feature (1)..(25): SEQ ID NO: 7780; TRP5_at; Start 93; Stop 117
aacggtgttgcatcgatacaggcag

SEQ ID NO: 10472 - DNA, 25 bp, Artificial
  probe
  misc_feature (1)..(25): SEQ ID NO: 7780; TRP5_at; Start 555; Stop 579
cgctaagcatggcaatcgctctgtc

SEQ ID NO: 10473 - DNA, 25 bp, Artificial
  probe
  misc_feature (1)..(25): SEQ ID NO: 7780; TRP5_at; Start 561; Stop 585
gcatggcaatcgctctgtctcttct

SEQ ID NO: 10474 - DNA, 25 bp, Artificial
  probe
  misc_feature (1)..(25): SEQ ID NO: 7780; TRP5_at; Start 450; Stop 474
acttcctgatattgttgatacatgc

SEQ ID NO: 10475 - DNA, 25 bp, Artificial
  probe
  misc_feature (1)..(25): SEQ ID NO: 7780; TRP5_at; Start 507; Stop 531
tatctcaacggcctcggcaattgtt

SEQ ID NO: 10476 - DNA, 25 bp, Artificial
  probe
  misc_feature (1)..(25): SEQ ID NO: 7780; TRP5_at; Start 283; Stop 307
cttactgccggtgaggctgaaacgc

SEQ ID NO: 10477 - DNA, 25 bp, Artificial
  probe
  misc_feature (1)..(25): SEQ ID NO: 7780; TRP5_at; Start 106; Stop 130
cgatacaggcaggtgctggcattgt

SEQ ID NO: 10478 - DNA, 25 bp, Artificial
  probe
  misc_feature (1)..(25): SEQ ID NO: 7780; TRP5_at; Start 318; Stop 342
gatgatggcagcggaaatgactcct

SEQ ID NO: 10479 - DNA, 25 bp, Artificial
  probe
  misc_feature (1)..(25): SEQ ID NO: 7780; TRP5_at; Start 22; Stop 46
ggtgtattgcctacattgggtttga

SEQ ID NO: 10480 - DNA, 25 bp, Artificial
  probe
  misc_feature (1)..(25): SEQ ID NO: 7780; TRP5_at; Start 539; Stop 563
cagctggtgcgaaaatcgctaagca

SEQ ID NO: 10481 - DNA, 25 bp, Artificial
  probe
  misc_feature (1)..(25): SEQ ID NO: 7780; TRP5_at; Start 419; Stop 443
caatgcgggcacacgctcttacagt

SEQ ID NO: 10482 - DNA, 25 bp, Artificial
  probe
  misc_feature (1)..(25): SEQ ID NO: 7780; TRP5_at; Start 417; Stop 441
ggcaatgcgggcacacgctcttaca

SEQ ID NO: 10483 - DNA, 25 bp, Artificial
  probe
  misc_feature (1)..(25): SEQ ID NO: 7780; TRP5_at; Start 447; Stop 471
tggacttcctgatattgttgataca

SEQ ID NO: 10484 - DNA, 25 bp, Artificial
  probe
  misc_feature (1)..(25): SEQ ID NO: 7780; TRP5_at; Start 523; Stop 547
gcaattgttgcctcggcagctggtg

SEQ ID NO: 10485 - DNA, 25 bp, Artificial
  probe
  misc_feature (1)..(25): SEQ ID NO: 7780; TRP5_at; Start 217; Stop 241
tgtttcatagcaaggaggataaagc

SEQ ID NO: 10486 - DNA, 25 bp, Artificial
  probe
  misc_feature (1)..(25): SEQ ID NO: 7780; TRP5_at; Start 182; Stop 206
tgcgctgctgaaaacgattcatatt

SEQ ID NO: 10487 - DNA, 25 bp, Artificial
  probe
  misc_feature (1)..(25): SEQ ID NO: 7780; TRP5_at; Start 177; Stop 201
gccggtgcgctgctgaaaacgattc

SEQ ID NO: 10488 - DNA, 25 bp, Artificial
  probe
  misc_feature (1)..(25): SEQ ID NO: 7780; TRP5_at; Start 562; Stop 586
catggcaatcgctctgtctcttcta

SEQ ID NO: 10489 - DNA, 25 bp, Artificial
  probe
  misc_feature (1)..(25): SEQ ID NO: 7780; TRP5_at; Start 576; Stop 600
tgtctcttctaaaagcggaagcgct

SEQ ID NO: 10490 - DNA, 25 bp, Artificial
  probe
  misc_feature (1)..(25): SEQ ID NO: 7780; TRP5_at; Start 435; Stop 459
tcttacagtcgatggacttcctgat

SEQ ID NO: 10491 - DNA, 25 bp, Artificial
  probe
  misc_feature (1)..(25): SEQ ID NO: 7780; TRP5_at; Start 99; Stop 123
gttgcatcgatacaggcaggtgctg

SEQ ID NO: 10492 - DNA, 25 bp, Artificial
  probe
  misc_feature (1)..(25): SEQ ID NO: 7780; TRP5_at; Start 213; Stop 237
gacatgtttcatagcaaggaggata

SEQ ID NO: 10493 - DNA, 25 bp, Artificial
  probe
  misc_feature (1)..(25): SEQ ID NO: 7780; TRP5_at; Start 434; Stop 458
ctcttacagtcgatggacttcctga

SEQ ID NO: 10494 - DNA, 25 bp, Artificial
  probe
  misc_feature (1)..(25): SEQ ID NO: 7780; TRP5_at; Start 567; Stop 591
caatcgctctgtctcttctaaaagc

SEQ ID NO: 10495 - DNA, 25 bp, Artificial
  probe
  misc_feature (1)..(25): SEQ ID NO: 7780; TRP5_at; Start 315; Stop 339
tatgatgatggcagcggaaatgact

SEQ ID NO: 10496 - DNA, 25 bp, Artificial
  probe
  misc_feature (1)..(25): SEQ ID NO: 7780; TRP5_at; Start 255; Stop 279
tctacaattgtgcgttgacggaaaa

SEQ ID NO: 10497 - DNA, 25 bp, Artificial
  probe
  misc_feature (1)..(25): SEQ ID NO: 7780; TRP5_at; Start 129; Stop 153
gttgctgattctgttccggaagccg

SEQ ID NO: 10498 - DNA, 25 bp, Artificial
  probe
  misc_feature (1)..(25): SEQ ID NO: 7780; TRP5_at; Start 441; Stop 465
agtcgatggacttcctgatattgtt

SEQ ID NO: 10499 - DNA, 25 bp, Artificial
  probe
  misc_feature (1)..(25): SEQ ID NO: 7780; TRP5_at; Start 429; Stop 453
acacgctcttacagtcgatggactt

SEQ ID NO: 10500 - DNA, 25 bp, Artificial
  probe
  misc_feature (1)..(25): SEQ ID NO: 7780; TRP5_at; Start 63; Stop 87
tgtattacgattcgcacgatgagtg

SEQ ID NO: 10501 - DNA, 25 bp, Artificial
  probe
  misc_feature (1)..(25): SEQ ID NO: 7780; TRP5_at; Start 51; Stop 75
aatatcgactcttgtattacgattc

SEQ ID NO: 10502 - DNA, 25 bp, Artificial
  probe
  misc_feature (1)..(25): SEQ ID NO: 7780; TRP5_at; Start 121; Stop 145
ctggcattgttgctgattctgttcc

SEQ ID NO: 10503 - DNA, 25 bp, Artificial
  probe
  misc_feature (1)..(25): SEQ ID NO: 7780; TRP5_at; Start 423; Stop 447
gcgggcacacgctcttacagtcgat

SEQ ID NO: 10504 - DNA, 25 bp, Artificial
  probe
  misc_feature (1)..(25): SEQ ID NO: 7780; TRP5_at; Start 69; Stop 93
acgattcgcacgatgagtgtaaaga

SEQ ID NO: 10505 - DNA, 25 bp, Artificial
  probe
  misc_feature (1)..(25): SEQ ID NO: 7780; TRP5_at; Start 519; Stop 543
ctcggcaattgttgcctcggcagct

SEQ ID NO: 10506 - DNA, 25 bp, Artificial
  probe
  misc_feature (1)..(25): SEQ ID NO: 7780; TRP5_at; Start 399; Stop 423
gcttgcgggttttgtgaaggcaatg

SEQ ID NO: 10507 - DNA, 25 bp, Artificial
  probe
  misc_feature (1)..(25): SEQ ID NO: 7780; TRP5_at; Start 531; Stop 555
tgcctcggcagctggtgcgaaaatc

SEQ ID NO: 10508 - DNA, 25 bp, Artificial
  probe
  misc_feature (1)..(25): SEQ ID NO: 7780; TRP5_at; Start 59; Stop 83
ctcttgtattacgattcgcacgatg

SEQ ID NO: 10509 - DNA, 25 bp, Artificial
  probe
  misc_feature (1)..(25): SEQ ID NO: 7780; TRP5_at; Start 525; Stop 549
aattgttgcctcggcagctggtgcg

SEQ ID NO: 10510 - DNA, 25 bp, Artificial
  probe
  misc_feature (1)..(25): SEQ ID NO: 7780; TRP5_at; Start 57; Stop 81
gactcttgtattacgattcgcacga

SEQ ID NO: 10511 - DNA, 25 bp, Artificial
  probe
  misc_feature (1)..(25): SEQ ID NO: 7780; TRP5_at; Start 117; Stop 141
ggtgctggcattgttgctgattctg

SEQ ID NO: 10512 - DNA, 25 bp, Artificial
  probe
  misc_feature (1)..(25): SEQ ID NO: 7781; TRPM_at; Start 72; Stop 96
atttacaggtgcagtcaccgaaaga

SEQ ID NO: 10513 - DNA, 25 bp, Artificial
  probe
  misc_feature (1)..(25): SEQ ID NO: 7781; TRPM_at; Start 501; Stop 525
atagactatgaggctgcgaaggcag

SEQ ID NO: 10514 - DNA, 25 bp, Artificial
  probe
  misc_feature (1)..(25): SEQ ID NO: 7781; TRPM_at; Start 240; Stop 264
cgattacaagcggaggcgctgccgc

SEQ ID NO: 10515 - DNA, 25 bp, Artificial
  probe
  misc_feature (1)..(25): SEQ ID NO: 7781; TRPM_at; Start 99; Stop 123
gcgcctatctcattcagaatatttt

SEQ ID NO: 10516 - DNA, 25 bp, Artificial
  probe
  misc_feature (1)..(25): SEQ ID NO: 7781; TRPM_at; Start 417; Stop 441
tttatcgggttgattgccgaagtga

SEQ ID NO: 10517 - DNA, 25 bp, Artificial
  probe
  misc_feature (1)..(25): SEQ ID NO: 7781; TRPM_at; Start 157; Stop 181
tacggcttttaatgcgggagctgcg

SEQ ID NO: 10518 - DNA, 25 bp, Artificial
  probe
  misc_feature (1)..(25): SEQ ID NO: 7781; TRPM_at; Start 97; Stop 121
gagcgcctatctcattcagaatatt

SEQ ID NO: 10519 - DNA, 25 bp, Artificial
  probe
  misc_feature (1)..(25): SEQ ID NO: 7781; TRPM_at; Start 38; Stop 62
gaagatttcggtttcacaaatggca

SEQ ID NO: 10520 - DNA, 25 bp, Artificial
  probe
  misc_feature (1)..(25): SEQ ID NO: 7781; TRPM_at; Start 81; Stop 105
tgcagtcaccgaaagagagcgccta

SEQ ID NO: 10521 - DNA, 25 bp, Artificial
  probe
  misc_feature (1)..(25): SEQ ID NO: 7781; TRPM_at; Start 502; Stop 526
tagactatgaggctgcgaaggcaga

SEQ ID NO: 10522 - DNA, 25 bp, Artificial
  probe
  misc_feature (1)..(25): SEQ ID NO: 7781; TRPM_at; Start 427; Stop 451
tgattgccgaagtgaagaaagcatc

SEQ ID NO: 10523 - DNA, 25 bp, Artificial
  probe
  misc_feature (1)..(25): SEQ ID NO: 7781; TRPM_at; Start 86; Stop 110
tcaccgaaagagagcgcctatctca

SEQ ID NO: 10524 - DNA, 25 bp, Artificial
  probe
  misc_feature (1)..(25): SEQ ID NO: 7781; TRPM_at; Start 523; Stop 547
cagatgcgatttccgttttaacaga

SEQ ID NO: 10525 - DNA, 25 bp, Artificial
  probe
  misc_feature (1)..(25): SEQ ID NO: 7781; TRPM_at; Start 345; Stop 369
acactggttttgccggtagagcagc

SEQ ID NO: 10526 - DNA, 25 bp, Artificial
  probe
  misc_feature (1)..(25): SEQ ID NO: 7781; TRPM_at; Start 484; Stop 508
tgcctgtgcagattgcaatagacta

SEQ ID NO: 10527 - DNA, 25 bp, Artificial
  probe
  misc_feature (1)..(25): SEQ ID NO: 7781; TRPM_at; Start 525; Stop 549
gatgcgatttccgttttaacagaca

SEQ ID NO: 10528 - DNA, 25 bp, Artificial
  probe
  misc_feature (1)..(25): SEQ ID NO: 7781; TRPM_at; Start 69; Stop 93
aagatttacaggtgcagtcaccgaa

SEQ ID NO: 10529 - DNA, 25 bp, Artificial
  probe
  misc_feature (1)..(25): SEQ ID NO: 7781; TRPM_at; Start 362; Stop 386
agagcagcctttcgagaaacgttca

SEQ ID NO: 10530 - DNA, 25 bp, Artificial
  probe
  misc_feature (1)..(25): SEQ ID NO: 7781; TRPM_at; Start 84; Stop 108
agtcaccgaaagagagcgcctatct

SEQ ID NO: 10531 - DNA, 25 bp, Artificial
  probe
  misc_feature (1)..(25): SEQ ID NO: 7781; TRPM_at; Start 254; Stop 278
ggcgctgccgcgcagcttgaacgac

SEQ ID NO: 10532 - DNA, 25 bp, Artificial
  probe
  misc_feature (1)..(25): SEQ ID NO: 7781; TRPM_at; Start 477; Stop 501
gattttgtgcctgtgcagattgcaa

SEQ ID NO: 10533 - DNA, 25 bp, Artificial
  probe
  misc_feature (1)..(25): SEQ ID NO: 7781; TRPM_at; Start 387; Stop 411
tttaaggaggcgctggcaagcccga

SEQ ID NO: 10534 - DNA, 25 bp, Artificial
  probe
  misc_feature (1)..(25): SEQ ID NO: 7781; TRPM_at; Start 419; Stop 443
tatcgggttgattgccgaagtgaag

SEQ ID NO: 10535 - DNA, 25 bp, Artificial
  probe
  misc_feature (1)..(25): SEQ ID NO: 7781; TRPM_at; Start 45; Stop 69
tcggtttcacaaatggcagacttga

SEQ ID NO: 10536 - DNA, 25 bp, Artificial
  probe
  misc_feature (1)..(25): SEQ ID NO: 7781; TRPM_at; Start 252; Stop 276
gaggcgctgccgcgcagcttgaacg

SEQ ID NO: 10537 - DNA, 25 bp, Artificial
  probe
  misc_feature (1)..(25): SEQ ID NO: 7781; TRPM_at; Start 78; Stop 102
aggtgcagtcaccgaaagagagcgc

SEQ ID NO: 10538 - DNA, 25 bp, Artificial
  probe
  misc_feature (1)..(25): SEQ ID NO: 7781; TRPM_at; Start 242; Stop 266
attacaagcggaggcgctgccgcgc

SEQ ID NO: 10539 - DNA, 25 bp, Artificial
  probe
  misc_feature (1)..(25): SEQ ID NO: 7781; TRPM_at; Start 261; Stop 285
ccgcgcagcttgaacgactaaagca

SEQ ID NO: 10540 - DNA, 25 bp, Artificial
  probe
  misc_feature (1)..(25): SEQ ID NO: 7781; TRPM_at; Start 346; Stop 370
cactggttttgccggtagagcagcc

SEQ ID NO: 10541 - DNA, 25 bp, Artificial
  probe
  misc_feature (1)..(25): SEQ ID NO: 7781; TRPM_at; Start 263; Stop 287
gcgcagcttgaacgactaaagcaga

SEQ ID NO: 10542 - DNA, 25 bp, Artificial
  probe
  misc_feature (1)..(25): SEQ ID NO: 7781; TRPM_at; Start 165; Stop 189
ttaatgcgggagctgcgatttacac

SEQ ID NO: 10543 - DNA, 25 bp, Artificial
  probe
  misc_feature (1)..(25): SEQ ID NO: 7781; TRPM_at; Start 504; Stop 528
gactatgaggctgcgaaggcagatg

SEQ ID NO: 10544 - DNA, 25 bp, Artificial
  probe
  misc_feature (1)..(25): SEQ ID NO: 7781; TRPM_at; Start 509; Stop 533
tgaggctgcgaaggcagatgcgatt

SEQ ID NO: 10545 - DNA, 25 bp, Artificial
  probe
  misc_feature (1)..(25): SEQ ID NO: 7781; TRPM_at; Start 174; Stop 198
gagctgcgatttacacggcgggaat

SEQ ID NO: 10546 - DNA, 25 bp, Artificial
  probe
  misc_feature (1)..(25): SEQ ID NO: 7781; TRPM_at; Start 224; Stop 248
gagctggcgttagagacgattacaa

SEQ ID NO: 10547 - DNA, 25 bp, Artificial
  probe
  misc_feature (1)..(25): SEQ ID NO: 7781; TRPM_at; Start 237; Stop 261
agacgattacaagcggaggcgctgc

SEQ ID NO: 10548 - DNA, 25 bp, Artificial
  probe
  misc_feature (1)..(25): SEQ ID NO: 7781; TRPM_at; Start 255; Stop 279
gcgctgccgcgcagcttgaacgact

SEQ ID NO: 10549 - DNA, 25 bp, Artificial
  probe
  misc_feature (1)..(25): SEQ ID NO: 7781; TRPM_at; Start 164; Stop 188
tttaatgcgggagctgcgatttaca

SEQ ID NO: 10550 - DNA, 25 bp, Artificial
  probe
  misc_feature (1)..(25): SEQ ID NO: 7781; TRPM_at; Start 384; Stop 408
tcatttaaggaggcgctggcaagcc

SEQ ID NO: 10551 - DNA, 25 bp, Artificial
  probe
  misc_feature (1)..(25): SEQ ID NO: 7781; TRPM_at; Start 48; Stop 72
gtttcacaaatggcagacttgaaga

SEQ ID NO: 10552 - DNA, 25 bp, Artificial
  probe
  misc_feature (1)..(25): SEQ ID NO: 7781; TRPM_at; Start 132; Stop 156
aaagcagcagttccgctttatctat

SEQ ID NO: 10553 - DNA, 25 bp, Artificial
  probe
  misc_feature (1)..(25): SEQ ID NO: 7781; TRPM_at; Start 476; Stop 500
ggattttgtgcctgtgcagattgca

SEQ ID NO: 10554 - DNA, 25 bp, Artificial
  probe
  misc_feature (1)..(25): SEQ ID NO: 7781; TRPM_at; Start 381; Stop 405
cgttcatttaaggaggcgctggcaa

SEQ ID NO: 10555 - DNA, 25 bp, Artificial
  probe
  misc_feature (1)..(25): SEQ ID NO: 7781; TRPM_at; Start 135; Stop 159
gcagcagttccgctttatctattac

SEQ ID NO: 10556 - DNA, 25 bp, Artificial
  probe
  misc_feature (1)..(25): SEQ ID NO: 7781; TRPM_at; Start 156; Stop 180
ttacggcttttaatgcgggagctgc

SEQ ID NO: 10557 - DNA, 25 bp, Artificial
  probe
  misc_feature (1)..(25): SEQ ID NO: 7781; TRPM_at; Start 447; Stop 471
gcatcgccgtcaaaagggcttatta

SEQ ID NO: 10558 - DNA, 25 bp, Artificial
  probe
  misc_feature (1)..(25): SEQ ID NO: 7781; TRPM_at; Start 70; Stop 94
agatttacaggtgcagtcaccgaaa

SEQ ID NO: 10559 - DNA, 25 bp, Artificial
  probe
  misc_feature (1)..(25): SEQ ID NO: 7781; TRPM_at; Start 87; Stop 111
caccgaaagagagcgcctatctcat

SEQ ID NO: 10560 - DNA, 25 bp, Artificial
  probe
  misc_feature (1)..(25): SEQ ID NO: 7781; TRPM_at; Start 480; Stop 504
tttgtgcctgtgcagattgcaatag

SEQ ID NO: 10561 - DNA, 25 bp, Artificial
  probe
  misc_feature (1)..(25): SEQ ID NO: 7781; TRPM_at; Start 396; Stop 420
gcgctggcaagcccgaatcggttta

SEQ ID NO: 10562 - DNA, 25 bp, Artificial
  probe
  misc_feature (1)..(25): SEQ ID NO: 7738; WAN02472B_at; Start 46; Stop 70
cctttttgtgccatgtttgctcctc

SEQ ID NO: 10563 - DNA, 25 bp, Artificial
  probe
  misc_feature (1)..(25): SEQ ID NO: 7738; WAN02472B_at; Start 13; Stop 37
tctgtatcaaatgctgccttgataa

SEQ ID NO: 10564 - DNA, 25 bp, Artificial
  probe
  misc_feature (1)..(25): SEQ ID NO: 7738; WAN02472B_at; Start 24; Stop 48
tgctgccttgataaggcttactcct

SEQ ID NO: 10565 - DNA, 25 bp, Artificial
  probe
  misc_feature (1)..(25): SEQ ID NO: 7738; WAN02472B_at; Start 11; Stop 35
tatctgtatcaaatgctgccttgat

SEQ ID NO: 10566 - DNA, 25 bp, Artificial
  probe
  misc_feature (1)..(25): SEQ ID NO: 7738; WAN02472B_at; Start 7; Stop 31
aagttatctgtatcaaatgctgcct

SEQ ID NO: 10567 - DNA, 25 bp, Artificial
  probe
  misc_feature (1)..(25): SEQ ID NO: 7738; WAN02472B_at; Start 53; Stop 77
gtgccatgtttgctcctccatcatt

SEQ ID NO: 10568 - DNA, 25 bp, Artificial
  probe
  misc_feature (1)..(25): SEQ ID NO: 7738; WAN02472B_at; Start 16; Stop 40
gtatcaaatgctgccttgataaggc

SEQ ID NO: 10569 - DNA, 25 bp, Artificial
  probe
  misc_feature (1)..(25): SEQ ID NO: 7738; WAN02472B_at; Start 18; Stop 42
atcaaatgctgccttgataaggctt

SEQ ID NO: 10570 - DNA, 25 bp, Artificial
  probe
  misc_feature (1)..(25): SEQ ID NO: 7738; WAN02472B_at; Start 41; Stop 65
ttactcctttttgtgccatgtttgc

SEQ ID NO: 10571 - DNA, 25 bp, Artificial
  probe
  misc_feature (1)..(25): SEQ ID NO: 7738; WAN02472B_at; Start 5; Stop 29
gaaagttatctgtatcaaatgctgc

SEQ ID NO: 10572 - DNA, 25 bp, Artificial
  probe
  misc_feature (1)..(25): SEQ ID NO: 7738; WAN02472B_at; Start 25; Stop 49
gctgccttgataaggcttactcctt

SEQ ID NO: 10573 - DNA, 25 bp, Artificial
  probe
  misc_feature (1)..(25): SEQ ID NO: 7738; WAN02472B_at; Start 36; Stop 60
aaggcttactcctttttgtgccatg

SEQ ID NO: 10574 - DNA, 25 bp, Artificial
  probe
  misc_feature (1)..(25): SEQ ID NO: 7738; WAN02472B_at; Start 33; Stop 57
gataaggcttactcctttttgtgcc

SEQ ID NO: 10575 - DNA, 25 bp, Artificial
  probe
  misc_feature (1)..(25): SEQ ID NO: 7738; WAN02472B_at; Start 49; Stop 73
ttttgtgccatgtttgctcctccat

SEQ ID NO: 10576 - DNA, 25 bp, Artificial
  probe
  misc_feature (1)..(25): SEQ ID NO: 7738; WAN02472B_at; Start 43; Stop 67
actcctttttgtgccatgtttgctc

SEQ ID NO: 10577 - DNA, 25 bp, Artificial
  probe
  misc_feature (1)..(25): SEQ ID NO: 7738; WAN02472B_at; Start 45; Stop 69
tcctttttgtgccatgtttgctcct

SEQ ID NO: 10578 - DNA, 25 bp, Artificial
  probe
  misc_feature (1)..(25): SEQ ID NO: 7738; WAN02472B_at; Start 38; Stop 62
ggcttactcctttttgtgccatgtt

SEQ ID NO: 10579 - DNA, 25 bp, Artificial
  probe
  misc_feature (1)..(25): SEQ ID NO: 7738; WAN02472B_at; Start 55; Stop 79
gccatgtttgctcctccatcatttt

SEQ ID NO: 10580 - DNA, 25 bp, Artificial
  probe
  misc_feature (1)..(25): SEQ ID NO: 7738; WAN02472B_at; Start 2; Stop 26
tgagaaagttatctgtatcaaatgc

SEQ ID NO: 10581 - DNA, 25 bp, Artificial
  probe
  misc_feature (1)..(25): SEQ ID NO: 7738; WAN02472B_at; Start 22; Stop 46
aatgctgccttgataaggcttactc

SEQ ID NO: 10582 - DNA, 25 bp, Artificial
  probe
  misc_feature (1)..(25): SEQ ID NO: 7738; WAN02472B_at; Start 70; Stop 94
ccatcatttttctttgtaaactgtt

SEQ ID NO: 10583 - DNA, 25 bp, Artificial
  probe
  misc_feature (1)..(25): SEQ ID NO: 7738; WAN02472B_at; Start 35; Stop 59
taaggcttactcctttttgtgccat

SEQ ID NO: 10584 - DNA, 25 bp, Artificial
  probe
  misc_feature (1)..(25): SEQ ID NO: 7738; WAN02472B_at; Start 6; Stop 30
aaagttatctgtatcaaatgctgcc

SEQ ID NO: 10585 - DNA, 25 bp, Artificial
  probe
  misc_feature (1)..(25): SEQ ID NO: 7738; WAN02472B_at; Start 57; Stop 81
catgtttgctcctccatcatttttc

SEQ ID NO: 10586 - DNA, 25 bp, Artificial
  probe
  misc_feature (1)..(25): SEQ ID NO: 7738; WAN02472B_at; Start 48; Stop 72
tttttgtgccatgtttgctcctcca

SEQ ID NO: 10587 - DNA, 25 bp, Artificial
  probe
  misc_feature (1)..(25): SEQ ID NO: 7738; WAN02472B_at; Start 39; Stop 63
gcttactcctttttgtgccatgttt

SEQ ID NO: 10588 - DNA, 25 bp, Artificial
  probe
  misc_feature (1)..(25): SEQ ID NO: 7738; WAN02472B_at; Start 9; Stop 33
gttatctgtatcaaatgctgccttg

SEQ ID NO: 10589 - DNA, 25 bp, Artificial
  probe
  misc_feature (1)..(25): SEQ ID NO: 7738; WAN02472B_at; Start 52; Stop 76
tgtgccatgtttgctcctccatcat

SEQ ID NO: 10590 - DNA, 25 bp, Artificial
  probe
  misc_feature (1)..(25): SEQ ID NO: 7738; WAN02472B_at; Start 20; Stop 44
caaatgctgccttgataaggcttac

SEQ ID NO: 10591 - DNA, 25 bp, Artificial
  probe
  misc_feature (1)..(25): SEQ ID NO: 7738; WAN02472B_at; Start 10; Stop 34
ttatctgtatcaaatgctgccttga

SEQ ID NO: 10592 - DNA, 25 bp, Artificial
  probe
  misc_feature (1)..(25): SEQ ID NO: 7738; WAN02472B_at; Start 66; Stop 90
tcctccatcatttttctttgtaaac

SEQ ID NO: 10593 - DNA, 25 bp, Artificial
  probe
  misc_feature (1)..(25): SEQ ID NO: 7738; WAN02472B_at; Start 29; Stop 53
ccttgataaggcttactcctttttg

SEQ ID NO: 10594 - DNA, 25 bp, Artificial
  probe
  misc_feature (1)..(25): SEQ ID NO: 7738; WAN02472B_at; Start 51; Stop 75
ttgtgccatgtttgctcctccatca

SEQ ID NO: 10595 - DNA, 25 bp, Artificial
  probe
  misc_feature (1)..(25): SEQ ID NO: 7738; WAN02472B_at; Start 8; Stop 32
agttatctgtatcaaatgctgcctt

SEQ ID NO: 10596 - DNA, 25 bp, Artificial
  probe
  misc_feature (1)..(25): SEQ ID NO: 7739; WAN02472C_at; Start 49; Stop 73
ggagattatttcagctatttttcat

SEQ ID NO: 10597 - DNA, 25 bp, Artificial
  probe
  misc_feature (1)..(25): SEQ ID NO: 7739; WAN02472C_at; Start 40; Stop 64
ccaaaaaatggagattatttcagct

SEQ ID NO: 10598 - DNA, 25 bp, Artificial
  probe
  misc_feature (1)..(25): SEQ ID NO: 7739; WAN02472C_at; Start 2; Stop 26
tgaactgggatttgtgtatttttat

SEQ ID NO: 10599 - DNA, 25 bp, Artificial
  probe
  misc_feature (1)..(25): SEQ ID NO: 7739; WAN02472C_at; Start 45; Stop 69
aaatggagattatttcagctatttt

SEQ ID NO: 10600 - DNA, 25 bp, Artificial
  probe
  misc_feature (1)..(25): SEQ ID NO: 7739; WAN02472C_at; Start 46; Stop 70
aatggagattatttcagctattttt

SEQ ID NO: 10601 - DNA, 25 bp, Artificial
  probe
  misc_feature (1)..(25): SEQ ID NO: 7739; WAN02472C_at; Start 42; Stop 66
aaaaaatggagattatttcagctat

SEQ ID NO: 10602 - DNA, 25 bp, Artificial
  probe
  misc_feature (1)..(25): SEQ ID NO: 7739; WAN02472C_at; Start 41; Stop 65
caaaaaatggagattatttcagcta

SEQ ID NO: 10603 - DNA, 25 bp, Artificial
  probe
  misc_feature (1)..(25): SEQ ID NO: 7739; WAN02472C_at; Start 38; Stop 62
taccaaaaaatggagattatttcag

SEQ ID NO: 10604 - DNA, 25 bp, Artificial
  probe
  misc_feature (1)..(25): SEQ ID NO: 7739; WAN02472C_at; Start 4; Stop 28
aactgggatttgtgtatttttatct

SEQ ID NO: 10605 - DNA, 25 bp, Artificial
  probe
  misc_feature (1)..(25): SEQ ID NO: 7739; WAN02472C_at; Start 1; Stop 25
atgaactgggatttgtgtattttta

SEQ ID NO: 10606 - DNA, 25 bp, Artificial
  probe
  misc_feature (1)..(25): SEQ ID NO: 7739; WAN02472C_at; Start 52; Stop 76
gattatttcagctatttttcatact

SEQ ID NO: 10607 - DNA, 25 bp, Artificial
  probe
  misc_feature (1)..(25): SEQ ID NO: 7739; WAN02472C_at; Start 44; Stop 68
aaaatggagattatttcagctattt

SEQ ID NO: 10608 - DNA, 25 bp, Artificial
  probe
  misc_feature (1)..(25): SEQ ID NO: 7739; WAN02472C_at; Start 53; Stop 77
attatttcagctatttttcatactt

SEQ ID NO: 10609 - DNA, 25 bp, Artificial
  probe
  misc_feature (1)..(25): SEQ ID NO: 7739; WAN02472C_at; Start 51; Stop 75
agattatttcagctatttttcatac

SEQ ID NO: 10610 - DNA, 25 bp, Artificial
  probe
  misc_feature (1)..(25): SEQ ID NO: 7739; WAN02472C_at; Start 50; Stop 74
gagattatttcagctatttttcata

SEQ ID NO: 10611 - DNA, 25 bp, Artificial
  probe
  misc_feature (1)..(25): SEQ ID NO: 7739; WAN02472C_at; Start 5; Stop 29
actgggatttgtgtatttttatctt

SEQ ID NO: 10612 - DNA, 25 bp, Artificial
  probe
  misc_feature (1)..(25): SEQ ID NO: 7739; WAN02472C_at; Start 10; Stop 34
gatttgtgtatttttatcttttcta

SEQ ID NO: 10613 - DNA, 25 bp, Artificial
  probe
  misc_feature (1)..(25): SEQ ID NO: 7739; WAN02472C_at; Start 43; Stop 67
aaaaatggagattatttcagctatt

SEQ ID NO: 10614 - DNA, 25 bp, Artificial
  probe
  misc_feature (1)..(25): SEQ ID NO: 7739; WAN02472C_at; Start 37; Stop 61
ttaccaaaaaatggagattatttca

SEQ ID NO: 10615 - DNA, 25 bp, Artificial
  probe
  misc_feature (1)..(25): SEQ ID NO: 7739; WAN02472C_at; Start 48; Stop 72
tggagattatttcagctatttttca

SEQ ID NO: 10616 - DNA, 25 bp, Artificial
  probe
  misc_feature (1)..(25): SEQ ID NO: 7739; WAN02472C_at; Start 54; Stop 78
ttatttcagctatttttcatacttt

SEQ ID NO: 10617 - DNA, 25 bp, Artificial
  probe
  misc_feature (1)..(25): SEQ ID NO: 7739; WAN02472C_at; Start 39; Stop 63
accaaaaaatggagattatttcagc

SEQ ID NO: 10618 - DNA, 25 bp, Artificial
  probe
  misc_feature (1)..(25): SEQ ID NO: 7739; WAN02472C_at; Start 3; Stop 27
gaactgggatttgtgtatttttatc

SEQ ID NO: 10619 - DNA, 25 bp, Artificial
  probe
  misc_feature (1)..(25): SEQ ID NO: 7739; WAN02472C_at; Start 6; Stop 30
ctgggatttgtgtatttttatcttt

SEQ ID NO: 10620 - DNA, 25 bp, Artificial
  probe
  misc_feature (1)..(25): SEQ ID NO: 7740; WAN02472D_at; Start 26; Stop 50
tccaaaaattggtaaagattagtca

SEQ ID NO: 10621 - DNA, 25 bp, Artificial
  probe
  misc_feature (1)..(25): SEQ ID NO: 7740; WAN02472D_at; Start 55; Stop 79
tttacccatgacagcaatttcttcc

SEQ ID NO: 10622 - DNA, 25 bp, Artificial
  probe
  misc_feature (1)..(25): SEQ ID NO: 7740; WAN02472D_at; Start 92; Stop 116
tcaataattttttctaccatggcct

SEQ ID NO: 10623 - DNA, 25 bp, Artificial
  probe
  misc_feature (1)..(25): SEQ ID NO: 7740; WAN02472D_at; Start 104; Stop 128
tctaccatggccttgtggaagcgtt

SEQ ID NO: 10624 - DNA, 25 bp, Artificial
  probe
  misc_feature (1)..(25): SEQ ID NO: 7740; WAN02472D_at; Start 109; Stop 133
catggccttgtggaagcgtttatgc

SEQ ID NO: 10625 - DNA, 25 bp, Artificial
  probe
  misc_feature (1)..(25): SEQ ID NO: 7740; WAN02472D_at; Start 132; Stop 156
gcagtctatgaatcaagcgaccctt

SEQ ID NO: 10626 - DNA, 25 bp, Artificial
  probe
  misc_feature (1)..(25): SEQ ID NO: 7740; WAN02472D_at; Start 74; Stop 98
tcttcctcgctcatgccatcaataa

SEQ ID NO: 10627 - DNA, 25 bp, Artificial
  probe
  misc_feature (1)..(25): SEQ ID NO: 7740; WAN02472D_at; Start 114; Stop 138
ccttgtggaagcgtttatgcagtct

SEQ ID NO: 10628 - DNA, 25 bp, Artificial
  probe
  misc_feature (1)..(25): SEQ ID NO: 7740; WAN02472D_at; Start 125; Stop 149
cgtttatgcagtctatgaatcaagc

SEQ ID NO: 10629 - DNA, 25 bp, Artificial
  probe
  misc_feature (1)..(25): SEQ ID NO: 7740; WAN02472D_at; Start 165; Stop 189
aatgcagatgcaccacacgacgatc

SEQ ID NO: 10630 - DNA, 25 bp, Artificial
  probe
  misc_feature (1)..(25): SEQ ID NO: 7740; WAN02472D_at; Start 100; Stop 124
tttttctaccatggccttgtggaag

SEQ ID NO: 10631 - DNA, 25 bp, Artificial
  probe
  misc_feature (1)..(25): SEQ ID NO: 7740; WAN02472D_at; Start 9; Stop 33
gccattatttcaaatcctccaaaaa

SEQ ID NO: 10632 - DNA, 25 bp, Artificial
  probe
  misc_feature (1)..(25): SEQ ID NO: 7740; WAN02472D_at; Start 96; Stop 120
taattttttctaccatggccttgtg

SEQ ID NO: 10633 - DNA, 25 bp, Artificial
  probe
  misc_feature (1)..(25): SEQ ID NO: 7740; WAN02472D_at; Start 3; Stop 27
gcaaaagccattatttcaaatcctc

SEQ ID NO: 10634 - DNA, 25 bp, Artificial
  probe
  misc_feature (1)..(25): SEQ ID NO: 7740; WAN02472D_at; Start 162; Stop 186
tcaaatgcagatgcaccacacgacg

SEQ ID NO: 10635 - DNA, 25 bp, Artificial
  probe
  misc_feature (1)..(25): SEQ ID NO: 7740; WAN02472D_at; Start 49; Stop 73
caaacctttacccatgacagcaatt

SEQ ID NO: 10636 - DNA, 25 bp, Artificial
  probe
  misc_feature (1)..(25): SEQ ID NO: 7740; WAN02472D_at; Start 147; Stop 171
agcgacccttctttgtcaaatgcag

SEQ ID NO: 10637 - DNA, 25 bp, Artificial
  probe
  misc_feature (1)..(25): SEQ ID NO: 7740; WAN02472D_at; Start 64; Stop 88
gacagcaatttcttcctcgctcatg

SEQ ID NO: 10638 - DNA, 25 bp, Artificial
  probe
  misc_feature (1)..(25): SEQ ID NO: 7740; WAN02472D_at; Start 81; Stop 105
cgctcatgccatcaataattttttc

SEQ ID NO: 10639 - DNA, 25 bp, Artificial
  probe
  misc_feature (1)..(25): SEQ ID NO: 7740; WAN02472D_at; Start 106; Stop 130
taccatggccttgtggaagcgttta

SEQ ID NO: 10640 - DNA, 25 bp, Artificial
  probe
  misc_feature (1)..(25): SEQ ID NO: 7740; WAN02472D_at; Start 144; Stop 168
tcaagcgacccttctttgtcaaatg

SEQ ID NO: 10641 - DNA, 25 bp, Artificial
  probe
  misc_feature (1)..(25): SEQ ID NO: 7740; WAN02472D_at; Start 170; Stop 194
agatgcaccacacgacgatcctgtt

SEQ ID NO: 10642 - DNA, 25 bp, Artificial
  probe
  misc_feature (1)..(25): SEQ ID NO: 7740; WAN02472D_at; Start 135; Stop 159
gtctatgaatcaagcgacccttctt

SEQ ID NO: 10643 - DNA, 25 bp, Artificial
  probe
  misc_feature (1)..(25): SEQ ID NO: 7740; WAN02472D_at; Start 129; Stop 153
tatgcagtctatgaatcaagcgacc

SEQ ID NO: 10644 - DNA, 25 bp, Artificial
  probe
  misc_feature (1)..(25): SEQ ID NO: 7740; WAN02472D_at; Start 111; Stop 135
tggccttgtggaagcgtttatgcag

SEQ ID NO: 10645 - DNA, 25 bp, Artificial
  probe
  misc_feature (1)..(25): SEQ ID NO: 7740; WAN02472D_at; Start 45; Stop 69
tagtcaaacctttacccatgacagc

SEQ ID NO: 10646 - DNA, 25 bp, Artificial
  probe
  misc_feature (1)..(25): SEQ ID NO: 7740; WAN02472D_at; Start 140; Stop 164
tgaatcaagcgacccttctttgtca

SEQ ID NO: 10647 - DNA, 25 bp, Artificial
  probe
  misc_feature (1)..(25): SEQ ID NO: 7740; WAN02472D_at; Start 68; Stop 92
gcaatttcttcctcgctcatgccat

SEQ ID NO: 10648 - DNA, 25 bp, Artificial
  probe
  misc_feature (1)..(25): SEQ ID NO: 7740; WAN02472D_at; Start 40; Stop 64
aagattagtcaaacctttacccatg

SEQ ID NO: 10649 - DNA, 25 bp, Artificial
  probe
  misc_feature (1)..(25): SEQ ID NO: 7740; WAN02472D_at; Start 138; Stop 162
tatgaatcaagcgacccttctttgt

SEQ ID NO: 10650 - DNA, 25 bp, Artificial
  probe
  misc_feature (1)..(25): SEQ ID NO: 7740; WAN02472D_at; Start 58; Stop 82
acccatgacagcaatttcttcctcg

SEQ ID NO: 10651 - DNA, 25 bp, Artificial
  probe
  misc_feature (1)..(25): SEQ ID NO: 7740; WAN02472D_at; Start 117; Stop 141
tgtggaagcgtttatgcagtctatg

SEQ ID NO: 10652 - DNA, 25 bp, Artificial
  probe
  misc_feature (1)..(25): SEQ ID NO: 7740; WAN02472D_at; Start 160; Stop 184
tgtcaaatgcagatgcaccacacga

SEQ ID NO: 10653 - DNA, 25 bp, Artificial
  probe
  misc_feature (1)..(25): SEQ ID NO: 7740; WAN02472D_at; Start 121; Stop 145
gaagcgtttatgcagtctatgaatc

SEQ ID NO: 10654 - DNA, 25 bp, Artificial
  probe
  misc_feature (1)..(25): SEQ ID NO: 7741; WAN02472E_at; Start 28; Stop 52
accattcctttcaacactccattat

SEQ ID NO: 10655 - DNA, 25 bp, Artificial
  probe
  misc_feature (1)..(25): SEQ ID NO: 7741; WAN02472E_at; Start 33; Stop 57
tcctttcaacactccattatatcgg

SEQ ID NO: 10656 - DNA, 25 bp, Artificial
  probe
  misc_feature (1)..(25): SEQ ID NO: 7741; WAN02472E_at; Start 34; Stop 58
cctttcaacactccattatatcgga

SEQ ID NO: 10657 - DNA, 25 bp, Artificial
  probe
  misc_feature (1)..(25): SEQ ID NO: 7741; WAN02472E_at; Start 27; Stop 51
taccattcctttcaacactccatta

SEQ ID NO: 10658 - DNA, 25 bp, Artificial
  probe
  misc_feature (1)..(25): SEQ ID NO: 7741; WAN02472E_at; Start 73; Stop 97
tcaatttctatttcttttcacttcc

SEQ ID NO: 10659 - DNA, 25 bp, Artificial
  probe
  misc_feature (1)..(25): SEQ ID NO: 7741; WAN02472E_at; Start 41; Stop 65
acactccattatatcggattttagc

SEQ ID NO: 10660 - DNA, 25 bp, Artificial
  probe
  misc_feature (1)..(25): SEQ ID NO: 7741; WAN02472E_at; Start 46; Stop 70
ccattatatcggattttagcatttt

SEQ ID NO: 10661 - DNA, 25 bp, Artificial
  probe
  misc_feature (1)..(25): SEQ ID NO: 7741; WAN02472E_at; Start 8; Stop 32
tgatttttacattggattttaccat

SEQ ID NO: 10662 - DNA, 25 bp, Artificial
  probe
  misc_feature (1)..(25): SEQ ID NO: 7741; WAN02472E_at; Start 24; Stop 48
ttttaccattcctttcaacactcca

SEQ ID NO: 10663 - DNA, 25 bp, Artificial
  probe
  misc_feature (1)..(25): SEQ ID NO: 7741; WAN02472E_at; Start 29; Stop 53
ccattcctttcaacactccattata

SEQ ID NO: 10664 - DNA, 25 bp, Artificial
  probe
  misc_feature (1)..(25): SEQ ID NO: 7741; WAN02472E_at; Start 43; Stop 67
actccattatatcggattttagcat

SEQ ID NO: 10665 - DNA, 25 bp, Artificial
  probe
  misc_feature (1)..(25): SEQ ID NO: 7741; WAN02472E_at; Start 19; Stop 43
ttggattttaccattcctttcaaca

SEQ ID NO: 10666 - DNA, 25 bp, Artificial
  probe
  misc_feature (1)..(25): SEQ ID NO: 7741; WAN02472E_at; Start 39; Stop 63
caacactccattatatcggatttta

SEQ ID NO: 10667 - DNA, 25 bp, Artificial
  probe
  misc_feature (1)..(25): SEQ ID NO: 7741; WAN02472E_at; Start 20; Stop 44
tggattttaccattcctttcaacac

SEQ ID NO: 10668 - DNA, 25 bp, Artificial
  probe
  misc_feature (1)..(25): SEQ ID NO: 7741; WAN02472E_at; Start 17; Stop 41
cattggattttaccattcctttcaa

SEQ ID NO: 10669 - DNA, 25 bp, Artificial
  probe
  misc_feature (1)..(25): SEQ ID NO: 7741; WAN02472E_at; Start 42; Stop 66
cactccattatatcggattttagca

SEQ ID NO: 10670 - DNA, 25 bp, Artificial
  probe
  misc_feature (1)..(25): SEQ ID NO: 7741; WAN02472E_at; Start 40; Stop 64
aacactccattatatcggattttag

SEQ ID NO: 10671 - DNA, 25 bp, Artificial
  probe
  misc_feature (1)..(25): SEQ ID NO: 7741; WAN02472E_at; Start 52; Stop 76
tatcggattttagcatttttttcaa

SEQ ID NO: 10672 - DNA, 25 bp, Artificial
  probe
  misc_feature (1)..(25): SEQ ID NO: 7741; WAN02472E_at; Start 1; Stop 25
ctgagaatgatttttacattggatt

SEQ ID NO: 10673 - DNA, 25 bp, Artificial
  probe
  misc_feature (1)..(25): SEQ ID NO: 7741; WAN02472E_at; Start 30; Stop 54
cattcctttcaacactccattatat

SEQ ID NO: 10674 - DNA, 25 bp, Artificial
  probe
  misc_feature (1)..(25): SEQ ID NO: 7741; WAN02472E_at; Start 16; Stop 40
acattggattttaccattcctttca

SEQ ID NO: 10675 - DNA, 25 bp, Artificial
  probe
  misc_feature (1)..(25): SEQ ID NO: 7741; WAN02472E_at; Start 35; Stop 59
ctttcaacactccattatatcggat

SEQ ID NO: 10676 - DNA, 25 bp, Artificial
  probe
  misc_feature (1)..(25): SEQ ID NO: 7741; WAN02472E_at; Start 15; Stop 39
tacattggattttaccattcctttc

SEQ ID NO: 10677 - DNA, 25 bp, Artificial
  probe
  misc_feature (1)..(25): SEQ ID NO: 7741; WAN02472E_at; Start 37; Stop 61
ttcaacactccattatatcggattt

SEQ ID NO: 10678 - DNA, 25 bp, Artificial
  probe
  misc_feature (1)..(25): SEQ ID NO: 7741; WAN02472E_at; Start 5; Stop 29
gaatgatttttacattggattttac

SEQ ID NO: 10679 - DNA, 25 bp, Artificial
  probe
  misc_feature (1)..(25): SEQ ID NO: 7741; WAN02472E_at; Start 45; Stop 69
tccattatatcggattttagcattt

SEQ ID NO: 10680 - DNA, 25 bp, Artificial
  probe
  misc_feature (1)..(25): SEQ ID NO: 7741; WAN02472E_at; Start 32; Stop 56
ttcctttcaacactccattatatcg

SEQ ID NO: 10681 - DNA, 25 bp, Artificial
  probe
  misc_feature (1)..(25): SEQ ID NO: 7741; WAN02472E_at; Start 38; Stop 62
tcaacactccattatatcggatttt

SEQ ID NO: 10682 - DNA, 25 bp, Artificial
  probe
  misc_feature (1)..(25): SEQ ID NO: 7741; WAN02472E_at; Start 47; Stop 71
cattatatcggattttagcattttt

SEQ ID NO: 10683 - DNA, 25 bp, Artificial
  probe
  misc_feature (1)..(25): SEQ ID NO: 7741; WAN02472E_at; Start 26; Stop 50
ttaccattcctttcaacactccatt

SEQ ID NO: 10684 - DNA, 25 bp, Artificial
  probe
  misc_feature (1)..(25): SEQ ID NO: 7741; WAN02472E_at; Start 22; Stop 46
gattttaccattcctttcaacactc

SEQ ID NO: 10685 - DNA, 25 bp, Artificial
  probe
  misc_feature (1)..(25): SEQ ID NO: 7741; WAN02472E_at; Start 36; Stop 60
tttcaacactccattatatcggatt

SEQ ID NO: 10686 - DNA, 25 bp, Artificial
  probe
  misc_feature (1)..(25): SEQ ID NO: 7741; WAN02472E_at; Start 25; Stop 49
tttaccattcctttcaacactccat

SEQ ID NO: 10687 - DNA, 25 bp, Artificial
  probe
  misc_feature (1)..(25): SEQ ID NO: 7741; WAN02472E_at; Start 7; Stop 31
atgatttttacattggattttacca

SEQ ID NO: 10688 - DNA, 25 bp, Artificial
  probe
  misc_feature (1)..(25): SEQ ID NO: 7742; WAN02472F_at; Start 30; Stop 54
ccaattaaatttgtttgattcgtgc

SEQ ID NO: 10689 - DNA, 25 bp, Artificial
  probe
  misc_feature (1)..(25): SEQ ID NO: 7742; WAN02472F_at; Start 7; Stop 31
accaaggaacttgatgttgaaggcc

SEQ ID NO: 10690 - DNA, 25 bp, Artificial
  probe
  misc_feature (1)..(25): SEQ ID NO: 7742; WAN02472F_at; Start 4; Stop 28
aaaaccaaggaacttgatgttgaag

SEQ ID NO: 10691 - DNA, 25 bp, Artificial
  probe
  misc_feature (1)..(25): SEQ ID NO: 7742; WAN02472F_at; Start 48; Stop 72
ttcgtgcttccttgagcatgaatca

SEQ ID NO: 10692 - DNA, 25 bp, Artificial
  probe
  misc_feature (1)..(25): SEQ ID NO: 7742; WAN02472F_at; Start 8; Stop 32
ccaaggaacttgatgttgaaggcca

SEQ ID NO: 10693 - DNA, 25 bp, Artificial
  probe
  misc_feature (1)..(25): SEQ ID NO: 7742; WAN02472F_at; Start 50; Stop 74
cgtgcttccttgagcatgaatcagg

SEQ ID NO: 10694 - DNA, 25 bp, Artificial
  probe
  misc_feature (1)..(25): SEQ ID NO: 7742; WAN02472F_at; Start 49; Stop 73
tcgtgcttccttgagcatgaatcag

SEQ ID NO: 10695 - DNA, 25 bp, Artificial
  probe
  misc_feature (1)..(25): SEQ ID NO: 7742; WAN02472F_at; Start 12; Stop 36
ggaacttgatgttgaaggccaatta

SEQ ID NO: 10696 - DNA, 25 bp, Artificial
  probe
  misc_feature (1)..(25): SEQ ID NO: 7742; WAN02472F_at; Start 13; Stop 37
gaacttgatgttgaaggccaattaa

SEQ ID NO: 10697 - DNA, 25 bp, Artificial
  probe
  misc_feature (1)..(25): SEQ ID NO: 7742; WAN02472F_at; Start 41; Stop 65
tgtttgattcgtgcttccttgagca

SEQ ID NO: 10698 - DNA, 25 bp, Artificial
  probe
  misc_feature (1)..(25): SEQ ID NO: 7742; WAN02472F_at; Start 5; Stop 29
aaaccaaggaacttgatgttgaagg

SEQ ID NO: 10699 - DNA, 25 bp, Artificial
  probe
  misc_feature (1)..(25): SEQ ID NO: 7742; WAN02472F_at; Start 9; Stop 33
caaggaacttgatgttgaaggccaa

SEQ ID NO: 10700 - DNA, 25 bp, Artificial
  probe
  misc_feature (1)..(25): SEQ ID NO: 7742; WAN02472F_at; Start 2; Stop 26
tgaaaaccaaggaacttgatgttga

SEQ ID NO: 10701 - DNA, 25 bp, Artificial
  probe
  misc_feature (1)..(25): SEQ ID NO: 7742; WAN02472F_at; Start 19; Stop 43
gatgttgaaggccaattaaatttgt

SEQ ID NO: 10702 - DNA, 25 bp, Artificial
  probe
  misc_feature (1)..(25): SEQ ID NO: 7742; WAN02472F_at; Start 45; Stop 69
tgattcgtgcttccttgagcatgaa

SEQ ID NO: 10703 - DNA, 25 bp, Artificial
  probe
  misc_feature (1)..(25): SEQ ID NO: 7742; WAN02472F_at; Start 35; Stop 59
taaatttgtttgattcgtgcttcct

SEQ ID NO: 10704 - DNA, 25 bp, Artificial
  probe
  misc_feature (1)..(25): SEQ ID NO: 7742; WAN02472F_at; Start 51; Stop 75
gtgcttccttgagcatgaatcaggc

SEQ ID NO: 10705 - DNA, 25 bp, Artificial
  probe
  misc_feature (1)..(25): SEQ ID NO: 7742; WAN02472F_at; Start 40; Stop 64
ttgtttgattcgtgcttccttgagc

SEQ ID NO: 10706 - DNA, 25 bp, Artificial
  probe
  misc_feature (1)..(25): SEQ ID NO: 7742; WAN02472F_at; Start 10; Stop 34
aaggaacttgatgttgaaggccaat

SEQ ID NO: 10707 - DNA, 25 bp, Artificial
  probe
  misc_feature (1)..(25): SEQ ID NO: 7742; WAN02472F_at; Start 46; Stop 70
gattcgtgcttccttgagcatgaat

SEQ ID NO: 10708 - DNA, 25 bp, Artificial
  probe
  misc_feature (1)..(25): SEQ ID NO: 7742; WAN02472F_at; Start 34; Stop 58
ttaaatttgtttgattcgtgcttcc

SEQ ID NO: 10709 - DNA, 25 bp, Artificial
  probe
  misc_feature (1)..(25): SEQ ID NO: 7742; WAN02472F_at; Start 6; Stop 30
aaccaaggaacttgatgttgaaggc

SEQ ID NO: 10710 - DNA, 25 bp, Artificial
  probe
  misc_feature (1)..(25): SEQ ID NO: 7742; WAN02472F_at; Start 39; Stop 63
tttgtttgattcgtgcttccttgag

SEQ ID NO: 10711 - DNA, 25 bp, Artificial
  probe
  misc_feature (1)..(25): SEQ ID NO: 7742; WAN02472F_at; Start 14; Stop 38
aacttgatgttgaaggccaattaaa

SEQ ID NO: 10712 - DNA, 25 bp, Artificial
  probe
  misc_feature (1)..(25): SEQ ID NO: 7742; WAN02472F_at; Start 1; Stop 25
atgaaaaccaaggaacttgatgttg

SEQ ID NO: 10713 - DNA, 25 bp, Artificial
  probe
  misc_feature (1)..(25): SEQ ID NO: 7742; WAN02472F_at; Start 3; Stop 27
gaaaaccaaggaacttgatgttgaa

SEQ ID NO: 10714 - DNA, 25 bp, Artificial
  probe
  misc_feature (1)..(25): SEQ ID NO: 7742; WAN02472F_at; Start 24; Stop 48
tgaaggccaattaaatttgtttgat

SEQ ID NO: 10715 - DNA, 25 bp, Artificial
  probe
  misc_feature (1)..(25): SEQ ID NO: 7742; WAN02472F_at; Start 16; Stop 40
cttgatgttgaaggccaattaaatt

SEQ ID NO: 10716 - DNA, 25 bp, Artificial
  probe
  misc_feature (1)..(25): SEQ ID NO: 7742; WAN02472F_at; Start 11; Stop 35
aggaacttgatgttgaaggccaatt

SEQ ID NO: 10717 - DNA, 25 bp, Artificial
  probe
  misc_feature (1)..(25): SEQ ID NO: 7742; WAN02472F_at; Start 37; Stop 61
aatttgtttgattcgtgcttccttg

SEQ ID NO: 10718 - DNA, 25 bp, Artificial
  probe
  misc_feature (1)..(25): SEQ ID NO: 7742; WAN02472F_at; Start 42; Stop 66
gtttgattcgtgcttccttgagcat

SEQ ID NO: 10719 - DNA, 25 bp, Artificial
  probe
  misc_feature (1)..(25): SEQ ID NO: 7742; WAN02472F_at; Start 27; Stop 51
aggccaattaaatttgtttgattcg

SEQ ID NO: 10720 - DNA, 25 bp, Artificial
  probe
  misc_feature (1)..(25): SEQ ID NO: 7742; WAN02472F_at; Start 44; Stop 68
ttgattcgtgcttccttgagcatga

SEQ ID NO: 10721 - DNA, 25 bp, Artificial
  probe
  misc_feature (1)..(25): SEQ ID NO: 7742; WAN02472F_at; Start 43; Stop 67
tttgattcgtgcttccttgagcatg

SEQ ID NO: 10722 - DNA, 25 bp, Artificial
  probe
  misc_feature (1)..(25): SEQ ID NO: 7743; WAN02472G_at; Start 35; Stop 59
ttccgattctccatgtagcaaagct

SEQ ID NO: 10723 - DNA, 25 bp, Artificial
  probe
  misc_feature (1)..(25): SEQ ID NO: 7743; WAN02472G_at; Start 78; Stop 102
tgttgcaggcgcttgtacagctcca

SEQ ID NO: 10724 - DNA, 25 bp, Artificial
  probe
  misc_feature (1)..(25): SEQ ID NO: 7743; WAN02472G_at; Start 37; Stop 61
ccgattctccatgtagcaaagctat

SEQ ID NO: 10725 - DNA, 25 bp, Artificial
  probe
  misc_feature (1)..(25): SEQ ID NO: 7743; WAN02472G_at; Start 48; Stop 72
tgtagcaaagctatcccgcaagaaa

SEQ ID NO: 10726 - DNA, 25 bp, Artificial
  probe
  misc_feature (1)..(25): SEQ ID NO: 7743; WAN02472G_at; Start 46; Stop 70
catgtagcaaagctatcccgcaaga

SEQ ID NO: 10727 - DNA, 25 bp, Artificial
  probe
  misc_feature (1)..(25): SEQ ID NO: 7743; WAN02472G_at; Start 30; Stop 54
taaggttccgattctccatgtagca

SEQ ID NO: 10728 - DNA, 25 bp, Artificial
  probe
  misc_feature (1)..(25): SEQ ID NO: 7743; WAN02472G_at; Start 33; Stop 57
ggttccgattctccatgtagcaaag

SEQ ID NO: 10729 - DNA, 25 bp, Artificial
  probe
  misc_feature (1)..(25): SEQ ID NO: 7743; WAN02472G_at; Start 71; Stop 95
aaaatcctgttgcaggcgcttgtac

SEQ ID NO: 10730 - DNA, 25 bp, Artificial
  probe
  misc_feature (1)..(25): SEQ ID NO: 7743; WAN02472G_at; Start 81; Stop 105
tgcaggcgcttgtacagctccaaac

SEQ ID NO: 10731 - DNA, 25 bp, Artificial
  probe
  misc_feature (1)..(25): SEQ ID NO: 7743; WAN02472G_at; Start 41; Stop 65
ttctccatgtagcaaagctatcccg

SEQ ID NO: 10732 - DNA, 25 bp, Artificial
  probe
  misc_feature (1)..(25): SEQ ID NO: 7743; WAN02472G_at; Start 61; Stop 85
tcccgcaagaaaaatcctgttgcag

SEQ ID NO: 10733 - DNA, 25 bp, Artificial
  probe
  misc_feature (1)..(25): SEQ ID NO: 7743; WAN02472G_at; Start 69; Stop 93
gaaaaatcctgttgcaggcgcttgt

SEQ ID NO: 10734 - DNA, 25 bp, Artificial
  probe
  misc_feature (1)..(25): SEQ ID NO: 7743; WAN02472G_at; Start 23; Stop 47
tcgaaaataaggttccgattctcca

SEQ ID NO: 10735 - DNA, 25 bp, Artificial
  probe
  misc_feature (1)..(25): SEQ ID NO: 7743; WAN02472G_at; Start 39; Stop 63
gattctccatgtagcaaagctatcc

SEQ ID NO: 10736 - DNA, 25 bp, Artificial
  probe
  misc_feature (1)..(25): SEQ ID NO: 7743; WAN02472G_at; Start 25; Stop 49
gaaaataaggttccgattctccatg

SEQ ID NO: 10737 - DNA, 25 bp, Artificial
  probe
  misc_feature (1)..(25): SEQ ID NO: 7743; WAN02472G_at; Start 59; Stop 83
tatcccgcaagaaaaatcctgttgc

SEQ ID NO: 10738 - DNA, 25 bp, Artificial
  probe
  misc_feature (1)..(25): SEQ ID NO: 7743; WAN02472G_at; Start 85; Stop 109
ggcgcttgtacagctccaaacaaac

SEQ ID NO: 10739 - DNA, 25 bp, Artificial
  probe
  misc_feature (1)..(25): SEQ ID NO: 7743; WAN02472G_at; Start 73; Stop 97
aatcctgttgcaggcgcttgtacag

SEQ ID NO: 10740 - DNA, 25 bp, Artificial
  probe
  misc_feature (1)..(25): SEQ ID NO: 7743; WAN02472G_at; Start 92; Stop 116
gtacagctccaaacaaacatctatg

SEQ ID NO: 10741 - DNA, 25 bp, Artificial
  probe
  misc_feature (1)..(25): SEQ ID NO: 7743; WAN02472G_at; Start 55; Stop 79
aagctatcccgcaagaaaaatcctg

SEQ ID NO: 10742 - DNA, 25 bp, Artificial
  probe
  misc_feature (1)..(25): SEQ ID NO: 7743; WAN02472G_at; Start 50; Stop 74
tagcaaagctatcccgcaagaaaaa

SEQ ID NO: 10743 - DNA, 25 bp, Artificial
  probe
  misc_feature (1)..(25): SEQ ID NO: 7743; WAN02472G_at; Start 97; Stop 121
gctccaaacaaacatctatgcgagg

SEQ ID NO: 10744 - DNA, 25 bp, Artificial
  probe
  misc_feature (1)..(25): SEQ ID NO: 7743; WAN02472G_at; Start 99; Stop 123
tccaaacaaacatctatgcgaggac

SEQ ID NO: 10745 - DNA, 25 bp, Artificial
  probe
  misc_feature (1)..(25): SEQ ID NO: 7743; WAN02472G_at; Start 88; Stop 112
gcttgtacagctccaaacaaacatc

SEQ ID NO: 10746 - DNA, 25 bp, Artificial
  probe
  misc_feature (1)..(25): SEQ ID NO: 7743; WAN02472G_at; Start 6; Stop 30
gcaacaactagtggtgttcgaaaat

SEQ ID NO: 10747 - DNA, 25 bp, Artificial
  probe
  misc_feature (1)..(25): SEQ ID NO: 7743; WAN02472G_at; Start 83; Stop 107
caggcgcttgtacagctccaaacaa

SEQ ID NO: 10748 - DNA, 25 bp, Artificial
  probe
  misc_feature (1)..(25): SEQ ID NO: 7743; WAN02472G_at; Start 31; Stop 55
aaggttccgattctccatgtagcaa

SEQ ID NO: 10749 - DNA, 25 bp, Artificial
  probe
  misc_feature (1)..(25): SEQ ID NO: 7743; WAN02472G_at; Start 10; Stop 34
caactagtggtgttcgaaaataagg

SEQ ID NO: 10750 - DNA, 25 bp, Artificial
  probe
  misc_feature (1)..(25): SEQ ID NO: 7743; WAN02472G_at; Start 1; Stop 25
ttgttgcaacaactagtggtgttcg

SEQ ID NO: 10751 - DNA, 25 bp, Artificial
  probe
  misc_feature (1)..(25): SEQ ID NO: 7743; WAN02472G_at; Start 44; Stop 68
tccatgtagcaaagctatcccgcaa

SEQ ID NO: 10752 - DNA, 25 bp, Artificial
  probe
  misc_feature (1)..(25): SEQ ID NO: 7743; WAN02472G_at; Start 57; Stop 81
gctatcccgcaagaaaaatcctgtt

SEQ ID NO: 10753 - DNA, 25 bp, Artificial
  probe
  misc_feature (1)..(25): SEQ ID NO: 7743; WAN02472G_at; Start 28; Stop 52
aataaggttccgattctccatgtag

SEQ ID NO: 10754 - DNA, 25 bp, Artificial
  probe
  misc_feature (1)..(25): SEQ ID NO: 7743; WAN02472G_at; Start 66; Stop 90
caagaaaaatcctgttgcaggcgct

SEQ ID NO: 10755 - DNA, 25 bp, Artificial
  probe
  misc_feature (1)..(25): SEQ ID NO: 7743; WAN02472G_at; Start 95; Stop 119
cagctccaaacaaacatctatgcga

SEQ ID NO: 10756 - DNA, 25 bp, Artificial
  probe
  misc_feature (1)..(25): SEQ ID NO: 7744; WAN02472H_at; Start 32; Stop 56
agcctgttaccaagctctttgtact

SEQ ID NO: 10757 - DNA, 25 bp, Artificial
  probe
  misc_feature (1)..(25): SEQ ID NO: 7744; WAN02472H_at; Start 25; Stop 49
caaaaagagcctgttaccaagctct

SEQ ID NO: 10758 - DNA, 25 bp, Artificial
  probe
  misc_feature (1)..(25): SEQ ID NO: 7744; WAN02472H_at; Start 38; Stop 62
ttaccaagctctttgtactcaatga

SEQ ID NO: 10759 - DNA, 25 bp, Artificial
  probe
  misc_feature (1)..(25): SEQ ID NO: 7744; WAN02472H_at; Start 19; Stop 43
gcaatacaaaaagagcctgttacca

SEQ ID NO: 10760 - DNA, 25 bp, Artificial
  probe
  misc_feature (1)..(25): SEQ ID NO: 7744; WAN02472H_at; Start 26; Stop 50
aaaaagagcctgttaccaagctctt

SEQ ID NO: 10761 - DNA, 25 bp, Artificial
  probe
  misc_feature (1)..(25): SEQ ID NO: 7744; WAN02472H_at; Start 14; Stop 38
taaacgcaatacaaaaagagcctgt

SEQ ID NO: 10762 - DNA, 25 bp, Artificial
  probe
  misc_feature (1)..(25): SEQ ID NO: 7744; WAN02472H_at; Start 22; Stop 46
atacaaaaagagcctgttaccaagc

SEQ ID NO: 10763 - DNA, 25 bp, Artificial
  probe
  misc_feature (1)..(25): SEQ ID NO: 7744; WAN02472H_at; Start 18; Stop 42
cgcaatacaaaaagagcctgttacc

SEQ ID NO: 10764 - DNA, 25 bp, Artificial
  probe
  misc_feature (1)..(25): SEQ ID NO: 7744; WAN02472H_at; Start 28; Stop 52
aaagagcctgttaccaagctctttg

SEQ ID NO: 10765 - DNA, 25 bp, Artificial
  probe
  misc_feature (1)..(25): SEQ ID NO: 7744; WAN02472H_at; Start 21; Stop 45
aatacaaaaagagcctgttaccaag

SEQ ID NO: 10766 - DNA, 25 bp, Artificial
  probe
  misc_feature (1)..(25): SEQ ID NO: 7744; WAN02472H_at; Start 12; Stop 36
aataaacgcaatacaaaaagagcct

SEQ ID NO: 10767 - DNA, 25 bp, Artificial
  probe
  misc_feature (1)..(25): SEQ ID NO: 7744; WAN02472H_at; Start 15; Stop 39
aaacgcaatacaaaaagagcctgtt

SEQ ID NO: 10768 - DNA, 25 bp, Artificial
  probe
  misc_feature (1)..(25): SEQ ID NO: 7744; WAN02472H_at; Start 33; Stop 57
gcctgttaccaagctctttgtactc

SEQ ID NO: 10769 - DNA, 25 bp, Artificial
  probe
  misc_feature (1)..(25): SEQ ID NO: 7744; WAN02472H_at; Start 30; Stop 54
agagcctgttaccaagctctttgta

SEQ ID NO: 10770 - DNA, 25 bp, Artificial
  probe
  misc_feature (1)..(25): SEQ ID NO: 7744; WAN02472H_at; Start 39; Stop 63
taccaagctctttgtactcaatgaa

SEQ ID NO: 10771 - DNA, 25 bp, Artificial
  probe
  misc_feature (1)..(25): SEQ ID NO: 7744; WAN02472H_at; Start 20; Stop 44
caatacaaaaagagcctgttaccaa

SEQ ID NO: 10772 - DNA, 25 bp, Artificial
  probe
  misc_feature (1)..(25): SEQ ID NO: 7744; WAN02472H_at; Start 36; Stop 60
tgttaccaagctctttgtactcaat

SEQ ID NO: 10773 - DNA, 25 bp, Artificial
  probe
  misc_feature (1)..(25): SEQ ID NO: 7744; WAN02472H_at; Start 16; Stop 40
aacgcaatacaaaaagagcctgtta

SEQ ID NO: 10774 - DNA, 25 bp, Artificial
  probe
  misc_feature (1)..(25): SEQ ID NO: 7744; WAN02472H_at; Start 23; Stop 47
tacaaaaagagcctgttaccaagct

SEQ ID NO: 10775 - DNA, 25 bp, Artificial
  probe
  misc_feature (1)..(25): SEQ ID NO: 7744; WAN02472H_at; Start 27; Stop 51
aaaagagcctgttaccaagctcttt

SEQ ID NO: 10776 - DNA, 25 bp, Artificial
  probe
  misc_feature (1)..(25): SEQ ID NO: 7744; WAN02472H_at; Start 31; Stop 55
gagcctgttaccaagctctttgtac

SEQ ID NO: 10777 - DNA, 25 bp, Artificial
  probe
  misc_feature (1)..(25): SEQ ID NO: 7744; WAN02472H_at; Start 13; Stop 37
ataaacgcaatacaaaaagagcctg

SEQ ID NO: 10778 - DNA, 25 bp, Artificial
  probe
  misc_feature (1)..(25): SEQ ID NO: 7744; WAN02472H_at; Start 37; Stop 61
gttaccaagctctttgtactcaatg

SEQ ID NO: 10779 - DNA, 25 bp, Artificial
  probe
  misc_feature (1)..(25): SEQ ID NO: 7744; WAN02472H_at; Start 29; Stop 53
aagagcctgttaccaagctctttgt

SEQ ID NO: 10780 - DNA, 25 bp, Artificial
  probe
  misc_feature (1)..(25): SEQ ID NO: 7744; WAN02472H_at; Start 24; Stop 48
acaaaaagagcctgttaccaagctc

SEQ ID NO: 10781 - DNA, 25 bp, Artificial
  probe
  misc_feature (1)..(25): SEQ ID NO: 7744; WAN02472H_at; Start 17; Stop 41
acgcaatacaaaaagagcctgttac

SEQ ID NO: 10782 - DNA, 25 bp, Artificial
  probe
  misc_feature (1)..(25): SEQ ID NO: 7745; WAN02472I_at; Start 23; Stop 47
tttcagctgacgagagtaaaggatt

SEQ ID NO: 10783 - DNA, 25 bp, Artificial
  probe
  misc_feature (1)..(25): SEQ ID NO: 7745; WAN02472I_at; Start 74; Stop 98
gtcccatctcagacaagggtgccaa

SEQ ID NO: 10784 - DNA, 25 bp, Artificial
  probe
  misc_feature (1)..(25): SEQ ID NO: 7745; WAN02472I_at; Start 28; Stop 52
gctgacgagagtaaaggatttttgc

SEQ ID NO: 10785 - DNA, 25 bp, Artificial
  probe
  misc_feature (1)..(25): SEQ ID NO: 7745; WAN02472I_at; Start 93; Stop 117
tgccaaatctatcccaaatcctata

SEQ ID NO: 10786 - DNA, 25 bp, Artificial
  probe
  misc_feature (1)..(25): SEQ ID NO: 7745; WAN02472I_at; Start 58; Stop 82
ttctggacttgctgccgtcccatct

SEQ ID NO: 10787 - DNA, 25 bp, Artificial
  probe
  misc_feature (1)..(25): SEQ ID NO: 7745; WAN02472I_at; Start 17; Stop 41
cgattatttcagctgacgagagtaa

SEQ ID NO: 10788 - DNA, 25 bp, Artificial
  probe
  misc_feature (1)..(25): SEQ ID NO: 7745; WAN02472I_at; Start 13; Stop 37
gatacgattatttcagctgacgaga

SEQ ID NO: 10789 - DNA, 25 bp, Artificial
  probe
  misc_feature (1)..(25): SEQ ID NO: 7745; WAN02472I_at; Start 70; Stop 94
tgccgtcccatctcagacaagggtg

SEQ ID NO: 10790 - DNA, 25 bp, Artificial
  probe
  misc_feature (1)..(25): SEQ ID NO: 7745; WAN02472I_at; Start 87; Stop 111
caagggtgccaaatctatcccaaat

SEQ ID NO: 10791 - DNA, 25 bp, Artificial
  probe
  misc_feature (1)..(25): SEQ ID NO: 7745; WAN02472I_at; Start 71; Stop 95
gccgtcccatctcagacaagggtgc

SEQ ID NO: 10792 - DNA, 25 bp, Artificial
  probe
  misc_feature (1)..(25): SEQ ID NO: 7745; WAN02472I_at; Start 82; Stop 106
tcagacaagggtgccaaatctatcc

SEQ ID NO: 10793 - DNA, 25 bp, Artificial
  probe
  misc_feature (1)..(25): SEQ ID NO: 7745; WAN02472I_at; Start 18; Stop 42
gattatttcagctgacgagagtaaa

SEQ ID NO: 10794 - DNA, 25 bp, Artificial
  probe
  misc_feature (1)..(25): SEQ ID NO: 7745; WAN02472I_at; Start 25; Stop 49
tcagctgacgagagtaaaggatttt

SEQ ID NO: 10795 - DNA, 25 bp, Artificial
  probe
  misc_feature (1)..(25): SEQ ID NO: 7745; WAN02472I_at; Start 77; Stop 101
ccatctcagacaagggtgccaaatc

SEQ ID NO: 10796 - DNA, 25 bp, Artificial
  probe
  misc_feature (1)..(25): SEQ ID NO: 7745; WAN02472I_at; Start 51; Stop 75
gctcaatttctggacttgctgccgt

SEQ ID NO: 10797 - DNA, 25 bp, Artificial
  probe
  misc_feature (1)..(25): SEQ ID NO: 7745; WAN02472I_at; Start 50; Stop 74
tgctcaatttctggacttgctgccg

SEQ ID NO: 10798 - DNA, 25 bp, Artificial
  probe
  misc_feature (1)..(25): SEQ ID NO: 7745; WAN02472I_at; Start 68; Stop 92
gctgccgtcccatctcagacaaggg

SEQ ID NO: 10799 - DNA, 25 bp, Artificial
  probe
  misc_feature (1)..(25): SEQ ID NO: 7745; WAN02472I_at; Start 36; Stop 60
gagtaaaggatttttgctcaatttc

SEQ ID NO: 10800 - DNA, 25 bp, Artificial
  probe
  misc_feature (1)..(25): SEQ ID NO: 7745; WAN02472I_at; Start 80; Stop 104
tctcagacaagggtgccaaatctat

SEQ ID NO: 10801 - DNA, 25 bp, Artificial
  probe
  misc_feature (1)..(25): SEQ ID NO: 7745; WAN02472I_at; Start 21; Stop 45
tatttcagctgacgagagtaaagga

SEQ ID NO: 10802 - DNA, 25 bp, Artificial
  probe
  misc_feature (1)..(25): SEQ ID NO: 7745; WAN02472I_at; Start 15; Stop 39
tacgattatttcagctgacgagagt

SEQ ID NO: 10803 - DNA, 25 bp, Artificial
  probe
  misc_feature (1)..(25): SEQ ID NO: 7745; WAN02472I_at; Start 26; Stop 50
cagctgacgagagtaaaggattttt

SEQ ID NO: 10804 - DNA, 25 bp, Artificial
  probe
  misc_feature (1)..(25): SEQ ID NO: 7745; WAN02472I_at; Start 85; Stop 109
gacaagggtgccaaatctatcccaa

SEQ ID NO: 10805 - DNA, 25 bp, Artificial
  probe
  misc_feature (1)..(25): SEQ ID NO: 7745; WAN02472I_at; Start 53; Stop 77
tcaatttctggacttgctgccgtcc

SEQ ID NO: 10806 - DNA, 25 bp, Artificial
  probe
  misc_feature (1)..(25): SEQ ID NO: 7745; WAN02472I_at; Start 84; Stop 108
agacaagggtgccaaatctatccca

SEQ ID NO: 10807 - DNA, 25 bp, Artificial
  probe
  misc_feature (1)..(25): SEQ ID NO: 7745; WAN02472I_at; Start 78; Stop 102
catctcagacaagggtgccaaatct

SEQ ID NO: 10808 - DNA, 25 bp, Artificial
  probe
  misc_feature (1)..(25): SEQ ID NO: 7745; WAN02472I_at; Start 44; Stop 68
gatttttgctcaatttctggacttg

SEQ ID NO: 10809 - DNA, 25 bp, Artificial
  probe
  misc_feature (1)..(25): SEQ ID NO: 7745; WAN02472I_at; Start 10; Stop 34
gaagatacgattatttcagctgacg

SEQ ID NO: 10810 - DNA, 25 bp, Artificial
  probe
  misc_feature (1)..(25): SEQ ID NO: 7745; WAN02472I_at; Start 41; Stop 65
aaggatttttgctcaatttctggac

SEQ ID NO: 10811 - DNA, 25 bp, Artificial
  probe
  misc_feature (1)..(25): SEQ ID NO: 7745; WAN02472I_at; Start 66; Stop 90
ttgctgccgtcccatctcagacaag

SEQ ID NO: 10812 - DNA, 25 bp, Artificial
  probe
  misc_feature (1)..(25): SEQ ID NO: 7745; WAN02472I_at; Start 31; Stop 55
gacgagagtaaaggatttttgctca

SEQ ID NO: 10813 - DNA, 25 bp, Artificial
  probe
  misc_feature (1)..(25): SEQ ID NO: 7745; WAN02472I_at; Start 91; Stop 115
ggtgccaaatctatcccaaatccta

SEQ ID NO: 10814 - DNA, 25 bp, Artificial
  probe
  misc_feature (1)..(25): SEQ ID NO: 7745; WAN02472I_at; Start 55; Stop 79
aatttctggacttgctgccgtccca

SEQ ID NO: 10815 - DNA, 25 bp, Artificial
  probe
  misc_feature (1)..(25): SEQ ID NO: 7745; WAN02472I_at; Start 75; Stop 99
tcccatctcagacaagggtgccaaa

SEQ ID NO: 10816 - DNA, 25 bp, Artificial
  probe
  misc_feature (1)..(25): SEQ ID NO: 7746; WAN02472J_at; Start 89; Stop 113
tggtccgaggaggacaggaaaatgt

SEQ ID NO: 10817 - DNA, 25 bp, Artificial
  probe
  misc_feature (1)..(25): SEQ ID NO: 7746; WAN02472J_at; Start 67; Stop 91
tcaactgctggactacaagagctgg

SEQ ID NO: 10818 - DNA, 25 bp, Artificial
  probe
  misc_feature (1)..(25): SEQ ID NO: 7746; WAN02472J_at; Start 69; Stop 93
aactgctggactacaagagctggtc

SEQ ID NO: 10819 - DNA, 25 bp, Artificial
  probe
  misc_feature (1)..(25): SEQ ID NO: 7746; WAN02472J_at; Start 29; Stop 53
tttacccagcaaccgcaacgagcca

SEQ ID NO: 10820 - DNA, 25 bp, Artificial
  probe
  misc_feature (1)..(25): SEQ ID NO: 7746; WAN02472J_at; Start 47; Stop 71
cgagccattacccaagcaaatcaac

SEQ ID NO: 10821 - DNA, 25 bp, Artificial
  probe
  misc_feature (1)..(25): SEQ ID NO: 7746; WAN02472J_at; Start 75; Stop 99
tggactacaagagctggtccgagga

SEQ ID NO: 10822 - DNA, 25 bp, Artificial
  probe
  misc_feature (1)..(25): SEQ ID NO: 7746; WAN02472J_at; Start 73; Stop 97
gctggactacaagagctggtccgag

SEQ ID NO: 10823 - DNA, 25 bp, Artificial
  probe
  misc_feature (1)..(25): SEQ ID NO: 7746; WAN02472J_at; Start 68; Stop 92
caactgctggactacaagagctggt

SEQ ID NO: 10824 - DNA, 25 bp, Artificial
  probe
  misc_feature (1)..(25): SEQ ID NO: 7746; WAN02472J_at; Start 55; Stop 79
tacccaagcaaatcaactgctggac

SEQ ID NO: 10825 - DNA, 25 bp, Artificial
  probe
  misc_feature (1)..(25): SEQ ID NO: 7746; WAN02472J_at; Start 66; Stop 90
atcaactgctggactacaagagctg

SEQ ID NO: 10826 - DNA, 25 bp, Artificial
  probe
  misc_feature (1)..(25): SEQ ID NO: 7746; WAN02472J_at; Start 70; Stop 94
actgctggactacaagagctggtcc

SEQ ID NO: 10827 - DNA, 25 bp, Artificial
  probe
  misc_feature (1)..(25): SEQ ID NO: 7746; WAN02472J_at; Start 72; Stop 96
tgctggactacaagagctggtccga

SEQ ID NO: 10828 - DNA, 25 bp, Artificial
  probe
  misc_feature (1)..(25): SEQ ID NO: 7746; WAN02472J_at; Start 53; Stop 77
attacccaagcaaatcaactgctgg

SEQ ID NO: 10829 - DNA, 25 bp, Artificial
  probe
  misc_feature (1)..(25): SEQ ID NO: 7746; WAN02472J_at; Start 17; Stop 41
ggcaacaagccctttacccagcaac

SEQ ID NO: 10830 - DNA, 25 bp, Artificial
  probe
  misc_feature (1)..(25): SEQ ID NO: 7746; WAN02472J_at; Start 80; Stop 104
tacaagagctggtccgaggaggaca

SEQ ID NO: 10831 - DNA, 25 bp, Artificial
  probe
  misc_feature (1)..(25): SEQ ID NO: 7746; WAN02472J_at; Start 57; Stop 81
cccaagcaaatcaactgctggacta

SEQ ID NO: 10832 - DNA, 25 bp, Artificial
  probe
  misc_feature (1)..(25): SEQ ID NO: 7746; WAN02472J_at; Start 61; Stop 85
agcaaatcaactgctggactacaag

SEQ ID NO: 10833 - DNA, 25 bp, Artificial
  probe
  misc_feature (1)..(25): SEQ ID NO: 7746; WAN02472J_at; Start 64; Stop 88
aaatcaactgctggactacaagagc

SEQ ID NO: 10834 - DNA, 25 bp, Artificial
  probe
  misc_feature (1)..(25): SEQ ID NO: 7746; WAN02472J_at; Start 2; Stop 26
tggttggagtttttcggcaacaagc

SEQ ID NO: 10835 - DNA, 25 bp, Artificial
  probe
  misc_feature (1)..(25): SEQ ID NO: 7746; WAN02472J_at; Start 54; Stop 78
ttacccaagcaaatcaactgctgga

SEQ ID NO: 10836 - DNA, 25 bp, Artificial
  probe
  misc_feature (1)..(25): SEQ ID NO: 7746; WAN02472J_at; Start 78; Stop 102
actacaagagctggtccgaggagga

SEQ ID NO: 10837 - DNA, 25 bp, Artificial
  probe
  misc_feature (1)..(25): SEQ ID NO: 7746; WAN02472J_at; Start 63; Stop 87
caaatcaactgctggactacaagag

SEQ ID NO: 10838 - DNA, 25 bp, Artificial
  probe
  misc_feature (1)..(25): SEQ ID NO: 7746; WAN02472J_at; Start 71; Stop 95
ctgctggactacaagagctggtccg

SEQ ID NO: 10839 - DNA, 25 bp, Artificial
  probe
  misc_feature (1)..(25): SEQ ID NO: 7746; WAN02472J_at; Start 79; Stop 103
ctacaagagctggtccgaggaggac

SEQ ID NO: 10840 - DNA, 25 bp, Artificial
  probe
  misc_feature (1)..(25): SEQ ID NO: 7746; WAN02472J_at; Start 85; Stop 109
gagctggtccgaggaggacaggaaa

SEQ ID NO: 10841 - DNA, 25 bp, Artificial
  probe
  misc_feature (1)..(25): SEQ ID NO: 7746; WAN02472J_at; Start 62; Stop 86
gcaaatcaactgctggactacaaga

SEQ ID NO: 10842 - DNA, 25 bp, Artificial
  probe
  misc_feature (1)..(25): SEQ ID NO: 7746; WAN02472J_at; Start 59; Stop 83
caagcaaatcaactgctggactaca

SEQ ID NO: 10843 - DNA, 25 bp, Artificial
  probe
  misc_feature (1)..(25): SEQ ID NO: 7746; WAN02472J_at; Start 49; Stop 73
agccattacccaagcaaatcaactg

SEQ ID NO: 10844 - DNA, 25 bp, Artificial
  probe
  misc_feature (1)..(25): SEQ ID NO: 7746; WAN02472J_at; Start 44; Stop 68
caacgagccattacccaagcaaatc

SEQ ID NO: 10845 - DNA, 25 bp, Artificial
  probe
  misc_feature (1)..(25): SEQ ID NO: 7746; WAN02472J_at; Start 43; Stop 67
gcaacgagccattacccaagcaaat

SEQ ID NO: 10846 - DNA, 25 bp, Artificial
  probe
  misc_feature (1)..(25): SEQ ID NO: 7746; WAN02472J_at; Start 45; Stop 69
aacgagccattacccaagcaaatca

SEQ ID NO: 10847 - DNA, 25 bp, Artificial
  probe
  misc_feature (1)..(25): SEQ ID NO: 7746; WAN02472J_at; Start 52; Stop 76
cattacccaagcaaatcaactgctg

SEQ ID NO: 10848 - DNA, 25 bp, Artificial
  probe
  misc_feature (1)..(25): SEQ ID NO: 7746; WAN02472J_at; Start 65; Stop 89
aatcaactgctggactacaagagct

SEQ ID NO: 10849 - DNA, 25 bp, Artificial
  probe
  misc_feature (1)..(25): SEQ ID NO: 7746; WAN02472J_at; Start 48; Stop 72
gagccattacccaagcaaatcaact

SEQ ID NO: 10850 - DNA, 25 bp, Artificial
  probe
  misc_feature (1)..(25): SEQ ID NO: 7747; WAN02472K_at; Start 38; Stop 62
ctctcttggtcatgtttactttcaa

SEQ ID NO: 10851 - DNA, 25 bp, Artificial
  probe
  misc_feature (1)..(25): SEQ ID NO: 7747; WAN02472K_at; Start 24; Stop 48
cctagatatttcaactctcttggtc

SEQ ID NO: 10852 - DNA, 25 bp, Artificial
  probe
  misc_feature (1)..(25): SEQ ID NO: 7747; WAN02472K_at; Start 54; Stop 78
tactttcaaacctagccgtttctca

SEQ ID NO: 10853 - DNA, 25 bp, Artificial
  probe
  misc_feature (1)..(25): SEQ ID NO: 7747; WAN02472K_at; Start 45; Stop 69
ggtcatgtttactttcaaacctagc

SEQ ID NO: 10854 - DNA, 25 bp, Artificial
  probe
  misc_feature (1)..(25): SEQ ID NO: 7747; WAN02472K_at; Start 43; Stop 67
ttggtcatgtttactttcaaaccta

SEQ ID NO: 10855 - DNA, 25 bp, Artificial
  probe
  misc_feature (1)..(25): SEQ ID NO: 7747; WAN02472K_at; Start 35; Stop 59
caactctcttggtcatgtttacttt

SEQ ID NO: 10856 - DNA, 25 bp, Artificial
  probe
  misc_feature (1)..(25): SEQ ID NO: 7747; WAN02472K_at; Start 59; Stop 83
tcaaacctagccgtttctcaataaa

SEQ ID NO: 10857 - DNA, 25 bp, Artificial
  probe
  misc_feature (1)..(25): SEQ ID NO: 7747; WAN02472K_at; Start 48; Stop 72
catgtttactttcaaacctagccgt

SEQ ID NO: 10858 - DNA, 25 bp, Artificial
  probe
  misc_feature (1)..(25): SEQ ID NO: 7747; WAN02472K_at; Start 41; Stop 65
tcttggtcatgtttactttcaaacc

SEQ ID NO: 10859 - DNA, 25 bp, Artificial
  probe
  misc_feature (1)..(25): SEQ ID NO: 7747; WAN02472K_at; Start 30; Stop 54
tatttcaactctcttggtcatgttt

SEQ ID NO: 10860 - DNA, 25 bp, Artificial
  probe
  misc_feature (1)..(25): SEQ ID NO: 7747; WAN02472K_at; Start 23; Stop 47
acctagatatttcaactctcttggt

SEQ ID NO: 10861 - DNA, 25 bp, Artificial
  probe
  misc_feature (1)..(25): SEQ ID NO: 7747; WAN02472K_at; Start 21; Stop 45
aaacctagatatttcaactctcttg

SEQ ID NO: 10862 - DNA, 25 bp, Artificial
  probe
  misc_feature (1)..(25): SEQ ID NO: 7747; WAN02472K_at; Start 12; Stop 36
cagaacccaaaacctagatatttca

SEQ ID NO: 10863 - DNA, 25 bp, Artificial
  probe
  misc_feature (1)..(25): SEQ ID NO: 7747; WAN02472K_at; Start 34; Stop 58
tcaactctcttggtcatgtttactt

SEQ ID NO: 10864 - DNA, 25 bp, Artificial
  probe
  misc_feature (1)..(25): SEQ ID NO: 7747; WAN02472K_at; Start 18; Stop 42
ccaaaacctagatatttcaactctc

SEQ ID NO: 10865 - DNA, 25 bp, Artificial
  probe
  misc_feature (1)..(25): SEQ ID NO: 7747; WAN02472K_at; Start 22; Stop 46
aacctagatatttcaactctcttgg

SEQ ID NO: 10866 - DNA, 25 bp, Artificial
  probe
  misc_feature (1)..(25): SEQ ID NO: 7747; WAN02472K_at; Start 33; Stop 57
ttcaactctcttggtcatgtttact

SEQ ID NO: 10867 - DNA, 25 bp, Artificial
  probe
  misc_feature (1)..(25): SEQ ID NO: 7747; WAN02472K_at; Start 19; Stop 43
caaaacctagatatttcaactctct

SEQ ID NO: 10868 - DNA, 25 bp, Artificial
  probe
  misc_feature (1)..(25): SEQ ID NO: 7747; WAN02472K_at; Start 47; Stop 71
tcatgtttactttcaaacctagccg

SEQ ID NO: 10869 - DNA, 25 bp, Artificial
  probe
  misc_feature (1)..(25): SEQ ID NO: 7747; WAN02472K_at; Start 40; Stop 64
ctcttggtcatgtttactttcaaac

SEQ ID NO: 10870 - DNA, 25 bp, Artificial
  probe
  misc_feature (1)..(25): SEQ ID NO: 7747; WAN02472K_at; Start 56; Stop 80
ctttcaaacctagccgtttctcaat

SEQ ID NO: 10871 - DNA, 25 bp, Artificial
  probe
  misc_feature (1)..(25): SEQ ID NO: 7747; WAN02472K_at; Start 17; Stop 41
cccaaaacctagatatttcaactct

SEQ ID NO: 10872 - DNA, 25 bp, Artificial
  probe
  misc_feature (1)..(25): SEQ ID NO: 7747; WAN02472K_at; Start 42; Stop 66
cttggtcatgtttactttcaaacct

SEQ ID NO: 10873 - DNA, 25 bp, Artificial
  probe
  misc_feature (1)..(25): SEQ ID NO: 7747; WAN02472K_at; Start 39; Stop 63
tctcttggtcatgtttactttcaaa

SEQ ID NO: 10874 - DNA, 25 bp, Artificial
  probe
  misc_feature (1)..(25): SEQ ID NO: 7747; WAN02472K_at; Start 29; Stop 53
atatttcaactctcttggtcatgtt

SEQ ID NO: 10875 - DNA, 25 bp, Artificial
  probe
  misc_feature (1)..(25): SEQ ID NO: 7747; WAN02472K_at; Start 32; Stop 56
tttcaactctcttggtcatgtttac

SEQ ID NO: 10876 - DNA, 25 bp, Artificial
  probe
  misc_feature (1)..(25): SEQ ID NO: 7747; WAN02472K_at; Start 26; Stop 50
tagatatttcaactctcttggtcat

SEQ ID NO: 10877 - DNA, 25 bp, Artificial
  probe
  misc_feature (1)..(25): SEQ ID NO: 7747; WAN02472K_at; Start 36; Stop 60
aactctcttggtcatgtttactttc

SEQ ID NO: 10878 - DNA, 25 bp, Artificial
  probe
  misc_feature (1)..(25): SEQ ID NO: 7747; WAN02472K_at; Start 25; Stop 49
ctagatatttcaactctcttggtca

SEQ ID NO: 10879 - DNA, 25 bp, Artificial
  probe
  misc_feature (1)..(25): SEQ ID NO: 7747; WAN02472K_at; Start 46; Stop 70
gtcatgtttactttcaaacctagcc

SEQ ID NO: 10880 - DNA, 25 bp, Artificial
  probe
  misc_feature (1)..(25): SEQ ID NO: 7747; WAN02472K_at; Start 44; Stop 68
tggtcatgtttactttcaaacctag

SEQ ID NO: 10881 - DNA, 25 bp, Artificial
  probe
  misc_feature (1)..(25): SEQ ID NO: 7747; WAN02472K_at; Start 27; Stop 51
agatatttcaactctcttggtcatg

SEQ ID NO: 10882 - DNA, 25 bp, Artificial
  probe
  misc_feature (1)..(25): SEQ ID NO: 7747; WAN02472K_at; Start 28; Stop 52
gatatttcaactctcttggtcatgt

SEQ ID NO: 10883 - DNA, 25 bp, Artificial
  probe
  misc_feature (1)..(25): SEQ ID NO: 7747; WAN02472K_at; Start 37; Stop 61
actctcttggtcatgtttactttca

SEQ ID NO: 10884 - DNA, 25 bp, Artificial
  probe
  misc_feature (1)..(25): SEQ ID NO: 7748; WAN02472L_at; Start 13; Stop 37
actcacatggagagtaattttgact

SEQ ID NO: 10885 - DNA, 25 bp, Artificial
  probe
  misc_feature (1)..(25): SEQ ID NO: 7748; WAN02472L_at; Start 26; Stop 50
gtaattttgactttgaacagcctaa

SEQ ID NO: 10886 - DNA, 25 bp, Artificial
  probe
  misc_feature (1)..(25): SEQ ID NO: 7748; WAN02472L_at; Start 39; Stop 63
tgaacagcctaaaagtgccatcaaa

SEQ ID NO: 10887 - DNA, 25 bp, Artificial
  probe
  misc_feature (1)..(25): SEQ ID NO: 7748; WAN02472L_at; Start 50; Stop 74
aaagtgccatcaaatttgaattgga

SEQ ID NO: 10888 - DNA, 25 bp, Artificial
  probe
  misc_feature (1)..(25): SEQ ID NO: 7748; WAN02472L_at; Start 18; Stop 42
catggagagtaattttgactttgaa

SEQ ID NO: 10889 - DNA, 25 bp, Artificial
  probe
  misc_feature (1)..(25): SEQ ID NO: 7748; WAN02472L_at; Start 22; Stop 46
gagagtaattttgactttgaacagc

SEQ ID NO: 10890 - DNA, 25 bp, Artificial
  probe
  misc_feature (1)..(25): SEQ ID NO: 7748; WAN02472L_at; Start 32; Stop 56
ttgactttgaacagcctaaaagtgc

SEQ ID NO: 10891 - DNA, 25 bp, Artificial
  probe
  misc_feature (1)..(25): SEQ ID NO: 7748; WAN02472L_at; Start 25; Stop 49
agtaattttgactttgaacagccta

SEQ ID NO: 10892 - DNA, 25 bp, Artificial
  probe
  misc_feature (1)..(25): SEQ ID NO: 7748; WAN02472L_at; Start 38; Stop 62
ttgaacagcctaaaagtgccatcaa

SEQ ID NO: 10893 - DNA, 25 bp, Artificial
  probe
  misc_feature (1)..(25): SEQ ID NO: 7748; WAN02472L_at; Start 43; Stop 67
cagcctaaaagtgccatcaaatttg

SEQ ID NO: 10894 - DNA, 25 bp, Artificial
  probe
  misc_feature (1)..(25): SEQ ID NO: 7748; WAN02472L_at; Start 27; Stop 51
taattttgactttgaacagcctaaa

SEQ ID NO: 10895 - DNA, 25 bp, Artificial
  probe
  misc_feature (1)..(25): SEQ ID NO: 7748; WAN02472L_at; Start 29; Stop 53
attttgactttgaacagcctaaaag

SEQ ID NO: 10896 - DNA, 25 bp, Artificial
  probe
  misc_feature (1)..(25): SEQ ID NO: 7748; WAN02472L_at; Start 15; Stop 39
tcacatggagagtaattttgacttt

SEQ ID NO: 10897 - DNA, 25 bp, Artificial
  probe
  misc_feature (1)..(25): SEQ ID NO: 7748; WAN02472L_at; Start 35; Stop 59
actttgaacagcctaaaagtgccat

SEQ ID NO: 10898 - DNA, 25 bp, Artificial
  probe
  misc_feature (1)..(25): SEQ ID NO: 7748; WAN02472L_at; Start 10; Stop 34
caaactcacatggagagtaattttg

SEQ ID NO: 10899 - DNA, 25 bp, Artificial
  probe
  misc_feature (1)..(25): SEQ ID NO: 7748; WAN02472L_at; Start 46; Stop 70
cctaaaagtgccatcaaatttgaat

SEQ ID NO: 10900 - DNA, 25 bp, Artificial
  probe
  misc_feature (1)..(25): SEQ ID NO: 7748; WAN02472L_at; Start 9; Stop 33
tcaaactcacatggagagtaatttt

SEQ ID NO: 10901 - DNA, 25 bp, Artificial
  probe
  misc_feature (1)..(25): SEQ ID NO: 7748; WAN02472L_at; Start 14; Stop 38
ctcacatggagagtaattttgactt

SEQ ID NO: 10902 - DNA, 25 bp, Artificial
  probe
  misc_feature (1)..(25): SEQ ID NO: 7748; WAN02472L_at; Start 49; Stop 73
aaaagtgccatcaaatttgaattgg

SEQ ID NO: 10903 - DNA, 25 bp, Artificial
  probe
  misc_feature (1)..(25): SEQ ID NO: 7748; WAN02472L_at; Start 45; Stop 69
gcctaaaagtgccatcaaatttgaa

SEQ ID NO: 10904 - DNA, 25 bp, Artificial
  probe
  misc_feature (1)..(25): SEQ ID NO: 7748; WAN02472L_at; Start 42; Stop 66
acagcctaaaagtgccatcaaattt

SEQ ID NO: 10905 - DNA, 25 bp, Artificial
  probe
  misc_feature (1)..(25): SEQ ID NO: 7748; WAN02472L_at; Start 40; Stop 64
gaacagcctaaaagtgccatcaaat

SEQ ID NO: 10906 - DNA, 25 bp, Artificial
  probe
  misc_feature (1)..(25): SEQ ID NO: 7748; WAN02472L_at; Start 37; Stop 61
tttgaacagcctaaaagtgccatca

SEQ ID NO: 10907 - DNA, 25 bp, Artificial
  probe
  misc_feature (1)..(25): SEQ ID NO: 7748; WAN02472L_at; Start 48; Stop 72
taaaagtgccatcaaatttgaattg

SEQ ID NO: 10908 - DNA, 25 bp, Artificial
  probe
  misc_feature (1)..(25): SEQ ID NO: 7748; WAN02472L_at; Start 24; Stop 48
gagtaattttgactttgaacagcct

SEQ ID NO: 10909 - DNA, 25 bp, Artificial
  probe
  misc_feature (1)..(25): SEQ ID NO: 7748; WAN02472L_at; Start 33; Stop 57
tgactttgaacagcctaaaagtgcc

SEQ ID NO: 10910 - DNA, 25 bp, Artificial
  probe
  misc_feature (1)..(25): SEQ ID NO: 7748; WAN02472L_at; Start 12; Stop 36
aactcacatggagagtaattttgac

SEQ ID NO: 10911 - DNA, 25 bp, Artificial
  probe
  misc_feature (1)..(25): SEQ ID NO: 7748; WAN02472L_at; Start 21; Stop 45
ggagagtaattttgactttgaacag

SEQ ID NO: 10912 - DNA, 25 bp, Artificial
  probe
  misc_feature (1)..(25): SEQ ID NO: 7748; WAN02472L_at; Start 31; Stop 55
tttgactttgaacagcctaaaagtg

SEQ ID NO: 10913 - DNA, 25 bp, Artificial
  probe
  misc_feature (1)..(25): SEQ ID NO: 7748; WAN02472L_at; Start 23; Stop 47
agagtaattttgactttgaacagcc

SEQ ID NO: 10914 - DNA, 25 bp, Artificial
  probe
  misc_feature (1)..(25): SEQ ID NO: 7748; WAN02472L_at; Start 16; Stop 40
cacatggagagtaattttgactttg

SEQ ID NO: 10915 - DNA, 25 bp, Artificial
  probe
  misc_feature (1)..(25): SEQ ID NO: 7748; WAN02472L_at; Start 36; Stop 60
ctttgaacagcctaaaagtgccatc

SEQ ID NO: 10916 - DNA, 25 bp, Artificial
  probe
  misc_feature (1)..(25): SEQ ID NO: 7748; WAN02472L_at; Start 51; Stop 75
aagtgccatcaaatttgaattggaa

SEQ ID NO: 10917 - DNA, 25 bp, Artificial
  probe
  misc_feature (1)..(25): SEQ ID NO: 7748; WAN02472L_at; Start 41; Stop 65
aacagcctaaaagtgccatcaaatt

SEQ ID NO: 10918 - DNA, 25 bp, Artificial
  probe
  misc_feature (1)..(25): SEQ ID NO: 7749; WAN02472M_at; Start 40; Stop 64
agagcttccaaagaagtcccccaga

SEQ ID NO: 10919 - DNA, 25 bp, Artificial
  probe
  misc_feature (1)..(25): SEQ ID NO: 7749; WAN02472M_at; Start 42; Stop 66
agcttccaaagaagtcccccagaga

SEQ ID NO: 10920 - DNA, 25 bp, Artificial
  probe
  misc_feature (1)..(25): SEQ ID NO: 7749; WAN02472M_at; Start 43; Stop 67
gcttccaaagaagtcccccagagaa

SEQ ID NO: 10921 - DNA, 25 bp, Artificial
  probe
  misc_feature (1)..(25): SEQ ID NO: 7749; WAN02472M_at; Start 39; Stop 63
aagagcttccaaagaagtcccccag

SEQ ID NO: 10922 - DNA, 25 bp, Artificial
  probe
  misc_feature (1)..(25): SEQ ID NO: 7749; WAN02472M_at; Start 41; Stop 65
gagcttccaaagaagtcccccagag

SEQ ID NO: 10923 - DNA, 25 bp, Artificial
  probe
  misc_feature (1)..(25): SEQ ID NO: 7750; WAN02472N_at; Start 52; Stop 76
ggtagacaaagtctgtatctgaccg

SEQ ID NO: 10924 - DNA, 25 bp, Artificial
  probe
  misc_feature (1)..(25): SEQ ID NO: 7750; WAN02472N_at; Start 58; Stop 82
caaagtctgtatctgaccgtagcaa

SEQ ID NO: 10925 - DNA, 25 bp, Artificial
  probe
  misc_feature (1)..(25): SEQ ID NO: 7750; WAN02472N_at; Start 56; Stop 80
gacaaagtctgtatctgaccgtagc

SEQ ID NO: 10926 - DNA, 25 bp, Artificial
  probe
  misc_feature (1)..(25): SEQ ID NO: 7750; WAN02472N_at; Start 69; Stop 93
tctgaccgtagcaaataatttcatt

SEQ ID NO: 10927 - DNA, 25 bp, Artificial
  probe
  misc_feature (1)..(25): SEQ ID NO: 7750; WAN02472N_at; Start 77; Stop 101
tagcaaataatttcattgacggcag

SEQ ID NO: 10928 - DNA, 25 bp, Artificial
  probe
  misc_feature (1)..(25): SEQ ID NO: 7750; WAN02472N_at; Start 79; Stop 103
gcaaataatttcattgacggcagaa

SEQ ID NO: 10929 - DNA, 25 bp, Artificial
  probe
  misc_feature (1)..(25): SEQ ID NO: 7750; WAN02472N_at; Start 75; Stop 99
cgtagcaaataatttcattgacggc

SEQ ID NO: 10930 - DNA, 25 bp, Artificial
  probe
  misc_feature (1)..(25): SEQ ID NO: 7750; WAN02472N_at; Start 82; Stop 106
aataatttcattgacggcagaagca

SEQ ID NO: 10931 - DNA, 25 bp, Artificial
  probe
  misc_feature (1)..(25): SEQ ID NO: 7750; WAN02472N_at; Start 19; Stop 43
aacttccctgtttcaaagtatgata

SEQ ID NO: 10932 - DNA, 25 bp, Artificial
  probe
  misc_feature (1)..(25): SEQ ID NO: 7750; WAN02472N_at; Start 23; Stop 47
tccctgtttcaaagtatgataaact

SEQ ID NO: 10933 - DNA, 25 bp, Artificial
  probe
  misc_feature (1)..(25): SEQ ID NO: 7750; WAN02472N_at; Start 64; Stop 88
ctgtatctgaccgtagcaaataatt

SEQ ID NO: 10934 - DNA, 25 bp, Artificial
  probe
  misc_feature (1)..(25): SEQ ID NO: 7750; WAN02472N_at; Start 44; Stop 68
aactagtaggtagacaaagtctgta

SEQ ID NO: 10935 - DNA, 25 bp, Artificial
  probe
  misc_feature (1)..(25): SEQ ID NO: 7750; WAN02472N_at; Start 5; Stop 29
tagataaaatatataacttccctgt

SEQ ID NO: 10936 - DNA, 25 bp, Artificial
  probe
  misc_feature (1)..(25): SEQ ID NO: 7750; WAN02472N_at; Start 42; Stop 66
taaactagtaggtagacaaagtctg

SEQ ID NO: 10937 - DNA, 25 bp, Artificial
  probe
  misc_feature (1)..(25): SEQ ID NO: 7750; WAN02472N_at; Start 72; Stop 96
gaccgtagcaaataatttcattgac

SEQ ID NO: 10938 - DNA, 25 bp, Artificial
  probe
  misc_feature (1)..(25): SEQ ID NO: 7750; WAN02472N_at; Start 84; Stop 108
taatttcattgacggcagaagcatg

SEQ ID NO: 10939 - DNA, 25 bp, Artificial
  probe
  misc_feature (1)..(25): SEQ ID NO: 7750; WAN02472N_at; Start 59; Stop 83
aaagtctgtatctgaccgtagcaaa

SEQ ID NO: 10940 - DNA, 25 bp, Artificial
  probe
  misc_feature (1)..(25): SEQ ID NO: 7750; WAN02472N_at; Start 67; Stop 91
tatctgaccgtagcaaataatttca

SEQ ID NO: 10941 - DNA, 25 bp, Artificial
  probe
  misc_feature (1)..(25): SEQ ID NO: 7750; WAN02472N_at; Start 57; Stop 81
acaaagtctgtatctgaccgtagca

SEQ ID NO: 10942 - DNA, 25 bp, Artificial
  probe
  misc_feature (1)..(25): SEQ ID NO: 7750; WAN02472N_at; Start 40; Stop 64
gataaactagtaggtagacaaagtc

SEQ ID NO: 10943 - DNA, 25 bp, Artificial
  probe
  misc_feature (1)..(25): SEQ ID NO: 7750; WAN02472N_at; Start 32; Stop 56
caaagtatgataaactagtaggtag

SEQ ID NO: 10944 - DNA, 25 bp, Artificial
  probe
  misc_feature (1)..(25): SEQ ID NO: 7750; WAN02472N_at; Start 2; Stop 26
tgatagataaaatatataacttccc

SEQ ID NO: 10945 - DNA, 25 bp, Artificial
  probe
  misc_feature (1)..(25): SEQ ID NO: 7750; WAN02472N_at; Start 87; Stop 111
tttcattgacggcagaagcatggta

SEQ ID NO: 10946 - DNA, 25 bp, Artificial
  probe
  misc_feature (1)..(25): SEQ ID NO: 7750; WAN02472N_at; Start 16; Stop 40
tataacttccctgtttcaaagtatg

SEQ ID NO: 10947 - DNA, 25 bp, Artificial
  probe
  misc_feature (1)..(25): SEQ ID NO: 7750; WAN02472N_at; Start 90; Stop 114
cattgacggcagaagcatggtagca

SEQ ID NO: 10948 - DNA, 25 bp, Artificial
  probe
  misc_feature (1)..(25): SEQ ID NO: 7750; WAN02472N_at; Start 89; Stop 113
tcattgacggcagaagcatggtagc

SEQ ID NO: 10949 - DNA, 25 bp, Artificial
  probe
  misc_feature (1)..(25): SEQ ID NO: 7750; WAN02472N_at; Start 35; Stop 59
agtatgataaactagtaggtagaca

SEQ ID NO: 10950 - DNA, 25 bp, Artificial
  probe
  misc_feature (1)..(25): SEQ ID NO: 7750; WAN02472N_at; Start 50; Stop 74
taggtagacaaagtctgtatctgac

SEQ ID NO: 10951 - DNA, 25 bp, Artificial
  probe
  misc_feature (1)..(25): SEQ ID NO: 7750; WAN02472N_at; Start 12; Stop 36
aatatataacttccctgtttcaaag

SEQ ID NO: 10952 - DNA, 25 bp, Artificial
  probe
  misc_feature (1)..(25): SEQ ID NO: 7750; WAN02472N_at; Start 46; Stop 70
ctagtaggtagacaaagtctgtatc

SEQ ID NO: 10953 - DNA, 25 bp, Artificial
  probe
  misc_feature (1)..(25): SEQ ID NO: 7750; WAN02472N_at; Start 54; Stop 78
tagacaaagtctgtatctgaccgta

SEQ ID NO: 10954 - DNA, 25 bp, Artificial
  probe
  misc_feature (1)..(25): SEQ ID NO: 7750; WAN02472N_at; Start 29; Stop 53
tttcaaagtatgataaactagtagg

SEQ ID NO: 10955 - DNA, 25 bp, Artificial
  probe
  misc_feature (1)..(25): SEQ ID NO: 7750; WAN02472N_at; Start 62; Stop 86
gtctgtatctgaccgtagcaaataa

SEQ ID NO: 10956 - DNA, 25 bp, Artificial
  probe
  misc_feature (1)..(25): SEQ ID NO: 7750; WAN02472N_at; Start 81; Stop 105
aaataatttcattgacggcagaagc

SEQ ID NO: 10957 - DNA, 25 bp, Artificial
  probe
  misc_feature (1)..(25): SEQ ID NO: 7751; WAN02472O_at; Start 19; Stop 43
gcagttggtttatcaatgggcttgg

SEQ ID NO: 10958 - DNA, 25 bp, Artificial
  probe
  misc_feature (1)..(25): SEQ ID NO: 7751; WAN02472O_at; Start 17; Stop 41
tagcagttggtttatcaatgggctt

SEQ ID NO: 10959 - DNA, 25 bp, Artificial
  probe
  misc_feature (1)..(25): SEQ ID NO: 7751; WAN02472O_at; Start 22; Stop 46
gttggtttatcaatgggcttggtct

SEQ ID NO: 10960 - DNA, 25 bp, Artificial
  probe
  misc_feature (1)..(25): SEQ ID NO: 7751; WAN02472O_at; Start 29; Stop 53
tatcaatgggcttggtcttgttgtt

SEQ ID NO: 10961 - DNA, 25 bp, Artificial
  probe
  misc_feature (1)..(25): SEQ ID NO: 7751; WAN02472O_at; Start 24; Stop 48
tggtttatcaatgggcttggtcttg

SEQ ID NO: 10962 - DNA, 25 bp, Artificial
  probe
  misc_feature (1)..(25): SEQ ID NO: 7751; WAN02472O_at; Start 14; Stop 38
tgctagcagttggtttatcaatggg

SEQ ID NO: 10963 - DNA, 25 bp, Artificial
  probe
  misc_feature (1)..(25): SEQ ID NO: 7751; WAN02472O_at; Start 35; Stop 59
tgggcttggtcttgttgtttgaaag

SEQ ID NO: 10964 - DNA, 25 bp, Artificial
  probe
  misc_feature (1)..(25): SEQ ID NO: 7751; WAN02472O_at; Start 8; Stop 32
tactcttgctagcagttggtttatc

SEQ ID NO: 10965 - DNA, 25 bp, Artificial
  probe
  misc_feature (1)..(25): SEQ ID NO: 7751; WAN02472O_at; Start 11; Stop 35
tcttgctagcagttggtttatcaat

SEQ ID NO: 10966 - DNA, 25 bp, Artificial
  probe
  misc_feature (1)..(25): SEQ ID NO: 7751; WAN02472O_at; Start 41; Stop 65
tggtcttgttgtttgaaagcttcca

SEQ ID NO: 10967 - DNA, 25 bp, Artificial
  probe
  misc_feature (1)..(25): SEQ ID NO: 7751; WAN02472O_at; Start 15; Stop 39
gctagcagttggtttatcaatgggc

SEQ ID NO: 10968 - DNA, 25 bp, Artificial
  probe
  misc_feature (1)..(25): SEQ ID NO: 7751; WAN02472O_at; Start 5; Stop 29
cgatactcttgctagcagttggttt

SEQ ID NO: 10969 - DNA, 25 bp, Artificial
  probe
  misc_feature (1)..(25): SEQ ID NO: 7751; WAN02472O_at; Start 20; Stop 44
cagttggtttatcaatgggcttggt

SEQ ID NO: 10970 - DNA, 25 bp, Artificial
  probe
  misc_feature (1)..(25): SEQ ID NO: 7751; WAN02472O_at; Start 44; Stop 68
tcttgttgtttgaaagcttccaagg

SEQ ID NO: 10971 - DNA, 25 bp, Artificial
  probe
  misc_feature (1)..(25): SEQ ID NO: 7751; WAN02472O_at; Start 47; Stop 71
tgttgtttgaaagcttccaaggaat

SEQ ID NO: 10972 - DNA, 25 bp, Artificial
  probe
  misc_feature (1)..(25): SEQ ID NO: 7751; WAN02472O_at; Start 10; Stop 34
ctcttgctagcagttggtttatcaa

SEQ ID NO: 10973 - DNA, 25 bp, Artificial
  probe
  misc_feature (1)..(25): SEQ ID NO: 7751; WAN02472O_at; Start 28; Stop 52
ttatcaatgggcttggtcttgttgt

SEQ ID NO: 10974 - DNA, 25 bp, Artificial
  probe
  misc_feature (1)..(25): SEQ ID NO: 7751; WAN02472O_at; Start 6; Stop 30
gatactcttgctagcagttggttta

SEQ ID NO: 10975 - DNA, 25 bp, Artificial
  probe
  misc_feature (1)..(25): SEQ ID NO: 7751; WAN02472O_at; Start 37; Stop 61
ggcttggtcttgttgtttgaaagct

SEQ ID NO: 10976 - DNA, 25 bp, Artificial
  probe
  misc_feature (1)..(25): SEQ ID NO: 7751; WAN02472O_at; Start 46; Stop 70
ttgttgtttgaaagcttccaaggaa

SEQ ID NO: 10977 - DNA, 25 bp, Artificial
  probe
  misc_feature (1)..(25): SEQ ID NO: 7751; WAN02472O_at; Start 33; Stop 57
aatgggcttggtcttgttgtttgaa

SEQ ID NO: 10978 - DNA, 25 bp, Artificial
  probe
  misc_feature (1)..(25): SEQ ID NO: 7751; WAN02472O_at; Start 34; Stop 58
atgggcttggtcttgttgtttgaaa

SEQ ID NO: 10979 - DNA, 25 bp, Artificial
  probe
  misc_feature (1)..(25): SEQ ID NO: 7751; WAN02472O_at; Start 39; Stop 63
cttggtcttgttgtttgaaagcttc

SEQ ID NO: 10980 - DNA, 25 bp, Artificial
  probe
  misc_feature (1)..(25): SEQ ID NO: 7751; WAN02472O_at; Start 12; Stop 36
cttgctagcagttggtttatcaatg

SEQ ID NO: 10981 - DNA, 25 bp, Artificial
  probe
  misc_feature (1)..(25): SEQ ID NO: 7751; WAN02472O_at; Start 9; Stop 33
actcttgctagcagttggtttatca

SEQ ID NO: 10982 - DNA, 25 bp, Artificial
  probe
  misc_feature (1)..(25): SEQ ID NO: 7751; WAN02472O_at; Start 45; Stop 69
cttgttgtttgaaagcttccaagga

SEQ ID NO: 10983 - DNA, 25 bp, Artificial
  probe
  misc_feature (1)..(25): SEQ ID NO: 7751; WAN02472O_at; Start 32; Stop 56
caatgggcttggtcttgttgtttga

SEQ ID NO: 10984 - DNA, 25 bp, Artificial
  probe
  misc_feature (1)..(25): SEQ ID NO: 7751; WAN02472O_at; Start 48; Stop 72
gttgtttgaaagcttccaaggaatc

SEQ ID NO: 10985 - DNA, 25 bp, Artificial
  probe
  misc_feature (1)..(25): SEQ ID NO: 7751; WAN02472O_at; Start 42; Stop 66
ggtcttgttgtttgaaagcttccaa

SEQ ID NO: 10986 - DNA, 25 bp, Artificial
  probe
  misc_feature (1)..(25): SEQ ID NO: 7751; WAN02472O_at; Start 50; Stop 74
tgtttgaaagcttccaaggaatccc

SEQ ID NO: 10987 - DNA, 25 bp, Artificial
  probe
  misc_feature (1)..(25): SEQ ID NO: 7751; WAN02472O_at; Start 21; Stop 45
agttggtttatcaatgggcttggtc

SEQ ID NO: 10988 - DNA, 25 bp, Artificial
  probe
  misc_feature (1)..(25): SEQ ID NO: 7751; WAN02472O_at; Start 49; Stop 73
ttgtttgaaagcttccaaggaatcc

SEQ ID NO: 10989 - DNA, 25 bp, Artificial
  probe
  misc_feature (1)..(25): SEQ ID NO: 7751; WAN02472O_at; Start 31; Stop 55
tcaatgggcttggtcttgttgtttg

SEQ ID NO: 10990 - DNA, 25 bp, Artificial
  probe
  misc_feature (1)..(25): SEQ ID NO: 7751; WAN02472O_at; Start 16; Stop 40
ctagcagttggtttatcaatgggct

SEQ ID NO: 10991 - DNA, 25 bp, Artificial
  probe
  misc_feature (1)..(25): SEQ ID NO: 7752; WAN02472P_at; Start 36; Stop 60
gggatttttctggctctttgtcaac

SEQ ID NO: 10992 - DNA, 25 bp, Artificial
  probe
  misc_feature (1)..(25): SEQ ID NO: 7752; WAN02472P_at; Start 34; Stop 58
aagggatttttctggctctttgtca

SEQ ID NO: 10993 - DNA, 25 bp, Artificial
  probe
  misc_feature (1)..(25): SEQ ID NO: 7752; WAN02472P_at; Start 32; Stop 56
acaagggatttttctggctctttgt

SEQ ID NO: 10994 - DNA, 25 bp, Artificial
  probe
  misc_feature (1)..(25): SEQ ID NO: 7752; WAN02472P_at; Start 33; Stop 57
caagggatttttctggctctttgtc

SEQ ID NO: 10995 - DNA, 25 bp, Artificial
  probe
  misc_feature (1)..(25): SEQ ID NO: 7752; WAN02472P_at; Start 35; Stop 59
agggatttttctggctctttgtcaa

SEQ ID NO: 10996 - DNA, 25 bp, Artificial
  probe
  misc_feature (1)..(25): SEQ ID NO: 6017; WAN02495P_at; Start 109; Stop 133
aaaaagtgcgcaccgattcggtgct

SEQ ID NO: 10997 - DNA, 25 bp, Artificial
  probe
  misc_feature (1)..(25): SEQ ID NO: 6017; WAN02495P_at; Start 45; Stop 69
tattttggaaccattagaaacaaca

SEQ ID NO: 10998 - DNA, 25 bp, Artificial
  probe
  misc_feature (1)..(25): SEQ ID NO: 6017; WAN02495P_at; Start 108; Stop 132
gaaaaagtgcgcaccgattcggtgc

SEQ ID NO: 10999 - DNA, 25 bp, Artificial
  probe
  misc_feature (1)..(25): SEQ ID NO: 6017; WAN02495P_at; Start 94; Stop 118
tccgtacacaacttgaaaaagtgcg

SEQ ID NO: 11000 - DNA, 25 bp, Artificial
  probe
  misc_feature (1)..(25): SEQ ID NO: 6017; WAN02495P_at; Start 181; Stop 205
aacaaatacaagtatagcgttttca

SEQ ID NO: 11001 - DNA, 25 bp, Artificial
  probe
  misc_feature (1)..(25): SEQ ID NO: 6017; WAN02495P_at; Start 85; Stop 109
aaggctttgtccgtacacaacttga

SEQ ID NO: 11002 - DNA, 25 bp, Artificial
  probe
  misc_feature (1)..(25): SEQ ID NO: 6017; WAN02495P_at; Start 107; Stop 131
tgaaaaagtgcgcaccgattcggtg

SEQ ID NO: 11003 - DNA, 25 bp, Artificial
  probe
  misc_feature (1)..(25): SEQ ID NO: 6017; WAN02495P_at; Start 6; Stop 30
gactactccaacagttaagtcaaat

SEQ ID NO: 11004 - DNA, 25 bp, Artificial
  probe
  misc_feature (1)..(25): SEQ ID NO: 6017; WAN02495P_at; Start 98; Stop 122
tacacaacttgaaaaagtgcgcacc

SEQ ID NO: 11005 - DNA, 25 bp, Artificial
  probe
  misc_feature (1)..(25): SEQ ID NO: 6017; WAN02495P_at; Start 68; Stop 92
catagcaaagttaaaataaggcttt

SEQ ID NO: 11006 - DNA, 25 bp, Artificial
  probe
  misc_feature (1)..(25): SEQ ID NO: 6017; WAN02495P_at; Start 1; Stop 25
accatgactactccaacagttaagt

SEQ ID NO: 11007 - DNA, 25 bp, Artificial
  probe
  misc_feature (1)..(25): SEQ ID NO: 6017; WAN02495P_at; Start 51; Stop 75
ggaaccattagaaacaacatagcaa

SEQ ID NO: 11008 - DNA, 25 bp, Artificial
  probe
  misc_feature (1)..(25): SEQ ID NO: 6017; WAN02495P_at; Start 82; Stop 106
aataaggctttgtccgtacacaact

SEQ ID NO: 11009 - DNA, 25 bp, Artificial
  probe
  misc_feature (1)..(25): SEQ ID NO: 6017; WAN02495P_at; Start 255; Stop 279
tgtgtggctaatctttatataaatg

SEQ ID NO: 11010 - DNA, 25 bp, Artificial
  probe
  misc_feature (1)..(25): SEQ ID NO: 6017; WAN02495P_at; Start 102; Stop 126
caacttgaaaaagtgcgcaccgatt

SEQ ID NO: 11011 - DNA, 25 bp, Artificial
  probe
  misc_feature (1)..(25): SEQ ID NO: 6017; WAN02495P_at; Start 104; Stop 128
acttgaaaaagtgcgcaccgattcg

SEQ ID NO: 11012 - DNA, 25 bp, Artificial
  probe
  misc_feature (1)..(25): SEQ ID NO: 6017; WAN02495P_at; Start 244; Stop 268
tacttaatttatgtgtggctaatct

SEQ ID NO: 11013 - DNA, 25 bp, Artificial
  probe
  misc_feature (1)..(25): SEQ ID NO: 6017; WAN02495P_at; Start 143; Stop 167
tactatactaatttattctactctt

SEQ ID NO: 11014 - DNA, 25 bp, Artificial
  probe
  misc_feature (1)..(25): SEQ ID NO: 6017; WAN02495P_at; Start 117; Stop 141
cgcaccgattcggtgcttttttgtt

SEQ ID NO: 11015 - DNA, 25 bp, Artificial
  probe
  misc_feature (1)..(25): SEQ ID NO: 6017; WAN02495P_at; Start 49; Stop 73
ttggaaccattagaaacaacatagc

SEQ ID NO: 11016 - DNA, 25 bp, Artificial
  probe
  misc_feature (1)..(25): SEQ ID NO: 6017; WAN02495P_at; Start 55; Stop 79
ccattagaaacaacatagcaaagtt

SEQ ID NO: 11017 - DNA, 25 bp, Artificial
  probe
  misc_feature (1)..(25): SEQ ID NO: 6017; WAN02495P_at; Start 88; Stop 112
gctttgtccgtacacaacttgaaaa

SEQ ID NO: 11018 - DNA, 25 bp, Artificial
  probe
  misc_feature (1)..(25): SEQ ID NO: 6017; WAN02495P_at; Start 9; Stop 33
tactccaacagttaagtcaaattta

SEQ ID NO: 11019 - DNA, 25 bp, Artificial
  probe
  misc_feature (1)..(25): SEQ ID NO: 6017; WAN02495P_at; Start 92; Stop 116
tgtccgtacacaacttgaaaaagtg

SEQ ID NO: 11020 - DNA, 25 bp, Artificial
  probe
  misc_feature (1)..(25): SEQ ID NO: 6017; WAN02495P_at; Start 87; Stop 111
ggctttgtccgtacacaacttgaaa

SEQ ID NO: 11021 - DNA, 25 bp, Artificial
  probe
  misc_feature (1)..(25): SEQ ID NO: 6017; WAN02495P_at; Start 217; Stop 241
taaataggtagattcaagtagagaa

SEQ ID NO: 11022 - DNA, 25 bp, Artificial
  probe
  misc_feature (1)..(25): SEQ ID NO: 6017; WAN02495P_at; Start 189; Stop 213
caagtatagcgttttcattagtttt

SEQ ID NO: 11023 - DNA, 25 bp, Artificial
  probe
  misc_feature (1)..(25): SEQ ID NO: 6017; WAN02495P_at; Start 65; Stop 89
caacatagcaaagttaaaataaggc

SEQ ID NO: 11024 - DNA, 25 bp, Artificial
  probe
  misc_feature (1)..(25): SEQ ID NO: 6017; WAN02495P_at; Start 100; Stop 124
cacaacttgaaaaagtgcgcaccga

SEQ ID NO: 11025 - DNA, 25 bp, Artificial
  probe
  misc_feature (1)..(25): SEQ ID NO: 6017; WAN02495P_at; Start 112; Stop 136
aagtgcgcaccgattcggtgctttt

SEQ ID NO: 11026 - DNA, 25 bp, Artificial
  probe
  misc_feature (1)..(25): SEQ ID NO: 6017; WAN02495P_at; Start 223; Stop 247
ggtagattcaagtagagaatttact

SEQ ID NO: 11027 - DNA, 25 bp, Artificial
  probe
  misc_feature (1)..(25): SEQ ID NO: 6017; WAN02495P_at; Start 187; Stop 211
tacaagtatagcgttttcattagtt

SEQ ID NO: 11028 - DNA, 25 bp, Artificial
  probe
  misc_feature (1)..(25): SEQ ID NO: 6017; WAN02495P_at; Start 96; Stop 120
cgtacacaacttgaaaaagtgcgca

SEQ ID NO: 11029 - DNA, 25 bp, Artificial
  probe
  misc_feature (1)..(25): SEQ ID NO: 6017; WAN02495P_at; Start 79; Stop 103
taaaataaggctttgtccgtacaca

SEQ ID NO: 11030 - DNA, 25 bp, Artificial
  probe
  misc_feature (1)..(25): SEQ ID NO: 6001; WAN02495Q_at; Start 23; Stop 47
ctagaaatcttctatttatgaaagg

SEQ ID NO: 11031 - DNA, 25 bp, Artificial
  probe
  misc_feature (1)..(25): SEQ ID NO: 6001; WAN02495Q_at; Start 8; Stop 32
gtggagttaattacactagaaatct

SEQ ID NO: 11032 - DNA, 25 bp, Artificial
  probe
  misc_feature (1)..(25): SEQ ID NO: 6001; WAN02495Q_at; Start 6; Stop 30
tagtggagttaattacactagaaat

SEQ ID NO: 11033 - DNA, 25 bp, Artificial
  probe
  misc_feature (1)..(25): SEQ ID NO: 6001; WAN02495Q_at; Start 18; Stop 42
ttacactagaaatcttctatttatg

SEQ ID NO: 11034 - DNA, 25 bp, Artificial
  probe
  misc_feature (1)..(25): SEQ ID NO: 6001; WAN02495Q_at; Start 27; Stop 51
aaatcttctatttatgaaaggaaat

SEQ ID NO: 11035 - DNA, 25 bp, Artificial
  probe
  misc_feature (1)..(25): SEQ ID NO: 6001; WAN02495Q_at; Start 30; Stop 54
tcttctatttatgaaaggaaatatc

SEQ ID NO: 11036 - DNA, 25 bp, Artificial
  probe
  misc_feature (1)..(25): SEQ ID NO: 6001; WAN02495Q_at; Start 17; Stop 41
attacactagaaatcttctatttat

SEQ ID NO: 11037 - DNA, 25 bp, Artificial
  probe
  misc_feature (1)..(25): SEQ ID NO: 6001; WAN02495Q_at; Start 1; Stop 25
aagattagtggagttaattacacta

SEQ ID NO: 11038 - DNA, 25 bp, Artificial
  probe
  misc_feature (1)..(25): SEQ ID NO: 6001; WAN02495Q_at; Start 29; Stop 53
atcttctatttatgaaaggaaatat

SEQ ID NO: 11039 - DNA, 25 bp, Artificial
  probe
  misc_feature (1)..(25): SEQ ID NO: 6001; WAN02495Q_at; Start 16; Stop 40
aattacactagaaatcttctattta

SEQ ID NO: 11040 - DNA, 25 bp, Artificial
  probe
  misc_feature (1)..(25): SEQ ID NO: 6001; WAN02495Q_at; Start 26; Stop 50
gaaatcttctatttatgaaaggaaa

SEQ ID NO: 11041 - DNA, 25 bp, Artificial
  probe
  misc_feature (1)..(25): SEQ ID NO: 6001; WAN02495Q_at; Start 4; Stop 28
attagtggagttaattacactagaa

SEQ ID NO: 11042 - DNA, 25 bp, Artificial
  probe
  misc_feature (1)..(25): SEQ ID NO: 6001; WAN02495Q_at; Start 13; Stop 37
gttaattacactagaaatcttctat

SEQ ID NO: 11043 - DNA, 25 bp, Artificial
  probe
  misc_feature (1)..(25): SEQ ID NO: 6001; WAN02495Q_at; Start 5; Stop 29
ttagtggagttaattacactagaaa

SEQ ID NO: 11044 - DNA, 25 bp, Artificial
  probe
  misc_feature (1)..(25): SEQ ID NO: 6001; WAN02495Q_at; Start 2; Stop 26
agattagtggagttaattacactag

SEQ ID NO: 11045 - DNA, 25 bp, Artificial
  probe
  misc_feature (1)..(25): SEQ ID NO: 6001; WAN02495Q_at; Start 11; Stop 35
gagttaattacactagaaatcttct

SEQ ID NO: 11046 - DNA, 25 bp, Artificial
  probe
  misc_feature (1)..(25): SEQ ID NO: 6001; WAN02495Q_at; Start 25; Stop 49
agaaatcttctatttatgaaaggaa

SEQ ID NO: 11047 - DNA, 25 bp, Artificial
  probe
  misc_feature (1)..(25): SEQ ID NO: 6001; WAN02495Q_at; Start 9; Stop 33
tggagttaattacactagaaatctt

SEQ ID NO: 11048 - DNA, 25 bp, Artificial
  probe
  misc_feature (1)..(25): SEQ ID NO: 6001; WAN02495Q_at; Start 10; Stop 34
ggagttaattacactagaaatcttc

SEQ ID NO: 11049 - DNA, 25 bp, Artificial
  probe
  misc_feature (1)..(25): SEQ ID NO: 6001; WAN02495Q_at; Start 15; Stop 39
taattacactagaaatcttctattt

SEQ ID NO: 11050 - DNA, 25 bp, Artificial
  probe
  misc_feature (1)..(25): SEQ ID NO: 6001; WAN02495Q_at; Start 12; Stop 36
agttaattacactagaaatcttcta

SEQ ID NO: 11051 - DNA, 25 bp, Artificial
  probe
  misc_feature (1)..(25): SEQ ID NO: 6001; WAN02495Q_at; Start 28; Stop 52
aatcttctatttatgaaaggaaata

SEQ ID NO: 11052 - DNA, 25 bp, Artificial
  probe
  misc_feature (1)..(25): SEQ ID NO: 6001; WAN02495Q_at; Start 21; Stop 45
cactagaaatcttctatttatgaaa

SEQ ID NO: 11053 - DNA, 25 bp, Artificial
  probe
  misc_feature (1)..(25): SEQ ID NO: 6001; WAN02495Q_at; Start 24; Stop 48
tagaaatcttctatttatgaaagga

SEQ ID NO: 11054 - DNA, 25 bp, Artificial
  probe
  misc_feature (1)..(25): SEQ ID NO: 6001; WAN02495Q_at; Start 20; Stop 44
acactagaaatcttctatttatgaa

SEQ ID NO: 11055 - DNA, 25 bp, Artificial
  probe
  misc_feature (1)..(25): SEQ ID NO: 6001; WAN02495Q_at; Start 19; Stop 43
tacactagaaatcttctatttatga

SEQ ID NO: 11056 - DNA, 25 bp, Artificial
  probe
  misc_feature (1)..(25): SEQ ID NO: 6001; WAN02495Q_at; Start 7; Stop 31
agtggagttaattacactagaaatc

SEQ ID NO: 11057 - DNA, 25 bp, Artificial
  probe
  misc_feature (1)..(25): SEQ ID NO: 6001; WAN02495Q_at; Start 3; Stop 27
gattagtggagttaattacactaga

SEQ ID NO: 11058 - DNA, 25 bp, Artificial
  probe
  misc_feature (1)..(25): SEQ ID NO: 6001; WAN02495Q_at; Start 14; Stop 38
ttaattacactagaaatcttctatt

SEQ ID NO: 11059 - DNA, 25 bp, Artificial
  probe
  misc_feature (1)..(25): SEQ ID NO: 6001; WAN02495Q_at; Start 22; Stop 46
actagaaatcttctatttatgaaag

SEQ ID NO: 11060 - DNA, 25 bp, Artificial
  probe
  misc_feature (1)..(25): SEQ ID NO: 6118; WAN02495R_at; Start 15; Stop 39
catcagtcctataaaaagtagtatc

SEQ ID NO: 11061 - DNA, 25 bp, Artificial
  probe
  misc_feature (1)..(25): SEQ ID NO: 6118; WAN02495R_at; Start 3; Stop 27
gctttctccttgcatcagtcctata

SEQ ID NO: 11062 - DNA, 25 bp, Artificial
  probe
  misc_feature (1)..(25): SEQ ID NO: 6118; WAN02495R_at; Start 7; Stop 31
tctccttgcatcagtcctataaaaa

SEQ ID NO: 11063 - DNA, 25 bp, Artificial
  probe
  misc_feature (1)..(25): SEQ ID NO: 6118; WAN02495R_at; Start 37; Stop 61
atcatagtgtcgtttgaaatatcag

SEQ ID NO: 11064 - DNA, 25 bp, Artificial
  probe
  misc_feature (1)..(25): SEQ ID NO: 6118; WAN02495R_at; Start 18; Stop 42
cagtcctataaaaagtagtatcata

SEQ ID NO: 11065 - DNA, 25 bp, Artificial
  probe
  misc_feature (1)..(25): SEQ ID NO: 6118; WAN02495R_at; Start 13; Stop 37
tgcatcagtcctataaaaagtagta

SEQ ID NO: 11066 - DNA, 25 bp, Artificial
  probe
  misc_feature (1)..(25): SEQ ID NO: 6118; WAN02495R_at; Start 40; Stop 64
atagtgtcgtttgaaatatcaggag

SEQ ID NO: 11067 - DNA, 25 bp, Artificial
  probe
  misc_feature (1)..(25): SEQ ID NO: 6118; WAN02495R_at; Start 5; Stop 29
tttctccttgcatcagtcctataaa

SEQ ID NO: 11068 - DNA, 25 bp, Artificial
  probe
  misc_feature (1)..(25): SEQ ID NO: 6118; WAN02495R_at; Start 17; Stop 41
tcagtcctataaaaagtagtatcat

SEQ ID NO: 11069 - DNA, 25 bp, Artificial
  probe
  misc_feature (1)..(25): SEQ ID NO: 6118; WAN02495R_at; Start 19; Stop 43
agtcctataaaaagtagtatcatag

SEQ ID NO: 11070 - DNA, 25 bp, Artificial
  probe
  misc_feature (1)..(25): SEQ ID NO: 6118; WAN02495R_at; Start 38; Stop 62
tcatagtgtcgtttgaaatatcagg

SEQ ID NO: 11071 - DNA, 25 bp, Artificial
  probe
  misc_feature (1)..(25): SEQ ID NO: 6118; WAN02495R_at; Start 10; Stop 34
ccttgcatcagtcctataaaaagta

SEQ ID NO: 11072 - DNA, 25 bp, Artificial
  probe
  misc_feature (1)..(25): SEQ ID NO: 6118; WAN02495R_at; Start 6; Stop 30
ttctccttgcatcagtcctataaaa

SEQ ID NO: 11073 - DNA, 25 bp, Artificial
  probe
  misc_feature (1)..(25): SEQ ID NO: 6118; WAN02495R_at; Start 9; Stop 33
tccttgcatcagtcctataaaaagt

SEQ ID NO: 11074 - DNA, 25 bp, Artificial
  probe
  misc_feature (1)..(25): SEQ ID NO: 6118; WAN02495R_at; Start 31; Stop 55
agtagtatcatagtgtcgtttgaaa

SEQ ID NO: 11075 - DNA, 25 bp, Artificial
  probe
  misc_feature (1)..(25): SEQ ID NO: 6118; WAN02495R_at; Start 39; Stop 63
catagtgtcgtttgaaatatcagga

SEQ ID NO: 11076 - DNA, 25 bp, Artificial
  probe
  misc_feature (1)..(25): SEQ ID NO: 6118; WAN02495R_at; Start 26; Stop 50
taaaaagtagtatcatagtgtcgtt

SEQ ID NO: 11077 - DNA, 25 bp, Artificial
  probe
  misc_feature (1)..(25): SEQ ID NO: 6118; WAN02495R_at; Start 35; Stop 59
gtatcatagtgtcgtttgaaatatc

SEQ ID NO: 11078 - DNA, 25 bp, Artificial
  probe
  misc_feature (1)..(25): SEQ ID NO: 6118; WAN02495R_at; Start 33; Stop 57
tagtatcatagtgtcgtttgaaata

SEQ ID NO: 11079 - DNA, 25 bp, Artificial
  probe
  misc_feature (1)..(25): SEQ ID NO: 6118; WAN02495R_at; Start 24; Stop 48
tataaaaagtagtatcatagtgtcg

SEQ ID NO: 11080 - DNA, 25 bp, Artificial
  probe
  misc_feature (1)..(25): SEQ ID NO: 6118; WAN02495R_at; Start 30; Stop 54
aagtagtatcatagtgtcgtttgaa

SEQ ID NO: 11081 - DNA, 25 bp, Artificial
  probe
  misc_feature (1)..(25): SEQ ID NO: 6118; WAN02495R_at; Start 11; Stop 35
cttgcatcagtcctataaaaagtag

SEQ ID NO: 11082 - DNA, 25 bp, Artificial
  probe
  misc_feature (1)..(25): SEQ ID NO: 6118; WAN02495R_at; Start 12; Stop 36
ttgcatcagtcctataaaaagtagt

SEQ ID NO: 11083 - DNA, 25 bp, Artificial
  probe
  misc_feature (1)..(25): SEQ ID NO: 6118; WAN02495R_at; Start 1; Stop 25
gagctttctccttgcatcagtccta

SEQ ID NO: 11084 - DNA, 25 bp, Artificial
  probe
  misc_feature (1)..(25): SEQ ID NO: 6118; WAN02495R_at; Start 2; Stop 26
agctttctccttgcatcagtcctat

SEQ ID NO: 11085 - DNA, 25 bp, Artificial
  probe
  misc_feature (1)..(25): SEQ ID NO: 6118; WAN02495R_at; Start 29; Stop 53
aaagtagtatcatagtgtcgtttga

SEQ ID NO: 11086 - DNA, 25 bp, Artificial
  probe
  misc_feature (1)..(25): SEQ ID NO: 6118; WAN02495R_at; Start 21; Stop 45
tcctataaaaagtagtatcatagtg

SEQ ID NO: 11087 - DNA, 25 bp, Artificial
  probe
  misc_feature (1)..(25): SEQ ID NO: 6118; WAN02495R_at; Start 32; Stop 56
gtagtatcatagtgtcgtttgaaat

SEQ ID NO: 11088 - DNA, 25 bp, Artificial
  probe
  misc_feature (1)..(25): SEQ ID NO: 6118; WAN02495R_at; Start 28; Stop 52
aaaagtagtatcatagtgtcgtttg

SEQ ID NO: 11089 - DNA, 25 bp, Artificial
  probe
  misc_feature (1)..(25): SEQ ID NO: 6118; WAN02495R_at; Start 8; Stop 32
ctccttgcatcagtcctataaaaag

SEQ ID NO: 11090 - DNA, 25 bp, Artificial
  probe
  misc_feature (1)..(25): SEQ ID NO: 6118; WAN02495R_at; Start 36; Stop 60
tatcatagtgtcgtttgaaatatca

SEQ ID NO: 11091 - DNA, 25 bp, Artificial
  probe
  misc_feature (1)..(25): SEQ ID NO: 6118; WAN02495R_at; Start 4; Stop 28
ctttctccttgcatcagtcctataa

SEQ ID NO: 11092 - DNA, 25 bp, Artificial
  probe
  misc_feature (1)..(25): SEQ ID NO: 6118; WAN02495R_at; Start 27; Stop 51
aaaaagtagtatcatagtgtcgttt

SEQ ID NO: 11093 - DNA, 25 bp, Artificial
  probe
  misc_feature (1)..(25): SEQ ID NO: 6118; WAN02495R_at; Start 16; Stop 40
atcagtcctataaaaagtagtatca

SEQ ID NO: 11094 - DNA, 25 bp, Artificial
  probe
  misc_feature (1)..(25): SEQ ID NO: 6222; WAN02495S_at; Start 9; Stop 33
tagttgcttaaaaagcatttgcatg

SEQ ID NO: 11095 - DNA, 25 bp, Artificial
  probe
  misc_feature (1)..(25): SEQ ID NO: 6222; WAN02495S_at; Start 18; Stop 42
aaaaagcatttgcatgatactatat

SEQ ID NO: 11096 - DNA, 25 bp, Artificial
  probe
  misc_feature (1)..(25): SEQ ID NO: 6222; WAN02495S_at; Start 1; Stop 25
ttgagaaatagttgcttaaaaagca

SEQ ID NO: 11097 - DNA, 25 bp, Artificial
  probe
  misc_feature (1)..(25): SEQ ID NO: 6222; WAN02495S_at; Start 30; Stop 54
catgatactatatattgaaaggagg

SEQ ID NO: 11098 - DNA, 25 bp, Artificial
  probe
  misc_feature (1)..(25): SEQ ID NO: 6222; WAN02495S_at; Start 32; Stop 56
tgatactatatattgaaaggaggtg

SEQ ID NO: 11099 - DNA, 25 bp, Artificial
  probe
  misc_feature (1)..(25): SEQ ID NO: 6222; WAN02495S_at; Start 33; Stop 57
gatactatatattgaaaggaggtga

SEQ ID NO: 11100 - DNA, 25 bp, Artificial
  probe
  misc_feature (1)..(25): SEQ ID NO: 6222; WAN02495S_at; Start 16; Stop 40
ttaaaaagcatttgcatgatactat

SEQ ID NO: 11101 - DNA, 25 bp, Artificial
  probe
  misc_feature (1)..(25): SEQ ID NO: 6222; WAN02495S_at; Start 27; Stop 51
ttgcatgatactatatattgaaagg

SEQ ID NO: 11102 - DNA, 25 bp, Artificial
  probe
  misc_feature (1)..(25): SEQ ID NO: 6222; WAN02495S_at; Start 31; Stop 55
atgatactatatattgaaaggaggt

SEQ ID NO: 11103 - DNA, 25 bp, Artificial
  probe
  misc_feature (1)..(25): SEQ ID NO: 6222; WAN02495S_at; Start 26; Stop 50
tttgcatgatactatatattgaaag

SEQ ID NO: 11104 - DNA, 25 bp, Artificial
  probe
  misc_feature (1)..(25): SEQ ID NO: 6222; WAN02495S_at; Start 29; Stop 53
gcatgatactatatattgaaaggag

SEQ ID NO: 11105 - DNA, 25 bp, Artificial
  probe
  misc_feature (1)..(25): SEQ ID NO: 6222; WAN02495S_at; Start 34; Stop 58
atactatatattgaaaggaggtgat

SEQ ID NO: 11106 - DNA, 25 bp, Artificial
  probe
  misc_feature (1)..(25): SEQ ID NO: 6222; WAN02495S_at; Start 28; Stop 52
tgcatgatactatatattgaaagga

SEQ ID NO: 11107 - DNA, 25 bp, Artificial
  probe
  misc_feature (1)..(25): SEQ ID NO: 6222; WAN02495S_at; Start 22; Stop 46
agcatttgcatgatactatatattg

SEQ ID NO: 11108 - DNA, 25 bp, Artificial
  probe
  misc_feature (1)..(25): SEQ ID NO: 6222; WAN02495S_at; Start 7; Stop 31
aatagttgcttaaaaagcatttgca

SEQ ID NO: 11109 - DNA, 25 bp, Artificial
  probe
  misc_feature (1)..(25): SEQ ID NO: 6222; WAN02495S_at; Start 19; Stop 43
aaaagcatttgcatgatactatata

SEQ ID NO: 11110 - DNA, 25 bp, Artificial
  probe
  misc_feature (1)..(25): SEQ ID NO: 6222; WAN02495S_at; Start 20; Stop 44
aaagcatttgcatgatactatatat

SEQ ID NO: 11111 - DNA, 25 bp, Artificial
  probe
  misc_feature (1)..(25): SEQ ID NO: 6222; WAN02495S_at; Start 35; Stop 59
tactatatattgaaaggaggtgata

SEQ ID NO: 11112 - DNA, 25 bp, Artificial
  probe
  misc_feature (1)..(25): SEQ ID NO: 6222; WAN02495S_at; Start 24; Stop 48
catttgcatgatactatatattgaa

SEQ ID NO: 11113 - DNA, 25 bp, Artificial
  probe
  misc_feature (1)..(25): SEQ ID NO: 6222; WAN02495S_at; Start 5; Stop 29
gaaatagttgcttaaaaagcatttg

SEQ ID NO: 11114 - DNA, 25 bp, Artificial
  probe
  misc_feature (1)..(25): SEQ ID NO: 6222; WAN02495S_at; Start 6; Stop 30
aaatagttgcttaaaaagcatttgc

SEQ ID NO: 11115 - DNA, 25 bp, Artificial
  probe
  misc_feature (1)..(25): SEQ ID NO: 6222; WAN02495S_at; Start 12; Stop 36
ttgcttaaaaagcatttgcatgata

SEQ ID NO: 11116 - DNA, 25 bp, Artificial
  probe
  misc_feature (1)..(25): SEQ ID NO: 6222; WAN02495S_at; Start 36; Stop 60
actatatattgaaaggaggtgataa

SEQ ID NO: 11117 - DNA, 25 bp, Artificial
  probe
  misc_feature (1)..(25): SEQ ID NO: 6222; WAN02495S_at; Start 17; Stop 41
taaaaagcatttgcatgatactata

SEQ ID NO: 11118 - DNA, 25 bp, Artificial
  probe
  misc_feature (1)..(25): SEQ ID NO: 6222; WAN02495S_at; Start 14; Stop 38
gcttaaaaagcatttgcatgatact

SEQ ID NO: 11119 - DNA, 25 bp, Artificial
  probe
  misc_feature (1)..(25): SEQ ID NO: 6222; WAN02495S_at; Start 11; Stop 35
gttgcttaaaaagcatttgcatgat

SEQ ID NO: 11120 - DNA, 25 bp, Artificial
  probe
  misc_feature (1)..(25): SEQ ID NO: 6222; WAN02495S_at; Start 21; Stop 45
aagcatttgcatgatactatatatt

SEQ ID NO: 11121 - DNA, 25 bp, Artificial
  probe
  misc_feature (1)..(25): SEQ ID NO: 6222; WAN02495S_at; Start 2; Stop 26
tgagaaatagttgcttaaaaagcat

SEQ ID NO: 11122 - DNA, 25 bp, Artificial
  probe
  misc_feature (1)..(25): SEQ ID NO: 6222; WAN02495S_at; Start 10; Stop 34
agttgcttaaaaagcatttgcatga

SEQ ID NO: 11123 - DNA, 25 bp, Artificial
  probe
  misc_feature (1)..(25): SEQ ID NO: 6222; WAN02495S_at; Start 37; Stop 61
ctatatattgaaaggaggtgataat

SEQ ID NO: 11124 - DNA, 25 bp, Artificial
  probe
  misc_feature (1)..(25): SEQ ID NO: 6222; WAN02495S_at; Start 15; Stop 39
cttaaaaagcatttgcatgatacta

SEQ ID NO: 11125 - DNA, 25 bp, Artificial
  probe
  misc_feature (1)..(25): SEQ ID NO: 6222; WAN02495S_at; Start 23; Stop 47
gcatttgcatgatactatatattga

SEQ ID NO: 11126 - DNA, 25 bp, Artificial
  probe
  misc_feature (1)..(25): SEQ ID NO: 6222; WAN02495S_at; Start 13; Stop 37
tgcttaaaaagcatttgcatgatac

SEQ ID NO: 11127 - DNA, 25 bp, Artificial
  probe
  misc_feature (1)..(25): SEQ ID NO: 6222; WAN02495S_at; Start 3; Stop 27
gagaaatagttgcttaaaaagcatt

SEQ ID NO: 11128 - DNA, 25 bp, Artificial
  probe
  misc_feature (1)..(25): SEQ ID NO: 6067; WAN02495T_at; Start 2; Stop 26
ttgcccgacttattgcttgaaaaag

SEQ ID NO: 11129 - DNA, 25 bp, Artificial
  probe
  misc_feature (1)..(25): SEQ ID NO: 6067; WAN02495T_at; Start 6; Stop 30
ccgacttattgcttgaaaaagaatt

SEQ ID NO: 11130 - DNA, 25 bp, Artificial
  probe
  misc_feature (1)..(25): SEQ ID NO: 6067; WAN02495T_at; Start 39; Stop 63
agtatagttaattatagattaacac

SEQ ID NO: 11131 - DNA, 25 bp, Artificial
  probe
  misc_feature (1)..(25): SEQ ID NO: 6067; WAN02495T_at; Start 5; Stop 29
cccgacttattgcttgaaaaagaat

SEQ ID NO: 11132 - DNA, 25 bp, Artificial
  probe
  misc_feature (1)..(25): SEQ ID NO: 6067; WAN02495T_at; Start 43; Stop 67
tagttaattatagattaacacttgc

SEQ ID NO: 11133 - DNA, 25 bp, Artificial
  probe
  misc_feature (1)..(25): SEQ ID NO: 6067; WAN02495T_at; Start 41; Stop 65
tatagttaattatagattaacactt

SEQ ID NO: 11134 - DNA, 25 bp, Artificial
  probe
  misc_feature (1)..(25): SEQ ID NO: 6067; WAN02495T_at; Start 1; Stop 25
attgcccgacttattgcttgaaaaa

SEQ ID NO: 11135 - DNA, 25 bp, Artificial
  probe
  misc_feature (1)..(25): SEQ ID NO: 6067; WAN02495T_at; Start 40; Stop 64
gtatagttaattatagattaacact

SEQ ID NO: 11136 - DNA, 25 bp, Artificial
  probe
  misc_feature (1)..(25): SEQ ID NO: 6067; WAN02495T_at; Start 4; Stop 28
gcccgacttattgcttgaaaaagaa

SEQ ID NO: 11137 - DNA, 25 bp, Artificial
  probe
  misc_feature (1)..(25): SEQ ID NO: 6067; WAN02495T_at; Start 3; Stop 27
tgcccgacttattgcttgaaaaaga

SEQ ID NO: 11138 - DNA, 25 bp, Artificial
  probe
  misc_feature (1)..(25): SEQ ID NO: 6067; WAN02495T_at; Start 42; Stop 66
atagttaattatagattaacacttg

SEQ ID NO: 11139 - DNA, 25 bp, Artificial
  probe
  misc_feature (1)..(25): SEQ ID NO: 6187; WAN02495U_at; Start 133; Stop 157
caatgatgtatttgttagagaggta

SEQ ID NO: 11140 - DNA, 25 bp, Artificial
  probe
  misc_feature (1)..(25): SEQ ID NO: 6187; WAN02495U_at; Start 68; Stop 92
tcgtccttatgtgttaatcaaagac

SEQ ID NO: 11141 - DNA, 25 bp, Artificial
  probe
  misc_feature (1)..(25): SEQ ID NO: 6187; WAN02495U_at; Start 82; Stop 106
taatcaaagacgaatacaaaaacat

SEQ ID NO: 11142 - DNA, 25 bp, Artificial
  probe
  misc_feature (1)..(25): SEQ ID NO: 6187; WAN02495U_at; Start 173; Stop 197
gagcaccaccagttataatagtata

SEQ ID NO: 11143 - DNA, 25 bp, Artificial
  probe
  misc_feature (1)..(25): SEQ ID NO: 6187; WAN02495U_at; Start 155; Stop 179
gtagataaatggaattgagagcacc

SEQ ID NO: 11144 - DNA, 25 bp, Artificial
  probe
  misc_feature (1)..(25): SEQ ID NO: 6187; WAN02495U_at; Start 10; Stop 34
gacactttatctggatttcggtata

SEQ ID NO: 11145 - DNA, 25 bp, Artificial
  probe
  misc_feature (1)..(25): SEQ ID NO: 6187; WAN02495U_at; Start 224; Stop 248
tgaattatagaaaaggagaaacaaa

SEQ ID NO: 11146 - DNA, 25 bp, Artificial
  probe
  misc_feature (1)..(25): SEQ ID NO: 6187; WAN02495U_at; Start 6; Stop 30
tattgacactttatctggatttcgg

SEQ ID NO: 11147 - DNA, 25 bp, Artificial
  probe
  misc_feature (1)..(25): SEQ ID NO: 6187; WAN02495U_at; Start 169; Stop 193
ttgagagcaccaccagttataatag

SEQ ID NO: 11148 - DNA, 25 bp, Artificial
  probe
  misc_feature (1)..(25): SEQ ID NO: 6187; WAN02495U_at; Start 158; Stop 182
gataaatggaattgagagcaccacc

SEQ ID NO: 11149 - DNA, 25 bp, Artificial
  probe
  misc_feature (1)..(25): SEQ ID NO: 6187; WAN02495U_at; Start 160; Stop 184
taaatggaattgagagcaccaccag

SEQ ID NO: 11150 - DNA, 25 bp, Artificial
  probe
  misc_feature (1)..(25): SEQ ID NO: 6187; WAN02495U_at; Start 164; Stop 188
tggaattgagagcaccaccagttat

SEQ ID NO: 11151 - DNA, 25 bp, Artificial
  probe
  misc_feature (1)..(25): SEQ ID NO: 6187; WAN02495U_at; Start 1; Stop 25
tcaagtattgacactttatctggat

SEQ ID NO: 11152 - DNA, 25 bp, Artificial
  probe
  misc_feature (1)..(25): SEQ ID NO: 6187; WAN02495U_at; Start 175; Stop 199
gcaccaccagttataatagtataaa

SEQ ID NO: 11153 - DNA, 25 bp, Artificial
  probe
  misc_feature (1)..(25): SEQ ID NO: 6187; WAN02495U_at; Start 165; Stop 189
ggaattgagagcaccaccagttata

SEQ ID NO: 11154 - DNA, 25 bp, Artificial
  probe
  misc_feature (1)..(25): SEQ ID NO: 6187; WAN02495U_at; Start 178; Stop 202
ccaccagttataatagtataaaacg

SEQ ID NO: 11155 - DNA, 25 bp, Artificial
  probe
  misc_feature (1)..(25): SEQ ID NO: 6187; WAN02495U_at; Start 21; Stop 45
tggatttcggtataatatgcttaga

SEQ ID NO: 11156 - DNA, 25 bp, Artificial
  probe
  misc_feature (1)..(25): SEQ ID NO: 6187; WAN02495U_at; Start 117; Stop 141
tctaaaaagtgttaatcaatgatgt

SEQ ID NO: 11157 - DNA, 25 bp, Artificial
  probe
  misc_feature (1)..(25): SEQ ID NO: 6187; WAN02495U_at; Start 114; Stop 138
tactctaaaaagtgttaatcaatga

SEQ ID NO: 11158 - DNA, 25 bp, Artificial
  probe
  misc_feature (1)..(25): SEQ ID NO: 6187; WAN02495U_at; Start 181; Stop 205
ccagttataatagtataaaacgtat

SEQ ID NO: 11159 - DNA, 25 bp, Artificial
  probe
  misc_feature (1)..(25): SEQ ID NO: 6187; WAN02495U_at; Start 72; Stop 96
ccttatgtgttaatcaaagacgaat

SEQ ID NO: 11160 - DNA, 25 bp, Artificial
  probe
  misc_feature (1)..(25): SEQ ID NO: 6187; WAN02495U_at; Start 218; Stop 242
ttaacttgaattatagaaaaggaga

SEQ ID NO: 11161 - DNA, 25 bp, Artificial
  probe
  misc_feature (1)..(25): SEQ ID NO: 6187; WAN02495U_at; Start 86; Stop 110
caaagacgaatacaaaaacatattt

SEQ ID NO: 11162 - DNA, 25 bp, Artificial
  probe
  misc_feature (1)..(25): SEQ ID NO: 6187; WAN02495U_at; Start 77; Stop 101
tgtgttaatcaaagacgaatacaaa

SEQ ID NO: 11163 - DNA, 25 bp, Artificial
  probe
  misc_feature (1)..(25): SEQ ID NO: 6187; WAN02495U_at; Start 166; Stop 190
gaattgagagcaccaccagttataa

SEQ ID NO: 11164 - DNA, 25 bp, Artificial
  probe
  misc_feature (1)..(25): SEQ ID NO: 6187; WAN02495U_at; Start 75; Stop 99
tatgtgttaatcaaagacgaataca

SEQ ID NO: 11165 - DNA, 25 bp, Artificial
  probe
  misc_feature (1)..(25): SEQ ID NO: 6187; WAN02495U_at; Start 162; Stop 186
aatggaattgagagcaccaccagtt

SEQ ID NO: 11166 - DNA, 25 bp, Artificial
  probe
  misc_feature (1)..(25): SEQ ID NO: 6187; WAN02495U_at; Start 171; Stop 195
gagagcaccaccagttataatagta

SEQ ID NO: 11167 - DNA, 25 bp, Artificial
  probe
  misc_feature (1)..(25): SEQ ID NO: 6187; WAN02495U_at; Start 222; Stop 246
cttgaattatagaaaaggagaaaca

SEQ ID NO: 11168 - DNA, 25 bp, Artificial
  probe
  misc_feature (1)..(25): SEQ ID NO: 6187; WAN02495U_at; Start 33; Stop 57
taatatgcttagaaaggaatctttc

SEQ ID NO: 11169 - DNA, 25 bp, Artificial
  probe
  misc_feature (1)..(25): SEQ ID NO: 6187; WAN02495U_at; Start 29; Stop 53
ggtataatatgcttagaaaggaatc

SEQ ID NO: 11170 - DNA, 25 bp, Artificial
  probe
  misc_feature (1)..(25): SEQ ID NO: 6187; WAN02495U_at; Start 27; Stop 51
tcggtataatatgcttagaaaggaa

SEQ ID NO: 11171 - DNA, 25 bp, Artificial
  probe
  misc_feature (1)..(25): SEQ ID NO: 6187; WAN02495U_at; Start 16; Stop 40
ttatctggatttcggtataatatgc

SEQ ID NO: 11172 - DNA, 25 bp, Artificial
  probe
  misc_feature (1)..(25): SEQ ID NO: 6187; WAN02495U_at; Start 145; Stop 169
tgttagagaggtagataaatggaat

SEQ ID NO: 11173 - DNA, 25 bp, Artificial
  probe
  misc_feature (1)..(25): SEQ ID NO: 6056; WAN02495V_at; Start 34; Stop 58
cttatcacattcgaattcagatttt

SEQ ID NO: 11174 - DNA, 25 bp, Artificial
  probe
  misc_feature (1)..(25): SEQ ID NO: 6056; WAN02495V_at; Start 67; Stop 91
tctctatctatagttgcttagttta

SEQ ID NO: 11175 - DNA, 25 bp, Artificial
  probe
  misc_feature (1)..(25): SEQ ID NO: 6056; WAN02495V_at; Start 5; Stop 29
gggaatcctattgtttcaatttcta

SEQ ID NO: 11176 - DNA, 25 bp, Artificial
  probe
  misc_feature (1)..(25): SEQ ID NO: 6056; WAN02495V_at; Start 29; Stop 53
aactccttatcacattcgaattcag

SEQ ID NO: 11177 - DNA, 25 bp, Artificial
  probe
  misc_feature (1)..(25): SEQ ID NO: 6056; WAN02495V_at; Start 22; Stop 46
aatttctaactccttatcacattcg

SEQ ID NO: 11178 - DNA, 25 bp, Artificial
  probe
  misc_feature (1)..(25): SEQ ID NO: 6056; WAN02495V_at; Start 26; Stop 50
tctaactccttatcacattcgaatt

SEQ ID NO: 11179 - DNA, 25 bp, Artificial
  probe
  misc_feature (1)..(25): SEQ ID NO: 6056; WAN02495V_at; Start 31; Stop 55
ctccttatcacattcgaattcagat

SEQ ID NO: 11180 - DNA, 25 bp, Artificial
  probe
  misc_feature (1)..(25): SEQ ID NO: 6056; WAN02495V_at; Start 13; Stop 37
tattgtttcaatttctaactcctta

SEQ ID NO: 11181 - DNA, 25 bp, Artificial
  probe
  misc_feature (1)..(25): SEQ ID NO: 6056; WAN02495V_at; Start 25; Stop 49
ttctaactccttatcacattcgaat

SEQ ID NO: 11182 - DNA, 25 bp, Artificial
  probe
  misc_feature (1)..(25): SEQ ID NO: 6056; WAN02495V_at; Start 86; Stop 110
agtttaaaataagcatggtctaata

SEQ ID NO: 11183 - DNA, 25 bp, Artificial
  probe
  misc_feature (1)..(25): SEQ ID NO: 6056; WAN02495V_at; Start 87; Stop 111
gtttaaaataagcatggtctaataa

SEQ ID NO: 11184 - DNA, 25 bp, Artificial
  probe
  misc_feature (1)..(25): SEQ ID NO: 6056; WAN02495V_at; Start 33; Stop 57
ccttatcacattcgaattcagattt

SEQ ID NO: 11185 - DNA, 25 bp, Artificial
  probe
  misc_feature (1)..(25): SEQ ID NO: 6056; WAN02495V_at; Start 91; Stop 115
aaaataagcatggtctaataaagct

SEQ ID NO: 11186 - DNA, 25 bp, Artificial
  probe
  misc_feature (1)..(25): SEQ ID NO: 6056; WAN02495V_at; Start 27; Stop 51
ctaactccttatcacattcgaattc

SEQ ID NO: 11187 - DNA, 25 bp, Artificial
  probe
  misc_feature (1)..(25): SEQ ID NO: 6056; WAN02495V_at; Start 24; Stop 48
tttctaactccttatcacattcgaa

SEQ ID NO: 11188 - DNA, 25 bp, Artificial
  probe
  misc_feature (1)..(25): SEQ ID NO: 6056; WAN02495V_at; Start 17; Stop 41
gtttcaatttctaactccttatcac

SEQ ID NO: 11189 - DNA, 25 bp, Artificial
  probe
  misc_feature (1)..(25): SEQ ID NO: 6056; WAN02495V_at; Start 93; Stop 117
aataagcatggtctaataaagctat

SEQ ID NO: 11190 - DNA, 25 bp, Artificial
  probe
  misc_feature (1)..(25): SEQ ID NO: 6056; WAN02495V_at; Start 39; Stop 63
cacattcgaattcagattttatttc

SEQ ID NO: 11191 - DNA, 25 bp, Artificial
  probe
  misc_feature (1)..(25): SEQ ID NO: 6056; WAN02495V_at; Start 32; Stop 56
tccttatcacattcgaattcagatt

SEQ ID NO: 11192 - DNA, 25 bp, Artificial
  probe
  misc_feature (1)..(25): SEQ ID NO: 6056; WAN02495V_at; Start 70; Stop 94
ctatctatagttgcttagtttaaaa

SEQ ID NO: 11193 - DNA, 25 bp, Artificial
  probe
  misc_feature (1)..(25): SEQ ID NO: 6056; WAN02495V_at; Start 59; Stop 83
atttcatttctctatctatagttgc

SEQ ID NO: 11194 - DNA, 25 bp, Artificial
  probe
  misc_feature (1)..(25): SEQ ID NO: 6056; WAN02495V_at; Start 90; Stop 114
taaaataagcatggtctaataaagc

SEQ ID NO: 11195 - DNA, 25 bp, Artificial
  probe
  misc_feature (1)..(25): SEQ ID NO: 6056; WAN02495V_at; Start 16; Stop 40
tgtttcaatttctaactccttatca

SEQ ID NO: 11196 - DNA, 25 bp, Artificial
  probe
  misc_feature (1)..(25): SEQ ID NO: 6056; WAN02495V_at; Start 23; Stop 47
atttctaactccttatcacattcga

SEQ ID NO: 11197 - DNA, 25 bp, Artificial
  probe
  misc_feature (1)..(25): SEQ ID NO: 6056; WAN02495V_at; Start 30; Stop 54
actccttatcacattcgaattcaga

SEQ ID NO: 11198 - DNA, 25 bp, Artificial
  probe
  misc_feature (1)..(25): SEQ ID NO: 6056; WAN02495V_at; Start 75; Stop 99
tatagttgcttagtttaaaataagc

SEQ ID NO: 11199 - DNA, 25 bp, Artificial
  probe
  misc_feature (1)..(25): SEQ ID NO: 6056; WAN02495V_at; Start 10; Stop 34
tcctattgtttcaatttctaactcc

SEQ ID NO: 11200 - DNA, 25 bp, Artificial
  probe
  misc_feature (1)..(25): SEQ ID NO: 6056; WAN02495V_at; Start 19; Stop 43
ttcaatttctaactccttatcacat

SEQ ID NO: 11201 - DNA, 25 bp, Artificial
  probe
  misc_feature (1)..(25): SEQ ID NO: 6056; WAN02495V_at; Start 36; Stop 60
tatcacattcgaattcagattttat

SEQ ID NO: 11202 - DNA, 25 bp, Artificial
  probe
  misc_feature (1)..(25): SEQ ID NO: 6056; WAN02495V_at; Start 82; Stop 106
gcttagtttaaaataagcatggtct

SEQ ID NO: 11203 - DNA, 25 bp, Artificial
  probe
  misc_feature (1)..(25): SEQ ID NO: 6056; WAN02495V_at; Start 92; Stop 116
aaataagcatggtctaataaagcta

SEQ ID NO: 11204 - DNA, 25 bp, Artificial
  probe
  misc_feature (1)..(25): SEQ ID NO: 6056; WAN02495V_at; Start 28; Stop 52
taactccttatcacattcgaattca

SEQ ID NO: 11205 - DNA, 25 bp, Artificial
  probe
  misc_feature (1)..(25): SEQ ID NO: 6056; WAN02495V_at; Start 63; Stop 87
catttctctatctatagttgcttag

SEQ ID NO: 11206 - DNA, 25 bp, Artificial
  probe
  misc_feature (1)..(25): SEQ ID NO: 6056; WAN02495V_at; Start 85; Stop 109
tagtttaaaataagcatggtctaat

SEQ ID NO: 11207 - DNA, 25 bp, Artificial
  probe
  misc_feature (1)..(25): SEQ ID NO: 6106; WAN02495W_at; Start 48; Stop 72
tcaaatcagggaagcattggctacg

SEQ ID NO: 11208 - DNA, 25 bp, Artificial
  probe
  misc_feature (1)..(25): SEQ ID NO: 6106; WAN02495W_at; Start 9; Stop 33
aatatagagaaacagaccgagtaac

SEQ ID NO: 11209 - DNA, 25 bp, Artificial
  probe
  misc_feature (1)..(25): SEQ ID NO: 6106; WAN02495W_at; Start 17; Stop 41
gaaacagaccgagtaactcggttca

SEQ ID NO: 11210 - DNA, 25 bp, Artificial
  probe
  misc_feature (1)..(25): SEQ ID NO: 6106; WAN02495W_at; Start 68; Stop 92
ctacgggcctcgacttctctttttg

SEQ ID NO: 11211 - DNA, 25 bp, Artificial
  probe
  misc_feature (1)..(25): SEQ ID NO: 6106; WAN02495W_at; Start 21; Stop 45
cagaccgagtaactcggttcaaatt

SEQ ID NO: 11212 - DNA, 25 bp, Artificial
  probe
  misc_feature (1)..(25): SEQ ID NO: 6106; WAN02495W_at; Start 51; Stop 75
aatcagggaagcattggctacgggc

SEQ ID NO: 11213 - DNA, 25 bp, Artificial
  probe
  misc_feature (1)..(25): SEQ ID NO: 6106; WAN02495W_at; Start 47; Stop 71
atcaaatcagggaagcattggctac

SEQ ID NO: 11214 - DNA, 25 bp, Artificial
  probe
  misc_feature (1)..(25): SEQ ID NO: 6106; WAN02495W_at; Start 26; Stop 50
cgagtaactcggttcaaattaatca

SEQ ID NO: 11215 - DNA, 25 bp, Artificial
  probe
  misc_feature (1)..(25): SEQ ID NO: 6106; WAN02495W_at; Start 65; Stop 89
tggctacgggcctcgacttctcttt

SEQ ID NO: 11216 - DNA, 25 bp, Artificial
  probe
  misc_feature (1)..(25): SEQ ID NO: 6106; WAN02495W_at; Start 53; Stop 77
tcagggaagcattggctacgggcct

SEQ ID NO: 11217 - DNA, 25 bp, Artificial
  probe
  misc_feature (1)..(25): SEQ ID NO: 6106; WAN02495W_at; Start 2; Stop 26
aagggtgaatatagagaaacagacc

SEQ ID NO: 11218 - DNA, 25 bp, Artificial
  probe
  misc_feature (1)..(25): SEQ ID NO: 6106; WAN02495W_at; Start 5; Stop 29
ggtgaatatagagaaacagaccgag

SEQ ID NO: 11219 - DNA, 25 bp, Artificial
  probe
  misc_feature (1)..(25): SEQ ID NO: 6106; WAN02495W_at; Start 35; Stop 59
cggttcaaattaatcaaatcaggga

SEQ ID NO: 11220 - DNA, 25 bp, Artificial
  probe
  misc_feature (1)..(25): SEQ ID NO: 6106; WAN02495W_at; Start 40; Stop 64
caaattaatcaaatcagggaagcat

SEQ ID NO: 11221 - DNA, 25 bp, Artificial
  probe
  misc_feature (1)..(25): SEQ ID NO: 6106; WAN02495W_at; Start 36; Stop 60
ggttcaaattaatcaaatcagggaa

SEQ ID NO: 11222 - DNA, 25 bp, Artificial
  probe
  misc_feature (1)..(25): SEQ ID NO: 6106; WAN02495W_at; Start 8; Stop 32
gaatatagagaaacagaccgagtaa

SEQ ID NO: 11223 - DNA, 25 bp, Artificial
  probe
  misc_feature (1)..(25): SEQ ID NO: 6106; WAN02495W_at; Start 4; Stop 28
gggtgaatatagagaaacagaccga

SEQ ID NO: 11224 - DNA, 25 bp, Artificial
  probe
  misc_feature (1)..(25): SEQ ID NO: 6106; WAN02495W_at; Start 30; Stop 54
taactcggttcaaattaatcaaatc

SEQ ID NO: 11225 - DNA, 25 bp, Artificial
  probe
  misc_feature (1)..(25): SEQ ID NO: 6106; WAN02495W_at; Start 64; Stop 88
ttggctacgggcctcgacttctctt

SEQ ID NO: 11226 - DNA, 25 bp, Artificial
  probe
  misc_feature (1)..(25): SEQ ID NO: 6106; WAN02495W_at; Start 7; Stop 31
tgaatatagagaaacagaccgagta

SEQ ID NO: 11227 - DNA, 25 bp, Artificial
  probe
  misc_feature (1)..(25): SEQ ID NO: 6106; WAN02495W_at; Start 13; Stop 37
tagagaaacagaccgagtaactcgg

SEQ ID NO: 11228 - DNA, 25 bp, Artificial
  probe
  misc_feature (1)..(25): SEQ ID NO: 6106; WAN02495W_at; Start 6; Stop 30
gtgaatatagagaaacagaccgagt

SEQ ID NO: 11229 - DNA, 25 bp, Artificial
  probe
  misc_feature (1)..(25): SEQ ID NO: 6106; WAN02495W_at; Start 52; Stop 76
atcagggaagcattggctacgggcc

SEQ ID NO: 11230 - DNA, 25 bp, Artificial
  probe
  misc_feature (1)..(25): SEQ ID NO: 6106; WAN02495W_at; Start 44; Stop 68
ttaatcaaatcagggaagcattggc

SEQ ID NO: 11231 - DNA, 25 bp, Artificial
  probe
  misc_feature (1)..(25): SEQ ID NO: 6106; WAN02495W_at; Start 1; Stop 25
gaagggtgaatatagagaaacagac

SEQ ID NO: 11232 - DNA, 25 bp, Artificial
  probe
  misc_feature (1)..(25): SEQ ID NO: 6106; WAN02495W_at; Start 27; Stop 51
gagtaactcggttcaaattaatcaa

SEQ ID NO: 11233 - DNA, 25 bp, Artificial
  probe
  misc_feature (1)..(25): SEQ ID NO: 6106; WAN02495W_at; Start 58; Stop 82
gaagcattggctacgggcctcgact

SEQ ID NO: 11234 - DNA, 25 bp, Artificial
  probe
  misc_feature (1)..(25): SEQ ID NO: 6106; WAN02495W_at; Start 11; Stop 35
tatagagaaacagaccgagtaactc

SEQ ID NO: 11235 - DNA, 25 bp, Artificial
  probe
  misc_feature (1)..(25): SEQ ID NO: 6106; WAN02495W_at; Start 57; Stop 81
ggaagcattggctacgggcctcgac

SEQ ID NO: 11236 - DNA, 25 bp, Artificial
  probe
  misc_feature (1)..(25): SEQ ID NO: 6106; WAN02495W_at; Start 34; Stop 58
tcggttcaaattaatcaaatcaggg

SEQ ID NO: 11237 - DNA, 25 bp, Artificial
  probe
  misc_feature (1)..(25): SEQ ID NO: 6106; WAN02495W_at; Start 39; Stop 63
tcaaattaatcaaatcagggaagca

SEQ ID NO: 11238 - DNA, 25 bp, Artificial
  probe
  misc_feature (1)..(25): SEQ ID NO: 6106; WAN02495W_at; Start 49; Stop 73
caaatcagggaagcattggctacgg

SEQ ID NO: 11239 - DNA, 25 bp, Artificial
  probe
  misc_feature (1)..(25): SEQ ID NO: 6106; WAN02495W_at; Start 46; Stop 70
aatcaaatcagggaagcattggcta

SEQ ID NO: 11240 - DNA, 25 bp, Artificial
  probe
  misc_feature (1)..(25): SEQ ID NO: 6106; WAN02495W_at; Start 54; Stop 78
cagggaagcattggctacgggcctc

SEQ ID NO: 11241 - DNA, 25 bp, Artificial
  probe
  misc_feature (1)..(25): SEQ ID NO: 6109; WAN02495X_at; Start 26; Stop 50
taactcgcgcacataaatcaaggag

SEQ ID NO: 11242 - DNA, 25 bp, Artificial
  probe
  misc_feature (1)..(25): SEQ ID NO: 6109; WAN02495X_at; Start 23; Stop 47
aactaactcgcgcacataaatcaag

SEQ ID NO: 11243 - DNA, 25 bp, Artificial
  probe
  misc_feature (1)..(25): SEQ ID NO: 6109; WAN02495X_at; Start 29; Stop 53
ctcgcgcacataaatcaaggagaaa

SEQ ID NO: 11244 - DNA, 25 bp, Artificial
  probe
  misc_feature (1)..(25): SEQ ID NO: 6109; WAN02495X_at; Start 22; Stop 46
aaactaactcgcgcacataaatcaa

SEQ ID NO: 11245 - DNA, 25 bp, Artificial
  probe
  misc_feature (1)..(25): SEQ ID NO: 6109; WAN02495X_at; Start 15; Stop 39
ttaggctaaactaactcgcgcacat

SEQ ID NO: 11246 - DNA, 25 bp, Artificial
  probe
  misc_feature (1)..(25): SEQ ID NO: 6109; WAN02495X_at; Start 16; Stop 40
taggctaaactaactcgcgcacata

SEQ ID NO: 11247 - DNA, 25 bp, Artificial
  probe
  misc_feature (1)..(25): SEQ ID NO: 6109; WAN02495X_at; Start 18; Stop 42
ggctaaactaactcgcgcacataaa

SEQ ID NO: 11248 - DNA, 25 bp, Artificial
  probe
  misc_feature (1)..(25): SEQ ID NO: 6109; WAN02495X_at; Start 12; Stop 36
aagttaggctaaactaactcgcgca

SEQ ID NO: 11249 - DNA, 25 bp, Artificial
  probe
  misc_feature (1)..(25): SEQ ID NO: 6109; WAN02495X_at; Start 13; Stop 37
agttaggctaaactaactcgcgcac

SEQ ID NO: 11250 - DNA, 25 bp, Artificial
  probe
  misc_feature (1)..(25): SEQ ID NO: 6109; WAN02495X_at; Start 28; Stop 52
actcgcgcacataaatcaaggagaa

SEQ ID NO: 11251 - DNA, 25 bp, Artificial
  probe
  misc_feature (1)..(25): SEQ ID NO: 6109; WAN02495X_at; Start 21; Stop 45
taaactaactcgcgcacataaatca

SEQ ID NO: 11252 - DNA, 25 bp, Artificial
  probe
  misc_feature (1)..(25): SEQ ID NO: 6109; WAN02495X_at; Start 27; Stop 51
aactcgcgcacataaatcaaggaga

SEQ ID NO: 11253 - DNA, 25 bp, Artificial
  probe
  misc_feature (1)..(25): SEQ ID NO: 6109; WAN02495X_at; Start 17; Stop 41
aggctaaactaactcgcgcacataa

SEQ ID NO: 11254 - DNA, 25 bp, Artificial
  probe
  misc_feature (1)..(25): SEQ ID NO: 6109; WAN02495X_at; Start 14; Stop 38
gttaggctaaactaactcgcgcaca

SEQ ID NO: 11255 - DNA, 25 bp, Artificial
  probe
  misc_feature (1)..(25): SEQ ID NO: 6109; WAN02495X_at; Start 25; Stop 49
ctaactcgcgcacataaatcaagga

SEQ ID NO: 11256 - DNA, 25 bp, Artificial
  probe
  misc_feature (1)..(25): SEQ ID NO: 6109; WAN02495X_at; Start 24; Stop 48
actaactcgcgcacataaatcaagg

SEQ ID NO: 11257 - DNA, 25 bp, Artificial
  probe
  misc_feature (1)..(25): SEQ ID NO: 6109; WAN02495X_at; Start 19; Stop 43
gctaaactaactcgcgcacataaat

SEQ ID NO: 11258 - DNA, 25 bp, Artificial
  probe
  misc_feature (1)..(25): SEQ ID NO: 6109; WAN02495X_at; Start 20; Stop 44
ctaaactaactcgcgcacataaatc

SEQ ID NO: 11259 - DNA, 25 bp, Artificial
  probe
  misc_feature (1)..(25): SEQ ID NO: 6109; WAN02495X_at; Start 30; Stop 54
tcgcgcacataaatcaaggagaaaa

SEQ ID NO: 11260 - DNA, 25 bp, Artificial
  probe
  misc_feature (1)..(25): SEQ ID NO: 6035; WAN02495Y_at; Start 38; Stop 62
aaacatcagagtgctttataaaata

SEQ ID NO: 11261 - DNA, 25 bp, Artificial
  probe
  misc_feature (1)..(25): SEQ ID NO: 6035; WAN02495Y_at; Start 41; Stop 65
catcagagtgctttataaaatataa

SEQ ID NO: 11262 - DNA, 25 bp, Artificial
  probe
  misc_feature (1)..(25): SEQ ID NO: 6035; WAN02495Y_at; Start 27; Stop 51
gaaagttgttcaaacatcagagtgc

SEQ ID NO: 11263 - DNA, 25 bp, Artificial
  probe
  misc_feature (1)..(25): SEQ ID NO: 6035; WAN02495Y_at; Start 39; Stop 63
aacatcagagtgctttataaaatat

SEQ ID NO: 11264 - DNA, 25 bp, Artificial
  probe
  misc_feature (1)..(25): SEQ ID NO: 6035; WAN02495Y_at; Start 9; Stop 33
tctccgttcatcatatatgaaagtt

SEQ ID NO: 11265 - DNA, 25 bp, Artificial
  probe
  misc_feature (1)..(25): SEQ ID NO: 6035; WAN02495Y_at; Start 31; Stop 55
gttgttcaaacatcagagtgcttta

SEQ ID NO: 11266 - DNA, 25 bp, Artificial
  probe
  misc_feature (1)..(25): SEQ ID NO: 6035; WAN02495Y_at; Start 4; Stop 28
aaatttctccgttcatcatatatga

SEQ ID NO: 11267 - DNA, 25 bp, Artificial
  probe
  misc_feature (1)..(25): SEQ ID NO: 6035; WAN02495Y_at; Start 2; Stop 26
taaaatttctccgttcatcatatat

SEQ ID NO: 11268 - DNA, 25 bp, Artificial
  probe
  misc_feature (1)..(25): SEQ ID NO: 6035; WAN02495Y_at; Start 10; Stop 34
ctccgttcatcatatatgaaagttg

SEQ ID NO: 11269 - DNA, 25 bp, Artificial
  probe
  misc_feature (1)..(25): SEQ ID NO: 6035; WAN02495Y_at; Start 7; Stop 31
tttctccgttcatcatatatgaaag

SEQ ID NO: 11270 - DNA, 25 bp, Artificial
  probe
  misc_feature (1)..(25): SEQ ID NO: 6035; WAN02495Y_at; Start 16; Stop 40
tcatcatatatgaaagttgttcaaa

SEQ ID NO: 11271 - DNA, 25 bp, Artificial
  probe
  misc_feature (1)..(25): SEQ ID NO: 6035; WAN02495Y_at; Start 35; Stop 59
ttcaaacatcagagtgctttataaa

SEQ ID NO: 11272 - DNA, 25 bp, Artificial
  probe
  misc_feature (1)..(25): SEQ ID NO: 6035; WAN02495Y_at; Start 11; Stop 35
tccgttcatcatatatgaaagttgt

SEQ ID NO: 11273 - DNA, 25 bp, Artificial
  probe
  misc_feature (1)..(25): SEQ ID NO: 6035; WAN02495Y_at; Start 37; Stop 61
caaacatcagagtgctttataaaat

SEQ ID NO: 11274 - DNA, 25 bp, Artificial
  probe
  misc_feature (1)..(25): SEQ ID NO: 6035; WAN02495Y_at; Start 56; Stop 80
taaaatataaatagacctaaagata

SEQ ID NO: 11275 - DNA, 25 bp, Artificial
  probe
  misc_feature (1)..(25): SEQ ID NO: 6035; WAN02495Y_at; Start 5; Stop 29
aatttctccgttcatcatatatgaa

SEQ ID NO: 11276 - DNA, 25 bp, Artificial
  probe
  misc_feature (1)..(25): SEQ ID NO: 6035; WAN02495Y_at; Start 22; Stop 46
tatatgaaagttgttcaaacatcag

SEQ ID NO: 11277 - DNA, 25 bp, Artificial
  probe
  misc_feature (1)..(25): SEQ ID NO: 6035; WAN02495Y_at; Start 20; Stop 44
catatatgaaagttgttcaaacatc

SEQ ID NO: 11278 - DNA, 25 bp, Artificial
  probe
  misc_feature (1)..(25): SEQ ID NO: 6035; WAN02495Y_at; Start 34; Stop 58
gttcaaacatcagagtgctttataa

SEQ ID NO: 11279 - DNA, 25 bp, Artificial
  probe
  misc_feature (1)..(25): SEQ ID NO: 6035; WAN02495Y_at; Start 14; Stop 38
gttcatcatatatgaaagttgttca

SEQ ID NO: 11280 - DNA, 25 bp, Artificial
  probe
  misc_feature (1)..(25): SEQ ID NO: 6035; WAN02495Y_at; Start 54; Stop 78
tataaaatataaatagacctaaaga

SEQ ID NO: 11281 - DNA, 25 bp, Artificial
  probe
  misc_feature (1)..(25): SEQ ID NO: 6035; WAN02495Y_at; Start 30; Stop 54
agttgttcaaacatcagagtgcttt

SEQ ID NO: 11282 - DNA, 25 bp, Artificial
  probe
  misc_feature (1)..(25): SEQ ID NO: 6035; WAN02495Y_at; Start 24; Stop 48
tatgaaagttgttcaaacatcagag

SEQ ID NO: 11283 - DNA, 25 bp, Artificial
  probe
  misc_feature (1)..(25): SEQ ID NO: 6035; WAN02495Y_at; Start 3; Stop 27
aaaatttctccgttcatcatatatg

SEQ ID NO: 11284 - DNA, 25 bp, Artificial
  probe
  misc_feature (1)..(25): SEQ ID NO: 6035; WAN02495Y_at; Start 36; Stop 60
tcaaacatcagagtgctttataaaa

SEQ ID NO: 11285 - DNA, 25 bp, Artificial
  probe
  misc_feature (1)..(25): SEQ ID NO: 6035; WAN02495Y_at; Start 8; Stop 32
ttctccgttcatcatatatgaaagt

SEQ ID NO: 11286 - DNA, 25 bp, Artificial
  probe
  misc_feature (1)..(25): SEQ ID NO: 6035; WAN02495Y_at; Start 33; Stop 57
tgttcaaacatcagagtgctttata

SEQ ID NO: 11287 - DNA, 25 bp, Artificial
  probe
  misc_feature (1)..(25): SEQ ID NO: 6035; WAN02495Y_at; Start 43; Stop 67
tcagagtgctttataaaatataaat

SEQ ID NO: 11288 - DNA, 25 bp, Artificial
  probe
  misc_feature (1)..(25): SEQ ID NO: 6035; WAN02495Y_at; Start 32; Stop 56
ttgttcaaacatcagagtgctttat

SEQ ID NO: 11289 - DNA, 25 bp, Artificial
  probe
  misc_feature (1)..(25): SEQ ID NO: 6035; WAN02495Y_at; Start 28; Stop 52
aaagttgttcaaacatcagagtgct

SEQ ID NO: 11290 - DNA, 25 bp, Artificial
  probe
  misc_feature (1)..(25): SEQ ID NO: 6035; WAN02495Y_at; Start 29; Stop 53
aagttgttcaaacatcagagtgctt

SEQ ID NO: 11291 - DNA, 25 bp, Artificial
  probe
  misc_feature (1)..(25): SEQ ID NO: 6035; WAN02495Y_at; Start 17; Stop 41
catcatatatgaaagttgttcaaac

SEQ ID NO: 11292 - DNA, 25 bp, Artificial
  probe
  misc_feature (1)..(25): SEQ ID NO: 6035; WAN02495Y_at; Start 26; Stop 50
tgaaagttgttcaaacatcagagtg

SEQ ID NO: 11293 - DNA, 25 bp, Artificial
  probe
  misc_feature (1)..(25): SEQ ID NO: 6035; WAN02495Y_at; Start 13; Stop 37
cgttcatcatatatgaaagttgttc

SEQ ID NO: 11294 - DNA, 25 bp, Artificial
  probe
  misc_feature (1)..(25): SEQ ID NO: 6232; WAN02495Z_at; Start 36; Stop 60
tctttttaggtgaaaatgattctat

SEQ ID NO: 11295 - DNA, 25 bp, Artificial
  probe
  misc_feature (1)..(25): SEQ ID NO: 6232; WAN02495Z_at; Start 69; Stop 93
tgtttgatacgaaatttattataag

SEQ ID NO: 11296 - DNA, 25 bp, Artificial
  probe
  misc_feature (1)..(25): SEQ ID NO: 6232; WAN02495Z_at; Start 67; Stop 91
gctgtttgatacgaaatttattata

SEQ ID NO: 11297 - DNA, 25 bp, Artificial
  probe
  misc_feature (1)..(25): SEQ ID NO: 6232; WAN02495Z_at; Start 5; Stop 29
ggtcagtacaatattagggtgtgat

SEQ ID NO: 11298 - DNA, 25 bp, Artificial
  probe
  misc_feature (1)..(25): SEQ ID NO: 6232; WAN02495Z_at; Start 16; Stop 40
tattagggtgtgattaattatcttt

SEQ ID NO: 11299 - DNA, 25 bp, Artificial
  probe
  misc_feature (1)..(25): SEQ ID NO: 6232; WAN02495Z_at; Start 56; Stop 80
tctatattatagctgtttgatacga

SEQ ID NO: 11300 - DNA, 25 bp, Artificial
  probe
  misc_feature (1)..(25): SEQ ID NO: 6232; WAN02495Z_at; Start 34; Stop 58
tatctttttaggtgaaaatgattct

SEQ ID NO: 11301 - DNA, 25 bp, Artificial
  probe
  misc_feature (1)..(25): SEQ ID NO: 6232; WAN02495Z_at; Start 66; Stop 90
agctgtttgatacgaaatttattat

SEQ ID NO: 11302 - DNA, 25 bp, Artificial
  probe
  misc_feature (1)..(25): SEQ ID NO: 6232; WAN02495Z_at; Start 8; Stop 32
cagtacaatattagggtgtgattaa

SEQ ID NO: 11303 - DNA, 25 bp, Artificial
  probe
  misc_feature (1)..(25): SEQ ID NO: 6232; WAN02495Z_at; Start 20; Stop 44
agggtgtgattaattatctttttag

SEQ ID NO: 11304 - DNA, 25 bp, Artificial
  probe
  misc_feature (1)..(25): SEQ ID NO: 6232; WAN02495Z_at; Start 13; Stop 37
caatattagggtgtgattaattatc

SEQ ID NO: 11305 - DNA, 25 bp, Artificial
  probe
  misc_feature (1)..(25): SEQ ID NO: 6232; WAN02495Z_at; Start 55; Stop 79
ttctatattatagctgtttgatacg

SEQ ID NO: 11306 - DNA, 25 bp, Artificial
  probe
  misc_feature (1)..(25): SEQ ID NO: 6232; WAN02495Z_at; Start 9; Stop 33
agtacaatattagggtgtgattaat

SEQ ID NO: 11307 - DNA, 25 bp, Artificial
  probe
  misc_feature (1)..(25): SEQ ID NO: 6232; WAN02495Z_at; Start 44; Stop 68
ggtgaaaatgattctatattatagc

SEQ ID NO: 11308 - DNA, 25 bp, Artificial
  probe
  misc_feature (1)..(25): SEQ ID NO: 6232; WAN02495Z_at; Start 60; Stop 84
tattatagctgtttgatacgaaatt

SEQ ID NO: 11309 - DNA, 25 bp, Artificial
  probe
  misc_feature (1)..(25): SEQ ID NO: 6232; WAN02495Z_at; Start 65; Stop 89
tagctgtttgatacgaaatttatta

SEQ ID NO: 11310 - DNA, 25 bp, Artificial
  probe
  misc_feature (1)..(25): SEQ ID NO: 6232; WAN02495Z_at; Start 73; Stop 97
tgatacgaaatttattataaggaaa

SEQ ID NO: 11311 - DNA, 25 bp, Artificial
  probe
  misc_feature (1)..(25): SEQ ID NO: 6232; WAN02495Z_at; Start 26; Stop 50
tgattaattatctttttaggtgaaa

SEQ ID NO: 11312 - DNA, 25 bp, Artificial
  probe
  misc_feature (1)..(25): SEQ ID NO: 6232; WAN02495Z_at; Start 47; Stop 71
gaaaatgattctatattatagctgt

SEQ ID NO: 11313 - DNA, 25 bp, Artificial
  probe
  misc_feature (1)..(25): SEQ ID NO: 6232; WAN02495Z_at; Start 11; Stop 35
tacaatattagggtgtgattaatta

SEQ ID NO: 11314 - DNA, 25 bp, Artificial
  probe
  misc_feature (1)..(25): SEQ ID NO: 6232; WAN02495Z_at; Start 37; Stop 61
ctttttaggtgaaaatgattctata

SEQ ID NO: 11315 - DNA, 25 bp, Artificial
  probe
  misc_feature (1)..(25): SEQ ID NO: 6232; WAN02495Z_at; Start 62; Stop 86
ttatagctgtttgatacgaaattta

SEQ ID NO: 11316 - DNA, 25 bp, Artificial
  probe
  misc_feature (1)..(25): SEQ ID NO: 6232; WAN02495Z_at; Start 58; Stop 82
tatattatagctgtttgatacgaaa

SEQ ID NO: 11317 - DNA, 25 bp, Artificial
  probe
  misc_feature (1)..(25): SEQ ID NO: 6232; WAN02495Z_at; Start 63; Stop 87
tatagctgtttgatacgaaatttat

SEQ ID NO: 11318 - DNA, 25 bp, Artificial
  probe
  misc_feature (1)..(25): SEQ ID NO: 6232; WAN02495Z_at; Start 7; Stop 31
tcagtacaatattagggtgtgatta

SEQ ID NO: 11319 - DNA, 25 bp, Artificial
  probe
  misc_feature (1)..(25): SEQ ID NO: 6232; WAN02495Z_at; Start 59; Stop 83
atattatagctgtttgatacgaaat

SEQ ID NO: 11320 - DNA, 25 bp, Artificial
  probe
  misc_feature (1)..(25): SEQ ID NO: 6232; WAN02495Z_at; Start 57; Stop 81
ctatattatagctgtttgatacgaa

SEQ ID NO: 11321 - DNA, 25 bp, Artificial
  probe
  misc_feature (1)..(25): SEQ ID NO: 6232; WAN02495Z_at; Start 4; Stop 28
gggtcagtacaatattagggtgtga

SEQ ID NO: 11322 - DNA, 25 bp, Artificial
  probe
  misc_feature (1)..(25): SEQ ID NO: 6232; WAN02495Z_at; Start 14; Stop 38
aatattagggtgtgattaattatct

SEQ ID NO: 11323 - DNA, 25 bp, Artificial
  probe
  misc_feature (1)..(25): SEQ ID NO: 6232; WAN02495Z_at; Start 30; Stop 54
taattatctttttaggtgaaaatga

SEQ ID NO: 11324 - DNA, 25 bp, Artificial
  probe
  misc_feature (1)..(25): SEQ ID NO: 6232; WAN02495Z_at; Start 78; Stop 102
cgaaatttattataaggaaattatg

SEQ ID NO: 11325 - DNA, 25 bp, Artificial
  probe
  misc_feature (1)..(25): SEQ ID NO: 6232; WAN02495Z_at; Start 46; Stop 70
tgaaaatgattctatattatagctg

SEQ ID NO: 11326 - DNA, 25 bp, Artificial
  probe
  misc_feature (1)..(25): SEQ ID NO: 6232; WAN02495Z_at; Start 24; Stop 48
tgtgattaattatctttttaggtga

SEQ ID NO: 11327 - DNA, 25 bp, Artificial
  probe
  misc_feature (1)..(25): SEQ ID NO: 6232; WAN02495Z_at; Start 6; Stop 30
gtcagtacaatattagggtgtgatt

SEQ ID NO: 11328 - DNA, 25 bp, Artificial
  probe
  misc_feature (1)..(25): SEQ ID NO: 6175; WAN024962_at; Start 52; Stop 76
tctatcggtgaacccaagagcgacc

SEQ ID NO: 11329 - DNA, 25 bp, Artificial
  probe
  misc_feature (1)..(25): SEQ ID NO: 6175; WAN024962_at; Start 79; Stop 103
caagcctgcttggattgaggtaata

SEQ ID NO: 11330 - DNA, 25 bp, Artificial
  probe
  misc_feature (1)..(25): SEQ ID NO: 6175; WAN024962_at; Start 112; Stop 136
tatctgtagttagactatttgaagt

SEQ ID NO: 11331 - DNA, 25 bp, Artificial
  probe
  misc_feature (1)..(25): SEQ ID NO: 6175; WAN024962_at; Start 1; Stop 25
tatacgatggatctatcgtagatct

SEQ ID NO: 11332 - DNA, 25 bp, Artificial
  probe
  misc_feature (1)..(25): SEQ ID NO: 6175; WAN024962_at; Start 185; Stop 209
tctattgctagaacaaatggtcgga

SEQ ID NO: 11333 - DNA, 25 bp, Artificial
  probe
  misc_feature (1)..(25): SEQ ID NO: 6175; WAN024962_at; Start 253; Stop 277
ggaacatagtgttatttattagaaa

SEQ ID NO: 11334 - DNA, 25 bp, Artificial
  probe
  misc_feature (1)..(25): SEQ ID NO: 6175; WAN024962_at; Start 136; Stop 160
tttgatgtaagaaagagaaagcgac

SEQ ID NO: 11335 - DNA, 25 bp, Artificial
  probe
  misc_feature (1)..(25): SEQ ID NO: 6175; WAN024962_at; Start 95; Stop 119
gaggtaatagattcaaatatctgta

SEQ ID NO: 11336 - DNA, 25 bp, Artificial
  probe
  misc_feature (1)..(25): SEQ ID NO: 6175; WAN024962_at; Start 122; Stop 146
tagactatttgaagtttgatgtaag

SEQ ID NO: 11337 - DNA, 25 bp, Artificial
  probe
  misc_feature (1)..(25): SEQ ID NO: 6175; WAN024962_at; Start 73; Stop 97
gaccctcaagcctgcttggattgag

SEQ ID NO: 11338 - DNA, 25 bp, Artificial
  probe
  misc_feature (1)..(25): SEQ ID NO: 6175; WAN024962_at; Start 171; Stop 195
aattttaactctcttctattgctag

SEQ ID NO: 11339 - DNA, 25 bp, Artificial
  probe
  misc_feature (1)..(25): SEQ ID NO: 6175; WAN024962_at; Start 190; Stop 214
tgctagaacaaatggtcggataggt

SEQ ID NO: 11340 - DNA, 25 bp, Artificial
  probe
  misc_feature (1)..(25): SEQ ID NO: 6175; WAN024962_at; Start 39; Stop 63
tacgtgccgatcatctatcggtgaa

SEQ ID NO: 11341 - DNA, 25 bp, Artificial
  probe
  misc_feature (1)..(25): SEQ ID NO: 6175; WAN024962_at; Start 19; Stop 43
tagatctgatgtgcaaggcctacgt

SEQ ID NO: 11342 - DNA, 25 bp, Artificial
  probe
  misc_feature (1)..(25): SEQ ID NO: 6175; WAN024962_at; Start 198; Stop 222
caaatggtcggataggttggtagtt

SEQ ID NO: 11343 - DNA, 25 bp, Artificial
  probe
  misc_feature (1)..(25): SEQ ID NO: 6175; WAN024962_at; Start 47; Stop 71
gatcatctatcggtgaacccaagag

SEQ ID NO: 11344 - DNA, 25 bp, Artificial
  probe
  misc_feature (1)..(25): SEQ ID NO: 6175; WAN024962_at; Start 104; Stop 128
gattcaaatatctgtagttagacta

SEQ ID NO: 11345 - DNA, 25 bp, Artificial
  probe
  misc_feature (1)..(25): SEQ ID NO: 6175; WAN024962_at; Start 28; Stop 52
tgtgcaaggcctacgtgccgatcat

SEQ ID NO: 11346 - DNA, 25 bp, Artificial
  probe
  misc_feature (1)..(25): SEQ ID NO: 6175; WAN024962_at; Start 58; Stop 82
ggtgaacccaagagcgaccctcaag

SEQ ID NO: 11347 - DNA, 25 bp, Artificial
  probe
  misc_feature (1)..(25): SEQ ID NO: 6175; WAN024962_at; Start 84; Stop 108
ctgcttggattgaggtaatagattc

SEQ ID NO: 11348 - DNA, 25 bp, Artificial
  probe
  misc_feature (1)..(25): SEQ ID NO: 6175; WAN024962_at; Start 143; Stop 167
taagaaagagaaagcgacagattga

SEQ ID NO: 11349 - DNA, 25 bp, Artificial
  probe
  misc_feature (1)..(25): SEQ ID NO: 6175; WAN024962_at; Start 240; Stop 264
tctattgttaaatggaacatagtgt

SEQ ID NO: 11350 - DNA, 25 bp, Artificial
  probe
  misc_feature (1)..(25): SEQ ID NO: 6175; WAN024962_at; Start 23; Stop 47
tctgatgtgcaaggcctacgtgccg

SEQ ID NO: 11351 - DNA, 25 bp, Artificial
  probe
  misc_feature (1)..(25): SEQ ID NO: 6175; WAN024962_at; Start 14; Stop 38
tatcgtagatctgatgtgcaaggcc

SEQ ID NO: 11352 - DNA, 25 bp, Artificial
  probe
  misc_feature (1)..(25): SEQ ID NO: 6175; WAN024962_at; Start 150; Stop 174
gagaaagcgacagattgaagtaatt

SEQ ID NO: 11353 - DNA, 25 bp, Artificial
  probe
  misc_feature (1)..(25): SEQ ID NO: 6175; WAN024962_at; Start 68; Stop 92
agagcgaccctcaagcctgcttgga

SEQ ID NO: 11354 - DNA, 25 bp, Artificial
  probe
  misc_feature (1)..(25): SEQ ID NO: 6175; WAN024962_at; Start 49; Stop 73
tcatctatcggtgaacccaagagcg

SEQ ID NO: 11355 - DNA, 25 bp, Artificial
  probe
  misc_feature (1)..(25): SEQ ID NO: 6175; WAN024962_at; Start 219; Stop 243
agtttgaaaatgaagatgctatcta

SEQ ID NO: 11356 - DNA, 25 bp, Artificial
  probe
  misc_feature (1)..(25): SEQ ID NO: 6175; WAN024962_at; Start 16; Stop 40
tcgtagatctgatgtgcaaggccta

SEQ ID NO: 11357 - DNA, 25 bp, Artificial
  probe
  misc_feature (1)..(25): SEQ ID NO: 6175; WAN024962_at; Start 208; Stop 232
gataggttggtagtttgaaaatgaa

SEQ ID NO: 11358 - DNA, 25 bp, Artificial
  probe
  misc_feature (1)..(25): SEQ ID NO: 6175; WAN024962_at; Start 54; Stop 78
tatcggtgaacccaagagcgaccct

SEQ ID NO: 11359 - DNA, 25 bp, Artificial
  probe
  misc_feature (1)..(25): SEQ ID NO: 6175; WAN024962_at; Start 193; Stop 217
tagaacaaatggtcggataggttgg

SEQ ID NO: 11360 - DNA, 25 bp, Artificial
  probe
  misc_feature (1)..(25): SEQ ID NO: 6175; WAN024962_at; Start 233; Stop 257
gatgctatctattgttaaatggaac

SEQ ID NO: 11361 - DNA, 25 bp, Artificial
  probe
  misc_feature (1)..(25): SEQ ID NO: 6175; WAN024962_at; Start 32; Stop 56
caaggcctacgtgccgatcatctat

SEQ ID NO: 11362 - DNA, 25 bp, Artificial
  probe
  misc_feature (1)..(25): SEQ ID NO: 5990; WAN024963_at; Start 23; Stop 47
tgaaagcgatataatggattcataa

SEQ ID NO: 11363 - DNA, 25 bp, Artificial
  probe
  misc_feature (1)..(25): SEQ ID NO: 5990; WAN024963_at; Start 2; Stop 26
aatgcgaagtatattattttttgaa

SEQ ID NO: 11364 - DNA, 25 bp, Artificial
  probe
  misc_feature (1)..(25): SEQ ID NO: 5990; WAN024963_at; Start 15; Stop 39
ttattttttgaaagcgatataatgg

SEQ ID NO: 11365 - DNA, 25 bp, Artificial
  probe
  misc_feature (1)..(25): SEQ ID NO: 5990; WAN024963_at; Start 12; Stop 36
atattattttttgaaagcgatataa

SEQ ID NO: 11366 - DNA, 25 bp, Artificial
  probe
  misc_feature (1)..(25): SEQ ID NO: 5990; WAN024963_at; Start 22; Stop 46
ttgaaagcgatataatggattcata

SEQ ID NO: 11367 - DNA, 25 bp, Artificial
  probe
  misc_feature (1)..(25): SEQ ID NO: 5990; WAN024963_at; Start 26; Stop 50
aagcgatataatggattcataaagg

SEQ ID NO: 11368 - DNA, 25 bp, Artificial
  probe
  misc_feature (1)..(25): SEQ ID NO: 5990; WAN024963_at; Start 13; Stop 37
tattattttttgaaagcgatataat

SEQ ID NO: 11369 - DNA, 25 bp, Artificial
  probe
  misc_feature (1)..(25): SEQ ID NO: 5990; WAN024963_at; Start 11; Stop 35
tatattattttttgaaagcgatata

SEQ ID NO: 11370 - DNA, 25 bp, Artificial
  probe
  misc_feature (1)..(25): SEQ ID NO: 5990; WAN024963_at; Start 31; Stop 55
atataatggattcataaaggaggtg

SEQ ID NO: 11371 - DNA, 25 bp, Artificial
  probe
  misc_feature (1)..(25): SEQ ID NO: 5990; WAN024963_at; Start 10; Stop 34
gtatattattttttgaaagcgatat

SEQ ID NO: 11372 - DNA, 25 bp, Artificial
  probe
  misc_feature (1)..(25): SEQ ID NO: 5990; WAN024963_at; Start 28; Stop 52
gcgatataatggattcataaaggag

SEQ ID NO: 11373 - DNA, 25 bp, Artificial
  probe
  misc_feature (1)..(25): SEQ ID NO: 5990; WAN024963_at; Start 35; Stop 59
aatggattcataaaggaggtgtatc

SEQ ID NO: 11374 - DNA, 25 bp, Artificial
  probe
  misc_feature (1)..(25): SEQ ID NO: 5990; WAN024963_at; Start 16; Stop 40
tattttttgaaagcgatataatgga

SEQ ID NO: 11375 - DNA, 25 bp, Artificial
  probe
  misc_feature (1)..(25): SEQ ID NO: 5990; WAN024963_at; Start 18; Stop 42
ttttttgaaagcgatataatggatt

SEQ ID NO: 11376 - DNA, 25 bp, Artificial
  probe
  misc_feature (1)..(25): SEQ ID NO: 5990; WAN024963_at; Start 32; Stop 56
tataatggattcataaaggaggtgt

SEQ ID NO: 11377 - DNA, 25 bp, Artificial
  probe
  misc_feature (1)..(25): SEQ ID NO: 5990; WAN024963_at; Start 20; Stop 44
ttttgaaagcgatataatggattca

SEQ ID NO: 11378 - DNA, 25 bp, Artificial
  probe
  misc_feature (1)..(25): SEQ ID NO: 5990; WAN024963_at; Start 30; Stop 54
gatataatggattcataaaggaggt

SEQ ID NO: 11379 - DNA, 25 bp, Artificial
  probe
  misc_feature (1)..(25): SEQ ID NO: 5990; WAN024963_at; Start 17; Stop 41
attttttgaaagcgatataatggat

SEQ ID NO: 11380 - DNA, 25 bp, Artificial
  probe
  misc_feature (1)..(25): SEQ ID NO: 5990; WAN024963_at; Start 34; Stop 58
taatggattcataaaggaggtgtat

SEQ ID NO: 11381 - DNA, 25 bp, Artificial
  probe
  misc_feature (1)..(25): SEQ ID NO: 5990; WAN024963_at; Start 21; Stop 45
tttgaaagcgatataatggattcat

SEQ ID NO: 11382 - DNA, 25 bp, Artificial
  probe
  misc_feature (1)..(25): SEQ ID NO: 5990; WAN024963_at; Start 29; Stop 53
cgatataatggattcataaaggagg

SEQ ID NO: 11383 - DNA, 25 bp, Artificial
  probe
  misc_feature (1)..(25): SEQ ID NO: 5990; WAN024963_at; Start 24; Stop 48
gaaagcgatataatggattcataaa

SEQ ID NO: 11384 - DNA, 25 bp, Artificial
  probe
  misc_feature (1)..(25): SEQ ID NO: 5990; WAN024963_at; Start 25; Stop 49
aaagcgatataatggattcataaag

SEQ ID NO: 11385 - DNA, 25 bp, Artificial
  probe
  misc_feature (1)..(25): SEQ ID NO: 5990; WAN024963_at; Start 19; Stop 43
tttttgaaagcgatataatggattc

SEQ ID NO: 11386 - DNA, 25 bp, Artificial
  probe
  misc_feature (1)..(25): SEQ ID NO: 5990; WAN024963_at; Start 14; Stop 38
attattttttgaaagcgatataatg

SEQ ID NO: 11387 - DNA, 25 bp, Artificial
  probe
  misc_feature (1)..(25): SEQ ID NO: 5990; WAN024963_at; Start 33; Stop 57
ataatggattcataaaggaggtgta

SEQ ID NO: 11388 - DNA, 25 bp, Artificial
  probe
  misc_feature (1)..(25): SEQ ID NO: 5990; WAN024963_at; Start 1; Stop 25
aaatgcgaagtatattattttttga

SEQ ID NO: 11389 - DNA, 25 bp, Artificial
  probe
  misc_feature (1)..(25): SEQ ID NO: 5990; WAN024963_at; Start 27; Stop 51
agcgatataatggattcataaagga

SEQ ID NO: 11390 - DNA, 25 bp, Artificial
  probe
  misc_feature (1)..(25): SEQ ID NO: 5990; WAN024963_at; Start 3; Stop 27
atgcgaagtatattattttttgaaa

SEQ ID NO: 11391 - DNA, 25 bp, Artificial
  probe
  misc_feature (1)..(25): SEQ ID NO: 6105; WAN024964_at; Start 123; Stop 147
tagtagatagtatacacaatagagt

SEQ ID NO: 11392 - DNA, 25 bp, Artificial
  probe
  misc_feature (1)..(25): SEQ ID NO: 6105; WAN024964_at; Start 264; Stop 288
gctagagagaaggtctctaaaatta

SEQ ID NO: 11393 - DNA, 25 bp, Artificial
  probe
  misc_feature (1)..(25): SEQ ID NO: 6105; WAN024964_at; Start 155; Stop 179
gaaacggttgcgaagtacgctaatc

SEQ ID NO: 11394 - DNA, 25 bp, Artificial
  probe
  misc_feature (1)..(25): SEQ ID NO: 6105; WAN024964_at; Start 152; Stop 176
cctgaaacggttgcgaagtacgcta

SEQ ID NO: 11395 - DNA, 25 bp, Artificial
  probe
  misc_feature (1)..(25): SEQ ID NO: 6105; WAN024964_at; Start 5; Stop 29
ccaattacaatgaagatacagctgt

SEQ ID NO: 11396 - DNA, 25 bp, Artificial
  probe
  misc_feature (1)..(25): SEQ ID NO: 6105; WAN024964_at; Start 50; Stop 74
tgatagacactaatcagatgattgg

SEQ ID NO: 11397 - DNA, 25 bp, Artificial
  probe
  misc_feature (1)..(25): SEQ ID NO: 6105; WAN024964_at; Start 66; Stop 90
gatgattggttatttaaaaactgta

SEQ ID NO: 11398 - DNA, 25 bp, Artificial
  probe
  misc_feature (1)..(25): SEQ ID NO: 6105; WAN024964_at; Start 1; Stop 25
gaaaccaattacaatgaagatacag

SEQ ID NO: 11399 - DNA, 25 bp, Artificial
  probe
  misc_feature (1)..(25): SEQ ID NO: 6105; WAN024964_at; Start 219; Stop 243
cacagcatccacagattgacttagg

SEQ ID NO: 11400 - DNA, 25 bp, Artificial
  probe
  misc_feature (1)..(25): SEQ ID NO: 6105; WAN024964_at; Start 35; Stop 59
gactagcagatgtagtgatagacac

SEQ ID NO: 11401 - DNA, 25 bp, Artificial
  probe
  misc_feature (1)..(25): SEQ ID NO: 6105; WAN024964_at; Start 27; Stop 51
tgttgtcagactagcagatgtagtg

SEQ ID NO: 11402 - DNA, 25 bp, Artificial
  probe
  misc_feature (1)..(25): SEQ ID NO: 6105; WAN024964_at; Start 19; Stop 43
gatacagctgttgtcagactagcag

SEQ ID NO: 11403 - DNA, 25 bp, Artificial
  probe
  misc_feature (1)..(25): SEQ ID NO: 6105; WAN024964_at; Start 114; Stop 138
cgaaagttatagtagatagtataca

SEQ ID NO: 11404 - DNA, 25 bp, Artificial
  probe
  misc_feature (1)..(25): SEQ ID NO: 6105; WAN024964_at; Start 80; Stop 104
taaaaactgtaatgaaaatgtaata

SEQ ID NO: 11405 - DNA, 25 bp, Artificial
  probe
  misc_feature (1)..(25): SEQ ID NO: 6105; WAN024964_at; Start 98; Stop 122
tgtaataatttatctacgaaagtta

SEQ ID NO: 11406 - DNA, 25 bp, Artificial
  probe
  misc_feature (1)..(25): SEQ ID NO: 6105; WAN024964_at; Start 260; Stop 284
gaaagctagagagaaggtctctaaa

SEQ ID NO: 11407 - DNA, 25 bp, Artificial
  probe
  misc_feature (1)..(25): SEQ ID NO: 6105; WAN024964_at; Start 164; Stop 188
gcgaagtacgctaatcactttgcta

SEQ ID NO: 11408 - DNA, 25 bp, Artificial
  probe
  misc_feature (1)..(25): SEQ ID NO: 6105; WAN024964_at; Start 173; Stop 197
gctaatcactttgctactgatctag

SEQ ID NO: 11409 - DNA, 25 bp, Artificial
  probe
  misc_feature (1)..(25): SEQ ID NO: 6105; WAN024964_at; Start 147; Stop 171
tataccctgaaacggttgcgaagta

SEQ ID NO: 11410 - DNA, 25 bp, Artificial
  probe
  misc_feature (1)..(25): SEQ ID NO: 6105; WAN024964_at; Start 142; Stop 166
tagagtataccctgaaacggttgcg

SEQ ID NO: 11411 - DNA, 25 bp, Artificial
  probe
  misc_feature (1)..(25): SEQ ID NO: 6105; WAN024964_at; Start 215; Stop 239
taaacacagcatccacagattgact

SEQ ID NO: 11412 - DNA, 25 bp, Artificial
  probe
  misc_feature (1)..(25): SEQ ID NO: 6105; WAN024964_at; Start 256; Stop 280
ttttgaaagctagagagaaggtctc

SEQ ID NO: 11413 - DNA, 25 bp, Artificial
  probe
  misc_feature (1)..(25): SEQ ID NO: 6105; WAN024964_at; Start 178; Stop 202
tcactttgctactgatctagatagt

SEQ ID NO: 11414 - DNA, 25 bp, Artificial
  probe
  misc_feature (1)..(25): SEQ ID NO: 6105; WAN024964_at; Start 208; Stop 232
taatcaataaacacagcatccacag

SEQ ID NO: 11415 - DNA, 25 bp, Artificial
  probe
  misc_feature (1)..(25): SEQ ID NO: 6105; WAN024964_at; Start 144; Stop 168
gagtataccctgaaacggttgcgaa

SEQ ID NO: 11416 - DNA, 25 bp, Artificial
  probe
  misc_feature (1)..(25): SEQ ID NO: 6105; WAN024964_at; Start 185; Stop 209
gctactgatctagatagtttcttta

SEQ ID NO: 11417 - DNA, 25 bp, Artificial
  probe
  misc_feature (1)..(25): SEQ ID NO: 6105; WAN024964_at; Start 137; Stop 161
cacaatagagtataccctgaaacgg

SEQ ID NO: 11418 - DNA, 25 bp, Artificial
  probe
  misc_feature (1)..(25): SEQ ID NO: 6105; WAN024964_at; Start 159; Stop 183
cggttgcgaagtacgctaatcactt

SEQ ID NO: 11419 - DNA, 25 bp, Artificial
  probe
  misc_feature (1)..(25): SEQ ID NO: 6105; WAN024964_at; Start 201; Stop 225
gtttctttaatcaataaacacagca

SEQ ID NO: 11420 - DNA, 25 bp, Artificial
  probe
  misc_feature (1)..(25): SEQ ID NO: 6105; WAN024964_at; Start 23; Stop 47
cagctgttgtcagactagcagatgt

SEQ ID NO: 11421 - DNA, 25 bp, Artificial
  probe
  misc_feature (1)..(25): SEQ ID NO: 6105; WAN024964_at; Start 227; Stop 251
ccacagattgacttaggatattgta

SEQ ID NO: 11422 - DNA, 25 bp, Artificial
  probe
  misc_feature (1)..(25): SEQ ID NO: 6105; WAN024964_at; Start 16; Stop 40
gaagatacagctgttgtcagactag

SEQ ID NO: 11423 - DNA, 25 bp, Artificial
  probe
  misc_feature (1)..(25): SEQ ID NO: 6105; WAN024964_at; Start 248; Stop 272
tgtaagttttttgaaagctagagag

SEQ ID NO: 11424 - DNA, 25 bp, Artificial
  probe
  misc_feature (1)..(25): SEQ ID NO: 6105; WAN024964_at; Start 12; Stop 36
caatgaagatacagctgttgtcaga

SEQ ID NO: 11425 - DNA, 25 bp, Artificial
  probe
  misc_feature (1)..(25): SEQ ID NO: 5993; WAN024965_at; Start 29; Stop 53
agagacacagcactagcctattccg

SEQ ID NO: 11426 - DNA, 25 bp, Artificial
  probe
  misc_feature (1)..(25): SEQ ID NO: 5993; WAN024965_at; Start 6; Stop 30
actcctaattattaaaataggctag

SEQ ID NO: 11427 - DNA, 25 bp, Artificial
  probe
  misc_feature (1)..(25): SEQ ID NO: 5993; WAN024965_at; Start 41; Stop 65
ctagcctattccgtaagtaaagcta

SEQ ID NO: 11428 - DNA, 25 bp, Artificial
  probe
  misc_feature (1)..(25): SEQ ID NO: 5993; WAN024965_at; Start 23; Stop 47
taggctagagacacagcactagcct

SEQ ID NO: 11429 - DNA, 25 bp, Artificial
  probe
  misc_feature (1)..(25): SEQ ID NO: 5993; WAN024965_at; Start 37; Stop 61
agcactagcctattccgtaagtaaa

SEQ ID NO: 11430 - DNA, 25 bp, Artificial
  probe
  misc_feature (1)..(25): SEQ ID NO: 5993; WAN024965_at; Start 11; Stop 35
taattattaaaataggctagagaca

SEQ ID NO: 11431 - DNA, 25 bp, Artificial
  probe
  misc_feature (1)..(25): SEQ ID NO: 5993; WAN024965_at; Start 10; Stop 34
ctaattattaaaataggctagagac

SEQ ID NO: 11432 - DNA, 25 bp, Artificial
  probe
  misc_feature (1)..(25): SEQ ID NO: 5993; WAN024965_at; Start 17; Stop 41
ttaaaataggctagagacacagcac

SEQ ID NO: 11433 - DNA, 25 bp, Artificial
  probe
  misc_feature (1)..(25): SEQ ID NO: 5993; WAN024965_at; Start 16; Stop 40
attaaaataggctagagacacagca

SEQ ID NO: 11434 - DNA, 25 bp, Artificial
  probe
  misc_feature (1)..(25): SEQ ID NO: 5993; WAN024965_at; Start 32; Stop 56
gacacagcactagcctattccgtaa

SEQ ID NO: 11435 - DNA, 25 bp, Artificial
  probe
  misc_feature (1)..(25): SEQ ID NO: 5993; WAN024965_at; Start 20; Stop 44
aaataggctagagacacagcactag

SEQ ID NO: 11436 - DNA, 25 bp, Artificial
  probe
  misc_feature (1)..(25): SEQ ID NO: 5993; WAN024965_at; Start 25; Stop 49
ggctagagacacagcactagcctat

SEQ ID NO: 11437 - DNA, 25 bp, Artificial
  probe
  misc_feature (1)..(25): SEQ ID NO: 5993; WAN024965_at; Start 39; Stop 63
cactagcctattccgtaagtaaagc

SEQ ID NO: 11438 - DNA, 25 bp, Artificial
  probe
  misc_feature (1)..(25): SEQ ID NO: 5993; WAN024965_at; Start 24; Stop 48
aggctagagacacagcactagccta

SEQ ID NO: 11439 - DNA, 25 bp, Artificial
  probe
  misc_feature (1)..(25): SEQ ID NO: 5993; WAN024965_at; Start 34; Stop 58
cacagcactagcctattccgtaagt

SEQ ID NO: 11440 - DNA, 25 bp, Artificial
  probe
  misc_feature (1)..(25): SEQ ID NO: 5993; WAN024965_at; Start 18; Stop 42
taaaataggctagagacacagcact

SEQ ID NO: 11441 - DNA, 25 bp, Artificial
  probe
  misc_feature (1)..(25): SEQ ID NO: 5993; WAN024965_at; Start 26; Stop 50
gctagagacacagcactagcctatt

SEQ ID NO: 11442 - DNA, 25 bp, Artificial
  probe
  misc_feature (1)..(25): SEQ ID NO: 5993; WAN024965_at; Start 36; Stop 60
cagcactagcctattccgtaagtaa

SEQ ID NO: 11443 - DNA, 25 bp, Artificial
  probe
  misc_feature (1)..(25): SEQ ID NO: 5993; WAN024965_at; Start 13; Stop 37
attattaaaataggctagagacaca

SEQ ID NO: 11444 - DNA, 25 bp, Artificial
  probe
  misc_feature (1)..(25): SEQ ID NO: 5993; WAN024965_at; Start 22; Stop 46
ataggctagagacacagcactagcc

SEQ ID NO: 11445 - DNA, 25 bp, Artificial
  probe
  misc_feature (1)..(25): SEQ ID NO: 5993; WAN024965_at; Start 30; Stop 54
gagacacagcactagcctattccgt

SEQ ID NO: 11446 - DNA, 25 bp, Artificial
  probe
  misc_feature (1)..(25): SEQ ID NO: 5993; WAN024965_at; Start 21; Stop 45
aataggctagagacacagcactagc

SEQ ID NO: 11447 - DNA, 25 bp, Artificial
  probe
  misc_feature (1)..(25): SEQ ID NO: 5993; WAN024965_at; Start 12; Stop 36
aattattaaaataggctagagacac

SEQ ID NO: 11448 - DNA, 25 bp, Artificial
  probe
  misc_feature (1)..(25): SEQ ID NO: 5993; WAN024965_at; Start 19; Stop 43
aaaataggctagagacacagcacta

SEQ ID NO: 11449 - DNA, 25 bp, Artificial
  probe
  misc_feature (1)..(25): SEQ ID NO: 5993; WAN024965_at; Start 42; Stop 66
tagcctattccgtaagtaaagctac

SEQ ID NO: 11450 - DNA, 25 bp, Artificial
  probe
  misc_feature (1)..(25): SEQ ID NO: 5993; WAN024965_at; Start 38; Stop 62
gcactagcctattccgtaagtaaag

SEQ ID NO: 11451 - DNA, 25 bp, Artificial
  probe
  misc_feature (1)..(25): SEQ ID NO: 5993; WAN024965_at; Start 27; Stop 51
ctagagacacagcactagcctattc

SEQ ID NO: 11452 - DNA, 25 bp, Artificial
  probe
  misc_feature (1)..(25): SEQ ID NO: 5993; WAN024965_at; Start 8; Stop 32
tcctaattattaaaataggctagag

SEQ ID NO: 11453 - DNA, 25 bp, Artificial
  probe
  misc_feature (1)..(25): SEQ ID NO: 5993; WAN024965_at; Start 43; Stop 67
agcctattccgtaagtaaagctact

SEQ ID NO: 11454 - DNA, 25 bp, Artificial
  probe
  misc_feature (1)..(25): SEQ ID NO: 5993; WAN024965_at; Start 28; Stop 52
tagagacacagcactagcctattcc

SEQ ID NO: 11455 - DNA, 25 bp, Artificial
  probe
  misc_feature (1)..(25): SEQ ID NO: 5993; WAN024965_at; Start 15; Stop 39
tattaaaataggctagagacacagc

SEQ ID NO: 11456 - DNA, 25 bp, Artificial
  probe
  misc_feature (1)..(25): SEQ ID NO: 5993; WAN024965_at; Start 46; Stop 70
ctattccgtaagtaaagctacttat

SEQ ID NO: 11457 - DNA, 25 bp, Artificial
  probe
  misc_feature (1)..(25): SEQ ID NO: 5993; WAN024965_at; Start 31; Stop 55
agacacagcactagcctattccgta

SEQ ID NO: 11458 - DNA, 25 bp, Artificial
  probe
  misc_feature (1)..(25): SEQ ID NO: 5993; WAN024965_at; Start 35; Stop 59
acagcactagcctattccgtaagta

SEQ ID NO: 11459 - DNA, 25 bp, Artificial
  probe
  misc_feature (1)..(25): SEQ ID NO: 6112; WAN024966_at; Start 245; Stop 269
tattactttaggacattgaaacttc

SEQ ID NO: 11460 - DNA, 25 bp, Artificial
  probe
  misc_feature (1)..(25): SEQ ID NO: 6112; WAN024966_at; Start 64; Stop 88
taaatttcttatctgaacaccacct

SEQ ID NO: 11461 - DNA, 25 bp, Artificial
  probe
  misc_feature (1)..(25): SEQ ID NO: 6112; WAN024966_at; Start 35; Stop 59
gcatagagcaaattcgtggttcgtc

SEQ ID NO: 11462 - DNA, 25 bp, Artificial
  probe
  misc_feature (1)..(25): SEQ ID NO: 6112; WAN024966_at; Start 29; Stop 53
cagaaagcatagagcaaattcgtgg

SEQ ID NO: 11463 - DNA, 25 bp, Artificial
  probe
  misc_feature (1)..(25): SEQ ID NO: 6112; WAN024966_at; Start 272; Stop 296
tcgccagaggtgcttatattactgg

SEQ ID NO: 11464 - DNA, 25 bp, Artificial
  probe
  misc_feature (1)..(25): SEQ ID NO: 6112; WAN024966_at; Start 125; Stop 149
aactttctaattatattctaccatg

SEQ ID NO: 11465 - DNA, 25 bp, Artificial
  probe
  misc_feature (1)..(25): SEQ ID NO: 6112; WAN024966_at; Start 241; Stop 265
cacttattactttaggacattgaaa

SEQ ID NO: 11466 - DNA, 25 bp, Artificial
  probe
  misc_feature (1)..(25): SEQ ID NO: 6112; WAN024966_at; Start 70; Stop 94
tcttatctgaacaccaccttcaaat

SEQ ID NO: 11467 - DNA, 25 bp, Artificial
  probe
  misc_feature (1)..(25): SEQ ID NO: 6112; WAN024966_at; Start 160; Stop 184
tgtcaagaattttctgaataaactg

SEQ ID NO: 11468 - DNA, 25 bp, Artificial
  probe
  misc_feature (1)..(25): SEQ ID NO: 6112; WAN024966_at; Start 220; Stop 244
ttaaaatctttcaattggattcact

SEQ ID NO: 11469 - DNA, 25 bp, Artificial
  probe
  misc_feature (1)..(25): SEQ ID NO: 6112; WAN024966_at; Start 276; Stop 300
cagaggtgcttatattactgggaag

SEQ ID NO: 11470 - DNA, 25 bp, Artificial
  probe
  misc_feature (1)..(25): SEQ ID NO: 6112; WAN024966_at; Start 12; Stop 36
cctgttatgataaattccagaaagc

SEQ ID NO: 11471 - DNA, 25 bp, Artificial
  probe
  misc_feature (1)..(25): SEQ ID NO: 6112; WAN024966_at; Start 130; Stop 154
tctaattatattctaccatgtgttt

SEQ ID NO: 11472 - DNA, 25 bp, Artificial
  probe
  misc_feature (1)..(25): SEQ ID NO: 6112; WAN024966_at; Start 8; Stop 32
tcctcctgttatgataaattccaga

SEQ ID NO: 11473 - DNA, 25 bp, Artificial
  probe
  misc_feature (1)..(25): SEQ ID NO: 6112; WAN024966_at; Start 32; Stop 56
aaagcatagagcaaattcgtggttc

SEQ ID NO: 11474 - DNA, 25 bp, Artificial
  probe
  misc_feature (1)..(25): SEQ ID NO: 6112; WAN024966_at; Start 22; Stop 46
taaattccagaaagcatagagcaaa

SEQ ID NO: 11475 - DNA, 25 bp, Artificial
  probe
  misc_feature (1)..(25): SEQ ID NO: 6112; WAN024966_at; Start 283; Stop 307
gcttatattactgggaagttgaaga

SEQ ID NO: 11476 - DNA, 25 bp, Artificial
  probe
  misc_feature (1)..(25): SEQ ID NO: 6112; WAN024966_at; Start 19; Stop 43
tgataaattccagaaagcatagagc

SEQ ID NO: 11477 - DNA, 25 bp, Artificial
  probe
  misc_feature (1)..(25): SEQ ID NO: 6112; WAN024966_at; Start 258; Stop 282
cattgaaacttctttcgccagaggt

SEQ ID NO: 11478 - DNA, 25 bp, Artificial
  probe
  misc_feature (1)..(25): SEQ ID NO: 6112; WAN024966_at; Start 42; Stop 66
gcaaattcgtggttcgtctgactaa

SEQ ID NO: 11479 - DNA, 25 bp, Artificial
  probe
  misc_feature (1)..(25): SEQ ID NO: 6112; WAN024966_at; Start 144; Stop 168
accatgtgtttttatatgtcaagaa

SEQ ID NO: 11480 - DNA, 25 bp, Artificial
  probe
  misc_feature (1)..(25): SEQ ID NO: 6112; WAN024966_at; Start 269; Stop 293
ctttcgccagaggtgcttatattac

SEQ ID NO: 11481 - DNA, 25 bp, Artificial
  probe
  misc_feature (1)..(25): SEQ ID NO: 6112; WAN024966_at; Start 53; Stop 77
gttcgtctgactaaatttcttatct

SEQ ID NO: 11482 - DNA, 25 bp, Artificial
  probe
  misc_feature (1)..(25): SEQ ID NO: 6112; WAN024966_at; Start 27; Stop 51
tccagaaagcatagagcaaattcgt

SEQ ID NO: 11483 - DNA, 25 bp, Artificial
  probe
  misc_feature (1)..(25): SEQ ID NO: 6112; WAN024966_at; Start 256; Stop 280
gacattgaaacttctttcgccagag

SEQ ID NO: 11484 - DNA, 25 bp, Artificial
  probe
  misc_feature (1)..(25): SEQ ID NO: 6112; WAN024966_at; Start 201; Stop 225
tgacatttttgcaaattgtttaaaa

SEQ ID NO: 11485 - DNA, 25 bp, Artificial
  probe
  misc_feature (1)..(25): SEQ ID NO: 6112; WAN024966_at; Start 252; Stop 276
ttaggacattgaaacttctttcgcc

SEQ ID NO: 11486 - DNA, 25 bp, Artificial
  probe
  misc_feature (1)..(25): SEQ ID NO: 6112; WAN024966_at; Start 75; Stop 99
tctgaacaccaccttcaaatacaaa

SEQ ID NO: 11487 - DNA, 25 bp, Artificial
  probe
  misc_feature (1)..(25): SEQ ID NO: 6112; WAN024966_at; Start 265; Stop 289
acttctttcgccagaggtgcttata

SEQ ID NO: 11488 - DNA, 25 bp, Artificial
  probe
  misc_feature (1)..(25): SEQ ID NO: 6112; WAN024966_at; Start 1; Stop 25
gactgtatcctcctgttatgataaa

SEQ ID NO: 11489 - DNA, 25 bp, Artificial
  probe
  misc_feature (1)..(25): SEQ ID NO: 6112; WAN024966_at; Start 61; Stop 85
gactaaatttcttatctgaacacca

SEQ ID NO: 11490 - DNA, 25 bp, Artificial
  probe
  misc_feature (1)..(25): SEQ ID NO: 6112; WAN024966_at; Start 235; Stop 259
tggattcacttattactttaggaca

SEQ ID NO: 11491 - DNA, 25 bp, Artificial
  probe
  misc_feature (1)..(25): SEQ ID NO: 6112; WAN024966_at; Start 261; Stop 285
tgaaacttctttcgccagaggtgct

SEQ ID NO: 11492 - DNA, 25 bp, Artificial
  probe
  misc_feature (1)..(25): SEQ ID NO: 6112; WAN024966_at; Start 39; Stop 63
agagcaaattcgtggttcgtctgac

SEQ ID NO: 11493 - DNA, 25 bp, Artificial
  probe
  misc_feature (1)..(25): SEQ ID NO: 6154; WAN024967_at; Start 18; Stop 42
aaagaggagaaagacagatttgaga

SEQ ID NO: 11494 - DNA, 25 bp, Artificial
  probe
  misc_feature (1)..(25): SEQ ID NO: 6154; WAN024967_at; Start 32; Stop 56
cagatttgagattccgcagaagtaa

SEQ ID NO: 11495 - DNA, 25 bp, Artificial
  probe
  misc_feature (1)..(25): SEQ ID NO: 6154; WAN024967_at; Start 24; Stop 48
gagaaagacagatttgagattccgc

SEQ ID NO: 11496 - DNA, 25 bp, Artificial
  probe
  misc_feature (1)..(25): SEQ ID NO: 6154; WAN024967_at; Start 72; Stop 96
ggctgttcgatacgattaaatctca

SEQ ID NO: 11497 - DNA, 25 bp, Artificial
  probe
  misc_feature (1)..(25): SEQ ID NO: 6154; WAN024967_at; Start 67; Stop 91
aagagggctgttcgatacgattaaa

SEQ ID NO: 11498 - DNA, 25 bp, Artificial
  probe
  misc_feature (1)..(25): SEQ ID NO: 6154; WAN024967_at; Start 33; Stop 57
agatttgagattccgcagaagtaaa

SEQ ID NO: 11499 - DNA, 25 bp, Artificial
  probe
  misc_feature (1)..(25): SEQ ID NO: 6154; WAN024967_at; Start 45; Stop 69
ccgcagaagtaaaaacagcccaaag

SEQ ID NO: 11500 - DNA, 25 bp, Artificial
  probe
  misc_feature (1)..(25): SEQ ID NO: 6154; WAN024967_at; Start 73; Stop 97
gctgttcgatacgattaaatctcaa

SEQ ID NO: 11501 - DNA, 25 bp, Artificial
  probe
  misc_feature (1)..(25): SEQ ID NO: 6154; WAN024967_at; Start 66; Stop 90
aaagagggctgttcgatacgattaa

SEQ ID NO: 11502 - DNA, 25 bp, Artificial
  probe
  misc_feature (1)..(25): SEQ ID NO: 6154; WAN024967_at; Start 48; Stop 72
cagaagtaaaaacagcccaaagagg

SEQ ID NO: 11503 - DNA, 25 bp, Artificial
  probe
  misc_feature (1)..(25): SEQ ID NO: 6154; WAN024967_at; Start 44; Stop 68
tccgcagaagtaaaaacagcccaaa

SEQ ID NO: 11504 - DNA, 25 bp, Artificial
  probe
  misc_feature (1)..(25): SEQ ID NO: 6154; WAN024967_at; Start 40; Stop 64
agattccgcagaagtaaaaacagcc

SEQ ID NO: 11505 - DNA, 25 bp, Artificial
  probe
  misc_feature (1)..(25): SEQ ID NO: 6154; WAN024967_at; Start 63; Stop 87
cccaaagagggctgttcgatacgat

SEQ ID NO: 11506 - DNA, 25 bp, Artificial
  probe
  misc_feature (1)..(25): SEQ ID NO: 6154; WAN024967_at; Start 69; Stop 93
gagggctgttcgatacgattaaatc

SEQ ID NO: 11507 - DNA, 25 bp, Artificial
  probe
  misc_feature (1)..(25): SEQ ID NO: 6154; WAN024967_at; Start 65; Stop 89
caaagagggctgttcgatacgatta

SEQ ID NO: 11508 - DNA, 25 bp, Artificial
  probe
  misc_feature (1)..(25): SEQ ID NO: 6154; WAN024967_at; Start 71; Stop 95
gggctgttcgatacgattaaatctc

SEQ ID NO: 11509 - DNA, 25 bp, Artificial
  probe
  misc_feature (1)..(25): SEQ ID NO: 6154; WAN024967_at; Start 28; Stop 52
aagacagatttgagattccgcagaa

SEQ ID NO: 11510 - DNA, 25 bp, Artificial
  probe
  misc_feature (1)..(25): SEQ ID NO: 6154; WAN024967_at; Start 74; Stop 98
ctgttcgatacgattaaatctcaac

SEQ ID NO: 11511 - DNA, 25 bp, Artificial
  probe
  misc_feature (1)..(25): SEQ ID NO: 6154; WAN024967_at; Start 26; Stop 50
gaaagacagatttgagattccgcag

SEQ ID NO: 11512 - DNA, 25 bp, Artificial
  probe
  misc_feature (1)..(25): SEQ ID NO: 6154; WAN024967_at; Start 38; Stop 62
tgagattccgcagaagtaaaaacag

SEQ ID NO: 11513 - DNA, 25 bp, Artificial
  probe
  misc_feature (1)..(25): SEQ ID NO: 6154; WAN024967_at; Start 14; Stop 38
cataaaagaggagaaagacagattt

SEQ ID NO: 11514 - DNA, 25 bp, Artificial
  probe
  misc_feature (1)..(25): SEQ ID NO: 6154; WAN024967_at; Start 43; Stop 67
ttccgcagaagtaaaaacagcccaa

SEQ ID NO: 11515 - DNA, 25 bp, Artificial
  probe
  misc_feature (1)..(25): SEQ ID NO: 6154; WAN024967_at; Start 27; Stop 51
aaagacagatttgagattccgcaga

SEQ ID NO: 11516 - DNA, 25 bp, Artificial
  probe
  misc_feature (1)..(25): SEQ ID NO: 6154; WAN024967_at; Start 64; Stop 88
ccaaagagggctgttcgatacgatt

SEQ ID NO: 11517 - DNA, 25 bp, Artificial
  probe
  misc_feature (1)..(25): SEQ ID NO: 6154; WAN024967_at; Start 47; Stop 71
gcagaagtaaaaacagcccaaagag

SEQ ID NO: 11518 - DNA, 25 bp, Artificial
  probe
  misc_feature (1)..(25): SEQ ID NO: 6154; WAN024967_at; Start 30; Stop 54
gacagatttgagattccgcagaagt

SEQ ID NO: 11519 - DNA, 25 bp, Artificial
  probe
  misc_feature (1)..(25): SEQ ID NO: 6154; WAN024967_at; Start 16; Stop 40
taaaagaggagaaagacagatttga

SEQ ID NO: 11520 - DNA, 25 bp, Artificial
  probe
  misc_feature (1)..(25): SEQ ID NO: 6154; WAN024967_at; Start 39; Stop 63
gagattccgcagaagtaaaaacagc

SEQ ID NO: 11521 - DNA, 25 bp, Artificial
  probe
  misc_feature (1)..(25): SEQ ID NO: 6154; WAN024967_at; Start 41; Stop 65
gattccgcagaagtaaaaacagccc

SEQ ID NO: 11522 - DNA, 25 bp, Artificial
  probe
  misc_feature (1)..(25): SEQ ID NO: 6154; WAN024967_at; Start 13; Stop 37
tcataaaagaggagaaagacagatt

SEQ ID NO: 11523 - DNA, 25 bp, Artificial
  probe
  misc_feature (1)..(25): SEQ ID NO: 6154; WAN024967_at; Start 29; Stop 53
agacagatttgagattccgcagaag

SEQ ID NO: 11524 - DNA, 25 bp, Artificial
  probe
  misc_feature (1)..(25): SEQ ID NO: 6154; WAN024967_at; Start 42; Stop 66
attccgcagaagtaaaaacagccca

SEQ ID NO: 11525 - DNA, 25 bp, Artificial
  probe
  misc_feature (1)..(25): SEQ ID NO: 6154; WAN024967_at; Start 36; Stop 60
tttgagattccgcagaagtaaaaac

SEQ ID NO: 11526 - DNA, 25 bp, Artificial
  probe
  misc_feature (1)..(25): SEQ ID NO: 6154; WAN024967_at; Start 11; Stop 35
tatcataaaagaggagaaagacaga

SEQ ID NO: 11527 - DNA, 25 bp, Artificial
  probe
  misc_feature (1)..(25): SEQ ID NO: 6160; WAN024969_at; Start 15; Stop 39
tagacactagattgtctaccccttt

SEQ ID NO: 11528 - DNA, 25 bp, Artificial
  probe
  misc_feature (1)..(25): SEQ ID NO: 6160; WAN024969_at; Start 8; Stop 32
tcgggggtagacactagattgtcta

SEQ ID NO: 11529 - DNA, 25 bp, Artificial
  probe
  misc_feature (1)..(25): SEQ ID NO: 6160; WAN024969_at; Start 10; Stop 34
gggggtagacactagattgtctacc

SEQ ID NO: 11530 - DNA, 25 bp, Artificial
  probe
  misc_feature (1)..(25): SEQ ID NO: 6160; WAN024969_at; Start 9; Stop 33
cgggggtagacactagattgtctac

SEQ ID NO: 11531 - DNA, 25 bp, Artificial
  probe
  misc_feature (1)..(25): SEQ ID NO: 6160; WAN024969_at; Start 16; Stop 40
agacactagattgtctacccctttt

SEQ ID NO: 11532 - DNA, 25 bp, Artificial
  probe
  misc_feature (1)..(25): SEQ ID NO: 6160; WAN024969_at; Start 14; Stop 38
gtagacactagattgtctacccctt

SEQ ID NO: 11533 - DNA, 25 bp, Artificial
  probe
  misc_feature (1)..(25): SEQ ID NO: 6160; WAN024969_at; Start 12; Stop 36
gggtagacactagattgtctacccc

SEQ ID NO: 11534 - DNA, 25 bp, Artificial
  probe
  misc_feature (1)..(25): SEQ ID NO: 6160; WAN024969_at; Start 11; Stop 35
ggggtagacactagattgtctaccc

SEQ ID NO: 11535 - DNA, 25 bp, Artificial
  probe
  misc_feature (1)..(25): SEQ ID NO: 6160; WAN024969_at; Start 13; Stop 37
ggtagacactagattgtctacccct

SEQ ID NO: 11536 - DNA, 25 bp, Artificial
  probe
  misc_feature (1)..(25): SEQ ID NO: 6160; WAN024969_at; Start 5; Stop 29
ctttcgggggtagacactagattgt

SEQ ID NO: 11537 - DNA, 25 bp, Artificial
  probe
  misc_feature (1)..(25): SEQ ID NO: 6160; WAN024969_at; Start 4; Stop 28
actttcgggggtagacactagattg

SEQ ID NO: 11538 - DNA, 25 bp, Artificial
  probe
  misc_feature (1)..(25): SEQ ID NO: 6160; WAN024969_at; Start 7; Stop 31
ttcgggggtagacactagattgtct

SEQ ID NO: 11539 - DNA, 25 bp, Artificial
  probe
  misc_feature (1)..(25): SEQ ID NO: 6160; WAN024969_at; Start 6; Stop 30
tttcgggggtagacactagattgtc

SEQ ID NO: 11540 - DNA, 25 bp, Artificial
  probe
  misc_feature (1)..(25): SEQ ID NO: 6003; WAN02496A_at; Start 131; Stop 155
tattatatagaaattccgaaaagaa

SEQ ID NO: 11541 - DNA, 25 bp, Artificial
  probe
  misc_feature (1)..(25): SEQ ID NO: 6003; WAN02496A_at; Start 277; Stop 301
ttgttgttctgttatgaaacgaaag

SEQ ID NO: 11542 - DNA, 25 bp, Artificial
  probe
  misc_feature (1)..(25): SEQ ID NO: 6003; WAN02496A_at; Start 374; Stop 398
cgtttacttcaactaaggagctcat

SEQ ID NO: 11543 - DNA, 25 bp, Artificial
  probe
  misc_feature (1)..(25): SEQ ID NO: 6003; WAN02496A_at; Start 306; Stop 330
tggaaactagtttctaatttatgaa

SEQ ID NO: 11544 - DNA, 25 bp, Artificial
  probe
  misc_feature (1)..(25): SEQ ID NO: 6003; WAN02496A_at; Start 274; Stop 298
tgtttgttgttctgttatgaaacga

SEQ ID NO: 11545 - DNA, 25 bp, Artificial
  probe
  misc_feature (1)..(25): SEQ ID NO: 6003; WAN02496A_at; Start 222; Stop 246
tcttacaatacatataattacgata

SEQ ID NO: 11546 - DNA, 25 bp, Artificial
  probe
  misc_feature (1)..(25): SEQ ID NO: 6003; WAN02496A_at; Start 272; Stop 296
tatgtttgttgttctgttatgaaac

SEQ ID NO: 11547 - DNA, 25 bp, Artificial
  probe
  misc_feature (1)..(25): SEQ ID NO: 6003; WAN02496A_at; Start 134; Stop 158
tatatagaaattccgaaaagaaata

SEQ ID NO: 11548 - DNA, 25 bp, Artificial
  probe
  misc_feature (1)..(25): SEQ ID NO: 6003; WAN02496A_at; Start 201; Stop 225
catattattagtgataaacgttctt

SEQ ID NO: 11549 - DNA, 25 bp, Artificial
  probe
  misc_feature (1)..(25): SEQ ID NO: 6003; WAN02496A_at; Start 285; Stop 309
ctgttatgaaacgaaagaaattgga

SEQ ID NO: 11550 - DNA, 25 bp, Artificial
  probe
  misc_feature (1)..(25): SEQ ID NO: 6003; WAN02496A_at; Start 286; Stop 310
tgttatgaaacgaaagaaattggaa

SEQ ID NO: 11551 - DNA, 25 bp, Artificial
  probe
  misc_feature (1)..(25): SEQ ID NO: 6003; WAN02496A_at; Start 208; Stop 232
ttagtgataaacgttcttacaatac

SEQ ID NO: 11552 - DNA, 25 bp, Artificial
  probe
  misc_feature (1)..(25): SEQ ID NO: 6003; WAN02496A_at; Start 227; Stop 251
caatacatataattacgataaaaag

SEQ ID NO: 11553 - DNA, 25 bp, Artificial
  probe
  misc_feature (1)..(25): SEQ ID NO: 6003; WAN02496A_at; Start 7; Stop 31
tgacctgatttatctcataaatctg

SEQ ID NO: 11554 - DNA, 25 bp, Artificial
  probe
  misc_feature (1)..(25): SEQ ID NO: 6003; WAN02496A_at; Start 284; Stop 308
tctgttatgaaacgaaagaaattgg

SEQ ID NO: 11555 - DNA, 25 bp, Artificial
  probe
  misc_feature (1)..(25): SEQ ID NO: 6003; WAN02496A_at; Start 29; Stop 53
ctgtagtttttatgggattctcttt

SEQ ID NO: 11556 - DNA, 25 bp, Artificial
  probe
  misc_feature (1)..(25): SEQ ID NO: 6003; WAN02496A_at; Start 3; Stop 27
taggtgacctgatttatctcataaa

SEQ ID NO: 11557 - DNA, 25 bp, Artificial
  probe
  misc_feature (1)..(25): SEQ ID NO: 6003; WAN02496A_at; Start 24; Stop 48
taaatctgtagtttttatgggattc

SEQ ID NO: 11558 - DNA, 25 bp, Artificial
  probe
  misc_feature (1)..(25): SEQ ID NO: 6003; WAN02496A_at; Start 209; Stop 233
tagtgataaacgttcttacaataca

SEQ ID NO: 11559 - DNA, 25 bp, Artificial
  probe
  misc_feature (1)..(25): SEQ ID NO: 6003; WAN02496A_at; Start 129; Stop 153
aatattatatagaaattccgaaaag

SEQ ID NO: 11560 - DNA, 25 bp, Artificial
  probe
  misc_feature (1)..(25): SEQ ID NO: 6003; WAN02496A_at; Start 213; Stop 237
gataaacgttcttacaatacatata

SEQ ID NO: 11561 - DNA, 25 bp, Artificial
  probe
  misc_feature (1)..(25): SEQ ID NO: 6003; WAN02496A_at; Start 203; Stop 227
tattattagtgataaacgttcttac

SEQ ID NO: 11562 - DNA, 25 bp, Artificial
  probe
  misc_feature (1)..(25): SEQ ID NO: 6003; WAN02496A_at; Start 197; Stop 221
tgaacatattattagtgataaacgt

SEQ ID NO: 11563 - DNA, 25 bp, Artificial
  probe
  misc_feature (1)..(25): SEQ ID NO: 6003; WAN02496A_at; Start 211; Stop 235
gtgataaacgttcttacaatacata

SEQ ID NO: 11564 - DNA, 25 bp, Artificial
  probe
  misc_feature (1)..(25): SEQ ID NO: 6003; WAN02496A_at; Start 26; Stop 50
aatctgtagtttttatgggattctc

SEQ ID NO: 11565 - DNA, 25 bp, Artificial
  probe
  misc_feature (1)..(25): SEQ ID NO: 6003; WAN02496A_at; Start 219; Stop 243
cgttcttacaatacatataattacg

SEQ ID NO: 11566 - DNA, 25 bp, Artificial
  probe
  misc_feature (1)..(25): SEQ ID NO: 6003; WAN02496A_at; Start 373; Stop 397
acgtttacttcaactaaggagctca

SEQ ID NO: 11567 - DNA, 25 bp, Artificial
  probe
  misc_feature (1)..(25): SEQ ID NO: 6003; WAN02496A_at; Start 278; Stop 302
tgttgttctgttatgaaacgaaaga

SEQ ID NO: 11568 - DNA, 25 bp, Artificial
  probe
  misc_feature (1)..(25): SEQ ID NO: 6003; WAN02496A_at; Start 215; Stop 239
taaacgttcttacaatacatataat

SEQ ID NO: 11569 - DNA, 25 bp, Artificial
  probe
  misc_feature (1)..(25): SEQ ID NO: 6003; WAN02496A_at; Start 205; Stop 229
ttattagtgataaacgttcttacaa

SEQ ID NO: 11570 - DNA, 25 bp, Artificial
  probe
  misc_feature (1)..(25): SEQ ID NO: 6003; WAN02496A_at; Start 10; Stop 34
cctgatttatctcataaatctgtag

SEQ ID NO: 11571 - DNA, 25 bp, Artificial
  probe
  misc_feature (1)..(25): SEQ ID NO: 6003; WAN02496A_at; Start 279; Stop 303
gttgttctgttatgaaacgaaagaa

SEQ ID NO: 11572 - DNA, 25 bp, Artificial
  probe
  misc_feature (1)..(25): SEQ ID NO: 6003; WAN02496A_at; Start 39; Stop 63
tatgggattctcttttaatttagaa

SEQ ID NO: 11573 - DNA, 25 bp, Artificial
  probe
  misc_feature (1)..(25): SEQ ID NO: 6003; WAN02496A_at; Start 5; Stop 29
ggtgacctgatttatctcataaatc

SEQ ID NO: 11574 - DNA, 25 bp, Artificial
  probe
  misc_feature (1)..(25): SEQ ID NO: 6103; WAN02496B_at; Start 47; Stop 71
aagttctgtgatacaactcattgaa

SEQ ID NO: 11575 - DNA, 25 bp, Artificial
  probe
  misc_feature (1)..(25): SEQ ID NO: 6103; WAN02496B_at; Start 72; Stop 96
taaagaaatagagatgggactggga

SEQ ID NO: 11576 - DNA, 25 bp, Artificial
  probe
  misc_feature (1)..(25): SEQ ID NO: 6103; WAN02496B_at; Start 70; Stop 94
aataaagaaatagagatgggactgg

SEQ ID NO: 11577 - DNA, 25 bp, Artificial
  probe
  misc_feature (1)..(25): SEQ ID NO: 6103; WAN02496B_at; Start 95; Stop 119
gataatgcccagtcccattttttat

SEQ ID NO: 11578 - DNA, 25 bp, Artificial
  probe
  misc_feature (1)..(25): SEQ ID NO: 6103; WAN02496B_at; Start 127; Stop 151
taatgagatcaaaaatgtgggagtg

SEQ ID NO: 11579 - DNA, 25 bp, Artificial
  probe
  misc_feature (1)..(25): SEQ ID NO: 6103; WAN02496B_at; Start 39; Stop 63
aatttctaaagttctgtgatacaac

SEQ ID NO: 11580 - DNA, 25 bp, Artificial
  probe
  misc_feature (1)..(25): SEQ ID NO: 6103; WAN02496B_at; Start 14; Stop 38
gaatagtaaattcttgtcattatat

SEQ ID NO: 11581 - DNA, 25 bp, Artificial
  probe
  misc_feature (1)..(25): SEQ ID NO: 6103; WAN02496B_at; Start 5; Stop 29
tgtaaaacagaatagtaaattcttg

SEQ ID NO: 11582 - DNA, 25 bp, Artificial
  probe
  misc_feature (1)..(25): SEQ ID NO: 6103; WAN02496B_at; Start 128; Stop 152
aatgagatcaaaaatgtgggagtgt

SEQ ID NO: 11583 - DNA, 25 bp, Artificial
  probe
  misc_feature (1)..(25): SEQ ID NO: 6103; WAN02496B_at; Start 49; Stop 73
gttctgtgatacaactcattgaata

SEQ ID NO: 11584 - DNA, 25 bp, Artificial
  probe
  misc_feature (1)..(25): SEQ ID NO: 6103; WAN02496B_at; Start 42; Stop 66
ttctaaagttctgtgatacaactca

SEQ ID NO: 11585 - DNA, 25 bp, Artificial
  probe
  misc_feature (1)..(25): SEQ ID NO: 6103; WAN02496B_at; Start 80; Stop 104
tagagatgggactgggataatgccc

SEQ ID NO: 11586 - DNA, 25 bp, Artificial
  probe
  misc_feature (1)..(25): SEQ ID NO: 6103; WAN02496B_at; Start 100; Stop 124
tgcccagtcccattttttatcaaaa

SEQ ID NO: 11587 - DNA, 25 bp, Artificial
  probe
  misc_feature (1)..(25): SEQ ID NO: 6103; WAN02496B_at; Start 67; Stop 91
ttgaataaagaaatagagatgggac

SEQ ID NO: 11588 - DNA, 25 bp, Artificial
  probe
  misc_feature (1)..(25): SEQ ID NO: 6103; WAN02496B_at; Start 74; Stop 98
aagaaatagagatgggactgggata

SEQ ID NO: 11589 - DNA, 25 bp, Artificial
  probe
  misc_feature (1)..(25): SEQ ID NO: 6103; WAN02496B_at; Start 54; Stop 78
gtgatacaactcattgaataaagaa

SEQ ID NO: 11590 - DNA, 25 bp, Artificial
  probe
  misc_feature (1)..(25): SEQ ID NO: 6103; WAN02496B_at; Start 45; Stop 69
taaagttctgtgatacaactcattg

SEQ ID NO: 11591 - DNA, 25 bp, Artificial
  probe
  misc_feature (1)..(25): SEQ ID NO: 6103; WAN02496B_at; Start 43; Stop 67
tctaaagttctgtgatacaactcat

SEQ ID NO: 11592 - DNA, 25 bp, Artificial
  probe
  misc_feature (1)..(25): SEQ ID NO: 6103; WAN02496B_at; Start 60; Stop 84
caactcattgaataaagaaatagag

SEQ ID NO: 11593 - DNA, 25 bp, Artificial
  probe
  misc_feature (1)..(25): SEQ ID NO: 6103; WAN02496B_at; Start 81; Stop 105
agagatgggactgggataatgccca

SEQ ID NO: 11594 - DNA, 25 bp, Artificial
  probe
  misc_feature (1)..(25): SEQ ID NO: 6103; WAN02496B_at; Start 92; Stop 116
tgggataatgcccagtcccattttt

SEQ ID NO: 11595 - DNA, 25 bp, Artificial
  probe
  misc_feature (1)..(25): SEQ ID NO: 6103; WAN02496B_at; Start 89; Stop 113
gactgggataatgcccagtcccatt

SEQ ID NO: 11596 - DNA, 25 bp, Artificial
  probe
  misc_feature (1)..(25): SEQ ID NO: 6103; WAN02496B_at; Start 98; Stop 122
aatgcccagtcccattttttatcaa

SEQ ID NO: 11597 - DNA, 25 bp, Artificial
  probe
  misc_feature (1)..(25): SEQ ID NO: 6103; WAN02496B_at; Start 94; Stop 118
ggataatgcccagtcccatttttta

SEQ ID NO: 11598 - DNA, 25 bp, Artificial
  probe
  misc_feature (1)..(25): SEQ ID NO: 6103; WAN02496B_at; Start 69; Stop 93
gaataaagaaatagagatgggactg

SEQ ID NO: 11599 - DNA, 25 bp, Artificial
  probe
  misc_feature (1)..(25): SEQ ID NO: 6103; WAN02496B_at; Start 78; Stop 102
aatagagatgggactgggataatgc

SEQ ID NO: 11600 - DNA, 25 bp, Artificial
  probe
  misc_feature (1)..(25): SEQ ID NO: 6103; WAN02496B_at; Start 7; Stop 31
taaaacagaatagtaaattcttgtc

SEQ ID NO: 11601 - DNA, 25 bp, Artificial
  probe
  misc_feature (1)..(25): SEQ ID NO: 6103; WAN02496B_at; Start 84; Stop 108
gatgggactgggataatgcccagtc

SEQ ID NO: 11602 - DNA, 25 bp, Artificial
  probe
  misc_feature (1)..(25): SEQ ID NO: 6103; WAN02496B_at; Start 113; Stop 137
tttttatcaaaaagtaatgagatca

SEQ ID NO: 11603 - DNA, 25 bp, Artificial
  probe
  misc_feature (1)..(25): SEQ ID NO: 6103; WAN02496B_at; Start 52; Stop 76
ctgtgatacaactcattgaataaag

SEQ ID NO: 11604 - DNA, 25 bp, Artificial
  probe
  misc_feature (1)..(25): SEQ ID NO: 6103; WAN02496B_at; Start 25; Stop 49
tcttgtcattatataatttctaaag

SEQ ID NO: 11605 - DNA, 25 bp, Artificial
  probe
  misc_feature (1)..(25): SEQ ID NO: 6103; WAN02496B_at; Start 130; Stop 154
tgagatcaaaaatgtgggagtgttg

SEQ ID NO: 11606 - DNA, 25 bp, Artificial
  probe
  misc_feature (1)..(25): SEQ ID NO: 6103; WAN02496B_at; Start 83; Stop 107
agatgggactgggataatgcccagt

SEQ ID NO: 11607 - DNA, 25 bp, Artificial
  probe
  misc_feature (1)..(25): SEQ ID NO: 6103; WAN02496B_at; Start 132; Stop 156
agatcaaaaatgtgggagtgttgaa

SEQ ID NO: 11608 - DNA, 25 bp, Artificial
  probe
  misc_feature (1)..(25): SEQ ID NO: 6136; WAN02496C_at; Start 20; Stop 44
ttcttagaaatttggagtattccaa

SEQ ID NO: 11609 - DNA, 25 bp, Artificial
  probe
  misc_feature (1)..(25): SEQ ID NO: 6136; WAN02496C_at; Start 21; Stop 45
tcttagaaatttggagtattccaat

SEQ ID NO: 11610 - DNA, 25 bp, Artificial
  probe
  misc_feature (1)..(25): SEQ ID NO: 6136; WAN02496C_at; Start 23; Stop 47
ttagaaatttggagtattccaataa

SEQ ID NO: 11611 - DNA, 25 bp, Artificial
  probe
  misc_feature (1)..(25): SEQ ID NO: 6136; WAN02496C_at; Start 24; Stop 48
tagaaatttggagtattccaataaa

SEQ ID NO: 11612 - DNA, 25 bp, Artificial
  probe
  misc_feature (1)..(25): SEQ ID NO: 6136; WAN02496C_at; Start 19; Stop 43
cttcttagaaatttggagtattcca

SEQ ID NO: 11613 - DNA, 25 bp, Artificial
  probe
  misc_feature (1)..(25): SEQ ID NO: 6136; WAN02496C_at; Start 32; Stop 56
tggagtattccaataaaattagaaa

SEQ ID NO: 11614 - DNA, 25 bp, Artificial
  probe
  misc_feature (1)..(25): SEQ ID NO: 6136; WAN02496C_at; Start 30; Stop 54
tttggagtattccaataaaattaga

SEQ ID NO: 11615 - DNA, 25 bp, Artificial
  probe
  misc_feature (1)..(25): SEQ ID NO: 6136; WAN02496C_at; Start 22; Stop 46
cttagaaatttggagtattccaata

SEQ ID NO: 11616 - DNA, 25 bp, Artificial
  probe
  misc_feature (1)..(25): SEQ ID NO: 6136; WAN02496C_at; Start 14; Stop 38
taatccttcttagaaatttggagta

SEQ ID NO: 11617 - DNA, 25 bp, Artificial
  probe
  misc_feature (1)..(25): SEQ ID NO: 6136; WAN02496C_at; Start 3; Stop 27
atgaaattggttaatccttcttaga

SEQ ID NO: 11618 - DNA, 25 bp, Artificial
  probe
  misc_feature (1)..(25): SEQ ID NO: 6136; WAN02496C_at; Start 2; Stop 26
gatgaaattggttaatccttcttag

SEQ ID NO: 11619 - DNA, 25 bp, Artificial
  probe
  misc_feature (1)..(25): SEQ ID NO: 6136; WAN02496C_at; Start 15; Stop 39
aatccttcttagaaatttggagtat

SEQ ID NO: 11620 - DNA, 25 bp, Artificial
  probe
  misc_feature (1)..(25): SEQ ID NO: 6136; WAN02496C_at; Start 4; Stop 28
tgaaattggttaatccttcttagaa

SEQ ID NO: 11621 - DNA, 25 bp, Artificial
  probe
  misc_feature (1)..(25): SEQ ID NO: 6136; WAN02496C_at; Start 29; Stop 53
atttggagtattccaataaaattag

SEQ ID NO: 11622 - DNA, 25 bp, Artificial
  probe
  misc_feature (1)..(25): SEQ ID NO: 6136; WAN02496C_at; Start 31; Stop 55
ttggagtattccaataaaattagaa

SEQ ID NO: 11623 - DNA, 25 bp, Artificial
  probe
  misc_feature (1)..(25): SEQ ID NO: 6136; WAN02496C_at; Start 1; Stop 25
ggatgaaattggttaatccttctta

SEQ ID NO: 11624 - DNA, 25 bp, Artificial
  probe
  misc_feature (1)..(25): SEQ ID NO: 6136; WAN02496C_at; Start 16; Stop 40
atccttcttagaaatttggagtatt

SEQ ID NO: 11625 - DNA, 25 bp, Artificial
  probe
  misc_feature (1)..(25): SEQ ID NO: 6136; WAN02496C_at; Start 17; Stop 41
tccttcttagaaatttggagtattc

SEQ ID NO: 11626 - DNA, 25 bp, Artificial
  probe
  misc_feature (1)..(25): SEQ ID NO: 6205; WAN02496D_at; Start 92; Stop 116
tattattgaaaaatttgggcaatca

SEQ ID NO: 11627 - DNA, 25 bp, Artificial
  probe
  misc_feature (1)..(25): SEQ ID NO: 6205; WAN02496D_at; Start 39; Stop 63
gatattaaaagaacgcataatatag

SEQ ID NO: 11628 - DNA, 25 bp, Artificial
  probe
  misc_feature (1)..(25): SEQ ID NO: 6205; WAN02496D_at; Start 109; Stop 133
ggcaatcatcagataaaattgagac

SEQ ID NO: 11629 - DNA, 25 bp, Artificial
  probe
  misc_feature (1)..(25): SEQ ID NO: 6205; WAN02496D_at; Start 100; Stop 124
aaaaatttgggcaatcatcagataa

SEQ ID NO: 11630 - DNA, 25 bp, Artificial
  probe
  misc_feature (1)..(25): SEQ ID NO: 6205; WAN02496D_at; Start 12; Stop 36
atcaaagaagtttgtcaaaaagtct

SEQ ID NO: 11631 - DNA, 25 bp, Artificial
  probe
  misc_feature (1)..(25): SEQ ID NO: 6205; WAN02496D_at; Start 64; Stop 88
gggattgtctccataatattatgcg

SEQ ID NO: 11632 - DNA, 25 bp, Artificial
  probe
  misc_feature (1)..(25): SEQ ID NO: 6205; WAN02496D_at; Start 120; Stop 144
gataaaattgagactatatcgagta

SEQ ID NO: 11633 - DNA, 25 bp, Artificial
  probe
  misc_feature (1)..(25): SEQ ID NO: 6205; WAN02496D_at; Start 124; Stop 148
aaattgagactatatcgagtatata

SEQ ID NO: 11634 - DNA, 25 bp, Artificial
  probe
  misc_feature (1)..(25): SEQ ID NO: 6205; WAN02496D_at; Start 108; Stop 132
gggcaatcatcagataaaattgaga

SEQ ID NO: 11635 - DNA, 25 bp, Artificial
  probe
  misc_feature (1)..(25): SEQ ID NO: 6205; WAN02496D_at; Start 111; Stop 135
caatcatcagataaaattgagacta

SEQ ID NO: 11636 - DNA, 25 bp, Artificial
  probe
  misc_feature (1)..(25): SEQ ID NO: 6205; WAN02496D_at; Start 122; Stop 146
taaaattgagactatatcgagtata

SEQ ID NO: 11637 - DNA, 25 bp, Artificial
  probe
  misc_feature (1)..(25): SEQ ID NO: 6205; WAN02496D_at; Start 96; Stop 120
attgaaaaatttgggcaatcatcag

SEQ ID NO: 11638 - DNA, 25 bp, Artificial
  probe
  misc_feature (1)..(25): SEQ ID NO: 6205; WAN02496D_at; Start 118; Stop 142
cagataaaattgagactatatcgag

SEQ ID NO: 11639 - DNA, 25 bp, Artificial
  probe
  misc_feature (1)..(25): SEQ ID NO: 6205; WAN02496D_at; Start 95; Stop 119
tattgaaaaatttgggcaatcatca

SEQ ID NO: 11640 - DNA, 25 bp, Artificial
  probe
  misc_feature (1)..(25): SEQ ID NO: 6205; WAN02496D_at; Start 105; Stop 129
tttgggcaatcatcagataaaattg

SEQ ID NO: 11641 - DNA, 25 bp, Artificial
  probe
  misc_feature (1)..(25): SEQ ID NO: 6205; WAN02496D_at; Start 139; Stop 163
cgagtatataaatgtttgtatagtc

SEQ ID NO: 11642 - DNA, 25 bp, Artificial
  probe
  misc_feature (1)..(25): SEQ ID NO: 6205; WAN02496D_at; Start 33; Stop 57
gtctttgatattaaaagaacgcata

SEQ ID NO: 11643 - DNA, 25 bp, Artificial
  probe
  misc_feature (1)..(25): SEQ ID NO: 6205; WAN02496D_at; Start 11; Stop 35
tatcaaagaagtttgtcaaaaagtc

SEQ ID NO: 11644 - DNA, 25 bp, Artificial
  probe
  misc_feature (1)..(25): SEQ ID NO: 6205; WAN02496D_at; Start 65; Stop 89
ggattgtctccataatattatgcgt

SEQ ID NO: 11645 - DNA, 25 bp, Artificial
  probe
  misc_feature (1)..(25): SEQ ID NO: 6205; WAN02496D_at; Start 107; Stop 131
tgggcaatcatcagataaaattgag

SEQ ID NO: 11646 - DNA, 25 bp, Artificial
  probe
  misc_feature (1)..(25): SEQ ID NO: 6205; WAN02496D_at; Start 3; Stop 27
taattagatatcaaagaagtttgtc

SEQ ID NO: 11647 - DNA, 25 bp, Artificial
  probe
  misc_feature (1)..(25): SEQ ID NO: 6205; WAN02496D_at; Start 9; Stop 33
gatatcaaagaagtttgtcaaaaag

SEQ ID NO: 11648 - DNA, 25 bp, Artificial
  probe
  misc_feature (1)..(25): SEQ ID NO: 6205; WAN02496D_at; Start 102; Stop 126
aaatttgggcaatcatcagataaaa

SEQ ID NO: 11649 - DNA, 25 bp, Artificial
  probe
  misc_feature (1)..(25): SEQ ID NO: 6205; WAN02496D_at; Start 128; Stop 152
tgagactatatcgagtatataaatg

SEQ ID NO: 11650 - DNA, 25 bp, Artificial
  probe
  misc_feature (1)..(25): SEQ ID NO: 6205; WAN02496D_at; Start 51; Stop 75
acgcataatataggggattgtctcc

SEQ ID NO: 11651 - DNA, 25 bp, Artificial
  probe
  misc_feature (1)..(25): SEQ ID NO: 6205; WAN02496D_at; Start 101; Stop 125
aaaatttgggcaatcatcagataaa

SEQ ID NO: 11652 - DNA, 25 bp, Artificial
  probe
  misc_feature (1)..(25): SEQ ID NO: 6205; WAN02496D_at; Start 131; Stop 155
gactatatcgagtatataaatgttt

SEQ ID NO: 11653 - DNA, 25 bp, Artificial
  probe
  misc_feature (1)..(25): SEQ ID NO: 6205; WAN02496D_at; Start 1; Stop 25
tgtaattagatatcaaagaagtttg

SEQ ID NO: 11654 - DNA, 25 bp, Artificial
  probe
  misc_feature (1)..(25): SEQ ID NO: 6205; WAN02496D_at; Start 66; Stop 90
gattgtctccataatattatgcgtt

SEQ ID NO: 11655 - DNA, 25 bp, Artificial
  probe
  misc_feature (1)..(25): SEQ ID NO: 6205; WAN02496D_at; Start 35; Stop 59
ctttgatattaaaagaacgcataat

SEQ ID NO: 11656 - DNA, 25 bp, Artificial
  probe
  misc_feature (1)..(25): SEQ ID NO: 6205; WAN02496D_at; Start 110; Stop 134
gcaatcatcagataaaattgagact

SEQ ID NO: 11657 - DNA, 25 bp, Artificial
  probe
  misc_feature (1)..(25): SEQ ID NO: 6205; WAN02496D_at; Start 69; Stop 93
tgtctccataatattatgcgtttta

SEQ ID NO: 11658 - DNA, 25 bp, Artificial
  probe
  misc_feature (1)..(25): SEQ ID NO: 6205; WAN02496D_at; Start 31; Stop 55
aagtctttgatattaaaagaacgca

SEQ ID NO: 11659 - DNA, 25 bp, Artificial
  probe
  misc_feature (1)..(25): SEQ ID NO: 6205; WAN02496D_at; Start 115; Stop 139
catcagataaaattgagactatatc

SEQ ID NO: 11660 - DNA, 25 bp, Artificial
  probe
  misc_feature (1)..(25): SEQ ID NO: 6097; WAN02496F_at; Start 152; Stop 176
cgatgagttcagcaggcaagaaaat

SEQ ID NO: 11661 - DNA, 25 bp, Artificial
  probe
  misc_feature (1)..(25): SEQ ID NO: 6097; WAN02496F_at; Start 143; Stop 167
gtattaaatcgatgagttcagcagg

SEQ ID NO: 11662 - DNA, 25 bp, Artificial
  probe
  misc_feature (1)..(25): SEQ ID NO: 6097; WAN02496F_at; Start 86; Stop 110
tcattctaaaatgtaaagtacaaac

SEQ ID NO: 11663 - DNA, 25 bp, Artificial
  probe
  misc_feature (1)..(25): SEQ ID NO: 6097; WAN02496F_at; Start 106; Stop 130
caaacaattacaatatactagaggg

SEQ ID NO: 11664 - DNA, 25 bp, Artificial
  probe
  misc_feature (1)..(25): SEQ ID NO: 6097; WAN02496F_at; Start 149; Stop 173
aatcgatgagttcagcaggcaagaa

SEQ ID NO: 11665 - DNA, 25 bp, Artificial
  probe
  misc_feature (1)..(25): SEQ ID NO: 6097; WAN02496F_at; Start 36; Stop 60
caaatagttcaattaaatacgctaa

SEQ ID NO: 11666 - DNA, 25 bp, Artificial
  probe
  misc_feature (1)..(25): SEQ ID NO: 6097; WAN02496F_at; Start 161; Stop 185
cagcaggcaagaaaatagcaccttt

SEQ ID NO: 11667 - DNA, 25 bp, Artificial
  probe
  misc_feature (1)..(25): SEQ ID NO: 6097; WAN02496F_at; Start 148; Stop 172
aaatcgatgagttcagcaggcaaga

SEQ ID NO: 11668 - DNA, 25 bp, Artificial
  probe
  misc_feature (1)..(25): SEQ ID NO: 6097; WAN02496F_at; Start 49; Stop 73
taaatacgctaaattactaatatac

SEQ ID NO: 11669 - DNA, 25 bp, Artificial
  probe
  misc_feature (1)..(25): SEQ ID NO: 6097; WAN02496F_at; Start 144; Stop 168
tattaaatcgatgagttcagcaggc

SEQ ID NO: 11670 - DNA, 25 bp, Artificial
  probe
  misc_feature (1)..(25): SEQ ID NO: 6097; WAN02496F_at; Start 158; Stop 182
gttcagcaggcaagaaaatagcacc

SEQ ID NO: 11671 - DNA, 25 bp, Artificial
  probe
  misc_feature (1)..(25): SEQ ID NO: 6097; WAN02496F_at; Start 157; Stop 181
agttcagcaggcaagaaaatagcac

SEQ ID NO: 11672 - DNA, 25 bp, Artificial
  probe
  misc_feature (1)..(25): SEQ ID NO: 6097; WAN02496F_at; Start 165; Stop 189
aggcaagaaaatagcacctttacgg

SEQ ID NO: 11673 - DNA, 25 bp, Artificial
  probe
  misc_feature (1)..(25): SEQ ID NO: 6097; WAN02496F_at; Start 14; Stop 38
ttttttaaggttatcataatatcaa

SEQ ID NO: 11674 - DNA, 25 bp, Artificial
  probe
  misc_feature (1)..(25): SEQ ID NO: 6097; WAN02496F_at; Start 87; Stop 111
cattctaaaatgtaaagtacaaaca

SEQ ID NO: 11675 - DNA, 25 bp, Artificial
  probe
  misc_feature (1)..(25): SEQ ID NO: 6097; WAN02496F_at; Start 164; Stop 188
caggcaagaaaatagcacctttacg

SEQ ID NO: 11676 - DNA, 25 bp, Artificial
  probe
  misc_feature (1)..(25): SEQ ID NO: 6097; WAN02496F_at; Start 162; Stop 186
agcaggcaagaaaatagcaccttta

SEQ ID NO: 11677 - DNA, 25 bp, Artificial
  probe
  misc_feature (1)..(25): SEQ ID NO: 6097; WAN02496F_at; Start 168; Stop 192
caagaaaatagcacctttacgggtg

SEQ ID NO: 11678 - DNA, 25 bp, Artificial
  probe
  misc_feature (1)..(25): SEQ ID NO: 6097; WAN02496F_at; Start 145; Stop 169
attaaatcgatgagttcagcaggca

SEQ ID NO: 11679 - DNA, 25 bp, Artificial
  probe
  misc_feature (1)..(25): SEQ ID NO: 6097; WAN02496F_at; Start 141; Stop 165
aggtattaaatcgatgagttcagca

SEQ ID NO: 11680 - DNA, 25 bp, Artificial
  probe
  misc_feature (1)..(25): SEQ ID NO: 6097; WAN02496F_at; Start 163; Stop 187
gcaggcaagaaaatagcacctttac

SEQ ID NO: 11681 - DNA, 25 bp, Artificial
  probe
  misc_feature (1)..(25): SEQ ID NO: 6097; WAN02496F_at; Start 142; Stop 166
ggtattaaatcgatgagttcagcag

SEQ ID NO: 11682 - DNA, 25 bp, Artificial
  probe
  misc_feature (1)..(25): SEQ ID NO: 6097; WAN02496F_at; Start 146; Stop 170
ttaaatcgatgagttcagcaggcaa

SEQ ID NO: 11683 - DNA, 25 bp, Artificial
  probe
  misc_feature (1)..(25): SEQ ID NO: 6097; WAN02496F_at; Start 33; Stop 57
tatcaaatagttcaattaaatacgc

SEQ ID NO: 11684 - DNA, 25 bp, Artificial
  probe
  misc_feature (1)..(25): SEQ ID NO: 6097; WAN02496F_at; Start 140; Stop 164
aaggtattaaatcgatgagttcagc

SEQ ID NO: 11685 - DNA, 25 bp, Artificial
  probe
  misc_feature (1)..(25): SEQ ID NO: 6097; WAN02496F_at; Start 150; Stop 174
atcgatgagttcagcaggcaagaaa

SEQ ID NO: 11686 - DNA, 25 bp, Artificial
  probe
  misc_feature (1)..(25): SEQ ID NO: 6097; WAN02496F_at; Start 40; Stop 64
tagttcaattaaatacgctaaatta

SEQ ID NO: 11687 - DNA, 25 bp, Artificial
  probe
  misc_feature (1)..(25): SEQ ID NO: 6097; WAN02496F_at; Start 110; Stop 134
caattacaatatactagagggggag

SEQ ID NO: 11688 - DNA, 25 bp, Artificial
  probe
  misc_feature (1)..(25): SEQ ID NO: 6097; WAN02496F_at; Start 147; Stop 171
taaatcgatgagttcagcaggcaag

SEQ ID NO: 11689 - DNA, 25 bp, Artificial
  probe
  misc_feature (1)..(25): SEQ ID NO: 6097; WAN02496F_at; Start 151; Stop 175
tcgatgagttcagcaggcaagaaaa

SEQ ID NO: 11690 - DNA, 25 bp, Artificial
  probe
  misc_feature (1)..(25): SEQ ID NO: 6097; WAN02496F_at; Start 153; Stop 177
gatgagttcagcaggcaagaaaata

SEQ ID NO: 11691 - DNA, 25 bp, Artificial
  probe
  misc_feature (1)..(25): SEQ ID NO: 6097; WAN02496F_at; Start 160; Stop 184
tcagcaggcaagaaaatagcacctt

SEQ ID NO: 11692 - DNA, 25 bp, Artificial
  probe
  misc_feature (1)..(25): SEQ ID NO: 6097; WAN02496F_at; Start 156; Stop 180
gagttcagcaggcaagaaaatagca

SEQ ID NO: 11693 - DNA, 25 bp, Artificial
  probe
  misc_feature (1)..(25): SEQ ID NO: 6097; WAN02496F_at; Start 159; Stop 183
ttcagcaggcaagaaaatagcacct

SEQ ID NO: 11694 - DNA, 25 bp, Artificial
  probe
  misc_feature (1)..(25): SEQ ID NO: 6029; WAN02496G_at; Start 27; Stop 51
tgtgctttagaatattataccacac

SEQ ID NO: 11695 - DNA, 25 bp, Artificial
  probe
  misc_feature (1)..(25): SEQ ID NO: 6029; WAN02496G_at; Start 32; Stop 56
tttagaatattataccacacaatca

SEQ ID NO: 11696 - DNA, 25 bp, Artificial
  probe
  misc_feature (1)..(25): SEQ ID NO: 6029; WAN02496G_at; Start 14; Stop 38
ctatactatcccttgtgctttagaa

SEQ ID NO: 11697 - DNA, 25 bp, Artificial
  probe
  misc_feature (1)..(25): SEQ ID NO: 6029; WAN02496G_at; Start 30; Stop 54
gctttagaatattataccacacaat

SEQ ID NO: 11698 - DNA, 25 bp, Artificial
  probe
  misc_feature (1)..(25): SEQ ID NO: 6029; WAN02496G_at; Start 25; Stop 49
cttgtgctttagaatattataccac

SEQ ID NO: 11699 - DNA, 25 bp, Artificial
  probe
  misc_feature (1)..(25): SEQ ID NO: 6029; WAN02496G_at; Start 20; Stop 44
tatcccttgtgctttagaatattat

SEQ ID NO: 11700 - DNA, 25 bp, Artificial
  probe
  misc_feature (1)..(25): SEQ ID NO: 6029; WAN02496G_at; Start 11; Stop 35
cttctatactatcccttgtgcttta

SEQ ID NO: 11701 - DNA, 25 bp, Artificial
  probe
  misc_feature (1)..(25): SEQ ID NO: 6029; WAN02496G_at; Start 24; Stop 48
ccttgtgctttagaatattatacca

SEQ ID NO: 11702 - DNA, 25 bp, Artificial
  probe
  misc_feature (1)..(25): SEQ ID NO: 6029; WAN02496G_at; Start 7; Stop 31
actccttctatactatcccttgtgc

SEQ ID NO: 11703 - DNA, 25 bp, Artificial
  probe
  misc_feature (1)..(25): SEQ ID NO: 6029; WAN02496G_at; Start 29; Stop 53
tgctttagaatattataccacacaa

SEQ ID NO: 11704 - DNA, 25 bp, Artificial
  probe
  misc_feature (1)..(25): SEQ ID NO: 6029; WAN02496G_at; Start 3; Stop 27
gtgtactccttctatactatccctt

SEQ ID NO: 11705 - DNA, 25 bp, Artificial
  probe
  misc_feature (1)..(25): SEQ ID NO: 6029; WAN02496G_at; Start 13; Stop 37
tctatactatcccttgtgctttaga

SEQ ID NO: 11706 - DNA, 25 bp, Artificial
  probe
  misc_feature (1)..(25): SEQ ID NO: 6029; WAN02496G_at; Start 18; Stop 42
actatcccttgtgctttagaatatt

SEQ ID NO: 11707 - DNA, 25 bp, Artificial
  probe
  misc_feature (1)..(25): SEQ ID NO: 6029; WAN02496G_at; Start 31; Stop 55
ctttagaatattataccacacaatc

SEQ ID NO: 11708 - DNA, 25 bp, Artificial
  probe
  misc_feature (1)..(25): SEQ ID NO: 6029; WAN02496G_at; Start 2; Stop 26
ggtgtactccttctatactatccct

SEQ ID NO: 11709 - DNA, 25 bp, Artificial
  probe
  misc_feature (1)..(25): SEQ ID NO: 6029; WAN02496G_at; Start 26; Stop 50
ttgtgctttagaatattataccaca

SEQ ID NO: 11710 - DNA, 25 bp, Artificial
  probe
  misc_feature (1)..(25): SEQ ID NO: 6029; WAN02496G_at; Start 10; Stop 34
ccttctatactatcccttgtgcttt

SEQ ID NO: 11711 - DNA, 25 bp, Artificial
  probe
  misc_feature (1)..(25): SEQ ID NO: 6029; WAN02496G_at; Start 15; Stop 39
tatactatcccttgtgctttagaat

SEQ ID NO: 11712 - DNA, 25 bp, Artificial
  probe
  misc_feature (1)..(25): SEQ ID NO: 6029; WAN02496G_at; Start 6; Stop 30
tactccttctatactatcccttgtg

SEQ ID NO: 11713 - DNA, 25 bp, Artificial
  probe
  misc_feature (1)..(25): SEQ ID NO: 6029; WAN02496G_at; Start 19; Stop 43
ctatcccttgtgctttagaatatta

SEQ ID NO: 11714 - DNA, 25 bp, Artificial
  probe
  misc_feature (1)..(25): SEQ ID NO: 6029; WAN02496G_at; Start 23; Stop 47
cccttgtgctttagaatattatacc

SEQ ID NO: 11715 - DNA, 25 bp, Artificial
  probe
  misc_feature (1)..(25): SEQ ID NO: 6029; WAN02496G_at; Start 16; Stop 40
atactatcccttgtgctttagaata

SEQ ID NO: 11716 - DNA, 25 bp, Artificial
  probe
  misc_feature (1)..(25): SEQ ID NO: 6029; WAN02496G_at; Start 1; Stop 25
aggtgtactccttctatactatccc

SEQ ID NO: 11717 - DNA, 25 bp, Artificial
  probe
  misc_feature (1)..(25): SEQ ID NO: 6029; WAN02496G_at; Start 17; Stop 41
tactatcccttgtgctttagaatat

SEQ ID NO: 11718 - DNA, 25 bp, Artificial
  probe
  misc_feature (1)..(25): SEQ ID NO: 6029; WAN02496G_at; Start 8; Stop 32
ctccttctatactatcccttgtgct

SEQ ID NO: 11719 - DNA, 25 bp, Artificial
  probe
  misc_feature (1)..(25): SEQ ID NO: 6029; WAN02496G_at; Start 22; Stop 46
tcccttgtgctttagaatattatac

SEQ ID NO: 11720 - DNA, 25 bp, Artificial
  probe
  misc_feature (1)..(25): SEQ ID NO: 6029; WAN02496G_at; Start 33; Stop 57
ttagaatattataccacacaatcaa

SEQ ID NO: 11721 - DNA, 25 bp, Artificial
  probe
  misc_feature (1)..(25): SEQ ID NO: 6029; WAN02496G_at; Start 5; Stop 29
gtactccttctatactatcccttgt

SEQ ID NO: 11722 - DNA, 25 bp, Artificial
  probe
  misc_feature (1)..(25): SEQ ID NO: 6029; WAN02496G_at; Start 4; Stop 28
tgtactccttctatactatcccttg

SEQ ID NO: 11723 - DNA, 25 bp, Artificial
  probe
  misc_feature (1)..(25): SEQ ID NO: 6029; WAN02496G_at; Start 28; Stop 52
gtgctttagaatattataccacaca

SEQ ID NO: 11724 - DNA, 25 bp, Artificial
  probe
  misc_feature (1)..(25): SEQ ID NO: 6029; WAN02496G_at; Start 21; Stop 45
atcccttgtgctttagaatattata

SEQ ID NO: 11725 - DNA, 25 bp, Artificial
  probe
  misc_feature (1)..(25): SEQ ID NO: 6029; WAN02496G_at; Start 12; Stop 36
ttctatactatcccttgtgctttag

SEQ ID NO: 11726 - DNA, 25 bp, Artificial
  probe
  misc_feature (1)..(25): SEQ ID NO: 6029; WAN02496G_at; Start 9; Stop 33
tccttctatactatcccttgtgctt

SEQ ID NO: 11727 - DNA, 25 bp, Artificial
  probe
  misc_feature (1)..(25): SEQ ID NO: 6212; WAN02496H_at; Start 27; Stop 51
cctttttgtgtaccttatggctgac

SEQ ID NO: 11728 - DNA, 25 bp, Artificial
  probe
  misc_feature (1)..(25): SEQ ID NO: 6212; WAN02496H_at; Start 28; Stop 52
ctttttgtgtaccttatggctgact

SEQ ID NO: 11729 - DNA, 25 bp, Artificial
  probe
  misc_feature (1)..(25): SEQ ID NO: 6212; WAN02496H_at; Start 35; Stop 59
tgtaccttatggctgacttttcaaa

SEQ ID NO: 11730 - DNA, 25 bp, Artificial
  probe
  misc_feature (1)..(25): SEQ ID NO: 6212; WAN02496H_at; Start 32; Stop 56
ttgtgtaccttatggctgacttttc

SEQ ID NO: 11731 - DNA, 25 bp, Artificial
  probe
  misc_feature (1)..(25): SEQ ID NO: 6212; WAN02496H_at; Start 25; Stop 49
accctttttgtgtaccttatggctg

SEQ ID NO: 11732 - DNA, 25 bp, Artificial
  probe
  misc_feature (1)..(25): SEQ ID NO: 6212; WAN02496H_at; Start 31; Stop 55
tttgtgtaccttatggctgactttt

SEQ ID NO: 11733 - DNA, 25 bp, Artificial
  probe
  misc_feature (1)..(25): SEQ ID NO: 6212; WAN02496H_at; Start 26; Stop 50
ccctttttgtgtaccttatggctga

SEQ ID NO: 11734 - DNA, 25 bp, Artificial
  probe
  misc_feature (1)..(25): SEQ ID NO: 6212; WAN02496H_at; Start 33; Stop 57
tgtgtaccttatggctgacttttca

SEQ ID NO: 11735 - DNA, 25 bp, Artificial
  probe
  misc_feature (1)..(25): SEQ ID NO: 6212; WAN02496H_at; Start 29; Stop 53
tttttgtgtaccttatggctgactt

SEQ ID NO: 11736 - DNA, 25 bp, Artificial
  probe
  misc_feature (1)..(25): SEQ ID NO: 6212; WAN02496H_at; Start 34; Stop 58
gtgtaccttatggctgacttttcaa

SEQ ID NO: 11737 - DNA, 25 bp, Artificial
  probe
  misc_feature (1)..(25): SEQ ID NO: 6212; WAN02496H_at; Start 12; Stop 36
atgctaaaatactaccctttttgtg

SEQ ID NO: 11738 - DNA, 25 bp, Artificial
  probe
  misc_feature (1)..(25): SEQ ID NO: 6212; WAN02496H_at; Start 30; Stop 54
ttttgtgtaccttatggctgacttt

SEQ ID NO: 11739 - DNA, 25 bp, Artificial
  probe
  misc_feature (1)..(25): SEQ ID NO: 6212; WAN02496H_at; Start 1; Stop 25
ttagggttcgtatgctaaaatacta

SEQ ID NO: 11740 - DNA, 25 bp, Artificial
  probe
  misc_feature (1)..(25): SEQ ID NO: 6212; WAN02496H_at; Start 2; Stop 26
tagggttcgtatgctaaaatactac

SEQ ID NO: 11741 - DNA, 25 bp, Artificial
  probe
  misc_feature (1)..(25): SEQ ID NO: 6167; WAN02496I_at; Start 109; Stop 133
cacttgtctctataaacgtgttaga

SEQ ID NO: 11742 - DNA, 25 bp, Artificial
  probe
  misc_feature (1)..(25): SEQ ID NO: 6167; WAN02496I_at; Start 104; Stop 128
tttaccacttgtctctataaacgtg

SEQ ID NO: 11743 - DNA, 25 bp, Artificial
  probe
  misc_feature (1)..(25): SEQ ID NO: 6167; WAN02496I_at; Start 94; Stop 118
gttaatattatttaccacttgtctc

SEQ ID NO: 11744 - DNA, 25 bp, Artificial
  probe
  misc_feature (1)..(25): SEQ ID NO: 6167; WAN02496I_at; Start 30; Stop 54
tagcttactttttaattgcctcctc

SEQ ID NO: 11745 - DNA, 25 bp, Artificial
  probe
  misc_feature (1)..(25): SEQ ID NO: 6167; WAN02496I_at; Start 5; Stop 29
gttctacctcctgtataaatctggt

SEQ ID NO: 11746 - DNA, 25 bp, Artificial
  probe
  misc_feature (1)..(25): SEQ ID NO: 6167; WAN02496I_at; Start 1; Stop 25
tacggttctacctcctgtataaatc

SEQ ID NO: 11747 - DNA, 25 bp, Artificial
  probe
  misc_feature (1)..(25): SEQ ID NO: 6167; WAN02496I_at; Start 113; Stop 137
tgtctctataaacgtgttagaggcc

SEQ ID NO: 11748 - DNA, 25 bp, Artificial
  probe
  misc_feature (1)..(25): SEQ ID NO: 6167; WAN02496I_at; Start 77; Stop 101
aacggctttggctagtggttaatat

SEQ ID NO: 11749 - DNA, 25 bp, Artificial
  probe
  misc_feature (1)..(25): SEQ ID NO: 6167; WAN02496I_at; Start 117; Stop 141
tctataaacgtgttagaggccttta

SEQ ID NO: 11750 - DNA, 25 bp, Artificial
  probe
  misc_feature (1)..(25): SEQ ID NO: 6167; WAN02496I_at; Start 71; Stop 95
ctctaaaacggctttggctagtggt

SEQ ID NO: 11751 - DNA, 25 bp, Artificial
  probe
  misc_feature (1)..(25): SEQ ID NO: 6167; WAN02496I_at; Start 67; Stop 91
tagcctctaaaacggctttggctag

SEQ ID NO: 11752 - DNA, 25 bp, Artificial
  probe
  misc_feature (1)..(25): SEQ ID NO: 6167; WAN02496I_at; Start 40; Stop 64
tttaattgcctcctctagcctcttt

SEQ ID NO: 11753 - DNA, 25 bp, Artificial
  probe
  misc_feature (1)..(25): SEQ ID NO: 6167; WAN02496I_at; Start 79; Stop 103
cggctttggctagtggttaatatta

SEQ ID NO: 11754 - DNA, 25 bp, Artificial
  probe
  misc_feature (1)..(25): SEQ ID NO: 6167; WAN02496I_at; Start 11; Stop 35
cctcctgtataaatctggttagctt

SEQ ID NO: 11755 - DNA, 25 bp, Artificial
  probe
  misc_feature (1)..(25): SEQ ID NO: 6167; WAN02496I_at; Start 45; Stop 69
ttgcctcctctagcctcttttttag

SEQ ID NO: 11756 - DNA, 25 bp, Artificial
  probe
  misc_feature (1)..(25): SEQ ID NO: 6167; WAN02496I_at; Start 85; Stop 109
tggctagtggttaatattatttacc

SEQ ID NO: 11757 - DNA, 25 bp, Artificial
  probe
  misc_feature (1)..(25): SEQ ID NO: 6167; WAN02496I_at; Start 102; Stop 126
tatttaccacttgtctctataaacg

SEQ ID NO: 11758 - DNA, 25 bp, Artificial
  probe
  misc_feature (1)..(25): SEQ ID NO: 6167; WAN02496I_at; Start 119; Stop 143
tataaacgtgttagaggcctttata

SEQ ID NO: 11759 - DNA, 25 bp, Artificial
  probe
  misc_feature (1)..(25): SEQ ID NO: 6167; WAN02496I_at; Start 32; Stop 56
gcttactttttaattgcctcctcta

SEQ ID NO: 11760 - DNA, 25 bp, Artificial
  probe
  misc_feature (1)..(25): SEQ ID NO: 6167; WAN02496I_at; Start 106; Stop 130
taccacttgtctctataaacgtgtt

SEQ ID NO: 11761 - DNA, 25 bp, Artificial
  probe
  misc_feature (1)..(25): SEQ ID NO: 6167; WAN02496I_at; Start 81; Stop 105
gctttggctagtggttaatattatt

SEQ ID NO: 11762 - DNA, 25 bp, Artificial
  probe
  misc_feature (1)..(25): SEQ ID NO: 6167; WAN02496I_at; Start 70; Stop 94
cctctaaaacggctttggctagtgg

SEQ ID NO: 11763 - DNA, 25 bp, Artificial
  probe
  misc_feature (1)..(25): SEQ ID NO: 6167; WAN02496I_at; Start 35; Stop 59
tactttttaattgcctcctctagcc

SEQ ID NO: 11764 - DNA, 25 bp, Artificial
  probe
  misc_feature (1)..(25): SEQ ID NO: 6167; WAN02496I_at; Start 115; Stop 139
tctctataaacgtgttagaggcctt

SEQ ID NO: 11765 - DNA, 25 bp, Artificial
  probe
  misc_feature (1)..(25): SEQ ID NO: 6167; WAN02496I_at; Start 50; Stop 74
tcctctagcctcttttttagcctct

SEQ ID NO: 11766 - DNA, 25 bp, Artificial
  probe
  misc_feature (1)..(25): SEQ ID NO: 6167; WAN02496I_at; Start 9; Stop 33
tacctcctgtataaatctggttagc

SEQ ID NO: 11767 - DNA, 25 bp, Artificial
  probe
  misc_feature (1)..(25): SEQ ID NO: 6167; WAN02496I_at; Start 7; Stop 31
tctacctcctgtataaatctggtta

SEQ ID NO: 11768 - DNA, 25 bp, Artificial
  probe
  misc_feature (1)..(25): SEQ ID NO: 6167; WAN02496I_at; Start 16; Stop 40
tgtataaatctggttagcttacttt

SEQ ID NO: 11769 - DNA, 25 bp, Artificial
  probe
  misc_feature (1)..(25): SEQ ID NO: 6167; WAN02496I_at; Start 24; Stop 48
tctggttagcttactttttaattgc

SEQ ID NO: 11770 - DNA, 25 bp, Artificial
  probe
  misc_feature (1)..(25): SEQ ID NO: 6167; WAN02496I_at; Start 14; Stop 38
cctgtataaatctggttagcttact

SEQ ID NO: 11771 - DNA, 25 bp, Artificial
  probe
  misc_feature (1)..(25): SEQ ID NO: 6167; WAN02496I_at; Start 38; Stop 62
tttttaattgcctcctctagcctct

SEQ ID NO: 11772 - DNA, 25 bp, Artificial
  probe
  misc_feature (1)..(25): SEQ ID NO: 6167; WAN02496I_at; Start 42; Stop 66
taattgcctcctctagcctcttttt

SEQ ID NO: 11773 - DNA, 25 bp, Artificial
  probe
  misc_feature (1)..(25): SEQ ID NO: 6167; WAN02496I_at; Start 53; Stop 77
tctagcctcttttttagcctctaaa

SEQ ID NO: 11774 - DNA, 25 bp, Artificial
  probe
  misc_feature (1)..(25): SEQ ID NO: 6167; WAN02496I_at; Start 4; Stop 28
ggttctacctcctgtataaatctgg

SEQ ID NO: 11775 - DNA, 25 bp, Artificial
  probe
  misc_feature (1)..(25): SEQ ID NO: 6213; WAN02496J_at; Start 38; Stop 62
tcattttcctctaattttgataaaa

SEQ ID NO: 11776 - DNA, 25 bp, Artificial
  probe
  misc_feature (1)..(25): SEQ ID NO: 6213; WAN02496J_at; Start 47; Stop 71
tctaattttgataaaataagaggag

SEQ ID NO: 11777 - DNA, 25 bp, Artificial
  probe
  misc_feature (1)..(25): SEQ ID NO: 6213; WAN02496J_at; Start 43; Stop 67
ttcctctaattttgataaaataaga

SEQ ID NO: 11778 - DNA, 25 bp, Artificial
  probe
  misc_feature (1)..(25): SEQ ID NO: 6213; WAN02496J_at; Start 53; Stop 77
tttgataaaataagaggagattatt

SEQ ID NO: 11779 - DNA, 25 bp, Artificial
  probe
  misc_feature (1)..(25): SEQ ID NO: 6213; WAN02496J_at; Start 33; Stop 57
agttgtcattttcctctaattttga

SEQ ID NO: 11780 - DNA, 25 bp, Artificial
  probe
  misc_feature (1)..(25): SEQ ID NO: 6213; WAN02496J_at; Start 37; Stop 61
gtcattttcctctaattttgataaa

SEQ ID NO: 11781 - DNA, 25 bp, Artificial
  probe
  misc_feature (1)..(25): SEQ ID NO: 6213; WAN02496J_at; Start 32; Stop 56
aagttgtcattttcctctaattttg

SEQ ID NO: 11782 - DNA, 25 bp, Artificial
  probe
  misc_feature (1)..(25): SEQ ID NO: 6213; WAN02496J_at; Start 29; Stop 53
attaagttgtcattttcctctaatt

SEQ ID NO: 11783 - DNA, 25 bp, Artificial
  probe
  misc_feature (1)..(25): SEQ ID NO: 6213; WAN02496J_at; Start 49; Stop 73
taattttgataaaataagaggagat

SEQ ID NO: 11784 - DNA, 25 bp, Artificial
  probe
  misc_feature (1)..(25): SEQ ID NO: 6213; WAN02496J_at; Start 44; Stop 68
tcctctaattttgataaaataagag

SEQ ID NO: 11785 - DNA, 25 bp, Artificial
  probe
  misc_feature (1)..(25): SEQ ID NO: 6213; WAN02496J_at; Start 24; Stop 48
tataaattaagttgtcattttcctc

SEQ ID NO: 11786 - DNA, 25 bp, Artificial
  probe
  misc_feature (1)..(25): SEQ ID NO: 6213; WAN02496J_at; Start 25; Stop 49
ataaattaagttgtcattttcctct

SEQ ID NO: 11787 - DNA, 25 bp, Artificial
  probe
  misc_feature (1)..(25): SEQ ID NO: 6213; WAN02496J_at; Start 35; Stop 59
ttgtcattttcctctaattttgata

SEQ ID NO: 11788 - DNA, 25 bp, Artificial
  probe
  misc_feature (1)..(25): SEQ ID NO: 6213; WAN02496J_at; Start 39; Stop 63
cattttcctctaattttgataaaat

SEQ ID NO: 11789 - DNA, 25 bp, Artificial
  probe
  misc_feature (1)..(25): SEQ ID NO: 6213; WAN02496J_at; Start 34; Stop 58
gttgtcattttcctctaattttgat

SEQ ID NO: 11790 - DNA, 25 bp, Artificial
  probe
  misc_feature (1)..(25): SEQ ID NO: 6213; WAN02496J_at; Start 50; Stop 74
aattttgataaaataagaggagatt

SEQ ID NO: 11791 - DNA, 25 bp, Artificial
  probe
  misc_feature (1)..(25): SEQ ID NO: 6213; WAN02496J_at; Start 48; Stop 72
ctaattttgataaaataagaggaga

SEQ ID NO: 11792 - DNA, 25 bp, Artificial
  probe
  misc_feature (1)..(25): SEQ ID NO: 6213; WAN02496J_at; Start 36; Stop 60
tgtcattttcctctaattttgataa

SEQ ID NO: 11793 - DNA, 25 bp, Artificial
  probe
  misc_feature (1)..(25): SEQ ID NO: 6213; WAN02496J_at; Start 46; Stop 70
ctctaattttgataaaataagagga

SEQ ID NO: 11794 - DNA, 25 bp, Artificial
  probe
  misc_feature (1)..(25): SEQ ID NO: 6213; WAN02496J_at; Start 52; Stop 76
ttttgataaaataagaggagattat

SEQ ID NO: 11795 - DNA, 25 bp, Artificial
  probe
  misc_feature (1)..(25): SEQ ID NO: 6213; WAN02496J_at; Start 45; Stop 69
cctctaattttgataaaataagagg

SEQ ID NO: 11796 - DNA, 25 bp, Artificial
  probe
  misc_feature (1)..(25): SEQ ID NO: 6213; WAN02496J_at; Start 26; Stop 50
taaattaagttgtcattttcctcta

SEQ ID NO: 11797 - DNA, 25 bp, Artificial
  probe
  misc_feature (1)..(25): SEQ ID NO: 6213; WAN02496J_at; Start 28; Stop 52
aattaagttgtcattttcctctaat

SEQ ID NO: 11798 - DNA, 25 bp, Artificial
  probe
  misc_feature (1)..(25): SEQ ID NO: 6213; WAN02496J_at; Start 51; Stop 75
attttgataaaataagaggagatta

SEQ ID NO: 11799 - DNA, 25 bp, Artificial
  probe
  misc_feature (1)..(25): SEQ ID NO: 6218; WAN02496K_at; Start 13; Stop 37
tttacttttgcatacctagattata

SEQ ID NO: 11800 - DNA, 25 bp, Artificial
  probe
  misc_feature (1)..(25): SEQ ID NO: 6218; WAN02496K_at; Start 6; Stop 30
tacctcctttacttttgcataccta

SEQ ID NO: 11801 - DNA, 25 bp, Artificial
  probe
  misc_feature (1)..(25): SEQ ID NO: 6218; WAN02496K_at; Start 15; Stop 39
tacttttgcatacctagattataaa

SEQ ID NO: 11802 - DNA, 25 bp, Artificial
  probe
  misc_feature (1)..(25): SEQ ID NO: 6218; WAN02496K_at; Start 22; Stop 46
gcatacctagattataaaactttat

SEQ ID NO: 11803 - DNA, 25 bp, Artificial
  probe
  misc_feature (1)..(25): SEQ ID NO: 6218; WAN02496K_at; Start 23; Stop 47
catacctagattataaaactttatt

SEQ ID NO: 11804 - DNA, 25 bp, Artificial
  probe
  misc_feature (1)..(25): SEQ ID NO: 6218; WAN02496K_at; Start 5; Stop 29
atacctcctttacttttgcatacct

SEQ ID NO: 11805 - DNA, 25 bp, Artificial
  probe
  misc_feature (1)..(25): SEQ ID NO: 6218; WAN02496K_at; Start 19; Stop 43
tttgcatacctagattataaaactt

SEQ ID NO: 11806 - DNA, 25 bp, Artificial
  probe
  misc_feature (1)..(25): SEQ ID NO: 6218; WAN02496K_at; Start 91; Stop 115
ttattatgttctttaaggaggtgta

SEQ ID NO: 11807 - DNA, 25 bp, Artificial
  probe
  misc_feature (1)..(25): SEQ ID NO: 6218; WAN02496K_at; Start 20; Stop 44
ttgcatacctagattataaaacttt

SEQ ID NO: 11808 - DNA, 25 bp, Artificial
  probe
  misc_feature (1)..(25): SEQ ID NO: 6218; WAN02496K_at; Start 10; Stop 34
tcctttacttttgcatacctagatt

SEQ ID NO: 11809 - DNA, 25 bp, Artificial
  probe
  misc_feature (1)..(25): SEQ ID NO: 6218; WAN02496K_at; Start 21; Stop 45
tgcatacctagattataaaacttta

SEQ ID NO: 11810 - DNA, 25 bp, Artificial
  probe
  misc_feature (1)..(25): SEQ ID NO: 6218; WAN02496K_at; Start 12; Stop 36
ctttacttttgcatacctagattat

SEQ ID NO: 11811 - DNA, 25 bp, Artificial
  probe
  misc_feature (1)..(25): SEQ ID NO: 6218; WAN02496K_at; Start 11; Stop 35
cctttacttttgcatacctagatta

SEQ ID NO: 11812 - DNA, 25 bp, Artificial
  probe
  misc_feature (1)..(25): SEQ ID NO: 6218; WAN02496K_at; Start 7; Stop 31
acctcctttacttttgcatacctag

SEQ ID NO: 11813 - DNA, 25 bp, Artificial
  probe
  misc_feature (1)..(25): SEQ ID NO: 6218; WAN02496K_at; Start 1; Stop 25
ttctatacctcctttacttttgcat

SEQ ID NO: 11814 - DNA, 25 bp, Artificial
  probe
  misc_feature (1)..(25): SEQ ID NO: 6218; WAN02496K_at; Start 3; Stop 27
ctatacctcctttacttttgcatac

SEQ ID NO: 11815 - DNA, 25 bp, Artificial
  probe
  misc_feature (1)..(25): SEQ ID NO: 6218; WAN02496K_at; Start 16; Stop 40
acttttgcatacctagattataaaa

SEQ ID NO: 11816 - DNA, 25 bp, Artificial
  probe
  misc_feature (1)..(25): SEQ ID NO: 6218; WAN02496K_at; Start 4; Stop 28
tatacctcctttacttttgcatacc

SEQ ID NO: 11817 - DNA, 25 bp, Artificial
  probe
  misc_feature (1)..(25): SEQ ID NO: 6218; WAN02496K_at; Start 9; Stop 33
ctcctttacttttgcatacctagat

SEQ ID NO: 11818 - DNA, 25 bp, Artificial
  probe
  misc_feature (1)..(25): SEQ ID NO: 6218; WAN02496K_at; Start 18; Stop 42
ttttgcatacctagattataaaact

SEQ ID NO: 11819 - DNA, 25 bp, Artificial
  probe
  misc_feature (1)..(25): SEQ ID NO: 6218; WAN02496K_at; Start 2; Stop 26
tctatacctcctttacttttgcata

SEQ ID NO: 11820 - DNA, 25 bp, Artificial
  probe
  misc_feature (1)..(25): SEQ ID NO: 6218; WAN02496K_at; Start 8; Stop 32
cctcctttacttttgcatacctaga

SEQ ID NO: 11821 - DNA, 25 bp, Artificial
  probe
  misc_feature (1)..(25): SEQ ID NO: 6218; WAN02496K_at; Start 17; Stop 41
cttttgcatacctagattataaaac

SEQ ID NO: 11822 - DNA, 25 bp, Artificial
  probe
  misc_feature (1)..(25): SEQ ID NO: 6218; WAN02496K_at; Start 92; Stop 116
tattatgttctttaaggaggtgtaa

SEQ ID NO: 11823 - DNA, 25 bp, Artificial
  probe
  misc_feature (1)..(25): SEQ ID NO: 6218; WAN02496K_at; Start 14; Stop 38
ttacttttgcatacctagattataa

SEQ ID NO: 11824 - DNA, 25 bp, Artificial
  probe
  misc_feature (1)..(25): SEQ ID NO: 5982; WAN02496L_at; Start 100; Stop 124
gcgccccaaagtgcttatttcaaag

SEQ ID NO: 11825 - DNA, 25 bp, Artificial
  probe
  misc_feature (1)..(25): SEQ ID NO: 5982; WAN02496L_at; Start 115; Stop 139
tatttcaaaggctttatagcctata

SEQ ID NO: 11826 - DNA, 25 bp, Artificial
  probe
  misc_feature (1)..(25): SEQ ID NO: 5982; WAN02496L_at; Start 112; Stop 136
gcttatttcaaaggctttatagcct

SEQ ID NO: 11827 - DNA, 25 bp, Artificial
  probe
  misc_feature (1)..(25): SEQ ID NO: 5982; WAN02496L_at; Start 108; Stop 132
aagtgcttatttcaaaggctttata

SEQ ID NO: 11828 - DNA, 25 bp, Artificial
  probe
  misc_feature (1)..(25): SEQ ID NO: 5982; WAN02496L_at; Start 106; Stop 130
caaagtgcttatttcaaaggcttta

SEQ ID NO: 11829 - DNA, 25 bp, Artificial
  probe
  misc_feature (1)..(25): SEQ ID NO: 5982; WAN02496L_at; Start 121; Stop 145
aaaggctttatagcctataatcaca

SEQ ID NO: 11830 - DNA, 25 bp, Artificial
  probe
  misc_feature (1)..(25): SEQ ID NO: 5982; WAN02496L_at; Start 104; Stop 128
cccaaagtgcttatttcaaaggctt

SEQ ID NO: 11831 - DNA, 25 bp, Artificial
  probe
  misc_feature (1)..(25): SEQ ID NO: 5982; WAN02496L_at; Start 103; Stop 127
ccccaaagtgcttatttcaaaggct

SEQ ID NO: 11832 - DNA, 25 bp, Artificial
  probe
  misc_feature (1)..(25): SEQ ID NO: 5982; WAN02496L_at; Start 128; Stop 152
ttatagcctataatcacataaagag

SEQ ID NO: 11833 - DNA, 25 bp, Artificial
  probe
  misc_feature (1)..(25): SEQ ID NO: 5982; WAN02496L_at; Start 120; Stop 144
caaaggctttatagcctataatcac

SEQ ID NO: 11834 - DNA, 25 bp, Artificial
  probe
  misc_feature (1)..(25): SEQ ID NO: 5982; WAN02496L_at; Start 118; Stop 142
ttcaaaggctttatagcctataatc

SEQ ID NO: 11835 - DNA, 25 bp, Artificial
  probe
  misc_feature (1)..(25): SEQ ID NO: 5982; WAN02496L_at; Start 109; Stop 133
agtgcttatttcaaaggctttatag

SEQ ID NO: 11836 - DNA, 25 bp, Artificial
  probe
  misc_feature (1)..(25): SEQ ID NO: 5982; WAN02496L_at; Start 31; Stop 55
ctcttactataccaaaaattagtag

SEQ ID NO: 11837 - DNA, 25 bp, Artificial
  probe
  misc_feature (1)..(25): SEQ ID NO: 5982; WAN02496L_at; Start 101; Stop 125
cgccccaaagtgcttatttcaaagg

SEQ ID NO: 11838 - DNA, 25 bp, Artificial
  probe
  misc_feature (1)..(25): SEQ ID NO: 5982; WAN02496L_at; Start 123; Stop 147
aggctttatagcctataatcacata

SEQ ID NO: 11839 - DNA, 25 bp, Artificial
  probe
  misc_feature (1)..(25): SEQ ID NO: 5982; WAN02496L_at; Start 86; Stop 110
agcactaagggaaagcgccccaaag

SEQ ID NO: 11840 - DNA, 25 bp, Artificial
  probe
  misc_feature (1)..(25): SEQ ID NO: 5982; WAN02496L_at; Start 102; Stop 126
gccccaaagtgcttatttcaaaggc

SEQ ID NO: 11841 - DNA, 25 bp, Artificial
  probe
  misc_feature (1)..(25): SEQ ID NO: 5982; WAN02496L_at; Start 116; Stop 140
atttcaaaggctttatagcctataa

SEQ ID NO: 11842 - DNA, 25 bp, Artificial
  probe
  misc_feature (1)..(25): SEQ ID NO: 5982; WAN02496L_at; Start 96; Stop 120
gaaagcgccccaaagtgcttatttc

SEQ ID NO: 11843 - DNA, 25 bp, Artificial
  probe
  misc_feature (1)..(25): SEQ ID NO: 5982; WAN02496L_at; Start 129; Stop 153
tatagcctataatcacataaagaga

SEQ ID NO: 11844 - DNA, 25 bp, Artificial
  probe
  misc_feature (1)..(25): SEQ ID NO: 5982; WAN02496L_at; Start 107; Stop 131
aaagtgcttatttcaaaggctttat

SEQ ID NO: 11845 - DNA, 25 bp, Artificial
  probe
  misc_feature (1)..(25): SEQ ID NO: 5982; WAN02496L_at; Start 119; Stop 143
tcaaaggctttatagcctataatca

SEQ ID NO: 11846 - DNA, 25 bp, Artificial
  probe
  misc_feature (1)..(25): SEQ ID NO: 5982; WAN02496L_at; Start 125; Stop 149
gctttatagcctataatcacataaa

SEQ ID NO: 11847 - DNA, 25 bp, Artificial
  probe
  misc_feature (1)..(25): SEQ ID NO: 5982; WAN02496L_at; Start 99; Stop 123
agcgccccaaagtgcttatttcaaa

SEQ ID NO: 11848 - DNA, 25 bp, Artificial
  probe
  misc_feature (1)..(25): SEQ ID NO: 5982; WAN02496L_at; Start 110; Stop 134
gtgcttatttcaaaggctttatagc

SEQ ID NO: 11849 - DNA, 25 bp, Artificial
  probe
  misc_feature (1)..(25): SEQ ID NO: 5982; WAN02496L_at; Start 88; Stop 112
cactaagggaaagcgccccaaagtg

SEQ ID NO: 11850 - DNA, 25 bp, Artificial
  probe
  misc_feature (1)..(25): SEQ ID NO: 5982; WAN02496L_at; Start 16; Stop 40
catttccgggctaccctcttactat

SEQ ID NO: 11851 - DNA, 25 bp, Artificial
  probe
  misc_feature (1)..(25): SEQ ID NO: 5982; WAN02496L_at; Start 97; Stop 121
aaagcgccccaaagtgcttatttca

SEQ ID NO: 11852 - DNA, 25 bp, Artificial
  probe
  misc_feature (1)..(25): SEQ ID NO: 5982; WAN02496L_at; Start 98; Stop 122
aagcgccccaaagtgcttatttcaa

SEQ ID NO: 11853 - DNA, 25 bp, Artificial
  probe
  misc_feature (1)..(25): SEQ ID NO: 5982; WAN02496L_at; Start 20; Stop 44
tccgggctaccctcttactatacca

SEQ ID NO: 11854 - DNA, 25 bp, Artificial
  probe
  misc_feature (1)..(25): SEQ ID NO: 5982; WAN02496L_at; Start 124; Stop 148
ggctttatagcctataatcacataa

SEQ ID NO: 11855 - DNA, 25 bp, Artificial
  probe
  misc_feature (1)..(25): SEQ ID NO: 5982; WAN02496L_at; Start 105; Stop 129
ccaaagtgcttatttcaaaggcttt

SEQ ID NO: 11856 - DNA, 25 bp, Artificial
  probe
  misc_feature (1)..(25): SEQ ID NO: 5982; WAN02496L_at; Start 114; Stop 138
ttatttcaaaggctttatagcctat

SEQ ID NO: 11857 - DNA, 25 bp, Artificial
  probe
  misc_feature (1)..(25): SEQ ID NO: 5982; WAN02496L_at; Start 111; Stop 135
tgcttatttcaaaggctttatagcc

SEQ ID NO: 11858 - DNA, 25 bp, Artificial
  probe
  misc_feature (1)..(25): SEQ ID NO: 6014; WAN02496M_at; Start 227; Stop 251
tgtacatctagctttctcctaagaa

SEQ ID NO: 11859 - DNA, 25 bp, Artificial
  probe
  misc_feature (1)..(25): SEQ ID NO: 6014; WAN02496M_at; Start 141; Stop 165
ggcataagctgaatttgtaaacgaa

SEQ ID NO: 11860 - DNA, 25 bp, Artificial
  probe
  misc_feature (1)..(25): SEQ ID NO: 6014; WAN02496M_at; Start 58; Stop 82
aaatagtctgtactgacgtcataga

SEQ ID NO: 11861 - DNA, 25 bp, Artificial
  probe
  misc_feature (1)..(25): SEQ ID NO: 6014; WAN02496M_at; Start 166; Stop 190
agtattgtagctatttgcttttggg

SEQ ID NO: 11862 - DNA, 25 bp, Artificial
  probe
  misc_feature (1)..(25): SEQ ID NO: 6014; WAN02496M_at; Start 260; Stop 284
gaccatatattgtaactatttagga

SEQ ID NO: 11863 - DNA, 25 bp, Artificial
  probe
  misc_feature (1)..(25): SEQ ID NO: 6014; WAN02496M_at; Start 189; Stop 213
gggcagatcatgatcctccctcaaa

SEQ ID NO: 11864 - DNA, 25 bp, Artificial
  probe
  misc_feature (1)..(25): SEQ ID NO: 6014; WAN02496M_at; Start 35; Stop 59
caggaaaatcagttaatcccaataa

SEQ ID NO: 11865 - DNA, 25 bp, Artificial
  probe
  misc_feature (1)..(25): SEQ ID NO: 6014; WAN02496M_at; Start 194; Stop 218
gatcatgatcctccctcaaatctct

SEQ ID NO: 11866 - DNA, 25 bp, Artificial
  probe
  misc_feature (1)..(25): SEQ ID NO: 6014; WAN02496M_at; Start 30; Stop 54
tttatcaggaaaatcagttaatccc

SEQ ID NO: 11867 - DNA, 25 bp, Artificial
  probe
  misc_feature (1)..(25): SEQ ID NO: 6014; WAN02496M_at; Start 205; Stop 229
tccctcaaatctctcaaacgtctgt

SEQ ID NO: 11868 - DNA, 25 bp, Artificial
  probe
  misc_feature (1)..(25): SEQ ID NO: 6014; WAN02496M_at; Start 221; Stop 245
aacgtctgtacatctagctttctcc

SEQ ID NO: 11869 - DNA, 25 bp, Artificial
  probe
  misc_feature (1)..(25): SEQ ID NO: 6014; WAN02496M_at; Start 115; Stop 139
aacgcatgctcaccccgttcaattt

SEQ ID NO: 11870 - DNA, 25 bp, Artificial
  probe
  misc_feature (1)..(25): SEQ ID NO: 6014; WAN02496M_at; Start 128; Stop 152
cccgttcaattttggcataagctga

SEQ ID NO: 11871 - DNA, 25 bp, Artificial
  probe
  misc_feature (1)..(25): SEQ ID NO: 6014; WAN02496M_at; Start 159; Stop 183
aaacgaaagtattgtagctatttgc

SEQ ID NO: 11872 - DNA, 25 bp, Artificial
  probe
  misc_feature (1)..(25): SEQ ID NO: 6014; WAN02496M_at; Start 243; Stop 267
tcctaagaaaaagtatagaccatat

SEQ ID NO: 11873 - DNA, 25 bp, Artificial
  probe
  misc_feature (1)..(25): SEQ ID NO: 6014; WAN02496M_at; Start 148; Stop 172
gctgaatttgtaaacgaaagtattg

SEQ ID NO: 11874 - DNA, 25 bp, Artificial
  probe
  misc_feature (1)..(25): SEQ ID NO: 6014; WAN02496M_at; Start 210; Stop 234
caaatctctcaaacgtctgtacatc

SEQ ID NO: 11875 - DNA, 25 bp, Artificial
  probe
  misc_feature (1)..(25): SEQ ID NO: 6014; WAN02496M_at; Start 72; Stop 96
gacgtcatagaaatctgagagttta

SEQ ID NO: 11876 - DNA, 25 bp, Artificial
  probe
  misc_feature (1)..(25): SEQ ID NO: 6014; WAN02496M_at; Start 174; Stop 198
agctatttgcttttggggcagatca

SEQ ID NO: 11877 - DNA, 25 bp, Artificial
  probe
  misc_feature (1)..(25): SEQ ID NO: 6014; WAN02496M_at; Start 43; Stop 67
tcagttaatcccaataaatagtctg

SEQ ID NO: 11878 - DNA, 25 bp, Artificial
  probe
  misc_feature (1)..(25): SEQ ID NO: 6014; WAN02496M_at; Start 240; Stop 264
ttctcctaagaaaaagtatagacca

SEQ ID NO: 11879 - DNA, 25 bp, Artificial
  probe
  misc_feature (1)..(25): SEQ ID NO: 6014; WAN02496M_at; Start 122; Stop 146
gctcaccccgttcaattttggcata

SEQ ID NO: 11880 - DNA, 25 bp, Artificial
  probe
  misc_feature (1)..(25): SEQ ID NO: 6014; WAN02496M_at; Start 48; Stop 72
taatcccaataaatagtctgtactg

SEQ ID NO: 11881 - DNA, 25 bp, Artificial
  probe
  misc_feature (1)..(25): SEQ ID NO: 6014; WAN02496M_at; Start 125; Stop 149
caccccgttcaattttggcataagc

SEQ ID NO: 11882 - DNA, 25 bp, Artificial
  probe
  misc_feature (1)..(25): SEQ ID NO: 6014; WAN02496M_at; Start 68; Stop 92
tactgacgtcatagaaatctgagag

SEQ ID NO: 11883 - DNA, 25 bp, Artificial
  probe
  misc_feature (1)..(25): SEQ ID NO: 6014; WAN02496M_at; Start 216; Stop 240
tctcaaacgtctgtacatctagctt

SEQ ID NO: 11884 - DNA, 25 bp, Artificial
  probe
  misc_feature (1)..(25): SEQ ID NO: 6014; WAN02496M_at; Start 102; Stop 126
tacatcagccgtcaacgcatgctca

SEQ ID NO: 11885 - DNA, 25 bp, Artificial
  probe
  misc_feature (1)..(25): SEQ ID NO: 6014; WAN02496M_at; Start 64; Stop 88
tctgtactgacgtcatagaaatctg

SEQ ID NO: 11886 - DNA, 25 bp, Artificial
  probe
  misc_feature (1)..(25): SEQ ID NO: 6014; WAN02496M_at; Start 100; Stop 124
aatacatcagccgtcaacgcatgct

SEQ ID NO: 11887 - DNA, 25 bp, Artificial
  probe
  misc_feature (1)..(25): SEQ ID NO: 6014; WAN02496M_at; Start 95; Stop 119
taaccaatacatcagccgtcaacgc

SEQ ID NO: 11888 - DNA, 25 bp, Artificial
  probe
  misc_feature (1)..(25): SEQ ID NO: 6014; WAN02496M_at; Start 54; Stop 78
caataaatagtctgtactgacgtca

SEQ ID NO: 11889 - DNA, 25 bp, Artificial
  probe
  misc_feature (1)..(25): SEQ ID NO: 6014; WAN02496M_at; Start 76; Stop 100
tcatagaaatctgagagtttaacca

SEQ ID NO: 11890 - DNA, 25 bp, Artificial
  probe
  misc_feature (1)..(25): SEQ ID NO: 6014; WAN02496M_at; Start 231; Stop 255
catctagctttctcctaagaaaaag

SEQ ID NO: 11891 - DNA, 25 bp, Artificial
  probe
  misc_feature (1)..(25): SEQ ID NO: 6014; WAN02496M_at; Start 81; Stop 105
gaaatctgagagtttaaccaataca

SEQ ID NO: 11892 - DNA, 25 bp, Artificial
  probe
  misc_feature (1)..(25): SEQ ID NO: 6198; WAN02496N_at; Start 51; Stop 75
gagagtagtctcacaatttgaacat

SEQ ID NO: 11893 - DNA, 25 bp, Artificial
  probe
  misc_feature (1)..(25): SEQ ID NO: 6198; WAN02496N_at; Start 101; Stop 125
aatgaattaatcagaaacctctgac

SEQ ID NO: 11894 - DNA, 25 bp, Artificial
  probe
  misc_feature (1)..(25): SEQ ID NO: 6198; WAN02496N_at; Start 69; Stop 93
tgaacatttcacatcactcttaata

SEQ ID NO: 11895 - DNA, 25 bp, Artificial
  probe
  misc_feature (1)..(25): SEQ ID NO: 6198; WAN02496N_at; Start 171; Stop 195
ctattatccctaattgaaaattgaa

SEQ ID NO: 11896 - DNA, 25 bp, Artificial
  probe
  misc_feature (1)..(25): SEQ ID NO: 6198; WAN02496N_at; Start 123; Stop 147
gactaagatttcctaattaattcac

SEQ ID NO: 11897 - DNA, 25 bp, Artificial
  probe
  misc_feature (1)..(25): SEQ ID NO: 6198; WAN02496N_at; Start 37; Stop 61
ctatacaacaatccgagagtagtct

SEQ ID NO: 11898 - DNA, 25 bp, Artificial
  probe
  misc_feature (1)..(25): SEQ ID NO: 6198; WAN02496N_at; Start 42; Stop 66
caacaatccgagagtagtctcacaa

SEQ ID NO: 11899 - DNA, 25 bp, Artificial
  probe
  misc_feature (1)..(25): SEQ ID NO: 6198; WAN02496N_at; Start 165; Stop 189
ggaattctattatccctaattgaaa

SEQ ID NO: 11900 - DNA, 25 bp, Artificial
  probe
  misc_feature (1)..(25): SEQ ID NO: 6198; WAN02496N_at; Start 31; Stop 55
aaatttctatacaacaatccgagag

SEQ ID NO: 11901 - DNA, 25 bp, Artificial
  probe
  misc_feature (1)..(25): SEQ ID NO: 6198; WAN02496N_at; Start 43; Stop 67
aacaatccgagagtagtctcacaat

SEQ ID NO: 11902 - DNA, 25 bp, Artificial
  probe
  misc_feature (1)..(25): SEQ ID NO: 6198; WAN02496N_at; Start 129; Stop 153
gatttcctaattaattcactttcta

SEQ ID NO: 11903 - DNA, 25 bp, Artificial
  probe
  misc_feature (1)..(25): SEQ ID NO: 6198; WAN02496N_at; Start 40; Stop 64
tacaacaatccgagagtagtctcac

SEQ ID NO: 11904 - DNA, 25 bp, Artificial
  probe
  misc_feature (1)..(25): SEQ ID NO: 6198; WAN02496N_at; Start 32; Stop 56
aatttctatacaacaatccgagagt

SEQ ID NO: 11905 - DNA, 25 bp, Artificial
  probe
  misc_feature (1)..(25): SEQ ID NO: 6198; WAN02496N_at; Start 104; Stop 128
gaattaatcagaaacctctgactaa

SEQ ID NO: 11906 - DNA, 25 bp, Artificial
  probe
  misc_feature (1)..(25): SEQ ID NO: 6198; WAN02496N_at; Start 144; Stop 168
tcactttctatatcatagtaaggaa

SEQ ID NO: 11907 - DNA, 25 bp, Artificial
  probe
  misc_feature (1)..(25): SEQ ID NO: 6198; WAN02496N_at; Start 78; Stop 102
cacatcactcttaatatataaaaaa

SEQ ID NO: 11908 - DNA, 25 bp, Artificial
  probe
  misc_feature (1)..(25): SEQ ID NO: 6198; WAN02496N_at; Start 156; Stop 180
tcatagtaaggaattctattatccc

SEQ ID NO: 11909 - DNA, 25 bp, Artificial
  probe
  misc_feature (1)..(25): SEQ ID NO: 6198; WAN02496N_at; Start 48; Stop 72
tccgagagtagtctcacaatttgaa

SEQ ID NO: 11910 - DNA, 25 bp, Artificial
  probe
  misc_feature (1)..(25): SEQ ID NO: 6198; WAN02496N_at; Start 1; Stop 25
tcttccttaaaaagctcacaataaa

SEQ ID NO: 11911 - DNA, 25 bp, Artificial
  probe
  misc_feature (1)..(25): SEQ ID NO: 6198; WAN02496N_at; Start 53; Stop 77
gagtagtctcacaatttgaacattt

SEQ ID NO: 11912 - DNA, 25 bp, Artificial
  probe
  misc_feature (1)..(25): SEQ ID NO: 6198; WAN02496N_at; Start 99; Stop 123
aaaatgaattaatcagaaacctctg

SEQ ID NO: 11913 - DNA, 25 bp, Artificial
  probe
  misc_feature (1)..(25): SEQ ID NO: 6198; WAN02496N_at; Start 45; Stop 69
caatccgagagtagtctcacaattt

SEQ ID NO: 11914 - DNA, 25 bp, Artificial
  probe
  misc_feature (1)..(25): SEQ ID NO: 6198; WAN02496N_at; Start 114; Stop 138
gaaacctctgactaagatttcctaa

SEQ ID NO: 11915 - DNA, 25 bp, Artificial
  probe
  misc_feature (1)..(25): SEQ ID NO: 6198; WAN02496N_at; Start 62; Stop 86
cacaatttgaacatttcacatcact

SEQ ID NO: 11916 - DNA, 25 bp, Artificial
  probe
  misc_feature (1)..(25): SEQ ID NO: 6198; WAN02496N_at; Start 34; Stop 58
tttctatacaacaatccgagagtag

SEQ ID NO: 11917 - DNA, 25 bp, Artificial
  probe
  misc_feature (1)..(25): SEQ ID NO: 6198; WAN02496N_at; Start 162; Stop 186
taaggaattctattatccctaattg

SEQ ID NO: 11918 - DNA, 25 bp, Artificial
  probe
  misc_feature (1)..(25): SEQ ID NO: 6198; WAN02496N_at; Start 36; Stop 60
tctatacaacaatccgagagtagtc

SEQ ID NO: 11919 - DNA, 25 bp, Artificial
  probe
  misc_feature (1)..(25): SEQ ID NO: 6198; WAN02496N_at; Start 56; Stop 80
tagtctcacaatttgaacatttcac

SEQ ID NO: 11920 - DNA, 25 bp, Artificial
  probe
  misc_feature (1)..(25): SEQ ID NO: 6198; WAN02496N_at; Start 29; Stop 53
ttaaatttctatacaacaatccgag

SEQ ID NO: 11921 - DNA, 25 bp, Artificial
  probe
  misc_feature (1)..(25): SEQ ID NO: 6198; WAN02496N_at; Start 50; Stop 74
cgagagtagtctcacaatttgaaca

SEQ ID NO: 11922 - DNA, 25 bp, Artificial
  probe
  misc_feature (1)..(25): SEQ ID NO: 6198; WAN02496N_at; Start 149; Stop 173
ttctatatcatagtaaggaattcta

SEQ ID NO: 11923 - DNA, 25 bp, Artificial
  probe
  misc_feature (1)..(25): SEQ ID NO: 6198; WAN02496N_at; Start 118; Stop 142
cctctgactaagatttcctaattaa

SEQ ID NO: 11924 - DNA, 25 bp, Artificial
  probe
  misc_feature (1)..(25): SEQ ID NO: 6198; WAN02496N_at; Start 159; Stop 183
tagtaaggaattctattatccctaa

SEQ ID NO: 11925 - DNA, 25 bp, Artificial
  probe
  misc_feature (1)..(25): SEQ ID NO: 6198; WAN02496N_at; Start 111; Stop 135
tcagaaacctctgactaagatttcc

SEQ ID NO: 11926 - DNA, 25 bp, Artificial
  probe
  misc_feature (1)..(25): SEQ ID NO: 6177; WAN02496O_at; Start 225; Stop 249
aacttcgcccatcataaaatatcta

SEQ ID NO: 11927 - DNA, 25 bp, Artificial
  probe
  misc_feature (1)..(25): SEQ ID NO: 6177; WAN02496O_at; Start 44; Stop 68
cttgtacattggaaacacctctatt

SEQ ID NO: 11928 - DNA, 25 bp, Artificial
  probe
  misc_feature (1)..(25): SEQ ID NO: 6177; WAN02496O_at; Start 141; Stop 165
gatttaattacatatatctcaaaaa

SEQ ID NO: 11929 - DNA, 25 bp, Artificial
  probe
  misc_feature (1)..(25): SEQ ID NO: 6177; WAN02496O_at; Start 76; Stop 100
ttcatattgctgcatgacactttca

SEQ ID NO: 11930 - DNA, 25 bp, Artificial
  probe
  misc_feature (1)..(25): SEQ ID NO: 6177; WAN02496O_at; Start 50; Stop 74
cattggaaacacctctattctacgc

SEQ ID NO: 11931 - DNA, 25 bp, Artificial
  probe
  misc_feature (1)..(25): SEQ ID NO: 6177; WAN02496O_at; Start 53; Stop 77
tggaaacacctctattctacgcttt

SEQ ID NO: 11932 - DNA, 25 bp, Artificial
  probe
  misc_feature (1)..(25): SEQ ID NO: 6177; WAN02496O_at; Start 70; Stop 94
tacgctttcatattgctgcatgaca

SEQ ID NO: 11933 - DNA, 25 bp, Artificial
  probe
  misc_feature (1)..(25): SEQ ID NO: 6177; WAN02496O_at; Start 151; Stop 175
catatatctcaaaaaattgttttga

SEQ ID NO: 11934 - DNA, 25 bp, Artificial
  probe
  misc_feature (1)..(25): SEQ ID NO: 6177; WAN02496O_at; Start 40; Stop 64
cttacttgtacattggaaacacctc

SEQ ID NO: 11935 - DNA, 25 bp, Artificial
  probe
  misc_feature (1)..(25): SEQ ID NO: 6177; WAN02496O_at; Start 55; Stop 79
gaaacacctctattctacgctttca

SEQ ID NO: 11936 - DNA, 25 bp, Artificial
  probe
  misc_feature (1)..(25): SEQ ID NO: 6177; WAN02496O_at; Start 46; Stop 70
tgtacattggaaacacctctattct

SEQ ID NO: 11937 - DNA, 25 bp, Artificial
  probe
  misc_feature (1)..(25): SEQ ID NO: 6177; WAN02496O_at; Start 82; Stop 106
ttgctgcatgacactttcaaaatca

SEQ ID NO: 11938 - DNA, 25 bp, Artificial
  probe
  misc_feature (1)..(25): SEQ ID NO: 6177; WAN02496O_at; Start 80; Stop 104
tattgctgcatgacactttcaaaat

SEQ ID NO: 11939 - DNA, 25 bp, Artificial
  probe
  misc_feature (1)..(25): SEQ ID NO: 6177; WAN02496O_at; Start 87; Stop 111
gcatgacactttcaaaatcaaattg

SEQ ID NO: 11940 - DNA, 25 bp, Artificial
  probe
  misc_feature (1)..(25): SEQ ID NO: 6177; WAN02496O_at; Start 15; Stop 39
tctattactttatttggaatcaaaa

SEQ ID NO: 11941 - DNA, 25 bp, Artificial
  probe
  misc_feature (1)..(25): SEQ ID NO: 6177; WAN02496O_at; Start 223; Stop 247
aaaacttcgcccatcataaaatatc

SEQ ID NO: 11942 - DNA, 25 bp, Artificial
  probe
  misc_feature (1)..(25): SEQ ID NO: 6177; WAN02496O_at; Start 31; Stop 55
gaatcaaaacttacttgtacattgg

SEQ ID NO: 11943 - DNA, 25 bp, Artificial
  probe
  misc_feature (1)..(25): SEQ ID NO: 6177; WAN02496O_at; Start 72; Stop 96
cgctttcatattgctgcatgacact

SEQ ID NO: 11944 - DNA, 25 bp, Artificial
  probe
  misc_feature (1)..(25): SEQ ID NO: 6177; WAN02496O_at; Start 91; Stop 115
gacactttcaaaatcaaattgctaa

SEQ ID NO: 11945 - DNA, 25 bp, Artificial
  probe
  misc_feature (1)..(25): SEQ ID NO: 6177; WAN02496O_at; Start 198; Stop 222
tctgtacttataggaactagttata

SEQ ID NO: 11946 - DNA, 25 bp, Artificial
  probe
  misc_feature (1)..(25): SEQ ID NO: 6177; WAN02496O_at; Start 216; Stop 240
agttataaaaacttcgcccatcata

SEQ ID NO: 11947 - DNA, 25 bp, Artificial
  probe
  misc_feature (1)..(25): SEQ ID NO: 6177; WAN02496O_at; Start 279; Stop 303
ttgatttttaagtgactataatctc

SEQ ID NO: 11948 - DNA, 25 bp, Artificial
  probe
  misc_feature (1)..(25): SEQ ID NO: 6177; WAN02496O_at; Start 93; Stop 117
cactttcaaaatcaaattgctaaaa

SEQ ID NO: 11949 - DNA, 25 bp, Artificial
  probe
  misc_feature (1)..(25): SEQ ID NO: 6177; WAN02496O_at; Start 67; Stop 91
ttctacgctttcatattgctgcatg

SEQ ID NO: 11950 - DNA, 25 bp, Artificial
  probe
  misc_feature (1)..(25): SEQ ID NO: 6177; WAN02496O_at; Start 60; Stop 84
acctctattctacgctttcatattg

SEQ ID NO: 11951 - DNA, 25 bp, Artificial
  probe
  misc_feature (1)..(25): SEQ ID NO: 6177; WAN02496O_at; Start 34; Stop 58
tcaaaacttacttgtacattggaaa

SEQ ID NO: 11952 - DNA, 25 bp, Artificial
  probe
  misc_feature (1)..(25): SEQ ID NO: 6177; WAN02496O_at; Start 230; Stop 254
cgcccatcataaaatatctatttaa

SEQ ID NO: 11953 - DNA, 25 bp, Artificial
  probe
  misc_feature (1)..(25): SEQ ID NO: 6177; WAN02496O_at; Start 42; Stop 66
tacttgtacattggaaacacctcta

SEQ ID NO: 11954 - DNA, 25 bp, Artificial
  probe
  misc_feature (1)..(25): SEQ ID NO: 6177; WAN02496O_at; Start 84; Stop 108
gctgcatgacactttcaaaatcaaa

SEQ ID NO: 11955 - DNA, 25 bp, Artificial
  probe
  misc_feature (1)..(25): SEQ ID NO: 6177; WAN02496O_at; Start 65; Stop 89
tattctacgctttcatattgctgca

SEQ ID NO: 11956 - DNA, 25 bp, Artificial
  probe
  misc_feature (1)..(25): SEQ ID NO: 6177; WAN02496O_at; Start 214; Stop 238
ctagttataaaaacttcgcccatca

SEQ ID NO: 11957 - DNA, 25 bp, Artificial
  probe
  misc_feature (1)..(25): SEQ ID NO: 6177; WAN02496O_at; Start 6; Stop 30
agctccttttctattactttatttg

SEQ ID NO: 11958 - DNA, 25 bp, Artificial
  probe
  misc_feature (1)..(25): SEQ ID NO: 6177; WAN02496O_at; Start 78; Stop 102
catattgctgcatgacactttcaaa

SEQ ID NO: 11959 - DNA, 25 bp, Artificial
  probe
  misc_feature (1)..(25): SEQ ID NO: 6177; WAN02496O_at; Start 27; Stop 51
tttggaatcaaaacttacttgtaca

SEQ ID NO: 11960 - DNA, 25 bp, Artificial
  probe
  misc_feature (1)..(25): SEQ ID NO: 6121; WAN02496P_at; Start 22; Stop 46
gttagactagtatatcacggatagg

SEQ ID NO: 11961 - DNA, 25 bp, Artificial
  probe
  misc_feature (1)..(25): SEQ ID NO: 6121; WAN02496P_at; Start 25; Stop 49
agactagtatatcacggataggctc

SEQ ID NO: 11962 - DNA, 25 bp, Artificial
  probe
  misc_feature (1)..(25): SEQ ID NO: 6121; WAN02496P_at; Start 26; Stop 50
gactagtatatcacggataggctcg

SEQ ID NO: 11963 - DNA, 25 bp, Artificial
  probe
  misc_feature (1)..(25): SEQ ID NO: 6121; WAN02496P_at; Start 23; Stop 47
ttagactagtatatcacggataggc

SEQ ID NO: 11964 - DNA, 25 bp, Artificial
  probe
  misc_feature (1)..(25): SEQ ID NO: 6121; WAN02496P_at; Start 24; Stop 48
tagactagtatatcacggataggct

SEQ ID NO: 11965 - DNA, 25 bp, Artificial
  probe
  misc_feature (1)..(25): SEQ ID NO: 6095; WAN02496Q_at; Start 23; Stop 47
aaagcctatcacacaagctctaaag

SEQ ID NO: 11966 - DNA, 25 bp, Artificial
  probe
  misc_feature (1)..(25): SEQ ID NO: 6095; WAN02496Q_at; Start 34; Stop 58
cacaagctctaaagctggatatgat

SEQ ID NO: 11967 - DNA, 25 bp, Artificial
  probe
  misc_feature (1)..(25): SEQ ID NO: 6095; WAN02496Q_at; Start 22; Stop 46
aaaagcctatcacacaagctctaaa

SEQ ID NO: 11968 - DNA, 25 bp, Artificial
  probe
  misc_feature (1)..(25): SEQ ID NO: 6095; WAN02496Q_at; Start 37; Stop 61
aagctctaaagctggatatgatagg

SEQ ID NO: 11969 - DNA, 25 bp, Artificial
  probe
  misc_feature (1)..(25): SEQ ID NO: 6095; WAN02496Q_at; Start 29; Stop 53
tatcacacaagctctaaagctggat

SEQ ID NO: 11970 - DNA, 25 bp, Artificial
  probe
  misc_feature (1)..(25): SEQ ID NO: 6095; WAN02496Q_at; Start 27; Stop 51
cctatcacacaagctctaaagctgg

SEQ ID NO: 11971 - DNA, 25 bp, Artificial
  probe
  misc_feature (1)..(25): SEQ ID NO: 6095; WAN02496Q_at; Start 12; Stop 36
cctctatacaaaaagcctatcacac

SEQ ID NO: 11972 - DNA, 25 bp, Artificial
  probe
  misc_feature (1)..(25): SEQ ID NO: 6095; WAN02496Q_at; Start 39; Stop 63
gctctaaagctggatatgataggtt

SEQ ID NO: 11973 - DNA, 25 bp, Artificial
  probe
  misc_feature (1)..(25): SEQ ID NO: 6095; WAN02496Q_at; Start 28; Stop 52
ctatcacacaagctctaaagctgga

SEQ ID NO: 11974 - DNA, 25 bp, Artificial
  probe
  misc_feature (1)..(25): SEQ ID NO: 6095; WAN02496Q_at; Start 41; Stop 65
tctaaagctggatatgataggtttt

SEQ ID NO: 11975 - DNA, 25 bp, Artificial
  probe
  misc_feature (1)..(25): SEQ ID NO: 6095; WAN02496Q_at; Start 36; Stop 60
caagctctaaagctggatatgatag

SEQ ID NO: 11976 - DNA, 25 bp, Artificial
  probe
  misc_feature (1)..(25): SEQ ID NO: 6095; WAN02496Q_at; Start 11; Stop 35
ccctctatacaaaaagcctatcaca

SEQ ID NO: 11977 - DNA, 25 bp, Artificial
  probe
  misc_feature (1)..(25): SEQ ID NO: 6095; WAN02496Q_at; Start 21; Stop 45
aaaaagcctatcacacaagctctaa

SEQ ID NO: 11978 - DNA, 25 bp, Artificial
  probe
  misc_feature (1)..(25): SEQ ID NO: 6095; WAN02496Q_at; Start 26; Stop 50
gcctatcacacaagctctaaagctg

SEQ ID NO: 11979 - DNA, 25 bp, Artificial
  probe
  misc_feature (1)..(25): SEQ ID NO: 6095; WAN02496Q_at; Start 24; Stop 48
aagcctatcacacaagctctaaagc

SEQ ID NO: 11980 - DNA, 25 bp, Artificial
  probe
  misc_feature (1)..(25): SEQ ID NO: 6095; WAN02496Q_at; Start 18; Stop 42
tacaaaaagcctatcacacaagctc

SEQ ID NO: 11981 - DNA, 25 bp, Artificial
  probe
  misc_feature (1)..(25): SEQ ID NO: 6095; WAN02496Q_at; Start 16; Stop 40
tatacaaaaagcctatcacacaagc

SEQ ID NO: 11982 - DNA, 25 bp, Artificial
  probe
  misc_feature (1)..(25): SEQ ID NO: 6095; WAN02496Q_at; Start 45; Stop 69
aagctggatatgataggtttttata

SEQ ID NO: 11983 - DNA, 25 bp, Artificial
  probe
  misc_feature (1)..(25): SEQ ID NO: 6095; WAN02496Q_at; Start 14; Stop 38
tctatacaaaaagcctatcacacaa

SEQ ID NO: 11984 - DNA, 25 bp, Artificial
  probe
  misc_feature (1)..(25): SEQ ID NO: 6095; WAN02496Q_at; Start 40; Stop 64
ctctaaagctggatatgataggttt

SEQ ID NO: 11985 - DNA, 25 bp, Artificial
  probe
  misc_feature (1)..(25): SEQ ID NO: 6095; WAN02496Q_at; Start 19; Stop 43
acaaaaagcctatcacacaagctct

SEQ ID NO: 11986 - DNA, 25 bp, Artificial
  probe
  misc_feature (1)..(25): SEQ ID NO: 6095; WAN02496Q_at; Start 33; Stop 57
acacaagctctaaagctggatatga

SEQ ID NO: 11987 - DNA, 25 bp, Artificial
  probe
  misc_feature (1)..(25): SEQ ID NO: 6095; WAN02496Q_at; Start 38; Stop 62
agctctaaagctggatatgataggt

SEQ ID NO: 11988 - DNA, 25 bp, Artificial
  probe
  misc_feature (1)..(25): SEQ ID NO: 6095; WAN02496Q_at; Start 8; Stop 32
ttaccctctatacaaaaagcctatc

SEQ ID NO: 11989 - DNA, 25 bp, Artificial
  probe
  misc_feature (1)..(25): SEQ ID NO: 6095; WAN02496Q_at; Start 42; Stop 66
ctaaagctggatatgataggttttt

SEQ ID NO: 11990 - DNA, 25 bp, Artificial
  probe
  misc_feature (1)..(25): SEQ ID NO: 6095; WAN02496Q_at; Start 30; Stop 54
atcacacaagctctaaagctggata

SEQ ID NO: 11991 - DNA, 25 bp, Artificial
  probe
  misc_feature (1)..(25): SEQ ID NO: 6095; WAN02496Q_at; Start 47; Stop 71
gctggatatgataggtttttatatt

SEQ ID NO: 11992 - DNA, 25 bp, Artificial
  probe
  misc_feature (1)..(25): SEQ ID NO: 6095; WAN02496Q_at; Start 10; Stop 34
accctctatacaaaaagcctatcac

SEQ ID NO: 11993 - DNA, 25 bp, Artificial
  probe
  misc_feature (1)..(25): SEQ ID NO: 6095; WAN02496Q_at; Start 6; Stop 30
tcttaccctctatacaaaaagccta

SEQ ID NO: 11994 - DNA, 25 bp, Artificial
  probe
  misc_feature (1)..(25): SEQ ID NO: 6095; WAN02496Q_at; Start 31; Stop 55
tcacacaagctctaaagctggatat

SEQ ID NO: 11995 - DNA, 25 bp, Artificial
  probe
  misc_feature (1)..(25): SEQ ID NO: 6095; WAN02496Q_at; Start 20; Stop 44
caaaaagcctatcacacaagctcta

SEQ ID NO: 11996 - DNA, 25 bp, Artificial
  probe
  misc_feature (1)..(25): SEQ ID NO: 6095; WAN02496Q_at; Start 7; Stop 31
cttaccctctatacaaaaagcctat

SEQ ID NO: 11997 - DNA, 25 bp, Artificial
  probe
  misc_feature (1)..(25): SEQ ID NO: 6095; WAN02496Q_at; Start 9; Stop 33
taccctctatacaaaaagcctatca

SEQ ID NO: 11998 - DNA, 25 bp, Artificial
  probe
  misc_feature (1)..(25): SEQ ID NO: 6095; WAN02496Q_at; Start 32; Stop 56
cacacaagctctaaagctggatatg

SEQ ID NO: 11999 - DNA, 25 bp, Artificial
  probe
  misc_feature (1)..(25): SEQ ID NO: 6068; WAN02496R_at; Start 27; Stop 51
cattcttactgattataccacattt

SEQ ID NO: 12000 - DNA, 25 bp, Artificial
  probe
  misc_feature (1)..(25): SEQ ID NO: 6068; WAN02496R_at; Start 41; Stop 65
ataccacatttacgttgaaaattct

SEQ ID NO: 12001 - DNA, 25 bp, Artificial
  probe
  misc_feature (1)..(25): SEQ ID NO: 6068; WAN02496R_at; Start 37; Stop 61
gattataccacatttacgttgaaaa

SEQ ID NO: 12002 - DNA, 25 bp, Artificial
  probe
  misc_feature (1)..(25): SEQ ID NO: 6068; WAN02496R_at; Start 25; Stop 49
aacattcttactgattataccacat

SEQ ID NO: 12003 - DNA, 25 bp, Artificial
  probe
  misc_feature (1)..(25): SEQ ID NO: 6068; WAN02496R_at; Start 44; Stop 68
ccacatttacgttgaaaattcttct

SEQ ID NO: 12004 - DNA, 25 bp, Artificial
  probe
  misc_feature (1)..(25): SEQ ID NO: 6068; WAN02496R_at; Start 35; Stop 59
ctgattataccacatttacgttgaa

SEQ ID NO: 12005 - DNA, 25 bp, Artificial
  probe
  misc_feature (1)..(25): SEQ ID NO: 6068; WAN02496R_at; Start 32; Stop 56
ttactgattataccacatttacgtt

SEQ ID NO: 12006 - DNA, 25 bp, Artificial
  probe
  misc_feature (1)..(25): SEQ ID NO: 6068; WAN02496R_at; Start 30; Stop 54
tcttactgattataccacatttacg

SEQ ID NO: 12007 - DNA, 25 bp, Artificial
  probe
  misc_feature (1)..(25): SEQ ID NO: 6068; WAN02496R_at; Start 33; Stop 57
tactgattataccacatttacgttg

SEQ ID NO: 12008 - DNA, 25 bp, Artificial
  probe
  misc_feature (1)..(25): SEQ ID NO: 6068; WAN02496R_at; Start 45; Stop 69
cacatttacgttgaaaattcttcta

SEQ ID NO: 12009 - DNA, 25 bp, Artificial
  probe
  misc_feature (1)..(25): SEQ ID NO: 6068; WAN02496R_at; Start 36; Stop 60
tgattataccacatttacgttgaaa

SEQ ID NO: 12010 - DNA, 25 bp, Artificial
  probe
  misc_feature (1)..(25): SEQ ID NO: 6068; WAN02496R_at; Start 23; Stop 47
ttaacattcttactgattataccac

SEQ ID NO: 12011 - DNA, 25 bp, Artificial
  probe
  misc_feature (1)..(25): SEQ ID NO: 6068; WAN02496R_at; Start 38; Stop 62
attataccacatttacgttgaaaat

SEQ ID NO: 12012 - DNA, 25 bp, Artificial
  probe
  misc_feature (1)..(25): SEQ ID NO: 6068; WAN02496R_at; Start 26; Stop 50
acattcttactgattataccacatt

SEQ ID NO: 12013 - DNA, 25 bp, Artificial
  probe
  misc_feature (1)..(25): SEQ ID NO: 6068; WAN02496R_at; Start 46; Stop 70
acatttacgttgaaaattcttctat

SEQ ID NO: 12014 - DNA, 25 bp, Artificial
  probe
  misc_feature (1)..(25): SEQ ID NO: 6068; WAN02496R_at; Start 47; Stop 71
catttacgttgaaaattcttctatt

SEQ ID NO: 12015 - DNA, 25 bp, Artificial
  probe
  misc_feature (1)..(25): SEQ ID NO: 6068; WAN02496R_at; Start 24; Stop 48
taacattcttactgattataccaca

SEQ ID NO: 12016 - DNA, 25 bp, Artificial
  probe
  misc_feature (1)..(25): SEQ ID NO: 6068; WAN02496R_at; Start 40; Stop 64
tataccacatttacgttgaaaattc

SEQ ID NO: 12017 - DNA, 25 bp, Artificial
  probe
  misc_feature (1)..(25): SEQ ID NO: 6068; WAN02496R_at; Start 34; Stop 58
actgattataccacatttacgttga

SEQ ID NO: 12018 - DNA, 25 bp, Artificial
  probe
  misc_feature (1)..(25): SEQ ID NO: 6068; WAN02496R_at; Start 28; Stop 52
attcttactgattataccacattta

SEQ ID NO: 12019 - DNA, 25 bp, Artificial
  probe
  misc_feature (1)..(25): SEQ ID NO: 6068; WAN02496R_at; Start 29; Stop 53
ttcttactgattataccacatttac

SEQ ID NO: 12020 - DNA, 25 bp, Artificial
  probe
  misc_feature (1)..(25): SEQ ID NO: 6068; WAN02496R_at; Start 31; Stop 55
cttactgattataccacatttacgt

SEQ ID NO: 12021 - DNA, 25 bp, Artificial
  probe
  misc_feature (1)..(25): SEQ ID NO: 6100; WAN02496S_at; Start 7; Stop 31
tcctcctttgaagtattataacaaa

SEQ ID NO: 12022 - DNA, 25 bp, Artificial
  probe
  misc_feature (1)..(25): SEQ ID NO: 6100; WAN02496S_at; Start 31; Stop 55
atcattaccgtaattacaatggcag

SEQ ID NO: 12023 - DNA, 25 bp, Artificial
  probe
  misc_feature (1)..(25): SEQ ID NO: 6100; WAN02496S_at; Start 20; Stop 44
tattataacaaatcattaccgtaat

SEQ ID NO: 12024 - DNA, 25 bp, Artificial
  probe
  misc_feature (1)..(25): SEQ ID NO: 6100; WAN02496S_at; Start 34; Stop 58
attaccgtaattacaatggcagaat

SEQ ID NO: 12025 - DNA, 25 bp, Artificial
  probe
  misc_feature (1)..(25): SEQ ID NO: 6100; WAN02496S_at; Start 2; Stop 26
tgatttcctcctttgaagtattata

SEQ ID NO: 12026 - DNA, 25 bp, Artificial
  probe
  misc_feature (1)..(25): SEQ ID NO: 6100; WAN02496S_at; Start 16; Stop 40
gaagtattataacaaatcattaccg

SEQ ID NO: 12027 - DNA, 25 bp, Artificial
  probe
  misc_feature (1)..(25): SEQ ID NO: 6100; WAN02496S_at; Start 17; Stop 41
aagtattataacaaatcattaccgt

SEQ ID NO: 12028 - DNA, 25 bp, Artificial
  probe
  misc_feature (1)..(25): SEQ ID NO: 6100; WAN02496S_at; Start 19; Stop 43
gtattataacaaatcattaccgtaa

SEQ ID NO: 12029 - DNA, 25 bp, Artificial
  probe
  misc_feature (1)..(25): SEQ ID NO: 6100; WAN02496S_at; Start 30; Stop 54
aatcattaccgtaattacaatggca

SEQ ID NO: 12030 - DNA, 25 bp, Artificial
  probe
  misc_feature (1)..(25): SEQ ID NO: 6100; WAN02496S_at; Start 23; Stop 47
tataacaaatcattaccgtaattac

SEQ ID NO: 12031 - DNA, 25 bp, Artificial
  probe
  misc_feature (1)..(25): SEQ ID NO: 6100; WAN02496S_at; Start 27; Stop 51
acaaatcattaccgtaattacaatg

SEQ ID NO: 12032 - DNA, 25 bp, Artificial
  probe
  misc_feature (1)..(25): SEQ ID NO: 6100; WAN02496S_at; Start 18; Stop 42
agtattataacaaatcattaccgta

SEQ ID NO: 12033 - DNA, 25 bp, Artificial
  probe
  misc_feature (1)..(25): SEQ ID NO: 6100; WAN02496S_at; Start 28; Stop 52
caaatcattaccgtaattacaatgg

SEQ ID NO: 12034 - DNA, 25 bp, Artificial
  probe
  misc_feature (1)..(25): SEQ ID NO: 6100; WAN02496S_at; Start 1; Stop 25
ctgatttcctcctttgaagtattat

SEQ ID NO: 12035 - DNA, 25 bp, Artificial
  probe
  misc_feature (1)..(25): SEQ ID NO: 6100; WAN02496S_at; Start 10; Stop 34
tcctttgaagtattataacaaatca

SEQ ID NO: 12036 - DNA, 25 bp, Artificial
  probe
  misc_feature (1)..(25): SEQ ID NO: 6100; WAN02496S_at; Start 6; Stop 30
ttcctcctttgaagtattataacaa

SEQ ID NO: 12037 - DNA, 25 bp, Artificial
  probe
  misc_feature (1)..(25): SEQ ID NO: 6100; WAN02496S_at; Start 11; Stop 35
cctttgaagtattataacaaatcat

SEQ ID NO: 12038 - DNA, 25 bp, Artificial
  probe
  misc_feature (1)..(25): SEQ ID NO: 6100; WAN02496S_at; Start 14; Stop 38
ttgaagtattataacaaatcattac

SEQ ID NO: 12039 - DNA, 25 bp, Artificial
  probe
  misc_feature (1)..(25): SEQ ID NO: 6100; WAN02496S_at; Start 21; Stop 45
attataacaaatcattaccgtaatt

SEQ ID NO: 12040 - DNA, 25 bp, Artificial
  probe
  misc_feature (1)..(25): SEQ ID NO: 6100; WAN02496S_at; Start 8; Stop 32
cctcctttgaagtattataacaaat

SEQ ID NO: 12041 - DNA, 25 bp, Artificial
  probe
  misc_feature (1)..(25): SEQ ID NO: 6100; WAN02496S_at; Start 15; Stop 39
tgaagtattataacaaatcattacc

SEQ ID NO: 12042 - DNA, 25 bp, Artificial
  probe
  misc_feature (1)..(25): SEQ ID NO: 6100; WAN02496S_at; Start 22; Stop 46
ttataacaaatcattaccgtaatta

SEQ ID NO: 12043 - DNA, 25 bp, Artificial
  probe
  misc_feature (1)..(25): SEQ ID NO: 6100; WAN02496S_at; Start 9; Stop 33
ctcctttgaagtattataacaaatc

SEQ ID NO: 12044 - DNA, 25 bp, Artificial
  probe
  misc_feature (1)..(25): SEQ ID NO: 6100; WAN02496S_at; Start 29; Stop 53
aaatcattaccgtaattacaatggc

SEQ ID NO: 12045 - DNA, 25 bp, Artificial
  probe
  misc_feature (1)..(25): SEQ ID NO: 6100; WAN02496S_at; Start 5; Stop 29
tttcctcctttgaagtattataaca

SEQ ID NO: 12046 - DNA, 25 bp, Artificial
  probe
  misc_feature (1)..(25): SEQ ID NO: 6100; WAN02496S_at; Start 33; Stop 57
cattaccgtaattacaatggcagaa

SEQ ID NO: 12047 - DNA, 25 bp, Artificial
  probe
  misc_feature (1)..(25): SEQ ID NO: 6100; WAN02496S_at; Start 26; Stop 50
aacaaatcattaccgtaattacaat

SEQ ID NO: 12048 - DNA, 25 bp, Artificial
  probe
  misc_feature (1)..(25): SEQ ID NO: 6100; WAN02496S_at; Start 35; Stop 59
ttaccgtaattacaatggcagaata

SEQ ID NO: 12049 - DNA, 25 bp, Artificial
  probe
  misc_feature (1)..(25): SEQ ID NO: 6100; WAN02496S_at; Start 24; Stop 48
ataacaaatcattaccgtaattaca

SEQ ID NO: 12050 - DNA, 25 bp, Artificial
  probe
  misc_feature (1)..(25): SEQ ID NO: 6100; WAN02496S_at; Start 32; Stop 56
tcattaccgtaattacaatggcaga

SEQ ID NO: 12051 - DNA, 25 bp, Artificial
  probe
  misc_feature (1)..(25): SEQ ID NO: 6100; WAN02496S_at; Start 12; Stop 36
ctttgaagtattataacaaatcatt

SEQ ID NO: 12052 - DNA, 25 bp, Artificial
  probe
  misc_feature (1)..(25): SEQ ID NO: 6100; WAN02496S_at; Start 3; Stop 27
gatttcctcctttgaagtattataa

SEQ ID NO: 12053 - DNA, 25 bp, Artificial
  probe
  misc_feature (1)..(25): SEQ ID NO: 6100; WAN02496S_at; Start 13; Stop 37
tttgaagtattataacaaatcatta

SEQ ID NO: 12054 - DNA, 25 bp, Artificial
  probe
  misc_feature (1)..(25): SEQ ID NO: 6100; WAN02496S_at; Start 25; Stop 49
taacaaatcattaccgtaattacaa

SEQ ID NO: 12055 - DNA, 25 bp, Artificial
  probe
  misc_feature (1)..(25): SEQ ID NO: 6186; WAN02496T_at; Start 203; Stop 227
caaatttagtttcttagcaagaaga

SEQ ID NO: 12056 - DNA, 25 bp, Artificial
  probe
  misc_feature (1)..(25): SEQ ID NO: 6186; WAN02496T_at; Start 19; Stop 43
gagctacctctattataccatgtaa

SEQ ID NO: 12057 - DNA, 25 bp, Artificial
  probe
  misc_feature (1)..(25): SEQ ID NO: 6186; WAN02496T_at; Start 140; Stop 164
taagtacggatgtaaaccaaatcaa

SEQ ID NO: 12058 - DNA, 25 bp, Artificial
  probe
  misc_feature (1)..(25): SEQ ID NO: 6186; WAN02496T_at; Start 123; Stop 147
gctctaacaaatcaatttaagtacg

SEQ ID NO: 12059 - DNA, 25 bp, Artificial
  probe
  misc_feature (1)..(25): SEQ ID NO: 6186; WAN02496T_at; Start 51; Stop 75
tatttcatctaaaagtacctttaga

SEQ ID NO: 12060 - DNA, 25 bp, Artificial
  probe
  misc_feature (1)..(25): SEQ ID NO: 6186; WAN02496T_at; Start 218; Stop 242
agcaagaagaatactaaacgttcgt

SEQ ID NO: 12061 - DNA, 25 bp, Artificial
  probe
  misc_feature (1)..(25): SEQ ID NO: 6186; WAN02496T_at; Start 74; Stop 98
gaatactgcttatttatccttgaaa

SEQ ID NO: 12062 - DNA, 25 bp, Artificial
  probe
  misc_feature (1)..(25): SEQ ID NO: 6186; WAN02496T_at; Start 130; Stop 154
caaatcaatttaagtacggatgtaa

SEQ ID NO: 12063 - DNA, 25 bp, Artificial
  probe
  misc_feature (1)..(25): SEQ ID NO: 6186; WAN02496T_at; Start 6; Stop 30
cacctccattaaagagctacctcta

SEQ ID NO: 12064 - DNA, 25 bp, Artificial
  probe
  misc_feature (1)..(25): SEQ ID NO: 6186; WAN02496T_at; Start 217; Stop 241
tagcaagaagaatactaaacgttcg

SEQ ID NO: 12065 - DNA, 25 bp, Artificial
  probe
  misc_feature (1)..(25): SEQ ID NO: 6186; WAN02496T_at; Start 146; Stop 170
cggatgtaaaccaaatcaactctaa

SEQ ID NO: 12066 - DNA, 25 bp, Artificial
  probe
  misc_feature (1)..(25): SEQ ID NO: 6186; WAN02496T_at; Start 107; Stop 131
ttttaataaaagtagagctctaaca

SEQ ID NO: 12067 - DNA, 25 bp, Artificial
  probe
  misc_feature (1)..(25): SEQ ID NO: 6186; WAN02496T_at; Start 58; Stop 82
tctaaaagtacctttagaatactgc

SEQ ID NO: 12068 - DNA, 25 bp, Artificial
  probe
  misc_feature (1)..(25): SEQ ID NO: 6186; WAN02496T_at; Start 273; Stop 297
tatcaacattttttgtctaactatt

SEQ ID NO: 12069 - DNA, 25 bp, Artificial
  probe
  misc_feature (1)..(25): SEQ ID NO: 6186; WAN02496T_at; Start 79; Stop 103
ctgcttatttatccttgaaattgaa

SEQ ID NO: 12070 - DNA, 25 bp, Artificial
  probe
  misc_feature (1)..(25): SEQ ID NO: 6186; WAN02496T_at; Start 148; Stop 172
gatgtaaaccaaatcaactctaaca

SEQ ID NO: 12071 - DNA, 25 bp, Artificial
  probe
  misc_feature (1)..(25): SEQ ID NO: 6186; WAN02496T_at; Start 240; Stop 264
cgttttttgtgaattaagaataatg

SEQ ID NO: 12072 - DNA, 25 bp, Artificial
  probe
  misc_feature (1)..(25): SEQ ID NO: 6186; WAN02496T_at; Start 257; Stop 281
gaataatgatacaaattatcaacat

SEQ ID NO: 12073 - DNA, 25 bp, Artificial
  probe
  misc_feature (1)..(25): SEQ ID NO: 6186; WAN02496T_at; Start 16; Stop 40
aaagagctacctctattataccatg

SEQ ID NO: 12074 - DNA, 25 bp, Artificial
  probe
  misc_feature (1)..(25): SEQ ID NO: 6186; WAN02496T_at; Start 23; Stop 47
tacctctattataccatgtaaaggc

SEQ ID NO: 12075 - DNA, 25 bp, Artificial
  probe
  misc_feature (1)..(25): SEQ ID NO: 6186; WAN02496T_at; Start 113; Stop 137
taaaagtagagctctaacaaatcaa

SEQ ID NO: 12076 - DNA, 25 bp, Artificial
  probe
  misc_feature (1)..(25): SEQ ID NO: 6186; WAN02496T_at; Start 144; Stop 168
tacggatgtaaaccaaatcaactct

SEQ ID NO: 12077 - DNA, 25 bp, Artificial
  probe
  misc_feature (1)..(25): SEQ ID NO: 6186; WAN02496T_at; Start 199; Stop 223
cgaacaaatttagtttcttagcaag

SEQ ID NO: 12078 - DNA, 25 bp, Artificial
  probe
  misc_feature (1)..(25): SEQ ID NO: 6186; WAN02496T_at; Start 119; Stop 143
tagagctctaacaaatcaatttaag

SEQ ID NO: 12079 - DNA, 25 bp, Artificial
  probe
  misc_feature (1)..(25): SEQ ID NO: 6186; WAN02496T_at; Start 1; Stop 25
tcaaacacctccattaaagagctac

SEQ ID NO: 12080 - DNA, 25 bp, Artificial
  probe
  misc_feature (1)..(25): SEQ ID NO: 6186; WAN02496T_at; Start 166; Stop 190
tctaacaaaaatagatttacaagag

SEQ ID NO: 12081 - DNA, 25 bp, Artificial
  probe
  misc_feature (1)..(25): SEQ ID NO: 6186; WAN02496T_at; Start 28; Stop 52
ctattataccatgtaaaggctttta

SEQ ID NO: 12082 - DNA, 25 bp, Artificial
  probe
  misc_feature (1)..(25): SEQ ID NO: 6186; WAN02496T_at; Start 127; Stop 151
taacaaatcaatttaagtacggatg

SEQ ID NO: 12083 - DNA, 25 bp, Artificial
  probe
  misc_feature (1)..(25): SEQ ID NO: 6186; WAN02496T_at; Start 39; Stop 63
tgtaaaggcttttatttcatctaaa

SEQ ID NO: 12084 - DNA, 25 bp, Artificial
  probe
  misc_feature (1)..(25): SEQ ID NO: 6186; WAN02496T_at; Start 214; Stop 238
tcttagcaagaagaatactaaacgt

SEQ ID NO: 12085 - DNA, 25 bp, Artificial
  probe
  misc_feature (1)..(25): SEQ ID NO: 6186; WAN02496T_at; Start 62; Stop 86
aaagtacctttagaatactgcttat

SEQ ID NO: 12086 - DNA, 25 bp, Artificial
  probe
  misc_feature (1)..(25): SEQ ID NO: 6186; WAN02496T_at; Start 134; Stop 158
tcaatttaagtacggatgtaaacca

SEQ ID NO: 12087 - DNA, 25 bp, Artificial
  probe
  misc_feature (1)..(25): SEQ ID NO: 6186; WAN02496T_at; Start 156; Stop 180
ccaaatcaactctaacaaaaataga

SEQ ID NO: 12088 - DNA, 25 bp, Artificial
  probe
  misc_feature (1)..(25): SEQ ID NO: 6186; WAN02496T_at; Start 25; Stop 49
cctctattataccatgtaaaggctt

SEQ ID NO: 12089 - DNA, 25 bp, Artificial
  probe
  misc_feature (1)..(25): SEQ ID NO: 6211; WAN02496U_at; Start 34; Stop 58
tttgaatgtgagttattcaaacctg

SEQ ID NO: 12090 - DNA, 25 bp, Artificial
  probe
  misc_feature (1)..(25): SEQ ID NO: 6211; WAN02496U_at; Start 24; Stop 48
tatacggctttttgaatgtgagtta

SEQ ID NO: 12091 - DNA, 25 bp, Artificial
  probe
  misc_feature (1)..(25): SEQ ID NO: 6211; WAN02496U_at; Start 40; Stop 64
tgtgagttattcaaacctgctacta

SEQ ID NO: 12092 - DNA, 25 bp, Artificial
  probe
  misc_feature (1)..(25): SEQ ID NO: 6211; WAN02496U_at; Start 33; Stop 57
ttttgaatgtgagttattcaaacct

SEQ ID NO: 12093 - DNA, 25 bp, Artificial
  probe
  misc_feature (1)..(25): SEQ ID NO: 6211; WAN02496U_at; Start 26; Stop 50
tacggctttttgaatgtgagttatt

SEQ ID NO: 12094 - DNA, 25 bp, Artificial
  probe
  misc_feature (1)..(25): SEQ ID NO: 6211; WAN02496U_at; Start 25; Stop 49
atacggctttttgaatgtgagttat

SEQ ID NO: 12095 - DNA, 25 bp, Artificial
  probe
  misc_feature (1)..(25): SEQ ID NO: 6211; WAN02496U_at; Start 20; Stop 44
gctttatacggctttttgaatgtga

SEQ ID NO: 12096 - DNA, 25 bp, Artificial
  probe
  misc_feature (1)..(25): SEQ ID NO: 6211; WAN02496U_at; Start 29; Stop 53
ggctttttgaatgtgagttattcaa

SEQ ID NO: 12097 - DNA, 25 bp, Artificial
  probe
  misc_feature (1)..(25): SEQ ID NO: 6211; WAN02496U_at; Start 41; Stop 65
gtgagttattcaaacctgctactac

SEQ ID NO: 12098 - DNA, 25 bp, Artificial
  probe
  misc_feature (1)..(25): SEQ ID NO: 6211; WAN02496U_at; Start 38; Stop 62
aatgtgagttattcaaacctgctac

SEQ ID NO: 12099 - DNA, 25 bp, Artificial
  probe
  misc_feature (1)..(25): SEQ ID NO: 6211; WAN02496U_at; Start 31; Stop 55
ctttttgaatgtgagttattcaaac

SEQ ID NO: 12100 - DNA, 25 bp, Artificial
  probe
  misc_feature (1)..(25): SEQ ID NO: 6211; WAN02496U_at; Start 39; Stop 63
atgtgagttattcaaacctgctact

SEQ ID NO: 12101 - DNA, 25 bp, Artificial
  probe
  misc_feature (1)..(25): SEQ ID NO: 6211; WAN02496U_at; Start 32; Stop 56
tttttgaatgtgagttattcaaacc

SEQ ID NO: 12102 - DNA, 25 bp, Artificial
  probe
  misc_feature (1)..(25): SEQ ID NO: 6211; WAN02496U_at; Start 30; Stop 54
gctttttgaatgtgagttattcaaa

SEQ ID NO: 12103 - DNA, 25 bp, Artificial
  probe
  misc_feature (1)..(25): SEQ ID NO: 6211; WAN02496U_at; Start 22; Stop 46
tttatacggctttttgaatgtgagt

SEQ ID NO: 12104 - DNA, 25 bp, Artificial
  probe
  misc_feature (1)..(25): SEQ ID NO: 6211; WAN02496U_at; Start 27; Stop 51
acggctttttgaatgtgagttattc

SEQ ID NO: 12105 - DNA, 25 bp, Artificial
  probe
  misc_feature (1)..(25): SEQ ID NO: 6211; WAN02496U_at; Start 36; Stop 60
tgaatgtgagttattcaaacctgct

SEQ ID NO: 12106 - DNA, 25 bp, Artificial
  probe
  misc_feature (1)..(25): SEQ ID NO: 6211; WAN02496U_at; Start 35; Stop 59
ttgaatgtgagttattcaaacctgc

SEQ ID NO: 12107 - DNA, 25 bp, Artificial
  probe
  misc_feature (1)..(25): SEQ ID NO: 6211; WAN02496U_at; Start 37; Stop 61
gaatgtgagttattcaaacctgcta

SEQ ID NO: 12108 - DNA, 25 bp, Artificial
  probe
  misc_feature (1)..(25): SEQ ID NO: 6211; WAN02496U_at; Start 19; Stop 43
cgctttatacggctttttgaatgtg

SEQ ID NO: 12109 - DNA, 25 bp, Artificial
  probe
  misc_feature (1)..(25): SEQ ID NO: 6211; WAN02496U_at; Start 21; Stop 45
ctttatacggctttttgaatgtgag

SEQ ID NO: 12110 - DNA, 25 bp, Artificial
  probe
  misc_feature (1)..(25): SEQ ID NO: 6211; WAN02496U_at; Start 28; Stop 52
cggctttttgaatgtgagttattca

SEQ ID NO: 12111 - DNA, 25 bp, Artificial
  probe
  misc_feature (1)..(25): SEQ ID NO: 6211; WAN02496U_at; Start 23; Stop 47
ttatacggctttttgaatgtgagtt

SEQ ID NO: 12112 - DNA, 25 bp, Artificial
  probe
  misc_feature (1)..(25): SEQ ID NO: 6227; WAN02496V_at; Start 21; Stop 45
gaccatcatctcttgtttttttgtg

SEQ ID NO: 12113 - DNA, 25 bp, Artificial
  probe
  misc_feature (1)..(25): SEQ ID NO: 6227; WAN02496V_at; Start 29; Stop 53
tctcttgtttttttgtggtacaata

SEQ ID NO: 12114 - DNA, 25 bp, Artificial
  probe
  misc_feature (1)..(25): SEQ ID NO: 6227; WAN02496V_at; Start 26; Stop 50
tcatctcttgtttttttgtggtaca

SEQ ID NO: 12115 - DNA, 25 bp, Artificial
  probe
  misc_feature (1)..(25): SEQ ID NO: 6227; WAN02496V_at; Start 16; Stop 40
gaggtgaccatcatctcttgttttt

SEQ ID NO: 12116 - DNA, 25 bp, Artificial
  probe
  misc_feature (1)..(25): SEQ ID NO: 6227; WAN02496V_at; Start 25; Stop 49
atcatctcttgtttttttgtggtac

SEQ ID NO: 12117 - DNA, 25 bp, Artificial
  probe
  misc_feature (1)..(25): SEQ ID NO: 6227; WAN02496V_at; Start 10; Stop 34
tgacaagaggtgaccatcatctctt

SEQ ID NO: 12118 - DNA, 25 bp, Artificial
  probe
  misc_feature (1)..(25): SEQ ID NO: 6227; WAN02496V_at; Start 23; Stop 47
ccatcatctcttgtttttttgtggt

SEQ ID NO: 12119 - DNA, 25 bp, Artificial
  probe
  misc_feature (1)..(25): SEQ ID NO: 6227; WAN02496V_at; Start 13; Stop 37
caagaggtgaccatcatctcttgtt

SEQ ID NO: 12120 - DNA, 25 bp, Artificial
  probe
  misc_feature (1)..(25): SEQ ID NO: 6227; WAN02496V_at; Start 19; Stop 43
gtgaccatcatctcttgtttttttg

SEQ ID NO: 12121 - DNA, 25 bp, Artificial
  probe
  misc_feature (1)..(25): SEQ ID NO: 6227; WAN02496V_at; Start 27; Stop 51
catctcttgtttttttgtggtacaa

SEQ ID NO: 12122 - DNA, 25 bp, Artificial
  probe
  misc_feature (1)..(25): SEQ ID NO: 6227; WAN02496V_at; Start 18; Stop 42
ggtgaccatcatctcttgttttttt

SEQ ID NO: 12123 - DNA, 25 bp, Artificial
  probe
  misc_feature (1)..(25): SEQ ID NO: 6227; WAN02496V_at; Start 28; Stop 52
atctcttgtttttttgtggtacaat

SEQ ID NO: 12124 - DNA, 25 bp, Artificial
  probe
  misc_feature (1)..(25): SEQ ID NO: 6227; WAN02496V_at; Start 4; Stop 28
cattcttgacaagaggtgaccatca

SEQ ID NO: 12125 - DNA, 25 bp, Artificial
  probe
  misc_feature (1)..(25): SEQ ID NO: 6227; WAN02496V_at; Start 17; Stop 41
aggtgaccatcatctcttgtttttt

SEQ ID NO: 12126 - DNA, 25 bp, Artificial
  probe
  misc_feature (1)..(25): SEQ ID NO: 6227; WAN02496V_at; Start 9; Stop 33
ttgacaagaggtgaccatcatctct

SEQ ID NO: 12127 - DNA, 25 bp, Artificial
  probe
  misc_feature (1)..(25): SEQ ID NO: 6227; WAN02496V_at; Start 8; Stop 32
cttgacaagaggtgaccatcatctc

SEQ ID NO: 12128 - DNA, 25 bp, Artificial
  probe
  misc_feature (1)..(25): SEQ ID NO: 6227; WAN02496V_at; Start 24; Stop 48
catcatctcttgtttttttgtggta

SEQ ID NO: 12129 - DNA, 25 bp, Artificial
  probe
  misc_feature (1)..(25): SEQ ID NO: 6227; WAN02496V_at; Start 22; Stop 46
accatcatctcttgtttttttgtgg

SEQ ID NO: 12130 - DNA, 25 bp, Artificial
  probe
  misc_feature (1)..(25): SEQ ID NO: 6227; WAN02496V_at; Start 6; Stop 30
ttcttgacaagaggtgaccatcatc

SEQ ID NO: 12131 - DNA, 25 bp, Artificial
  probe
  misc_feature (1)..(25): SEQ ID NO: 6227; WAN02496V_at; Start 3; Stop 27
gcattcttgacaagaggtgaccatc

SEQ ID NO: 12132 - DNA, 25 bp, Artificial
  probe
  misc_feature (1)..(25): SEQ ID NO: 6227; WAN02496V_at; Start 15; Stop 39
agaggtgaccatcatctcttgtttt

SEQ ID NO: 12133 - DNA, 25 bp, Artificial
  probe
  misc_feature (1)..(25): SEQ ID NO: 6227; WAN02496V_at; Start 11; Stop 35
gacaagaggtgaccatcatctcttg

SEQ ID NO: 12134 - DNA, 25 bp, Artificial
  probe
  misc_feature (1)..(25): SEQ ID NO: 6227; WAN02496V_at; Start 5; Stop 29
attcttgacaagaggtgaccatcat

SEQ ID NO: 12135 - DNA, 25 bp, Artificial
  probe
  misc_feature (1)..(25): SEQ ID NO: 6227; WAN02496V_at; Start 2; Stop 26
tgcattcttgacaagaggtgaccat

SEQ ID NO: 12136 - DNA, 25 bp, Artificial
  probe
  misc_feature (1)..(25): SEQ ID NO: 6227; WAN02496V_at; Start 1; Stop 25
ttgcattcttgacaagaggtgacca

SEQ ID NO: 12137 - DNA, 25 bp, Artificial
  probe
  misc_feature (1)..(25): SEQ ID NO: 6227; WAN02496V_at; Start 12; Stop 36
acaagaggtgaccatcatctcttgt

SEQ ID NO: 12138 - DNA, 25 bp, Artificial
  probe
  misc_feature (1)..(25): SEQ ID NO: 6227; WAN02496V_at; Start 7; Stop 31
tcttgacaagaggtgaccatcatct

SEQ ID NO: 12139 - DNA, 25 bp, Artificial
  probe
  misc_feature (1)..(25): SEQ ID NO: 6227; WAN02496V_at; Start 20; Stop 44
tgaccatcatctcttgtttttttgt

SEQ ID NO: 12140 - DNA, 25 bp, Artificial
  probe
  misc_feature (1)..(25): SEQ ID NO: 6227; WAN02496V_at; Start 14; Stop 38
aagaggtgaccatcatctcttgttt

SEQ ID NO: 12141 - DNA, 25 bp, Artificial
  probe
  misc_feature (1)..(25): SEQ ID NO: 6197; WAN02496W_at; Start 24; Stop 48
tccgatatggtaaattcttgaccta

SEQ ID NO: 12142 - DNA, 25 bp, Artificial
  probe
  misc_feature (1)..(25): SEQ ID NO: 6197; WAN02496W_at; Start 10; Stop 34
ctaacactaataagtccgatatggt

SEQ ID NO: 12143 - DNA, 25 bp, Artificial
  probe
  misc_feature (1)..(25): SEQ ID NO: 6197; WAN02496W_at; Start 30; Stop 54
atggtaaattcttgacctattagtt

SEQ ID NO: 12144 - DNA, 25 bp, Artificial
  probe
  misc_feature (1)..(25): SEQ ID NO: 6197; WAN02496W_at; Start 21; Stop 45
aagtccgatatggtaaattcttgac

SEQ ID NO: 12145 - DNA, 25 bp, Artificial
  probe
  misc_feature (1)..(25): SEQ ID NO: 6197; WAN02496W_at; Start 7; Stop 31
ctactaacactaataagtccgatat

SEQ ID NO: 12146 - DNA, 25 bp, Artificial
  probe
  misc_feature (1)..(25): SEQ ID NO: 6197; WAN02496W_at; Start 1; Stop 25
tcttccctactaacactaataagtc

SEQ ID NO: 12147 - DNA, 25 bp, Artificial
  probe
  misc_feature (1)..(25): SEQ ID NO: 6197; WAN02496W_at; Start 18; Stop 42
aataagtccgatatggtaaattctt

SEQ ID NO: 12148 - DNA, 25 bp, Artificial
  probe
  misc_feature (1)..(25): SEQ ID NO: 6197; WAN02496W_at; Start 29; Stop 53
tatggtaaattcttgacctattagt

SEQ ID NO: 12149 - DNA, 25 bp, Artificial
  probe
  misc_feature (1)..(25): SEQ ID NO: 6197; WAN02496W_at; Start 22; Stop 46
agtccgatatggtaaattcttgacc

SEQ ID NO: 12150 - DNA, 25 bp, Artificial
  probe
  misc_feature (1)..(25): SEQ ID NO: 6197; WAN02496W_at; Start 9; Stop 33
actaacactaataagtccgatatgg

SEQ ID NO: 12151 - DNA, 25 bp, Artificial
  probe
  misc_feature (1)..(25): SEQ ID NO: 6197; WAN02496W_at; Start 12; Stop 36
aacactaataagtccgatatggtaa

SEQ ID NO: 12152 - DNA, 25 bp, Artificial
  probe
  misc_feature (1)..(25): SEQ ID NO: 6197; WAN02496W_at; Start 31; Stop 55
tggtaaattcttgacctattagttg

SEQ ID NO: 12153 - DNA, 25 bp, Artificial
  probe
  misc_feature (1)..(25): SEQ ID NO: 6197; WAN02496W_at; Start 6; Stop 30
cctactaacactaataagtccgata

SEQ ID NO: 12154 - DNA, 25 bp, Artificial
  probe
  misc_feature (1)..(25): SEQ ID NO: 6197; WAN02496W_at; Start 5; Stop 29
ccctactaacactaataagtccgat

SEQ ID NO: 12155 - DNA, 25 bp, Artificial
  probe
  misc_feature (1)..(25): SEQ ID NO: 6197; WAN02496W_at; Start 20; Stop 44
taagtccgatatggtaaattcttga

SEQ ID NO: 12156 - DNA, 25 bp, Artificial
  probe
  misc_feature (1)..(25): SEQ ID NO: 6197; WAN02496W_at; Start 25; Stop 49
ccgatatggtaaattcttgacctat

SEQ ID NO: 12157 - DNA, 25 bp, Artificial
  probe
  misc_feature (1)..(25): SEQ ID NO: 6197; WAN02496W_at; Start 32; Stop 56
ggtaaattcttgacctattagttgc

SEQ ID NO: 12158 - DNA, 25 bp, Artificial
  probe
  misc_feature (1)..(25): SEQ ID NO: 6197; WAN02496W_at; Start 27; Stop 51
gatatggtaaattcttgacctatta

SEQ ID NO: 12159 - DNA, 25 bp, Artificial
  probe
  misc_feature (1)..(25): SEQ ID NO: 6197; WAN02496W_at; Start 16; Stop 40
ctaataagtccgatatggtaaattc

SEQ ID NO: 12160 - DNA, 25 bp, Artificial
  probe
  misc_feature (1)..(25): SEQ ID NO: 6197; WAN02496W_at; Start 19; Stop 43
ataagtccgatatggtaaattcttg

SEQ ID NO: 12161 - DNA, 25 bp, Artificial
  probe
  misc_feature (1)..(25): SEQ ID NO: 6197; WAN02496W_at; Start 17; Stop 41
taataagtccgatatggtaaattct

SEQ ID NO: 12162 - DNA, 25 bp, Artificial
  probe
  misc_feature (1)..(25): SEQ ID NO: 6197; WAN02496W_at; Start 4; Stop 28
tccctactaacactaataagtccga

SEQ ID NO: 12163 - DNA, 25 bp, Artificial
  probe
  misc_feature (1)..(25): SEQ ID NO: 6197; WAN02496W_at; Start 33; Stop 57
gtaaattcttgacctattagttgct

SEQ ID NO: 12164 - DNA, 25 bp, Artificial
  probe
  misc_feature (1)..(25): SEQ ID NO: 6197; WAN02496W_at; Start 28; Stop 52
atatggtaaattcttgacctattag

SEQ ID NO: 12165 - DNA, 25 bp, Artificial
  probe
  misc_feature (1)..(25): SEQ ID NO: 6197; WAN02496W_at; Start 14; Stop 38
cactaataagtccgatatggtaaat

SEQ ID NO: 12166 - DNA, 25 bp, Artificial
  probe
  misc_feature (1)..(25): SEQ ID NO: 6197; WAN02496W_at; Start 13; Stop 37
acactaataagtccgatatggtaaa

SEQ ID NO: 12167 - DNA, 25 bp, Artificial
  probe
  misc_feature (1)..(25): SEQ ID NO: 6197; WAN02496W_at; Start 26; Stop 50
cgatatggtaaattcttgacctatt

SEQ ID NO: 12168 - DNA, 25 bp, Artificial
  probe
  misc_feature (1)..(25): SEQ ID NO: 6197; WAN02496W_at; Start 11; Stop 35
taacactaataagtccgatatggta

SEQ ID NO: 12169 - DNA, 25 bp, Artificial
  probe
  misc_feature (1)..(25): SEQ ID NO: 6197; WAN02496W_at; Start 15; Stop 39
actaataagtccgatatggtaaatt

SEQ ID NO: 12170 - DNA, 25 bp, Artificial
  probe
  misc_feature (1)..(25): SEQ ID NO: 6197; WAN02496W_at; Start 23; Stop 47
gtccgatatggtaaattcttgacct

SEQ ID NO: 12171 - DNA, 25 bp, Artificial
  probe
  misc_feature (1)..(25): SEQ ID NO: 6197; WAN02496W_at; Start 8; Stop 32
tactaacactaataagtccgatatg

SEQ ID NO: 12172 - DNA, 25 bp, Artificial
  probe
  misc_feature (1)..(25): SEQ ID NO: 6038; WAN02496X_at; Start 164; Stop 188
ctagcaaaaagagagccgaaactct

SEQ ID NO: 12173 - DNA, 25 bp, Artificial
  probe
  misc_feature (1)..(25): SEQ ID NO: 6038; WAN02496X_at; Start 134; Stop 158
taaaaagcaattcaaactattgtaa

SEQ ID NO: 12174 - DNA, 25 bp, Artificial
  probe
  misc_feature (1)..(25): SEQ ID NO: 6038; WAN02496X_at; Start 141; Stop 165
caattcaaactattgtaaaattcct

SEQ ID NO: 12175 - DNA, 25 bp, Artificial
  probe
  misc_feature (1)..(25): SEQ ID NO: 6038; WAN02496X_at; Start 102; Stop 126
catactatacaagtaaaagagatgg

SEQ ID NO: 12176 - DNA, 25 bp, Artificial
  probe
  misc_feature (1)..(25): SEQ ID NO: 6038; WAN02496X_at; Start 20; Stop 44
ttatttcaaaataatatgcaaccag

SEQ ID NO: 12177 - DNA, 25 bp, Artificial
  probe
  misc_feature (1)..(25): SEQ ID NO: 6038; WAN02496X_at; Start 107; Stop 131
tatacaagtaaaagagatggtgtta

SEQ ID NO: 12178 - DNA, 25 bp, Artificial
  probe
  misc_feature (1)..(25): SEQ ID NO: 6038; WAN02496X_at; Start 120; Stop 144
gagatggtgttaactaaaaagcaat

SEQ ID NO: 12179 - DNA, 25 bp, Artificial
  probe
  misc_feature (1)..(25): SEQ ID NO: 6038; WAN02496X_at; Start 104; Stop 128
tactatacaagtaaaagagatggtg

SEQ ID NO: 12180 - DNA, 25 bp, Artificial
  probe
  misc_feature (1)..(25): SEQ ID NO: 6038; WAN02496X_at; Start 98; Stop 122
cattcatactatacaagtaaaagag

SEQ ID NO: 12181 - DNA, 25 bp, Artificial
  probe
  misc_feature (1)..(25): SEQ ID NO: 6038; WAN02496X_at; Start 118; Stop 142
aagagatggtgttaactaaaaagca

SEQ ID NO: 12182 - DNA, 25 bp, Artificial
  probe
  misc_feature (1)..(25): SEQ ID NO: 6038; WAN02496X_at; Start 124; Stop 148
tggtgttaactaaaaagcaattcaa

SEQ ID NO: 12183 - DNA, 25 bp, Artificial
  probe
  misc_feature (1)..(25): SEQ ID NO: 6038; WAN02496X_at; Start 105; Stop 129
actatacaagtaaaagagatggtgt

SEQ ID NO: 12184 - DNA, 25 bp, Artificial
  probe
  misc_feature (1)..(25): SEQ ID NO: 6038; WAN02496X_at; Start 23; Stop 47
tttcaaaataatatgcaaccagtac

SEQ ID NO: 12185 - DNA, 25 bp, Artificial
  probe
  misc_feature (1)..(25): SEQ ID NO: 6038; WAN02496X_at; Start 94; Stop 118
ttcccattcatactatacaagtaaa

SEQ ID NO: 12186 - DNA, 25 bp, Artificial
  probe
  misc_feature (1)..(25): SEQ ID NO: 6038; WAN02496X_at; Start 24; Stop 48
ttcaaaataatatgcaaccagtact

SEQ ID NO: 12187 - DNA, 25 bp, Artificial
  probe
  misc_feature (1)..(25): SEQ ID NO: 6038; WAN02496X_at; Start 21; Stop 45
tatttcaaaataatatgcaaccagt

SEQ ID NO: 12188 - DNA, 25 bp, Artificial
  probe
  misc_feature (1)..(25): SEQ ID NO: 6038; WAN02496X_at; Start 91; Stop 115
tttttcccattcatactatacaagt

SEQ ID NO: 12189 - DNA, 25 bp, Artificial
  probe
  misc_feature (1)..(25): SEQ ID NO: 6038; WAN02496X_at; Start 140; Stop 164
gcaattcaaactattgtaaaattcc

SEQ ID NO: 12190 - DNA, 25 bp, Artificial
  probe
  misc_feature (1)..(25): SEQ ID NO: 6038; WAN02496X_at; Start 122; Stop 146
gatggtgttaactaaaaagcaattc

SEQ ID NO: 12191 - DNA, 25 bp, Artificial
  probe
  misc_feature (1)..(25): SEQ ID NO: 6038; WAN02496X_at; Start 131; Stop 155
aactaaaaagcaattcaaactattg

SEQ ID NO: 12192 - DNA, 25 bp, Artificial
  probe
  misc_feature (1)..(25): SEQ ID NO: 6038; WAN02496X_at; Start 101; Stop 125
tcatactatacaagtaaaagagatg

SEQ ID NO: 12193 - DNA, 25 bp, Artificial
  probe
  misc_feature (1)..(25): SEQ ID NO: 6038; WAN02496X_at; Start 111; Stop 135
caagtaaaagagatggtgttaacta

SEQ ID NO: 12194 - DNA, 25 bp, Artificial
  probe
  misc_feature (1)..(25): SEQ ID NO: 6038; WAN02496X_at; Start 123; Stop 147
atggtgttaactaaaaagcaattca

SEQ ID NO: 12195 - DNA, 25 bp, Artificial
  probe
  misc_feature (1)..(25): SEQ ID NO: 6038; WAN02496X_at; Start 143; Stop 167
attcaaactattgtaaaattcctag

SEQ ID NO: 12196 - DNA, 25 bp, Artificial
  probe
  misc_feature (1)..(25): SEQ ID NO: 6038; WAN02496X_at; Start 109; Stop 133
tacaagtaaaagagatggtgttaac

SEQ ID NO: 12197 - DNA, 25 bp, Artificial
  probe
  misc_feature (1)..(25): SEQ ID NO: 6038; WAN02496X_at; Start 119; Stop 143
agagatggtgttaactaaaaagcaa

SEQ ID NO: 12198 - DNA, 25 bp, Artificial
  probe
  misc_feature (1)..(25): SEQ ID NO: 6038; WAN02496X_at; Start 93; Stop 117
tttcccattcatactatacaagtaa

SEQ ID NO: 12199 - DNA, 25 bp, Artificial
  probe
  misc_feature (1)..(25): SEQ ID NO: 6038; WAN02496X_at; Start 163; Stop 187
cctagcaaaaagagagccgaaactc

SEQ ID NO: 12200 - DNA, 25 bp, Artificial
  probe
  misc_feature (1)..(25): SEQ ID NO: 6038; WAN02496X_at; Start 96; Stop 120
cccattcatactatacaagtaaaag

SEQ ID NO: 12201 - DNA, 25 bp, Artificial
  probe
  misc_feature (1)..(25): SEQ ID NO: 6038; WAN02496X_at; Start 92; Stop 116
ttttcccattcatactatacaagta

SEQ ID NO: 12202 - DNA, 25 bp, Artificial
  probe
  misc_feature (1)..(25): SEQ ID NO: 6038; WAN02496X_at; Start 25; Stop 49
tcaaaataatatgcaaccagtacta

SEQ ID NO: 12203 - DNA, 25 bp, Artificial
  probe
  misc_feature (1)..(25): SEQ ID NO: 6038; WAN02496X_at; Start 133; Stop 157
ctaaaaagcaattcaaactattgta

SEQ ID NO: 12204 - DNA, 25 bp, Artificial
  probe
  misc_feature (1)..(25): SEQ ID NO: 6038; WAN02496X_at; Start 110; Stop 134
acaagtaaaagagatggtgttaact

SEQ ID NO: 12205 - DNA, 25 bp, Artificial
  probe
  misc_feature (1)..(25): SEQ ID NO: 6038; WAN02496X_at; Start 106; Stop 130
ctatacaagtaaaagagatggtgtt

SEQ ID NO: 12206 - DNA, 25 bp, Artificial
  probe
  misc_feature (1)..(25): SEQ ID NO: 6132; WAN02496Y_at; Start 26; Stop 50
tatcagtatagcaaaattctcctct

SEQ ID NO: 12207 - DNA, 25 bp, Artificial
  probe
  misc_feature (1)..(25): SEQ ID NO: 6132; WAN02496Y_at; Start 1; Stop 25
gctctgctcctttaccacttactag

SEQ ID NO: 12208 - DNA, 25 bp, Artificial
  probe
  misc_feature (1)..(25): SEQ ID NO: 6132; WAN02496Y_at; Start 15; Stop 39
ccacttactagtatcagtatagcaa

SEQ ID NO: 12209 - DNA, 25 bp, Artificial
  probe
  misc_feature (1)..(25): SEQ ID NO: 6132; WAN02496Y_at; Start 12; Stop 36
ttaccacttactagtatcagtatag

SEQ ID NO: 12210 - DNA, 25 bp, Artificial
  probe
  misc_feature (1)..(25): SEQ ID NO: 6132; WAN02496Y_at; Start 8; Stop 32
tcctttaccacttactagtatcagt

SEQ ID NO: 12211 - DNA, 25 bp, Artificial
  probe
  misc_feature (1)..(25): SEQ ID NO: 6132; WAN02496Y_at; Start 19; Stop 43
ttactagtatcagtatagcaaaatt

SEQ ID NO: 12212 - DNA, 25 bp, Artificial
  probe
  misc_feature (1)..(25): SEQ ID NO: 6132; WAN02496Y_at; Start 2; Stop 26
ctctgctcctttaccacttactagt

SEQ ID NO: 12213 - DNA, 25 bp, Artificial
  probe
  misc_feature (1)..(25): SEQ ID NO: 6132; WAN02496Y_at; Start 21; Stop 45
actagtatcagtatagcaaaattct

SEQ ID NO: 12214 - DNA, 25 bp, Artificial
  probe
  misc_feature (1)..(25): SEQ ID NO: 6132; WAN02496Y_at; Start 14; Stop 38
accacttactagtatcagtatagca

SEQ ID NO: 12215 - DNA, 25 bp, Artificial
  probe
  misc_feature (1)..(25): SEQ ID NO: 6132; WAN02496Y_at; Start 16; Stop 40
cacttactagtatcagtatagcaaa

SEQ ID NO: 12216 - DNA, 25 bp, Artificial
  probe
  misc_feature (1)..(25): SEQ ID NO: 6132; WAN02496Y_at; Start 23; Stop 47
tagtatcagtatagcaaaattctcc

SEQ ID NO: 12217 - DNA, 25 bp, Artificial
  probe
  misc_feature (1)..(25): SEQ ID NO: 6132; WAN02496Y_at; Start 9; Stop 33
cctttaccacttactagtatcagta

SEQ ID NO: 12218 - DNA, 25 bp, Artificial
  probe
  misc_feature (1)..(25): SEQ ID NO: 6132; WAN02496Y_at; Start 13; Stop 37
taccacttactagtatcagtatagc

SEQ ID NO: 12219 - DNA, 25 bp, Artificial
  probe
  misc_feature (1)..(25): SEQ ID NO: 6132; WAN02496Y_at; Start 17; Stop 41
acttactagtatcagtatagcaaaa

SEQ ID NO: 12220 - DNA, 25 bp, Artificial
  probe
  misc_feature (1)..(25): SEQ ID NO: 6132; WAN02496Y_at; Start 22; Stop 46
ctagtatcagtatagcaaaattctc

SEQ ID NO: 12221 - DNA, 25 bp, Artificial
  probe
  misc_feature (1)..(25): SEQ ID NO: 6132; WAN02496Y_at; Start 3; Stop 27
tctgctcctttaccacttactagta

SEQ ID NO: 12222 - DNA, 25 bp, Artificial
  probe
  misc_feature (1)..(25): SEQ ID NO: 6132; WAN02496Y_at; Start 25; Stop 49
gtatcagtatagcaaaattctcctc

SEQ ID NO: 12223 - DNA, 25 bp, Artificial
  probe
  misc_feature (1)..(25): SEQ ID NO: 6132; WAN02496Y_at; Start 10; Stop 34
ctttaccacttactagtatcagtat

SEQ ID NO: 12224 - DNA, 25 bp, Artificial
  probe
  misc_feature (1)..(25): SEQ ID NO: 6132; WAN02496Y_at; Start 5; Stop 29
tgctcctttaccacttactagtatc

SEQ ID NO: 12225 - DNA, 25 bp, Artificial
  probe
  misc_feature (1)..(25): SEQ ID NO: 6132; WAN02496Y_at; Start 18; Stop 42
cttactagtatcagtatagcaaaat

SEQ ID NO: 12226 - DNA, 25 bp, Artificial
  probe
  misc_feature (1)..(25): SEQ ID NO: 6132; WAN02496Y_at; Start 4; Stop 28
ctgctcctttaccacttactagtat

SEQ ID NO: 12227 - DNA, 25 bp, Artificial
  probe
  misc_feature (1)..(25): SEQ ID NO: 6132; WAN02496Y_at; Start 7; Stop 31
ctcctttaccacttactagtatcag

SEQ ID NO: 12228 - DNA, 25 bp, Artificial
  probe
  misc_feature (1)..(25): SEQ ID NO: 6132; WAN02496Y_at; Start 6; Stop 30
gctcctttaccacttactagtatca

SEQ ID NO: 12229 - DNA, 25 bp, Artificial
  probe
  misc_feature (1)..(25): SEQ ID NO: 6132; WAN02496Y_at; Start 11; Stop 35
tttaccacttactagtatcagtata

SEQ ID NO: 12230 - DNA, 25 bp, Artificial
  probe
  misc_feature (1)..(25): SEQ ID NO: 6132; WAN02496Y_at; Start 20; Stop 44
tactagtatcagtatagcaaaattc

SEQ ID NO: 12231 - DNA, 25 bp, Artificial
  probe
  misc_feature (1)..(25): SEQ ID NO: 6132; WAN02496Y_at; Start 27; Stop 51
atcagtatagcaaaattctcctcta

SEQ ID NO: 12232 - DNA, 25 bp, Artificial
  probe
  misc_feature (1)..(25): SEQ ID NO: 6132; WAN02496Y_at; Start 24; Stop 48
agtatcagtatagcaaaattctcct

SEQ ID NO: 12233 - DNA, 25 bp, Artificial
  probe
  misc_feature (1)..(25): SEQ ID NO: 5995; WAN02496Z_at; Start 31; Stop 55
atattatcaagcgacctaaaacttt

SEQ ID NO: 12234 - DNA, 25 bp, Artificial
  probe
  misc_feature (1)..(25): SEQ ID NO: 5995; WAN02496Z_at; Start 38; Stop 62
caagcgacctaaaactttgggctct

SEQ ID NO: 12235 - DNA, 25 bp, Artificial
  probe
  misc_feature (1)..(25): SEQ ID NO: 5995; WAN02496Z_at; Start 6; Stop 30
gcagtctataaaattcaaaaaacgc

SEQ ID NO: 12236 - DNA, 25 bp, Artificial
  probe
  misc_feature (1)..(25): SEQ ID NO: 5995; WAN02496Z_at; Start 46; Stop 70
ctaaaactttgggctctataatatt

SEQ ID NO: 12237 - DNA, 25 bp, Artificial
  probe
  misc_feature (1)..(25): SEQ ID NO: 5995; WAN02496Z_at; Start 40; Stop 64
agcgacctaaaactttgggctctat

SEQ ID NO: 12238 - DNA, 25 bp, Artificial
  probe
  misc_feature (1)..(25): SEQ ID NO: 5995; WAN02496Z_at; Start 4; Stop 28
gagcagtctataaaattcaaaaaac

SEQ ID NO: 12239 - DNA, 25 bp, Artificial
  probe
  misc_feature (1)..(25): SEQ ID NO: 5995; WAN02496Z_at; Start 45; Stop 69
cctaaaactttgggctctataatat

SEQ ID NO: 12240 - DNA, 25 bp, Artificial
  probe
  misc_feature (1)..(25): SEQ ID NO: 5995; WAN02496Z_at; Start 9; Stop 33
gtctataaaattcaaaaaacgcata

SEQ ID NO: 12241 - DNA, 25 bp, Artificial
  probe
  misc_feature (1)..(25): SEQ ID NO: 5995; WAN02496Z_at; Start 32; Stop 56
tattatcaagcgacctaaaactttg

SEQ ID NO: 12242 - DNA, 25 bp, Artificial
  probe
  misc_feature (1)..(25): SEQ ID NO: 5995; WAN02496Z_at; Start 12; Stop 36
tataaaattcaaaaaacgcatatta

SEQ ID NO: 12243 - DNA, 25 bp, Artificial
  probe
  misc_feature (1)..(25): SEQ ID NO: 5995; WAN02496Z_at; Start 27; Stop 51
acgcatattatcaagcgacctaaaa

SEQ ID NO: 12244 - DNA, 25 bp, Artificial
  probe
  misc_feature (1)..(25): SEQ ID NO: 5995; WAN02496Z_at; Start 7; Stop 31
cagtctataaaattcaaaaaacgca

SEQ ID NO: 12245 - DNA, 25 bp, Artificial
  probe
  misc_feature (1)..(25): SEQ ID NO: 5995; WAN02496Z_at; Start 3; Stop 27
cgagcagtctataaaattcaaaaaa

SEQ ID NO: 12246 - DNA, 25 bp, Artificial
  probe
  misc_feature (1)..(25): SEQ ID NO: 5995; WAN02496Z_at; Start 5; Stop 29
agcagtctataaaattcaaaaaacg

SEQ ID NO: 12247 - DNA, 25 bp, Artificial
  probe
  misc_feature (1)..(25): SEQ ID NO: 5995; WAN02496Z_at; Start 8; Stop 32
agtctataaaattcaaaaaacgcat

SEQ ID NO: 12248 - DNA, 25 bp, Artificial
  probe
  misc_feature (1)..(25): SEQ ID NO: 5995; WAN02496Z_at; Start 33; Stop 57
attatcaagcgacctaaaactttgg

SEQ ID NO: 12249 - DNA, 25 bp, Artificial
  probe
  misc_feature (1)..(25): SEQ ID NO: 5995; WAN02496Z_at; Start 36; Stop 60
atcaagcgacctaaaactttgggct

SEQ ID NO: 12250 - DNA, 25 bp, Artificial
  probe
  misc_feature (1)..(25): SEQ ID NO: 5995; WAN02496Z_at; Start 30; Stop 54
catattatcaagcgacctaaaactt

SEQ ID NO: 12251 - DNA, 25 bp, Artificial
  probe
  misc_feature (1)..(25): SEQ ID NO: 5995; WAN02496Z_at; Start 1; Stop 25
aacgagcagtctataaaattcaaaa

SEQ ID NO: 12252 - DNA, 25 bp, Artificial
  probe
  misc_feature (1)..(25): SEQ ID NO: 5995; WAN02496Z_at; Start 28; Stop 52
cgcatattatcaagcgacctaaaac

SEQ ID NO: 12253 - DNA, 25 bp, Artificial
  probe
  misc_feature (1)..(25): SEQ ID NO: 5995; WAN02496Z_at; Start 14; Stop 38
taaaattcaaaaaacgcatattatc

SEQ ID NO: 12254 - DNA, 25 bp, Artificial
  probe
  misc_feature (1)..(25): SEQ ID NO: 5995; WAN02496Z_at; Start 13; Stop 37
ataaaattcaaaaaacgcatattat

SEQ ID NO: 12255 - DNA, 25 bp, Artificial
  probe
  misc_feature (1)..(25): SEQ ID NO: 5995; WAN02496Z_at; Start 41; Stop 65
gcgacctaaaactttgggctctata

SEQ ID NO: 12256 - DNA, 25 bp, Artificial
  probe
  misc_feature (1)..(25): SEQ ID NO: 5995; WAN02496Z_at; Start 35; Stop 59
tatcaagcgacctaaaactttgggc

SEQ ID NO: 12257 - DNA, 25 bp, Artificial
  probe
  misc_feature (1)..(25): SEQ ID NO: 5995; WAN02496Z_at; Start 29; Stop 53
gcatattatcaagcgacctaaaact

SEQ ID NO: 12258 - DNA, 25 bp, Artificial
  probe
  misc_feature (1)..(25): SEQ ID NO: 5995; WAN02496Z_at; Start 10; Stop 34
tctataaaattcaaaaaacgcatat

SEQ ID NO: 12259 - DNA, 25 bp, Artificial
  probe
  misc_feature (1)..(25): SEQ ID NO: 5995; WAN02496Z_at; Start 2; Stop 26
acgagcagtctataaaattcaaaaa

SEQ ID NO: 12260 - DNA, 25 bp, Artificial
  probe
  misc_feature (1)..(25): SEQ ID NO: 5995; WAN02496Z_at; Start 11; Stop 35
ctataaaattcaaaaaacgcatatt

SEQ ID NO: 12261 - DNA, 25 bp, Artificial
  probe
  misc_feature (1)..(25): SEQ ID NO: 5995; WAN02496Z_at; Start 37; Stop 61
tcaagcgacctaaaactttgggctc

SEQ ID NO: 12262 - DNA, 25 bp, Artificial
  probe
  misc_feature (1)..(25): SEQ ID NO: 6021; WAN024972_at; Start 142; Stop 166
gcatttcatgccctcatatgggatg

SEQ ID NO: 12263 - DNA, 25 bp, Artificial
  probe
  misc_feature (1)..(25): SEQ ID NO: 6021; WAN024972_at; Start 173; Stop 197
gactaaataatatgattatcgagat

SEQ ID NO: 12264 - DNA, 25 bp, Artificial
  probe
  misc_feature (1)..(25): SEQ ID NO: 6021; WAN024972_at; Start 73; Stop 97
taaaaatccttcacaataggttcta

SEQ ID NO: 12265 - DNA, 25 bp, Artificial
  probe
  misc_feature (1)..(25): SEQ ID NO: 6021; WAN024972_at; Start 139; Stop 163
ttagcatttcatgccctcatatggg

SEQ ID NO: 12266 - DNA, 25 bp, Artificial
  probe
  misc_feature (1)..(25): SEQ ID NO: 6021; WAN024972_at; Start 151; Stop 175
gccctcatatgggatgttctttgac

SEQ ID NO: 12267 - DNA, 25 bp, Artificial
  probe
  misc_feature (1)..(25): SEQ ID NO: 6021; WAN024972_at; Start 111; Stop 135
cttcatcttaatagtgagcaagcta

SEQ ID NO: 12268 - DNA, 25 bp, Artificial
  probe
  misc_feature (1)..(25): SEQ ID NO: 6021; WAN024972_at; Start 31; Stop 55
catcggtaaattgtgaaataggtat

SEQ ID NO: 12269 - DNA, 25 bp, Artificial
  probe
  misc_feature (1)..(25): SEQ ID NO: 6021; WAN024972_at; Start 153; Stop 177
cctcatatgggatgttctttgacta

SEQ ID NO: 12270 - DNA, 25 bp, Artificial
  probe
  misc_feature (1)..(25): SEQ ID NO: 6021; WAN024972_at; Start 158; Stop 182
tatgggatgttctttgactaaataa

SEQ ID NO: 12271 - DNA, 25 bp, Artificial
  probe
  misc_feature (1)..(25): SEQ ID NO: 6021; WAN024972_at; Start 193; Stop 217
gagatatatctggataaatgaacta

SEQ ID NO: 12272 - DNA, 25 bp, Artificial
  probe
  misc_feature (1)..(25): SEQ ID NO: 6021; WAN024972_at; Start 122; Stop 146
tagtgagcaagctaaacttagcatt

SEQ ID NO: 12273 - DNA, 25 bp, Artificial
  probe
  misc_feature (1)..(25): SEQ ID NO: 6021; WAN024972_at; Start 105; Stop 129
tatatacttcatcttaatagtgagc

SEQ ID NO: 12274 - DNA, 25 bp, Artificial
  probe
  misc_feature (1)..(25): SEQ ID NO: 6021; WAN024972_at; Start 147; Stop 171
tcatgccctcatatgggatgttctt

SEQ ID NO: 12275 - DNA, 25 bp, Artificial
  probe
  misc_feature (1)..(25): SEQ ID NO: 6021; WAN024972_at; Start 116; Stop 140
tcttaatagtgagcaagctaaactt

SEQ ID NO: 12276 - DNA, 25 bp, Artificial
  probe
  misc_feature (1)..(25): SEQ ID NO: 6021; WAN024972_at; Start 191; Stop 215
tcgagatatatctggataaatgaac

SEQ ID NO: 12277 - DNA, 25 bp, Artificial
  probe
  misc_feature (1)..(25): SEQ ID NO: 6021; WAN024972_at; Start 49; Stop 73
taggtatggaattggcgaaaattat

SEQ ID NO: 12278 - DNA, 25 bp, Artificial
  probe
  misc_feature (1)..(25): SEQ ID NO: 6021; WAN024972_at; Start 34; Stop 58
cggtaaattgtgaaataggtatgga

SEQ ID NO: 12279 - DNA, 25 bp, Artificial
  probe
  misc_feature (1)..(25): SEQ ID NO: 6021; WAN024972_at; Start 63; Stop 87
gcgaaaattataaaaatccttcaca

SEQ ID NO: 12280 - DNA, 25 bp, Artificial
  probe
  misc_feature (1)..(25): SEQ ID NO: 6021; WAN024972_at; Start 12; Stop 36
ttcaattgtttttctgtgtcatcgg

SEQ ID NO: 12281 - DNA, 25 bp, Artificial
  probe
  misc_feature (1)..(25): SEQ ID NO: 6021; WAN024972_at; Start 109; Stop 133
tacttcatcttaatagtgagcaagc

SEQ ID NO: 12282 - DNA, 25 bp, Artificial
  probe
  misc_feature (1)..(25): SEQ ID NO: 6021; WAN024972_at; Start 24; Stop 48
tctgtgtcatcggtaaattgtgaaa

SEQ ID NO: 12283 - DNA, 25 bp, Artificial
  probe
  misc_feature (1)..(25): SEQ ID NO: 6021; WAN024972_at; Start 91; Stop 115
ggttctatgaaatatatatacttca

SEQ ID NO: 12284 - DNA, 25 bp, Artificial
  probe
  misc_feature (1)..(25): SEQ ID NO: 6021; WAN024972_at; Start 181; Stop 205
aatatgattatcgagatatatctgg

SEQ ID NO: 12285 - DNA, 25 bp, Artificial
  probe
  misc_feature (1)..(25): SEQ ID NO: 6021; WAN024972_at; Start 156; Stop 180
catatgggatgttctttgactaaat

SEQ ID NO: 12286 - DNA, 25 bp, Artificial
  probe
  misc_feature (1)..(25): SEQ ID NO: 6021; WAN024972_at; Start 28; Stop 52
tgtcatcggtaaattgtgaaatagg

SEQ ID NO: 12287 - DNA, 25 bp, Artificial
  probe
  misc_feature (1)..(25): SEQ ID NO: 6021; WAN024972_at; Start 119; Stop 143
taatagtgagcaagctaaacttagc

SEQ ID NO: 12288 - DNA, 25 bp, Artificial
  probe
  misc_feature (1)..(25): SEQ ID NO: 6021; WAN024972_at; Start 45; Stop 69
gaaataggtatggaattggcgaaaa

SEQ ID NO: 12289 - DNA, 25 bp, Artificial
  probe
  misc_feature (1)..(25): SEQ ID NO: 6021; WAN024972_at; Start 114; Stop 138
catcttaatagtgagcaagctaaac

SEQ ID NO: 12290 - DNA, 25 bp, Artificial
  probe
  misc_feature (1)..(25): SEQ ID NO: 6021; WAN024972_at; Start 41; Stop 65
ttgtgaaataggtatggaattggcg

SEQ ID NO: 12291 - DNA, 25 bp, Artificial
  probe
  misc_feature (1)..(25): SEQ ID NO: 6021; WAN024972_at; Start 132; Stop 156
gctaaacttagcatttcatgccctc

SEQ ID NO: 12292 - DNA, 25 bp, Artificial
  probe
  misc_feature (1)..(25): SEQ ID NO: 6021; WAN024972_at; Start 134; Stop 158
taaacttagcatttcatgccctcat

SEQ ID NO: 12293 - DNA, 25 bp, Artificial
  probe
  misc_feature (1)..(25): SEQ ID NO: 6021; WAN024972_at; Start 145; Stop 169
tttcatgccctcatatgggatgttc

SEQ ID NO: 12294 - DNA, 25 bp, Artificial
  probe
  misc_feature (1)..(25): SEQ ID NO: 6021; WAN024972_at; Start 14; Stop 38
caattgtttttctgtgtcatcggta

SEQ ID NO: 12295 - DNA, 25 bp, Artificial
  probe
  misc_feature (1)..(25): SEQ ID NO: 6021; WAN024972_at; Start 129; Stop 153
caagctaaacttagcatttcatgcc

SEQ ID NO: 12296 - DNA, 25 bp, Artificial
  probe
  misc_feature (1)..(25): SEQ ID NO: 6083; WAN024973_at; Start 4; Stop 28
tacctgagaagaaagttgcaatgtt

SEQ ID NO: 12297 - DNA, 25 bp, Artificial
  probe
  misc_feature (1)..(25): SEQ ID NO: 6083; WAN024973_at; Start 16; Stop 40
aagttgcaatgttgtttttggtgcg

SEQ ID NO: 12298 - DNA, 25 bp, Artificial
  probe
  misc_feature (1)..(25): SEQ ID NO: 6083; WAN024973_at; Start 3; Stop 27
ttacctgagaagaaagttgcaatgt

SEQ ID NO: 12299 - DNA, 25 bp, Artificial
  probe
  misc_feature (1)..(25): SEQ ID NO: 6083; WAN024973_at; Start 58; Stop 82
tttgttatgtagtacctaatctaag

SEQ ID NO: 12300 - DNA, 25 bp, Artificial
  probe
  misc_feature (1)..(25): SEQ ID NO: 6083; WAN024973_at; Start 22; Stop 46
caatgttgtttttggtgcgggtttg

SEQ ID NO: 12301 - DNA, 25 bp, Artificial
  probe
  misc_feature (1)..(25): SEQ ID NO: 6083; WAN024973_at; Start 61; Stop 85
gttatgtagtacctaatctaaggaa

SEQ ID NO: 12302 - DNA, 25 bp, Artificial
  probe
  misc_feature (1)..(25): SEQ ID NO: 6083; WAN024973_at; Start 2; Stop 26
attacctgagaagaaagttgcaatg

SEQ ID NO: 12303 - DNA, 25 bp, Artificial
  probe
  misc_feature (1)..(25): SEQ ID NO: 6083; WAN024973_at; Start 60; Stop 84
tgttatgtagtacctaatctaagga

SEQ ID NO: 12304 - DNA, 25 bp, Artificial
  probe
  misc_feature (1)..(25): SEQ ID NO: 6083; WAN024973_at; Start 17; Stop 41
agttgcaatgttgtttttggtgcgg

SEQ ID NO: 12305 - DNA, 25 bp, Artificial
  probe
  misc_feature (1)..(25): SEQ ID NO: 6083; WAN024973_at; Start 15; Stop 39
aaagttgcaatgttgtttttggtgc

SEQ ID NO: 12306 - DNA, 25 bp, Artificial
  probe
  misc_feature (1)..(25): SEQ ID NO: 6083; WAN024973_at; Start 59; Stop 83
ttgttatgtagtacctaatctaagg

SEQ ID NO: 12307 - DNA, 25 bp, Artificial
  probe
  misc_feature (1)..(25): SEQ ID NO: 6083; WAN024973_at; Start 10; Stop 34
agaagaaagttgcaatgttgttttt

SEQ ID NO: 12308 - DNA, 25 bp, Artificial
  probe
  misc_feature (1)..(25): SEQ ID NO: 6083; WAN024973_at; Start 6; Stop 30
cctgagaagaaagttgcaatgttgt

SEQ ID NO: 12309 - DNA, 25 bp, Artificial
  probe
  misc_feature (1)..(25): SEQ ID NO: 6083; WAN024973_at; Start 56; Stop 80
aatttgttatgtagtacctaatcta

SEQ ID NO: 12310 - DNA, 25 bp, Artificial
  probe
  misc_feature (1)..(25): SEQ ID NO: 6083; WAN024973_at; Start 13; Stop 37
agaaagttgcaatgttgtttttggt

SEQ ID NO: 12311 - DNA, 25 bp, Artificial
  probe
  misc_feature (1)..(25): SEQ ID NO: 6083; WAN024973_at; Start 1; Stop 25
cattacctgagaagaaagttgcaat

SEQ ID NO: 12312 - DNA, 25 bp, Artificial
  probe
  misc_feature (1)..(25): SEQ ID NO: 6083; WAN024973_at; Start 5; Stop 29
acctgagaagaaagttgcaatgttg

SEQ ID NO: 12313 - DNA, 25 bp, Artificial
  probe
  misc_feature (1)..(25): SEQ ID NO: 6083; WAN024973_at; Start 7; Stop 31
ctgagaagaaagttgcaatgttgtt

SEQ ID NO: 12314 - DNA, 25 bp, Artificial
  probe
  misc_feature (1)..(25): SEQ ID NO: 6083; WAN024973_at; Start 8; Stop 32
tgagaagaaagttgcaatgttgttt

SEQ ID NO: 12315 - DNA, 25 bp, Artificial
  probe
  misc_feature (1)..(25): SEQ ID NO: 6083; WAN024973_at; Start 55; Stop 79
aaatttgttatgtagtacctaatct

SEQ ID NO: 12316 - DNA, 25 bp, Artificial
  probe
  misc_feature (1)..(25): SEQ ID NO: 6083; WAN024973_at; Start 11; Stop 35
gaagaaagttgcaatgttgtttttg

SEQ ID NO: 12317 - DNA, 25 bp, Artificial
  probe
  misc_feature (1)..(25): SEQ ID NO: 6083; WAN024973_at; Start 12; Stop 36
aagaaagttgcaatgttgtttttgg

SEQ ID NO: 12318 - DNA, 25 bp, Artificial
  probe
  misc_feature (1)..(25): SEQ ID NO: 6083; WAN024973_at; Start 19; Stop 43
ttgcaatgttgtttttggtgcgggt

SEQ ID NO: 12319 - DNA, 25 bp, Artificial
  probe
  misc_feature (1)..(25): SEQ ID NO: 6083; WAN024973_at; Start 9; Stop 33
gagaagaaagttgcaatgttgtttt

SEQ ID NO: 12320 - DNA, 25 bp, Artificial
  probe
  misc_feature (1)..(25): SEQ ID NO: 6083; WAN024973_at; Start 57; Stop 81
atttgttatgtagtacctaatctaa

SEQ ID NO: 12321 - DNA, 25 bp, Artificial
  probe
  misc_feature (1)..(25): SEQ ID NO: 6083; WAN024973_at; Start 18; Stop 42
gttgcaatgttgtttttggtgcggg

SEQ ID NO: 12322 - DNA, 25 bp, Artificial
  probe
  misc_feature (1)..(25): SEQ ID NO: 6083; WAN024973_at; Start 20; Stop 44
tgcaatgttgtttttggtgcgggtt

SEQ ID NO: 12323 - DNA, 25 bp, Artificial
  probe
  misc_feature (1)..(25): SEQ ID NO: 6083; WAN024973_at; Start 14; Stop 38
gaaagttgcaatgttgtttttggtg

SEQ ID NO: 12324 - DNA, 25 bp, Artificial
  probe
  misc_feature (1)..(25): SEQ ID NO: 6171; WAN024974_at; Start 32; Stop 56
ataacattatcaaatgtaaaaccca

SEQ ID NO: 12325 - DNA, 25 bp, Artificial
  probe
  misc_feature (1)..(25): SEQ ID NO: 6171; WAN024974_at; Start 23; Stop 47
ctttttattataacattatcaaatg

SEQ ID NO: 12326 - DNA, 25 bp, Artificial
  probe
  misc_feature (1)..(25): SEQ ID NO: 6171; WAN024974_at; Start 19; Stop 43
tctcctttttattataacattatca

SEQ ID NO: 12327 - DNA, 25 bp, Artificial
  probe
  misc_feature (1)..(25): SEQ ID NO: 6171; WAN024974_at; Start 22; Stop 46
cctttttattataacattatcaaat

SEQ ID NO: 12328 - DNA, 25 bp, Artificial
  probe
  misc_feature (1)..(25): SEQ ID NO: 6171; WAN024974_at; Start 21; Stop 45
tcctttttattataacattatcaaa

SEQ ID NO: 12329 - DNA, 25 bp, Artificial
  probe
  misc_feature (1)..(25): SEQ ID NO: 6171; WAN024974_at; Start 18; Stop 42
ttctcctttttattataacattatc

SEQ ID NO: 12330 - DNA, 25 bp, Artificial
  probe
  misc_feature (1)..(25): SEQ ID NO: 6171; WAN024974_at; Start 33; Stop 57
taacattatcaaatgtaaaacccaa

SEQ ID NO: 12331 - DNA, 25 bp, Artificial
  probe
  misc_feature (1)..(25): SEQ ID NO: 6171; WAN024974_at; Start 20; Stop 44
ctcctttttattataacattatcaa

SEQ ID NO: 12332 - DNA, 25 bp, Artificial
  probe
  misc_feature (1)..(25): SEQ ID NO: 6171; WAN024974_at; Start 31; Stop 55
tataacattatcaaatgtaaaaccc

SEQ ID NO: 12333 - DNA, 25 bp, Artificial
  probe
  misc_feature (1)..(25): SEQ ID NO: 6171; WAN024974_at; Start 30; Stop 54
ttataacattatcaaatgtaaaacc

SEQ ID NO: 12334 - DNA, 25 bp, Artificial
  probe
  misc_feature (1)..(25): SEQ ID NO: 6022; WAN024975_at; Start 14; Stop 38
actatgacctcaccttgtcaggctc

SEQ ID NO: 12335 - DNA, 25 bp, Artificial
  probe
  misc_feature (1)..(25): SEQ ID NO: 6022; WAN024975_at; Start 23; Stop 47
tcaccttgtcaggctctactgctgt

SEQ ID NO: 12336 - DNA, 25 bp, Artificial
  probe
  misc_feature (1)..(25): SEQ ID NO: 6022; WAN024975_at; Start 26; Stop 50
ccttgtcaggctctactgctgtaag

SEQ ID NO: 12337 - DNA, 25 bp, Artificial
  probe
  misc_feature (1)..(25): SEQ ID NO: 6022; WAN024975_at; Start 6; Stop 30
tcctccctactatgacctcaccttg

SEQ ID NO: 12338 - DNA, 25 bp, Artificial
  probe
  misc_feature (1)..(25): SEQ ID NO: 6022; WAN024975_at; Start 20; Stop 44
acctcaccttgtcaggctctactgc

SEQ ID NO: 12339 - DNA, 25 bp, Artificial
  probe
  misc_feature (1)..(25): SEQ ID NO: 6022; WAN024975_at; Start 19; Stop 43
gacctcaccttgtcaggctctactg

SEQ ID NO: 12340 - DNA, 25 bp, Artificial
  probe
  misc_feature (1)..(25): SEQ ID NO: 6022; WAN024975_at; Start 8; Stop 32
ctccctactatgacctcaccttgtc

SEQ ID NO: 12341 - DNA, 25 bp, Artificial
  probe
  misc_feature (1)..(25): SEQ ID NO: 6022; WAN024975_at; Start 16; Stop 40
tatgacctcaccttgtcaggctcta

SEQ ID NO: 12342 - DNA, 25 bp, Artificial
  probe
  misc_feature (1)..(25): SEQ ID NO: 6022; WAN024975_at; Start 2; Stop 26
gaaatcctccctactatgacctcac

SEQ ID NO: 12343 - DNA, 25 bp, Artificial
  probe
  misc_feature (1)..(25): SEQ ID NO: 6022; WAN024975_at; Start 1; Stop 25
agaaatcctccctactatgacctca

SEQ ID NO: 12344 - DNA, 25 bp, Artificial
  probe
  misc_feature (1)..(25): SEQ ID NO: 6022; WAN024975_at; Start 13; Stop 37
tactatgacctcaccttgtcaggct

SEQ ID NO: 12345 - DNA, 25 bp, Artificial
  probe
  misc_feature (1)..(25): SEQ ID NO: 6022; WAN024975_at; Start 27; Stop 51
cttgtcaggctctactgctgtaaga

SEQ ID NO: 12346 - DNA, 25 bp, Artificial
  probe
  misc_feature (1)..(25): SEQ ID NO: 6022; WAN024975_at; Start 7; Stop 31
cctccctactatgacctcaccttgt

SEQ ID NO: 12347 - DNA, 25 bp, Artificial
  probe
  misc_feature (1)..(25): SEQ ID NO: 6022; WAN024975_at; Start 5; Stop 29
atcctccctactatgacctcacctt

SEQ ID NO: 12348 - DNA, 25 bp, Artificial
  probe
  misc_feature (1)..(25): SEQ ID NO: 6022; WAN024975_at; Start 17; Stop 41
atgacctcaccttgtcaggctctac

SEQ ID NO: 12349 - DNA, 25 bp, Artificial
  probe
  misc_feature (1)..(25): SEQ ID NO: 6022; WAN024975_at; Start 24; Stop 48
caccttgtcaggctctactgctgta

SEQ ID NO: 12350 - DNA, 25 bp, Artificial
  probe
  misc_feature (1)..(25): SEQ ID NO: 6022; WAN024975_at; Start 11; Stop 35
cctactatgacctcaccttgtcagg

SEQ ID NO: 12351 - DNA, 25 bp, Artificial
  probe
  misc_feature (1)..(25): SEQ ID NO: 6022; WAN024975_at; Start 3; Stop 27
aaatcctccctactatgacctcacc

SEQ ID NO: 12352 - DNA, 25 bp, Artificial
  probe
  misc_feature (1)..(25): SEQ ID NO: 6022; WAN024975_at; Start 18; Stop 42
tgacctcaccttgtcaggctctact

SEQ ID NO: 12353 - DNA, 25 bp, Artificial
  probe
  misc_feature (1)..(25): SEQ ID NO: 6022; WAN024975_at; Start 15; Stop 39
ctatgacctcaccttgtcaggctct

SEQ ID NO: 12354 - DNA, 25 bp, Artificial
  probe
  misc_feature (1)..(25): SEQ ID NO: 6022; WAN024975_at; Start 10; Stop 34
ccctactatgacctcaccttgtcag

SEQ ID NO: 12355 - DNA, 25 bp, Artificial
  probe
  misc_feature (1)..(25): SEQ ID NO: 6022; WAN024975_at; Start 22; Stop 46
ctcaccttgtcaggctctactgctg

SEQ ID NO: 12356 - DNA, 25 bp, Artificial
  probe
  misc_feature (1)..(25): SEQ ID NO: 6022; WAN024975_at; Start 25; Stop 49
accttgtcaggctctactgctgtaa

SEQ ID NO: 12357 - DNA, 25 bp, Artificial
  probe
  misc_feature (1)..(25): SEQ ID NO: 6022; WAN024975_at; Start 4; Stop 28
aatcctccctactatgacctcacct

SEQ ID NO: 12358 - DNA, 25 bp, Artificial
  probe
  misc_feature (1)..(25): SEQ ID NO: 6022; WAN024975_at; Start 9; Stop 33
tccctactatgacctcaccttgtca

SEQ ID NO: 12359 - DNA, 25 bp, Artificial
  probe
  misc_feature (1)..(25): SEQ ID NO: 6022; WAN024975_at; Start 12; Stop 36
ctactatgacctcaccttgtcaggc

SEQ ID NO: 12360 - DNA, 25 bp, Artificial
  probe
  misc_feature (1)..(25): SEQ ID NO: 6022; WAN024975_at; Start 21; Stop 45
cctcaccttgtcaggctctactgct

SEQ ID NO: 12361 - DNA, 25 bp, Artificial
  probe
  misc_feature (1)..(25): SEQ ID NO: 6191; WAN024976_at; Start 17; Stop 41
caatttaatagagccttctactcaa

SEQ ID NO: 12362 - DNA, 25 bp, Artificial
  probe
  misc_feature (1)..(25): SEQ ID NO: 6191; WAN024976_at; Start 22; Stop 46
taatagagccttctactcaaatatc

SEQ ID NO: 12363 - DNA, 25 bp, Artificial
  probe
  misc_feature (1)..(25): SEQ ID NO: 6191; WAN024976_at; Start 15; Stop 39
aacaatttaatagagccttctactc

SEQ ID NO: 12364 - DNA, 25 bp, Artificial
  probe
  misc_feature (1)..(25): SEQ ID NO: 6191; WAN024976_at; Start 39; Stop 63
caaatatcctgtcagaaaaggatag

SEQ ID NO: 12365 - DNA, 25 bp, Artificial
  probe
  misc_feature (1)..(25): SEQ ID NO: 6191; WAN024976_at; Start 31; Stop 55
cttctactcaaatatcctgtcagaa

SEQ ID NO: 12366 - DNA, 25 bp, Artificial
  probe
  misc_feature (1)..(25): SEQ ID NO: 6191; WAN024976_at; Start 27; Stop 51
gagccttctactcaaatatcctgtc

SEQ ID NO: 12367 - DNA, 25 bp, Artificial
  probe
  misc_feature (1)..(25): SEQ ID NO: 6191; WAN024976_at; Start 8; Stop 32
tttcactaacaatttaatagagcct

SEQ ID NO: 12368 - DNA, 25 bp, Artificial
  probe
  misc_feature (1)..(25): SEQ ID NO: 6191; WAN024976_at; Start 35; Stop 59
tactcaaatatcctgtcagaaaagg

SEQ ID NO: 12369 - DNA, 25 bp, Artificial
  probe
  misc_feature (1)..(25): SEQ ID NO: 6191; WAN024976_at; Start 10; Stop 34
tcactaacaatttaatagagccttc

SEQ ID NO: 12370 - DNA, 25 bp, Artificial
  probe
  misc_feature (1)..(25): SEQ ID NO: 6191; WAN024976_at; Start 47; Stop 71
ctgtcagaaaaggatagaaagctac

SEQ ID NO: 12371 - DNA, 25 bp, Artificial
  probe
  misc_feature (1)..(25): SEQ ID NO: 6191; WAN024976_at; Start 29; Stop 53
gccttctactcaaatatcctgtcag

SEQ ID NO: 12372 - DNA, 25 bp, Artificial
  probe
  misc_feature (1)..(25): SEQ ID NO: 6191; WAN024976_at; Start 38; Stop 62
tcaaatatcctgtcagaaaaggata

SEQ ID NO: 12373 - DNA, 25 bp, Artificial
  probe
  misc_feature (1)..(25): SEQ ID NO: 6191; WAN024976_at; Start 45; Stop 69
tcctgtcagaaaaggatagaaagct

SEQ ID NO: 12374 - DNA, 25 bp, Artificial
  probe
  misc_feature (1)..(25): SEQ ID NO: 6191; WAN024976_at; Start 49; Stop 73
gtcagaaaaggatagaaagctactt

SEQ ID NO: 12375 - DNA, 25 bp, Artificial
  probe
  misc_feature (1)..(25): SEQ ID NO: 6191; WAN024976_at; Start 11; Stop 35
cactaacaatttaatagagccttct

SEQ ID NO: 12376 - DNA, 25 bp, Artificial
  probe
  misc_feature (1)..(25): SEQ ID NO: 6191; WAN024976_at; Start 25; Stop 49
tagagccttctactcaaatatcctg

SEQ ID NO: 12377 - DNA, 25 bp, Artificial
  probe
  misc_feature (1)..(25): SEQ ID NO: 6191; WAN024976_at; Start 58; Stop 82
ggatagaaagctactttttataata

SEQ ID NO: 12378 - DNA, 25 bp, Artificial
  probe
  misc_feature (1)..(25): SEQ ID NO: 6191; WAN024976_at; Start 40; Stop 64
aaatatcctgtcagaaaaggataga

SEQ ID NO: 12379 - DNA, 25 bp, Artificial
  probe
  misc_feature (1)..(25): SEQ ID NO: 6191; WAN024976_at; Start 34; Stop 58
ctactcaaatatcctgtcagaaaag

SEQ ID NO: 12380 - DNA, 25 bp, Artificial
  probe
  misc_feature (1)..(25): SEQ ID NO: 6191; WAN024976_at; Start 6; Stop 30
tatttcactaacaatttaatagagc

SEQ ID NO: 12381 - DNA, 25 bp, Artificial
  probe
  misc_feature (1)..(25): SEQ ID NO: 6191; WAN024976_at; Start 26; Stop 50
agagccttctactcaaatatcctgt

SEQ ID NO: 12382 - DNA, 25 bp, Artificial
  probe
  misc_feature (1)..(25): SEQ ID NO: 6191; WAN024976_at; Start 50; Stop 74
tcagaaaaggatagaaagctacttt

SEQ ID NO: 12383 - DNA, 25 bp, Artificial
  probe
  misc_feature (1)..(25): SEQ ID NO: 6191; WAN024976_at; Start 46; Stop 70
cctgtcagaaaaggatagaaagcta

SEQ ID NO: 12384 - DNA, 25 bp, Artificial
  probe
  misc_feature (1)..(25): SEQ ID NO: 6191; WAN024976_at; Start 28; Stop 52
agccttctactcaaatatcctgtca

SEQ ID NO: 12385 - DNA, 25 bp, Artificial
  probe
  misc_feature (1)..(25): SEQ ID NO: 6191; WAN024976_at; Start 33; Stop 57
tctactcaaatatcctgtcagaaaa

SEQ ID NO: 12386 - DNA, 25 bp, Artificial
  probe
  misc_feature (1)..(25): SEQ ID NO: 6191; WAN024976_at; Start 30; Stop 54
ccttctactcaaatatcctgtcaga

SEQ ID NO: 12387 - DNA, 25 bp, Artificial
  probe
  misc_feature (1)..(25): SEQ ID NO: 6191; WAN024976_at; Start 36; Stop 60
actcaaatatcctgtcagaaaagga

SEQ ID NO: 12388 - DNA, 25 bp, Artificial
  probe
  misc_feature (1)..(25): SEQ ID NO: 6191; WAN024976_at; Start 16; Stop 40
acaatttaatagagccttctactca

SEQ ID NO: 12389 - DNA, 25 bp, Artificial
  probe
  misc_feature (1)..(25): SEQ ID NO: 6191; WAN024976_at; Start 51; Stop 75
cagaaaaggatagaaagctactttt

SEQ ID NO: 12390 - DNA, 25 bp, Artificial
  probe
  misc_feature (1)..(25): SEQ ID NO: 6191; WAN024976_at; Start 48; Stop 72
tgtcagaaaaggatagaaagctact

SEQ ID NO: 12391 - DNA, 25 bp, Artificial
  probe
  misc_feature (1)..(25): SEQ ID NO: 6191; WAN024976_at; Start 23; Stop 47
aatagagccttctactcaaatatcc

SEQ ID NO: 12392 - DNA, 25 bp, Artificial
  probe
  misc_feature (1)..(25): SEQ ID NO: 6191; WAN024976_at; Start 14; Stop 38
taacaatttaatagagccttctact

SEQ ID NO: 12393 - DNA, 25 bp, Artificial
  probe
  misc_feature (1)..(25): SEQ ID NO: 6191; WAN024976_at; Start 13; Stop 37
ctaacaatttaatagagccttctac

SEQ ID NO: 12394 - DNA, 25 bp, Artificial
  probe
  misc_feature (1)..(25): SEQ ID NO: 6191; WAN024976_at; Start 37; Stop 61
ctcaaatatcctgtcagaaaaggat

SEQ ID NO: 12395 - DNA, 25 bp, Artificial
  probe
  misc_feature (1)..(25): SEQ ID NO: 6108; WAN024977_at; Start 41; Stop 65
tagaatcctcataattttactataa

SEQ ID NO: 12396 - DNA, 25 bp, Artificial
  probe
  misc_feature (1)..(25): SEQ ID NO: 6108; WAN024977_at; Start 35; Stop 59
tcagaatagaatcctcataatttta

SEQ ID NO: 12397 - DNA, 25 bp, Artificial
  probe
  misc_feature (1)..(25): SEQ ID NO: 6108; WAN024977_at; Start 37; Stop 61
agaatagaatcctcataattttact

SEQ ID NO: 12398 - DNA, 25 bp, Artificial
  probe
  misc_feature (1)..(25): SEQ ID NO: 6108; WAN024977_at; Start 23; Stop 47
aactaaaataaatcagaatagaatc

SEQ ID NO: 12399 - DNA, 25 bp, Artificial
  probe
  misc_feature (1)..(25): SEQ ID NO: 6108; WAN024977_at; Start 42; Stop 66
agaatcctcataattttactataag

SEQ ID NO: 12400 - DNA, 25 bp, Artificial
  probe
  misc_feature (1)..(25): SEQ ID NO: 6108; WAN024977_at; Start 31; Stop 55
taaatcagaatagaatcctcataat

SEQ ID NO: 12401 - DNA, 25 bp, Artificial
  probe
  misc_feature (1)..(25): SEQ ID NO: 6108; WAN024977_at; Start 25; Stop 49
ctaaaataaatcagaatagaatcct

SEQ ID NO: 12402 - DNA, 25 bp, Artificial
  probe
  misc_feature (1)..(25): SEQ ID NO: 6108; WAN024977_at; Start 26; Stop 50
taaaataaatcagaatagaatcctc

SEQ ID NO: 12403 - DNA, 25 bp, Artificial
  probe
  misc_feature (1)..(25): SEQ ID NO: 6108; WAN024977_at; Start 39; Stop 63
aatagaatcctcataattttactat

SEQ ID NO: 12404 - DNA, 25 bp, Artificial
  probe
  misc_feature (1)..(25): SEQ ID NO: 6108; WAN024977_at; Start 27; Stop 51
aaaataaatcagaatagaatcctca

SEQ ID NO: 12405 - DNA, 25 bp, Artificial
  probe
  misc_feature (1)..(25): SEQ ID NO: 6108; WAN024977_at; Start 38; Stop 62
gaatagaatcctcataattttacta

SEQ ID NO: 12406 - DNA, 25 bp, Artificial
  probe
  misc_feature (1)..(25): SEQ ID NO: 6108; WAN024977_at; Start 34; Stop 58
atcagaatagaatcctcataatttt

SEQ ID NO: 12407 - DNA, 25 bp, Artificial
  probe
  misc_feature (1)..(25): SEQ ID NO: 6108; WAN024977_at; Start 33; Stop 57
aatcagaatagaatcctcataattt

SEQ ID NO: 12408 - DNA, 25 bp, Artificial
  probe
  misc_feature (1)..(25): SEQ ID NO: 6108; WAN024977_at; Start 40; Stop 64
atagaatcctcataattttactata

SEQ ID NO: 12409 - DNA, 25 bp, Artificial
  probe
  misc_feature (1)..(25): SEQ ID NO: 6108; WAN024977_at; Start 28; Stop 52
aaataaatcagaatagaatcctcat

SEQ ID NO: 12410 - DNA, 25 bp, Artificial
  probe
  misc_feature (1)..(25): SEQ ID NO: 6108; WAN024977_at; Start 44; Stop 68
aatcctcataattttactataagtc

SEQ ID NO: 12411 - DNA, 25 bp, Artificial
  probe
  misc_feature (1)..(25): SEQ ID NO: 6108; WAN024977_at; Start 30; Stop 54
ataaatcagaatagaatcctcataa

SEQ ID NO: 12412 - DNA, 25 bp, Artificial
  probe
  misc_feature (1)..(25): SEQ ID NO: 6108; WAN024977_at; Start 36; Stop 60
cagaatagaatcctcataattttac

SEQ ID NO: 12413 - DNA, 25 bp, Artificial
  probe
  misc_feature (1)..(25): SEQ ID NO: 6108; WAN024977_at; Start 22; Stop 46
aaactaaaataaatcagaatagaat

SEQ ID NO: 12414 - DNA, 25 bp, Artificial
  probe
  misc_feature (1)..(25): SEQ ID NO: 6108; WAN024977_at; Start 43; Stop 67
gaatcctcataattttactataagt

SEQ ID NO: 12415 - DNA, 25 bp, Artificial
  probe
  misc_feature (1)..(25): SEQ ID NO: 6108; WAN024977_at; Start 32; Stop 56
aaatcagaatagaatcctcataatt

SEQ ID NO: 12416 - DNA, 25 bp, Artificial
  probe
  misc_feature (1)..(25): SEQ ID NO: 6108; WAN024977_at; Start 29; Stop 53
aataaatcagaatagaatcctcata

SEQ ID NO: 12417 - DNA, 25 bp, Artificial
  probe
  misc_feature (1)..(25): SEQ ID NO: 6108; WAN024977_at; Start 24; Stop 48
actaaaataaatcagaatagaatcc

SEQ ID NO: 12418 - DNA, 25 bp, Artificial
  probe
  misc_feature (1)..(25): SEQ ID NO: 6123; WAN024978_at; Start 113; Stop 137
atcttcttaaaggtagcagtaccta

SEQ ID NO: 12419 - DNA, 25 bp, Artificial
  probe
  misc_feature (1)..(25): SEQ ID NO: 6123; WAN024978_at; Start 102; Stop 126
atacgtctactatcttcttaaaggt

SEQ ID NO: 12420 - DNA, 25 bp, Artificial
  probe
  misc_feature (1)..(25): SEQ ID NO: 6123; WAN024978_at; Start 96; Stop 120
aagtatatacgtctactatcttctt

SEQ ID NO: 12421 - DNA, 25 bp, Artificial
  probe
  misc_feature (1)..(25): SEQ ID NO: 6123; WAN024978_at; Start 93; Stop 117
aaaaagtatatacgtctactatctt

SEQ ID NO: 12422 - DNA, 25 bp, Artificial
  probe
  misc_feature (1)..(25): SEQ ID NO: 6123; WAN024978_at; Start 98; Stop 122
gtatatacgtctactatcttcttaa

SEQ ID NO: 12423 - DNA, 25 bp, Artificial
  probe
  misc_feature (1)..(25): SEQ ID NO: 6123; WAN024978_at; Start 39; Stop 63
gtcttaaattcaataaacaaataga

SEQ ID NO: 12424 - DNA, 25 bp, Artificial
  probe
  misc_feature (1)..(25): SEQ ID NO: 6123; WAN024978_at; Start 106; Stop 130
gtctactatcttcttaaaggtagca

SEQ ID NO: 12425 - DNA, 25 bp, Artificial
  probe
  misc_feature (1)..(25): SEQ ID NO: 6123; WAN024978_at; Start 69; Stop 93
tatagtatctttttgattttcttaa

SEQ ID NO: 12426 - DNA, 25 bp, Artificial
  probe
  misc_feature (1)..(25): SEQ ID NO: 6123; WAN024978_at; Start 111; Stop 135
ctatcttcttaaaggtagcagtacc

SEQ ID NO: 12427 - DNA, 25 bp, Artificial
  probe
  misc_feature (1)..(25): SEQ ID NO: 6123; WAN024978_at; Start 103; Stop 127
tacgtctactatcttcttaaaggta

SEQ ID NO: 12428 - DNA, 25 bp, Artificial
  probe
  misc_feature (1)..(25): SEQ ID NO: 6123; WAN024978_at; Start 55; Stop 79
acaaatagattttttatagtatctt

SEQ ID NO: 12429 - DNA, 25 bp, Artificial
  probe
  misc_feature (1)..(25): SEQ ID NO: 6123; WAN024978_at; Start 95; Stop 119
aaagtatatacgtctactatcttct

SEQ ID NO: 12430 - DNA, 25 bp, Artificial
  probe
  misc_feature (1)..(25): SEQ ID NO: 6123; WAN024978_at; Start 92; Stop 116
aaaaaagtatatacgtctactatct

SEQ ID NO: 12431 - DNA, 25 bp, Artificial
  probe
  misc_feature (1)..(25): SEQ ID NO: 6123; WAN024978_at; Start 115; Stop 139
cttcttaaaggtagcagtacctatt

SEQ ID NO: 12432 - DNA, 25 bp, Artificial
  probe
  misc_feature (1)..(25): SEQ ID NO: 6123; WAN024978_at; Start 29; Stop 53
tgttaccaaagtcttaaattcaata

SEQ ID NO: 12433 - DNA, 25 bp, Artificial
  probe
  misc_feature (1)..(25): SEQ ID NO: 6123; WAN024978_at; Start 91; Stop 115
taaaaaagtatatacgtctactatc

SEQ ID NO: 12434 - DNA, 25 bp, Artificial
  probe
  misc_feature (1)..(25): SEQ ID NO: 6123; WAN024978_at; Start 38; Stop 62
agtcttaaattcaataaacaaatag

SEQ ID NO: 12435 - DNA, 25 bp, Artificial
  probe
  misc_feature (1)..(25): SEQ ID NO: 6123; WAN024978_at; Start 100; Stop 124
atatacgtctactatcttcttaaag

SEQ ID NO: 12436 - DNA, 25 bp, Artificial
  probe
  misc_feature (1)..(25): SEQ ID NO: 6123; WAN024978_at; Start 110; Stop 134
actatcttcttaaaggtagcagtac

SEQ ID NO: 12437 - DNA, 25 bp, Artificial
  probe
  misc_feature (1)..(25): SEQ ID NO: 6123; WAN024978_at; Start 99; Stop 123
tatatacgtctactatcttcttaaa

SEQ ID NO: 12438 - DNA, 25 bp, Artificial
  probe
  misc_feature (1)..(25): SEQ ID NO: 6123; WAN024978_at; Start 97; Stop 121
agtatatacgtctactatcttctta

SEQ ID NO: 12439 - DNA, 25 bp, Artificial
  probe
  misc_feature (1)..(25): SEQ ID NO: 6123; WAN024978_at; Start 112; Stop 136
tatcttcttaaaggtagcagtacct

SEQ ID NO: 12440 - DNA, 25 bp, Artificial
  probe
  misc_feature (1)..(25): SEQ ID NO: 6123; WAN024978_at; Start 104; Stop 128
acgtctactatcttcttaaaggtag

SEQ ID NO: 12441 - DNA, 25 bp, Artificial
  probe
  misc_feature (1)..(25): SEQ ID NO: 6123; WAN024978_at; Start 41; Stop 65
cttaaattcaataaacaaatagatt

SEQ ID NO: 12442 - DNA, 25 bp, Artificial
  probe
  misc_feature (1)..(25): SEQ ID NO: 6123; WAN024978_at; Start 109; Stop 133
tactatcttcttaaaggtagcagta

SEQ ID NO: 12443 - DNA, 25 bp, Artificial
  probe
  misc_feature (1)..(25): SEQ ID NO: 6123; WAN024978_at; Start 1; Stop 25
gatgaatacctcctttttattttca

SEQ ID NO: 12444 - DNA, 25 bp, Artificial
  probe
  misc_feature (1)..(25): SEQ ID NO: 6123; WAN024978_at; Start 54; Stop 78
aacaaatagattttttatagtatct

SEQ ID NO: 12445 - DNA, 25 bp, Artificial
  probe
  misc_feature (1)..(25): SEQ ID NO: 6123; WAN024978_at; Start 94; Stop 118
aaaagtatatacgtctactatcttc

SEQ ID NO: 12446 - DNA, 25 bp, Artificial
  probe
  misc_feature (1)..(25): SEQ ID NO: 6123; WAN024978_at; Start 107; Stop 131
tctactatcttcttaaaggtagcag

SEQ ID NO: 12447 - DNA, 25 bp, Artificial
  probe
  misc_feature (1)..(25): SEQ ID NO: 6123; WAN024978_at; Start 114; Stop 138
tcttcttaaaggtagcagtacctat

SEQ ID NO: 12448 - DNA, 25 bp, Artificial
  probe
  misc_feature (1)..(25): SEQ ID NO: 6123; WAN024978_at; Start 40; Stop 64
tcttaaattcaataaacaaatagat

SEQ ID NO: 12449 - DNA, 25 bp, Artificial
  probe
  misc_feature (1)..(25): SEQ ID NO: 6123; WAN024978_at; Start 108; Stop 132
ctactatcttcttaaaggtagcagt

SEQ ID NO: 12450 - DNA, 25 bp, Artificial
  probe
  misc_feature (1)..(25): SEQ ID NO: 6123; WAN024978_at; Start 105; Stop 129
cgtctactatcttcttaaaggtagc

SEQ ID NO: 12451 - DNA, 25 bp, Artificial
  probe
  misc_feature (1)..(25): SEQ ID NO: 6123; WAN024978_at; Start 101; Stop 125
tatacgtctactatcttcttaaagg

SEQ ID NO: 12452 - DNA, 25 bp, Artificial
  probe
  misc_feature (1)..(25): SEQ ID NO: 6091; WAN024979_at; Start 46; Stop 70
tggtttcagctgtccggaaacttta

SEQ ID NO: 12453 - DNA, 25 bp, Artificial
  probe
  misc_feature (1)..(25): SEQ ID NO: 6091; WAN024979_at; Start 3; Stop 27
aaatcgaagactttctgccgtaatg

SEQ ID NO: 12454 - DNA, 25 bp, Artificial
  probe
  misc_feature (1)..(25): SEQ ID NO: 6091; WAN024979_at; Start 95; Stop 119
tggaacttcgaaggaggtcactacc

SEQ ID NO: 12455 - DNA, 25 bp, Artificial
  probe
  misc_feature (1)..(25): SEQ ID NO: 6091; WAN024979_at; Start 119; Stop 143
cgtccgtcattacttaggaaagtct

SEQ ID NO: 12456 - DNA, 25 bp, Artificial
  probe
  misc_feature (1)..(25): SEQ ID NO: 6091; WAN024979_at; Start 43; Stop 67
gcttggtttcagctgtccggaaact

SEQ ID NO: 12457 - DNA, 25 bp, Artificial
  probe
  misc_feature (1)..(25): SEQ ID NO: 6091; WAN024979_at; Start 108; Stop 132
gaggtcactaccgtccgtcattact

SEQ ID NO: 12458 - DNA, 25 bp, Artificial
  probe
  misc_feature (1)..(25): SEQ ID NO: 6091; WAN024979_at; Start 100; Stop 124
cttcgaaggaggtcactaccgtccg

SEQ ID NO: 12459 - DNA, 25 bp, Artificial
  probe
  misc_feature (1)..(25): SEQ ID NO: 6091; WAN024979_at; Start 17; Stop 41
ctgccgtaatgaaaacacctgaaac

SEQ ID NO: 12460 - DNA, 25 bp, Artificial
  probe
  misc_feature (1)..(25): SEQ ID NO: 6091; WAN024979_at; Start 24; Stop 48
aatgaaaacacctgaaacagcttgg

SEQ ID NO: 12461 - DNA, 25 bp, Artificial
  probe
  misc_feature (1)..(25): SEQ ID NO: 6091; WAN024979_at; Start 4; Stop 28
aatcgaagactttctgccgtaatga

SEQ ID NO: 12462 - DNA, 25 bp, Artificial
  probe
  misc_feature (1)..(25): SEQ ID NO: 6091; WAN024979_at; Start 11; Stop 35
gactttctgccgtaatgaaaacacc

SEQ ID NO: 12463 - DNA, 25 bp, Artificial
  probe
  misc_feature (1)..(25): SEQ ID NO: 6091; WAN024979_at; Start 23; Stop 47
taatgaaaacacctgaaacagcttg

SEQ ID NO: 12464 - DNA, 25 bp, Artificial
  probe
  misc_feature (1)..(25): SEQ ID NO: 6091; WAN024979_at; Start 121; Stop 145
tccgtcattacttaggaaagtctta

SEQ ID NO: 12465 - DNA, 25 bp, Artificial
  probe
  misc_feature (1)..(25): SEQ ID NO: 6091; WAN024979_at; Start 41; Stop 65
cagcttggtttcagctgtccggaaa

SEQ ID NO: 12466 - DNA, 25 bp, Artificial
  probe
  misc_feature (1)..(25): SEQ ID NO: 6091; WAN024979_at; Start 19; Stop 43
gccgtaatgaaaacacctgaaacag

SEQ ID NO: 12467 - DNA, 25 bp, Artificial
  probe
  misc_feature (1)..(25): SEQ ID NO: 6091; WAN024979_at; Start 110; Stop 134
ggtcactaccgtccgtcattactta

SEQ ID NO: 12468 - DNA, 25 bp, Artificial
  probe
  misc_feature (1)..(25): SEQ ID NO: 6091; WAN024979_at; Start 104; Stop 128
gaaggaggtcactaccgtccgtcat

SEQ ID NO: 12469 - DNA, 25 bp, Artificial
  probe
  misc_feature (1)..(25): SEQ ID NO: 6091; WAN024979_at; Start 6; Stop 30
tcgaagactttctgccgtaatgaaa

SEQ ID NO: 12470 - DNA, 25 bp, Artificial
  probe
  misc_feature (1)..(25): SEQ ID NO: 6091; WAN024979_at; Start 26; Stop 50
tgaaaacacctgaaacagcttggtt

SEQ ID NO: 12471 - DNA, 25 bp, Artificial
  probe
  misc_feature (1)..(25): SEQ ID NO: 6091; WAN024979_at; Start 16; Stop 40
tctgccgtaatgaaaacacctgaaa

SEQ ID NO: 12472 - DNA, 25 bp, Artificial
  probe
  misc_feature (1)..(25): SEQ ID NO: 6091; WAN024979_at; Start 37; Stop 61
gaaacagcttggtttcagctgtccg

SEQ ID NO: 12473 - DNA, 25 bp, Artificial
  probe
  misc_feature (1)..(25): SEQ ID NO: 6091; WAN024979_at; Start 102; Stop 126
tcgaaggaggtcactaccgtccgtc

SEQ ID NO: 12474 - DNA, 25 bp, Artificial
  probe
  misc_feature (1)..(25): SEQ ID NO: 6091; WAN024979_at; Start 112; Stop 136
tcactaccgtccgtcattacttagg

SEQ ID NO: 12475 - DNA, 25 bp, Artificial
  probe
  misc_feature (1)..(25): SEQ ID NO: 6091; WAN024979_at; Start 14; Stop 38
tttctgccgtaatgaaaacacctga

SEQ ID NO: 12476 - DNA, 25 bp, Artificial
  probe
  misc_feature (1)..(25): SEQ ID NO: 6091; WAN024979_at; Start 113; Stop 137
cactaccgtccgtcattacttagga

SEQ ID NO: 12477 - DNA, 25 bp, Artificial
  probe
  misc_feature (1)..(25): SEQ ID NO: 6091; WAN024979_at; Start 30; Stop 54
aacacctgaaacagcttggtttcag

SEQ ID NO: 12478 - DNA, 25 bp, Artificial
  probe
  misc_feature (1)..(25): SEQ ID NO: 6091; WAN024979_at; Start 106; Stop 130
aggaggtcactaccgtccgtcatta

SEQ ID NO: 12479 - DNA, 25 bp, Artificial
  probe
  misc_feature (1)..(25): SEQ ID NO: 6091; WAN024979_at; Start 21; Stop 45
cgtaatgaaaacacctgaaacagct

SEQ ID NO: 12480 - DNA, 25 bp, Artificial
  probe
  misc_feature (1)..(25): SEQ ID NO: 6091; WAN024979_at; Start 39; Stop 63
aacagcttggtttcagctgtccgga

SEQ ID NO: 12481 - DNA, 25 bp, Artificial
  probe
  misc_feature (1)..(25): SEQ ID NO: 6091; WAN024979_at; Start 89; Stop 113
taggtatggaacttcgaaggaggtc

SEQ ID NO: 12482 - DNA, 25 bp, Artificial
  probe
  misc_feature (1)..(25): SEQ ID NO: 6091; WAN024979_at; Start 1; Stop 25
ctaaatcgaagactttctgccgtaa

SEQ ID NO: 12483 - DNA, 25 bp, Artificial
  probe
  misc_feature (1)..(25): SEQ ID NO: 6091; WAN024979_at; Start 7; Stop 31
cgaagactttctgccgtaatgaaaa

SEQ ID NO: 12484 - DNA, 25 bp, Artificial
  probe
  misc_feature (1)..(25): SEQ ID NO: 6091; WAN024979_at; Start 93; Stop 117
tatggaacttcgaaggaggtcacta

SEQ ID NO: 12485 - DNA, 25 bp, Artificial
  probe
  misc_feature (1)..(25): SEQ ID NO: 6091; WAN024979_at; Start 92; Stop 116
gtatggaacttcgaaggaggtcact

SEQ ID NO: 12486 - DNA, 25 bp, Artificial
  probe
  misc_feature (1)..(25): SEQ ID NO: 6049; WAN02497A_x_at; Start 25; Stop 49
gtgctttggcattcctagccttcat

SEQ ID NO: 12487 - DNA, 25 bp, Artificial
  probe
  misc_feature (1)..(25): SEQ ID NO: 6049; WAN02497A_x_at; Start 24; Stop 48
agtgctttggcattcctagccttca

SEQ ID NO: 12488 - DNA, 25 bp, Artificial
  probe
  misc_feature (1)..(25): SEQ ID NO: 6049; WAN02497A_x_at; Start 1; Stop 25
atgagattcaaacgaaatatgtcag

SEQ ID NO: 12489 - DNA, 25 bp, Artificial
  probe
  misc_feature (1)..(25): SEQ ID NO: 6049; WAN02497A_x_at; Start 4; Stop 28
agattcaaacgaaatatgtcagtgc

SEQ ID NO: 12490 - DNA, 25 bp, Artificial
  probe
  misc_feature (1)..(25): SEQ ID NO: 6049; WAN02497A_x_at; Start 8; Stop 32
tcaaacgaaatatgtcagtgctttg

SEQ ID NO: 12491 - DNA, 25 bp, Artificial
  probe
  misc_feature (1)..(25): SEQ ID NO: 6049; WAN02497A_x_at; Start 12; Stop 36
acgaaatatgtcagtgctttggcat

SEQ ID NO: 12492 - DNA, 25 bp, Artificial
  probe
  misc_feature (1)..(25): SEQ ID NO: 6049; WAN02497A_x_at; Start 5; Stop 29
gattcaaacgaaatatgtcagtgct

SEQ ID NO: 12493 - DNA, 25 bp, Artificial
  probe
  misc_feature (1)..(25): SEQ ID NO: 6049; WAN02497A_x_at; Start 15; Stop 39
aaatatgtcagtgctttggcattcc

SEQ ID NO: 12494 - DNA, 25 bp, Artificial
  probe
  misc_feature (1)..(25): SEQ ID NO: 6049; WAN02497A_x_at; Start 3; Stop 27
gagattcaaacgaaatatgtcagtg

SEQ ID NO: 12495 - DNA, 25 bp, Artificial
  probe
  misc_feature (1)..(25): SEQ ID NO: 6049; WAN02497A_x_at; Start 2; Stop 26
tgagattcaaacgaaatatgtcagt

SEQ ID NO: 12496 - DNA, 25 bp, Artificial
  probe
  misc_feature (1)..(25): SEQ ID NO: 6049; WAN02497A_x_at; Start 21; Stop 45
gtcagtgctttggcattcctagcct

SEQ ID NO: 12497 - DNA, 25 bp, Artificial
  probe
  misc_feature (1)..(25): SEQ ID NO: 6049; WAN02497A_x_at; Start 19; Stop 43
atgtcagtgctttggcattcctagc

SEQ ID NO: 12498 - DNA, 25 bp, Artificial
  probe
  misc_feature (1)..(25): SEQ ID NO: 6049; WAN02497A_x_at; Start 14; Stop 38
gaaatatgtcagtgctttggcattc

SEQ ID NO: 12499 - DNA, 25 bp, Artificial
  probe
  misc_feature (1)..(25): SEQ ID NO: 6049; WAN02497A_x_at; Start 9; Stop 33
caaacgaaatatgtcagtgctttgg

SEQ ID NO: 12500 - DNA, 25 bp, Artificial
  probe
  misc_feature (1)..(25): SEQ ID NO: 6049; WAN02497A_x_at; Start 11; Stop 35
aacgaaatatgtcagtgctttggca

SEQ ID NO: 12501 - DNA, 25 bp, Artificial
  probe
  misc_feature (1)..(25): SEQ ID NO: 6049; WAN02497A_x_at; Start 6; Stop 30
attcaaacgaaatatgtcagtgctt

SEQ ID NO: 12502 - DNA, 25 bp, Artificial
  probe
  misc_feature (1)..(25): SEQ ID NO: 6049; WAN02497A_x_at; Start 7; Stop 31
ttcaaacgaaatatgtcagtgcttt

SEQ ID NO: 12503 - DNA, 25 bp, Artificial
  probe
  misc_feature (1)..(25): SEQ ID NO: 6049; WAN02497A_x_at; Start 10; Stop 34
aaacgaaatatgtcagtgctttggc

SEQ ID NO: 12504 - DNA, 25 bp, Artificial
  probe
  misc_feature (1)..(25): SEQ ID NO: 6049; WAN02497A_x_at; Start 13; Stop 37
cgaaatatgtcagtgctttggcatt

SEQ ID NO: 12505 - DNA, 25 bp, Artificial
  probe
  misc_feature (1)..(25): SEQ ID NO: 6049; WAN02497A_x_at; Start 26; Stop 50
tgctttggcattcctagccttcata

SEQ ID NO: 12506 - DNA, 25 bp, Artificial
  probe
  misc_feature (1)..(25): SEQ ID NO: 6049; WAN02497A_x_at; Start 22; Stop 46
tcagtgctttggcattcctagcctt

SEQ ID NO: 12507 - DNA, 25 bp, Artificial
  probe
  misc_feature (1)..(25): SEQ ID NO: 6049; WAN02497A_x_at; Start 23; Stop 47
cagtgctttggcattcctagccttc

SEQ ID NO: 12508 - DNA, 25 bp, Artificial
  probe
  misc_feature (1)..(25): SEQ ID NO: 6049; WAN02497A_x_at; Start 17; Stop 41
atatgtcagtgctttggcattccta

SEQ ID NO: 12509 - DNA, 25 bp, Artificial
  probe
  misc_feature (1)..(25): SEQ ID NO: 6049; WAN02497A_x_at; Start 20; Stop 44
tgtcagtgctttggcattcctagcc

SEQ ID NO: 12510 - DNA, 25 bp, Artificial
  probe
  misc_feature (1)..(25): SEQ ID NO: 6049; WAN02497A_x_at; Start 16; Stop 40
aatatgtcagtgctttggcattcct

SEQ ID NO: 12511 - DNA, 25 bp, Artificial
  probe
  misc_feature (1)..(25): SEQ ID NO: 6049; WAN02497A_x_at; Start 18; Stop 42
tatgtcagtgctttggcattcctag

SEQ ID NO: 12512 - DNA, 25 bp, Artificial
  probe
  misc_feature (1)..(25): SEQ ID NO: 6045; WAN02497B_at; Start 64; Stop 88
caataacccacaatgaggctggcac

SEQ ID NO: 12513 - DNA, 25 bp, Artificial
  probe
  misc_feature (1)..(25): SEQ ID NO: 6045; WAN02497B_at; Start 70; Stop 94
cccacaatgaggctggcacaatctg

SEQ ID NO: 12514 - DNA, 25 bp, Artificial
  probe
  misc_feature (1)..(25): SEQ ID NO: 6045; WAN02497B_at; Start 105; Stop 129
tatccgttattgtgattcatgccac

SEQ ID NO: 12515 - DNA, 25 bp, Artificial
  probe
  misc_feature (1)..(25): SEQ ID NO: 6045; WAN02497B_at; Start 122; Stop 146
catgccacatcaccatgattcctga

SEQ ID NO: 12516 - DNA, 25 bp, Artificial
  probe
  misc_feature (1)..(25): SEQ ID NO: 6045; WAN02497B_at; Start 77; Stop 101
tgaggctggcacaatctgcccagcc

SEQ ID NO: 12517 - DNA, 25 bp, Artificial
  probe
  misc_feature (1)..(25): SEQ ID NO: 6045; WAN02497B_at; Start 192; Stop 216
ctttttcataatgatgtacattgaa

SEQ ID NO: 12518 - DNA, 25 bp, Artificial
  probe
  misc_feature (1)..(25): SEQ ID NO: 6045; WAN02497B_at; Start 169; Stop 193
tggtcttcccttcagcctgctatct

SEQ ID NO: 12519 - DNA, 25 bp, Artificial
  probe
  misc_feature (1)..(25): SEQ ID NO: 6045; WAN02497B_at; Start 109; Stop 133
cgttattgtgattcatgccacatca

SEQ ID NO: 12520 - DNA, 25 bp, Artificial
  probe
  misc_feature (1)..(25): SEQ ID NO: 6045; WAN02497B_at; Start 67; Stop 91
taacccacaatgaggctggcacaat

SEQ ID NO: 12521 - DNA, 25 bp, Artificial
  probe
  misc_feature (1)..(25): SEQ ID NO: 6045; WAN02497B_at; Start 38; Stop 62
ccagaccagtcctatcgttttacaa

SEQ ID NO: 12522 - DNA, 25 bp, Artificial
  probe
  misc_feature (1)..(25): SEQ ID NO: 6045; WAN02497B_at; Start 75; Stop 99
aatgaggctggcacaatctgcccag

SEQ ID NO: 12523 - DNA, 25 bp, Artificial
  probe
  misc_feature (1)..(25): SEQ ID NO: 6045; WAN02497B_at; Start 158; Stop 182
tcagagtactctggtcttcccttca

SEQ ID NO: 12524 - DNA, 25 bp, Artificial
  probe
  misc_feature (1)..(25): SEQ ID NO: 6045; WAN02497B_at; Start 125; Stop 149
gccacatcaccatgattcctgatta

SEQ ID NO: 12525 - DNA, 25 bp, Artificial
  probe
  misc_feature (1)..(25): SEQ ID NO: 6045; WAN02497B_at; Start 10; Stop 34
ccagtcctgtccattcctaaaatga

SEQ ID NO: 12526 - DNA, 25 bp, Artificial
  probe
  misc_feature (1)..(25): SEQ ID NO: 6045; WAN02497B_at; Start 138; Stop 162
gattcctgattaacatcacctcaga

SEQ ID NO: 12527 - DNA, 25 bp, Artificial
  probe
  misc_feature (1)..(25): SEQ ID NO: 6045; WAN02497B_at; Start 144; Stop 168
tgattaacatcacctcagagtactc

SEQ ID NO: 12528 - DNA, 25 bp, Artificial
  probe
  misc_feature (1)..(25): SEQ ID NO: 6045; WAN02497B_at; Start 163; Stop 187
gtactctggtcttcccttcagcctg

SEQ ID NO: 12529 - DNA, 25 bp, Artificial
  probe
  misc_feature (1)..(25): SEQ ID NO: 6045; WAN02497B_at; Start 89; Stop 113
aatctgcccagcctcatatccgtta

SEQ ID NO: 12530 - DNA, 25 bp, Artificial
  probe
  misc_feature (1)..(25): SEQ ID NO: 6045; WAN02497B_at; Start 148; Stop 172
taacatcacctcagagtactctggt

SEQ ID NO: 12531 - DNA, 25 bp, Artificial
  probe
  misc_feature (1)..(25): SEQ ID NO: 6045; WAN02497B_at; Start 161; Stop 185
gagtactctggtcttcccttcagcc

SEQ ID NO: 12532 - DNA, 25 bp, Artificial
  probe
  misc_feature (1)..(25): SEQ ID NO: 6045; WAN02497B_at; Start 115; Stop 139
tgtgattcatgccacatcaccatga

SEQ ID NO: 12533 - DNA, 25 bp, Artificial
  probe
  misc_feature (1)..(25): SEQ ID NO: 6045; WAN02497B_at; Start 72; Stop 96
cacaatgaggctggcacaatctgcc

SEQ ID NO: 12534 - DNA, 25 bp, Artificial
  probe
  misc_feature (1)..(25): SEQ ID NO: 6045; WAN02497B_at; Start 93; Stop 117
tgcccagcctcatatccgttattgt

SEQ ID NO: 12535 - DNA, 25 bp, Artificial
  probe
  misc_feature (1)..(25): SEQ ID NO: 6045; WAN02497B_at; Start 33; Stop 57
gattaccagaccagtcctatcgttt

SEQ ID NO: 12536 - DNA, 25 bp, Artificial
  probe
  misc_feature (1)..(25): SEQ ID NO: 6045; WAN02497B_at; Start 41; Stop 65
gaccagtcctatcgttttacaaaca

SEQ ID NO: 12537 - DNA, 25 bp, Artificial
  probe
  misc_feature (1)..(25): SEQ ID NO: 6045; WAN02497B_at; Start 96; Stop 120
ccagcctcatatccgttattgtgat

SEQ ID NO: 12538 - DNA, 25 bp, Artificial
  probe
  misc_feature (1)..(25): SEQ ID NO: 6045; WAN02497B_at; Start 27; Stop 51
taaaatgattaccagaccagtccta

SEQ ID NO: 12539 - DNA, 25 bp, Artificial
  probe
  misc_feature (1)..(25): SEQ ID NO: 6045; WAN02497B_at; Start 5; Stop 29
gaatcccagtcctgtccattcctaa

SEQ ID NO: 12540 - DNA, 25 bp, Artificial
  probe
  misc_feature (1)..(25): SEQ ID NO: 6045; WAN02497B_at; Start 17; Stop 41
tgtccattcctaaaatgattaccag

SEQ ID NO: 12541 - DNA, 25 bp, Artificial
  probe
  misc_feature (1)..(25): SEQ ID NO: 6045; WAN02497B_at; Start 24; Stop 48
tcctaaaatgattaccagaccagtc

SEQ ID NO: 12542 - DNA, 25 bp, Artificial
  probe
  misc_feature (1)..(25): SEQ ID NO: 6045; WAN02497B_at; Start 60; Stop 84
caaacaataacccacaatgaggctg

SEQ ID NO: 12543 - DNA, 25 bp, Artificial
  probe
  misc_feature (1)..(25): SEQ ID NO: 6045; WAN02497B_at; Start 30; Stop 54
aatgattaccagaccagtcctatcg

SEQ ID NO: 12544 - DNA, 25 bp, Artificial
  probe
  misc_feature (1)..(25): SEQ ID NO: 6045; WAN02497B_at; Start 57; Stop 81
ttacaaacaataacccacaatgagg

SEQ ID NO: 12545 - DNA, 25 bp, Artificial
  probe
  misc_feature (1)..(25): SEQ ID NO: 6045; WAN02497B_at; Start 183; Stop 207
gcctgctatctttttcataatgatg

SEQ ID NO: 12546 - DNA, 25 bp, Artificial
  probe
  misc_feature (1)..(25): SEQ ID NO: 6126; WAN02497C_at; Start 191; Stop 215
cgttcagaacatagatattatcatt

SEQ ID NO: 12547 - DNA, 25 bp, Artificial
  probe
  misc_feature (1)..(25): SEQ ID NO: 6126; WAN02497C_at; Start 160; Stop 184
tctcttcttgagtgctacttcttaa

SEQ ID NO: 12548 - DNA, 25 bp, Artificial
  probe
  misc_feature (1)..(25): SEQ ID NO: 6126; WAN02497C_at; Start 179; Stop 203
tcttaaaagtatcgttcagaacata

SEQ ID NO: 12549 - DNA, 25 bp, Artificial
  probe
  misc_feature (1)..(25): SEQ ID NO: 6126; WAN02497C_at; Start 53; Stop 77
tacacatgacaataataatcctttt

SEQ ID NO: 12550 - DNA, 25 bp, Artificial
  probe
  misc_feature (1)..(25): SEQ ID NO: 6126; WAN02497C_at; Start 113; Stop 137
tgatagtttacttacgaataaaaca

SEQ ID NO: 12551 - DNA, 25 bp, Artificial
  probe
  misc_feature (1)..(25): SEQ ID NO: 6126; WAN02497C_at; Start 156; Stop 180
taaatctcttcttgagtgctacttc

SEQ ID NO: 12552 - DNA, 25 bp, Artificial
  probe
  misc_feature (1)..(25): SEQ ID NO: 6126; WAN02497C_at; Start 150; Stop 174
taaacttaaatctcttcttgagtgc

SEQ ID NO: 12553 - DNA, 25 bp, Artificial
  probe
  misc_feature (1)..(25): SEQ ID NO: 6126; WAN02497C_at; Start 78; Stop 102
tctgtgcaagttttcgaaaacatct

SEQ ID NO: 12554 - DNA, 25 bp, Artificial
  probe
  misc_feature (1)..(25): SEQ ID NO: 6126; WAN02497C_at; Start 24; Stop 48
taaaatcaactgtgagcaatgtaat

SEQ ID NO: 12555 - DNA, 25 bp, Artificial
  probe
  misc_feature (1)..(25): SEQ ID NO: 6126; WAN02497C_at; Start 30; Stop 54
caactgtgagcaatgtaatgaatta

SEQ ID NO: 12556 - DNA, 25 bp, Artificial
  probe
  misc_feature (1)..(25): SEQ ID NO: 6126; WAN02497C_at; Start 153; Stop 177
acttaaatctcttcttgagtgctac

SEQ ID NO: 12557 - DNA, 25 bp, Artificial
  probe
  misc_feature (1)..(25): SEQ ID NO: 6126; WAN02497C_at; Start 91; Stop 115
tcgaaaacatctcccctttcaatga

SEQ ID NO: 12558 - DNA, 25 bp, Artificial
  probe
  misc_feature (1)..(25): SEQ ID NO: 6126; WAN02497C_at; Start 82; Stop 106
tgcaagttttcgaaaacatctcccc

SEQ ID NO: 12559 - DNA, 25 bp, Artificial
  probe
  misc_feature (1)..(25): SEQ ID NO: 6126; WAN02497C_at; Start 71; Stop 95
tcctttttctgtgcaagttttcgaa

SEQ ID NO: 12560 - DNA, 25 bp, Artificial
  probe
  misc_feature (1)..(25): SEQ ID NO: 6126; WAN02497C_at; Start 173; Stop 197
gctacttcttaaaagtatcgttcag

SEQ ID NO: 12561 - DNA, 25 bp, Artificial
  probe
  misc_feature (1)..(25): SEQ ID NO: 6126; WAN02497C_at; Start 21; Stop 45
tcttaaaatcaactgtgagcaatgt

SEQ ID NO: 12562 - DNA, 25 bp, Artificial
  probe
  misc_feature (1)..(25): SEQ ID NO: 6126; WAN02497C_at; Start 98; Stop 122
catctcccctttcaatgatagttta

SEQ ID NO: 12563 - DNA, 25 bp, Artificial
  probe
  misc_feature (1)..(25): SEQ ID NO: 6126; WAN02497C_at; Start 188; Stop 212
tatcgttcagaacatagatattatc

SEQ ID NO: 12564 - DNA, 25 bp, Artificial
  probe
  misc_feature (1)..(25): SEQ ID NO: 6126; WAN02497C_at; Start 33; Stop 57
ctgtgagcaatgtaatgaattacac

SEQ ID NO: 12565 - DNA, 25 bp, Artificial
  probe
  misc_feature (1)..(25): SEQ ID NO: 6126; WAN02497C_at; Start 62; Stop 86
caataataatcctttttctgtgcaa

SEQ ID NO: 12566 - DNA, 25 bp, Artificial
  probe
  misc_feature (1)..(25): SEQ ID NO: 6126; WAN02497C_at; Start 15; Stop 39
catatctcttaaaatcaactgtgag

SEQ ID NO: 12567 - DNA, 25 bp, Artificial
  probe
  misc_feature (1)..(25): SEQ ID NO: 6126; WAN02497C_at; Start 1; Stop 25
gatttctccttattcatatctctta

SEQ ID NO: 12568 - DNA, 25 bp, Artificial
  probe
  misc_feature (1)..(25): SEQ ID NO: 6126; WAN02497C_at; Start 168; Stop 192
tgagtgctacttcttaaaagtatcg

SEQ ID NO: 12569 - DNA, 25 bp, Artificial
  probe
  misc_feature (1)..(25): SEQ ID NO: 6126; WAN02497C_at; Start 94; Stop 118
aaaacatctcccctttcaatgatag

SEQ ID NO: 12570 - DNA, 25 bp, Artificial
  probe
  misc_feature (1)..(25): SEQ ID NO: 6126; WAN02497C_at; Start 182; Stop 206
taaaagtatcgttcagaacatagat

SEQ ID NO: 12571 - DNA, 25 bp, Artificial
  probe
  misc_feature (1)..(25): SEQ ID NO: 6126; WAN02497C_at; Start 110; Stop 134
caatgatagtttacttacgaataaa

SEQ ID NO: 12572 - DNA, 25 bp, Artificial
  probe
  misc_feature (1)..(25): SEQ ID NO: 6126; WAN02497C_at; Start 65; Stop 89
taataatcctttttctgtgcaagtt

SEQ ID NO: 12573 - DNA, 25 bp, Artificial
  probe
  misc_feature (1)..(25): SEQ ID NO: 6126; WAN02497C_at; Start 142; Stop 166
tcaccaagtaaacttaaatctcttc

SEQ ID NO: 12574 - DNA, 25 bp, Artificial
  probe
  misc_feature (1)..(25): SEQ ID NO: 6126; WAN02497C_at; Start 27; Stop 51
aatcaactgtgagcaatgtaatgaa

SEQ ID NO: 12575 - DNA, 25 bp, Artificial
  probe
  misc_feature (1)..(25): SEQ ID NO: 6126; WAN02497C_at; Start 17; Stop 41
tatctcttaaaatcaactgtgagca

SEQ ID NO: 12576 - DNA, 25 bp, Artificial
  probe
  misc_feature (1)..(25): SEQ ID NO: 6126; WAN02497C_at; Start 39; Stop 63
gcaatgtaatgaattacacatgaca

SEQ ID NO: 12577 - DNA, 25 bp, Artificial
  probe
  misc_feature (1)..(25): SEQ ID NO: 6126; WAN02497C_at; Start 49; Stop 73
gaattacacatgacaataataatcc

SEQ ID NO: 12578 - DNA, 25 bp, Artificial
  probe
  misc_feature (1)..(25): SEQ ID NO: 6126; WAN02497C_at; Start 197; Stop 221
gaacatagatattatcatttctaca

SEQ ID NO: 12579 - DNA, 25 bp, Artificial
  probe
  misc_feature (1)..(25): SEQ ID NO: 6126; WAN02497C_at; Start 104; Stop 128
ccctttcaatgatagtttacttacg

SEQ ID NO: 12580 - DNA, 25 bp, Artificial
  probe
  misc_feature (1)..(25): SEQ ID NO: 6182; WAN02497D_at; Start 130; Stop 154
aaaagcgtataaaagtgcgttatag

SEQ ID NO: 12581 - DNA, 25 bp, Artificial
  probe
  misc_feature (1)..(25): SEQ ID NO: 6182; WAN02497D_at; Start 108; Stop 132
tccgttcactaacaaacgtagcaaa

SEQ ID NO: 12582 - DNA, 25 bp, Artificial
  probe
  misc_feature (1)..(25): SEQ ID NO: 6182; WAN02497D_at; Start 52; Stop 76
tatacacgaagaaacggattactta

SEQ ID NO: 12583 - DNA, 25 bp, Artificial
  probe
  misc_feature (1)..(25): SEQ ID NO: 6182; WAN02497D_at; Start 37; Stop 61
ggtactttcaatctgtatacacgaa

SEQ ID NO: 12584 - DNA, 25 bp, Artificial
  probe
  misc_feature (1)..(25): SEQ ID NO: 6182; WAN02497D_at; Start 124; Stop 148
cgtagcaaaagcgtataaaagtgcg

SEQ ID NO: 12585 - DNA, 25 bp, Artificial
  probe
  misc_feature (1)..(25): SEQ ID NO: 6182; WAN02497D_at; Start 100; Stop 124
tgagttaatccgttcactaacaaac

SEQ ID NO: 12586 - DNA, 25 bp, Artificial
  probe
  misc_feature (1)..(25): SEQ ID NO: 6182; WAN02497D_at; Start 62; Stop 86
gaaacggattacttatgttctgata

SEQ ID NO: 12587 - DNA, 25 bp, Artificial
  probe
  misc_feature (1)..(25): SEQ ID NO: 6182; WAN02497D_at; Start 83; Stop 107
gataaaatttatctcactgagttaa

SEQ ID NO: 12588 - DNA, 25 bp, Artificial
  probe
  misc_feature (1)..(25): SEQ ID NO: 6182; WAN02497D_at; Start 29; Stop 53
gattcataggtactttcaatctgta

SEQ ID NO: 12589 - DNA, 25 bp, Artificial
  probe
  misc_feature (1)..(25): SEQ ID NO: 6182; WAN02497D_at; Start 33; Stop 57
cataggtactttcaatctgtataca

SEQ ID NO: 12590 - DNA, 25 bp, Artificial
  probe
  misc_feature (1)..(25): SEQ ID NO: 6182; WAN02497D_at; Start 50; Stop 74
tgtatacacgaagaaacggattact

SEQ ID NO: 12591 - DNA, 25 bp, Artificial
  probe
  misc_feature (1)..(25): SEQ ID NO: 6182; WAN02497D_at; Start 1; Stop 25
tattcatagaacaagttaatccttc

SEQ ID NO: 12592 - DNA, 25 bp, Artificial
  probe
  misc_feature (1)..(25): SEQ ID NO: 6182; WAN02497D_at; Start 65; Stop 89
acggattacttatgttctgataaaa

SEQ ID NO: 12593 - DNA, 25 bp, Artificial
  probe
  misc_feature (1)..(25): SEQ ID NO: 6182; WAN02497D_at; Start 92; Stop 116
tatctcactgagttaatccgttcac

SEQ ID NO: 12594 - DNA, 25 bp, Artificial
  probe
  misc_feature (1)..(25): SEQ ID NO: 6182; WAN02497D_at; Start 56; Stop 80
cacgaagaaacggattacttatgtt

SEQ ID NO: 12595 - DNA, 25 bp, Artificial
  probe
  misc_feature (1)..(25): SEQ ID NO: 6182; WAN02497D_at; Start 94; Stop 118
tctcactgagttaatccgttcacta

SEQ ID NO: 12596 - DNA, 25 bp, Artificial
  probe
  misc_feature (1)..(25): SEQ ID NO: 6182; WAN02497D_at; Start 97; Stop 121
cactgagttaatccgttcactaaca

SEQ ID NO: 12597 - DNA, 25 bp, Artificial
  probe
  misc_feature (1)..(25): SEQ ID NO: 6182; WAN02497D_at; Start 45; Stop 69
caatctgtatacacgaagaaacgga

SEQ ID NO: 12598 - DNA, 25 bp, Artificial
  probe
  misc_feature (1)..(25): SEQ ID NO: 6182; WAN02497D_at; Start 117; Stop 141
taacaaacgtagcaaaagcgtataa

SEQ ID NO: 12599 - DNA, 25 bp, Artificial
  probe
  misc_feature (1)..(25): SEQ ID NO: 6182; WAN02497D_at; Start 105; Stop 129
taatccgttcactaacaaacgtagc

SEQ ID NO: 12600 - DNA, 25 bp, Artificial
  probe
  misc_feature (1)..(25): SEQ ID NO: 6182; WAN02497D_at; Start 14; Stop 38
agttaatccttctatgattcatagg

SEQ ID NO: 12601 - DNA, 25 bp, Artificial
  probe
  misc_feature (1)..(25): SEQ ID NO: 6182; WAN02497D_at; Start 120; Stop 144
caaacgtagcaaaagcgtataaaag

SEQ ID NO: 12602 - DNA, 25 bp, Artificial
  probe
  misc_feature (1)..(25): SEQ ID NO: 6182; WAN02497D_at; Start 112; Stop 136
ttcactaacaaacgtagcaaaagcg

SEQ ID NO: 12603 - DNA, 25 bp, Artificial
  probe
  misc_feature (1)..(25): SEQ ID NO: 6182; WAN02497D_at; Start 35; Stop 59
taggtactttcaatctgtatacacg

SEQ ID NO: 12604 - DNA, 25 bp, Artificial
  probe
  misc_feature (1)..(25): SEQ ID NO: 6182; WAN02497D_at; Start 114; Stop 138
cactaacaaacgtagcaaaagcgta

SEQ ID NO: 12605 - DNA, 25 bp, Artificial
  probe
  misc_feature (1)..(25): SEQ ID NO: 6182; WAN02497D_at; Start 128; Stop 152
gcaaaagcgtataaaagtgcgttat

SEQ ID NO: 12606 - DNA, 25 bp, Artificial
  probe
  misc_feature (1)..(25): SEQ ID NO: 6182; WAN02497D_at; Start 25; Stop 49
ctatgattcataggtactttcaatc

SEQ ID NO: 12607 - DNA, 25 bp, Artificial
  probe
  misc_feature (1)..(25): SEQ ID NO: 6182; WAN02497D_at; Start 126; Stop 150
tagcaaaagcgtataaaagtgcgtt

SEQ ID NO: 12608 - DNA, 25 bp, Artificial
  probe
  misc_feature (1)..(25): SEQ ID NO: 6182; WAN02497D_at; Start 7; Stop 31
tagaacaagttaatccttctatgat

SEQ ID NO: 12609 - DNA, 25 bp, Artificial
  probe
  misc_feature (1)..(25): SEQ ID NO: 6182; WAN02497D_at; Start 59; Stop 83
gaagaaacggattacttatgttctg

SEQ ID NO: 12610 - DNA, 25 bp, Artificial
  probe
  misc_feature (1)..(25): SEQ ID NO: 6182; WAN02497D_at; Start 44; Stop 68
tcaatctgtatacacgaagaaacgg

SEQ ID NO: 12611 - DNA, 25 bp, Artificial
  probe
  misc_feature (1)..(25): SEQ ID NO: 6182; WAN02497D_at; Start 39; Stop 63
tactttcaatctgtatacacgaaga

SEQ ID NO: 12612 - DNA, 25 bp, Artificial
  probe
  misc_feature (1)..(25): SEQ ID NO: 6182; WAN02497D_at; Start 48; Stop 72
tctgtatacacgaagaaacggatta

SEQ ID NO: 12613 - DNA, 25 bp, Artificial
  probe
  misc_feature (1)..(25): SEQ ID NO: 6182; WAN02497D_at; Start 54; Stop 78
tacacgaagaaacggattacttatg

SEQ ID NO: 12614 - DNA, 25 bp, Artificial
  probe
  misc_feature (1)..(25): SEQ ID NO: 6150; WAN02497E_at; Start 223; Stop 247
ttataatgaaaagcgcctaaacaac

SEQ ID NO: 12615 - DNA, 25 bp, Artificial
  probe
  misc_feature (1)..(25): SEQ ID NO: 6150; WAN02497E_at; Start 162; Stop 186
tgggtaaatcccactgtggagatta

SEQ ID NO: 12616 - DNA, 25 bp, Artificial
  probe
  misc_feature (1)..(25): SEQ ID NO: 6150; WAN02497E_at; Start 101; Stop 125
tctgctctctagtttctgctagtga

SEQ ID NO: 12617 - DNA, 25 bp, Artificial
  probe
  misc_feature (1)..(25): SEQ ID NO: 6150; WAN02497E_at; Start 123; Stop 147
tgaacaaaagtgttttttctggctc

SEQ ID NO: 12618 - DNA, 25 bp, Artificial
  probe
  misc_feature (1)..(25): SEQ ID NO: 6150; WAN02497E_at; Start 12; Stop 36
tgtctacacacaaaaaggggcttcc

SEQ ID NO: 12619 - DNA, 25 bp, Artificial
  probe
  misc_feature (1)..(25): SEQ ID NO: 6150; WAN02497E_at; Start 115; Stop 139
tctgctagtgaacaaaagtgttttt

SEQ ID NO: 12620 - DNA, 25 bp, Artificial
  probe
  misc_feature (1)..(25): SEQ ID NO: 6150; WAN02497E_at; Start 159; Stop 183
tagtgggtaaatcccactgtggaga

SEQ ID NO: 12621 - DNA, 25 bp, Artificial
  probe
  misc_feature (1)..(25): SEQ ID NO: 6150; WAN02497E_at; Start 66; Stop 90
tcccagttttgggtaaatctgaaca

SEQ ID NO: 12622 - DNA, 25 bp, Artificial
  probe
  misc_feature (1)..(25): SEQ ID NO: 6150; WAN02497E_at; Start 130; Stop 154
aagtgttttttctggctctataatt

SEQ ID NO: 12623 - DNA, 25 bp, Artificial
  probe
  misc_feature (1)..(25): SEQ ID NO: 6150; WAN02497E_at; Start 184; Stop 208
ttatagggctttttgagtatcaaaa

SEQ ID NO: 12624 - DNA, 25 bp, Artificial
  probe
  misc_feature (1)..(25): SEQ ID NO: 6150; WAN02497E_at; Start 52; Stop 76
cttatccccatatttcccagttttg

SEQ ID NO: 12625 - DNA, 25 bp, Artificial
  probe
  misc_feature (1)..(25): SEQ ID NO: 6150; WAN02497E_at; Start 170; Stop 194
tcccactgtggagattatagggctt

SEQ ID NO: 12626 - DNA, 25 bp, Artificial
  probe
  misc_feature (1)..(25): SEQ ID NO: 6150; WAN02497E_at; Start 30; Stop 54
ggcttcctaagccatctctattctt

SEQ ID NO: 12627 - DNA, 25 bp, Artificial
  probe
  misc_feature (1)..(25): SEQ ID NO: 6150; WAN02497E_at; Start 104; Stop 128
gctctctagtttctgctagtgaaca

SEQ ID NO: 12628 - DNA, 25 bp, Artificial
  probe
  misc_feature (1)..(25): SEQ ID NO: 6150; WAN02497E_at; Start 196; Stop 220
ttgagtatcaaaaaagtcccataag

SEQ ID NO: 12629 - DNA, 25 bp, Artificial
  probe
  misc_feature (1)..(25): SEQ ID NO: 6150; WAN02497E_at; Start 198; Stop 222
gagtatcaaaaaagtcccataagac

SEQ ID NO: 12630 - DNA, 25 bp, Artificial
  probe
  misc_feature (1)..(25): SEQ ID NO: 6150; WAN02497E_at; Start 217; Stop 241
taagacttataatgaaaagcgccta

SEQ ID NO: 12631 - DNA, 25 bp, Artificial
  probe
  misc_feature (1)..(25): SEQ ID NO: 6150; WAN02497E_at; Start 220; Stop 244
gacttataatgaaaagcgcctaaac

SEQ ID NO: 12632 - DNA, 25 bp, Artificial
  probe
  misc_feature (1)..(25): SEQ ID NO: 6150; WAN02497E_at; Start 110; Stop 134
tagtttctgctagtgaacaaaagtg

SEQ ID NO: 12633 - DNA, 25 bp, Artificial
  probe
  misc_feature (1)..(25): SEQ ID NO: 6150; WAN02497E_at; Start 97; Stop 121
cacttctgctctctagtttctgcta

SEQ ID NO: 12634 - DNA, 25 bp, Artificial
  probe
  misc_feature (1)..(25): SEQ ID NO: 6150; WAN02497E_at; Start 1; Stop 25
gttcatcgtactgtctacacacaaa

SEQ ID NO: 12635 - DNA, 25 bp, Artificial
  probe
  misc_feature (1)..(25): SEQ ID NO: 6150; WAN02497E_at; Start 91; Stop 115
gaaaaacacttctgctctctagttt

SEQ ID NO: 12636 - DNA, 25 bp, Artificial
  probe
  misc_feature (1)..(25): SEQ ID NO: 6150; WAN02497E_at; Start 173; Stop 197
cactgtggagattatagggcttttt

SEQ ID NO: 12637 - DNA, 25 bp, Artificial
  probe
  misc_feature (1)..(25): SEQ ID NO: 6150; WAN02497E_at; Start 201; Stop 225
tatcaaaaaagtcccataagactta

SEQ ID NO: 12638 - DNA, 25 bp, Artificial
  probe
  misc_feature (1)..(25): SEQ ID NO: 6150; WAN02497E_at; Start 48; Stop 72
tattcttatccccatatttcccagt

SEQ ID NO: 12639 - DNA, 25 bp, Artificial
  probe
  misc_feature (1)..(25): SEQ ID NO: 6150; WAN02497E_at; Start 69; Stop 93
cagttttgggtaaatctgaacagaa

SEQ ID NO: 12640 - DNA, 25 bp, Artificial
  probe
  misc_feature (1)..(25): SEQ ID NO: 6150; WAN02497E_at; Start 6; Stop 30
tcgtactgtctacacacaaaaaggg

SEQ ID NO: 12641 - DNA, 25 bp, Artificial
  probe
  misc_feature (1)..(25): SEQ ID NO: 6150; WAN02497E_at; Start 215; Stop 239
cataagacttataatgaaaagcgcc

SEQ ID NO: 12642 - DNA, 25 bp, Artificial
  probe
  misc_feature (1)..(25): SEQ ID NO: 6150; WAN02497E_at; Start 127; Stop 151
caaaagtgttttttctggctctata

SEQ ID NO: 12643 - DNA, 25 bp, Artificial
  probe
  misc_feature (1)..(25): SEQ ID NO: 6150; WAN02497E_at; Start 83; Stop 107
tctgaacagaaaaacacttctgctc

SEQ ID NO: 12644 - DNA, 25 bp, Artificial
  probe
  misc_feature (1)..(25): SEQ ID NO: 6150; WAN02497E_at; Start 75; Stop 99
tgggtaaatctgaacagaaaaacac

SEQ ID NO: 12645 - DNA, 25 bp, Artificial
  probe
  misc_feature (1)..(25): SEQ ID NO: 6150; WAN02497E_at; Start 86; Stop 110
gaacagaaaaacacttctgctctct

SEQ ID NO: 12646 - DNA, 25 bp, Artificial
  probe
  misc_feature (1)..(25): SEQ ID NO: 6150; WAN02497E_at; Start 34; Stop 58
tcctaagccatctctattcttatcc

SEQ ID NO: 12647 - DNA, 25 bp, Artificial
  probe
  misc_feature (1)..(25): SEQ ID NO: 6150; WAN02497E_at; Start 168; Stop 192
aatcccactgtggagattatagggc

SEQ ID NO: 12648 - DNA, 25 bp, Artificial
  probe
  misc_feature (1)..(25): SEQ ID NO: 6087; WAN02497F_at; Start 62; Stop 86
caaagtcacttctttgattaagcga

SEQ ID NO: 12649 - DNA, 25 bp, Artificial
  probe
  misc_feature (1)..(25): SEQ ID NO: 6087; WAN02497F_at; Start 73; Stop 97
ctttgattaagcgagtgttctaata

SEQ ID NO: 12650 - DNA, 25 bp, Artificial
  probe
  misc_feature (1)..(25): SEQ ID NO: 6087; WAN02497F_at; Start 76; Stop 100
tgattaagcgagtgttctaatataa

SEQ ID NO: 12651 - DNA, 25 bp, Artificial
  probe
  misc_feature (1)..(25): SEQ ID NO: 6087; WAN02497F_at; Start 45; Stop 69
cgtcaggtcaagtacaacaaagtca

SEQ ID NO: 12652 - DNA, 25 bp, Artificial
  probe
  misc_feature (1)..(25): SEQ ID NO: 6087; WAN02497F_at; Start 47; Stop 71
tcaggtcaagtacaacaaagtcact

SEQ ID NO: 12653 - DNA, 25 bp, Artificial
  probe
  misc_feature (1)..(25): SEQ ID NO: 6087; WAN02497F_at; Start 24; Stop 48
catgcttttaatctccccaatcgtc

SEQ ID NO: 12654 - DNA, 25 bp, Artificial
  probe
  misc_feature (1)..(25): SEQ ID NO: 6087; WAN02497F_at; Start 42; Stop 66
aatcgtcaggtcaagtacaacaaag

SEQ ID NO: 12655 - DNA, 25 bp, Artificial
  probe
  misc_feature (1)..(25): SEQ ID NO: 6087; WAN02497F_at; Start 80; Stop 104
taagcgagtgttctaatataattat

SEQ ID NO: 12656 - DNA, 25 bp, Artificial
  probe
  misc_feature (1)..(25): SEQ ID NO: 6087; WAN02497F_at; Start 17; Stop 41
gatttcacatgcttttaatctcccc

SEQ ID NO: 12657 - DNA, 25 bp, Artificial
  probe
  misc_feature (1)..(25): SEQ ID NO: 6087; WAN02497F_at; Start 39; Stop 63
cccaatcgtcaggtcaagtacaaca

SEQ ID NO: 12658 - DNA, 25 bp, Artificial
  probe
  misc_feature (1)..(25): SEQ ID NO: 6087; WAN02497F_at; Start 22; Stop 46
cacatgcttttaatctccccaatcg

SEQ ID NO: 12659 - DNA, 25 bp, Artificial
  probe
  misc_feature (1)..(25): SEQ ID NO: 6087; WAN02497F_at; Start 33; Stop 57
aatctccccaatcgtcaggtcaagt

SEQ ID NO: 12660 - DNA, 25 bp, Artificial
  probe
  misc_feature (1)..(25): SEQ ID NO: 6087; WAN02497F_at; Start 26; Stop 50
tgcttttaatctccccaatcgtcag

SEQ ID NO: 12661 - DNA, 25 bp, Artificial
  probe
  misc_feature (1)..(25): SEQ ID NO: 6087; WAN02497F_at; Start 40; Stop 64
ccaatcgtcaggtcaagtacaacaa

SEQ ID NO: 12662 - DNA, 25 bp, Artificial
  probe
  misc_feature (1)..(25): SEQ ID NO: 6087; WAN02497F_at; Start 70; Stop 94
cttctttgattaagcgagtgttcta

SEQ ID NO: 12663 - DNA, 25 bp, Artificial
  probe
  misc_feature (1)..(25): SEQ ID NO: 6087; WAN02497F_at; Start 37; Stop 61
tccccaatcgtcaggtcaagtacaa

SEQ ID NO: 12664 - DNA, 25 bp, Artificial
  probe
  misc_feature (1)..(25): SEQ ID NO: 6087; WAN02497F_at; Start 91; Stop 115
tctaatataattataagcgccctgt

SEQ ID NO: 12665 - DNA, 25 bp, Artificial
  probe
  misc_feature (1)..(25): SEQ ID NO: 6087; WAN02497F_at; Start 68; Stop 92
cacttctttgattaagcgagtgttc

SEQ ID NO: 12666 - DNA, 25 bp, Artificial
  probe
  misc_feature (1)..(25): SEQ ID NO: 6087; WAN02497F_at; Start 64; Stop 88
aagtcacttctttgattaagcgagt

SEQ ID NO: 12667 - DNA, 25 bp, Artificial
  probe
  misc_feature (1)..(25): SEQ ID NO: 6087; WAN02497F_at; Start 44; Stop 68
tcgtcaggtcaagtacaacaaagtc

SEQ ID NO: 12668 - DNA, 25 bp, Artificial
  probe
  misc_feature (1)..(25): SEQ ID NO: 6087; WAN02497F_at; Start 1; Stop 25
cgaaaaagcatgtgtagatttcaca

SEQ ID NO: 12669 - DNA, 25 bp, Artificial
  probe
  misc_feature (1)..(25): SEQ ID NO: 6087; WAN02497F_at; Start 48; Stop 72
caggtcaagtacaacaaagtcactt

SEQ ID NO: 12670 - DNA, 25 bp, Artificial
  probe
  misc_feature (1)..(25): SEQ ID NO: 6087; WAN02497F_at; Start 93; Stop 117
taatataattataagcgccctgtca

SEQ ID NO: 12671 - DNA, 25 bp, Artificial
  probe
  misc_feature (1)..(25): SEQ ID NO: 6087; WAN02497F_at; Start 32; Stop 56
taatctccccaatcgtcaggtcaag

SEQ ID NO: 12672 - DNA, 25 bp, Artificial
  probe
  misc_feature (1)..(25): SEQ ID NO: 6087; WAN02497F_at; Start 53; Stop 77
caagtacaacaaagtcacttctttg

SEQ ID NO: 12673 - DNA, 25 bp, Artificial
  probe
  misc_feature (1)..(25): SEQ ID NO: 6087; WAN02497F_at; Start 46; Stop 70
gtcaggtcaagtacaacaaagtcac

SEQ ID NO: 12674 - DNA, 25 bp, Artificial
  probe
  misc_feature (1)..(25): SEQ ID NO: 6087; WAN02497F_at; Start 41; Stop 65
caatcgtcaggtcaagtacaacaaa

SEQ ID NO: 12675 - DNA, 25 bp, Artificial
  probe
  misc_feature (1)..(25): SEQ ID NO: 6087; WAN02497F_at; Start 3; Stop 27
aaaaagcatgtgtagatttcacatg

SEQ ID NO: 12676 - DNA, 25 bp, Artificial
  probe
  misc_feature (1)..(25): SEQ ID NO: 6087; WAN02497F_at; Start 88; Stop 112
tgttctaatataattataagcgccc

SEQ ID NO: 12677 - DNA, 25 bp, Artificial
  probe
  misc_feature (1)..(25): SEQ ID NO: 6087; WAN02497F_at; Start 29; Stop 53
ttttaatctccccaatcgtcaggtc

SEQ ID NO: 12678 - DNA, 25 bp, Artificial
  probe
  misc_feature (1)..(25): SEQ ID NO: 6087; WAN02497F_at; Start 19; Stop 43
tttcacatgcttttaatctccccaa

SEQ ID NO: 12679 - DNA, 25 bp, Artificial
  probe
  misc_feature (1)..(25): SEQ ID NO: 6087; WAN02497F_at; Start 50; Stop 74
ggtcaagtacaacaaagtcacttct

SEQ ID NO: 12680 - DNA, 25 bp, Artificial
  probe
  misc_feature (1)..(25): SEQ ID NO: 6087; WAN02497F_at; Start 30; Stop 54
tttaatctccccaatcgtcaggtca

SEQ ID NO: 12681 - DNA, 25 bp, Artificial
  probe
  misc_feature (1)..(25): SEQ ID NO: 6087; WAN02497F_at; Start 35; Stop 59
tctccccaatcgtcaggtcaagtac

SEQ ID NO: 12682 - DNA, 25 bp, Artificial
  probe
  misc_feature (1)..(25): SEQ ID NO: 6073; WAN02497G_at; Start 28; Stop 52
atcatctcgttttgatttattaaaa

SEQ ID NO: 12683 - DNA, 25 bp, Artificial
  probe
  misc_feature (1)..(25): SEQ ID NO: 6073; WAN02497G_at; Start 23; Stop 47
aattaatcatctcgttttgatttat

SEQ ID NO: 12684 - DNA, 25 bp, Artificial
  probe
  misc_feature (1)..(25): SEQ ID NO: 6073; WAN02497G_at; Start 8; Stop 32
tcttgttctactaagaattaatcat

SEQ ID NO: 12685 - DNA, 25 bp, Artificial
  probe
  misc_feature (1)..(25): SEQ ID NO: 6073; WAN02497G_at; Start 5; Stop 29
tactcttgttctactaagaattaat

SEQ ID NO: 12686 - DNA, 25 bp, Artificial
  probe
  misc_feature (1)..(25): SEQ ID NO: 6073; WAN02497G_at; Start 7; Stop 31
ctcttgttctactaagaattaatca

SEQ ID NO: 12687 - DNA, 25 bp, Artificial
  probe
  misc_feature (1)..(25): SEQ ID NO: 6073; WAN02497G_at; Start 21; Stop 45
agaattaatcatctcgttttgattt

SEQ ID NO: 12688 - DNA, 25 bp, Artificial
  probe
  misc_feature (1)..(25): SEQ ID NO: 6073; WAN02497G_at; Start 13; Stop 37
ttctactaagaattaatcatctcgt

SEQ ID NO: 12689 - DNA, 25 bp, Artificial
  probe
  misc_feature (1)..(25): SEQ ID NO: 6073; WAN02497G_at; Start 12; Stop 36
gttctactaagaattaatcatctcg

SEQ ID NO: 12690 - DNA, 25 bp, Artificial
  probe
  misc_feature (1)..(25): SEQ ID NO: 6073; WAN02497G_at; Start 17; Stop 41
actaagaattaatcatctcgttttg

SEQ ID NO: 12691 - DNA, 25 bp, Artificial
  probe
  misc_feature (1)..(25): SEQ ID NO: 6073; WAN02497G_at; Start 27; Stop 51
aatcatctcgttttgatttattaaa

SEQ ID NO: 12692 - DNA, 25 bp, Artificial
  probe
  misc_feature (1)..(25): SEQ ID NO: 6073; WAN02497G_at; Start 22; Stop 46
gaattaatcatctcgttttgattta

SEQ ID NO: 12693 - DNA, 25 bp, Artificial
  probe
  misc_feature (1)..(25): SEQ ID NO: 6073; WAN02497G_at; Start 29; Stop 53
tcatctcgttttgatttattaaaaa

SEQ ID NO: 12694 - DNA, 25 bp, Artificial
  probe
  misc_feature (1)..(25): SEQ ID NO: 6073; WAN02497G_at; Start 14; Stop 38
tctactaagaattaatcatctcgtt

SEQ ID NO: 12695 - DNA, 25 bp, Artificial
  probe
  misc_feature (1)..(25): SEQ ID NO: 6073; WAN02497G_at; Start 19; Stop 43
taagaattaatcatctcgttttgat

SEQ ID NO: 12696 - DNA, 25 bp, Artificial
  probe
  misc_feature (1)..(25): SEQ ID NO: 6073; WAN02497G_at; Start 15; Stop 39
ctactaagaattaatcatctcgttt

SEQ ID NO: 12697 - DNA, 25 bp, Artificial
  probe
  misc_feature (1)..(25): SEQ ID NO: 6073; WAN02497G_at; Start 20; Stop 44
aagaattaatcatctcgttttgatt

SEQ ID NO: 12698 - DNA, 25 bp, Artificial
  probe
  misc_feature (1)..(25): SEQ ID NO: 6073; WAN02497G_at; Start 4; Stop 28
ttactcttgttctactaagaattaa

SEQ ID NO: 12699 - DNA, 25 bp, Artificial
  probe
  misc_feature (1)..(25): SEQ ID NO: 6073; WAN02497G_at; Start 11; Stop 35
tgttctactaagaattaatcatctc

SEQ ID NO: 12700 - DNA, 25 bp, Artificial
  probe
  misc_feature (1)..(25): SEQ ID NO: 6073; WAN02497G_at; Start 6; Stop 30
actcttgttctactaagaattaatc

SEQ ID NO: 12701 - DNA, 25 bp, Artificial
  probe
  misc_feature (1)..(25): SEQ ID NO: 6073; WAN02497G_at; Start 1; Stop 25
attttactcttgttctactaagaat

SEQ ID NO: 12702 - DNA, 25 bp, Artificial
  probe
  misc_feature (1)..(25): SEQ ID NO: 6073; WAN02497G_at; Start 3; Stop 27
tttactcttgttctactaagaatta

SEQ ID NO: 12703 - DNA, 25 bp, Artificial
  probe
  misc_feature (1)..(25): SEQ ID NO: 6073; WAN02497G_at; Start 18; Stop 42
ctaagaattaatcatctcgttttga

SEQ ID NO: 12704 - DNA, 25 bp, Artificial
  probe
  misc_feature (1)..(25): SEQ ID NO: 6073; WAN02497G_at; Start 30; Stop 54
catctcgttttgatttattaaaaat

SEQ ID NO: 12705 - DNA, 25 bp, Artificial
  probe
  misc_feature (1)..(25): SEQ ID NO: 6073; WAN02497G_at; Start 16; Stop 40
tactaagaattaatcatctcgtttt

SEQ ID NO: 12706 - DNA, 25 bp, Artificial
  probe
  misc_feature (1)..(25): SEQ ID NO: 6073; WAN02497G_at; Start 9; Stop 33
cttgttctactaagaattaatcatc

SEQ ID NO: 12707 - DNA, 25 bp, Artificial
  probe
  misc_feature (1)..(25): SEQ ID NO: 6073; WAN02497G_at; Start 10; Stop 34
ttgttctactaagaattaatcatct

SEQ ID NO: 12708 - DNA, 25 bp, Artificial
  probe
  misc_feature (1)..(25): SEQ ID NO: 6073; WAN02497G_at; Start 26; Stop 50
taatcatctcgttttgatttattaa

SEQ ID NO: 12709 - DNA, 25 bp, Artificial
  probe
  misc_feature (1)..(25): SEQ ID NO: 6131; WAN02497H_at; Start 66; Stop 90
tatccttgataattttaatgtatct

SEQ ID NO: 12710 - DNA, 25 bp, Artificial
  probe
  misc_feature (1)..(25): SEQ ID NO: 6131; WAN02497H_at; Start 40; Stop 64
ctctcgacaatacatgatacattat

SEQ ID NO: 12711 - DNA, 25 bp, Artificial
  probe
  misc_feature (1)..(25): SEQ ID NO: 6131; WAN02497H_at; Start 25; Stop 49
ttttaatagttaactctctcgacaa

SEQ ID NO: 12712 - DNA, 25 bp, Artificial
  probe
  misc_feature (1)..(25): SEQ ID NO: 6131; WAN02497H_at; Start 52; Stop 76
catgatacattatatatccttgata

SEQ ID NO: 12713 - DNA, 25 bp, Artificial
  probe
  misc_feature (1)..(25): SEQ ID NO: 6131; WAN02497H_at; Start 21; Stop 45
gctgttttaatagttaactctctcg

SEQ ID NO: 12714 - DNA, 25 bp, Artificial
  probe
  misc_feature (1)..(25): SEQ ID NO: 6131; WAN02497H_at; Start 36; Stop 60
aactctctcgacaatacatgataca

SEQ ID NO: 12715 - DNA, 25 bp, Artificial
  probe
  misc_feature (1)..(25): SEQ ID NO: 6131; WAN02497H_at; Start 44; Stop 68
cgacaatacatgatacattatatat

SEQ ID NO: 12716 - DNA, 25 bp, Artificial
  probe
  misc_feature (1)..(25): SEQ ID NO: 6131; WAN02497H_at; Start 26; Stop 50
tttaatagttaactctctcgacaat

SEQ ID NO: 12717 - DNA, 25 bp, Artificial
  probe
  misc_feature (1)..(25): SEQ ID NO: 6131; WAN02497H_at; Start 31; Stop 55
tagttaactctctcgacaatacatg

SEQ ID NO: 12718 - DNA, 25 bp, Artificial
  probe
  misc_feature (1)..(25): SEQ ID NO: 6131; WAN02497H_at; Start 34; Stop 58
ttaactctctcgacaatacatgata

SEQ ID NO: 12719 - DNA, 25 bp, Artificial
  probe
  misc_feature (1)..(25): SEQ ID NO: 6131; WAN02497H_at; Start 27; Stop 51
ttaatagttaactctctcgacaata

SEQ ID NO: 12720 - DNA, 25 bp, Artificial
  probe
  misc_feature (1)..(25): SEQ ID NO: 6131; WAN02497H_at; Start 33; Stop 57
gttaactctctcgacaatacatgat

SEQ ID NO: 12721 - DNA, 25 bp, Artificial
  probe
  misc_feature (1)..(25): SEQ ID NO: 6131; WAN02497H_at; Start 20; Stop 44
tgctgttttaatagttaactctctc

SEQ ID NO: 12722 - DNA, 25 bp, Artificial
  probe
  misc_feature (1)..(25): SEQ ID NO: 6131; WAN02497H_at; Start 54; Stop 78
tgatacattatatatccttgataat

SEQ ID NO: 12723 - DNA, 25 bp, Artificial
  probe
  misc_feature (1)..(25): SEQ ID NO: 6131; WAN02497H_at; Start 43; Stop 67
tcgacaatacatgatacattatata

SEQ ID NO: 12724 - DNA, 25 bp, Artificial
  probe
  misc_feature (1)..(25): SEQ ID NO: 6131; WAN02497H_at; Start 3; Stop 27
cccctccttattttatatgctgttt

SEQ ID NO: 12725 - DNA, 25 bp, Artificial
  probe
  misc_feature (1)..(25): SEQ ID NO: 6131; WAN02497H_at; Start 32; Stop 56
agttaactctctcgacaatacatga

SEQ ID NO: 12726 - DNA, 25 bp, Artificial
  probe
  misc_feature (1)..(25): SEQ ID NO: 6131; WAN02497H_at; Start 5; Stop 29
cctccttattttatatgctgtttta

SEQ ID NO: 12727 - DNA, 25 bp, Artificial
  probe
  misc_feature (1)..(25): SEQ ID NO: 6131; WAN02497H_at; Start 42; Stop 66
ctcgacaatacatgatacattatat

SEQ ID NO: 12728 - DNA, 25 bp, Artificial
  probe
  misc_feature (1)..(25): SEQ ID NO: 6131; WAN02497H_at; Start 39; Stop 63
tctctcgacaatacatgatacatta

SEQ ID NO: 12729 - DNA, 25 bp, Artificial
  probe
  misc_feature (1)..(25): SEQ ID NO: 6131; WAN02497H_at; Start 22; Stop 46
ctgttttaatagttaactctctcga

SEQ ID NO: 12730 - DNA, 25 bp, Artificial
  probe
  misc_feature (1)..(25): SEQ ID NO: 6131; WAN02497H_at; Start 41; Stop 65
tctcgacaatacatgatacattata

SEQ ID NO: 12731 - DNA, 25 bp, Artificial
  probe
  misc_feature (1)..(25): SEQ ID NO: 6131; WAN02497H_at; Start 50; Stop 74
tacatgatacattatatatccttga

SEQ ID NO: 12732 - DNA, 25 bp, Artificial
  probe
  misc_feature (1)..(25): SEQ ID NO: 6131; WAN02497H_at; Start 38; Stop 62
ctctctcgacaatacatgatacatt

SEQ ID NO: 12733 - DNA, 25 bp, Artificial
  probe
  misc_feature (1)..(25): SEQ ID NO: 6131; WAN02497H_at; Start 24; Stop 48
gttttaatagttaactctctcgaca

SEQ ID NO: 12734 - DNA, 25 bp, Artificial
  probe
  misc_feature (1)..(25): SEQ ID NO: 6131; WAN02497H_at; Start 23; Stop 47
tgttttaatagttaactctctcgac

SEQ ID NO: 12735 - DNA, 25 bp, Artificial
  probe
  misc_feature (1)..(25): SEQ ID NO: 6131; WAN02497H_at; Start 28; Stop 52
taatagttaactctctcgacaatac

SEQ ID NO: 12736 - DNA, 25 bp, Artificial
  probe
  misc_feature (1)..(25): SEQ ID NO: 6131; WAN02497H_at; Start 30; Stop 54
atagttaactctctcgacaatacat

SEQ ID NO: 12737 - DNA, 25 bp, Artificial
  probe
  misc_feature (1)..(25): SEQ ID NO: 6131; WAN02497H_at; Start 29; Stop 53
aatagttaactctctcgacaataca

SEQ ID NO: 12738 - DNA, 25 bp, Artificial
  probe
  misc_feature (1)..(25): SEQ ID NO: 6131; WAN02497H_at; Start 37; Stop 61
actctctcgacaatacatgatacat

SEQ ID NO: 12739 - DNA, 25 bp, Artificial
  probe
  misc_feature (1)..(25): SEQ ID NO: 6131; WAN02497H_at; Start 35; Stop 59
taactctctcgacaatacatgatac

SEQ ID NO: 12740 - DNA, 25 bp, Artificial
  probe
  misc_feature (1)..(25): SEQ ID NO: 6131; WAN02497H_at; Start 16; Stop 40
tatatgctgttttaatagttaactc

SEQ ID NO: 12741 - DNA, 25 bp, Artificial
  probe
  misc_feature (1)..(25): SEQ ID NO: 6131; WAN02497H_at; Start 47; Stop 71
caatacatgatacattatatatcct

SEQ ID NO: 12742 - DNA, 25 bp, Artificial
  probe
  misc_feature (1)..(25): SEQ ID NO: 6131; WAN02497H_at; Start 18; Stop 42
tatgctgttttaatagttaactctc

SEQ ID NO: 12743 - DNA, 25 bp, Artificial
  probe
  misc_feature (1)..(25): SEQ ID NO: 6193; WAN02497I_at; Start 113; Stop 137
gataaaacttttctccatctaaaca

SEQ ID NO: 12744 - DNA, 25 bp, Artificial
  probe
  misc_feature (1)..(25): SEQ ID NO: 6193; WAN02497I_at; Start 297; Stop 321
aatgccagagttatattgtagtccc

SEQ ID NO: 12745 - DNA, 25 bp, Artificial
  probe
  misc_feature (1)..(25): SEQ ID NO: 6193; WAN02497I_at; Start 284; Stop 308
tatgctctgtaagaatgccagagtt

SEQ ID NO: 12746 - DNA, 25 bp, Artificial
  probe
  misc_feature (1)..(25): SEQ ID NO: 6193; WAN02497I_at; Start 300; Stop 324
gccagagttatattgtagtcccctt

SEQ ID NO: 12747 - DNA, 25 bp, Artificial
  probe
  misc_feature (1)..(25): SEQ ID NO: 6193; WAN02497I_at; Start 252; Stop 276
gcaatcagtacataagctaataaac

SEQ ID NO: 12748 - DNA, 25 bp, Artificial
  probe
  misc_feature (1)..(25): SEQ ID NO: 6193; WAN02497I_at; Start 21; Stop 45
taaatcaggcagtacatgcaactac

SEQ ID NO: 12749 - DNA, 25 bp, Artificial
  probe
  misc_feature (1)..(25): SEQ ID NO: 6193; WAN02497I_at; Start 278; Stop 302
gataagtatgctctgtaagaatgcc

SEQ ID NO: 12750 - DNA, 25 bp, Artificial
  probe
  misc_feature (1)..(25): SEQ ID NO: 6193; WAN02497I_at; Start 35; Stop 59
catgcaactacagaaactcaatata

SEQ ID NO: 12751 - DNA, 25 bp, Artificial
  probe
  misc_feature (1)..(25): SEQ ID NO: 6193; WAN02497I_at; Start 169; Stop 193
tcaataatgaattagaaggtccagt

SEQ ID NO: 12752 - DNA, 25 bp, Artificial
  probe
  misc_feature (1)..(25): SEQ ID NO: 6193; WAN02497I_at; Start 53; Stop 77
caatatatatttggtcactcaatga

SEQ ID NO: 12753 - DNA, 25 bp, Artificial
  probe
  misc_feature (1)..(25): SEQ ID NO: 6193; WAN02497I_at; Start 209; Stop 233
aatagaccgaatattatttgaagac

SEQ ID NO: 12754 - DNA, 25 bp, Artificial
  probe
  misc_feature (1)..(25): SEQ ID NO: 6193; WAN02497I_at; Start 314; Stop 338
gtagtccccttccatactatattca

SEQ ID NO: 12755 - DNA, 25 bp, Artificial
  probe
  misc_feature (1)..(25): SEQ ID NO: 6193; WAN02497I_at; Start 102; Stop 126
cctctacgtcagataaaacttttct

SEQ ID NO: 12756 - DNA, 25 bp, Artificial
  probe
  misc_feature (1)..(25): SEQ ID NO: 6193; WAN02497I_at; Start 147; Stop 171
tgtttcagtaatatatgagttctca

SEQ ID NO: 12757 - DNA, 25 bp, Artificial
  probe
  misc_feature (1)..(25): SEQ ID NO: 6193; WAN02497I_at; Start 60; Stop 84
tatttggtcactcaatgattttcag

SEQ ID NO: 12758 - DNA, 25 bp, Artificial
  probe
  misc_feature (1)..(25): SEQ ID NO: 6193; WAN02497I_at; Start 173; Stop 197
taatgaattagaaggtccagttcaa

SEQ ID NO: 12759 - DNA, 25 bp, Artificial
  probe
  misc_feature (1)..(25): SEQ ID NO: 6193; WAN02497I_at; Start 220; Stop 244
tattatttgaagacatatcggtttc

SEQ ID NO: 12760 - DNA, 25 bp, Artificial
  probe
  misc_feature (1)..(25): SEQ ID NO: 6193; WAN02497I_at; Start 16; Stop 40
caaattaaatcaggcagtacatgca

SEQ ID NO: 12761 - DNA, 25 bp, Artificial
  probe
  misc_feature (1)..(25): SEQ ID NO: 6193; WAN02497I_at; Start 5; Stop 29
tttccatttgacaaattaaatcagg

SEQ ID NO: 12762 - DNA, 25 bp, Artificial
  probe
  misc_feature (1)..(25): SEQ ID NO: 6193; WAN02497I_at; Start 25; Stop 49
tcaggcagtacatgcaactacagaa

SEQ ID NO: 12763 - DNA, 25 bp, Artificial
  probe
  misc_feature (1)..(25): SEQ ID NO: 6193; WAN02497I_at; Start 28; Stop 52
ggcagtacatgcaactacagaaact

SEQ ID NO: 12764 - DNA, 25 bp, Artificial
  probe
  misc_feature (1)..(25): SEQ ID NO: 6193; WAN02497I_at; Start 267; Stop 291
gctaataaactgataagtatgctct

SEQ ID NO: 12765 - DNA, 25 bp, Artificial
  probe
  misc_feature (1)..(25): SEQ ID NO: 6193; WAN02497I_at; Start 304; Stop 328
gagttatattgtagtccccttccat

SEQ ID NO: 12766 - DNA, 25 bp, Artificial
  probe
  misc_feature (1)..(25): SEQ ID NO: 6193; WAN02497I_at; Start 124; Stop 148
tctccatctaaacaaaatttatttg

SEQ ID NO: 12767 - DNA, 25 bp, Artificial
  probe
  misc_feature (1)..(25): SEQ ID NO: 6193; WAN02497I_at; Start 90; Stop 114
taattcttttatcctctacgtcaga

SEQ ID NO: 12768 - DNA, 25 bp, Artificial
  probe
  misc_feature (1)..(25): SEQ ID NO: 6193; WAN02497I_at; Start 195; Stop 219
caattattcttccaaatagaccgaa

SEQ ID NO: 12769 - DNA, 25 bp, Artificial
  probe
  misc_feature (1)..(25): SEQ ID NO: 6193; WAN02497I_at; Start 160; Stop 184
tatgagttctcaataatgaattaga

SEQ ID NO: 12770 - DNA, 25 bp, Artificial
  probe
  misc_feature (1)..(25): SEQ ID NO: 6193; WAN02497I_at; Start 235; Stop 259
tatcggtttctgaaattgcaatcag

SEQ ID NO: 12771 - DNA, 25 bp, Artificial
  probe
  misc_feature (1)..(25): SEQ ID NO: 6193; WAN02497I_at; Start 186; Stop 210
ggtccagttcaattattcttccaaa

SEQ ID NO: 12772 - DNA, 25 bp, Artificial
  probe
  misc_feature (1)..(25): SEQ ID NO: 6193; WAN02497I_at; Start 229; Stop 253
aagacatatcggtttctgaaattgc

SEQ ID NO: 12773 - DNA, 25 bp, Artificial
  probe
  misc_feature (1)..(25): SEQ ID NO: 6193; WAN02497I_at; Start 45; Stop 69
cagaaactcaatatatatttggtca

SEQ ID NO: 12774 - DNA, 25 bp, Artificial
  probe
  misc_feature (1)..(25): SEQ ID NO: 6193; WAN02497I_at; Start 65; Stop 89
ggtcactcaatgattttcagaaata

SEQ ID NO: 12775 - DNA, 25 bp, Artificial
  probe
  misc_feature (1)..(25): SEQ ID NO: 6193; WAN02497I_at; Start 280; Stop 304
taagtatgctctgtaagaatgccag

SEQ ID NO: 12776 - DNA, 25 bp, Artificial
  probe
  misc_feature (1)..(25): SEQ ID NO: 6193; WAN02497I_at; Start 246; Stop 270
gaaattgcaatcagtacataagcta

SEQ ID NO: 12777 - DNA, 25 bp, Artificial
  probe
  misc_feature (1)..(25): SEQ ID NO: 6076; WAN02497J_at; Start 53; Stop 77
cacaaaaggaaacatcaacaagcct

SEQ ID NO: 12778 - DNA, 25 bp, Artificial
  probe
  misc_feature (1)..(25): SEQ ID NO: 6076; WAN02497J_at; Start 71; Stop 95
caagcctttacatgccgactatctg

SEQ ID NO: 12779 - DNA, 25 bp, Artificial
  probe
  misc_feature (1)..(25): SEQ ID NO: 6076; WAN02497J_at; Start 85; Stop 109
ccgactatctgaacaataaaatgaa

SEQ ID NO: 12780 - DNA, 25 bp, Artificial
  probe
  misc_feature (1)..(25): SEQ ID NO: 6076; WAN02497J_at; Start 60; Stop 84
ggaaacatcaacaagcctttacatg

SEQ ID NO: 12781 - DNA, 25 bp, Artificial
  probe
  misc_feature (1)..(25): SEQ ID NO: 6076; WAN02497J_at; Start 41; Stop 65
tacatatatcgacacaaaaggaaac

SEQ ID NO: 12782 - DNA, 25 bp, Artificial
  probe
  misc_feature (1)..(25): SEQ ID NO: 6076; WAN02497J_at; Start 49; Stop 73
tcgacacaaaaggaaacatcaacaa

SEQ ID NO: 12783 - DNA, 25 bp, Artificial
  probe
  misc_feature (1)..(25): SEQ ID NO: 6076; WAN02497J_at; Start 55; Stop 79
caaaaggaaacatcaacaagccttt

SEQ ID NO: 12784 - DNA, 25 bp, Artificial
  probe
  misc_feature (1)..(25): SEQ ID NO: 6076; WAN02497J_at; Start 79; Stop 103
tacatgccgactatctgaacaataa

SEQ ID NO: 12785 - DNA, 25 bp, Artificial
  probe
  misc_feature (1)..(25): SEQ ID NO: 6076; WAN02497J_at; Start 30; Stop 54
caatttgtttttacatatatcgaca

SEQ ID NO: 12786 - DNA, 25 bp, Artificial
  probe
  misc_feature (1)..(25): SEQ ID NO: 6076; WAN02497J_at; Start 109; Stop 133
aaagcattagaaagccgacataaag

SEQ ID NO: 12787 - DNA, 25 bp, Artificial
  probe
  misc_feature (1)..(25): SEQ ID NO: 6076; WAN02497J_at; Start 106; Stop 130
tgaaaagcattagaaagccgacata

SEQ ID NO: 12788 - DNA, 25 bp, Artificial
  probe
  misc_feature (1)..(25): SEQ ID NO: 6076; WAN02497J_at; Start 81; Stop 105
catgccgactatctgaacaataaaa

SEQ ID NO: 12789 - DNA, 25 bp, Artificial
  probe
  misc_feature (1)..(25): SEQ ID NO: 6076; WAN02497J_at; Start 72; Stop 96
aagcctttacatgccgactatctga

SEQ ID NO: 12790 - DNA, 25 bp, Artificial
  probe
  misc_feature (1)..(25): SEQ ID NO: 6076; WAN02497J_at; Start 47; Stop 71
tatcgacacaaaaggaaacatcaac

SEQ ID NO: 12791 - DNA, 25 bp, Artificial
  probe
  misc_feature (1)..(25): SEQ ID NO: 6076; WAN02497J_at; Start 64; Stop 88
acatcaacaagcctttacatgccga

SEQ ID NO: 12792 - DNA, 25 bp, Artificial
  probe
  misc_feature (1)..(25): SEQ ID NO: 6076; WAN02497J_at; Start 75; Stop 99
cctttacatgccgactatctgaaca

SEQ ID NO: 12793 - DNA, 25 bp, Artificial
  probe
  misc_feature (1)..(25): SEQ ID NO: 6076; WAN02497J_at; Start 45; Stop 69
tatatcgacacaaaaggaaacatca

SEQ ID NO: 12794 - DNA, 25 bp, Artificial
  probe
  misc_feature (1)..(25): SEQ ID NO: 6076; WAN02497J_at; Start 107; Stop 131
gaaaagcattagaaagccgacataa

SEQ ID NO: 12795 - DNA, 25 bp, Artificial
  probe
  misc_feature (1)..(25): SEQ ID NO: 6076; WAN02497J_at; Start 68; Stop 92
caacaagcctttacatgccgactat

SEQ ID NO: 12796 - DNA, 25 bp, Artificial
  probe
  misc_feature (1)..(25): SEQ ID NO: 6076; WAN02497J_at; Start 38; Stop 62
ttttacatatatcgacacaaaagga

SEQ ID NO: 12797 - DNA, 25 bp, Artificial
  probe
  misc_feature (1)..(25): SEQ ID NO: 6076; WAN02497J_at; Start 20; Stop 44
taatccagaacaatttgtttttaca

SEQ ID NO: 12798 - DNA, 25 bp, Artificial
  probe
  misc_feature (1)..(25): SEQ ID NO: 6076; WAN02497J_at; Start 101; Stop 125
taaaatgaaaagcattagaaagccg

SEQ ID NO: 12799 - DNA, 25 bp, Artificial
  probe
  misc_feature (1)..(25): SEQ ID NO: 6076; WAN02497J_at; Start 69; Stop 93
aacaagcctttacatgccgactatc

SEQ ID NO: 12800 - DNA, 25 bp, Artificial
  probe
  misc_feature (1)..(25): SEQ ID NO: 6076; WAN02497J_at; Start 77; Stop 101
tttacatgccgactatctgaacaat

SEQ ID NO: 12801 - DNA, 25 bp, Artificial
  probe
  misc_feature (1)..(25): SEQ ID NO: 6076; WAN02497J_at; Start 90; Stop 114
tatctgaacaataaaatgaaaagca

SEQ ID NO: 12802 - DNA, 25 bp, Artificial
  probe
  misc_feature (1)..(25): SEQ ID NO: 6076; WAN02497J_at; Start 65; Stop 89
catcaacaagcctttacatgccgac

SEQ ID NO: 12803 - DNA, 25 bp, Artificial
  probe
  misc_feature (1)..(25): SEQ ID NO: 6076; WAN02497J_at; Start 110; Stop 134
aagcattagaaagccgacataaaga

SEQ ID NO: 12804 - DNA, 25 bp, Artificial
  probe
  misc_feature (1)..(25): SEQ ID NO: 6076; WAN02497J_at; Start 104; Stop 128
aatgaaaagcattagaaagccgaca

SEQ ID NO: 12805 - DNA, 25 bp, Artificial
  probe
  misc_feature (1)..(25): SEQ ID NO: 6076; WAN02497J_at; Start 61; Stop 85
gaaacatcaacaagcctttacatgc

SEQ ID NO: 12806 - DNA, 25 bp, Artificial
  probe
  misc_feature (1)..(25): SEQ ID NO: 6076; WAN02497J_at; Start 67; Stop 91
tcaacaagcctttacatgccgacta

SEQ ID NO: 12807 - DNA, 25 bp, Artificial
  probe
  misc_feature (1)..(25): SEQ ID NO: 6076; WAN02497J_at; Start 43; Stop 67
catatatcgacacaaaaggaaacat

SEQ ID NO: 12808 - DNA, 25 bp, Artificial
  probe
  misc_feature (1)..(25): SEQ ID NO: 6076; WAN02497J_at; Start 83; Stop 107
tgccgactatctgaacaataaaatg

SEQ ID NO: 12809 - DNA, 25 bp, Artificial
  probe
  misc_feature (1)..(25): SEQ ID NO: 6076; WAN02497J_at; Start 92; Stop 116
tctgaacaataaaatgaaaagcatt

SEQ ID NO: 12810 - DNA, 25 bp, Artificial
  probe
  misc_feature (1)..(25): SEQ ID NO: 6076; WAN02497J_at; Start 51; Stop 75
gacacaaaaggaaacatcaacaagc

SEQ ID NO: 12811 - DNA, 25 bp, Artificial
  probe
  misc_feature (1)..(25): SEQ ID NO: 6023; WAN02497K_at; Start 58; Stop 82
gacggcgttttgagcagacttcaat

SEQ ID NO: 12812 - DNA, 25 bp, Artificial
  probe
  misc_feature (1)..(25): SEQ ID NO: 6023; WAN02497K_at; Start 61; Stop 85
ggcgttttgagcagacttcaattgt

SEQ ID NO: 12813 - DNA, 25 bp, Artificial
  probe
  misc_feature (1)..(25): SEQ ID NO: 6023; WAN02497K_at; Start 9; Stop 33
ctagaaagctaggctcctaaaaggg

SEQ ID NO: 12814 - DNA, 25 bp, Artificial
  probe
  misc_feature (1)..(25): SEQ ID NO: 6023; WAN02497K_at; Start 8; Stop 32
actagaaagctaggctcctaaaagg

SEQ ID NO: 12815 - DNA, 25 bp, Artificial
  probe
  misc_feature (1)..(25): SEQ ID NO: 6023; WAN02497K_at; Start 11; Stop 35
agaaagctaggctcctaaaagggag

SEQ ID NO: 12816 - DNA, 25 bp, Artificial
  probe
  misc_feature (1)..(25): SEQ ID NO: 6023; WAN02497K_at; Start 10; Stop 34
tagaaagctaggctcctaaaaggga

SEQ ID NO: 12817 - DNA, 25 bp, Artificial
  probe
  misc_feature (1)..(25): SEQ ID NO: 6023; WAN02497K_at; Start 59; Stop 83
acggcgttttgagcagacttcaatt

SEQ ID NO: 12818 - DNA, 25 bp, Artificial
  probe
  misc_feature (1)..(25): SEQ ID NO: 6023; WAN02497K_at; Start 15; Stop 39
agctaggctcctaaaagggagaaag

SEQ ID NO: 12819 - DNA, 25 bp, Artificial
  probe
  misc_feature (1)..(25): SEQ ID NO: 6023; WAN02497K_at; Start 60; Stop 84
cggcgttttgagcagacttcaattg

SEQ ID NO: 12820 - DNA, 25 bp, Artificial
  probe
  misc_feature (1)..(25): SEQ ID NO: 6023; WAN02497K_at; Start 12; Stop 36
gaaagctaggctcctaaaagggaga

SEQ ID NO: 12821 - DNA, 25 bp, Artificial
  probe
  misc_feature (1)..(25): SEQ ID NO: 6206; WAN02497L_at; Start 25; Stop 49
tgtatataataaaaggctactgcct

SEQ ID NO: 12822 - DNA, 25 bp, Artificial
  probe
  misc_feature (1)..(25): SEQ ID NO: 6206; WAN02497L_at; Start 64; Stop 88
atccagtaacctttcatatattgcc

SEQ ID NO: 12823 - DNA, 25 bp, Artificial
  probe
  misc_feature (1)..(25): SEQ ID NO: 6206; WAN02497L_at; Start 37; Stop 61
aaggctactgcctgcataatttaaa

SEQ ID NO: 12824 - DNA, 25 bp, Artificial
  probe
  misc_feature (1)..(25): SEQ ID NO: 6206; WAN02497L_at; Start 50; Stop 74
gcataatttaaaacatccagtaacc

SEQ ID NO: 12825 - DNA, 25 bp, Artificial
  probe
  misc_feature (1)..(25): SEQ ID NO: 6206; WAN02497L_at; Start 73; Stop 97
cctttcatatattgccataagttta

SEQ ID NO: 12826 - DNA, 25 bp, Artificial
  probe
  misc_feature (1)..(25): SEQ ID NO: 6206; WAN02497L_at; Start 31; Stop 55
taataaaaggctactgcctgcataa

SEQ ID NO: 12827 - DNA, 25 bp, Artificial
  probe
  misc_feature (1)..(25): SEQ ID NO: 6206; WAN02497L_at; Start 29; Stop 53
tataataaaaggctactgcctgcat

SEQ ID NO: 12828 - DNA, 25 bp, Artificial
  probe
  misc_feature (1)..(25): SEQ ID NO: 6206; WAN02497L_at; Start 78; Stop 102
catatattgccataagtttaaatta

SEQ ID NO: 12829 - DNA, 25 bp, Artificial
  probe
  misc_feature (1)..(25): SEQ ID NO: 6206; WAN02497L_at; Start 47; Stop 71
cctgcataatttaaaacatccagta

SEQ ID NO: 12830 - DNA, 25 bp, Artificial
  probe
  misc_feature (1)..(25): SEQ ID NO: 6206; WAN02497L_at; Start 32; Stop 56
aataaaaggctactgcctgcataat

SEQ ID NO: 12831 - DNA, 25 bp, Artificial
  probe
  misc_feature (1)..(25): SEQ ID NO: 6206; WAN02497L_at; Start 2; Stop 26
gtattatccttactttatccatttg

SEQ ID NO: 12832 - DNA, 25 bp, Artificial
  probe
  misc_feature (1)..(25): SEQ ID NO: 6206; WAN02497L_at; Start 70; Stop 94
taacctttcatatattgccataagt

SEQ ID NO: 12833 - DNA, 25 bp, Artificial
  probe
  misc_feature (1)..(25): SEQ ID NO: 6206; WAN02497L_at; Start 38; Stop 62
aggctactgcctgcataatttaaaa

SEQ ID NO: 12834 - DNA, 25 bp, Artificial
  probe
  misc_feature (1)..(25): SEQ ID NO: 6206; WAN02497L_at; Start 66; Stop 90
ccagtaacctttcatatattgccat

SEQ ID NO: 12835 - DNA, 25 bp, Artificial
  probe
  misc_feature (1)..(25): SEQ ID NO: 6206; WAN02497L_at; Start 36; Stop 60
aaaggctactgcctgcataatttaa

SEQ ID NO: 12836 - DNA, 25 bp, Artificial
  probe
  misc_feature (1)..(25): SEQ ID NO: 6206; WAN02497L_at; Start 63; Stop 87
catccagtaacctttcatatattgc

SEQ ID NO: 12837 - DNA, 25 bp, Artificial
  probe
  misc_feature (1)..(25): SEQ ID NO: 6206; WAN02497L_at; Start 39; Stop 63
ggctactgcctgcataatttaaaac

SEQ ID NO: 12838 - DNA, 25 bp, Artificial
  probe
  misc_feature (1)..(25): SEQ ID NO: 6206; WAN02497L_at; Start 42; Stop 66
tactgcctgcataatttaaaacatc

SEQ ID NO: 12839 - DNA, 25 bp, Artificial
  probe
  misc_feature (1)..(25): SEQ ID NO: 6206; WAN02497L_at; Start 27; Stop 51
tatataataaaaggctactgcctgc

SEQ ID NO: 12840 - DNA, 25 bp, Artificial
  probe
  misc_feature (1)..(25): SEQ ID NO: 6206; WAN02497L_at; Start 58; Stop 82
taaaacatccagtaacctttcatat

SEQ ID NO: 12841 - DNA, 25 bp, Artificial
  probe
  misc_feature (1)..(25): SEQ ID NO: 6206; WAN02497L_at; Start 69; Stop 93
gtaacctttcatatattgccataag

SEQ ID NO: 12842 - DNA, 25 bp, Artificial
  probe
  misc_feature (1)..(25): SEQ ID NO: 6206; WAN02497L_at; Start 45; Stop 69
tgcctgcataatttaaaacatccag

SEQ ID NO: 12843 - DNA, 25 bp, Artificial
  probe
  misc_feature (1)..(25): SEQ ID NO: 6206; WAN02497L_at; Start 17; Stop 41
tatccatttgtatataataaaaggc

SEQ ID NO: 12844 - DNA, 25 bp, Artificial
  probe
  misc_feature (1)..(25): SEQ ID NO: 6206; WAN02497L_at; Start 24; Stop 48
ttgtatataataaaaggctactgcc

SEQ ID NO: 12845 - DNA, 25 bp, Artificial
  probe
  misc_feature (1)..(25): SEQ ID NO: 6206; WAN02497L_at; Start 43; Stop 67
actgcctgcataatttaaaacatcc

SEQ ID NO: 12846 - DNA, 25 bp, Artificial
  probe
  misc_feature (1)..(25): SEQ ID NO: 6206; WAN02497L_at; Start 40; Stop 64
gctactgcctgcataatttaaaaca

SEQ ID NO: 12847 - DNA, 25 bp, Artificial
  probe
  misc_feature (1)..(25): SEQ ID NO: 6206; WAN02497L_at; Start 51; Stop 75
cataatttaaaacatccagtaacct

SEQ ID NO: 12848 - DNA, 25 bp, Artificial
  probe
  misc_feature (1)..(25): SEQ ID NO: 6206; WAN02497L_at; Start 46; Stop 70
gcctgcataatttaaaacatccagt

SEQ ID NO: 12849 - DNA, 25 bp, Artificial
  probe
  misc_feature (1)..(25): SEQ ID NO: 6206; WAN02497L_at; Start 34; Stop 58
taaaaggctactgcctgcataattt

SEQ ID NO: 12850 - DNA, 25 bp, Artificial
  probe
  misc_feature (1)..(25): SEQ ID NO: 6206; WAN02497L_at; Start 49; Stop 73
tgcataatttaaaacatccagtaac

SEQ ID NO: 12851 - DNA, 25 bp, Artificial
  probe
  misc_feature (1)..(25): SEQ ID NO: 6206; WAN02497L_at; Start 26; Stop 50
gtatataataaaaggctactgcctg

SEQ ID NO: 12852 - DNA, 25 bp, Artificial
  probe
  misc_feature (1)..(25): SEQ ID NO: 6206; WAN02497L_at; Start 67; Stop 91
cagtaacctttcatatattgccata

SEQ ID NO: 12853 - DNA, 25 bp, Artificial
  probe
  misc_feature (1)..(25): SEQ ID NO: 6206; WAN02497L_at; Start 65; Stop 89
tccagtaacctttcatatattgcca

SEQ ID NO: 12854 - DNA, 25 bp, Artificial
  probe
  misc_feature (1)..(25): SEQ ID NO: 6206; WAN02497L_at; Start 20; Stop 44
ccatttgtatataataaaaggctac

SEQ ID NO: 12855 - DNA, 25 bp, Artificial
  probe
  misc_feature (1)..(25): SEQ ID NO: 6139; WAN02497M_at; Start 2; Stop 26
gttccttgccatgggctataaaata

SEQ ID NO: 12856 - DNA, 25 bp, Artificial
  probe
  misc_feature (1)..(25): SEQ ID NO: 6139; WAN02497M_at; Start 16; Stop 40
gctataaaatagtgtttaataagga

SEQ ID NO: 12857 - DNA, 25 bp, Artificial
  probe
  misc_feature (1)..(25): SEQ ID NO: 6139; WAN02497M_at; Start 53; Stop 77
gatcacaaccttgtataactgaaaa

SEQ ID NO: 12858 - DNA, 25 bp, Artificial
  probe
  misc_feature (1)..(25): SEQ ID NO: 6139; WAN02497M_at; Start 38; Stop 62
ggatatacaggaagtgatcacaacc

SEQ ID NO: 12859 - DNA, 25 bp, Artificial
  probe
  misc_feature (1)..(25): SEQ ID NO: 6139; WAN02497M_at; Start 41; Stop 65
tatacaggaagtgatcacaaccttg

SEQ ID NO: 12860 - DNA, 25 bp, Artificial
  probe
  misc_feature (1)..(25): SEQ ID NO: 6139; WAN02497M_at; Start 59; Stop 83
aaccttgtataactgaaaaggagag

SEQ ID NO: 12861 - DNA, 25 bp, Artificial
  probe
  misc_feature (1)..(25): SEQ ID NO: 6139; WAN02497M_at; Start 61; Stop 85
ccttgtataactgaaaaggagagaa

SEQ ID NO: 12862 - DNA, 25 bp, Artificial
  probe
  misc_feature (1)..(25): SEQ ID NO: 6139; WAN02497M_at; Start 35; Stop 59
taaggatatacaggaagtgatcaca

SEQ ID NO: 12863 - DNA, 25 bp, Artificial
  probe
  misc_feature (1)..(25): SEQ ID NO: 6139; WAN02497M_at; Start 32; Stop 56
taataaggatatacaggaagtgatc

SEQ ID NO: 12864 - DNA, 25 bp, Artificial
  probe
  misc_feature (1)..(25): SEQ ID NO: 6139; WAN02497M_at; Start 45; Stop 69
caggaagtgatcacaaccttgtata

SEQ ID NO: 12865 - DNA, 25 bp, Artificial
  probe
  misc_feature (1)..(25): SEQ ID NO: 6139; WAN02497M_at; Start 37; Stop 61
aggatatacaggaagtgatcacaac

SEQ ID NO: 12866 - DNA, 25 bp, Artificial
  probe
  misc_feature (1)..(25): SEQ ID NO: 6139; WAN02497M_at; Start 51; Stop 75
gtgatcacaaccttgtataactgaa

SEQ ID NO: 12867 - DNA, 25 bp, Artificial
  probe
  misc_feature (1)..(25): SEQ ID NO: 6139; WAN02497M_at; Start 1; Stop 25
ggttccttgccatgggctataaaat

SEQ ID NO: 12868 - DNA, 25 bp, Artificial
  probe
  misc_feature (1)..(25): SEQ ID NO: 6139; WAN02497M_at; Start 39; Stop 63
gatatacaggaagtgatcacaacct

SEQ ID NO: 12869 - DNA, 25 bp, Artificial
  probe
  misc_feature (1)..(25): SEQ ID NO: 6139; WAN02497M_at; Start 58; Stop 82
caaccttgtataactgaaaaggaga

SEQ ID NO: 12870 - DNA, 25 bp, Artificial
  probe
  misc_feature (1)..(25): SEQ ID NO: 6139; WAN02497M_at; Start 43; Stop 67
tacaggaagtgatcacaaccttgta

SEQ ID NO: 12871 - DNA, 25 bp, Artificial
  probe
  misc_feature (1)..(25): SEQ ID NO: 6139; WAN02497M_at; Start 52; Stop 76
tgatcacaaccttgtataactgaaa

SEQ ID NO: 12872 - DNA, 25 bp, Artificial
  probe
  misc_feature (1)..(25): SEQ ID NO: 6139; WAN02497M_at; Start 42; Stop 66
atacaggaagtgatcacaaccttgt

SEQ ID NO: 12873 - DNA, 25 bp, Artificial
  probe
  misc_feature (1)..(25): SEQ ID NO: 6139; WAN02497M_at; Start 25; Stop 49
tagtgtttaataaggatatacagga

SEQ ID NO: 12874 - DNA, 25 bp, Artificial
  probe
  misc_feature (1)..(25): SEQ ID NO: 6139; WAN02497M_at; Start 30; Stop 54
tttaataaggatatacaggaagtga

SEQ ID NO: 12875 - DNA, 25 bp, Artificial
  probe
  misc_feature (1)..(25): SEQ ID NO: 6139; WAN02497M_at; Start 49; Stop 73
aagtgatcacaaccttgtataactg

SEQ ID NO: 12876 - DNA, 25 bp, Artificial
  probe
  misc_feature (1)..(25): SEQ ID NO: 6139; WAN02497M_at; Start 29; Stop 53
gtttaataaggatatacaggaagtg

SEQ ID NO: 12877 - DNA, 25 bp, Artificial
  probe
  misc_feature (1)..(25): SEQ ID NO: 6139; WAN02497M_at; Start 48; Stop 72
gaagtgatcacaaccttgtataact

SEQ ID NO: 12878 - DNA, 25 bp, Artificial
  probe
  misc_feature (1)..(25): SEQ ID NO: 6139; WAN02497M_at; Start 55; Stop 79
tcacaaccttgtataactgaaaagg

SEQ ID NO: 12879 - DNA, 25 bp, Artificial
  probe
  misc_feature (1)..(25): SEQ ID NO: 6139; WAN02497M_at; Start 46; Stop 70
aggaagtgatcacaaccttgtataa

SEQ ID NO: 12880 - DNA, 25 bp, Artificial
  probe
  misc_feature (1)..(25): SEQ ID NO: 6139; WAN02497M_at; Start 56; Stop 80
cacaaccttgtataactgaaaagga

SEQ ID NO: 12881 - DNA, 25 bp, Artificial
  probe
  misc_feature (1)..(25): SEQ ID NO: 6139; WAN02497M_at; Start 34; Stop 58
ataaggatatacaggaagtgatcac

SEQ ID NO: 12882 - DNA, 25 bp, Artificial
  probe
  misc_feature (1)..(25): SEQ ID NO: 6139; WAN02497M_at; Start 62; Stop 86
cttgtataactgaaaaggagagaaa

SEQ ID NO: 12883 - DNA, 25 bp, Artificial
  probe
  misc_feature (1)..(25): SEQ ID NO: 6139; WAN02497M_at; Start 60; Stop 84
accttgtataactgaaaaggagaga

SEQ ID NO: 12884 - DNA, 25 bp, Artificial
  probe
  misc_feature (1)..(25): SEQ ID NO: 6139; WAN02497M_at; Start 47; Stop 71
ggaagtgatcacaaccttgtataac

SEQ ID NO: 12885 - DNA, 25 bp, Artificial
  probe
  misc_feature (1)..(25): SEQ ID NO: 6139; WAN02497M_at; Start 54; Stop 78
atcacaaccttgtataactgaaaag

SEQ ID NO: 12886 - DNA, 25 bp, Artificial
  probe
  misc_feature (1)..(25): SEQ ID NO: 6139; WAN02497M_at; Start 64; Stop 88
tgtataactgaaaaggagagaaaac

SEQ ID NO: 12887 - DNA, 25 bp, Artificial
  probe
  misc_feature (1)..(25): SEQ ID NO: 6139; WAN02497M_at; Start 36; Stop 60
aaggatatacaggaagtgatcacaa

SEQ ID NO: 12888 - DNA, 25 bp, Artificial
  probe
  misc_feature (1)..(25): SEQ ID NO: 6139; WAN02497M_at; Start 44; Stop 68
acaggaagtgatcacaaccttgtat

SEQ ID NO: 12889 - DNA, 25 bp, Artificial
  probe
  misc_feature (1)..(25): SEQ ID NO: 6099; WAN02497N_at; Start 7; Stop 31
acctcctagcttttgcatattatat

SEQ ID NO: 12890 - DNA, 25 bp, Artificial
  probe
  misc_feature (1)..(25): SEQ ID NO: 6099; WAN02497N_at; Start 55; Stop 79
aatattctgatagttagaaaaaata

SEQ ID NO: 12891 - DNA, 25 bp, Artificial
  probe
  misc_feature (1)..(25): SEQ ID NO: 6099; WAN02497N_at; Start 51; Stop 75
tcaaaatattctgatagttagaaaa

SEQ ID NO: 12892 - DNA, 25 bp, Artificial
  probe
  misc_feature (1)..(25): SEQ ID NO: 6099; WAN02497N_at; Start 6; Stop 30
cacctcctagcttttgcatattata

SEQ ID NO: 12893 - DNA, 25 bp, Artificial
  probe
  misc_feature (1)..(25): SEQ ID NO: 6099; WAN02497N_at; Start 4; Stop 28
accacctcctagcttttgcatatta

SEQ ID NO: 12894 - DNA, 25 bp, Artificial
  probe
  misc_feature (1)..(25): SEQ ID NO: 6099; WAN02497N_at; Start 40; Stop 64
acaatcatttgtcaaaatattctga

SEQ ID NO: 12895 - DNA, 25 bp, Artificial
  probe
  misc_feature (1)..(25): SEQ ID NO: 6099; WAN02497N_at; Start 29; Stop 53
tatcattatttacaatcatttgtca

SEQ ID NO: 12896 - DNA, 25 bp, Artificial
  probe
  misc_feature (1)..(25): SEQ ID NO: 6099; WAN02497N_at; Start 48; Stop 72
ttgtcaaaatattctgatagttaga

SEQ ID NO: 12897 - DNA, 25 bp, Artificial
  probe
  misc_feature (1)..(25): SEQ ID NO: 6099; WAN02497N_at; Start 13; Stop 37
tagcttttgcatattatatcattat

SEQ ID NO: 12898 - DNA, 25 bp, Artificial
  probe
  misc_feature (1)..(25): SEQ ID NO: 6099; WAN02497N_at; Start 22; Stop 46
catattatatcattatttacaatca

SEQ ID NO: 12899 - DNA, 25 bp, Artificial
  probe
  misc_feature (1)..(25): SEQ ID NO: 6099; WAN02497N_at; Start 49; Stop 73
tgtcaaaatattctgatagttagaa

SEQ ID NO: 12900 - DNA, 25 bp, Artificial
  probe
  misc_feature (1)..(25): SEQ ID NO: 6099; WAN02497N_at; Start 8; Stop 32
cctcctagcttttgcatattatatc

SEQ ID NO: 12901 - DNA, 25 bp, Artificial
  probe
  misc_feature (1)..(25): SEQ ID NO: 6099; WAN02497N_at; Start 41; Stop 65
caatcatttgtcaaaatattctgat

SEQ ID NO: 12902 - DNA, 25 bp, Artificial
  probe
  misc_feature (1)..(25): SEQ ID NO: 6099; WAN02497N_at; Start 32; Stop 56
cattatttacaatcatttgtcaaaa

SEQ ID NO: 12903 - DNA, 25 bp, Artificial
  probe
  misc_feature (1)..(25): SEQ ID NO: 6099; WAN02497N_at; Start 42; Stop 66
aatcatttgtcaaaatattctgata

SEQ ID NO: 12904 - DNA, 25 bp, Artificial
  probe
  misc_feature (1)..(25): SEQ ID NO: 6099; WAN02497N_at; Start 1; Stop 25
ctgaccacctcctagcttttgcata

SEQ ID NO: 12905 - DNA, 25 bp, Artificial
  probe
  misc_feature (1)..(25): SEQ ID NO: 6099; WAN02497N_at; Start 9; Stop 33
ctcctagcttttgcatattatatca

SEQ ID NO: 12906 - DNA, 25 bp, Artificial
  probe
  misc_feature (1)..(25): SEQ ID NO: 6099; WAN02497N_at; Start 45; Stop 69
catttgtcaaaatattctgatagtt

SEQ ID NO: 12907 - DNA, 25 bp, Artificial
  probe
  misc_feature (1)..(25): SEQ ID NO: 6099; WAN02497N_at; Start 31; Stop 55
tcattatttacaatcatttgtcaaa

SEQ ID NO: 12908 - DNA, 25 bp, Artificial
  probe
  misc_feature (1)..(25): SEQ ID NO: 6099; WAN02497N_at; Start 28; Stop 52
atatcattatttacaatcatttgtc

SEQ ID NO: 12909 - DNA, 25 bp, Artificial
  probe
  misc_feature (1)..(25): SEQ ID NO: 6099; WAN02497N_at; Start 52; Stop 76
caaaatattctgatagttagaaaaa

SEQ ID NO: 12910 - DNA, 25 bp, Artificial
  probe
  misc_feature (1)..(25): SEQ ID NO: 6099; WAN02497N_at; Start 27; Stop 51
tatatcattatttacaatcatttgt

SEQ ID NO: 12911 - DNA, 25 bp, Artificial
  probe
  misc_feature (1)..(25): SEQ ID NO: 6099; WAN02497N_at; Start 11; Stop 35
cctagcttttgcatattatatcatt

SEQ ID NO: 12912 - DNA, 25 bp, Artificial
  probe
  misc_feature (1)..(25): SEQ ID NO: 6099; WAN02497N_at; Start 44; Stop 68
tcatttgtcaaaatattctgatagt

SEQ ID NO: 12913 - DNA, 25 bp, Artificial
  probe
  misc_feature (1)..(25): SEQ ID NO: 6099; WAN02497N_at; Start 12; Stop 36
ctagcttttgcatattatatcatta

SEQ ID NO: 12914 - DNA, 25 bp, Artificial
  probe
  misc_feature (1)..(25): SEQ ID NO: 6099; WAN02497N_at; Start 21; Stop 45
gcatattatatcattatttacaatc

SEQ ID NO: 12915 - DNA, 25 bp, Artificial
  probe
  misc_feature (1)..(25): SEQ ID NO: 6099; WAN02497N_at; Start 10; Stop 34
tcctagcttttgcatattatatcat

SEQ ID NO: 12916 - DNA, 25 bp, Artificial
  probe
  misc_feature (1)..(25): SEQ ID NO: 6099; WAN02497N_at; Start 43; Stop 67
atcatttgtcaaaatattctgatag

SEQ ID NO: 12917 - DNA, 25 bp, Artificial
  probe
  misc_feature (1)..(25): SEQ ID NO: 6099; WAN02497N_at; Start 47; Stop 71
tttgtcaaaatattctgatagttag

SEQ ID NO: 12918 - DNA, 25 bp, Artificial
  probe
  misc_feature (1)..(25): SEQ ID NO: 6099; WAN02497N_at; Start 2; Stop 26
tgaccacctcctagcttttgcatat

SEQ ID NO: 12919 - DNA, 25 bp, Artificial
  probe
  misc_feature (1)..(25): SEQ ID NO: 6099; WAN02497N_at; Start 3; Stop 27
gaccacctcctagcttttgcatatt

SEQ ID NO: 12920 - DNA, 25 bp, Artificial
  probe
  misc_feature (1)..(25): SEQ ID NO: 6099; WAN02497N_at; Start 39; Stop 63
tacaatcatttgtcaaaatattctg

SEQ ID NO: 12921 - DNA, 25 bp, Artificial
  probe
  misc_feature (1)..(25): SEQ ID NO: 6099; WAN02497N_at; Start 50; Stop 74
gtcaaaatattctgatagttagaaa

SEQ ID NO: 12922 - DNA, 25 bp, Artificial
  probe
  misc_feature (1)..(25): SEQ ID NO: 6099; WAN02497N_at; Start 5; Stop 29
ccacctcctagcttttgcatattat

SEQ ID NO: 12923 - DNA, 25 bp, Artificial
  probe
  misc_feature (1)..(25): SEQ ID NO: 6033; WAN02497O_at; Start 15; Stop 39
cagactagaaggctaagcgaaagca

SEQ ID NO: 12924 - DNA, 25 bp, Artificial
  probe
  misc_feature (1)..(25): SEQ ID NO: 6033; WAN02497O_at; Start 49; Stop 73
ttagctcccatagttcgggaaacta

SEQ ID NO: 12925 - DNA, 25 bp, Artificial
  probe
  misc_feature (1)..(25): SEQ ID NO: 6033; WAN02497O_at; Start 6; Stop 30
aatcgaaatcagactagaaggctaa

SEQ ID NO: 12926 - DNA, 25 bp, Artificial
  probe
  misc_feature (1)..(25): SEQ ID NO: 6033; WAN02497O_at; Start 40; Stop 64
taacttgagttagctcccatagttc

SEQ ID NO: 12927 - DNA, 25 bp, Artificial
  probe
  misc_feature (1)..(25): SEQ ID NO: 6033; WAN02497O_at; Start 37; Stop 61
gcataacttgagttagctcccatag

SEQ ID NO: 12928 - DNA, 25 bp, Artificial
  probe
  misc_feature (1)..(25): SEQ ID NO: 6033; WAN02497O_at; Start 10; Stop 34
gaaatcagactagaaggctaagcga

SEQ ID NO: 12929 - DNA, 25 bp, Artificial
  probe
  misc_feature (1)..(25): SEQ ID NO: 6033; WAN02497O_at; Start 22; Stop 46
gaaggctaagcgaaagcataacttg

SEQ ID NO: 12930 - DNA, 25 bp, Artificial
  probe
  misc_feature (1)..(25): SEQ ID NO: 6033; WAN02497O_at; Start 3; Stop 27
aaaaatcgaaatcagactagaaggc

SEQ ID NO: 12931 - DNA, 25 bp, Artificial
  probe
  misc_feature (1)..(25): SEQ ID NO: 6033; WAN02497O_at; Start 11; Stop 35
aaatcagactagaaggctaagcgaa

SEQ ID NO: 12932 - DNA, 25 bp, Artificial
  probe
  misc_feature (1)..(25): SEQ ID NO: 6033; WAN02497O_at; Start 9; Stop 33
cgaaatcagactagaaggctaagcg

SEQ ID NO: 12933 - DNA, 25 bp, Artificial
  probe
  misc_feature (1)..(25): SEQ ID NO: 6033; WAN02497O_at; Start 13; Stop 37
atcagactagaaggctaagcgaaag

SEQ ID NO: 12934 - DNA, 25 bp, Artificial
  probe
  misc_feature (1)..(25): SEQ ID NO: 6033; WAN02497O_at; Start 51; Stop 75
agctcccatagttcgggaaactatg

SEQ ID NO: 12935 - DNA, 25 bp, Artificial
  probe
  misc_feature (1)..(25): SEQ ID NO: 6033; WAN02497O_at; Start 38; Stop 62
cataacttgagttagctcccatagt

SEQ ID NO: 12936 - DNA, 25 bp, Artificial
  probe
  misc_feature (1)..(25): SEQ ID NO: 6033; WAN02497O_at; Start 28; Stop 52
taagcgaaagcataacttgagttag

SEQ ID NO: 12937 - DNA, 25 bp, Artificial
  probe
  misc_feature (1)..(25): SEQ ID NO: 6033; WAN02497O_at; Start 5; Stop 29
aaatcgaaatcagactagaaggcta

SEQ ID NO: 12938 - DNA, 25 bp, Artificial
  probe
  misc_feature (1)..(25): SEQ ID NO: 6033; WAN02497O_at; Start 8; Stop 32
tcgaaatcagactagaaggctaagc

SEQ ID NO: 12939 - DNA, 25 bp, Artificial
  probe
  misc_feature (1)..(25): SEQ ID NO: 6033; WAN02497O_at; Start 29; Stop 53
aagcgaaagcataacttgagttagc

SEQ ID NO: 12940 - DNA, 25 bp, Artificial
  probe
  misc_feature (1)..(25): SEQ ID NO: 6033; WAN02497O_at; Start 34; Stop 58
aaagcataacttgagttagctccca

SEQ ID NO: 12941 - DNA, 25 bp, Artificial
  probe
  misc_feature (1)..(25): SEQ ID NO: 6033; WAN02497O_at; Start 31; Stop 55
gcgaaagcataacttgagttagctc

SEQ ID NO: 12942 - DNA, 25 bp, Artificial
  probe
  misc_feature (1)..(25): SEQ ID NO: 6033; WAN02497O_at; Start 24; Stop 48
aggctaagcgaaagcataacttgag

SEQ ID NO: 12943 - DNA, 25 bp, Artificial
  probe
  misc_feature (1)..(25): SEQ ID NO: 6033; WAN02497O_at; Start 25; Stop 49
ggctaagcgaaagcataacttgagt

SEQ ID NO: 12944 - DNA, 25 bp, Artificial
  probe
  misc_feature (1)..(25): SEQ ID NO: 6033; WAN02497O_at; Start 26; Stop 50
gctaagcgaaagcataacttgagtt

SEQ ID NO: 12945 - DNA, 25 bp, Artificial
  probe
  misc_feature (1)..(25): SEQ ID NO: 6033; WAN02497O_at; Start 42; Stop 66
acttgagttagctcccatagttcgg

SEQ ID NO: 12946 - DNA, 25 bp, Artificial
  probe
  misc_feature (1)..(25): SEQ ID NO: 6033; WAN02497O_at; Start 4; Stop 28
aaaatcgaaatcagactagaaggct

SEQ ID NO: 12947 - DNA, 25 bp, Artificial
  probe
  misc_feature (1)..(25): SEQ ID NO: 6033; WAN02497O_at; Start 45; Stop 69
tgagttagctcccatagttcgggaa

SEQ ID NO: 12948 - DNA, 25 bp, Artificial
  probe
  misc_feature (1)..(25): SEQ ID NO: 6033; WAN02497O_at; Start 2; Stop 26
taaaaatcgaaatcagactagaagg

SEQ ID NO: 12949 - DNA, 25 bp, Artificial
  probe
  misc_feature (1)..(25): SEQ ID NO: 6033; WAN02497O_at; Start 56; Stop 80
ccatagttcgggaaactatgggagg

SEQ ID NO: 12950 - DNA, 25 bp, Artificial
  probe
  misc_feature (1)..(25): SEQ ID NO: 6033; WAN02497O_at; Start 12; Stop 36
aatcagactagaaggctaagcgaaa

SEQ ID NO: 12951 - DNA, 25 bp, Artificial
  probe
  misc_feature (1)..(25): SEQ ID NO: 6033; WAN02497O_at; Start 50; Stop 74
tagctcccatagttcgggaaactat

SEQ ID NO: 12952 - DNA, 25 bp, Artificial
  probe
  misc_feature (1)..(25): SEQ ID NO: 6033; WAN02497O_at; Start 43; Stop 67
cttgagttagctcccatagttcggg

SEQ ID NO: 12953 - DNA, 25 bp, Artificial
  probe
  misc_feature (1)..(25): SEQ ID NO: 6033; WAN02497O_at; Start 19; Stop 43
ctagaaggctaagcgaaagcataac

SEQ ID NO: 12954 - DNA, 25 bp, Artificial
  probe
  misc_feature (1)..(25): SEQ ID NO: 6033; WAN02497O_at; Start 33; Stop 57
gaaagcataacttgagttagctccc

SEQ ID NO: 12955 - DNA, 25 bp, Artificial
  probe
  misc_feature (1)..(25): SEQ ID NO: 6033; WAN02497O_at; Start 17; Stop 41
gactagaaggctaagcgaaagcata

SEQ ID NO: 12956 - DNA, 25 bp, Artificial
  probe
  misc_feature (1)..(25): SEQ ID NO: 6033; WAN02497O_at; Start 46; Stop 70
gagttagctcccatagttcgggaaa

SEQ ID NO: 12957 - DNA, 25 bp, Artificial
  probe
  misc_feature (1)..(25): SEQ ID NO: 6027; WAN02497P_at; Start 103; Stop 127
atgagtattcagtcggtcaaatgaa

SEQ ID NO: 12958 - DNA, 25 bp, Artificial
  probe
  misc_feature (1)..(25): SEQ ID NO: 6027; WAN02497P_at; Start 110; Stop 134
ttcagtcggtcaaatgaagctgaac

SEQ ID NO: 12959 - DNA, 25 bp, Artificial
  probe
  misc_feature (1)..(25): SEQ ID NO: 6027; WAN02497P_at; Start 41; Stop 65
ccaggaaaatgacataaaaatatca

SEQ ID NO: 12960 - DNA, 25 bp, Artificial
  probe
  misc_feature (1)..(25): SEQ ID NO: 6027; WAN02497P_at; Start 88; Stop 112
ttctctctgaaaaatatgagtattc

SEQ ID NO: 12961 - DNA, 25 bp, Artificial
  probe
  misc_feature (1)..(25): SEQ ID NO: 6027; WAN02497P_at; Start 111; Stop 135
tcagtcggtcaaatgaagctgaacg

SEQ ID NO: 12962 - DNA, 25 bp, Artificial
  probe
  misc_feature (1)..(25): SEQ ID NO: 6027; WAN02497P_at; Start 99; Stop 123
aaatatgagtattcagtcggtcaaa

SEQ ID NO: 12963 - DNA, 25 bp, Artificial
  probe
  misc_feature (1)..(25): SEQ ID NO: 6027; WAN02497P_at; Start 95; Stop 119
tgaaaaatatgagtattcagtcggt

SEQ ID NO: 12964 - DNA, 25 bp, Artificial
  probe
  misc_feature (1)..(25): SEQ ID NO: 6027; WAN02497P_at; Start 100; Stop 124
aatatgagtattcagtcggtcaaat

SEQ ID NO: 12965 - DNA, 25 bp, Artificial
  probe
  misc_feature (1)..(25): SEQ ID NO: 6027; WAN02497P_at; Start 108; Stop 132
tattcagtcggtcaaatgaagctga

SEQ ID NO: 12966 - DNA, 25 bp, Artificial
  probe
  misc_feature (1)..(25): SEQ ID NO: 6027; WAN02497P_at; Start 31; Stop 55
acagaaaaacccaggaaaatgacat

SEQ ID NO: 12967 - DNA, 25 bp, Artificial
  probe
  misc_feature (1)..(25): SEQ ID NO: 6027; WAN02497P_at; Start 114; Stop 138
gtcggtcaaatgaagctgaacgaac

SEQ ID NO: 12968 - DNA, 25 bp, Artificial
  probe
  misc_feature (1)..(25): SEQ ID NO: 6027; WAN02497P_at; Start 112; Stop 136
cagtcggtcaaatgaagctgaacga

SEQ ID NO: 12969 - DNA, 25 bp, Artificial
  probe
  misc_feature (1)..(25): SEQ ID NO: 6027; WAN02497P_at; Start 98; Stop 122
aaaatatgagtattcagtcggtcaa

SEQ ID NO: 12970 - DNA, 25 bp, Artificial
  probe
  misc_feature (1)..(25): SEQ ID NO: 6027; WAN02497P_at; Start 89; Stop 113
tctctctgaaaaatatgagtattca

SEQ ID NO: 12971 - DNA, 25 bp, Artificial
  probe
  misc_feature (1)..(25): SEQ ID NO: 6027; WAN02497P_at; Start 97; Stop 121
aaaaatatgagtattcagtcggtca

SEQ ID NO: 12972 - DNA, 25 bp, Artificial
  probe
  misc_feature (1)..(25): SEQ ID NO: 6027; WAN02497P_at; Start 104; Stop 128
tgagtattcagtcggtcaaatgaag

SEQ ID NO: 12973 - DNA, 25 bp, Artificial
  probe
  misc_feature (1)..(25): SEQ ID NO: 6027; WAN02497P_at; Start 96; Stop 120
gaaaaatatgagtattcagtcggtc

SEQ ID NO: 12974 - DNA, 25 bp, Artificial
  probe
  misc_feature (1)..(25): SEQ ID NO: 6027; WAN02497P_at; Start 75; Stop 99
ctatttatgctatttctctctgaaa

SEQ ID NO: 12975 - DNA, 25 bp, Artificial
  probe
  misc_feature (1)..(25): SEQ ID NO: 6027; WAN02497P_at; Start 101; Stop 125
atatgagtattcagtcggtcaaatg

SEQ ID NO: 12976 - DNA, 25 bp, Artificial
  probe
  misc_feature (1)..(25): SEQ ID NO: 6027; WAN02497P_at; Start 107; Stop 131
gtattcagtcggtcaaatgaagctg

SEQ ID NO: 12977 - DNA, 25 bp, Artificial
  probe
  misc_feature (1)..(25): SEQ ID NO: 6027; WAN02497P_at; Start 73; Stop 97
gcctatttatgctatttctctctga

SEQ ID NO: 12978 - DNA, 25 bp, Artificial
  probe
  misc_feature (1)..(25): SEQ ID NO: 6027; WAN02497P_at; Start 74; Stop 98
cctatttatgctatttctctctgaa

SEQ ID NO: 12979 - DNA, 25 bp, Artificial
  probe
  misc_feature (1)..(25): SEQ ID NO: 6027; WAN02497P_at; Start 55; Stop 79
taaaaatatcattcctaggcctatt

SEQ ID NO: 12980 - DNA, 25 bp, Artificial
  probe
  misc_feature (1)..(25): SEQ ID NO: 6027; WAN02497P_at; Start 56; Stop 80
aaaaatatcattcctaggcctattt

SEQ ID NO: 12981 - DNA, 25 bp, Artificial
  probe
  misc_feature (1)..(25): SEQ ID NO: 6027; WAN02497P_at; Start 113; Stop 137
agtcggtcaaatgaagctgaacgaa

SEQ ID NO: 12982 - DNA, 25 bp, Artificial
  probe
  misc_feature (1)..(25): SEQ ID NO: 6027; WAN02497P_at; Start 109; Stop 133
attcagtcggtcaaatgaagctgaa

SEQ ID NO: 12983 - DNA, 25 bp, Artificial
  probe
  misc_feature (1)..(25): SEQ ID NO: 6027; WAN02497P_at; Start 40; Stop 64
cccaggaaaatgacataaaaatatc

SEQ ID NO: 12984 - DNA, 25 bp, Artificial
  probe
  misc_feature (1)..(25): SEQ ID NO: 6027; WAN02497P_at; Start 32; Stop 56
cagaaaaacccaggaaaatgacata

SEQ ID NO: 12985 - DNA, 25 bp, Artificial
  probe
  misc_feature (1)..(25): SEQ ID NO: 6027; WAN02497P_at; Start 83; Stop 107
gctatttctctctgaaaaatatgag

SEQ ID NO: 12986 - DNA, 25 bp, Artificial
  probe
  misc_feature (1)..(25): SEQ ID NO: 6027; WAN02497P_at; Start 106; Stop 130
agtattcagtcggtcaaatgaagct

SEQ ID NO: 12987 - DNA, 25 bp, Artificial
  probe
  misc_feature (1)..(25): SEQ ID NO: 6027; WAN02497P_at; Start 53; Stop 77
cataaaaatatcattcctaggccta

SEQ ID NO: 12988 - DNA, 25 bp, Artificial
  probe
  misc_feature (1)..(25): SEQ ID NO: 6027; WAN02497P_at; Start 85; Stop 109
tatttctctctgaaaaatatgagta

SEQ ID NO: 12989 - DNA, 25 bp, Artificial
  probe
  misc_feature (1)..(25): SEQ ID NO: 6027; WAN02497P_at; Start 93; Stop 117
tctgaaaaatatgagtattcagtcg

SEQ ID NO: 12990 - DNA, 25 bp, Artificial
  probe
  misc_feature (1)..(25): SEQ ID NO: 6027; WAN02497P_at; Start 102; Stop 126
tatgagtattcagtcggtcaaatga

SEQ ID NO: 12991 - DNA, 25 bp, Artificial
  probe
  misc_feature (1)..(25): SEQ ID NO: 6064; WAN02497Q_at; Start 34; Stop 58
aaattttccacgtatctgactagaa

SEQ ID NO: 12992 - DNA, 25 bp, Artificial
  probe
  misc_feature (1)..(25): SEQ ID NO: 6064; WAN02497Q_at; Start 25; Stop 49
tatcatatcaaattttccacgtatc

SEQ ID NO: 12993 - DNA, 25 bp, Artificial
  probe
  misc_feature (1)..(25): SEQ ID NO: 6064; WAN02497Q_at; Start 21; Stop 45
ctactatcatatcaaattttccacg

SEQ ID NO: 12994 - DNA, 25 bp, Artificial
  probe
  misc_feature (1)..(25): SEQ ID NO: 6064; WAN02497Q_at; Start 73; Stop 97
tacaattgatgctctaccttcatca

SEQ ID NO: 12995 - DNA, 25 bp, Artificial
  probe
  misc_feature (1)..(25): SEQ ID NO: 6064; WAN02497Q_at; Start 51; Stop 75
gactagaataaggagcactttctac

SEQ ID NO: 12996 - DNA, 25 bp, Artificial
  probe
  misc_feature (1)..(25): SEQ ID NO: 6064; WAN02497Q_at; Start 32; Stop 56
tcaaattttccacgtatctgactag

SEQ ID NO: 12997 - DNA, 25 bp, Artificial
  probe
  misc_feature (1)..(25): SEQ ID NO: 6064; WAN02497Q_at; Start 28; Stop 52
catatcaaattttccacgtatctga

SEQ ID NO: 12998 - DNA, 25 bp, Artificial
  probe
  misc_feature (1)..(25): SEQ ID NO: 6064; WAN02497Q_at; Start 6; Stop 30
tcttctccttattccctactatcat

SEQ ID NO: 12999 - DNA, 25 bp, Artificial
  probe
  misc_feature (1)..(25): SEQ ID NO: 6064; WAN02497Q_at; Start 60; Stop 84
aaggagcactttctacaattgatgc

SEQ ID NO: 13000 - DNA, 25 bp, Artificial
  probe
  misc_feature (1)..(25): SEQ ID NO: 6064; WAN02497Q_at; Start 46; Stop 70
tatctgactagaataaggagcactt

SEQ ID NO: 13001 - DNA, 25 bp, Artificial
  probe
  misc_feature (1)..(25): SEQ ID NO: 6064; WAN02497Q_at; Start 65; Stop 89
gcactttctacaattgatgctctac

SEQ ID NO: 13002 - DNA, 25 bp, Artificial
  probe
  misc_feature (1)..(25): SEQ ID NO: 6064; WAN02497Q_at; Start 43; Stop 67
acgtatctgactagaataaggagca

SEQ ID NO: 13003 - DNA, 25 bp, Artificial
  probe
  misc_feature (1)..(25): SEQ ID NO: 6064; WAN02497Q_at; Start 30; Stop 54
tatcaaattttccacgtatctgact

SEQ ID NO: 13004 - DNA, 25 bp, Artificial
  probe
  misc_feature (1)..(25): SEQ ID NO: 6064; WAN02497Q_at; Start 35; Stop 59
aattttccacgtatctgactagaat

SEQ ID NO: 13005 - DNA, 25 bp, Artificial
  probe
  misc_feature (1)..(25): SEQ ID NO: 6064; WAN02497Q_at; Start 59; Stop 83
taaggagcactttctacaattgatg

SEQ ID NO: 13006 - DNA, 25 bp, Artificial
  probe
  misc_feature (1)..(25): SEQ ID NO: 6064; WAN02497Q_at; Start 12; Stop 36
ccttattccctactatcatatcaaa

SEQ ID NO: 13007 - DNA, 25 bp, Artificial
  probe
  misc_feature (1)..(25): SEQ ID NO: 6064; WAN02497Q_at; Start 69; Stop 93
tttctacaattgatgctctaccttc

SEQ ID NO: 13008 - DNA, 25 bp, Artificial
  probe
  misc_feature (1)..(25): SEQ ID NO: 6064; WAN02497Q_at; Start 62; Stop 86
ggagcactttctacaattgatgctc

SEQ ID NO: 13009 - DNA, 25 bp, Artificial
  probe
  misc_feature (1)..(25): SEQ ID NO: 6064; WAN02497Q_at; Start 33; Stop 57
caaattttccacgtatctgactaga

SEQ ID NO: 13010 - DNA, 25 bp, Artificial
  probe
  misc_feature (1)..(25): SEQ ID NO: 6064; WAN02497Q_at; Start 80; Stop 104
gatgctctaccttcatcacatacca

SEQ ID NO: 13011 - DNA, 25 bp, Artificial
  probe
  misc_feature (1)..(25): SEQ ID NO: 6064; WAN02497Q_at; Start 56; Stop 80
gaataaggagcactttctacaattg

SEQ ID NO: 13012 - DNA, 25 bp, Artificial
  probe
  misc_feature (1)..(25): SEQ ID NO: 6064; WAN02497Q_at; Start 45; Stop 69
gtatctgactagaataaggagcact

SEQ ID NO: 13013 - DNA, 25 bp, Artificial
  probe
  misc_feature (1)..(25): SEQ ID NO: 6064; WAN02497Q_at; Start 40; Stop 64
tccacgtatctgactagaataagga

SEQ ID NO: 13014 - DNA, 25 bp, Artificial
  probe
  misc_feature (1)..(25): SEQ ID NO: 6064; WAN02497Q_at; Start 38; Stop 62
tttccacgtatctgactagaataag

SEQ ID NO: 13015 - DNA, 25 bp, Artificial
  probe
  misc_feature (1)..(25): SEQ ID NO: 6064; WAN02497Q_at; Start 42; Stop 66
cacgtatctgactagaataaggagc

SEQ ID NO: 13016 - DNA, 25 bp, Artificial
  probe
  misc_feature (1)..(25): SEQ ID NO: 6064; WAN02497Q_at; Start 49; Stop 73
ctgactagaataaggagcactttct

SEQ ID NO: 13017 - DNA, 25 bp, Artificial
  probe
  misc_feature (1)..(25): SEQ ID NO: 6064; WAN02497Q_at; Start 44; Stop 68
cgtatctgactagaataaggagcac

SEQ ID NO: 13018 - DNA, 25 bp, Artificial
  probe
  misc_feature (1)..(25): SEQ ID NO: 6064; WAN02497Q_at; Start 39; Stop 63
ttccacgtatctgactagaataagg

SEQ ID NO: 13019 - DNA, 25 bp, Artificial
  probe
  misc_feature (1)..(25): SEQ ID NO: 6064; WAN02497Q_at; Start 48; Stop 72
tctgactagaataaggagcactttc

SEQ ID NO: 13020 - DNA, 25 bp, Artificial
  probe
  misc_feature (1)..(25): SEQ ID NO: 6064; WAN02497Q_at; Start 3; Stop 27
tattcttctccttattccctactat

SEQ ID NO: 13021 - DNA, 25 bp, Artificial
  probe
  misc_feature (1)..(25): SEQ ID NO: 6064; WAN02497Q_at; Start 75; Stop 99
caattgatgctctaccttcatcaca

SEQ ID NO: 13022 - DNA, 25 bp, Artificial
  probe
  misc_feature (1)..(25): SEQ ID NO: 6064; WAN02497Q_at; Start 66; Stop 90
cactttctacaattgatgctctacc

SEQ ID NO: 13023 - DNA, 25 bp, Artificial
  probe
  misc_feature (1)..(25): SEQ ID NO: 6064; WAN02497Q_at; Start 71; Stop 95
tctacaattgatgctctaccttcat

SEQ ID NO: 13024 - DNA, 25 bp, Artificial
  probe
  misc_feature (1)..(25): SEQ ID NO: 6064; WAN02497Q_at; Start 53; Stop 77
ctagaataaggagcactttctacaa

SEQ ID NO: 13025 - DNA, 25 bp, Artificial
  probe
  misc_feature (1)..(25): SEQ ID NO: 5988; WAN02497R_at; Start 65; Stop 89
tcaagccagacaacttgaagcatcc

SEQ ID NO: 13026 - DNA, 25 bp, Artificial
  probe
  misc_feature (1)..(25): SEQ ID NO: 5988; WAN02497R_at; Start 90; Stop 114
cactcagcaaaaaacaatcccagaa

SEQ ID NO: 13027 - DNA, 25 bp, Artificial
  probe
  misc_feature (1)..(25): SEQ ID NO: 5988; WAN02497R_at; Start 72; Stop 96
agacaacttgaagcatcccactcag

SEQ ID NO: 13028 - DNA, 25 bp, Artificial
  probe
  misc_feature (1)..(25): SEQ ID NO: 5988; WAN02497R_at; Start 61; Stop 85
aaagtcaagccagacaacttgaagc

SEQ ID NO: 13029 - DNA, 25 bp, Artificial
  probe
  misc_feature (1)..(25): SEQ ID NO: 5988; WAN02497R_at; Start 115; Stop 139
aaaatcttctaggattgttttgtat

SEQ ID NO: 13030 - DNA, 25 bp, Artificial
  probe
  misc_feature (1)..(25): SEQ ID NO: 5988; WAN02497R_at; Start 74; Stop 98
acaacttgaagcatcccactcagca

SEQ ID NO: 13031 - DNA, 25 bp, Artificial
  probe
  misc_feature (1)..(25): SEQ ID NO: 5988; WAN02497R_at; Start 64; Stop 88
gtcaagccagacaacttgaagcatc

SEQ ID NO: 13032 - DNA, 25 bp, Artificial
  probe
  misc_feature (1)..(25): SEQ ID NO: 5988; WAN02497R_at; Start 91; Stop 115
actcagcaaaaaacaatcccagaaa

SEQ ID NO: 13033 - DNA, 25 bp, Artificial
  probe
  misc_feature (1)..(25): SEQ ID NO: 5988; WAN02497R_at; Start 73; Stop 97
gacaacttgaagcatcccactcagc

SEQ ID NO: 13034 - DNA, 25 bp, Artificial
  probe
  misc_feature (1)..(25): SEQ ID NO: 5988; WAN02497R_at; Start 84; Stop 108
gcatcccactcagcaaaaaacaatc

SEQ ID NO: 13035 - DNA, 25 bp, Artificial
  probe
  misc_feature (1)..(25): SEQ ID NO: 5988; WAN02497R_at; Start 68; Stop 92
agccagacaacttgaagcatcccac

SEQ ID NO: 13036 - DNA, 25 bp, Artificial
  probe
  misc_feature (1)..(25): SEQ ID NO: 5988; WAN02497R_at; Start 110; Stop 134
cagaaaaaatcttctaggattgttt

SEQ ID NO: 13037 - DNA, 25 bp, Artificial
  probe
  misc_feature (1)..(25): SEQ ID NO: 5988; WAN02497R_at; Start 81; Stop 105
gaagcatcccactcagcaaaaaaca

SEQ ID NO: 13038 - DNA, 25 bp, Artificial
  probe
  misc_feature (1)..(25): SEQ ID NO: 5988; WAN02497R_at; Start 82; Stop 106
aagcatcccactcagcaaaaaacaa

SEQ ID NO: 13039 - DNA, 25 bp, Artificial
  probe
  misc_feature (1)..(25): SEQ ID NO: 5988; WAN02497R_at; Start 86; Stop 110
atcccactcagcaaaaaacaatccc

SEQ ID NO: 13040 - DNA, 25 bp, Artificial
  probe
  misc_feature (1)..(25): SEQ ID NO: 5988; WAN02497R_at; Start 69; Stop 93
gccagacaacttgaagcatcccact

SEQ ID NO: 13041 - DNA, 25 bp, Artificial
  probe
  misc_feature (1)..(25): SEQ ID NO: 5988; WAN02497R_at; Start 60; Stop 84
gaaagtcaagccagacaacttgaag

SEQ ID NO: 13042 - DNA, 25 bp, Artificial
  probe
  misc_feature (1)..(25): SEQ ID NO: 5988; WAN02497R_at; Start 63; Stop 87
agtcaagccagacaacttgaagcat

SEQ ID NO: 13043 - DNA, 25 bp, Artificial
  probe
  misc_feature (1)..(25): SEQ ID NO: 5988; WAN02497R_at; Start 62; Stop 86
aagtcaagccagacaacttgaagca

SEQ ID NO: 13044 - DNA, 25 bp, Artificial
  probe
  misc_feature (1)..(25): SEQ ID NO: 5988; WAN02497R_at; Start 78; Stop 102
cttgaagcatcccactcagcaaaaa

SEQ ID NO: 13045 - DNA, 25 bp, Artificial
  probe
  misc_feature (1)..(25): SEQ ID NO: 5988; WAN02497R_at; Start 75; Stop 99
caacttgaagcatcccactcagcaa

SEQ ID NO: 13046 - DNA, 25 bp, Artificial
  probe
  misc_feature (1)..(25): SEQ ID NO: 5988; WAN02497R_at; Start 89; Stop 113
ccactcagcaaaaaacaatcccaga

SEQ ID NO: 13047 - DNA, 25 bp, Artificial
  probe
  misc_feature (1)..(25): SEQ ID NO: 5988; WAN02497R_at; Start 83; Stop 107
agcatcccactcagcaaaaaacaat

SEQ ID NO: 13048 - DNA, 25 bp, Artificial
  probe
  misc_feature (1)..(25): SEQ ID NO: 5988; WAN02497R_at; Start 79; Stop 103
ttgaagcatcccactcagcaaaaaa

SEQ ID NO: 13049 - DNA, 25 bp, Artificial
  probe
  misc_feature (1)..(25): SEQ ID NO: 5988; WAN02497R_at; Start 67; Stop 91
aagccagacaacttgaagcatccca

SEQ ID NO: 13050 - DNA, 25 bp, Artificial
  probe
  misc_feature (1)..(25): SEQ ID NO: 5988; WAN02497R_at; Start 109; Stop 133
ccagaaaaaatcttctaggattgtt

SEQ ID NO: 13051 - DNA, 25 bp, Artificial
  probe
  misc_feature (1)..(25): SEQ ID NO: 5988; WAN02497R_at; Start 92; Stop 116
ctcagcaaaaaacaatcccagaaaa

SEQ ID NO: 13052 - DNA, 25 bp, Artificial
  probe
  misc_feature (1)..(25): SEQ ID NO: 5988; WAN02497R_at; Start 80; Stop 104
tgaagcatcccactcagcaaaaaac

SEQ ID NO: 13053 - DNA, 25 bp, Artificial
  probe
  misc_feature (1)..(25): SEQ ID NO: 5988; WAN02497R_at; Start 85; Stop 109
catcccactcagcaaaaaacaatcc

SEQ ID NO: 13054 - DNA, 25 bp, Artificial
  probe
  misc_feature (1)..(25): SEQ ID NO: 5988; WAN02497R_at; Start 71; Stop 95
cagacaacttgaagcatcccactca

SEQ ID NO: 13055 - DNA, 25 bp, Artificial
  probe
  misc_feature (1)..(25): SEQ ID NO: 5988; WAN02497R_at; Start 66; Stop 90
caagccagacaacttgaagcatccc

SEQ ID NO: 13056 - DNA, 25 bp, Artificial
  probe
  misc_feature (1)..(25): SEQ ID NO: 5988; WAN02497R_at; Start 76; Stop 100
aacttgaagcatcccactcagcaaa

SEQ ID NO: 13057 - DNA, 25 bp, Artificial
  probe
  misc_feature (1)..(25): SEQ ID NO: 5988; WAN02497R_at; Start 93; Stop 117
tcagcaaaaaacaatcccagaaaaa

SEQ ID NO: 13058 - DNA, 25 bp, Artificial
  probe
  misc_feature (1)..(25): SEQ ID NO: 5988; WAN02497R_at; Start 108; Stop 132
cccagaaaaaatcttctaggattgt

SEQ ID NO: 13059 - DNA, 25 bp, Artificial
  probe
  misc_feature (1)..(25): SEQ ID NO: 6037; WAN02497S_at; Start 51; Stop 75
cactactcaacaatgaaactctaca

SEQ ID NO: 13060 - DNA, 25 bp, Artificial
  probe
  misc_feature (1)..(25): SEQ ID NO: 6037; WAN02497S_at; Start 54; Stop 78
tactcaacaatgaaactctacaatc

SEQ ID NO: 13061 - DNA, 25 bp, Artificial
  probe
  misc_feature (1)..(25): SEQ ID NO: 6037; WAN02497S_at; Start 38; Stop 62
tccttacaagaaacactactcaaca

SEQ ID NO: 13062 - DNA, 25 bp, Artificial
  probe
  misc_feature (1)..(25): SEQ ID NO: 6037; WAN02497S_at; Start 35; Stop 59
tcatccttacaagaaacactactca

SEQ ID NO: 13063 - DNA, 25 bp, Artificial
  probe
  misc_feature (1)..(25): SEQ ID NO: 6037; WAN02497S_at; Start 24; Stop 48
catctgactcctcatccttacaaga

SEQ ID NO: 13064 - DNA, 25 bp, Artificial
  probe
  misc_feature (1)..(25): SEQ ID NO: 6037; WAN02497S_at; Start 42; Stop 66
tacaagaaacactactcaacaatga

SEQ ID NO: 13065 - DNA, 25 bp, Artificial
  probe
  misc_feature (1)..(25): SEQ ID NO: 6037; WAN02497S_at; Start 12; Stop 36
gagtcgatttgtcatctgactcctc

SEQ ID NO: 13066 - DNA, 25 bp, Artificial
  probe
  misc_feature (1)..(25): SEQ ID NO: 6037; WAN02497S_at; Start 6; Stop 30
aaaaaggagtcgatttgtcatctga

SEQ ID NO: 13067 - DNA, 25 bp, Artificial
  probe
  misc_feature (1)..(25): SEQ ID NO: 6037; WAN02497S_at; Start 15; Stop 39
tcgatttgtcatctgactcctcatc

SEQ ID NO: 13068 - DNA, 25 bp, Artificial
  probe
  misc_feature (1)..(25): SEQ ID NO: 6037; WAN02497S_at; Start 13; Stop 37
agtcgatttgtcatctgactcctca

SEQ ID NO: 13069 - DNA, 25 bp, Artificial
  probe
  misc_feature (1)..(25): SEQ ID NO: 6037; WAN02497S_at; Start 28; Stop 52
tgactcctcatccttacaagaaaca

SEQ ID NO: 13070 - DNA, 25 bp, Artificial
  probe
  misc_feature (1)..(25): SEQ ID NO: 6037; WAN02497S_at; Start 26; Stop 50
tctgactcctcatccttacaagaaa

SEQ ID NO: 13071 - DNA, 25 bp, Artificial
  probe
  misc_feature (1)..(25): SEQ ID NO: 6037; WAN02497S_at; Start 21; Stop 45
tgtcatctgactcctcatccttaca

SEQ ID NO: 13072 - DNA, 25 bp, Artificial
  probe
  misc_feature (1)..(25): SEQ ID NO: 6037; WAN02497S_at; Start 49; Stop 73
aacactactcaacaatgaaactcta

SEQ ID NO: 13073 - DNA, 25 bp, Artificial
  probe
  misc_feature (1)..(25): SEQ ID NO: 6037; WAN02497S_at; Start 5; Stop 29
gaaaaaggagtcgatttgtcatctg

SEQ ID NO: 13074 - DNA, 25 bp, Artificial
  probe
  misc_feature (1)..(25): SEQ ID NO: 6037; WAN02497S_at; Start 32; Stop 56
tcctcatccttacaagaaacactac

SEQ ID NO: 13075 - DNA, 25 bp, Artificial
  probe
  misc_feature (1)..(25): SEQ ID NO: 6037; WAN02497S_at; Start 23; Stop 47
tcatctgactcctcatccttacaag

SEQ ID NO: 13076 - DNA, 25 bp, Artificial
  probe
  misc_feature (1)..(25): SEQ ID NO: 6037; WAN02497S_at; Start 44; Stop 68
caagaaacactactcaacaatgaaa

SEQ ID NO: 13077 - DNA, 25 bp, Artificial
  probe
  misc_feature (1)..(25): SEQ ID NO: 6037; WAN02497S_at; Start 3; Stop 27
aagaaaaaggagtcgatttgtcatc

SEQ ID NO: 13078 - DNA, 25 bp, Artificial
  probe
  misc_feature (1)..(25): SEQ ID NO: 6037; WAN02497S_at; Start 25; Stop 49
atctgactcctcatccttacaagaa

SEQ ID NO: 13079 - DNA, 25 bp, Artificial
  probe
  misc_feature (1)..(25): SEQ ID NO: 6037; WAN02497S_at; Start 27; Stop 51
ctgactcctcatccttacaagaaac

SEQ ID NO: 13080 - DNA, 25 bp, Artificial
  probe
  misc_feature (1)..(25): SEQ ID NO: 6037; WAN02497S_at; Start 9; Stop 33
aaggagtcgatttgtcatctgactc

SEQ ID NO: 13081 - DNA, 25 bp, Artificial
  probe
  misc_feature (1)..(25): SEQ ID NO: 6037; WAN02497S_at; Start 29; Stop 53
gactcctcatccttacaagaaacac

SEQ ID NO: 13082 - DNA, 25 bp, Artificial
  probe
  misc_feature (1)..(25): SEQ ID NO: 6037; WAN02497S_at; Start 39; Stop 63
ccttacaagaaacactactcaacaa

SEQ ID NO: 13083 - DNA, 25 bp, Artificial
  probe
  misc_feature (1)..(25): SEQ ID NO: 6037; WAN02497S_at; Start 36; Stop 60
catccttacaagaaacactactcaa

SEQ ID NO: 13084 - DNA, 25 bp, Artificial
  probe
  misc_feature (1)..(25): SEQ ID NO: 6037; WAN02497S_at; Start 41; Stop 65
ttacaagaaacactactcaacaatg

SEQ ID NO: 13085 - DNA, 25 bp, Artificial
  probe
  misc_feature (1)..(25): SEQ ID NO: 6037; WAN02497S_at; Start 17; Stop 41
gatttgtcatctgactcctcatcct

SEQ ID NO: 13086 - DNA, 25 bp, Artificial
  probe
  misc_feature (1)..(25): SEQ ID NO: 6037; WAN02497S_at; Start 47; Stop 71
gaaacactactcaacaatgaaactc

SEQ ID NO: 13087 - DNA, 25 bp, Artificial
  probe
  misc_feature (1)..(25): SEQ ID NO: 6037; WAN02497S_at; Start 8; Stop 32
aaaggagtcgatttgtcatctgact

SEQ ID NO: 13088 - DNA, 25 bp, Artificial
  probe
  misc_feature (1)..(25): SEQ ID NO: 6037; WAN02497S_at; Start 2; Stop 26
taagaaaaaggagtcgatttgtcat

SEQ ID NO: 13089 - DNA, 25 bp, Artificial
  probe
  misc_feature (1)..(25): SEQ ID NO: 6037; WAN02497S_at; Start 19; Stop 43
tttgtcatctgactcctcatcctta

SEQ ID NO: 13090 - DNA, 25 bp, Artificial
  probe
  misc_feature (1)..(25): SEQ ID NO: 6037; WAN02497S_at; Start 14; Stop 38
gtcgatttgtcatctgactcctcat

SEQ ID NO: 13091 - DNA, 25 bp, Artificial
  probe
  misc_feature (1)..(25): SEQ ID NO: 6037; WAN02497S_at; Start 33; Stop 57
cctcatccttacaagaaacactact

SEQ ID NO: 13092 - DNA, 25 bp, Artificial
  probe
  misc_feature (1)..(25): SEQ ID NO: 6037; WAN02497S_at; Start 7; Stop 31
aaaaggagtcgatttgtcatctgac

SEQ ID NO: 13093 - DNA, 25 bp, Artificial
  probe
  misc_feature (1)..(25): SEQ ID NO: 6061; WAN02497T_at; Start 195; Stop 219
tataacgataaaaaacagagataac

SEQ ID NO: 13094 - DNA, 25 bp, Artificial
  probe
  misc_feature (1)..(25): SEQ ID NO: 6061; WAN02497T_at; Start 71; Stop 95
taatatagtatggaattttctgagt

SEQ ID NO: 13095 - DNA, 25 bp, Artificial
  probe
  misc_feature (1)..(25): SEQ ID NO: 6061; WAN02497T_at; Start 109; Stop 133
tacttatcattatacaataaatcga

SEQ ID NO: 13096 - DNA, 25 bp, Artificial
  probe
  misc_feature (1)..(25): SEQ ID NO: 6061; WAN02497T_at; Start 92; Stop 116
gagtacttttcaacaattacttatc

SEQ ID NO: 13097 - DNA, 25 bp, Artificial
  probe
  misc_feature (1)..(25): SEQ ID NO: 6061; WAN02497T_at; Start 87; Stop 111
tttctgagtacttttcaacaattac

SEQ ID NO: 13098 - DNA, 25 bp, Artificial
  probe
  misc_feature (1)..(25): SEQ ID NO: 6061; WAN02497T_at; Start 262; Stop 286
ttttaaattagattaccgcttatgc

SEQ ID NO: 13099 - DNA, 25 bp, Artificial
  probe
  misc_feature (1)..(25): SEQ ID NO: 6061; WAN02497T_at; Start 218; Stop 242
acatctcaacaagtaagtgtggact

SEQ ID NO: 13100 - DNA, 25 bp, Artificial
  probe
  misc_feature (1)..(25): SEQ ID NO: 6061; WAN02497T_at; Start 239; Stop 263
gacttcagactaattacagcatttt

SEQ ID NO: 13101 - DNA, 25 bp, Artificial
  probe
  misc_feature (1)..(25): SEQ ID NO: 6061; WAN02497T_at; Start 227; Stop 251
caagtaagtgtggacttcagactaa

SEQ ID NO: 13102 - DNA, 25 bp, Artificial
  probe
  misc_feature (1)..(25): SEQ ID NO: 6061; WAN02497T_at; Start 214; Stop 238
gataacatctcaacaagtaagtgtg

SEQ ID NO: 13103 - DNA, 25 bp, Artificial
  probe
  misc_feature (1)..(25): SEQ ID NO: 6061; WAN02497T_at; Start 82; Stop 106
ggaattttctgagtacttttcaaca

SEQ ID NO: 13104 - DNA, 25 bp, Artificial
  probe
  misc_feature (1)..(25): SEQ ID NO: 6061; WAN02497T_at; Start 265; Stop 289
taaattagattaccgcttatgcttt

SEQ ID NO: 13105 - DNA, 25 bp, Artificial
  probe
  misc_feature (1)..(25): SEQ ID NO: 6061; WAN02497T_at; Start 224; Stop 248
caacaagtaagtgtggacttcagac

SEQ ID NO: 13106 - DNA, 25 bp, Artificial
  probe
  misc_feature (1)..(25): SEQ ID NO: 6061; WAN02497T_at; Start 216; Stop 240
taacatctcaacaagtaagtgtgga

SEQ ID NO: 13107 - DNA, 25 bp, Artificial
  probe
  misc_feature (1)..(25): SEQ ID NO: 6061; WAN02497T_at; Start 237; Stop 261
tggacttcagactaattacagcatt

SEQ ID NO: 13108 - DNA, 25 bp, Artificial
  probe
  misc_feature (1)..(25): SEQ ID NO: 6061; WAN02497T_at; Start 231; Stop 255
taagtgtggacttcagactaattac

SEQ ID NO: 13109 - DNA, 25 bp, Artificial
  probe
  misc_feature (1)..(25): SEQ ID NO: 6061; WAN02497T_at; Start 1; Stop 25
attaacctcgctttttctatattct

SEQ ID NO: 13110 - DNA, 25 bp, Artificial
  probe
  misc_feature (1)..(25): SEQ ID NO: 6061; WAN02497T_at; Start 32; Stop 56
caatctatattttatagcataaaag

SEQ ID NO: 13111 - DNA, 25 bp, Artificial
  probe
  misc_feature (1)..(25): SEQ ID NO: 6061; WAN02497T_at; Start 221; Stop 245
tctcaacaagtaagtgtggacttca

SEQ ID NO: 13112 - DNA, 25 bp, Artificial
  probe
  misc_feature (1)..(25): SEQ ID NO: 6061; WAN02497T_at; Start 167; Stop 191
tctgcatactataaaaaatacagta

SEQ ID NO: 13113 - DNA, 25 bp, Artificial
  probe
  misc_feature (1)..(25): SEQ ID NO: 6061; WAN02497T_at; Start 255; Stop 279
cagcattttttaaattagattaccg

SEQ ID NO: 13114 - DNA, 25 bp, Artificial
  probe
  misc_feature (1)..(25): SEQ ID NO: 6061; WAN02497T_at; Start 46; Stop 70
tagcataaaagtataaacataaaaa

SEQ ID NO: 13115 - DNA, 25 bp, Artificial
  probe
  misc_feature (1)..(25): SEQ ID NO: 6061; WAN02497T_at; Start 244; Stop 268
cagactaattacagcattttttaaa

SEQ ID NO: 13116 - DNA, 25 bp, Artificial
  probe
  misc_feature (1)..(25): SEQ ID NO: 6061; WAN02497T_at; Start 212; Stop 236
gagataacatctcaacaagtaagtg

SEQ ID NO: 13117 - DNA, 25 bp, Artificial
  probe
  misc_feature (1)..(25): SEQ ID NO: 6061; WAN02497T_at; Start 235; Stop 259
tgtggacttcagactaattacagca

SEQ ID NO: 13118 - DNA, 25 bp, Artificial
  probe
  misc_feature (1)..(25): SEQ ID NO: 6061; WAN02497T_at; Start 115; Stop 139
tcattatacaataaatcgatagaaa

SEQ ID NO: 13119 - DNA, 25 bp, Artificial
  probe
  misc_feature (1)..(25): SEQ ID NO: 6061; WAN02497T_at; Start 200; Stop 224
cgataaaaaacagagataacatctc

SEQ ID NO: 13120 - DNA, 25 bp, Artificial
  probe
  misc_feature (1)..(25): SEQ ID NO: 6061; WAN02497T_at; Start 273; Stop 297
attaccgcttatgcttttaatgggc

SEQ ID NO: 13121 - DNA, 25 bp, Artificial
  probe
  misc_feature (1)..(25): SEQ ID NO: 6061; WAN02497T_at; Start 6; Stop 30
cctcgctttttctatattctttata

SEQ ID NO: 13122 - DNA, 25 bp, Artificial
  probe
  misc_feature (1)..(25): SEQ ID NO: 6061; WAN02497T_at; Start 233; Stop 257
agtgtggacttcagactaattacag

SEQ ID NO: 13123 - DNA, 25 bp, Artificial
  probe
  misc_feature (1)..(25): SEQ ID NO: 6061; WAN02497T_at; Start 154; Stop 178
tacttaaaaatattctgcatactat

SEQ ID NO: 13124 - DNA, 25 bp, Artificial
  probe
  misc_feature (1)..(25): SEQ ID NO: 6061; WAN02497T_at; Start 148; Stop 172
gaaatatacttaaaaatattctgca

SEQ ID NO: 13125 - DNA, 25 bp, Artificial
  probe
  misc_feature (1)..(25): SEQ ID NO: 6061; WAN02497T_at; Start 272; Stop 296
gattaccgcttatgcttttaatggg

SEQ ID NO: 13126 - DNA, 25 bp, Artificial
  probe
  misc_feature (1)..(25): SEQ ID NO: 6061; WAN02497T_at; Start 132; Stop 156
gatagaaatttctattgaaatatac

SEQ ID NO: 13127 - DNA, 25 bp, Artificial
  probe
  misc_feature (1)..(25): SEQ ID NO: 6137; WAN02497U_at; Start 74; Stop 98
gctttcaacgcttagttatatcata

SEQ ID NO: 13128 - DNA, 25 bp, Artificial
  probe
  misc_feature (1)..(25): SEQ ID NO: 6137; WAN02497U_at; Start 135; Stop 159
ctcccaaaagtaggcgcaatgactc

SEQ ID NO: 13129 - DNA, 25 bp, Artificial
  probe
  misc_feature (1)..(25): SEQ ID NO: 6137; WAN02497U_at; Start 136; Stop 160
tcccaaaagtaggcgcaatgactct

SEQ ID NO: 13130 - DNA, 25 bp, Artificial
  probe
  misc_feature (1)..(25): SEQ ID NO: 6137; WAN02497U_at; Start 64; Stop 88
ttaacagatagctttcaacgcttag

SEQ ID NO: 13131 - DNA, 25 bp, Artificial
  probe
  misc_feature (1)..(25): SEQ ID NO: 6137; WAN02497U_at; Start 6; Stop 30
tagcaaatacaattttcttcgtttc

SEQ ID NO: 13132 - DNA, 25 bp, Artificial
  probe
  misc_feature (1)..(25): SEQ ID NO: 6137; WAN02497U_at; Start 113; Stop 137
gtctctgcgtacctattcctagctc

SEQ ID NO: 13133 - DNA, 25 bp, Artificial
  probe
  misc_feature (1)..(25): SEQ ID NO: 6137; WAN02497U_at; Start 123; Stop 147
acctattcctagctcccaaaagtag

SEQ ID NO: 13134 - DNA, 25 bp, Artificial
  probe
  misc_feature (1)..(25): SEQ ID NO: 6137; WAN02497U_at; Start 130; Stop 154
cctagctcccaaaagtaggcgcaat

SEQ ID NO: 13135 - DNA, 25 bp, Artificial
  probe
  misc_feature (1)..(25): SEQ ID NO: 6137; WAN02497U_at; Start 118; Stop 142
tgcgtacctattcctagctcccaaa

SEQ ID NO: 13136 - DNA, 25 bp, Artificial
  probe
  misc_feature (1)..(25): SEQ ID NO: 6137; WAN02497U_at; Start 134; Stop 158
gctcccaaaagtaggcgcaatgact

SEQ ID NO: 13137 - DNA, 25 bp, Artificial
  probe
  misc_feature (1)..(25): SEQ ID NO: 6137; WAN02497U_at; Start 129; Stop 153
tcctagctcccaaaagtaggcgcaa

SEQ ID NO: 13138 - DNA, 25 bp, Artificial
  probe
  misc_feature (1)..(25): SEQ ID NO: 6137; WAN02497U_at; Start 131; Stop 155
ctagctcccaaaagtaggcgcaatg

SEQ ID NO: 13139 - DNA, 25 bp, Artificial
  probe
  misc_feature (1)..(25): SEQ ID NO: 6137; WAN02497U_at; Start 127; Stop 151
attcctagctcccaaaagtaggcgc

SEQ ID NO: 13140 - DNA, 25 bp, Artificial
  probe
  misc_feature (1)..(25): SEQ ID NO: 6137; WAN02497U_at; Start 65; Stop 89
taacagatagctttcaacgcttagt

SEQ ID NO: 13141 - DNA, 25 bp, Artificial
  probe
  misc_feature (1)..(25): SEQ ID NO: 6137; WAN02497U_at; Start 133; Stop 157
agctcccaaaagtaggcgcaatgac

SEQ ID NO: 13142 - DNA, 25 bp, Artificial
  probe
  misc_feature (1)..(25): SEQ ID NO: 6137; WAN02497U_at; Start 70; Stop 94
gatagctttcaacgcttagttatat

SEQ ID NO: 13143 - DNA, 25 bp, Artificial
  probe
  misc_feature (1)..(25): SEQ ID NO: 6137; WAN02497U_at; Start 128; Stop 152
ttcctagctcccaaaagtaggcgca

SEQ ID NO: 13144 - DNA, 25 bp, Artificial
  probe
  misc_feature (1)..(25): SEQ ID NO: 6137; WAN02497U_at; Start 107; Stop 131
ctatttgtctctgcgtacctattcc

SEQ ID NO: 13145 - DNA, 25 bp, Artificial
  probe
  misc_feature (1)..(25): SEQ ID NO: 6137; WAN02497U_at; Start 2; Stop 26
gcactagcaaatacaattttcttcg

SEQ ID NO: 13146 - DNA, 25 bp, Artificial
  probe
  misc_feature (1)..(25): SEQ ID NO: 6137; WAN02497U_at; Start 67; Stop 91
acagatagctttcaacgcttagtta

SEQ ID NO: 13147 - DNA, 25 bp, Artificial
  probe
  misc_feature (1)..(25): SEQ ID NO: 6137; WAN02497U_at; Start 103; Stop 127
cctactatttgtctctgcgtaccta

SEQ ID NO: 13148 - DNA, 25 bp, Artificial
  probe
  misc_feature (1)..(25): SEQ ID NO: 6137; WAN02497U_at; Start 132; Stop 156
tagctcccaaaagtaggcgcaatga

SEQ ID NO: 13149 - DNA, 25 bp, Artificial
  probe
  misc_feature (1)..(25): SEQ ID NO: 6137; WAN02497U_at; Start 101; Stop 125
ttcctactatttgtctctgcgtacc

SEQ ID NO: 13150 - DNA, 25 bp, Artificial
  probe
  misc_feature (1)..(25): SEQ ID NO: 6137; WAN02497U_at; Start 125; Stop 149
ctattcctagctcccaaaagtaggc

SEQ ID NO: 13151 - DNA, 25 bp, Artificial
  probe
  misc_feature (1)..(25): SEQ ID NO: 6137; WAN02497U_at; Start 110; Stop 134
tttgtctctgcgtacctattcctag

SEQ ID NO: 13152 - DNA, 25 bp, Artificial
  probe
  misc_feature (1)..(25): SEQ ID NO: 6137; WAN02497U_at; Start 79; Stop 103
caacgcttagttatatcatattttc

SEQ ID NO: 13153 - DNA, 25 bp, Artificial
  probe
  misc_feature (1)..(25): SEQ ID NO: 6137; WAN02497U_at; Start 120; Stop 144
cgtacctattcctagctcccaaaag

SEQ ID NO: 13154 - DNA, 25 bp, Artificial
  probe
  misc_feature (1)..(25): SEQ ID NO: 6137; WAN02497U_at; Start 82; Stop 106
cgcttagttatatcatattttccta

SEQ ID NO: 13155 - DNA, 25 bp, Artificial
  probe
  misc_feature (1)..(25): SEQ ID NO: 6137; WAN02497U_at; Start 97; Stop 121
tattttcctactatttgtctctgcg

SEQ ID NO: 13156 - DNA, 25 bp, Artificial
  probe
  misc_feature (1)..(25): SEQ ID NO: 6137; WAN02497U_at; Start 33; Stop 57
tcttactccttattgtagtttgaat

SEQ ID NO: 13157 - DNA, 25 bp, Artificial
  probe
  misc_feature (1)..(25): SEQ ID NO: 6137; WAN02497U_at; Start 37; Stop 61
actccttattgtagtttgaatatta

SEQ ID NO: 13158 - DNA, 25 bp, Artificial
  probe
  misc_feature (1)..(25): SEQ ID NO: 6137; WAN02497U_at; Start 1; Stop 25
ggcactagcaaatacaattttcttc

SEQ ID NO: 13159 - DNA, 25 bp, Artificial
  probe
  misc_feature (1)..(25): SEQ ID NO: 6137; WAN02497U_at; Start 52; Stop 76
ttgaatattatattaacagatagct

SEQ ID NO: 13160 - DNA, 25 bp, Artificial
  probe
  misc_feature (1)..(25): SEQ ID NO: 6137; WAN02497U_at; Start 112; Stop 136
tgtctctgcgtacctattcctagct

SEQ ID NO: 13161 - DNA, 25 bp, Artificial
  probe
  misc_feature (1)..(25): SEQ ID NO: 6200; WAN02497V_at; Start 26; Stop 50
gggctctagctttgatcctatagga

SEQ ID NO: 13162 - DNA, 25 bp, Artificial
  probe
  misc_feature (1)..(25): SEQ ID NO: 6200; WAN02497V_at; Start 56; Stop 80
cgtctactgactaaatgcttaagcc

SEQ ID NO: 13163 - DNA, 25 bp, Artificial
  probe
  misc_feature (1)..(25): SEQ ID NO: 6200; WAN02497V_at; Start 48; Stop 72
ggacaaagcgtctactgactaaatg

SEQ ID NO: 13164 - DNA, 25 bp, Artificial
  probe
  misc_feature (1)..(25): SEQ ID NO: 6200; WAN02497V_at; Start 29; Stop 53
ctctagctttgatcctataggacaa

SEQ ID NO: 13165 - DNA, 25 bp, Artificial
  probe
  misc_feature (1)..(25): SEQ ID NO: 6200; WAN02497V_at; Start 49; Stop 73
gacaaagcgtctactgactaaatgc

SEQ ID NO: 13166 - DNA, 25 bp, Artificial
  probe
  misc_feature (1)..(25): SEQ ID NO: 6200; WAN02497V_at; Start 11; Stop 35
taaaaatactagtcagggctctagc

SEQ ID NO: 13167 - DNA, 25 bp, Artificial
  probe
  misc_feature (1)..(25): SEQ ID NO: 6200; WAN02497V_at; Start 43; Stop 67
ctataggacaaagcgtctactgact

SEQ ID NO: 13168 - DNA, 25 bp, Artificial
  probe
  misc_feature (1)..(25): SEQ ID NO: 6200; WAN02497V_at; Start 42; Stop 66
cctataggacaaagcgtctactgac

SEQ ID NO: 13169 - DNA, 25 bp, Artificial
  probe
  misc_feature (1)..(25): SEQ ID NO: 6200; WAN02497V_at; Start 9; Stop 33
tctaaaaatactagtcagggctcta

SEQ ID NO: 13170 - DNA, 25 bp, Artificial
  probe
  misc_feature (1)..(25): SEQ ID NO: 6200; WAN02497V_at; Start 18; Stop 42
actagtcagggctctagctttgatc

SEQ ID NO: 13171 - DNA, 25 bp, Artificial
  probe
  misc_feature (1)..(25): SEQ ID NO: 6200; WAN02497V_at; Start 12; Stop 36
aaaaatactagtcagggctctagct

SEQ ID NO: 13172 - DNA, 25 bp, Artificial
  probe
  misc_feature (1)..(25): SEQ ID NO: 6200; WAN02497V_at; Start 20; Stop 44
tagtcagggctctagctttgatcct

SEQ ID NO: 13173 - DNA, 25 bp, Artificial
  probe
  misc_feature (1)..(25): SEQ ID NO: 6200; WAN02497V_at; Start 22; Stop 46
gtcagggctctagctttgatcctat

SEQ ID NO: 13174 - DNA, 25 bp, Artificial
  probe
  misc_feature (1)..(25): SEQ ID NO: 6200; WAN02497V_at; Start 54; Stop 78
agcgtctactgactaaatgcttaag

SEQ ID NO: 13175 - DNA, 25 bp, Artificial
  probe
  misc_feature (1)..(25): SEQ ID NO: 6200; WAN02497V_at; Start 13; Stop 37
aaaatactagtcagggctctagctt

SEQ ID NO: 13176 - DNA, 25 bp, Artificial
  probe
  misc_feature (1)..(25): SEQ ID NO: 6200; WAN02497V_at; Start 36; Stop 60
tttgatcctataggacaaagcgtct

SEQ ID NO: 13177 - DNA, 25 bp, Artificial
  probe
  misc_feature (1)..(25): SEQ ID NO: 6200; WAN02497V_at; Start 38; Stop 62
tgatcctataggacaaagcgtctac

SEQ ID NO: 13178 - DNA, 25 bp, Artificial
  probe
  misc_feature (1)..(25): SEQ ID NO: 6200; WAN02497V_at; Start 23; Stop 47
tcagggctctagctttgatcctata

SEQ ID NO: 13179 - DNA, 25 bp, Artificial
  probe
  misc_feature (1)..(25): SEQ ID NO: 6200; WAN02497V_at; Start 57; Stop 81
gtctactgactaaatgcttaagcct

SEQ ID NO: 13180 - DNA, 25 bp, Artificial
  probe
  misc_feature (1)..(25): SEQ ID NO: 6200; WAN02497V_at; Start 58; Stop 82
tctactgactaaatgcttaagcctt

SEQ ID NO: 13181 - DNA, 25 bp, Artificial
  probe
  misc_feature (1)..(25): SEQ ID NO: 6200; WAN02497V_at; Start 25; Stop 49
agggctctagctttgatcctatagg

SEQ ID NO: 13182 - DNA, 25 bp, Artificial
  probe
  misc_feature (1)..(25): SEQ ID NO: 6200; WAN02497V_at; Start 46; Stop 70
taggacaaagcgtctactgactaaa

SEQ ID NO: 13183 - DNA, 25 bp, Artificial
  probe
  misc_feature (1)..(25): SEQ ID NO: 6200; WAN02497V_at; Start 39; Stop 63
gatcctataggacaaagcgtctact

SEQ ID NO: 13184 - DNA, 25 bp, Artificial
  probe
  misc_feature (1)..(25): SEQ ID NO: 6200; WAN02497V_at; Start 27; Stop 51
ggctctagctttgatcctataggac

SEQ ID NO: 13185 - DNA, 25 bp, Artificial
  probe
  misc_feature (1)..(25): SEQ ID NO: 6200; WAN02497V_at; Start 14; Stop 38
aaatactagtcagggctctagcttt

SEQ ID NO: 13186 - DNA, 25 bp, Artificial
  probe
  misc_feature (1)..(25): SEQ ID NO: 6200; WAN02497V_at; Start 31; Stop 55
ctagctttgatcctataggacaaag

SEQ ID NO: 13187 - DNA, 25 bp, Artificial
  probe
  misc_feature (1)..(25): SEQ ID NO: 6200; WAN02497V_at; Start 21; Stop 45
agtcagggctctagctttgatccta

SEQ ID NO: 13188 - DNA, 25 bp, Artificial
  probe
  misc_feature (1)..(25): SEQ ID NO: 6200; WAN02497V_at; Start 41; Stop 65
tcctataggacaaagcgtctactga

SEQ ID NO: 13189 - DNA, 25 bp, Artificial
  probe
  misc_feature (1)..(25): SEQ ID NO: 6200; WAN02497V_at; Start 59; Stop 83
ctactgactaaatgcttaagccttt

SEQ ID NO: 13190 - DNA, 25 bp, Artificial
  probe
  misc_feature (1)..(25): SEQ ID NO: 6200; WAN02497V_at; Start 7; Stop 31
tatctaaaaatactagtcagggctc

SEQ ID NO: 13191 - DNA, 25 bp, Artificial
  probe
  misc_feature (1)..(25): SEQ ID NO: 6200; WAN02497V_at; Start 51; Stop 75
caaagcgtctactgactaaatgctt

SEQ ID NO: 13192 - DNA, 25 bp, Artificial
  probe
  misc_feature (1)..(25): SEQ ID NO: 6200; WAN02497V_at; Start 28; Stop 52
gctctagctttgatcctataggaca

SEQ ID NO: 13193 - DNA, 25 bp, Artificial
  probe
  misc_feature (1)..(25): SEQ ID NO: 6200; WAN02497V_at; Start 24; Stop 48
cagggctctagctttgatcctatag

SEQ ID NO: 13194 - DNA, 25 bp, Artificial
  probe
  misc_feature (1)..(25): SEQ ID NO: 6200; WAN02497V_at; Start 55; Stop 79
gcgtctactgactaaatgcttaagc

SEQ ID NO: 13195 - DNA, 25 bp, Artificial
  probe
  misc_feature (1)..(25): SEQ ID NO: 6192; WAN02497W_at; Start 48; Stop 72
taccatagatagcaagaattttcca

SEQ ID NO: 13196 - DNA, 25 bp, Artificial
  probe
  misc_feature (1)..(25): SEQ ID NO: 6192; WAN02497W_at; Start 58; Stop 82
agcaagaattttccacaagctgtga

SEQ ID NO: 13197 - DNA, 25 bp, Artificial
  probe
  misc_feature (1)..(25): SEQ ID NO: 6192; WAN02497W_at; Start 59; Stop 83
gcaagaattttccacaagctgtgaa

SEQ ID NO: 13198 - DNA, 25 bp, Artificial
  probe
  misc_feature (1)..(25): SEQ ID NO: 6192; WAN02497W_at; Start 52; Stop 76
atagatagcaagaattttccacaag

SEQ ID NO: 13199 - DNA, 25 bp, Artificial
  probe
  misc_feature (1)..(25): SEQ ID NO: 6192; WAN02497W_at; Start 60; Stop 84
caagaattttccacaagctgtgaaa

SEQ ID NO: 13200 - DNA, 25 bp, Artificial
  probe
  misc_feature (1)..(25): SEQ ID NO: 6192; WAN02497W_at; Start 46; Stop 70
tttaccatagatagcaagaattttc

SEQ ID NO: 13201 - DNA, 25 bp, Artificial
  probe
  misc_feature (1)..(25): SEQ ID NO: 6192; WAN02497W_at; Start 28; Stop 52
gtttaatactagagatattttacca

SEQ ID NO: 13202 - DNA, 25 bp, Artificial
  probe
  misc_feature (1)..(25): SEQ ID NO: 6192; WAN02497W_at; Start 54; Stop 78
agatagcaagaattttccacaagct

SEQ ID NO: 13203 - DNA, 25 bp, Artificial
  probe
  misc_feature (1)..(25): SEQ ID NO: 6192; WAN02497W_at; Start 61; Stop 85
aagaattttccacaagctgtgaaaa

SEQ ID NO: 13204 - DNA, 25 bp, Artificial
  probe
  misc_feature (1)..(25): SEQ ID NO: 6192; WAN02497W_at; Start 32; Stop 56
aatactagagatattttaccataga

SEQ ID NO: 13205 - DNA, 25 bp, Artificial
  probe
  misc_feature (1)..(25): SEQ ID NO: 6192; WAN02497W_at; Start 41; Stop 65
gatattttaccatagatagcaagaa

SEQ ID NO: 13206 - DNA, 25 bp, Artificial
  probe
  misc_feature (1)..(25): SEQ ID NO: 6192; WAN02497W_at; Start 51; Stop 75
catagatagcaagaattttccacaa

SEQ ID NO: 13207 - DNA, 25 bp, Artificial
  probe
  misc_feature (1)..(25): SEQ ID NO: 6192; WAN02497W_at; Start 63; Stop 87
gaattttccacaagctgtgaaaaat

SEQ ID NO: 13208 - DNA, 25 bp, Artificial
  probe
  misc_feature (1)..(25): SEQ ID NO: 6192; WAN02497W_at; Start 47; Stop 71
ttaccatagatagcaagaattttcc

SEQ ID NO: 13209 - DNA, 25 bp, Artificial
  probe
  misc_feature (1)..(25): SEQ ID NO: 6192; WAN02497W_at; Start 39; Stop 63
gagatattttaccatagatagcaag

SEQ ID NO: 13210 - DNA, 25 bp, Artificial
  probe
  misc_feature (1)..(25): SEQ ID NO: 6192; WAN02497W_at; Start 43; Stop 67
tattttaccatagatagcaagaatt

SEQ ID NO: 13211 - DNA, 25 bp, Artificial
  probe
  misc_feature (1)..(25): SEQ ID NO: 6192; WAN02497W_at; Start 49; Stop 73
accatagatagcaagaattttccac

SEQ ID NO: 13212 - DNA, 25 bp, Artificial
  probe
  misc_feature (1)..(25): SEQ ID NO: 6192; WAN02497W_at; Start 70; Stop 94
ccacaagctgtgaaaaataatccac

SEQ ID NO: 13213 - DNA, 25 bp, Artificial
  probe
  misc_feature (1)..(25): SEQ ID NO: 6192; WAN02497W_at; Start 50; Stop 74
ccatagatagcaagaattttccaca

SEQ ID NO: 13214 - DNA, 25 bp, Artificial
  probe
  misc_feature (1)..(25): SEQ ID NO: 6192; WAN02497W_at; Start 64; Stop 88
aattttccacaagctgtgaaaaata

SEQ ID NO: 13215 - DNA, 25 bp, Artificial
  probe
  misc_feature (1)..(25): SEQ ID NO: 6192; WAN02497W_at; Start 68; Stop 92
ttccacaagctgtgaaaaataatcc

SEQ ID NO: 13216 - DNA, 25 bp, Artificial
  probe
  misc_feature (1)..(25): SEQ ID NO: 6192; WAN02497W_at; Start 55; Stop 79
gatagcaagaattttccacaagctg

SEQ ID NO: 13217 - DNA, 25 bp, Artificial
  probe
  misc_feature (1)..(25): SEQ ID NO: 6192; WAN02497W_at; Start 56; Stop 80
atagcaagaattttccacaagctgt

SEQ ID NO: 13218 - DNA, 25 bp, Artificial
  probe
  misc_feature (1)..(25): SEQ ID NO: 6192; WAN02497W_at; Start 71; Stop 95
cacaagctgtgaaaaataatccaca

SEQ ID NO: 13219 - DNA, 25 bp, Artificial
  probe
  misc_feature (1)..(25): SEQ ID NO: 6192; WAN02497W_at; Start 67; Stop 91
tttccacaagctgtgaaaaataatc

SEQ ID NO: 13220 - DNA, 25 bp, Artificial
  probe
  misc_feature (1)..(25): SEQ ID NO: 6192; WAN02497W_at; Start 38; Stop 62
agagatattttaccatagatagcaa

SEQ ID NO: 13221 - DNA, 25 bp, Artificial
  probe
  misc_feature (1)..(25): SEQ ID NO: 6192; WAN02497W_at; Start 31; Stop 55
taatactagagatattttaccatag

SEQ ID NO: 13222 - DNA, 25 bp, Artificial
  probe
  misc_feature (1)..(25): SEQ ID NO: 6192; WAN02497W_at; Start 62; Stop 86
agaattttccacaagctgtgaaaaa

SEQ ID NO: 13223 - DNA, 25 bp, Artificial
  probe
  misc_feature (1)..(25): SEQ ID NO: 6192; WAN02497W_at; Start 69; Stop 93
tccacaagctgtgaaaaataatcca

SEQ ID NO: 13224 - DNA, 25 bp, Artificial
  probe
  misc_feature (1)..(25): SEQ ID NO: 6192; WAN02497W_at; Start 53; Stop 77
tagatagcaagaattttccacaagc

SEQ ID NO: 13225 - DNA, 25 bp, Artificial
  probe
  misc_feature (1)..(25): SEQ ID NO: 6192; WAN02497W_at; Start 36; Stop 60
ctagagatattttaccatagatagc

SEQ ID NO: 13226 - DNA, 25 bp, Artificial
  probe
  misc_feature (1)..(25): SEQ ID NO: 6192; WAN02497W_at; Start 37; Stop 61
tagagatattttaccatagatagca

SEQ ID NO: 13227 - DNA, 25 bp, Artificial
  probe
  misc_feature (1)..(25): SEQ ID NO: 6192; WAN02497W_at; Start 57; Stop 81
tagcaagaattttccacaagctgtg

SEQ ID NO: 13228 - DNA, 25 bp, Artificial
  probe
  misc_feature (1)..(25): SEQ ID NO: 6192; WAN02497W_at; Start 40; Stop 64
agatattttaccatagatagcaaga

SEQ ID NO: 13229 - DNA, 25 bp, Artificial
  probe
  misc_feature (1)..(25): SEQ ID NO: 6075; WAN02497X_at; Start 79; Stop 103
aatgaaaacgctatacttgtatttg

SEQ ID NO: 13230 - DNA, 25 bp, Artificial
  probe
  misc_feature (1)..(25): SEQ ID NO: 6075; WAN02497X_at; Start 170; Stop 194
cactttttcaagttgtgtacggaca

SEQ ID NO: 13231 - DNA, 25 bp, Artificial
  probe
  misc_feature (1)..(25): SEQ ID NO: 6075; WAN02497X_at; Start 175; Stop 199
tttcaagttgtgtacggacaaagcc

SEQ ID NO: 13232 - DNA, 25 bp, Artificial
  probe
  misc_feature (1)..(25): SEQ ID NO: 6075; WAN02497X_at; Start 253; Stop 277
taaatttgacttaactgttggagta

SEQ ID NO: 13233 - DNA, 25 bp, Artificial
  probe
  misc_feature (1)..(25): SEQ ID NO: 6075; WAN02497X_at; Start 160; Stop 184
aatcggtgcgcactttttcaagttg

SEQ ID NO: 13234 - DNA, 25 bp, Artificial
  probe
  misc_feature (1)..(25): SEQ ID NO: 6075; WAN02497X_at; Start 50; Stop 74
tacttgaatctacctatttaataaa

SEQ ID NO: 13235 - DNA, 25 bp, Artificial
  probe
  misc_feature (1)..(25): SEQ ID NO: 6075; WAN02497X_at; Start 24; Stop 48
gccacacataaattaagtaaattct

SEQ ID NO: 13236 - DNA, 25 bp, Artificial
  probe
  misc_feature (1)..(25): SEQ ID NO: 6075; WAN02497X_at; Start 197; Stop 221
gccttattttaactttgctatgttg

SEQ ID NO: 13237 - DNA, 25 bp, Artificial
  probe
  misc_feature (1)..(25): SEQ ID NO: 6075; WAN02497X_at; Start 39; Stop 63
agtaaattctctacttgaatctacc

SEQ ID NO: 13238 - DNA, 25 bp, Artificial
  probe
  misc_feature (1)..(25): SEQ ID NO: 6075; WAN02497X_at; Start 194; Stop 218
aaagccttattttaactttgctatg

SEQ ID NO: 13239 - DNA, 25 bp, Artificial
  probe
  misc_feature (1)..(25): SEQ ID NO: 6075; WAN02497X_at; Start 166; Stop 190
tgcgcactttttcaagttgtgtacg

SEQ ID NO: 13240 - DNA, 25 bp, Artificial
  probe
  misc_feature (1)..(25): SEQ ID NO: 6075; WAN02497X_at; Start 260; Stop 284
gacttaactgttggagtagtcatgg

SEQ ID NO: 13241 - DNA, 25 bp, Artificial
  probe
  misc_feature (1)..(25): SEQ ID NO: 6075; WAN02497X_at; Start 46; Stop 70
tctctacttgaatctacctatttaa

SEQ ID NO: 13242 - DNA, 25 bp, Artificial
  probe
  misc_feature (1)..(25): SEQ ID NO: 6075; WAN02497X_at; Start 224; Stop 248
tctaatggttccaaaataataaata

SEQ ID NO: 13243 - DNA, 25 bp, Artificial
  probe
  misc_feature (1)..(25): SEQ ID NO: 6075; WAN02497X_at; Start 168; Stop 192
cgcactttttcaagttgtgtacgga

SEQ ID NO: 13244 - DNA, 25 bp, Artificial
  probe
  misc_feature (1)..(25): SEQ ID NO: 6075; WAN02497X_at; Start 75; Stop 99
aactaatgaaaacgctatacttgta

SEQ ID NO: 13245 - DNA, 25 bp, Artificial
  probe
  misc_feature (1)..(25): SEQ ID NO: 6075; WAN02497X_at; Start 220; Stop 244
tgtttctaatggttccaaaataata

SEQ ID NO: 13246 - DNA, 25 bp, Artificial
  probe
  misc_feature (1)..(25): SEQ ID NO: 6075; WAN02497X_at; Start 162; Stop 186
tcggtgcgcactttttcaagttgtg

SEQ ID NO: 13247 - DNA, 25 bp, Artificial
  probe
  misc_feature (1)..(25): SEQ ID NO: 6075; WAN02497X_at; Start 261; Stop 285
acttaactgttggagtagtcatggt

SEQ ID NO: 13248 - DNA, 25 bp, Artificial
  probe
  misc_feature (1)..(25): SEQ ID NO: 6075; WAN02497X_at; Start 148; Stop 172
aaaaaagcaccgaatcggtgcgcac

SEQ ID NO: 13249 - DNA, 25 bp, Artificial
  probe
  misc_feature (1)..(25): SEQ ID NO: 6075; WAN02497X_at; Start 180; Stop 204
agttgtgtacggacaaagccttatt

SEQ ID NO: 13250 - DNA, 25 bp, Artificial
  probe
  misc_feature (1)..(25): SEQ ID NO: 6075; WAN02497X_at; Start 109; Stop 133
tcattaaaataagagtagaataaat

SEQ ID NO: 13251 - DNA, 25 bp, Artificial
  probe
  misc_feature (1)..(25): SEQ ID NO: 6075; WAN02497X_at; Start 19; Stop 43
gattagccacacataaattaagtaa

SEQ ID NO: 13252 - DNA, 25 bp, Artificial
  probe
  misc_feature (1)..(25): SEQ ID NO: 6075; WAN02497X_at; Start 11; Stop 35
tatataaagattagccacacataaa

SEQ ID NO: 13253 - DNA, 25 bp, Artificial
  probe
  misc_feature (1)..(25): SEQ ID NO: 6075; WAN02497X_at; Start 158; Stop 182
cgaatcggtgcgcactttttcaagt

SEQ ID NO: 13254 - DNA, 25 bp, Artificial
  probe
  misc_feature (1)..(25): SEQ ID NO: 6075; WAN02497X_at; Start 118; Stop 142
taagagtagaataaattagtatagt

SEQ ID NO: 13255 - DNA, 25 bp, Artificial
  probe
  misc_feature (1)..(25): SEQ ID NO: 6075; WAN02497X_at; Start 87; Stop 111
cgctatacttgtatttgttttttca

SEQ ID NO: 13256 - DNA, 25 bp, Artificial
  probe
  misc_feature (1)..(25): SEQ ID NO: 6075; WAN02497X_at; Start 183; Stop 207
tgtgtacggacaaagccttatttta

SEQ ID NO: 13257 - DNA, 25 bp, Artificial
  probe
  misc_feature (1)..(25): SEQ ID NO: 6075; WAN02497X_at; Start 177; Stop 201
tcaagttgtgtacggacaaagcctt

SEQ ID NO: 13258 - DNA, 25 bp, Artificial
  probe
  misc_feature (1)..(25): SEQ ID NO: 6075; WAN02497X_at; Start 212; Stop 236
tgctatgttgtttctaatggttcca

SEQ ID NO: 13259 - DNA, 25 bp, Artificial
  probe
  misc_feature (1)..(25): SEQ ID NO: 6075; WAN02497X_at; Start 73; Stop 97
aaaactaatgaaaacgctatacttg

SEQ ID NO: 13260 - DNA, 25 bp, Artificial
  probe
  misc_feature (1)..(25): SEQ ID NO: 6075; WAN02497X_at; Start 145; Stop 169
aacaaaaaagcaccgaatcggtgcg

SEQ ID NO: 13261 - DNA, 25 bp, Artificial
  probe
  misc_feature (1)..(25): SEQ ID NO: 6075; WAN02497X_at; Start 155; Stop 179
caccgaatcggtgcgcactttttca

SEQ ID NO: 13262 - DNA, 25 bp, Artificial
  probe
  misc_feature (1)..(25): SEQ ID NO: 6075; WAN02497X_at; Start 7; Stop 31
catttatataaagattagccacaca

SEQ ID NO: 13263 - DNA, 25 bp, Artificial
  probe
  misc_feature (1)..(25): SEQ ID NO: 6172; WAN02497Y_at; Start 190; Stop 214
cttgtcatcgttttatcgtaaatct

SEQ ID NO: 13264 - DNA, 25 bp, Artificial
  probe
  misc_feature (1)..(25): SEQ ID NO: 6172; WAN02497Y_at; Start 192; Stop 216
tgtcatcgttttatcgtaaatctgt

SEQ ID NO: 13265 - DNA, 25 bp, Artificial
  probe
  misc_feature (1)..(25): SEQ ID NO: 6172; WAN02497Y_at; Start 193; Stop 217
gtcatcgttttatcgtaaatctgtt

SEQ ID NO: 13266 - DNA, 25 bp, Artificial
  probe
  misc_feature (1)..(25): SEQ ID NO: 6172; WAN02497Y_at; Start 189; Stop 213
ccttgtcatcgttttatcgtaaatc

SEQ ID NO: 13267 - DNA, 25 bp, Artificial
  probe
  misc_feature (1)..(25): SEQ ID NO: 6172; WAN02497Y_at; Start 191; Stop 215
ttgtcatcgttttatcgtaaatctg

SEQ ID NO: 13268 - DNA, 25 bp, Artificial
  probe
  misc_feature (1)..(25): SEQ ID NO: 6172; WAN02497Y_at; Start 194; Stop 218
tcatcgttttatcgtaaatctgtta

SEQ ID NO: 13269 - DNA, 25 bp, Artificial
  probe
  misc_feature (1)..(25): SEQ ID NO: 6122; WAN02497Z_at; Start 1; Stop 25
gatatttcctttcataaatagaaga

SEQ ID NO: 13270 - DNA, 25 bp, Artificial
  probe
  misc_feature (1)..(25): SEQ ID NO: 6122; WAN02497Z_at; Start 13; Stop 37
cataaatagaagatttctagtgtaa

SEQ ID NO: 13271 - DNA, 25 bp, Artificial
  probe
  misc_feature (1)..(25): SEQ ID NO: 6122; WAN02497Z_at; Start 27; Stop 51
ttctagtgtaattaactccactaat

SEQ ID NO: 13272 - DNA, 25 bp, Artificial
  probe
  misc_feature (1)..(25): SEQ ID NO: 6122; WAN02497Z_at; Start 18; Stop 42
atagaagatttctagtgtaattaac

SEQ ID NO: 13273 - DNA, 25 bp, Artificial
  probe
  misc_feature (1)..(25): SEQ ID NO: 6122; WAN02497Z_at; Start 30; Stop 54
tagtgtaattaactccactaatctt

SEQ ID NO: 13274 - DNA, 25 bp, Artificial
  probe
  misc_feature (1)..(25): SEQ ID NO: 6122; WAN02497Z_at; Start 9; Stop 33
ctttcataaatagaagatttctagt

SEQ ID NO: 13275 - DNA, 25 bp, Artificial
  probe
  misc_feature (1)..(25): SEQ ID NO: 6122; WAN02497Z_at; Start 22; Stop 46
aagatttctagtgtaattaactcca

SEQ ID NO: 13276 - DNA, 25 bp, Artificial
  probe
  misc_feature (1)..(25): SEQ ID NO: 6122; WAN02497Z_at; Start 14; Stop 38
ataaatagaagatttctagtgtaat

SEQ ID NO: 13277 - DNA, 25 bp, Artificial
  probe
  misc_feature (1)..(25): SEQ ID NO: 6122; WAN02497Z_at; Start 15; Stop 39
taaatagaagatttctagtgtaatt

SEQ ID NO: 13278 - DNA, 25 bp, Artificial
  probe
  misc_feature (1)..(25): SEQ ID NO: 6122; WAN02497Z_at; Start 3; Stop 27
tatttcctttcataaatagaagatt

SEQ ID NO: 13279 - DNA, 25 bp, Artificial
  probe
  misc_feature (1)..(25): SEQ ID NO: 6122; WAN02497Z_at; Start 29; Stop 53
ctagtgtaattaactccactaatct

SEQ ID NO: 13280 - DNA, 25 bp, Artificial
  probe
  misc_feature (1)..(25): SEQ ID NO: 6122; WAN02497Z_at; Start 2; Stop 26
atatttcctttcataaatagaagat

SEQ ID NO: 13281 - DNA, 25 bp, Artificial
  probe
  misc_feature (1)..(25): SEQ ID NO: 6122; WAN02497Z_at; Start 24; Stop 48
gatttctagtgtaattaactccact

SEQ ID NO: 13282 - DNA, 25 bp, Artificial
  probe
  misc_feature (1)..(25): SEQ ID NO: 6122; WAN02497Z_at; Start 28; Stop 52
tctagtgtaattaactccactaatc

SEQ ID NO: 13283 - DNA, 25 bp, Artificial
  probe
  misc_feature (1)..(25): SEQ ID NO: 6122; WAN02497Z_at; Start 10; Stop 34
tttcataaatagaagatttctagtg

SEQ ID NO: 13284 - DNA, 25 bp, Artificial
  probe
  misc_feature (1)..(25): SEQ ID NO: 6122; WAN02497Z_at; Start 19; Stop 43
tagaagatttctagtgtaattaact

SEQ ID NO: 13285 - DNA, 25 bp, Artificial
  probe
  misc_feature (1)..(25): SEQ ID NO: 6122; WAN02497Z_at; Start 7; Stop 31
tcctttcataaatagaagatttcta

SEQ ID NO: 13286 - DNA, 25 bp, Artificial
  probe
  misc_feature (1)..(25): SEQ ID NO: 6122; WAN02497Z_at; Start 6; Stop 30
ttcctttcataaatagaagatttct

SEQ ID NO: 13287 - DNA, 25 bp, Artificial
  probe
  misc_feature (1)..(25): SEQ ID NO: 6122; WAN02497Z_at; Start 11; Stop 35
ttcataaatagaagatttctagtgt

SEQ ID NO: 13288 - DNA, 25 bp, Artificial
  probe
  misc_feature (1)..(25): SEQ ID NO: 6122; WAN02497Z_at; Start 12; Stop 36
tcataaatagaagatttctagtgta

SEQ ID NO: 13289 - DNA, 25 bp, Artificial
  probe
  misc_feature (1)..(25): SEQ ID NO: 6122; WAN02497Z_at; Start 25; Stop 49
atttctagtgtaattaactccacta

SEQ ID NO: 13290 - DNA, 25 bp, Artificial
  probe
  misc_feature (1)..(25): SEQ ID NO: 6122; WAN02497Z_at; Start 16; Stop 40
aaatagaagatttctagtgtaatta

SEQ ID NO: 13291 - DNA, 25 bp, Artificial
  probe
  misc_feature (1)..(25): SEQ ID NO: 6122; WAN02497Z_at; Start 17; Stop 41
aatagaagatttctagtgtaattaa

SEQ ID NO: 13292 - DNA, 25 bp, Artificial
  probe
  misc_feature (1)..(25): SEQ ID NO: 6122; WAN02497Z_at; Start 21; Stop 45
gaagatttctagtgtaattaactcc

SEQ ID NO: 13293 - DNA, 25 bp, Artificial
  probe
  misc_feature (1)..(25): SEQ ID NO: 6122; WAN02497Z_at; Start 20; Stop 44
agaagatttctagtgtaattaactc

SEQ ID NO: 13294 - DNA, 25 bp, Artificial
  probe
  misc_feature (1)..(25): SEQ ID NO: 6122; WAN02497Z_at; Start 4; Stop 28
atttcctttcataaatagaagattt

SEQ ID NO: 13295 - DNA, 25 bp, Artificial
  probe
  misc_feature (1)..(25): SEQ ID NO: 6122; WAN02497Z_at; Start 5; Stop 29
tttcctttcataaatagaagatttc

SEQ ID NO: 13296 - DNA, 25 bp, Artificial
  probe
  misc_feature (1)..(25): SEQ ID NO: 6122; WAN02497Z_at; Start 26; Stop 50
tttctagtgtaattaactccactaa

SEQ ID NO: 13297 - DNA, 25 bp, Artificial
  probe
  misc_feature (1)..(25): SEQ ID NO: 6122; WAN02497Z_at; Start 23; Stop 47
agatttctagtgtaattaactccac

SEQ ID NO: 13298 - DNA, 25 bp, Artificial
  probe
  misc_feature (1)..(25): SEQ ID NO: 6122; WAN02497Z_at; Start 8; Stop 32
cctttcataaatagaagatttctag

SEQ ID NO: 13299 - DNA, 25 bp, Artificial
  probe
  misc_feature (1)..(25): SEQ ID NO: 5986; WAN024982_s_at; Start 16; Stop 40
gctttccagaggagcgacaagaaac

SEQ ID NO: 13300 - DNA, 25 bp, Artificial
  probe
  misc_feature (1)..(25): SEQ ID NO: 5986; WAN024982_s_at; Start 1; Stop 25
aaagctattatatcagctttccaga

SEQ ID NO: 13301 - DNA, 25 bp, Artificial
  probe
  misc_feature (1)..(25): SEQ ID NO: 5986; WAN024982_s_at; Start 19; Stop 43
ttccagaggagcgacaagaaacagc

SEQ ID NO: 13302 - DNA, 25 bp, Artificial
  probe
  misc_feature (1)..(25): SEQ ID NO: 5986; WAN024982_s_at; Start 8; Stop 32
ttatatcagctttccagaggagcga

SEQ ID NO: 13303 - DNA, 25 bp, Artificial
  probe
  misc_feature (1)..(25): SEQ ID NO: 5986; WAN024982_s_at; Start 6; Stop 30
tattatatcagctttccagaggagc

SEQ ID NO: 13304 - DNA, 25 bp, Artificial
  probe
  misc_feature (1)..(25): SEQ ID NO: 5986; WAN024982_s_at; Start 10; Stop 34
atatcagctttccagaggagcgaca

SEQ ID NO: 13305 - DNA, 25 bp, Artificial
  probe
  misc_feature (1)..(25): SEQ ID NO: 5986; WAN024982_s_at; Start 24; Stop 48
gaggagcgacaagaaacagcaaact

SEQ ID NO: 13306 - DNA, 25 bp, Artificial
  probe
  misc_feature (1)..(25): SEQ ID NO: 5986; WAN024982_s_at; Start 13; Stop 37
tcagctttccagaggagcgacaaga

SEQ ID NO: 13307 - DNA, 25 bp, Artificial
  probe
  misc_feature (1)..(25): SEQ ID NO: 5986; WAN024982_s_at; Start 22; Stop 46
cagaggagcgacaagaaacagcaaa

SEQ ID NO: 13308 - DNA, 25 bp, Artificial
  probe
  misc_feature (1)..(25): SEQ ID NO: 5986; WAN024982_s_at; Start 2; Stop 26
aagctattatatcagctttccagag

SEQ ID NO: 13309 - DNA, 25 bp, Artificial
  probe
  misc_feature (1)..(25): SEQ ID NO: 5986; WAN024982_s_at; Start 15; Stop 39
agctttccagaggagcgacaagaaa

SEQ ID NO: 13310 - DNA, 25 bp, Artificial
  probe
  misc_feature (1)..(25): SEQ ID NO: 5986; WAN024982_s_at; Start 23; Stop 47
agaggagcgacaagaaacagcaaac

SEQ ID NO: 13311 - DNA, 25 bp, Artificial
  probe
  misc_feature (1)..(25): SEQ ID NO: 5986; WAN024982_s_at; Start 4; Stop 28
gctattatatcagctttccagagga

SEQ ID NO: 13312 - DNA, 25 bp, Artificial
  probe
  misc_feature (1)..(25): SEQ ID NO: 5986; WAN024982_s_at; Start 5; Stop 29
ctattatatcagctttccagaggag

SEQ ID NO: 13313 - DNA, 25 bp, Artificial
  probe
  misc_feature (1)..(25): SEQ ID NO: 5986; WAN024982_s_at; Start 21; Stop 45
ccagaggagcgacaagaaacagcaa

SEQ ID NO: 13314 - DNA, 25 bp, Artificial
  probe
  misc_feature (1)..(25): SEQ ID NO: 5986; WAN024982_s_at; Start 20; Stop 44
tccagaggagcgacaagaaacagca

SEQ ID NO: 13315 - DNA, 25 bp, Artificial
  probe
  misc_feature (1)..(25): SEQ ID NO: 5986; WAN024982_s_at; Start 9; Stop 33
tatatcagctttccagaggagcgac

SEQ ID NO: 13316 - DNA, 25 bp, Artificial
  probe
  misc_feature (1)..(25): SEQ ID NO: 5986; WAN024982_s_at; Start 7; Stop 31
attatatcagctttccagaggagcg

SEQ ID NO: 13317 - DNA, 25 bp, Artificial
  probe
  misc_feature (1)..(25): SEQ ID NO: 5986; WAN024982_s_at; Start 18; Stop 42
tttccagaggagcgacaagaaacag

SEQ ID NO: 13318 - DNA, 25 bp, Artificial
  probe
  misc_feature (1)..(25): SEQ ID NO: 5986; WAN024982_s_at; Start 11; Stop 35
tatcagctttccagaggagcgacaa

SEQ ID NO: 13319 - DNA, 25 bp, Artificial
  probe
  misc_feature (1)..(25): SEQ ID NO: 5986; WAN024982_s_at; Start 17; Stop 41
ctttccagaggagcgacaagaaaca

SEQ ID NO: 13320 - DNA, 25 bp, Artificial
  probe
  misc_feature (1)..(25): SEQ ID NO: 5986; WAN024982_s_at; Start 3; Stop 27
agctattatatcagctttccagagg

SEQ ID NO: 13321 - DNA, 25 bp, Artificial
  probe
  misc_feature (1)..(25): SEQ ID NO: 5986; WAN024982_s_at; Start 12; Stop 36
atcagctttccagaggagcgacaag

SEQ ID NO: 13322 - DNA, 25 bp, Artificial
  probe
  misc_feature (1)..(25): SEQ ID NO: 5986; WAN024982_s_at; Start 14; Stop 38
cagctttccagaggagcgacaagaa

SEQ ID NO: 13323 - DNA, 25 bp, Artificial
  probe
  misc_feature (1)..(25): SEQ ID NO: 6090; WAN024983_at; Start 43; Stop 67
ttataggactgatgcaaggagaaag

SEQ ID NO: 13324 - DNA, 25 bp, Artificial
  probe
  misc_feature (1)..(25): SEQ ID NO: 6090; WAN024983_at; Start 44; Stop 68
tataggactgatgcaaggagaaagc

SEQ ID NO: 13325 - DNA, 25 bp, Artificial
  probe
  misc_feature (1)..(25): SEQ ID NO: 6090; WAN024983_at; Start 33; Stop 57
atactactttttataggactgatgc

SEQ ID NO: 13326 - DNA, 25 bp, Artificial
  probe
  misc_feature (1)..(25): SEQ ID NO: 6090; WAN024983_at; Start 36; Stop 60
ctactttttataggactgatgcaag

SEQ ID NO: 13327 - DNA, 25 bp, Artificial
  probe
  misc_feature (1)..(25): SEQ ID NO: 6090; WAN024983_at; Start 41; Stop 65
ttttataggactgatgcaaggagaa

SEQ ID NO: 13328 - DNA, 25 bp, Artificial
  probe
  misc_feature (1)..(25): SEQ ID NO: 6090; WAN024983_at; Start 42; Stop 66
tttataggactgatgcaaggagaaa

SEQ ID NO: 13329 - DNA, 25 bp, Artificial
  probe
  misc_feature (1)..(25): SEQ ID NO: 6090; WAN024983_at; Start 1; Stop 25
cgtttcctcctgatatttcaaacga

SEQ ID NO: 13330 - DNA, 25 bp, Artificial
  probe
  misc_feature (1)..(25): SEQ ID NO: 6090; WAN024983_at; Start 13; Stop 37
atatttcaaacgacactatgatact

SEQ ID NO: 13331 - DNA, 25 bp, Artificial
  probe
  misc_feature (1)..(25): SEQ ID NO: 6090; WAN024983_at; Start 15; Stop 39
atttcaaacgacactatgatactac

SEQ ID NO: 13332 - DNA, 25 bp, Artificial
  probe
  misc_feature (1)..(25): SEQ ID NO: 6090; WAN024983_at; Start 40; Stop 64
tttttataggactgatgcaaggaga

SEQ ID NO: 13333 - DNA, 25 bp, Artificial
  probe
  misc_feature (1)..(25): SEQ ID NO: 6090; WAN024983_at; Start 21; Stop 45
aacgacactatgatactacttttta

SEQ ID NO: 13334 - DNA, 25 bp, Artificial
  probe
  misc_feature (1)..(25): SEQ ID NO: 6090; WAN024983_at; Start 18; Stop 42
tcaaacgacactatgatactacttt

SEQ ID NO: 13335 - DNA, 25 bp, Artificial
  probe
  misc_feature (1)..(25): SEQ ID NO: 6090; WAN024983_at; Start 34; Stop 58
tactactttttataggactgatgca

SEQ ID NO: 13336 - DNA, 25 bp, Artificial
  probe
  misc_feature (1)..(25): SEQ ID NO: 6090; WAN024983_at; Start 46; Stop 70
taggactgatgcaaggagaaagctc

SEQ ID NO: 13337 - DNA, 25 bp, Artificial
  probe
  misc_feature (1)..(25): SEQ ID NO: 6090; WAN024983_at; Start 14; Stop 38
tatttcaaacgacactatgatacta

SEQ ID NO: 13338 - DNA, 25 bp, Artificial
  probe
  misc_feature (1)..(25): SEQ ID NO: 6090; WAN024983_at; Start 38; Stop 62
actttttataggactgatgcaagga

SEQ ID NO: 13339 - DNA, 25 bp, Artificial
  probe
  misc_feature (1)..(25): SEQ ID NO: 6090; WAN024983_at; Start 20; Stop 44
aaacgacactatgatactacttttt

SEQ ID NO: 13340 - DNA, 25 bp, Artificial
  probe
  misc_feature (1)..(25): SEQ ID NO: 6090; WAN024983_at; Start 22; Stop 46
acgacactatgatactactttttat

SEQ ID NO: 13341 - DNA, 25 bp, Artificial
  probe
  misc_feature (1)..(25): SEQ ID NO: 6090; WAN024983_at; Start 45; Stop 69
ataggactgatgcaaggagaaagct

SEQ ID NO: 13342 - DNA, 25 bp, Artificial
  probe
  misc_feature (1)..(25): SEQ ID NO: 6090; WAN024983_at; Start 16; Stop 40
tttcaaacgacactatgatactact

SEQ ID NO: 13343 - DNA, 25 bp, Artificial
  probe
  misc_feature (1)..(25): SEQ ID NO: 6090; WAN024983_at; Start 12; Stop 36
gatatttcaaacgacactatgatac

SEQ ID NO: 13344 - DNA, 25 bp, Artificial
  probe
  misc_feature (1)..(25): SEQ ID NO: 6090; WAN024983_at; Start 17; Stop 41
ttcaaacgacactatgatactactt

SEQ ID NO: 13345 - DNA, 25 bp, Artificial
  probe
  misc_feature (1)..(25): SEQ ID NO: 6090; WAN024983_at; Start 39; Stop 63
ctttttataggactgatgcaaggag

SEQ ID NO: 13346 - DNA, 25 bp, Artificial
  probe
  misc_feature (1)..(25): SEQ ID NO: 6090; WAN024983_at; Start 19; Stop 43
caaacgacactatgatactactttt

SEQ ID NO: 13347 - DNA, 25 bp, Artificial
  probe
  misc_feature (1)..(25): SEQ ID NO: 6090; WAN024983_at; Start 35; Stop 59
actactttttataggactgatgcaa

SEQ ID NO: 13348 - DNA, 25 bp, Artificial
  probe
  misc_feature (1)..(25): SEQ ID NO: 6090; WAN024983_at; Start 37; Stop 61
tactttttataggactgatgcaagg

SEQ ID NO: 13349 - DNA, 25 bp, Artificial
  probe
  misc_feature (1)..(25): SEQ ID NO: 5997; WAN024984_s_at; Start 66; Stop 90
aagtctaggttactgacttggtcag

SEQ ID NO: 13350 - DNA, 25 bp, Artificial
  probe
  misc_feature (1)..(25): SEQ ID NO: 5997; WAN024984_s_at; Start 64; Stop 88
ctaagtctaggttactgacttggtc

SEQ ID NO: 13351 - DNA, 25 bp, Artificial
  probe
  misc_feature (1)..(25): SEQ ID NO: 5997; WAN024984_s_at; Start 48; Stop 72
tcagtgccgccttgccctaagtcta

SEQ ID NO: 13352 - DNA, 25 bp, Artificial
  probe
  misc_feature (1)..(25): SEQ ID NO: 5997; WAN024984_s_at; Start 61; Stop 85
gccctaagtctaggttactgacttg

SEQ ID NO: 13353 - DNA, 25 bp, Artificial
  probe
  misc_feature (1)..(25): SEQ ID NO: 5997; WAN024984_s_at; Start 65; Stop 89
taagtctaggttactgacttggtca

SEQ ID NO: 13354 - DNA, 25 bp, Artificial
  probe
  misc_feature (1)..(25): SEQ ID NO: 5997; WAN024984_s_at; Start 60; Stop 84
tgccctaagtctaggttactgactt

SEQ ID NO: 13355 - DNA, 25 bp, Artificial
  probe
  misc_feature (1)..(25): SEQ ID NO: 5997; WAN024984_s_at; Start 56; Stop 80
gccttgccctaagtctaggttactg

SEQ ID NO: 13356 - DNA, 25 bp, Artificial
  probe
  misc_feature (1)..(25): SEQ ID NO: 5997; WAN024984_s_at; Start 32; Stop 56
atctcttcaaactaggtcagtgccg

SEQ ID NO: 13357 - DNA, 25 bp, Artificial
  probe
  misc_feature (1)..(25): SEQ ID NO: 5997; WAN024984_s_at; Start 51; Stop 75
gtgccgccttgccctaagtctaggt

SEQ ID NO: 13358 - DNA, 25 bp, Artificial
  probe
  misc_feature (1)..(25): SEQ ID NO: 5997; WAN024984_s_at; Start 68; Stop 92
gtctaggttactgacttggtcagtt

SEQ ID NO: 13359 - DNA, 25 bp, Artificial
  probe
  misc_feature (1)..(25): SEQ ID NO: 5997; WAN024984_s_at; Start 50; Stop 74
agtgccgccttgccctaagtctagg

SEQ ID NO: 13360 - DNA, 25 bp, Artificial
  probe
  misc_feature (1)..(25): SEQ ID NO: 5997; WAN024984_s_at; Start 36; Stop 60
cttcaaactaggtcagtgccgcctt

SEQ ID NO: 13361 - DNA, 25 bp, Artificial
  probe
  misc_feature (1)..(25): SEQ ID NO: 5997; WAN024984_s_at; Start 40; Stop 64
aaactaggtcagtgccgccttgccc

SEQ ID NO: 13362 - DNA, 25 bp, Artificial
  probe
  misc_feature (1)..(25): SEQ ID NO: 5997; WAN024984_s_at; Start 38; Stop 62
tcaaactaggtcagtgccgccttgc

SEQ ID NO: 13363 - DNA, 25 bp, Artificial
  probe
  misc_feature (1)..(25): SEQ ID NO: 5997; WAN024984_s_at; Start 39; Stop 63
caaactaggtcagtgccgccttgcc

SEQ ID NO: 13364 - DNA, 25 bp, Artificial
  probe
  misc_feature (1)..(25): SEQ ID NO: 5997; WAN024984_s_at; Start 63; Stop 87
cctaagtctaggttactgacttggt

SEQ ID NO: 13365 - DNA, 25 bp, Artificial
  probe
  misc_feature (1)..(25): SEQ ID NO: 5997; WAN024984_s_at; Start 58; Stop 82
cttgccctaagtctaggttactgac

SEQ ID NO: 13366 - DNA, 25 bp, Artificial
  probe
  misc_feature (1)..(25): SEQ ID NO: 5997; WAN024984_s_at; Start 37; Stop 61
ttcaaactaggtcagtgccgccttg

SEQ ID NO: 13367 - DNA, 25 bp, Artificial
  probe
  misc_feature (1)..(25): SEQ ID NO: 5997; WAN024984_s_at; Start 67; Stop 91
agtctaggttactgacttggtcagt

SEQ ID NO: 13368 - DNA, 25 bp, Artificial
  probe
  misc_feature (1)..(25): SEQ ID NO: 5997; WAN024984_s_at; Start 47; Stop 71
gtcagtgccgccttgccctaagtct

SEQ ID NO: 13369 - DNA, 25 bp, Artificial
  probe
  misc_feature (1)..(25): SEQ ID NO: 5997; WAN024984_s_at; Start 42; Stop 66
actaggtcagtgccgccttgcccta

SEQ ID NO: 13370 - DNA, 25 bp, Artificial
  probe
  misc_feature (1)..(25): SEQ ID NO: 5997; WAN024984_s_at; Start 59; Stop 83
ttgccctaagtctaggttactgact

SEQ ID NO: 13371 - DNA, 25 bp, Artificial
  probe
  misc_feature (1)..(25): SEQ ID NO: 5997; WAN024984_s_at; Start 46; Stop 70
ggtcagtgccgccttgccctaagtc

SEQ ID NO: 13372 - DNA, 25 bp, Artificial
  probe
  misc_feature (1)..(25): SEQ ID NO: 5997; WAN024984_s_at; Start 57; Stop 81
ccttgccctaagtctaggttactga

SEQ ID NO: 13373 - DNA, 25 bp, Artificial
  probe
  misc_feature (1)..(25): SEQ ID NO: 5997; WAN024984_s_at; Start 53; Stop 77
gccgccttgccctaagtctaggtta

SEQ ID NO: 13374 - DNA, 25 bp, Artificial
  probe
  misc_feature (1)..(25): SEQ ID NO: 5997; WAN024984_s_at; Start 62; Stop 86
ccctaagtctaggttactgacttgg

SEQ ID NO: 13375 - DNA, 25 bp, Artificial
  probe
  misc_feature (1)..(25): SEQ ID NO: 5997; WAN024984_s_at; Start 35; Stop 59
tcttcaaactaggtcagtgccgcct

SEQ ID NO: 13376 - DNA, 25 bp, Artificial
  probe
  misc_feature (1)..(25): SEQ ID NO: 5997; WAN024984_s_at; Start 33; Stop 57
tctcttcaaactaggtcagtgccgc

SEQ ID NO: 13377 - DNA, 25 bp, Artificial
  probe
  misc_feature (1)..(25): SEQ ID NO: 5997; WAN024984_s_at; Start 41; Stop 65
aactaggtcagtgccgccttgccct

SEQ ID NO: 13378 - DNA, 25 bp, Artificial
  probe
  misc_feature (1)..(25): SEQ ID NO: 5997; WAN024984_s_at; Start 31; Stop 55
aatctcttcaaactaggtcagtgcc

SEQ ID NO: 13379 - DNA, 25 bp, Artificial
  probe
  misc_feature (1)..(25): SEQ ID NO: 5997; WAN024984_s_at; Start 52; Stop 76
tgccgccttgccctaagtctaggtt

SEQ ID NO: 13380 - DNA, 25 bp, Artificial
  probe
  misc_feature (1)..(25): SEQ ID NO: 5997; WAN024984_s_at; Start 49; Stop 73
cagtgccgccttgccctaagtctag

SEQ ID NO: 13381 - DNA, 25 bp, Artificial
  probe
  misc_feature (1)..(25): SEQ ID NO: 5997; WAN024984_s_at; Start 43; Stop 67
ctaggtcagtgccgccttgccctaa

SEQ ID NO: 13382 - DNA, 25 bp, Artificial
  probe
  misc_feature (1)..(25): SEQ ID NO: 5997; WAN024984_s_at; Start 55; Stop 79
cgccttgccctaagtctaggttact

SEQ ID NO: 13383 - DNA, 25 bp, Artificial
  probe
  misc_feature (1)..(25): SEQ ID NO: 6062; WAN024985_at; Start 22; Stop 46
atagtatcatgcaaatgctttttaa

SEQ ID NO: 13384 - DNA, 25 bp, Artificial
  probe
  misc_feature (1)..(25): SEQ ID NO: 6062; WAN024985_at; Start 19; Stop 43
tatatagtatcatgcaaatgctttt

SEQ ID NO: 13385 - DNA, 25 bp, Artificial
  probe
  misc_feature (1)..(25): SEQ ID NO: 6062; WAN024985_at; Start 7; Stop 31
acctcctttcaatatatagtatcat

SEQ ID NO: 13386 - DNA, 25 bp, Artificial
  probe
  misc_feature (1)..(25): SEQ ID NO: 6062; WAN024985_at; Start 1; Stop 25
attatcacctcctttcaatatatag

SEQ ID NO: 13387 - DNA, 25 bp, Artificial
  probe
  misc_feature (1)..(25): SEQ ID NO: 6062; WAN024985_at; Start 33; Stop 57
caaatgctttttaagcaactatttc

SEQ ID NO: 13388 - DNA, 25 bp, Artificial
  probe
  misc_feature (1)..(25): SEQ ID NO: 6062; WAN024985_at; Start 32; Stop 56
gcaaatgctttttaagcaactattt

SEQ ID NO: 13389 - DNA, 25 bp, Artificial
  probe
  misc_feature (1)..(25): SEQ ID NO: 6062; WAN024985_at; Start 6; Stop 30
cacctcctttcaatatatagtatca

SEQ ID NO: 13390 - DNA, 25 bp, Artificial
  probe
  misc_feature (1)..(25): SEQ ID NO: 6062; WAN024985_at; Start 31; Stop 55
tgcaaatgctttttaagcaactatt

SEQ ID NO: 13391 - DNA, 25 bp, Artificial
  probe
  misc_feature (1)..(25): SEQ ID NO: 6062; WAN024985_at; Start 29; Stop 53
catgcaaatgctttttaagcaacta

SEQ ID NO: 13392 - DNA, 25 bp, Artificial
  probe
  misc_feature (1)..(25): SEQ ID NO: 6062; WAN024985_at; Start 21; Stop 45
tatagtatcatgcaaatgcttttta

SEQ ID NO: 13393 - DNA, 25 bp, Artificial
  probe
  misc_feature (1)..(25): SEQ ID NO: 6062; WAN024985_at; Start 28; Stop 52
tcatgcaaatgctttttaagcaact

SEQ ID NO: 13394 - DNA, 25 bp, Artificial
  probe
  misc_feature (1)..(25): SEQ ID NO: 6062; WAN024985_at; Start 15; Stop 39
tcaatatatagtatcatgcaaatgc

SEQ ID NO: 13395 - DNA, 25 bp, Artificial
  probe
  misc_feature (1)..(25): SEQ ID NO: 6062; WAN024985_at; Start 25; Stop 49
gtatcatgcaaatgctttttaagca

SEQ ID NO: 13396 - DNA, 25 bp, Artificial
  probe
  misc_feature (1)..(25): SEQ ID NO: 6062; WAN024985_at; Start 36; Stop 60
atgctttttaagcaactatttctca

SEQ ID NO: 13397 - DNA, 25 bp, Artificial
  probe
  misc_feature (1)..(25): SEQ ID NO: 6062; WAN024985_at; Start 16; Stop 40
caatatatagtatcatgcaaatgct

SEQ ID NO: 13398 - DNA, 25 bp, Artificial
  probe
  misc_feature (1)..(25): SEQ ID NO: 6062; WAN024985_at; Start 8; Stop 32
cctcctttcaatatatagtatcatg

SEQ ID NO: 13399 - DNA, 25 bp, Artificial
  probe
  misc_feature (1)..(25): SEQ ID NO: 6062; WAN024985_at; Start 10; Stop 34
tcctttcaatatatagtatcatgca

SEQ ID NO: 13400 - DNA, 25 bp, Artificial
  probe
  misc_feature (1)..(25): SEQ ID NO: 6062; WAN024985_at; Start 30; Stop 54
atgcaaatgctttttaagcaactat

SEQ ID NO: 13401 - DNA, 25 bp, Artificial
  probe
  misc_feature (1)..(25): SEQ ID NO: 6062; WAN024985_at; Start 4; Stop 28
atcacctcctttcaatatatagtat

SEQ ID NO: 13402 - DNA, 25 bp, Artificial
  probe
  misc_feature (1)..(25): SEQ ID NO: 6062; WAN024985_at; Start 18; Stop 42
atatatagtatcatgcaaatgcttt

SEQ ID NO: 13403 - DNA, 25 bp, Artificial
  probe
  misc_feature (1)..(25): SEQ ID NO: 6062; WAN024985_at; Start 17; Stop 41
aatatatagtatcatgcaaatgctt

SEQ ID NO: 13404 - DNA, 25 bp, Artificial
  probe
  misc_feature (1)..(25): SEQ ID NO: 6062; WAN024985_at; Start 5; Stop 29
tcacctcctttcaatatatagtatc

SEQ ID NO: 13405 - DNA, 25 bp, Artificial
  probe
  misc_feature (1)..(25): SEQ ID NO: 6062; WAN024985_at; Start 35; Stop 59
aatgctttttaagcaactatttctc

SEQ ID NO: 13406 - DNA, 25 bp, Artificial
  probe
  misc_feature (1)..(25): SEQ ID NO: 6062; WAN024985_at; Start 23; Stop 47
tagtatcatgcaaatgctttttaag

SEQ ID NO: 13407 - DNA, 25 bp, Artificial
  probe
  misc_feature (1)..(25): SEQ ID NO: 6062; WAN024985_at; Start 9; Stop 33
ctcctttcaatatatagtatcatgc

SEQ ID NO: 13408 - DNA, 25 bp, Artificial
  probe
  misc_feature (1)..(25): SEQ ID NO: 6062; WAN024985_at; Start 11; Stop 35
cctttcaatatatagtatcatgcaa

SEQ ID NO: 13409 - DNA, 25 bp, Artificial
  probe
  misc_feature (1)..(25): SEQ ID NO: 6062; WAN024985_at; Start 24; Stop 48
agtatcatgcaaatgctttttaagc

SEQ ID NO: 13410 - DNA, 25 bp, Artificial
  probe
  misc_feature (1)..(25): SEQ ID NO: 6062; WAN024985_at; Start 27; Stop 51
atcatgcaaatgctttttaagcaac

SEQ ID NO: 13411 - DNA, 25 bp, Artificial
  probe
  misc_feature (1)..(25): SEQ ID NO: 6062; WAN024985_at; Start 37; Stop 61
tgctttttaagcaactatttctcaa

SEQ ID NO: 13412 - DNA, 25 bp, Artificial
  probe
  misc_feature (1)..(25): SEQ ID NO: 6062; WAN024985_at; Start 2; Stop 26
ttatcacctcctttcaatatatagt

SEQ ID NO: 13413 - DNA, 25 bp, Artificial
  probe
  misc_feature (1)..(25): SEQ ID NO: 6062; WAN024985_at; Start 26; Stop 50
tatcatgcaaatgctttttaagcaa

SEQ ID NO: 13414 - DNA, 25 bp, Artificial
  probe
  misc_feature (1)..(25): SEQ ID NO: 6062; WAN024985_at; Start 3; Stop 27
tatcacctcctttcaatatatagta

SEQ ID NO: 13415 - DNA, 25 bp, Artificial
  probe
  misc_feature (1)..(25): SEQ ID NO: 6062; WAN024985_at; Start 14; Stop 38
ttcaatatatagtatcatgcaaatg

SEQ ID NO: 13416 - DNA, 25 bp, Artificial
  probe
  misc_feature (1)..(25): SEQ ID NO: 6062; WAN024985_at; Start 12; Stop 36
ctttcaatatatagtatcatgcaaa

SEQ ID NO: 13417 - DNA, 25 bp, Artificial
  probe
  misc_feature (1)..(25): SEQ ID NO: 6128; WAN024986_at; Start 29; Stop 53
tatattttaaattctttttcaagca

SEQ ID NO: 13418 - DNA, 25 bp, Artificial
  probe
  misc_feature (1)..(25): SEQ ID NO: 6128; WAN024986_at; Start 5; Stop 29
gtgttaatctataattaactatact

SEQ ID NO: 13419 - DNA, 25 bp, Artificial
  probe
  misc_feature (1)..(25): SEQ ID NO: 6128; WAN024986_at; Start 36; Stop 60
taaattctttttcaagcaataagtc

SEQ ID NO: 13420 - DNA, 25 bp, Artificial
  probe
  misc_feature (1)..(25): SEQ ID NO: 6128; WAN024986_at; Start 1; Stop 25
gcaagtgttaatctataattaacta

SEQ ID NO: 13421 - DNA, 25 bp, Artificial
  probe
  misc_feature (1)..(25): SEQ ID NO: 6128; WAN024986_at; Start 40; Stop 64
ttctttttcaagcaataagtcgggc

SEQ ID NO: 13422 - DNA, 25 bp, Artificial
  probe
  misc_feature (1)..(25): SEQ ID NO: 6128; WAN024986_at; Start 2; Stop 26
caagtgttaatctataattaactat

SEQ ID NO: 13423 - DNA, 25 bp, Artificial
  probe
  misc_feature (1)..(25): SEQ ID NO: 6128; WAN024986_at; Start 9; Stop 33
taatctataattaactatactatat

SEQ ID NO: 13424 - DNA, 25 bp, Artificial
  probe
  misc_feature (1)..(25): SEQ ID NO: 6128; WAN024986_at; Start 39; Stop 63
attctttttcaagcaataagtcggg

SEQ ID NO: 13425 - DNA, 25 bp, Artificial
  probe
  misc_feature (1)..(25): SEQ ID NO: 6128; WAN024986_at; Start 42; Stop 66
ctttttcaagcaataagtcgggcaa

SEQ ID NO: 13426 - DNA, 25 bp, Artificial
  probe
  misc_feature (1)..(25): SEQ ID NO: 6128; WAN024986_at; Start 38; Stop 62
aattctttttcaagcaataagtcgg

SEQ ID NO: 13427 - DNA, 25 bp, Artificial
  probe
  misc_feature (1)..(25): SEQ ID NO: 6128; WAN024986_at; Start 4; Stop 28
agtgttaatctataattaactatac

SEQ ID NO: 13428 - DNA, 25 bp, Artificial
  probe
  misc_feature (1)..(25): SEQ ID NO: 6128; WAN024986_at; Start 43; Stop 67
tttttcaagcaataagtcgggcaat

SEQ ID NO: 13429 - DNA, 25 bp, Artificial
  probe
  misc_feature (1)..(25): SEQ ID NO: 6128; WAN024986_at; Start 37; Stop 61
aaattctttttcaagcaataagtcg

SEQ ID NO: 13430 - DNA, 25 bp, Artificial
  probe
  misc_feature (1)..(25): SEQ ID NO: 6128; WAN024986_at; Start 41; Stop 65
tctttttcaagcaataagtcgggca

SEQ ID NO: 13431 - DNA, 25 bp, Artificial
  probe
  misc_feature (1)..(25): SEQ ID NO: 6127; WAN024987_at; Start 226; Stop 250
atccagataaagtgtcaatacttga

SEQ ID NO: 13432 - DNA, 25 bp, Artificial
  probe
  misc_feature (1)..(25): SEQ ID NO: 6127; WAN024987_at; Start 58; Stop 82
ctattataactggtggtgctctcaa

SEQ ID NO: 13433 - DNA, 25 bp, Artificial
  probe
  misc_feature (1)..(25): SEQ ID NO: 6127; WAN024987_at; Start 56; Stop 80
tactattataactggtggtgctctc

SEQ ID NO: 13434 - DNA, 25 bp, Artificial
  probe
  misc_feature (1)..(25): SEQ ID NO: 6127; WAN024987_at; Start 201; Stop 225
tcctttctaagcatattataccgaa

SEQ ID NO: 13435 - DNA, 25 bp, Artificial
  probe
  misc_feature (1)..(25): SEQ ID NO: 6127; WAN024987_at; Start 164; Stop 188
tgattaacacataaggacgaaaaaa

SEQ ID NO: 13436 - DNA, 25 bp, Artificial
  probe
  misc_feature (1)..(25): SEQ ID NO: 6127; WAN024987_at; Start 114; Stop 138
cattgattaacactttttagagtaa

SEQ ID NO: 13437 - DNA, 25 bp, Artificial
  probe
  misc_feature (1)..(25): SEQ ID NO: 6127; WAN024987_at; Start 9; Stop 33
tctccttttctataattcaagttaa

SEQ ID NO: 13438 - DNA, 25 bp, Artificial
  probe
  misc_feature (1)..(25): SEQ ID NO: 6127; WAN024987_at; Start 194; Stop 218
gaaagattcctttctaagcatatta

SEQ ID NO: 13439 - DNA, 25 bp, Artificial
  probe
  misc_feature (1)..(25): SEQ ID NO: 6127; WAN024987_at; Start 64; Stop 88
taactggtggtgctctcaattccat

SEQ ID NO: 13440 - DNA, 25 bp, Artificial
  probe
  misc_feature (1)..(25): SEQ ID NO: 6127; WAN024987_at; Start 54; Stop 78
tatactattataactggtggtgctc

SEQ ID NO: 13441 - DNA, 25 bp, Artificial
  probe
  misc_feature (1)..(25): SEQ ID NO: 6127; WAN024987_at; Start 141; Stop 165
aaatatgtttttgtattcgtctttg

SEQ ID NO: 13442 - DNA, 25 bp, Artificial
  probe
  misc_feature (1)..(25): SEQ ID NO: 6127; WAN024987_at; Start 57; Stop 81
actattataactggtggtgctctca

SEQ ID NO: 13443 - DNA, 25 bp, Artificial
  probe
  misc_feature (1)..(25): SEQ ID NO: 6127; WAN024987_at; Start 208; Stop 232
taagcatattataccgaaatccaga

SEQ ID NO: 13444 - DNA, 25 bp, Artificial
  probe
  misc_feature (1)..(25): SEQ ID NO: 6127; WAN024987_at; Start 84; Stop 108
tccatttatctacctctctaacaaa

SEQ ID NO: 13445 - DNA, 25 bp, Artificial
  probe
  misc_feature (1)..(25): SEQ ID NO: 6127; WAN024987_at; Start 80; Stop 104
caattccatttatctacctctctaa

SEQ ID NO: 13446 - DNA, 25 bp, Artificial
  probe
  misc_feature (1)..(25): SEQ ID NO: 6127; WAN024987_at; Start 152; Stop 176
tgtattcgtctttgattaacacata

SEQ ID NO: 13447 - DNA, 25 bp, Artificial
  probe
  misc_feature (1)..(25): SEQ ID NO: 6127; WAN024987_at; Start 59; Stop 83
tattataactggtggtgctctcaat

SEQ ID NO: 13448 - DNA, 25 bp, Artificial
  probe
  misc_feature (1)..(25): SEQ ID NO: 6127; WAN024987_at; Start 211; Stop 235
gcatattataccgaaatccagataa

SEQ ID NO: 13449 - DNA, 25 bp, Artificial
  probe
  misc_feature (1)..(25): SEQ ID NO: 6127; WAN024987_at; Start 160; Stop 184
tctttgattaacacataaggacgaa

SEQ ID NO: 13450 - DNA, 25 bp, Artificial
  probe
  misc_feature (1)..(25): SEQ ID NO: 6127; WAN024987_at; Start 72; Stop 96
ggtgctctcaattccatttatctac

SEQ ID NO: 13451 - DNA, 25 bp, Artificial
  probe
  misc_feature (1)..(25): SEQ ID NO: 6127; WAN024987_at; Start 223; Stop 247
gaaatccagataaagtgtcaatact

SEQ ID NO: 13452 - DNA, 25 bp, Artificial
  probe
  misc_feature (1)..(25): SEQ ID NO: 6127; WAN024987_at; Start 62; Stop 86
tataactggtggtgctctcaattcc

SEQ ID NO: 13453 - DNA, 25 bp, Artificial
  probe
  misc_feature (1)..(25): SEQ ID NO: 6127; WAN024987_at; Start 94; Stop 118
tacctctctaacaaatacatcattg

SEQ ID NO: 13454 - DNA, 25 bp, Artificial
  probe
  misc_feature (1)..(25): SEQ ID NO: 6127; WAN024987_at; Start 5; Stop 29
tgtttctccttttctataattcaag

SEQ ID NO: 13455 - DNA, 25 bp, Artificial
  probe
  misc_feature (1)..(25): SEQ ID NO: 6127; WAN024987_at; Start 198; Stop 222
gattcctttctaagcatattatacc

SEQ ID NO: 13456 - DNA, 25 bp, Artificial
  probe
  misc_feature (1)..(25): SEQ ID NO: 6127; WAN024987_at; Start 69; Stop 93
ggtggtgctctcaattccatttatc

SEQ ID NO: 13457 - DNA, 25 bp, Artificial
  probe
  misc_feature (1)..(25): SEQ ID NO: 6127; WAN024987_at; Start 111; Stop 135
catcattgattaacactttttagag

SEQ ID NO: 13458 - DNA, 25 bp, Artificial
  probe
  misc_feature (1)..(25): SEQ ID NO: 6127; WAN024987_at; Start 219; Stop 243
taccgaaatccagataaagtgtcaa

SEQ ID NO: 13459 - DNA, 25 bp, Artificial
  probe
  misc_feature (1)..(25): SEQ ID NO: 6127; WAN024987_at; Start 217; Stop 241
tataccgaaatccagataaagtgtc

SEQ ID NO: 13460 - DNA, 25 bp, Artificial
  probe
  misc_feature (1)..(25): SEQ ID NO: 6127; WAN024987_at; Start 206; Stop 230
tctaagcatattataccgaaatcca

SEQ ID NO: 13461 - DNA, 25 bp, Artificial
  probe
  misc_feature (1)..(25): SEQ ID NO: 6127; WAN024987_at; Start 96; Stop 120
cctctctaacaaatacatcattgat

SEQ ID NO: 13462 - DNA, 25 bp, Artificial
  probe
  misc_feature (1)..(25): SEQ ID NO: 6127; WAN024987_at; Start 157; Stop 181
tcgtctttgattaacacataaggac

SEQ ID NO: 13463 - DNA, 25 bp, Artificial
  probe
  misc_feature (1)..(25): SEQ ID NO: 6127; WAN024987_at; Start 67; Stop 91
ctggtggtgctctcaattccattta

SEQ ID NO: 13464 - DNA, 25 bp, Artificial
  probe
  misc_feature (1)..(25): SEQ ID NO: 6127; WAN024987_at; Start 221; Stop 245
ccgaaatccagataaagtgtcaata

SEQ ID NO: 13465 - DNA, 25 bp, Artificial
  probe
  misc_feature (1)..(25): SEQ ID NO: 6044; WAN024988_at; Start 31; Stop 55
ctaagcaactatagatagagaaatg

SEQ ID NO: 13466 - DNA, 25 bp, Artificial
  probe
  misc_feature (1)..(25): SEQ ID NO: 6044; WAN024988_at; Start 2; Stop 26
tagctttattagaccatgcttattt

SEQ ID NO: 13467 - DNA, 25 bp, Artificial
  probe
  misc_feature (1)..(25): SEQ ID NO: 6044; WAN024988_at; Start 67; Stop 91
gaattcgaatgtgataaggagttag

SEQ ID NO: 13468 - DNA, 25 bp, Artificial
  probe
  misc_feature (1)..(25): SEQ ID NO: 6044; WAN024988_at; Start 61; Stop 85
aaatctgaattcgaatgtgataagg

SEQ ID NO: 13469 - DNA, 25 bp, Artificial
  probe
  misc_feature (1)..(25): SEQ ID NO: 6044; WAN024988_at; Start 27; Stop 51
taaactaagcaactatagatagaga

SEQ ID NO: 13470 - DNA, 25 bp, Artificial
  probe
  misc_feature (1)..(25): SEQ ID NO: 6044; WAN024988_at; Start 35; Stop 59
gcaactatagatagagaaatgaaat

SEQ ID NO: 13471 - DNA, 25 bp, Artificial
  probe
  misc_feature (1)..(25): SEQ ID NO: 6044; WAN024988_at; Start 36; Stop 60
caactatagatagagaaatgaaata

SEQ ID NO: 13472 - DNA, 25 bp, Artificial
  probe
  misc_feature (1)..(25): SEQ ID NO: 6044; WAN024988_at; Start 79; Stop 103
gataaggagttagaaattgaaacaa

SEQ ID NO: 13473 - DNA, 25 bp, Artificial
  probe
  misc_feature (1)..(25): SEQ ID NO: 6044; WAN024988_at; Start 68; Stop 92
aattcgaatgtgataaggagttaga

SEQ ID NO: 13474 - DNA, 25 bp, Artificial
  probe
  misc_feature (1)..(25): SEQ ID NO: 6044; WAN024988_at; Start 89; Stop 113
tagaaattgaaacaataggattccc

SEQ ID NO: 13475 - DNA, 25 bp, Artificial
  probe
  misc_feature (1)..(25): SEQ ID NO: 6044; WAN024988_at; Start 59; Stop 83
taaaatctgaattcgaatgtgataa

SEQ ID NO: 13476 - DNA, 25 bp, Artificial
  probe
  misc_feature (1)..(25): SEQ ID NO: 6044; WAN024988_at; Start 64; Stop 88
tctgaattcgaatgtgataaggagt

SEQ ID NO: 13477 - DNA, 25 bp, Artificial
  probe
  misc_feature (1)..(25): SEQ ID NO: 6044; WAN024988_at; Start 77; Stop 101
gtgataaggagttagaaattgaaac

SEQ ID NO: 13478 - DNA, 25 bp, Artificial
  probe
  misc_feature (1)..(25): SEQ ID NO: 6044; WAN024988_at; Start 12; Stop 36
agaccatgcttattttaaactaagc

SEQ ID NO: 13479 - DNA, 25 bp, Artificial
  probe
  misc_feature (1)..(25): SEQ ID NO: 6044; WAN024988_at; Start 4; Stop 28
gctttattagaccatgcttatttta

SEQ ID NO: 13480 - DNA, 25 bp, Artificial
  probe
  misc_feature (1)..(25): SEQ ID NO: 6044; WAN024988_at; Start 24; Stop 48
ttttaaactaagcaactatagatag

SEQ ID NO: 13481 - DNA, 25 bp, Artificial
  probe
  misc_feature (1)..(25): SEQ ID NO: 6044; WAN024988_at; Start 26; Stop 50
ttaaactaagcaactatagatagag

SEQ ID NO: 13482 - DNA, 25 bp, Artificial
  probe
  misc_feature (1)..(25): SEQ ID NO: 6044; WAN024988_at; Start 65; Stop 89
ctgaattcgaatgtgataaggagtt

SEQ ID NO: 13483 - DNA, 25 bp, Artificial
  probe
  misc_feature (1)..(25): SEQ ID NO: 6044; WAN024988_at; Start 13; Stop 37
gaccatgcttattttaaactaagca

SEQ ID NO: 13484 - DNA, 25 bp, Artificial
  probe
  misc_feature (1)..(25): SEQ ID NO: 6044; WAN024988_at; Start 8; Stop 32
tattagaccatgcttattttaaact

SEQ ID NO: 13485 - DNA, 25 bp, Artificial
  probe
  misc_feature (1)..(25): SEQ ID NO: 6044; WAN024988_at; Start 62; Stop 86
aatctgaattcgaatgtgataagga

SEQ ID NO: 13486 - DNA, 25 bp, Artificial
  probe
  misc_feature (1)..(25): SEQ ID NO: 6044; WAN024988_at; Start 15; Stop 39
ccatgcttattttaaactaagcaac

SEQ ID NO: 13487 - DNA, 25 bp, Artificial
  probe
  misc_feature (1)..(25): SEQ ID NO: 6044; WAN024988_at; Start 84; Stop 108
ggagttagaaattgaaacaatagga

SEQ ID NO: 13488 - DNA, 25 bp, Artificial
  probe
  misc_feature (1)..(25): SEQ ID NO: 6044; WAN024988_at; Start 81; Stop 105
taaggagttagaaattgaaacaata

SEQ ID NO: 13489 - DNA, 25 bp, Artificial
  probe
  misc_feature (1)..(25): SEQ ID NO: 6044; WAN024988_at; Start 71; Stop 95
tcgaatgtgataaggagttagaaat

SEQ ID NO: 13490 - DNA, 25 bp, Artificial
  probe
  misc_feature (1)..(25): SEQ ID NO: 6044; WAN024988_at; Start 55; Stop 79
gaaataaaatctgaattcgaatgtg

SEQ ID NO: 13491 - DNA, 25 bp, Artificial
  probe
  misc_feature (1)..(25): SEQ ID NO: 6044; WAN024988_at; Start 66; Stop 90
tgaattcgaatgtgataaggagtta

SEQ ID NO: 13492 - DNA, 25 bp, Artificial
  probe
  misc_feature (1)..(25): SEQ ID NO: 6044; WAN024988_at; Start 44; Stop 68
gatagagaaatgaaataaaatctga

SEQ ID NO: 13493 - DNA, 25 bp, Artificial
  probe
  misc_feature (1)..(25): SEQ ID NO: 6044; WAN024988_at; Start 56; Stop 80
aaataaaatctgaattcgaatgtga

SEQ ID NO: 13494 - DNA, 25 bp, Artificial
  probe
  misc_feature (1)..(25): SEQ ID NO: 6044; WAN024988_at; Start 32; Stop 56
taagcaactatagatagagaaatga

SEQ ID NO: 13495 - DNA, 25 bp, Artificial
  probe
  misc_feature (1)..(25): SEQ ID NO: 6044; WAN024988_at; Start 93; Stop 117
aattgaaacaataggattcccccat

SEQ ID NO: 13496 - DNA, 25 bp, Artificial
  probe
  misc_feature (1)..(25): SEQ ID NO: 6044; WAN024988_at; Start 22; Stop 46
tattttaaactaagcaactatagat

SEQ ID NO: 13497 - DNA, 25 bp, Artificial
  probe
  misc_feature (1)..(25): SEQ ID NO: 6044; WAN024988_at; Start 72; Stop 96
cgaatgtgataaggagttagaaatt

SEQ ID NO: 13498 - DNA, 25 bp, Artificial
  probe
  misc_feature (1)..(25): SEQ ID NO: 6044; WAN024988_at; Start 29; Stop 53
aactaagcaactatagatagagaaa

SEQ ID NO: 13499 - DNA, 25 bp, Artificial
  probe
  misc_feature (1)..(25): SEQ ID NO: 6170; WAN024989_at; Start 99; Stop 123
acgcaaatgagtataaatcagctaa

SEQ ID NO: 13500 - DNA, 25 bp, Artificial
  probe
  misc_feature (1)..(25): SEQ ID NO: 6170; WAN024989_at; Start 86; Stop 110
tttttataaagacacgcaaatgagt

SEQ ID NO: 13501 - DNA, 25 bp, Artificial
  probe
  misc_feature (1)..(25): SEQ ID NO: 6170; WAN024989_at; Start 85; Stop 109
ttttttataaagacacgcaaatgag

SEQ ID NO: 13502 - DNA, 25 bp, Artificial
  probe
  misc_feature (1)..(25): SEQ ID NO: 6170; WAN024989_at; Start 112; Stop 136
taaatcagctaatttttggtttata

SEQ ID NO: 13503 - DNA, 25 bp, Artificial
  probe
  misc_feature (1)..(25): SEQ ID NO: 6170; WAN024989_at; Start 95; Stop 119
agacacgcaaatgagtataaatcag

SEQ ID NO: 13504 - DNA, 25 bp, Artificial
  probe
  misc_feature (1)..(25): SEQ ID NO: 6170; WAN024989_at; Start 90; Stop 114
tataaagacacgcaaatgagtataa

SEQ ID NO: 13505 - DNA, 25 bp, Artificial
  probe
  misc_feature (1)..(25): SEQ ID NO: 6170; WAN024989_at; Start 79; Stop 103
gataagttttttataaagacacgca

SEQ ID NO: 13506 - DNA, 25 bp, Artificial
  probe
  misc_feature (1)..(25): SEQ ID NO: 6170; WAN024989_at; Start 3; Stop 27
gcaagaaacttgaggtatttttgct

SEQ ID NO: 13507 - DNA, 25 bp, Artificial
  probe
  misc_feature (1)..(25): SEQ ID NO: 6170; WAN024989_at; Start 92; Stop 116
taaagacacgcaaatgagtataaat

SEQ ID NO: 13508 - DNA, 25 bp, Artificial
  probe
  misc_feature (1)..(25): SEQ ID NO: 6170; WAN024989_at; Start 101; Stop 125
gcaaatgagtataaatcagctaatt

SEQ ID NO: 13509 - DNA, 25 bp, Artificial
  probe
  misc_feature (1)..(25): SEQ ID NO: 6170; WAN024989_at; Start 97; Stop 121
acacgcaaatgagtataaatcagct

SEQ ID NO: 13510 - DNA, 25 bp, Artificial
  probe
  misc_feature (1)..(25): SEQ ID NO: 6170; WAN024989_at; Start 87; Stop 111
ttttataaagacacgcaaatgagta

SEQ ID NO: 13511 - DNA, 25 bp, Artificial
  probe
  misc_feature (1)..(25): SEQ ID NO: 6170; WAN024989_at; Start 93; Stop 117
aaagacacgcaaatgagtataaatc

SEQ ID NO: 13512 - DNA, 25 bp, Artificial
  probe
  misc_feature (1)..(25): SEQ ID NO: 6170; WAN024989_at; Start 88; Stop 112
tttataaagacacgcaaatgagtat

SEQ ID NO: 13513 - DNA, 25 bp, Artificial
  probe
  misc_feature (1)..(25): SEQ ID NO: 6170; WAN024989_at; Start 102; Stop 126
caaatgagtataaatcagctaattt

SEQ ID NO: 13514 - DNA, 25 bp, Artificial
  probe
  misc_feature (1)..(25): SEQ ID NO: 6170; WAN024989_at; Start 96; Stop 120
gacacgcaaatgagtataaatcagc

SEQ ID NO: 13515 - DNA, 25 bp, Artificial
  probe
  misc_feature (1)..(25): SEQ ID NO: 6170; WAN024989_at; Start 1; Stop 25
tagcaagaaacttgaggtatttttg

SEQ ID NO: 13516 - DNA, 25 bp, Artificial
  probe
  misc_feature (1)..(25): SEQ ID NO: 6170; WAN024989_at; Start 107; Stop 131
gagtataaatcagctaatttttggt

SEQ ID NO: 13517 - DNA, 25 bp, Artificial
  probe
  misc_feature (1)..(25): SEQ ID NO: 6170; WAN024989_at; Start 84; Stop 108
gttttttataaagacacgcaaatga

SEQ ID NO: 13518 - DNA, 25 bp, Artificial
  probe
  misc_feature (1)..(25): SEQ ID NO: 6170; WAN024989_at; Start 139; Stop 163
cctatttttatgcataattattctt

SEQ ID NO: 13519 - DNA, 25 bp, Artificial
  probe
  misc_feature (1)..(25): SEQ ID NO: 6170; WAN024989_at; Start 91; Stop 115
ataaagacacgcaaatgagtataaa

SEQ ID NO: 13520 - DNA, 25 bp, Artificial
  probe
  misc_feature (1)..(25): SEQ ID NO: 6170; WAN024989_at; Start 138; Stop 162
tcctatttttatgcataattattct

SEQ ID NO: 13521 - DNA, 25 bp, Artificial
  probe
  misc_feature (1)..(25): SEQ ID NO: 6170; WAN024989_at; Start 117; Stop 141
cagctaatttttggtttatattcct

SEQ ID NO: 13522 - DNA, 25 bp, Artificial
  probe
  misc_feature (1)..(25): SEQ ID NO: 6170; WAN024989_at; Start 100; Stop 124
cgcaaatgagtataaatcagctaat

SEQ ID NO: 13523 - DNA, 25 bp, Artificial
  probe
  misc_feature (1)..(25): SEQ ID NO: 6170; WAN024989_at; Start 110; Stop 134
tataaatcagctaatttttggttta

SEQ ID NO: 13524 - DNA, 25 bp, Artificial
  probe
  misc_feature (1)..(25): SEQ ID NO: 6170; WAN024989_at; Start 116; Stop 140
tcagctaatttttggtttatattcc

SEQ ID NO: 13525 - DNA, 25 bp, Artificial
  probe
  misc_feature (1)..(25): SEQ ID NO: 6170; WAN024989_at; Start 98; Stop 122
cacgcaaatgagtataaatcagcta

SEQ ID NO: 13526 - DNA, 25 bp, Artificial
  probe
  misc_feature (1)..(25): SEQ ID NO: 6170; WAN024989_at; Start 108; Stop 132
agtataaatcagctaatttttggtt

SEQ ID NO: 13527 - DNA, 25 bp, Artificial
  probe
  misc_feature (1)..(25): SEQ ID NO: 6170; WAN024989_at; Start 4; Stop 28
caagaaacttgaggtatttttgcta

SEQ ID NO: 13528 - DNA, 25 bp, Artificial
  probe
  misc_feature (1)..(25): SEQ ID NO: 6170; WAN024989_at; Start 36; Stop 60
aaagcattttactattttgtatata

SEQ ID NO: 13529 - DNA, 25 bp, Artificial
  probe
  misc_feature (1)..(25): SEQ ID NO: 6170; WAN024989_at; Start 106; Stop 130
tgagtataaatcagctaatttttgg

SEQ ID NO: 13530 - DNA, 25 bp, Artificial
  probe
  misc_feature (1)..(25): SEQ ID NO: 6170; WAN024989_at; Start 83; Stop 107
agttttttataaagacacgcaaatg

SEQ ID NO: 13531 - DNA, 25 bp, Artificial
  probe
  misc_feature (1)..(25): SEQ ID NO: 6170; WAN024989_at; Start 94; Stop 118
aagacacgcaaatgagtataaatca

SEQ ID NO: 13532 - DNA, 25 bp, Artificial
  probe
  misc_feature (1)..(25): SEQ ID NO: 6170; WAN024989_at; Start 2; Stop 26
agcaagaaacttgaggtatttttgc

SEQ ID NO: 13533 - DNA, 25 bp, Artificial
  probe
  misc_feature (1)..(25): SEQ ID NO: 6130; WAN02498A_at; Start 12; Stop 36
aagtcgaggcccgtagccaatgctt

SEQ ID NO: 13534 - DNA, 25 bp, Artificial
  probe
  misc_feature (1)..(25): SEQ ID NO: 6130; WAN02498A_at; Start 41; Stop 65
gatttgattaatttgaaccgagtta

SEQ ID NO: 13535 - DNA, 25 bp, Artificial
  probe
  misc_feature (1)..(25): SEQ ID NO: 6130; WAN02498A_at; Start 13; Stop 37
agtcgaggcccgtagccaatgcttc

SEQ ID NO: 13536 - DNA, 25 bp, Artificial
  probe
  misc_feature (1)..(25): SEQ ID NO: 6130; WAN02498A_at; Start 59; Stop 83
cgagttactcggtctgtttctctat

SEQ ID NO: 13537 - DNA, 25 bp, Artificial
  probe
  misc_feature (1)..(25): SEQ ID NO: 6130; WAN02498A_at; Start 3; Stop 27
caaaaagagaagtcgaggcccgtag

SEQ ID NO: 13538 - DNA, 25 bp, Artificial
  probe
  misc_feature (1)..(25): SEQ ID NO: 6130; WAN02498A_at; Start 7; Stop 31
aagagaagtcgaggcccgtagccaa

SEQ ID NO: 13539 - DNA, 25 bp, Artificial
  probe
  misc_feature (1)..(25): SEQ ID NO: 6130; WAN02498A_at; Start 45; Stop 69
tgattaatttgaaccgagttactcg

SEQ ID NO: 13540 - DNA, 25 bp, Artificial
  probe
  misc_feature (1)..(25): SEQ ID NO: 6130; WAN02498A_at; Start 70; Stop 94
gtctgtttctctatattcacccttc

SEQ ID NO: 13541 - DNA, 25 bp, Artificial
  probe
  misc_feature (1)..(25): SEQ ID NO: 6130; WAN02498A_at; Start 54; Stop 78
tgaaccgagttactcggtctgtttc

SEQ ID NO: 13542 - DNA, 25 bp, Artificial
  probe
  misc_feature (1)..(25): SEQ ID NO: 6130; WAN02498A_at; Start 27; Stop 51
gccaatgcttccctgatttgattaa

SEQ ID NO: 13543 - DNA, 25 bp, Artificial
  probe
  misc_feature (1)..(25): SEQ ID NO: 6130; WAN02498A_at; Start 32; Stop 56
tgcttccctgatttgattaatttga

SEQ ID NO: 13544 - DNA, 25 bp, Artificial
  probe
  misc_feature (1)..(25): SEQ ID NO: 6130; WAN02498A_at; Start 29; Stop 53
caatgcttccctgatttgattaatt

SEQ ID NO: 13545 - DNA, 25 bp, Artificial
  probe
  misc_feature (1)..(25): SEQ ID NO: 6130; WAN02498A_at; Start 25; Stop 49
tagccaatgcttccctgatttgatt

SEQ ID NO: 13546 - DNA, 25 bp, Artificial
  probe
  misc_feature (1)..(25): SEQ ID NO: 6130; WAN02498A_at; Start 18; Stop 42
aggcccgtagccaatgcttccctga

SEQ ID NO: 13547 - DNA, 25 bp, Artificial
  probe
  misc_feature (1)..(25): SEQ ID NO: 6130; WAN02498A_at; Start 61; Stop 85
agttactcggtctgtttctctatat

SEQ ID NO: 13548 - DNA, 25 bp, Artificial
  probe
  misc_feature (1)..(25): SEQ ID NO: 6130; WAN02498A_at; Start 28; Stop 52
ccaatgcttccctgatttgattaat

SEQ ID NO: 13549 - DNA, 25 bp, Artificial
  probe
  misc_feature (1)..(25): SEQ ID NO: 6130; WAN02498A_at; Start 20; Stop 44
gcccgtagccaatgcttccctgatt

SEQ ID NO: 13550 - DNA, 25 bp, Artificial
  probe
  misc_feature (1)..(25): SEQ ID NO: 6130; WAN02498A_at; Start 36; Stop 60
tccctgatttgattaatttgaaccg

SEQ ID NO: 13551 - DNA, 25 bp, Artificial
  probe
  misc_feature (1)..(25): SEQ ID NO: 6130; WAN02498A_at; Start 19; Stop 43
ggcccgtagccaatgcttccctgat

SEQ ID NO: 13552 - DNA, 25 bp, Artificial
  probe
  misc_feature (1)..(25): SEQ ID NO: 6130; WAN02498A_at; Start 38; Stop 62
cctgatttgattaatttgaaccgag

SEQ ID NO: 13553 - DNA, 25 bp, Artificial
  probe
  misc_feature (1)..(25): SEQ ID NO: 6130; WAN02498A_at; Start 65; Stop 89
actcggtctgtttctctatattcac

SEQ ID NO: 13554 - DNA, 25 bp, Artificial
  probe
  misc_feature (1)..(25): SEQ ID NO: 6130; WAN02498A_at; Start 64; Stop 88
tactcggtctgtttctctatattca

SEQ ID NO: 13555 - DNA, 25 bp, Artificial
  probe
  misc_feature (1)..(25): SEQ ID NO: 6130; WAN02498A_at; Start 17; Stop 41
gaggcccgtagccaatgcttccctg

SEQ ID NO: 13556 - DNA, 25 bp, Artificial
  probe
  misc_feature (1)..(25): SEQ ID NO: 6130; WAN02498A_at; Start 6; Stop 30
aaagagaagtcgaggcccgtagcca

SEQ ID NO: 13557 - DNA, 25 bp, Artificial
  probe
  misc_feature (1)..(25): SEQ ID NO: 6130; WAN02498A_at; Start 24; Stop 48
gtagccaatgcttccctgatttgat

SEQ ID NO: 13558 - DNA, 25 bp, Artificial
  probe
  misc_feature (1)..(25): SEQ ID NO: 6130; WAN02498A_at; Start 50; Stop 74
aatttgaaccgagttactcggtctg

SEQ ID NO: 13559 - DNA, 25 bp, Artificial
  probe
  misc_feature (1)..(25): SEQ ID NO: 6130; WAN02498A_at; Start 67; Stop 91
tcggtctgtttctctatattcaccc

SEQ ID NO: 13560 - DNA, 25 bp, Artificial
  probe
  misc_feature (1)..(25): SEQ ID NO: 6130; WAN02498A_at; Start 58; Stop 82
ccgagttactcggtctgtttctcta

SEQ ID NO: 13561 - DNA, 25 bp, Artificial
  probe
  misc_feature (1)..(25): SEQ ID NO: 6130; WAN02498A_at; Start 37; Stop 61
ccctgatttgattaatttgaaccga

SEQ ID NO: 13562 - DNA, 25 bp, Artificial
  probe
  misc_feature (1)..(25): SEQ ID NO: 6130; WAN02498A_at; Start 14; Stop 38
gtcgaggcccgtagccaatgcttcc

SEQ ID NO: 13563 - DNA, 25 bp, Artificial
  probe
  misc_feature (1)..(25): SEQ ID NO: 6130; WAN02498A_at; Start 60; Stop 84
gagttactcggtctgtttctctata

SEQ ID NO: 13564 - DNA, 25 bp, Artificial
  probe
  misc_feature (1)..(25): SEQ ID NO: 6130; WAN02498A_at; Start 23; Stop 47
cgtagccaatgcttccctgatttga

SEQ ID NO: 13565 - DNA, 25 bp, Artificial
  probe
  misc_feature (1)..(25): SEQ ID NO: 6130; WAN02498A_at; Start 22; Stop 46
ccgtagccaatgcttccctgatttg

SEQ ID NO: 13566 - DNA, 25 bp, Artificial
  probe
  misc_feature (1)..(25): SEQ ID NO: 6130; WAN02498A_at; Start 68; Stop 92
cggtctgtttctctatattcaccct

SEQ ID NO: 13567 - DNA, 25 bp, Artificial
  probe
  misc_feature (1)..(25): SEQ ID NO: 6243; WAN02498B_at; Start 16; Stop 40
atgtgcgcgagttagtttagcctaa

SEQ ID NO: 13568 - DNA, 25 bp, Artificial
  probe
  misc_feature (1)..(25): SEQ ID NO: 6243; WAN02498B_at; Start 13; Stop 37
tttatgtgcgcgagttagtttagcc

SEQ ID NO: 13569 - DNA, 25 bp, Artificial
  probe
  misc_feature (1)..(25): SEQ ID NO: 6243; WAN02498B_at; Start 17; Stop 41
tgtgcgcgagttagtttagcctaac

SEQ ID NO: 13570 - DNA, 25 bp, Artificial
  probe
  misc_feature (1)..(25): SEQ ID NO: 6243; WAN02498B_at; Start 18; Stop 42
gtgcgcgagttagtttagcctaact

SEQ ID NO: 13571 - DNA, 25 bp, Artificial
  probe
  misc_feature (1)..(25): SEQ ID NO: 6243; WAN02498B_at; Start 8; Stop 32
cttgatttatgtgcgcgagttagtt

SEQ ID NO: 13572 - DNA, 25 bp, Artificial
  probe
  misc_feature (1)..(25): SEQ ID NO: 6243; WAN02498B_at; Start 6; Stop 30
tccttgatttatgtgcgcgagttag

SEQ ID NO: 13573 - DNA, 25 bp, Artificial
  probe
  misc_feature (1)..(25): SEQ ID NO: 6243; WAN02498B_at; Start 11; Stop 35
gatttatgtgcgcgagttagtttag

SEQ ID NO: 13574 - DNA, 25 bp, Artificial
  probe
  misc_feature (1)..(25): SEQ ID NO: 6243; WAN02498B_at; Start 5; Stop 29
ctccttgatttatgtgcgcgagtta

SEQ ID NO: 13575 - DNA, 25 bp, Artificial
  probe
  misc_feature (1)..(25): SEQ ID NO: 6243; WAN02498B_at; Start 1; Stop 25
ttttctccttgatttatgtgcgcga

SEQ ID NO: 13576 - DNA, 25 bp, Artificial
  probe
  misc_feature (1)..(25): SEQ ID NO: 6243; WAN02498B_at; Start 19; Stop 43
tgcgcgagttagtttagcctaactt

SEQ ID NO: 13577 - DNA, 25 bp, Artificial
  probe
  misc_feature (1)..(25): SEQ ID NO: 6243; WAN02498B_at; Start 12; Stop 36
atttatgtgcgcgagttagtttagc

SEQ ID NO: 13578 - DNA, 25 bp, Artificial
  probe
  misc_feature (1)..(25): SEQ ID NO: 6243; WAN02498B_at; Start 9; Stop 33
ttgatttatgtgcgcgagttagttt

SEQ ID NO: 13579 - DNA, 25 bp, Artificial
  probe
  misc_feature (1)..(25): SEQ ID NO: 6243; WAN02498B_at; Start 10; Stop 34
tgatttatgtgcgcgagttagttta

SEQ ID NO: 13580 - DNA, 25 bp, Artificial
  probe
  misc_feature (1)..(25): SEQ ID NO: 6243; WAN02498B_at; Start 15; Stop 39
tatgtgcgcgagttagtttagccta

SEQ ID NO: 13581 - DNA, 25 bp, Artificial
  probe
  misc_feature (1)..(25): SEQ ID NO: 6243; WAN02498B_at; Start 7; Stop 31
ccttgatttatgtgcgcgagttagt

SEQ ID NO: 13582 - DNA, 25 bp, Artificial
  probe
  misc_feature (1)..(25): SEQ ID NO: 6243; WAN02498B_at; Start 14; Stop 38
ttatgtgcgcgagttagtttagcct

SEQ ID NO: 13583 - DNA, 25 bp, Artificial
  probe
  misc_feature (1)..(25): SEQ ID NO: 6243; WAN02498B_at; Start 2; Stop 26
tttctccttgatttatgtgcgcgag

SEQ ID NO: 13584 - DNA, 25 bp, Artificial
  probe
  misc_feature (1)..(25): SEQ ID NO: 6243; WAN02498B_at; Start 3; Stop 27
ttctccttgatttatgtgcgcgagt

SEQ ID NO: 13585 - DNA, 25 bp, Artificial
  probe
  misc_feature (1)..(25): SEQ ID NO: 6243; WAN02498B_at; Start 4; Stop 28
tctccttgatttatgtgcgcgagtt

SEQ ID NO: 13586 - DNA, 25 bp, Artificial
  probe
  misc_feature (1)..(25): SEQ ID NO: 6060; WAN02498C_at; Start 39; Stop 63
ctctgatgtttgaacaactttcata

SEQ ID NO: 13587 - DNA, 25 bp, Artificial
  probe
  misc_feature (1)..(25): SEQ ID NO: 6060; WAN02498C_at; Start 50; Stop 74
gaacaactttcatatatgatgaacg

SEQ ID NO: 13588 - DNA, 25 bp, Artificial
  probe
  misc_feature (1)..(25): SEQ ID NO: 6060; WAN02498C_at; Start 51; Stop 75
aacaactttcatatatgatgaacgg

SEQ ID NO: 13589 - DNA, 25 bp, Artificial
  probe
  misc_feature (1)..(25): SEQ ID NO: 6060; WAN02498C_at; Start 38; Stop 62
actctgatgtttgaacaactttcat

SEQ ID NO: 13590 - DNA, 25 bp, Artificial
  probe
  misc_feature (1)..(25): SEQ ID NO: 6060; WAN02498C_at; Start 25; Stop 49
tattttataaagcactctgatgttt

SEQ ID NO: 13591 - DNA, 25 bp, Artificial
  probe
  misc_feature (1)..(25): SEQ ID NO: 6060; WAN02498C_at; Start 61; Stop 85
atatatgatgaacggagaaatttta

SEQ ID NO: 13592 - DNA, 25 bp, Artificial
  probe
  misc_feature (1)..(25): SEQ ID NO: 6060; WAN02498C_at; Start 28; Stop 52
tttataaagcactctgatgtttgaa

SEQ ID NO: 13593 - DNA, 25 bp, Artificial
  probe
  misc_feature (1)..(25): SEQ ID NO: 6060; WAN02498C_at; Start 27; Stop 51
ttttataaagcactctgatgtttga

SEQ ID NO: 13594 - DNA, 25 bp, Artificial
  probe
  misc_feature (1)..(25): SEQ ID NO: 6060; WAN02498C_at; Start 26; Stop 50
attttataaagcactctgatgtttg

SEQ ID NO: 13595 - DNA, 25 bp, Artificial
  probe
  misc_feature (1)..(25): SEQ ID NO: 6060; WAN02498C_at; Start 41; Stop 65
ctgatgtttgaacaactttcatata

SEQ ID NO: 13596 - DNA, 25 bp, Artificial
  probe
  misc_feature (1)..(25): SEQ ID NO: 6060; WAN02498C_at; Start 29; Stop 53
ttataaagcactctgatgtttgaac

SEQ ID NO: 13597 - DNA, 25 bp, Artificial
  probe
  misc_feature (1)..(25): SEQ ID NO: 6060; WAN02498C_at; Start 35; Stop 59
agcactctgatgtttgaacaacttt

SEQ ID NO: 13598 - DNA, 25 bp, Artificial
  probe
  misc_feature (1)..(25): SEQ ID NO: 6060; WAN02498C_at; Start 59; Stop 83
tcatatatgatgaacggagaaattt

SEQ ID NO: 13599 - DNA, 25 bp, Artificial
  probe
  misc_feature (1)..(25): SEQ ID NO: 6060; WAN02498C_at; Start 46; Stop 70
gtttgaacaactttcatatatgatg

SEQ ID NO: 13600 - DNA, 25 bp, Artificial
  probe
  misc_feature (1)..(25): SEQ ID NO: 6060; WAN02498C_at; Start 32; Stop 56
taaagcactctgatgtttgaacaac

SEQ ID NO: 13601 - DNA, 25 bp, Artificial
  probe
  misc_feature (1)..(25): SEQ ID NO: 6060; WAN02498C_at; Start 47; Stop 71
tttgaacaactttcatatatgatga

SEQ ID NO: 13602 - DNA, 25 bp, Artificial
  probe
  misc_feature (1)..(25): SEQ ID NO: 6060; WAN02498C_at; Start 55; Stop 79
actttcatatatgatgaacggagaa

SEQ ID NO: 13603 - DNA, 25 bp, Artificial
  probe
  misc_feature (1)..(25): SEQ ID NO: 6060; WAN02498C_at; Start 57; Stop 81
tttcatatatgatgaacggagaaat

SEQ ID NO: 13604 - DNA, 25 bp, Artificial
  probe
  misc_feature (1)..(25): SEQ ID NO: 6060; WAN02498C_at; Start 37; Stop 61
cactctgatgtttgaacaactttca

SEQ ID NO: 13605 - DNA, 25 bp, Artificial
  probe
  misc_feature (1)..(25): SEQ ID NO: 6060; WAN02498C_at; Start 54; Stop 78
aactttcatatatgatgaacggaga

SEQ ID NO: 13606 - DNA, 25 bp, Artificial
  probe
  misc_feature (1)..(25): SEQ ID NO: 6060; WAN02498C_at; Start 53; Stop 77
caactttcatatatgatgaacggag

SEQ ID NO: 13607 - DNA, 25 bp, Artificial
  probe
  misc_feature (1)..(25): SEQ ID NO: 6060; WAN02498C_at; Start 56; Stop 80
ctttcatatatgatgaacggagaaa

SEQ ID NO: 13608 - DNA, 25 bp, Artificial
  probe
  misc_feature (1)..(25): SEQ ID NO: 6060; WAN02498C_at; Start 30; Stop 54
tataaagcactctgatgtttgaaca

SEQ ID NO: 13609 - DNA, 25 bp, Artificial
  probe
  misc_feature (1)..(25): SEQ ID NO: 6060; WAN02498C_at; Start 49; Stop 73
tgaacaactttcatatatgatgaac

SEQ ID NO: 13610 - DNA, 25 bp, Artificial
  probe
  misc_feature (1)..(25): SEQ ID NO: 6060; WAN02498C_at; Start 31; Stop 55
ataaagcactctgatgtttgaacaa

SEQ ID NO: 13611 - DNA, 25 bp, Artificial
  probe
  misc_feature (1)..(25): SEQ ID NO: 6060; WAN02498C_at; Start 52; Stop 76
acaactttcatatatgatgaacgga

SEQ ID NO: 13612 - DNA, 25 bp, Artificial
  probe
  misc_feature (1)..(25): SEQ ID NO: 6060; WAN02498C_at; Start 34; Stop 58
aagcactctgatgtttgaacaactt

SEQ ID NO: 13613 - DNA, 25 bp, Artificial
  probe
  misc_feature (1)..(25): SEQ ID NO: 6060; WAN02498C_at; Start 33; Stop 57
aaagcactctgatgtttgaacaact

SEQ ID NO: 13614 - DNA, 25 bp, Artificial
  probe
  misc_feature (1)..(25): SEQ ID NO: 6060; WAN02498C_at; Start 40; Stop 64
tctgatgtttgaacaactttcatat

SEQ ID NO: 13615 - DNA, 25 bp, Artificial
  probe
  misc_feature (1)..(25): SEQ ID NO: 6060; WAN02498C_at; Start 43; Stop 67
gatgtttgaacaactttcatatatg

SEQ ID NO: 13616 - DNA, 25 bp, Artificial
  probe
  misc_feature (1)..(25): SEQ ID NO: 6060; WAN02498C_at; Start 36; Stop 60
gcactctgatgtttgaacaactttc

SEQ ID NO: 13617 - DNA, 25 bp, Artificial
  probe
  misc_feature (1)..(25): SEQ ID NO: 6060; WAN02498C_at; Start 23; Stop 47
tatattttataaagcactctgatgt

SEQ ID NO: 13618 - DNA, 25 bp, Artificial
  probe
  misc_feature (1)..(25): SEQ ID NO: 6060; WAN02498C_at; Start 22; Stop 46
ttatattttataaagcactctgatg

SEQ ID NO: 13619 - DNA, 25 bp, Artificial
  probe
  misc_feature (1)..(25): SEQ ID NO: 6060; WAN02498C_at; Start 60; Stop 84
catatatgatgaacggagaaatttt

SEQ ID NO: 13620 - DNA, 25 bp, Artificial
  probe
  misc_feature (1)..(25): SEQ ID NO: 6161; WAN02498D_at; Start 25; Stop 49
ttcgtatcaaacagctataatatag

SEQ ID NO: 13621 - DNA, 25 bp, Artificial
  probe
  misc_feature (1)..(25): SEQ ID NO: 6161; WAN02498D_at; Start 27; Stop 51
cgtatcaaacagctataatatagaa

SEQ ID NO: 13622 - DNA, 25 bp, Artificial
  probe
  misc_feature (1)..(25): SEQ ID NO: 6161; WAN02498D_at; Start 21; Stop 45
aaatttcgtatcaaacagctataat

SEQ ID NO: 13623 - DNA, 25 bp, Artificial
  probe
  misc_feature (1)..(25): SEQ ID NO: 6161; WAN02498D_at; Start 42; Stop 66
taatatagaatcattttcacctaaa

SEQ ID NO: 13624 - DNA, 25 bp, Artificial
  probe
  misc_feature (1)..(25): SEQ ID NO: 6161; WAN02498D_at; Start 38; Stop 62
gctataatatagaatcattttcacc

SEQ ID NO: 13625 - DNA, 25 bp, Artificial
  probe
  misc_feature (1)..(25): SEQ ID NO: 6161; WAN02498D_at; Start 69; Stop 93
gataattaatcacaccctaatattg

SEQ ID NO: 13626 - DNA, 25 bp, Artificial
  probe
  misc_feature (1)..(25): SEQ ID NO: 6161; WAN02498D_at; Start 66; Stop 90
aaagataattaatcacaccctaata

SEQ ID NO: 13627 - DNA, 25 bp, Artificial
  probe
  misc_feature (1)..(25): SEQ ID NO: 6161; WAN02498D_at; Start 26; Stop 50
tcgtatcaaacagctataatataga

SEQ ID NO: 13628 - DNA, 25 bp, Artificial
  probe
  misc_feature (1)..(25): SEQ ID NO: 6161; WAN02498D_at; Start 22; Stop 46
aatttcgtatcaaacagctataata

SEQ ID NO: 13629 - DNA, 25 bp, Artificial
  probe
  misc_feature (1)..(25): SEQ ID NO: 6161; WAN02498D_at; Start 20; Stop 44
taaatttcgtatcaaacagctataa

SEQ ID NO: 13630 - DNA, 25 bp, Artificial
  probe
  misc_feature (1)..(25): SEQ ID NO: 6161; WAN02498D_at; Start 16; Stop 40
ataataaatttcgtatcaaacagct

SEQ ID NO: 13631 - DNA, 25 bp, Artificial
  probe
  misc_feature (1)..(25): SEQ ID NO: 6161; WAN02498D_at; Start 52; Stop 76
tcattttcacctaaaaagataatta

SEQ ID NO: 13632 - DNA, 25 bp, Artificial
  probe
  misc_feature (1)..(25): SEQ ID NO: 6161; WAN02498D_at; Start 31; Stop 55
tcaaacagctataatatagaatcat

SEQ ID NO: 13633 - DNA, 25 bp, Artificial
  probe
  misc_feature (1)..(25): SEQ ID NO: 6161; WAN02498D_at; Start 77; Stop 101
atcacaccctaatattgtactgacc

SEQ ID NO: 13634 - DNA, 25 bp, Artificial
  probe
  misc_feature (1)..(25): SEQ ID NO: 6161; WAN02498D_at; Start 47; Stop 71
tagaatcattttcacctaaaaagat

SEQ ID NO: 13635 - DNA, 25 bp, Artificial
  probe
  misc_feature (1)..(25): SEQ ID NO: 6161; WAN02498D_at; Start 63; Stop 87
taaaaagataattaatcacacccta

SEQ ID NO: 13636 - DNA, 25 bp, Artificial
  probe
  misc_feature (1)..(25): SEQ ID NO: 6161; WAN02498D_at; Start 45; Stop 69
tatagaatcattttcacctaaaaag

SEQ ID NO: 13637 - DNA, 25 bp, Artificial
  probe
  misc_feature (1)..(25): SEQ ID NO: 6161; WAN02498D_at; Start 59; Stop 83
cacctaaaaagataattaatcacac

SEQ ID NO: 13638 - DNA, 25 bp, Artificial
  probe
  misc_feature (1)..(25): SEQ ID NO: 6161; WAN02498D_at; Start 29; Stop 53
tatcaaacagctataatatagaatc

SEQ ID NO: 13639 - DNA, 25 bp, Artificial
  probe
  misc_feature (1)..(25): SEQ ID NO: 6161; WAN02498D_at; Start 75; Stop 99
taatcacaccctaatattgtactga

SEQ ID NO: 13640 - DNA, 25 bp, Artificial
  probe
  misc_feature (1)..(25): SEQ ID NO: 6161; WAN02498D_at; Start 74; Stop 98
ttaatcacaccctaatattgtactg

SEQ ID NO: 13641 - DNA, 25 bp, Artificial
  probe
  misc_feature (1)..(25): SEQ ID NO: 6161; WAN02498D_at; Start 65; Stop 89
aaaagataattaatcacaccctaat

SEQ ID NO: 13642 - DNA, 25 bp, Artificial
  probe
  misc_feature (1)..(25): SEQ ID NO: 6161; WAN02498D_at; Start 62; Stop 86
ctaaaaagataattaatcacaccct

SEQ ID NO: 13643 - DNA, 25 bp, Artificial
  probe
  misc_feature (1)..(25): SEQ ID NO: 6161; WAN02498D_at; Start 81; Stop 105
caccctaatattgtactgaccccaa

SEQ ID NO: 13644 - DNA, 25 bp, Artificial
  probe
  misc_feature (1)..(25): SEQ ID NO: 6161; WAN02498D_at; Start 18; Stop 42
aataaatttcgtatcaaacagctat

SEQ ID NO: 13645 - DNA, 25 bp, Artificial
  probe
  misc_feature (1)..(25): SEQ ID NO: 6161; WAN02498D_at; Start 56; Stop 80
tttcacctaaaaagataattaatca

SEQ ID NO: 13646 - DNA, 25 bp, Artificial
  probe
  misc_feature (1)..(25): SEQ ID NO: 6161; WAN02498D_at; Start 76; Stop 100
aatcacaccctaatattgtactgac

SEQ ID NO: 13647 - DNA, 25 bp, Artificial
  probe
  misc_feature (1)..(25): SEQ ID NO: 6161; WAN02498D_at; Start 71; Stop 95
taattaatcacaccctaatattgta

SEQ ID NO: 13648 - DNA, 25 bp, Artificial
  probe
  misc_feature (1)..(25): SEQ ID NO: 6161; WAN02498D_at; Start 80; Stop 104
acaccctaatattgtactgacccca

SEQ ID NO: 13649 - DNA, 25 bp, Artificial
  probe
  misc_feature (1)..(25): SEQ ID NO: 6161; WAN02498D_at; Start 49; Stop 73
gaatcattttcacctaaaaagataa

SEQ ID NO: 13650 - DNA, 25 bp, Artificial
  probe
  misc_feature (1)..(25): SEQ ID NO: 6161; WAN02498D_at; Start 4; Stop 28
cataatttccttataataaatttcg

SEQ ID NO: 13651 - DNA, 25 bp, Artificial
  probe
  misc_feature (1)..(25): SEQ ID NO: 6161; WAN02498D_at; Start 15; Stop 39
tataataaatttcgtatcaaacagc

SEQ ID NO: 13652 - DNA, 25 bp, Artificial
  probe
  misc_feature (1)..(25): SEQ ID NO: 6161; WAN02498D_at; Start 17; Stop 41
taataaatttcgtatcaaacagcta

SEQ ID NO: 13653 - DNA, 25 bp, Artificial
  probe
  misc_feature (1)..(25): SEQ ID NO: 6161; WAN02498D_at; Start 78; Stop 102
tcacaccctaatattgtactgaccc

SEQ ID NO: 13654 - DNA, 25 bp, Artificial
  probe
  misc_feature (1)..(25): SEQ ID NO: 6158; WAN02498E_at; Start 229; Stop 253
tcaccgatagatgatcggcacgtag

SEQ ID NO: 13655 - DNA, 25 bp, Artificial
  probe
  misc_feature (1)..(25): SEQ ID NO: 6158; WAN02498E_at; Start 82; Stop 106
tccgaccatttgttctagcaataga

SEQ ID NO: 13656 - DNA, 25 bp, Artificial
  probe
  misc_feature (1)..(25): SEQ ID NO: 6158; WAN02498E_at; Start 199; Stop 223
tccaagcaggcttgagggtcgctct

SEQ ID NO: 13657 - DNA, 25 bp, Artificial
  probe
  misc_feature (1)..(25): SEQ ID NO: 6158; WAN02498E_at; Start 14; Stop 38
tttctaataaataacactatgttcc

SEQ ID NO: 13658 - DNA, 25 bp, Artificial
  probe
  misc_feature (1)..(25): SEQ ID NO: 6158; WAN02498E_at; Start 131; Stop 155
gtcgctttctctttcttacatcaaa

SEQ ID NO: 13659 - DNA, 25 bp, Artificial
  probe
  misc_feature (1)..(25): SEQ ID NO: 6158; WAN02498E_at; Start 265; Stop 289
cagatctacgatagatccatcgtat

SEQ ID NO: 13660 - DNA, 25 bp, Artificial
  probe
  misc_feature (1)..(25): SEQ ID NO: 6158; WAN02498E_at; Start 215; Stop 239
ggtcgctcttgggttcaccgataga

SEQ ID NO: 13661 - DNA, 25 bp, Artificial
  probe
  misc_feature (1)..(25): SEQ ID NO: 6158; WAN02498E_at; Start 117; Stop 141
aattacttcaatctgtcgctttctc

SEQ ID NO: 13662 - DNA, 25 bp, Artificial
  probe
  misc_feature (1)..(25): SEQ ID NO: 6158; WAN02498E_at; Start 61; Stop 85
cattttcaaactaccaacctatccg

SEQ ID NO: 13663 - DNA, 25 bp, Artificial
  probe
  misc_feature (1)..(25): SEQ ID NO: 6158; WAN02498E_at; Start 183; Stop 207
gaatctattacctcaatccaagcag

SEQ ID NO: 13664 - DNA, 25 bp, Artificial
  probe
  misc_feature (1)..(25): SEQ ID NO: 6158; WAN02498E_at; Start 110; Stop 134
gagttaaaattacttcaatctgtcg

SEQ ID NO: 13665 - DNA, 25 bp, Artificial
  probe
  misc_feature (1)..(25): SEQ ID NO: 6158; WAN02498E_at; Start 251; Stop 275
taggccttgcacatcagatctacga

SEQ ID NO: 13666 - DNA, 25 bp, Artificial
  probe
  misc_feature (1)..(25): SEQ ID NO: 6158; WAN02498E_at; Start 188; Stop 212
tattacctcaatccaagcaggcttg

SEQ ID NO: 13667 - DNA, 25 bp, Artificial
  probe
  misc_feature (1)..(25): SEQ ID NO: 6158; WAN02498E_at; Start 201; Stop 225
caagcaggcttgagggtcgctcttg

SEQ ID NO: 13668 - DNA, 25 bp, Artificial
  probe
  misc_feature (1)..(25): SEQ ID NO: 6158; WAN02498E_at; Start 163; Stop 187
tagtctaactacagatatttgaatc

SEQ ID NO: 13669 - DNA, 25 bp, Artificial
  probe
  misc_feature (1)..(25): SEQ ID NO: 6158; WAN02498E_at; Start 37; Stop 61
ccatttaacaatagatagcatcttc

SEQ ID NO: 13670 - DNA, 25 bp, Artificial
  probe
  misc_feature (1)..(25): SEQ ID NO: 6158; WAN02498E_at; Start 236; Stop 260
tagatgatcggcacgtaggccttgc

SEQ ID NO: 13671 - DNA, 25 bp, Artificial
  probe
  misc_feature (1)..(25): SEQ ID NO: 6158; WAN02498E_at; Start 172; Stop 196
tacagatatttgaatctattacctc

SEQ ID NO: 13672 - DNA, 25 bp, Artificial
  probe
  misc_feature (1)..(25): SEQ ID NO: 6158; WAN02498E_at; Start 48; Stop 72
tagatagcatcttcattttcaaact

SEQ ID NO: 13673 - DNA, 25 bp, Artificial
  probe
  misc_feature (1)..(25): SEQ ID NO: 6158; WAN02498E_at; Start 95; Stop 119
tctagcaatagaagagagttaaaat

SEQ ID NO: 13674 - DNA, 25 bp, Artificial
  probe
  misc_feature (1)..(25): SEQ ID NO: 6158; WAN02498E_at; Start 152; Stop 176
caaacttcaaatagtctaactacag

SEQ ID NO: 13675 - DNA, 25 bp, Artificial
  probe
  misc_feature (1)..(25): SEQ ID NO: 6158; WAN02498E_at; Start 88; Stop 112
catttgttctagcaatagaagagag

SEQ ID NO: 13676 - DNA, 25 bp, Artificial
  probe
  misc_feature (1)..(25): SEQ ID NO: 6158; WAN02498E_at; Start 125; Stop 149
caatctgtcgctttctctttcttac

SEQ ID NO: 13677 - DNA, 25 bp, Artificial
  probe
  misc_feature (1)..(25): SEQ ID NO: 6158; WAN02498E_at; Start 245; Stop 269
ggcacgtaggccttgcacatcagat

SEQ ID NO: 13678 - DNA, 25 bp, Artificial
  probe
  misc_feature (1)..(25): SEQ ID NO: 6158; WAN02498E_at; Start 31; Stop 55
tatgttccatttaacaatagatagc

SEQ ID NO: 13679 - DNA, 25 bp, Artificial
  probe
  misc_feature (1)..(25): SEQ ID NO: 6158; WAN02498E_at; Start 224; Stop 248
tgggttcaccgatagatgatcggca

SEQ ID NO: 13680 - DNA, 25 bp, Artificial
  probe
  misc_feature (1)..(25): SEQ ID NO: 6158; WAN02498E_at; Start 255; Stop 279
ccttgcacatcagatctacgataga

SEQ ID NO: 13681 - DNA, 25 bp, Artificial
  probe
  misc_feature (1)..(25): SEQ ID NO: 6158; WAN02498E_at; Start 240; Stop 264
tgatcggcacgtaggccttgcacat

SEQ ID NO: 13682 - DNA, 25 bp, Artificial
  probe
  misc_feature (1)..(25): SEQ ID NO: 6158; WAN02498E_at; Start 195; Stop 219
tcaatccaagcaggcttgagggtcg

SEQ ID NO: 13683 - DNA, 25 bp, Artificial
  probe
  misc_feature (1)..(25): SEQ ID NO: 6158; WAN02498E_at; Start 211; Stop 235
tgagggtcgctcttgggttcaccga

SEQ ID NO: 13684 - DNA, 25 bp, Artificial
  probe
  misc_feature (1)..(25): SEQ ID NO: 6158; WAN02498E_at; Start 75; Stop 99
caacctatccgaccatttgttctag

SEQ ID NO: 13685 - DNA, 25 bp, Artificial
  probe
  misc_feature (1)..(25): SEQ ID NO: 6158; WAN02498E_at; Start 247; Stop 271
cacgtaggccttgcacatcagatct

SEQ ID NO: 13686 - DNA, 25 bp, Artificial
  probe
  misc_feature (1)..(25): SEQ ID NO: 6158; WAN02498E_at; Start 218; Stop 242
cgctcttgggttcaccgatagatga

SEQ ID NO: 13687 - DNA, 25 bp, Artificial
  probe
  misc_feature (1)..(25): SEQ ID NO: 6158; WAN02498E_at; Start 144; Stop 168
tcttacatcaaacttcaaatagtct

SEQ ID NO: 13688 - DNA, 25 bp, Artificial
  probe
  misc_feature (1)..(25): SEQ ID NO: 6120; WAN02498F_at; Start 16; Stop 40
tgaatccattatatcgctttcaaaa

SEQ ID NO: 13689 - DNA, 25 bp, Artificial
  probe
  misc_feature (1)..(25): SEQ ID NO: 6120; WAN02498F_at; Start 22; Stop 46
cattatatcgctttcaaaaaataat

SEQ ID NO: 13690 - DNA, 25 bp, Artificial
  probe
  misc_feature (1)..(25): SEQ ID NO: 6120; WAN02498F_at; Start 10; Stop 34
cctttatgaatccattatatcgctt

SEQ ID NO: 13691 - DNA, 25 bp, Artificial
  probe
  misc_feature (1)..(25): SEQ ID NO: 6120; WAN02498F_at; Start 29; Stop 53
tcgctttcaaaaaataatatacttc

SEQ ID NO: 13692 - DNA, 25 bp, Artificial
  probe
  misc_feature (1)..(25): SEQ ID NO: 6120; WAN02498F_at; Start 6; Stop 30
acctcctttatgaatccattatatc

SEQ ID NO: 13693 - DNA, 25 bp, Artificial
  probe
  misc_feature (1)..(25): SEQ ID NO: 6120; WAN02498F_at; Start 24; Stop 48
ttatatcgctttcaaaaaataatat

SEQ ID NO: 13694 - DNA, 25 bp, Artificial
  probe
  misc_feature (1)..(25): SEQ ID NO: 6120; WAN02498F_at; Start 17; Stop 41
gaatccattatatcgctttcaaaaa

SEQ ID NO: 13695 - DNA, 25 bp, Artificial
  probe
  misc_feature (1)..(25): SEQ ID NO: 6120; WAN02498F_at; Start 21; Stop 45
ccattatatcgctttcaaaaaataa

SEQ ID NO: 13696 - DNA, 25 bp, Artificial
  probe
  misc_feature (1)..(25): SEQ ID NO: 6120; WAN02498F_at; Start 2; Stop 26
atacacctcctttatgaatccatta

SEQ ID NO: 13697 - DNA, 25 bp, Artificial
  probe
  misc_feature (1)..(25): SEQ ID NO: 6120; WAN02498F_at; Start 31; Stop 55
gctttcaaaaaataatatacttcgc

SEQ ID NO: 13698 - DNA, 25 bp, Artificial
  probe
  misc_feature (1)..(25): SEQ ID NO: 6120; WAN02498F_at; Start 30; Stop 54
cgctttcaaaaaataatatacttcg

SEQ ID NO: 13699 - DNA, 25 bp, Artificial
  probe
  misc_feature (1)..(25): SEQ ID NO: 6120; WAN02498F_at; Start 12; Stop 36
tttatgaatccattatatcgctttc

SEQ ID NO: 13700 - DNA, 25 bp, Artificial
  probe
  misc_feature (1)..(25): SEQ ID NO: 6120; WAN02498F_at; Start 35; Stop 59
tcaaaaaataatatacttcgcattt

SEQ ID NO: 13701 - DNA, 25 bp, Artificial
  probe
  misc_feature (1)..(25): SEQ ID NO: 6120; WAN02498F_at; Start 28; Stop 52
atcgctttcaaaaaataatatactt

SEQ ID NO: 13702 - DNA, 25 bp, Artificial
  probe
  misc_feature (1)..(25): SEQ ID NO: 6120; WAN02498F_at; Start 34; Stop 58
ttcaaaaaataatatacttcgcatt

SEQ ID NO: 13703 - DNA, 25 bp, Artificial
  probe
  misc_feature (1)..(25): SEQ ID NO: 6120; WAN02498F_at; Start 5; Stop 29
cacctcctttatgaatccattatat

SEQ ID NO: 13704 - DNA, 25 bp, Artificial
  probe
  misc_feature (1)..(25): SEQ ID NO: 6120; WAN02498F_at; Start 1; Stop 25
gatacacctcctttatgaatccatt

SEQ ID NO: 13705 - DNA, 25 bp, Artificial
  probe
  misc_feature (1)..(25): SEQ ID NO: 6120; WAN02498F_at; Start 27; Stop 51
tatcgctttcaaaaaataatatact

SEQ ID NO: 13706 - DNA, 25 bp, Artificial
  probe
  misc_feature (1)..(25): SEQ ID NO: 6120; WAN02498F_at; Start 26; Stop 50
atatcgctttcaaaaaataatatac

SEQ ID NO: 13707 - DNA, 25 bp, Artificial
  probe
  misc_feature (1)..(25): SEQ ID NO: 6120; WAN02498F_at; Start 9; Stop 33
tcctttatgaatccattatatcgct

SEQ ID NO: 13708 - DNA, 25 bp, Artificial
  probe
  misc_feature (1)..(25): SEQ ID NO: 6120; WAN02498F_at; Start 19; Stop 43
atccattatatcgctttcaaaaaat

SEQ ID NO: 13709 - DNA, 25 bp, Artificial
  probe
  misc_feature (1)..(25): SEQ ID NO: 6120; WAN02498F_at; Start 4; Stop 28
acacctcctttatgaatccattata

SEQ ID NO: 13710 - DNA, 25 bp, Artificial
  probe
  misc_feature (1)..(25): SEQ ID NO: 6120; WAN02498F_at; Start 32; Stop 56
ctttcaaaaaataatatacttcgca

SEQ ID NO: 13711 - DNA, 25 bp, Artificial
  probe
  misc_feature (1)..(25): SEQ ID NO: 6120; WAN02498F_at; Start 13; Stop 37
ttatgaatccattatatcgctttca

SEQ ID NO: 13712 - DNA, 25 bp, Artificial
  probe
  misc_feature (1)..(25): SEQ ID NO: 6120; WAN02498F_at; Start 7; Stop 31
cctcctttatgaatccattatatcg

SEQ ID NO: 13713 - DNA, 25 bp, Artificial
  probe
  misc_feature (1)..(25): SEQ ID NO: 6120; WAN02498F_at; Start 8; Stop 32
ctcctttatgaatccattatatcgc

SEQ ID NO: 13714 - DNA, 25 bp, Artificial
  probe
  misc_feature (1)..(25): SEQ ID NO: 6120; WAN02498F_at; Start 20; Stop 44
tccattatatcgctttcaaaaaata

SEQ ID NO: 13715 - DNA, 25 bp, Artificial
  probe
  misc_feature (1)..(25): SEQ ID NO: 6120; WAN02498F_at; Start 3; Stop 27
tacacctcctttatgaatccattat

SEQ ID NO: 13716 - DNA, 25 bp, Artificial
  probe
  misc_feature (1)..(25): SEQ ID NO: 6120; WAN02498F_at; Start 25; Stop 49
tatatcgctttcaaaaaataatata

SEQ ID NO: 13717 - DNA, 25 bp, Artificial
  probe
  misc_feature (1)..(25): SEQ ID NO: 6120; WAN02498F_at; Start 18; Stop 42
aatccattatatcgctttcaaaaaa

SEQ ID NO: 13718 - DNA, 25 bp, Artificial
  probe
  misc_feature (1)..(25): SEQ ID NO: 6120; WAN02498F_at; Start 11; Stop 35
ctttatgaatccattatatcgcttt

SEQ ID NO: 13719 - DNA, 25 bp, Artificial
  probe
  misc_feature (1)..(25): SEQ ID NO: 6120; WAN02498F_at; Start 14; Stop 38
tatgaatccattatatcgctttcaa

SEQ ID NO: 13720 - DNA, 25 bp, Artificial
  probe
  misc_feature (1)..(25): SEQ ID NO: 6120; WAN02498F_at; Start 33; Stop 57
tttcaaaaaataatatacttcgcat

SEQ ID NO: 13721 - DNA, 25 bp, Artificial
  probe
  misc_feature (1)..(25): SEQ ID NO: 6120; WAN02498F_at; Start 15; Stop 39
atgaatccattatatcgctttcaaa

SEQ ID NO: 13722 - DNA, 25 bp, Artificial
  probe
  misc_feature (1)..(25): SEQ ID NO: 6166; WAN02498G_at; Start 245; Stop 269
tctgctagtctgacaacagctgtat

SEQ ID NO: 13723 - DNA, 25 bp, Artificial
  probe
  misc_feature (1)..(25): SEQ ID NO: 6166; WAN02498G_at; Start 80; Stop 104
taaagaaactatctagatcagtagc

SEQ ID NO: 13724 - DNA, 25 bp, Artificial
  probe
  misc_feature (1)..(25): SEQ ID NO: 6166; WAN02498G_at; Start 38; Stop 62
tacaatatcctaagtcaatctgtgg

SEQ ID NO: 13725 - DNA, 25 bp, Artificial
  probe
  misc_feature (1)..(25): SEQ ID NO: 6166; WAN02498G_at; Start 141; Stop 165
tactctattgtgtatactatctact

SEQ ID NO: 13726 - DNA, 25 bp, Artificial
  probe
  misc_feature (1)..(25): SEQ ID NO: 6166; WAN02498G_at; Start 124; Stop 148
gcaaccgtttcagggtatactctat

SEQ ID NO: 13727 - DNA, 25 bp, Artificial
  probe
  misc_feature (1)..(25): SEQ ID NO: 6166; WAN02498G_at; Start 101; Stop 125
tagcaaagtgattagcgtacttcgc

SEQ ID NO: 13728 - DNA, 25 bp, Artificial
  probe
  misc_feature (1)..(25): SEQ ID NO: 6166; WAN02498G_at; Start 118; Stop 142
tacttcgcaaccgtttcagggtata

SEQ ID NO: 13729 - DNA, 25 bp, Artificial
  probe
  misc_feature (1)..(25): SEQ ID NO: 6166; WAN02498G_at; Start 9; Stop 33
gagaccttctctctagctttcaaaa

SEQ ID NO: 13730 - DNA, 25 bp, Artificial
  probe
  misc_feature (1)..(25): SEQ ID NO: 6166; WAN02498G_at; Start 93; Stop 117
tagatcagtagcaaagtgattagcg

SEQ ID NO: 13731 - DNA, 25 bp, Artificial
  probe
  misc_feature (1)..(25): SEQ ID NO: 6166; WAN02498G_at; Start 109; Stop 133
tgattagcgtacttcgcaaccgttt

SEQ ID NO: 13732 - DNA, 25 bp, Artificial
  probe
  misc_feature (1)..(25): SEQ ID NO: 6166; WAN02498G_at; Start 261; Stop 285
cagctgtatcttcattgtaattggt

SEQ ID NO: 13733 - DNA, 25 bp, Artificial
  probe
  misc_feature (1)..(25): SEQ ID NO: 6166; WAN02498G_at; Start 46; Stop 70
cctaagtcaatctgtggatgctgtg

SEQ ID NO: 13734 - DNA, 25 bp, Artificial
  probe
  misc_feature (1)..(25): SEQ ID NO: 6166; WAN02498G_at; Start 216; Stop 240
caatcatctgattagtgtctatcac

SEQ ID NO: 13735 - DNA, 25 bp, Artificial
  probe
  misc_feature (1)..(25): SEQ ID NO: 6166; WAN02498G_at; Start 250; Stop 274
tagtctgacaacagctgtatcttca

SEQ ID NO: 13736 - DNA, 25 bp, Artificial
  probe
  misc_feature (1)..(25): SEQ ID NO: 6166; WAN02498G_at; Start 121; Stop 145
ttcgcaaccgtttcagggtatactc

SEQ ID NO: 13737 - DNA, 25 bp, Artificial
  probe
  misc_feature (1)..(25): SEQ ID NO: 6166; WAN02498G_at; Start 84; Stop 108
gaaactatctagatcagtagcaaag

SEQ ID NO: 13738 - DNA, 25 bp, Artificial
  probe
  misc_feature (1)..(25): SEQ ID NO: 6166; WAN02498G_at; Start 113; Stop 137
tagcgtacttcgcaaccgtttcagg

SEQ ID NO: 13739 - DNA, 25 bp, Artificial
  probe
  misc_feature (1)..(25): SEQ ID NO: 6166; WAN02498G_at; Start 16; Stop 40
tctctctagctttcaaaaaacttac

SEQ ID NO: 13740 - DNA, 25 bp, Artificial
  probe
  misc_feature (1)..(25): SEQ ID NO: 6166; WAN02498G_at; Start 235; Stop 259
tatcactacatctgctagtctgaca

SEQ ID NO: 13741 - DNA, 25 bp, Artificial
  probe
  misc_feature (1)..(25): SEQ ID NO: 6166; WAN02498G_at; Start 57; Stop 81
ctgtggatgctgtgtttattgatta

SEQ ID NO: 13742 - DNA, 25 bp, Artificial
  probe
  misc_feature (1)..(25): SEQ ID NO: 6166; WAN02498G_at; Start 151; Stop 175
tgtatactatctactataactttcg

SEQ ID NO: 13743 - DNA, 25 bp, Artificial
  probe
  misc_feature (1)..(25): SEQ ID NO: 6166; WAN02498G_at; Start 129; Stop 153
cgtttcagggtatactctattgtgt

SEQ ID NO: 13744 - DNA, 25 bp, Artificial
  probe
  misc_feature (1)..(25): SEQ ID NO: 6166; WAN02498G_at; Start 88; Stop 112
ctatctagatcagtagcaaagtgat

SEQ ID NO: 13745 - DNA, 25 bp, Artificial
  probe
  misc_feature (1)..(25): SEQ ID NO: 6166; WAN02498G_at; Start 22; Stop 46
tagctttcaaaaaacttacaatatc

SEQ ID NO: 13746 - DNA, 25 bp, Artificial
  probe
  misc_feature (1)..(25): SEQ ID NO: 6166; WAN02498G_at; Start 106; Stop 130
aagtgattagcgtacttcgcaaccg

SEQ ID NO: 13747 - DNA, 25 bp, Artificial
  probe
  misc_feature (1)..(25): SEQ ID NO: 6166; WAN02498G_at; Start 230; Stop 254
gtgtctatcactacatctgctagtc

SEQ ID NO: 13748 - DNA, 25 bp, Artificial
  probe
  misc_feature (1)..(25): SEQ ID NO: 6166; WAN02498G_at; Start 241; Stop 265
tacatctgctagtctgacaacagct

SEQ ID NO: 13749 - DNA, 25 bp, Artificial
  probe
  misc_feature (1)..(25): SEQ ID NO: 6166; WAN02498G_at; Start 50; Stop 74
agtcaatctgtggatgctgtgttta

SEQ ID NO: 13750 - DNA, 25 bp, Artificial
  probe
  misc_feature (1)..(25): SEQ ID NO: 6166; WAN02498G_at; Start 1; Stop 25
taattttagagaccttctctctagc

SEQ ID NO: 13751 - DNA, 25 bp, Artificial
  probe
  misc_feature (1)..(25): SEQ ID NO: 6166; WAN02498G_at; Start 256; Stop 280
gacaacagctgtatcttcattgtaa

SEQ ID NO: 13752 - DNA, 25 bp, Artificial
  probe
  misc_feature (1)..(25): SEQ ID NO: 6166; WAN02498G_at; Start 167; Stop 191
taactttcgtagataaattattaca

SEQ ID NO: 13753 - DNA, 25 bp, Artificial
  probe
  misc_feature (1)..(25): SEQ ID NO: 6166; WAN02498G_at; Start 199; Stop 223
tacagtttttaaataaccaatcatc

SEQ ID NO: 13754 - DNA, 25 bp, Artificial
  probe
  misc_feature (1)..(25): SEQ ID NO: 6166; WAN02498G_at; Start 225; Stop 249
gattagtgtctatcactacatctgc

SEQ ID NO: 13755 - DNA, 25 bp, Artificial
  probe
  misc_feature (1)..(25): SEQ ID NO: 6166; WAN02498G_at; Start 208; Stop 232
taaataaccaatcatctgattagtg

SEQ ID NO: 13756 - DNA, 25 bp, Artificial
  probe
  misc_feature (1)..(25): SEQ ID NO: 6214; WAN02498H_at; Start 34; Stop 58
cggaataggctagtgctgtgtctct

SEQ ID NO: 13757 - DNA, 25 bp, Artificial
  probe
  misc_feature (1)..(25): SEQ ID NO: 6214; WAN02498H_at; Start 41; Stop 65
ggctagtgctgtgtctctagcctat

SEQ ID NO: 13758 - DNA, 25 bp, Artificial
  probe
  misc_feature (1)..(25): SEQ ID NO: 6214; WAN02498H_at; Start 17; Stop 41
ataagtagctttacttacggaatag

SEQ ID NO: 13759 - DNA, 25 bp, Artificial
  probe
  misc_feature (1)..(25): SEQ ID NO: 6214; WAN02498H_at; Start 26; Stop 50
tttacttacggaataggctagtgct

SEQ ID NO: 13760 - DNA, 25 bp, Artificial
  probe
  misc_feature (1)..(25): SEQ ID NO: 6214; WAN02498H_at; Start 29; Stop 53
acttacggaataggctagtgctgtg

SEQ ID NO: 13761 - DNA, 25 bp, Artificial
  probe
  misc_feature (1)..(25): SEQ ID NO: 6214; WAN02498H_at; Start 33; Stop 57
acggaataggctagtgctgtgtctc

SEQ ID NO: 13762 - DNA, 25 bp, Artificial
  probe
  misc_feature (1)..(25): SEQ ID NO: 6214; WAN02498H_at; Start 57; Stop 81
ctagcctattttaataattaggagt

SEQ ID NO: 13763 - DNA, 25 bp, Artificial
  probe
  misc_feature (1)..(25): SEQ ID NO: 6214; WAN02498H_at; Start 32; Stop 56
tacggaataggctagtgctgtgtct

SEQ ID NO: 13764 - DNA, 25 bp, Artificial
  probe
  misc_feature (1)..(25): SEQ ID NO: 6214; WAN02498H_at; Start 40; Stop 64
aggctagtgctgtgtctctagccta

SEQ ID NO: 13765 - DNA, 25 bp, Artificial
  probe
  misc_feature (1)..(25): SEQ ID NO: 6214; WAN02498H_at; Start 36; Stop 60
gaataggctagtgctgtgtctctag

SEQ ID NO: 13766 - DNA, 25 bp, Artificial
  probe
  misc_feature (1)..(25): SEQ ID NO: 6214; WAN02498H_at; Start 24; Stop 48
gctttacttacggaataggctagtg

SEQ ID NO: 13767 - DNA, 25 bp, Artificial
  probe
  misc_feature (1)..(25): SEQ ID NO: 6214; WAN02498H_at; Start 38; Stop 62
ataggctagtgctgtgtctctagcc

SEQ ID NO: 13768 - DNA, 25 bp, Artificial
  probe
  misc_feature (1)..(25): SEQ ID NO: 6214; WAN02498H_at; Start 44; Stop 68
tagtgctgtgtctctagcctatttt

SEQ ID NO: 13769 - DNA, 25 bp, Artificial
  probe
  misc_feature (1)..(25): SEQ ID NO: 6214; WAN02498H_at; Start 37; Stop 61
aataggctagtgctgtgtctctagc

SEQ ID NO: 13770 - DNA, 25 bp, Artificial
  probe
  misc_feature (1)..(25): SEQ ID NO: 6214; WAN02498H_at; Start 20; Stop 44
agtagctttacttacggaataggct

SEQ ID NO: 13771 - DNA, 25 bp, Artificial
  probe
  misc_feature (1)..(25): SEQ ID NO: 6214; WAN02498H_at; Start 21; Stop 45
gtagctttacttacggaataggcta

SEQ ID NO: 13772 - DNA, 25 bp, Artificial
  probe
  misc_feature (1)..(25): SEQ ID NO: 6214; WAN02498H_at; Start 45; Stop 69
agtgctgtgtctctagcctatttta

SEQ ID NO: 13773 - DNA, 25 bp, Artificial
  probe
  misc_feature (1)..(25): SEQ ID NO: 6214; WAN02498H_at; Start 53; Stop 77
gtctctagcctattttaataattag

SEQ ID NO: 13774 - DNA, 25 bp, Artificial
  probe
  misc_feature (1)..(25): SEQ ID NO: 6214; WAN02498H_at; Start 51; Stop 75
gtgtctctagcctattttaataatt

SEQ ID NO: 13775 - DNA, 25 bp, Artificial
  probe
  misc_feature (1)..(25): SEQ ID NO: 6214; WAN02498H_at; Start 31; Stop 55
ttacggaataggctagtgctgtgtc

SEQ ID NO: 13776 - DNA, 25 bp, Artificial
  probe
  misc_feature (1)..(25): SEQ ID NO: 6214; WAN02498H_at; Start 50; Stop 74
tgtgtctctagcctattttaataat

SEQ ID NO: 13777 - DNA, 25 bp, Artificial
  probe
  misc_feature (1)..(25): SEQ ID NO: 6214; WAN02498H_at; Start 56; Stop 80
tctagcctattttaataattaggag

SEQ ID NO: 13778 - DNA, 25 bp, Artificial
  probe
  misc_feature (1)..(25): SEQ ID NO: 6214; WAN02498H_at; Start 39; Stop 63
taggctagtgctgtgtctctagcct

SEQ ID NO: 13779 - DNA, 25 bp, Artificial
  probe
  misc_feature (1)..(25): SEQ ID NO: 6214; WAN02498H_at; Start 42; Stop 66
gctagtgctgtgtctctagcctatt

SEQ ID NO: 13780 - DNA, 25 bp, Artificial
  probe
  misc_feature (1)..(25): SEQ ID NO: 6214; WAN02498H_at; Start 25; Stop 49
ctttacttacggaataggctagtgc

SEQ ID NO: 13781 - DNA, 25 bp, Artificial
  probe
  misc_feature (1)..(25): SEQ ID NO: 6214; WAN02498H_at; Start 43; Stop 67
ctagtgctgtgtctctagcctattt

SEQ ID NO: 13782 - DNA, 25 bp, Artificial
  probe
  misc_feature (1)..(25): SEQ ID NO: 6214; WAN02498H_at; Start 48; Stop 72
gctgtgtctctagcctattttaata

SEQ ID NO: 13783 - DNA, 25 bp, Artificial
  probe
  misc_feature (1)..(25): SEQ ID NO: 6214; WAN02498H_at; Start 27; Stop 51
ttacttacggaataggctagtgctg

SEQ ID NO: 13784 - DNA, 25 bp, Artificial
  probe
  misc_feature (1)..(25): SEQ ID NO: 6214; WAN02498H_at; Start 46; Stop 70
gtgctgtgtctctagcctattttaa

SEQ ID NO: 13785 - DNA, 25 bp, Artificial
  probe
  misc_feature (1)..(25): SEQ ID NO: 6214; WAN02498H_at; Start 22; Stop 46
tagctttacttacggaataggctag

SEQ ID NO: 13786 - DNA, 25 bp, Artificial
  probe
  misc_feature (1)..(25): SEQ ID NO: 6214; WAN02498H_at; Start 28; Stop 52
tacttacggaataggctagtgctgt

SEQ ID NO: 13787 - DNA, 25 bp, Artificial
  probe
  misc_feature (1)..(25): SEQ ID NO: 6214; WAN02498H_at; Start 35; Stop 59
ggaataggctagtgctgtgtctcta

SEQ ID NO: 13788 - DNA, 25 bp, Artificial
  probe
  misc_feature (1)..(25): SEQ ID NO: 6214; WAN02498H_at; Start 47; Stop 71
tgctgtgtctctagcctattttaat

SEQ ID NO: 13789 - DNA, 25 bp, Artificial
  probe
  misc_feature (1)..(25): SEQ ID NO: 6214; WAN02498H_at; Start 54; Stop 78
tctctagcctattttaataattagg

SEQ ID NO: 13790 - DNA, 25 bp, Artificial
  probe
  misc_feature (1)..(25): SEQ ID NO: 6007; WAN02498I_at; Start 215; Stop 239
tatttgaaggtggtgttcagataag

SEQ ID NO: 13791 - DNA, 25 bp, Artificial
  probe
  misc_feature (1)..(25): SEQ ID NO: 6007; WAN02498I_at; Start 18; Stop 42
taatataagcacctctggcgaaaga

SEQ ID NO: 13792 - DNA, 25 bp, Artificial
  probe
  misc_feature (1)..(25): SEQ ID NO: 6007; WAN02498I_at; Start 267; Stop 291
gctctatgctttctggaatttatca

SEQ ID NO: 13793 - DNA, 25 bp, Artificial
  probe
  misc_feature (1)..(25): SEQ ID NO: 6007; WAN02498I_at; Start 278; Stop 302
tctggaatttatcataacaggagga

SEQ ID NO: 13794 - DNA, 25 bp, Artificial
  probe
  misc_feature (1)..(25): SEQ ID NO: 6007; WAN02498I_at; Start 85; Stop 109
ttttaaacaatttgcaaaaatgtca

SEQ ID NO: 13795 - DNA, 25 bp, Artificial
  probe
  misc_feature (1)..(25): SEQ ID NO: 6007; WAN02498I_at; Start 41; Stop 65
gaagtttcaatgtcctaaagtaata

SEQ ID NO: 13796 - DNA, 25 bp, Artificial
  probe
  misc_feature (1)..(25): SEQ ID NO: 6007; WAN02498I_at; Start 225; Stop 249
tggtgttcagataagaaatttagtc

SEQ ID NO: 13797 - DNA, 25 bp, Artificial
  probe
  misc_feature (1)..(25): SEQ ID NO: 6007; WAN02498I_at; Start 6; Stop 30
tcaacttcccagtaatataagcacc

SEQ ID NO: 13798 - DNA, 25 bp, Artificial
  probe
  misc_feature (1)..(25): SEQ ID NO: 6007; WAN02498I_at; Start 285; Stop 309
tttatcataacaggaggatacagtc

SEQ ID NO: 13799 - DNA, 25 bp, Artificial
  probe
  misc_feature (1)..(25): SEQ ID NO: 6007; WAN02498I_at; Start 205; Stop 229
ctaaaatttgtatttgaaggtggtg

SEQ ID NO: 13800 - DNA, 25 bp, Artificial
  probe
  misc_feature (1)..(25): SEQ ID NO: 6007; WAN02498I_at; Start 274; Stop 298
gctttctggaatttatcataacagg

SEQ ID NO: 13801 - DNA, 25 bp, Artificial
  probe
  misc_feature (1)..(25): SEQ ID NO: 6007; WAN02498I_at; Start 69; Stop 93
gaatccaattgaaagattttaaaca

SEQ ID NO: 13802 - DNA, 25 bp, Artificial
  probe
  misc_feature (1)..(25): SEQ ID NO: 6007; WAN02498I_at; Start 21; Stop 45
tataagcacctctggcgaaagaagt

SEQ ID NO: 13803 - DNA, 25 bp, Artificial
  probe
  misc_feature (1)..(25): SEQ ID NO: 6007; WAN02498I_at; Start 3; Stop 27
tcttcaacttcccagtaatataagc

SEQ ID NO: 13804 - DNA, 25 bp, Artificial
  probe
  misc_feature (1)..(25): SEQ ID NO: 6007; WAN02498I_at; Start 36; Stop 60
cgaaagaagtttcaatgtcctaaag

SEQ ID NO: 13805 - DNA, 25 bp, Artificial
  probe
  misc_feature (1)..(25): SEQ ID NO: 6007; WAN02498I_at; Start 25; Stop 49
agcacctctggcgaaagaagtttca

SEQ ID NO: 13806 - DNA, 25 bp, Artificial
  probe
  misc_feature (1)..(25): SEQ ID NO: 6007; WAN02498I_at; Start 234; Stop 258
gataagaaatttagtcagacgaacc

SEQ ID NO: 13807 - DNA, 25 bp, Artificial
  probe
  misc_feature (1)..(25): SEQ ID NO: 6007; WAN02498I_at; Start 251; Stop 275
gacgaaccacgaatttgctctatgc

SEQ ID NO: 13808 - DNA, 25 bp, Artificial
  probe
  misc_feature (1)..(25): SEQ ID NO: 6007; WAN02498I_at; Start 10; Stop 34
cttcccagtaatataagcacctctg

SEQ ID NO: 13809 - DNA, 25 bp, Artificial
  probe
  misc_feature (1)..(25): SEQ ID NO: 6007; WAN02498I_at; Start 142; Stop 166
ttcttgacatataaaaacacatggt

SEQ ID NO: 13810 - DNA, 25 bp, Artificial
  probe
  misc_feature (1)..(25): SEQ ID NO: 6007; WAN02498I_at; Start 239; Stop 263
gaaatttagtcagacgaaccacgaa

SEQ ID NO: 13811 - DNA, 25 bp, Artificial
  probe
  misc_feature (1)..(25): SEQ ID NO: 6007; WAN02498I_at; Start 247; Stop 271
gtcagacgaaccacgaatttgctct

SEQ ID NO: 13812 - DNA, 25 bp, Artificial
  probe
  misc_feature (1)..(25): SEQ ID NO: 6007; WAN02498I_at; Start 54; Stop 78
cctaaagtaataagtgaatccaatt

SEQ ID NO: 13813 - DNA, 25 bp, Artificial
  probe
  misc_feature (1)..(25): SEQ ID NO: 6007; WAN02498I_at; Start 60; Stop 84
gtaataagtgaatccaattgaaaga

SEQ ID NO: 13814 - DNA, 25 bp, Artificial
  probe
  misc_feature (1)..(25): SEQ ID NO: 6007; WAN02498I_at; Start 159; Stop 183
cacatggtagaatataattagaaag

SEQ ID NO: 13815 - DNA, 25 bp, Artificial
  probe
  misc_feature (1)..(25): SEQ ID NO: 6007; WAN02498I_at; Start 31; Stop 55
tctggcgaaagaagtttcaatgtcc

SEQ ID NO: 13816 - DNA, 25 bp, Artificial
  probe
  misc_feature (1)..(25): SEQ ID NO: 6007; WAN02498I_at; Start 254; Stop 278
gaaccacgaatttgctctatgcttt

SEQ ID NO: 13817 - DNA, 25 bp, Artificial
  probe
  misc_feature (1)..(25): SEQ ID NO: 6007; WAN02498I_at; Start 146; Stop 170
tgacatataaaaacacatggtagaa

SEQ ID NO: 13818 - DNA, 25 bp, Artificial
  probe
  misc_feature (1)..(25): SEQ ID NO: 6007; WAN02498I_at; Start 244; Stop 268
ttagtcagacgaaccacgaatttgc

SEQ ID NO: 13819 - DNA, 25 bp, Artificial
  probe
  misc_feature (1)..(25): SEQ ID NO: 6007; WAN02498I_at; Start 260; Stop 284
cgaatttgctctatgctttctggaa

SEQ ID NO: 13820 - DNA, 25 bp, Artificial
  probe
  misc_feature (1)..(25): SEQ ID NO: 6007; WAN02498I_at; Start 27; Stop 51
cacctctggcgaaagaagtttcaat

SEQ ID NO: 13821 - DNA, 25 bp, Artificial
  probe
  misc_feature (1)..(25): SEQ ID NO: 6007; WAN02498I_at; Start 15; Stop 39
cagtaatataagcacctctggcgaa

SEQ ID NO: 13822 - DNA, 25 bp, Artificial
  probe
  misc_feature (1)..(25): SEQ ID NO: 6007; WAN02498I_at; Start 51; Stop 75
tgtcctaaagtaataagtgaatcca

SEQ ID NO: 13823 - DNA, 25 bp, Artificial
  probe
  misc_feature (1)..(25): SEQ ID NO: 6007; WAN02498I_at; Start 126; Stop 150
cagtttattcagaaaattcttgaca

SEQ ID NO: 13824 - DNA, 25 bp, Artificial
  probe
  misc_feature (1)..(25): SEQ ID NO: 6153; WAN02498J_at; Start 52; Stop 76
cggaatctcaaatctgtctttctcc

SEQ ID NO: 13825 - DNA, 25 bp, Artificial
  probe
  misc_feature (1)..(25): SEQ ID NO: 6153; WAN02498J_at; Start 11; Stop 35
aatcgtatcgaacagccctctttgg

SEQ ID NO: 13826 - DNA, 25 bp, Artificial
  probe
  misc_feature (1)..(25): SEQ ID NO: 6153; WAN02498J_at; Start 44; Stop 68
tacttctgcggaatctcaaatctgt

SEQ ID NO: 13827 - DNA, 25 bp, Artificial
  probe
  misc_feature (1)..(25): SEQ ID NO: 6153; WAN02498J_at; Start 54; Stop 78
gaatctcaaatctgtctttctcctc

SEQ ID NO: 13828 - DNA, 25 bp, Artificial
  probe
  misc_feature (1)..(25): SEQ ID NO: 6153; WAN02498J_at; Start 8; Stop 32
tttaatcgtatcgaacagccctctt

SEQ ID NO: 13829 - DNA, 25 bp, Artificial
  probe
  misc_feature (1)..(25): SEQ ID NO: 6153; WAN02498J_at; Start 47; Stop 71
ttctgcggaatctcaaatctgtctt

SEQ ID NO: 13830 - DNA, 25 bp, Artificial
  probe
  misc_feature (1)..(25): SEQ ID NO: 6153; WAN02498J_at; Start 48; Stop 72
tctgcggaatctcaaatctgtcttt

SEQ ID NO: 13831 - DNA, 25 bp, Artificial
  probe
  misc_feature (1)..(25): SEQ ID NO: 6153; WAN02498J_at; Start 70; Stop 94
tttctcctcttttatgatataatag

SEQ ID NO: 13832 - DNA, 25 bp, Artificial
  probe
  misc_feature (1)..(25): SEQ ID NO: 6153; WAN02498J_at; Start 9; Stop 33
ttaatcgtatcgaacagccctcttt

SEQ ID NO: 13833 - DNA, 25 bp, Artificial
  probe
  misc_feature (1)..(25): SEQ ID NO: 6153; WAN02498J_at; Start 37; Stop 61
ctgtttttacttctgcggaatctca

SEQ ID NO: 13834 - DNA, 25 bp, Artificial
  probe
  misc_feature (1)..(25): SEQ ID NO: 6153; WAN02498J_at; Start 38; Stop 62
tgtttttacttctgcggaatctcaa

SEQ ID NO: 13835 - DNA, 25 bp, Artificial
  probe
  misc_feature (1)..(25): SEQ ID NO: 6153; WAN02498J_at; Start 2; Stop 26
ttgagatttaatcgtatcgaacagc

SEQ ID NO: 13836 - DNA, 25 bp, Artificial
  probe
  misc_feature (1)..(25): SEQ ID NO: 6153; WAN02498J_at; Start 7; Stop 31
atttaatcgtatcgaacagccctct

SEQ ID NO: 13837 - DNA, 25 bp, Artificial
  probe
  misc_feature (1)..(25): SEQ ID NO: 6153; WAN02498J_at; Start 57; Stop 81
tctcaaatctgtctttctcctcttt

SEQ ID NO: 13838 - DNA, 25 bp, Artificial
  probe
  misc_feature (1)..(25): SEQ ID NO: 6153; WAN02498J_at; Start 64; Stop 88
tctgtctttctcctcttttatgata

SEQ ID NO: 13839 - DNA, 25 bp, Artificial
  probe
  misc_feature (1)..(25): SEQ ID NO: 6153; WAN02498J_at; Start 4; Stop 28
gagatttaatcgtatcgaacagccc

SEQ ID NO: 13840 - DNA, 25 bp, Artificial
  probe
  misc_feature (1)..(25): SEQ ID NO: 6153; WAN02498J_at; Start 53; Stop 77
ggaatctcaaatctgtctttctcct

SEQ ID NO: 13841 - DNA, 25 bp, Artificial
  probe
  misc_feature (1)..(25): SEQ ID NO: 6153; WAN02498J_at; Start 62; Stop 86
aatctgtctttctcctcttttatga

SEQ ID NO: 13842 - DNA, 25 bp, Artificial
  probe
  misc_feature (1)..(25): SEQ ID NO: 6153; WAN02498J_at; Start 67; Stop 91
gtctttctcctcttttatgatataa

SEQ ID NO: 13843 - DNA, 25 bp, Artificial
  probe
  misc_feature (1)..(25): SEQ ID NO: 6153; WAN02498J_at; Start 42; Stop 66
tttacttctgcggaatctcaaatct

SEQ ID NO: 13844 - DNA, 25 bp, Artificial
  probe
  misc_feature (1)..(25): SEQ ID NO: 6153; WAN02498J_at; Start 3; Stop 27
tgagatttaatcgtatcgaacagcc

SEQ ID NO: 13845 - DNA, 25 bp, Artificial
  probe
  misc_feature (1)..(25): SEQ ID NO: 6153; WAN02498J_at; Start 10; Stop 34
taatcgtatcgaacagccctctttg

SEQ ID NO: 13846 - DNA, 25 bp, Artificial
  probe
  misc_feature (1)..(25): SEQ ID NO: 6153; WAN02498J_at; Start 46; Stop 70
cttctgcggaatctcaaatctgtct

SEQ ID NO: 13847 - DNA, 25 bp, Artificial
  probe
  misc_feature (1)..(25): SEQ ID NO: 6153; WAN02498J_at; Start 49; Stop 73
ctgcggaatctcaaatctgtctttc

SEQ ID NO: 13848 - DNA, 25 bp, Artificial
  probe
  misc_feature (1)..(25): SEQ ID NO: 6153; WAN02498J_at; Start 51; Stop 75
gcggaatctcaaatctgtctttctc

SEQ ID NO: 13849 - DNA, 25 bp, Artificial
  probe
  misc_feature (1)..(25): SEQ ID NO: 6153; WAN02498J_at; Start 50; Stop 74
tgcggaatctcaaatctgtctttct

SEQ ID NO: 13850 - DNA, 25 bp, Artificial
  probe
  misc_feature (1)..(25): SEQ ID NO: 6153; WAN02498J_at; Start 6; Stop 30
gatttaatcgtatcgaacagccctc

SEQ ID NO: 13851 - DNA, 25 bp, Artificial
  probe
  misc_feature (1)..(25): SEQ ID NO: 6153; WAN02498J_at; Start 12; Stop 36
atcgtatcgaacagccctctttggg

SEQ ID NO: 13852 - DNA, 25 bp, Artificial
  probe
  misc_feature (1)..(25): SEQ ID NO: 6153; WAN02498J_at; Start 43; Stop 67
ttacttctgcggaatctcaaatctg

SEQ ID NO: 13853 - DNA, 25 bp, Artificial
  probe
  misc_feature (1)..(25): SEQ ID NO: 6153; WAN02498J_at; Start 45; Stop 69
acttctgcggaatctcaaatctgtc

SEQ ID NO: 13854 - DNA, 25 bp, Artificial
  probe
  misc_feature (1)..(25): SEQ ID NO: 6153; WAN02498J_at; Start 39; Stop 63
gtttttacttctgcggaatctcaaa

SEQ ID NO: 13855 - DNA, 25 bp, Artificial
  probe
  misc_feature (1)..(25): SEQ ID NO: 6153; WAN02498J_at; Start 5; Stop 29
agatttaatcgtatcgaacagccct

SEQ ID NO: 13856 - DNA, 25 bp, Artificial
  probe
  misc_feature (1)..(25): SEQ ID NO: 6153; WAN02498J_at; Start 36; Stop 60
gctgtttttacttctgcggaatctc

SEQ ID NO: 13857 - DNA, 25 bp, Artificial
  probe
  misc_feature (1)..(25): SEQ ID NO: 6153; WAN02498J_at; Start 55; Stop 79
aatctcaaatctgtctttctcctct

SEQ ID NO: 13858 - DNA, 25 bp, Artificial
  probe
  misc_feature (1)..(25): SEQ ID NO: 6199; WAN02498L_at; Start 8; Stop 32
ccatgggcttcctctccttatttcc

SEQ ID NO: 13859 - DNA, 25 bp, Artificial
  probe
  misc_feature (1)..(25): SEQ ID NO: 6199; WAN02498L_at; Start 5; Stop 29
cttccatgggcttcctctccttatt

SEQ ID NO: 13860 - DNA, 25 bp, Artificial
  probe
  misc_feature (1)..(25): SEQ ID NO: 6199; WAN02498L_at; Start 9; Stop 33
catgggcttcctctccttatttcct

SEQ ID NO: 13861 - DNA, 25 bp, Artificial
  probe
  misc_feature (1)..(25): SEQ ID NO: 6199; WAN02498L_at; Start 7; Stop 31
tccatgggcttcctctccttatttc

SEQ ID NO: 13862 - DNA, 25 bp, Artificial
  probe
  misc_feature (1)..(25): SEQ ID NO: 6199; WAN02498L_at; Start 2; Stop 26
cttcttccatgggcttcctctcctt

SEQ ID NO: 13863 - DNA, 25 bp, Artificial
  probe
  misc_feature (1)..(25): SEQ ID NO: 6199; WAN02498L_at; Start 1; Stop 25
tcttcttccatgggcttcctctcct

SEQ ID NO: 13864 - DNA, 25 bp, Artificial
  probe
  misc_feature (1)..(25): SEQ ID NO: 6199; WAN02498L_at; Start 10; Stop 34
atgggcttcctctccttatttccta

SEQ ID NO: 13865 - DNA, 25 bp, Artificial
  probe
  misc_feature (1)..(25): SEQ ID NO: 6199; WAN02498L_at; Start 11; Stop 35
tgggcttcctctccttatttcctaa

SEQ ID NO: 13866 - DNA, 25 bp, Artificial
  probe
  misc_feature (1)..(25): SEQ ID NO: 6199; WAN02498L_at; Start 4; Stop 28
tcttccatgggcttcctctccttat

SEQ ID NO: 13867 - DNA, 25 bp, Artificial
  probe
  misc_feature (1)..(25): SEQ ID NO: 6199; WAN02498L_at; Start 3; Stop 27
ttcttccatgggcttcctctcctta

SEQ ID NO: 13868 - DNA, 25 bp, Artificial
  probe
  misc_feature (1)..(25): SEQ ID NO: 6199; WAN02498L_at; Start 6; Stop 30
ttccatgggcttcctctccttattt

SEQ ID NO: 13869 - DNA, 25 bp, Artificial
  probe
  misc_feature (1)..(25): SEQ ID NO: 6012; WAN02498M_at; Start 29; Stop 53
tagacaatctagtgtctacccccga

SEQ ID NO: 13870 - DNA, 25 bp, Artificial
  probe
  misc_feature (1)..(25): SEQ ID NO: 6012; WAN02498M_at; Start 31; Stop 55
gacaatctagtgtctacccccgaaa

SEQ ID NO: 13871 - DNA, 25 bp, Artificial
  probe
  misc_feature (1)..(25): SEQ ID NO: 6012; WAN02498M_at; Start 23; Stop 47
aaggggtagacaatctagtgtctac

SEQ ID NO: 13872 - DNA, 25 bp, Artificial
  probe
  misc_feature (1)..(25): SEQ ID NO: 6012; WAN02498M_at; Start 30; Stop 54
agacaatctagtgtctacccccgaa

SEQ ID NO: 13873 - DNA, 25 bp, Artificial
  probe
  misc_feature (1)..(25): SEQ ID NO: 6012; WAN02498M_at; Start 24; Stop 48
aggggtagacaatctagtgtctacc

SEQ ID NO: 13874 - DNA, 25 bp, Artificial
  probe
  misc_feature (1)..(25): SEQ ID NO: 6012; WAN02498M_at; Start 28; Stop 52
gtagacaatctagtgtctacccccg

SEQ ID NO: 13875 - DNA, 25 bp, Artificial
  probe
  misc_feature (1)..(25): SEQ ID NO: 6012; WAN02498M_at; Start 27; Stop 51
ggtagacaatctagtgtctaccccc

SEQ ID NO: 13876 - DNA, 25 bp, Artificial
  probe
  misc_feature (1)..(25): SEQ ID NO: 6012; WAN02498M_at; Start 32; Stop 56
acaatctagtgtctacccccgaaag

SEQ ID NO: 13877 - DNA, 25 bp, Artificial
  probe
  misc_feature (1)..(25): SEQ ID NO: 6012; WAN02498M_at; Start 21; Stop 45
aaaaggggtagacaatctagtgtct

SEQ ID NO: 13878 - DNA, 25 bp, Artificial
  probe
  misc_feature (1)..(25): SEQ ID NO: 6012; WAN02498M_at; Start 25; Stop 49
ggggtagacaatctagtgtctaccc

SEQ ID NO: 13879 - DNA, 25 bp, Artificial
  probe
  misc_feature (1)..(25): SEQ ID NO: 6012; WAN02498M_at; Start 33; Stop 57
caatctagtgtctacccccgaaagt

SEQ ID NO: 13880 - DNA, 25 bp, Artificial
  probe
  misc_feature (1)..(25): SEQ ID NO: 6012; WAN02498M_at; Start 26; Stop 50
gggtagacaatctagtgtctacccc

SEQ ID NO: 13881 - DNA, 25 bp, Artificial
  probe
  misc_feature (1)..(25): SEQ ID NO: 6012; WAN02498M_at; Start 22; Stop 46
aaaggggtagacaatctagtgtcta

SEQ ID NO: 13882 - DNA, 25 bp, Artificial
  probe
  misc_feature (1)..(25): SEQ ID NO: 6051; WAN02498N_at; Start 371; Stop 395
atttatgagataaatcaggtcacct

SEQ ID NO: 13883 - DNA, 25 bp, Artificial
  probe
  misc_feature (1)..(25): SEQ ID NO: 6051; WAN02498N_at; Start 166; Stop 190
tgtattgtaagaacgtttatcacta

SEQ ID NO: 13884 - DNA, 25 bp, Artificial
  probe
  misc_feature (1)..(25): SEQ ID NO: 6051; WAN02498N_at; Start 101; Stop 125
tcgtttcataacagaacaacaaaca

SEQ ID NO: 13885 - DNA, 25 bp, Artificial
  probe
  misc_feature (1)..(25): SEQ ID NO: 6051; WAN02498N_at; Start 164; Stop 188
tatgtattgtaagaacgtttatcac

SEQ ID NO: 13886 - DNA, 25 bp, Artificial
  probe
  misc_feature (1)..(25): SEQ ID NO: 6051; WAN02498N_at; Start 69; Stop 93
ttcataaattagaaactagtttcca

SEQ ID NO: 13887 - DNA, 25 bp, Artificial
  probe
  misc_feature (1)..(25): SEQ ID NO: 6051; WAN02498N_at; Start 1; Stop 25
atgagctccttagttgaagtaaacg

SEQ ID NO: 13888 - DNA, 25 bp, Artificial
  probe
  misc_feature (1)..(25): SEQ ID NO: 6051; WAN02498N_at; Start 92; Stop 116
caatttctttcgtttcataacagaa

SEQ ID NO: 13889 - DNA, 25 bp, Artificial
  probe
  misc_feature (1)..(25): SEQ ID NO: 6051; WAN02498N_at; Start 91; Stop 115
ccaatttctttcgtttcataacaga

SEQ ID NO: 13890 - DNA, 25 bp, Artificial
  probe
  misc_feature (1)..(25): SEQ ID NO: 6051; WAN02498N_at; Start 337; Stop 361
tctaaattaaaagagaatcccataa

SEQ ID NO: 13891 - DNA, 25 bp, Artificial
  probe
  misc_feature (1)..(25): SEQ ID NO: 6051; WAN02498N_at; Start 110; Stop 134
aacagaacaacaaacataaaaatat

SEQ ID NO: 13892 - DNA, 25 bp, Artificial
  probe
  misc_feature (1)..(25): SEQ ID NO: 6051; WAN02498N_at; Start 102; Stop 126
cgtttcataacagaacaacaaacat

SEQ ID NO: 13893 - DNA, 25 bp, Artificial
  probe
  misc_feature (1)..(25): SEQ ID NO: 6051; WAN02498N_at; Start 99; Stop 123
tttcgtttcataacagaacaacaaa

SEQ ID NO: 13894 - DNA, 25 bp, Artificial
  probe
  misc_feature (1)..(25): SEQ ID NO: 6051; WAN02498N_at; Start 105; Stop 129
ttcataacagaacaacaaacataaa

SEQ ID NO: 13895 - DNA, 25 bp, Artificial
  probe
  misc_feature (1)..(25): SEQ ID NO: 6051; WAN02498N_at; Start 103; Stop 127
gtttcataacagaacaacaaacata

SEQ ID NO: 13896 - DNA, 25 bp, Artificial
  probe
  misc_feature (1)..(25): SEQ ID NO: 6051; WAN02498N_at; Start 168; Stop 192
tattgtaagaacgtttatcactaat

SEQ ID NO: 13897 - DNA, 25 bp, Artificial
  probe
  misc_feature (1)..(25): SEQ ID NO: 6051; WAN02498N_at; Start 71; Stop 95
cataaattagaaactagtttccaat

SEQ ID NO: 13898 - DNA, 25 bp, Artificial
  probe
  misc_feature (1)..(25): SEQ ID NO: 6051; WAN02498N_at; Start 174; Stop 198
aagaacgtttatcactaataatatg

SEQ ID NO: 13899 - DNA, 25 bp, Artificial
  probe
  misc_feature (1)..(25): SEQ ID NO: 6051; WAN02498N_at; Start 241; Stop 265
tatttcttttcggaatttctatata

SEQ ID NO: 13900 - DNA, 25 bp, Artificial
  probe
  misc_feature (1)..(25): SEQ ID NO: 6051; WAN02498N_at; Start 370; Stop 394
gatttatgagataaatcaggtcacc

SEQ ID NO: 13901 - DNA, 25 bp, Artificial
  probe
  misc_feature (1)..(25): SEQ ID NO: 6051; WAN02498N_at; Start 167; Stop 191
gtattgtaagaacgtttatcactaa

SEQ ID NO: 13902 - DNA, 25 bp, Artificial
  probe
  misc_feature (1)..(25): SEQ ID NO: 6051; WAN02498N_at; Start 156; Stop 180
cgtaattatatgtattgtaagaacg

SEQ ID NO: 13903 - DNA, 25 bp, Artificial
  probe
  misc_feature (1)..(25): SEQ ID NO: 6051; WAN02498N_at; Start 348; Stop 372
agagaatcccataaaaactacagat

SEQ ID NO: 13904 - DNA, 25 bp, Artificial
  probe
  misc_feature (1)..(25): SEQ ID NO: 6051; WAN02498N_at; Start 97; Stop 121
tctttcgtttcataacagaacaaca

SEQ ID NO: 13905 - DNA, 25 bp, Artificial
  probe
  misc_feature (1)..(25): SEQ ID NO: 6051; WAN02498N_at; Start 179; Stop 203
cgtttatcactaataatatgttcat

SEQ ID NO: 13906 - DNA, 25 bp, Artificial
  probe
  misc_feature (1)..(25): SEQ ID NO: 6051; WAN02498N_at; Start 2; Stop 26
tgagctccttagttgaagtaaacgt

SEQ ID NO: 13907 - DNA, 25 bp, Artificial
  probe
  misc_feature (1)..(25): SEQ ID NO: 6051; WAN02498N_at; Start 107; Stop 131
cataacagaacaacaaacataaaaa

SEQ ID NO: 13908 - DNA, 25 bp, Artificial
  probe
  misc_feature (1)..(25): SEQ ID NO: 6051; WAN02498N_at; Start 372; Stop 396
tttatgagataaatcaggtcaccta

SEQ ID NO: 13909 - DNA, 25 bp, Artificial
  probe
  misc_feature (1)..(25): SEQ ID NO: 6051; WAN02498N_at; Start 355; Stop 379
cccataaaaactacagatttatgag

SEQ ID NO: 13910 - DNA, 25 bp, Artificial
  probe
  misc_feature (1)..(25): SEQ ID NO: 6051; WAN02498N_at; Start 351; Stop 375
gaatcccataaaaactacagattta

SEQ ID NO: 13911 - DNA, 25 bp, Artificial
  probe
  misc_feature (1)..(25): SEQ ID NO: 6051; WAN02498N_at; Start 349; Stop 373
gagaatcccataaaaactacagatt

SEQ ID NO: 13912 - DNA, 25 bp, Artificial
  probe
  misc_feature (1)..(25): SEQ ID NO: 6051; WAN02498N_at; Start 171; Stop 195
tgtaagaacgtttatcactaataat

SEQ ID NO: 13913 - DNA, 25 bp, Artificial
  probe
  misc_feature (1)..(25): SEQ ID NO: 6051; WAN02498N_at; Start 346; Stop 370
aaagagaatcccataaaaactacag

SEQ ID NO: 13914 - DNA, 25 bp, Artificial
  probe
  misc_feature (1)..(25): SEQ ID NO: 6051; WAN02498N_at; Start 98; Stop 122
ctttcgtttcataacagaacaacaa

SEQ ID NO: 13915 - DNA, 25 bp, Artificial
  probe
  misc_feature (1)..(25): SEQ ID NO: 6051; WAN02498N_at; Start 90; Stop 114
tccaatttctttcgtttcataacag

SEQ ID NO: 13916 - DNA, 25 bp, Artificial
  probe
  misc_feature (1)..(25): SEQ ID NO: 6215; WAN02498O_at; Start 7; Stop 31
actcccacatttttgatctcattac

SEQ ID NO: 13917 - DNA, 25 bp, Artificial
  probe
  misc_feature (1)..(25): SEQ ID NO: 6215; WAN02498O_at; Start 66; Stop 90
gtcccatctctatttctttattcaa

SEQ ID NO: 13918 - DNA, 25 bp, Artificial
  probe
  misc_feature (1)..(25): SEQ ID NO: 6215; WAN02498O_at; Start 41; Stop 65
aaaaatgggactgggcattatccca

SEQ ID NO: 13919 - DNA, 25 bp, Artificial
  probe
  misc_feature (1)..(25): SEQ ID NO: 6215; WAN02498O_at; Start 101; Stop 125
cacagaactttagaaattatataat

SEQ ID NO: 13920 - DNA, 25 bp, Artificial
  probe
  misc_feature (1)..(25): SEQ ID NO: 6215; WAN02498O_at; Start 21; Stop 45
gatctcattactttttgataaaaaa

SEQ ID NO: 13921 - DNA, 25 bp, Artificial
  probe
  misc_feature (1)..(25): SEQ ID NO: 6215; WAN02498O_at; Start 59; Stop 83
tatcccagtcccatctctatttctt

SEQ ID NO: 13922 - DNA, 25 bp, Artificial
  probe
  misc_feature (1)..(25): SEQ ID NO: 6215; WAN02498O_at; Start 88; Stop 112
caatgagttgtatcacagaacttta

SEQ ID NO: 13923 - DNA, 25 bp, Artificial
  probe
  misc_feature (1)..(25): SEQ ID NO: 6215; WAN02498O_at; Start 61; Stop 85
tcccagtcccatctctatttcttta

SEQ ID NO: 13924 - DNA, 25 bp, Artificial
  probe
  misc_feature (1)..(25): SEQ ID NO: 6215; WAN02498O_at; Start 96; Stop 120
tgtatcacagaactttagaaattat

SEQ ID NO: 13925 - DNA, 25 bp, Artificial
  probe
  misc_feature (1)..(25): SEQ ID NO: 6215; WAN02498O_at; Start 92; Stop 116
gagttgtatcacagaactttagaaa

SEQ ID NO: 13926 - DNA, 25 bp, Artificial
  probe
  misc_feature (1)..(25): SEQ ID NO: 6215; WAN02498O_at; Start 122; Stop 146
taatgacaagaatttactattctgt

SEQ ID NO: 13927 - DNA, 25 bp, Artificial
  probe
  misc_feature (1)..(25): SEQ ID NO: 6215; WAN02498O_at; Start 94; Stop 118
gttgtatcacagaactttagaaatt

SEQ ID NO: 13928 - DNA, 25 bp, Artificial
  probe
  misc_feature (1)..(25): SEQ ID NO: 6215; WAN02498O_at; Start 108; Stop 132
ctttagaaattatataatgacaaga

SEQ ID NO: 13929 - DNA, 25 bp, Artificial
  probe
  misc_feature (1)..(25): SEQ ID NO: 6215; WAN02498O_at; Start 91; Stop 115
tgagttgtatcacagaactttagaa

SEQ ID NO: 13930 - DNA, 25 bp, Artificial
  probe
  misc_feature (1)..(25): SEQ ID NO: 6215; WAN02498O_at; Start 6; Stop 30
cactcccacatttttgatctcatta

SEQ ID NO: 13931 - DNA, 25 bp, Artificial
  probe
  misc_feature (1)..(25): SEQ ID NO: 6215; WAN02498O_at; Start 70; Stop 94
catctctatttctttattcaatgag

SEQ ID NO: 13932 - DNA, 25 bp, Artificial
  probe
  misc_feature (1)..(25): SEQ ID NO: 6215; WAN02498O_at; Start 55; Stop 79
gcattatcccagtcccatctctatt

SEQ ID NO: 13933 - DNA, 25 bp, Artificial
  probe
  misc_feature (1)..(25): SEQ ID NO: 6215; WAN02498O_at; Start 56; Stop 80
cattatcccagtcccatctctattt

SEQ ID NO: 13934 - DNA, 25 bp, Artificial
  probe
  misc_feature (1)..(25): SEQ ID NO: 6215; WAN02498O_at; Start 84; Stop 108
tattcaatgagttgtatcacagaac

SEQ ID NO: 13935 - DNA, 25 bp, Artificial
  probe
  misc_feature (1)..(25): SEQ ID NO: 6215; WAN02498O_at; Start 53; Stop 77
gggcattatcccagtcccatctcta

SEQ ID NO: 13936 - DNA, 25 bp, Artificial
  probe
  misc_feature (1)..(25): SEQ ID NO: 6215; WAN02498O_at; Start 49; Stop 73
gactgggcattatcccagtcccatc

SEQ ID NO: 13937 - DNA, 25 bp, Artificial
  probe
  misc_feature (1)..(25): SEQ ID NO: 6215; WAN02498O_at; Start 10; Stop 34
cccacatttttgatctcattacttt

SEQ ID NO: 13938 - DNA, 25 bp, Artificial
  probe
  misc_feature (1)..(25): SEQ ID NO: 6215; WAN02498O_at; Start 52; Stop 76
tgggcattatcccagtcccatctct

SEQ ID NO: 13939 - DNA, 25 bp, Artificial
  probe
  misc_feature (1)..(25): SEQ ID NO: 6215; WAN02498O_at; Start 24; Stop 48
ctcattactttttgataaaaaatgg

SEQ ID NO: 13940 - DNA, 25 bp, Artificial
  probe
  misc_feature (1)..(25): SEQ ID NO: 6215; WAN02498O_at; Start 128; Stop 152
caagaatttactattctgttttaca

SEQ ID NO: 13941 - DNA, 25 bp, Artificial
  probe
  misc_feature (1)..(25): SEQ ID NO: 6215; WAN02498O_at; Start 39; Stop 63
taaaaaatgggactgggcattatcc

SEQ ID NO: 13942 - DNA, 25 bp, Artificial
  probe
  misc_feature (1)..(25): SEQ ID NO: 6215; WAN02498O_at; Start 45; Stop 69
atgggactgggcattatcccagtcc

SEQ ID NO: 13943 - DNA, 25 bp, Artificial
  probe
  misc_feature (1)..(25): SEQ ID NO: 6215; WAN02498O_at; Start 105; Stop 129
gaactttagaaattatataatgaca

SEQ ID NO: 13944 - DNA, 25 bp, Artificial
  probe
  misc_feature (1)..(25): SEQ ID NO: 6215; WAN02498O_at; Start 3; Stop 27
caacactcccacatttttgatctca

SEQ ID NO: 13945 - DNA, 25 bp, Artificial
  probe
  misc_feature (1)..(25): SEQ ID NO: 6215; WAN02498O_at; Start 14; Stop 38
catttttgatctcattactttttga

SEQ ID NO: 13946 - DNA, 25 bp, Artificial
  probe
  misc_feature (1)..(25): SEQ ID NO: 6215; WAN02498O_at; Start 87; Stop 111
tcaatgagttgtatcacagaacttt

SEQ ID NO: 13947 - DNA, 25 bp, Artificial
  probe
  misc_feature (1)..(25): SEQ ID NO: 6215; WAN02498O_at; Start 89; Stop 113
aatgagttgtatcacagaactttag

SEQ ID NO: 13948 - DNA, 25 bp, Artificial
  probe
  misc_feature (1)..(25): SEQ ID NO: 6215; WAN02498O_at; Start 64; Stop 88
cagtcccatctctatttctttattc

SEQ ID NO: 13949 - DNA, 25 bp, Artificial
  probe
  misc_feature (1)..(25): SEQ ID NO: 6215; WAN02498O_at; Start 86; Stop 110
ttcaatgagttgtatcacagaactt

SEQ ID NO: 13950 - DNA, 25 bp, Artificial
  probe
  misc_feature (1)..(25): SEQ ID NO: 5983; WAN02498P_at; Start 40; Stop 64
taagaaggattaaccaatttcatcc

SEQ ID NO: 13951 - DNA, 25 bp, Artificial
  probe
  misc_feature (1)..(25): SEQ ID NO: 5983; WAN02498P_at; Start 38; Stop 62
tctaagaaggattaaccaatttcat

SEQ ID NO: 13952 - DNA, 25 bp, Artificial
  probe
  misc_feature (1)..(25): SEQ ID NO: 5983; WAN02498P_at; Start 20; Stop 44
attggaatactccaaatttctaaga

SEQ ID NO: 13953 - DNA, 25 bp, Artificial
  probe
  misc_feature (1)..(25): SEQ ID NO: 5983; WAN02498P_at; Start 24; Stop 48
gaatactccaaatttctaagaagga

SEQ ID NO: 13954 - DNA, 25 bp, Artificial
  probe
  misc_feature (1)..(25): SEQ ID NO: 5983; WAN02498P_at; Start 39; Stop 63
ctaagaaggattaaccaatttcatc

SEQ ID NO: 13955 - DNA, 25 bp, Artificial
  probe
  misc_feature (1)..(25): SEQ ID NO: 5983; WAN02498P_at; Start 27; Stop 51
tactccaaatttctaagaaggatta

SEQ ID NO: 13956 - DNA, 25 bp, Artificial
  probe
  misc_feature (1)..(25): SEQ ID NO: 5983; WAN02498P_at; Start 37; Stop 61
ttctaagaaggattaaccaatttca

SEQ ID NO: 13957 - DNA, 25 bp, Artificial
  probe
  misc_feature (1)..(25): SEQ ID NO: 5983; WAN02498P_at; Start 22; Stop 46
tggaatactccaaatttctaagaag

SEQ ID NO: 13958 - DNA, 25 bp, Artificial
  probe
  misc_feature (1)..(25): SEQ ID NO: 5983; WAN02498P_at; Start 26; Stop 50
atactccaaatttctaagaaggatt

SEQ ID NO: 13959 - DNA, 25 bp, Artificial
  probe
  misc_feature (1)..(25): SEQ ID NO: 5983; WAN02498P_at; Start 11; Stop 35
tctaattttattggaatactccaaa

SEQ ID NO: 13960 - DNA, 25 bp, Artificial
  probe
  misc_feature (1)..(25): SEQ ID NO: 5983; WAN02498P_at; Start 10; Stop 34
ttctaattttattggaatactccaa

SEQ ID NO: 13961 - DNA, 25 bp, Artificial
  probe
  misc_feature (1)..(25): SEQ ID NO: 5983; WAN02498P_at; Start 19; Stop 43
tattggaatactccaaatttctaag

SEQ ID NO: 13962 - DNA, 25 bp, Artificial
  probe
  misc_feature (1)..(25): SEQ ID NO: 5983; WAN02498P_at; Start 9; Stop 33
tttctaattttattggaatactcca

SEQ ID NO: 13963 - DNA, 25 bp, Artificial
  probe
  misc_feature (1)..(25): SEQ ID NO: 5983; WAN02498P_at; Start 18; Stop 42
ttattggaatactccaaatttctaa

SEQ ID NO: 13964 - DNA, 25 bp, Artificial
  probe
  misc_feature (1)..(25): SEQ ID NO: 5983; WAN02498P_at; Start 17; Stop 41
tttattggaatactccaaatttcta

SEQ ID NO: 13965 - DNA, 25 bp, Artificial
  probe
  misc_feature (1)..(25): SEQ ID NO: 5983; WAN02498P_at; Start 25; Stop 49
aatactccaaatttctaagaaggat

SEQ ID NO: 13966 - DNA, 25 bp, Artificial
  probe
  misc_feature (1)..(25): SEQ ID NO: 5983; WAN02498P_at; Start 12; Stop 36
ctaattttattggaatactccaaat

SEQ ID NO: 13967 - DNA, 25 bp, Artificial
  probe
  misc_feature (1)..(25): SEQ ID NO: 5983; WAN02498P_at; Start 21; Stop 45
ttggaatactccaaatttctaagaa

SEQ ID NO: 13968 - DNA, 25 bp, Artificial
  probe
  misc_feature (1)..(25): SEQ ID NO: 6066; WAN02498Q_at; Start 37; Stop 61
tcaattttatctgatgattgcccaa

SEQ ID NO: 13969 - DNA, 25 bp, Artificial
  probe
  misc_feature (1)..(25): SEQ ID NO: 6066; WAN02498Q_at; Start 89; Stop 113
tatggagacaatcccctatattatg

SEQ ID NO: 13970 - DNA, 25 bp, Artificial
  probe
  misc_feature (1)..(25): SEQ ID NO: 6066; WAN02498Q_at; Start 93; Stop 117
gagacaatcccctatattatgcgtt

SEQ ID NO: 13971 - DNA, 25 bp, Artificial
  probe
  misc_feature (1)..(25): SEQ ID NO: 6066; WAN02498Q_at; Start 59; Stop 83
caaatttttcaataataaaacgcat

SEQ ID NO: 13972 - DNA, 25 bp, Artificial
  probe
  misc_feature (1)..(25): SEQ ID NO: 6066; WAN02498Q_at; Start 47; Stop 71
ctgatgattgcccaaatttttcaat

SEQ ID NO: 13973 - DNA, 25 bp, Artificial
  probe
  misc_feature (1)..(25): SEQ ID NO: 6066; WAN02498Q_at; Start 86; Stop 110
tattatggagacaatcccctatatt

SEQ ID NO: 13974 - DNA, 25 bp, Artificial
  probe
  misc_feature (1)..(25): SEQ ID NO: 6066; WAN02498Q_at; Start 126; Stop 150
atcaaagactttttgacaaacttct

SEQ ID NO: 13975 - DNA, 25 bp, Artificial
  probe
  misc_feature (1)..(25): SEQ ID NO: 6066; WAN02498Q_at; Start 49; Stop 73
gatgattgcccaaatttttcaataa

SEQ ID NO: 13976 - DNA, 25 bp, Artificial
  probe
  misc_feature (1)..(25): SEQ ID NO: 6066; WAN02498Q_at; Start 74; Stop 98
taaaacgcataatattatggagaca

SEQ ID NO: 13977 - DNA, 25 bp, Artificial
  probe
  misc_feature (1)..(25): SEQ ID NO: 6066; WAN02498Q_at; Start 4; Stop 28
gactatacaaacatttatatactcg

SEQ ID NO: 13978 - DNA, 25 bp, Artificial
  probe
  misc_feature (1)..(25): SEQ ID NO: 6066; WAN02498Q_at; Start 41; Stop 65
ttttatctgatgattgcccaaattt

SEQ ID NO: 13979 - DNA, 25 bp, Artificial
  probe
  misc_feature (1)..(25): SEQ ID NO: 6066; WAN02498Q_at; Start 142; Stop 166
caaacttctttgatatctaattaca

SEQ ID NO: 13980 - DNA, 25 bp, Artificial
  probe
  misc_feature (1)..(25): SEQ ID NO: 6066; WAN02498Q_at; Start 95; Stop 119
gacaatcccctatattatgcgttct

SEQ ID NO: 13981 - DNA, 25 bp, Artificial
  probe
  misc_feature (1)..(25): SEQ ID NO: 6066; WAN02498Q_at; Start 132; Stop 156
gactttttgacaaacttctttgata

SEQ ID NO: 13982 - DNA, 25 bp, Artificial
  probe
  misc_feature (1)..(25): SEQ ID NO: 6066; WAN02498Q_at; Start 100; Stop 124
tcccctatattatgcgttcttttaa

SEQ ID NO: 13983 - DNA, 25 bp, Artificial
  probe
  misc_feature (1)..(25): SEQ ID NO: 6066; WAN02498Q_at; Start 44; Stop 68
tatctgatgattgcccaaatttttc

SEQ ID NO: 13984 - DNA, 25 bp, Artificial
  probe
  misc_feature (1)..(25): SEQ ID NO: 6066; WAN02498Q_at; Start 19; Stop 43
tatatactcgatatagtctcaattt

SEQ ID NO: 13985 - DNA, 25 bp, Artificial
  probe
  misc_feature (1)..(25): SEQ ID NO: 6066; WAN02498Q_at; Start 39; Stop 63
aattttatctgatgattgcccaaat

SEQ ID NO: 13986 - DNA, 25 bp, Artificial
  probe
  misc_feature (1)..(25): SEQ ID NO: 6066; WAN02498Q_at; Start 81; Stop 105
cataatattatggagacaatcccct

SEQ ID NO: 13987 - DNA, 25 bp, Artificial
  probe
  misc_feature (1)..(25): SEQ ID NO: 6066; WAN02498Q_at; Start 84; Stop 108
aatattatggagacaatcccctata

SEQ ID NO: 13988 - DNA, 25 bp, Artificial
  probe
  misc_feature (1)..(25): SEQ ID NO: 6066; WAN02498Q_at; Start 94; Stop 118
agacaatcccctatattatgcgttc

SEQ ID NO: 13989 - DNA, 25 bp, Artificial
  probe
  misc_feature (1)..(25): SEQ ID NO: 6066; WAN02498Q_at; Start 97; Stop 121
caatcccctatattatgcgttcttt

SEQ ID NO: 13990 - DNA, 25 bp, Artificial
  probe
  misc_feature (1)..(25): SEQ ID NO: 6066; WAN02498Q_at; Start 38; Stop 62
caattttatctgatgattgcccaaa

SEQ ID NO: 13991 - DNA, 25 bp, Artificial
  probe
  misc_feature (1)..(25): SEQ ID NO: 6066; WAN02498Q_at; Start 92; Stop 116
ggagacaatcccctatattatgcgt

SEQ ID NO: 13992 - DNA, 25 bp, Artificial
  probe
  misc_feature (1)..(25): SEQ ID NO: 6066; WAN02498Q_at; Start 52; Stop 76
gattgcccaaatttttcaataataa

SEQ ID NO: 13993 - DNA, 25 bp, Artificial
  probe
  misc_feature (1)..(25): SEQ ID NO: 6066; WAN02498Q_at; Start 23; Stop 47
tactcgatatagtctcaattttatc

SEQ ID NO: 13994 - DNA, 25 bp, Artificial
  probe
  misc_feature (1)..(25): SEQ ID NO: 6066; WAN02498Q_at; Start 35; Stop 59
tctcaattttatctgatgattgccc

SEQ ID NO: 13995 - DNA, 25 bp, Artificial
  probe
  misc_feature (1)..(25): SEQ ID NO: 6066; WAN02498Q_at; Start 110; Stop 134
tatgcgttcttttaatatcaaagac

SEQ ID NO: 13996 - DNA, 25 bp, Artificial
  probe
  misc_feature (1)..(25): SEQ ID NO: 6066; WAN02498Q_at; Start 79; Stop 103
cgcataatattatggagacaatccc

SEQ ID NO: 13997 - DNA, 25 bp, Artificial
  probe
  misc_feature (1)..(25): SEQ ID NO: 6066; WAN02498Q_at; Start 28; Stop 52
gatatagtctcaattttatctgatg

SEQ ID NO: 13998 - DNA, 25 bp, Artificial
  probe
  misc_feature (1)..(25): SEQ ID NO: 6066; WAN02498Q_at; Start 112; Stop 136
tgcgttcttttaatatcaaagactt

SEQ ID NO: 13999 - DNA, 25 bp, Artificial
  probe
  misc_feature (1)..(25): SEQ ID NO: 6066; WAN02498Q_at; Start 15; Stop 39
catttatatactcgatatagtctca

SEQ ID NO: 14000 - DNA, 25 bp, Artificial
  probe
  misc_feature (1)..(25): SEQ ID NO: 6066; WAN02498Q_at; Start 80; Stop 104
gcataatattatggagacaatcccc

SEQ ID NO: 14001 - DNA, 25 bp, Artificial
  probe
  misc_feature (1)..(25): SEQ ID NO: 6066; WAN02498Q_at; Start 83; Stop 107
taatattatggagacaatcccctat

SEQ ID NO: 14002 - DNA, 25 bp, Artificial
  probe
  misc_feature (1)..(25): SEQ ID NO: 6237; WAN02498R_at; Start 68; Stop 92
tgaaatagccccccattactctaaa

SEQ ID NO: 14003 - DNA, 25 bp, Artificial
  probe
  misc_feature (1)..(25): SEQ ID NO: 6237; WAN02498R_at; Start 62; Stop 86
tgaagttgaaatagccccccattac

SEQ ID NO: 14004 - DNA, 25 bp, Artificial
  probe
  misc_feature (1)..(25): SEQ ID NO: 6237; WAN02498R_at; Start 50; Stop 74
attatagtaggttgaagttgaaata

SEQ ID NO: 14005 - DNA, 25 bp, Artificial
  probe
  misc_feature (1)..(25): SEQ ID NO: 6237; WAN02498R_at; Start 43; Stop 67
tttctgtattatagtaggttgaagt

SEQ ID NO: 14006 - DNA, 25 bp, Artificial
  probe
  misc_feature (1)..(25): SEQ ID NO: 6237; WAN02498R_at; Start 41; Stop 65
tttttctgtattatagtaggttgaa

SEQ ID NO: 14007 - DNA, 25 bp, Artificial
  probe
  misc_feature (1)..(25): SEQ ID NO: 6237; WAN02498R_at; Start 40; Stop 64
ttttttctgtattatagtaggttga

SEQ ID NO: 14008 - DNA, 25 bp, Artificial
  probe
  misc_feature (1)..(25): SEQ ID NO: 6237; WAN02498R_at; Start 54; Stop 78
tagtaggttgaagttgaaatagccc

SEQ ID NO: 14009 - DNA, 25 bp, Artificial
  probe
  misc_feature (1)..(25): SEQ ID NO: 6237; WAN02498R_at; Start 46; Stop 70
ctgtattatagtaggttgaagttga

SEQ ID NO: 14010 - DNA, 25 bp, Artificial
  probe
  misc_feature (1)..(25): SEQ ID NO: 6237; WAN02498R_at; Start 44; Stop 68
ttctgtattatagtaggttgaagtt

SEQ ID NO: 14011 - DNA, 25 bp, Artificial
  probe
  misc_feature (1)..(25): SEQ ID NO: 6237; WAN02498R_at; Start 86; Stop 110
ctctaaaacgttgttataaaatgct

SEQ ID NO: 14012 - DNA, 25 bp, Artificial
  probe
  misc_feature (1)..(25): SEQ ID NO: 6237; WAN02498R_at; Start 53; Stop 77
atagtaggttgaagttgaaatagcc

SEQ ID NO: 14013 - DNA, 25 bp, Artificial
  probe
  misc_feature (1)..(25): SEQ ID NO: 6237; WAN02498R_at; Start 65; Stop 89
agttgaaatagccccccattactct

SEQ ID NO: 14014 - DNA, 25 bp, Artificial
  probe
  misc_feature (1)..(25): SEQ ID NO: 6237; WAN02498R_at; Start 42; Stop 66
ttttctgtattatagtaggttgaag

SEQ ID NO: 14015 - DNA, 25 bp, Artificial
  probe
  misc_feature (1)..(25): SEQ ID NO: 6237; WAN02498R_at; Start 47; Stop 71
tgtattatagtaggttgaagttgaa

SEQ ID NO: 14016 - DNA, 25 bp, Artificial
  probe
  misc_feature (1)..(25): SEQ ID NO: 6237; WAN02498R_at; Start 61; Stop 85
ttgaagttgaaatagccccccatta

SEQ ID NO: 14017 - DNA, 25 bp, Artificial
  probe
  misc_feature (1)..(25): SEQ ID NO: 6237; WAN02498R_at; Start 66; Stop 90
gttgaaatagccccccattactcta

SEQ ID NO: 14018 - DNA, 25 bp, Artificial
  probe
  misc_feature (1)..(25): SEQ ID NO: 6237; WAN02498R_at; Start 51; Stop 75
ttatagtaggttgaagttgaaatag

SEQ ID NO: 14019 - DNA, 25 bp, Artificial
  probe
  misc_feature (1)..(25): SEQ ID NO: 6237; WAN02498R_at; Start 52; Stop 76
tatagtaggttgaagttgaaatagc

SEQ ID NO: 14020 - DNA, 25 bp, Artificial
  probe
  misc_feature (1)..(25): SEQ ID NO: 6237; WAN02498R_at; Start 45; Stop 69
tctgtattatagtaggttgaagttg

SEQ ID NO: 14021 - DNA, 25 bp, Artificial
  probe
  misc_feature (1)..(25): SEQ ID NO: 6237; WAN02498R_at; Start 67; Stop 91
ttgaaatagccccccattactctaa

SEQ ID NO: 14022 - DNA, 25 bp, Artificial
  probe
  misc_feature (1)..(25): SEQ ID NO: 6237; WAN02498R_at; Start 49; Stop 73
tattatagtaggttgaagttgaaat

SEQ ID NO: 14023 - DNA, 25 bp, Artificial
  probe
  misc_feature (1)..(25): SEQ ID NO: 6237; WAN02498R_at; Start 48; Stop 72
gtattatagtaggttgaagttgaaa

SEQ ID NO: 14024 - DNA, 25 bp, Artificial
  probe
  misc_feature (1)..(25): SEQ ID NO: 6080; WAN02498T_at; Start 129; Stop 153
taatttagcgtatttaattgaacta

SEQ ID NO: 14025 - DNA, 25 bp, Artificial
  probe
  misc_feature (1)..(25): SEQ ID NO: 6080; WAN02498T_at; Start 1; Stop 25
cacccgtaaaggtgctattttcttg

SEQ ID NO: 14026 - DNA, 25 bp, Artificial
  probe
  misc_feature (1)..(25): SEQ ID NO: 6080; WAN02498T_at; Start 20; Stop 44
ttcttgcctgctgaactcatcgatt

SEQ ID NO: 14027 - DNA, 25 bp, Artificial
  probe
  misc_feature (1)..(25): SEQ ID NO: 6080; WAN02498T_at; Start 13; Stop 37
tgctattttcttgcctgctgaactc

SEQ ID NO: 14028 - DNA, 25 bp, Artificial
  probe
  misc_feature (1)..(25): SEQ ID NO: 6080; WAN02498T_at; Start 24; Stop 48
tgcctgctgaactcatcgatttaat

SEQ ID NO: 14029 - DNA, 25 bp, Artificial
  probe
  misc_feature (1)..(25): SEQ ID NO: 6080; WAN02498T_at; Start 12; Stop 36
gtgctattttcttgcctgctgaact

SEQ ID NO: 14030 - DNA, 25 bp, Artificial
  probe
  misc_feature (1)..(25): SEQ ID NO: 6080; WAN02498T_at; Start 66; Stop 90
tctagtatattgtaattgtttgtac

SEQ ID NO: 14031 - DNA, 25 bp, Artificial
  probe
  misc_feature (1)..(25): SEQ ID NO: 6080; WAN02498T_at; Start 117; Stop 141
aaagtatattagtaatttagcgtat

SEQ ID NO: 14032 - DNA, 25 bp, Artificial
  probe
  misc_feature (1)..(25): SEQ ID NO: 6080; WAN02498T_at; Start 31; Stop 55
tgaactcatcgatttaatacctttt

SEQ ID NO: 14033 - DNA, 25 bp, Artificial
  probe
  misc_feature (1)..(25): SEQ ID NO: 6080; WAN02498T_at; Start 6; Stop 30
gtaaaggtgctattttcttgcctgc

SEQ ID NO: 14034 - DNA, 25 bp, Artificial
  probe
  misc_feature (1)..(25): SEQ ID NO: 6080; WAN02498T_at; Start 4; Stop 28
ccgtaaaggtgctattttcttgcct

SEQ ID NO: 14035 - DNA, 25 bp, Artificial
  probe
  misc_feature (1)..(25): SEQ ID NO: 6080; WAN02498T_at; Start 26; Stop 50
cctgctgaactcatcgatttaatac

SEQ ID NO: 14036 - DNA, 25 bp, Artificial
  probe
  misc_feature (1)..(25): SEQ ID NO: 6080; WAN02498T_at; Start 157; Stop 181
gatattatgataaccttaaaaaata

SEQ ID NO: 14037 - DNA, 25 bp, Artificial
  probe
  misc_feature (1)..(25): SEQ ID NO: 6080; WAN02498T_at; Start 7; Stop 31
taaaggtgctattttcttgcctgct

SEQ ID NO: 14038 - DNA, 25 bp, Artificial
  probe
  misc_feature (1)..(25): SEQ ID NO: 6080; WAN02498T_at; Start 9; Stop 33
aaggtgctattttcttgcctgctga

SEQ ID NO: 14039 - DNA, 25 bp, Artificial
  probe
  misc_feature (1)..(25): SEQ ID NO: 6080; WAN02498T_at; Start 63; Stop 87
ccctctagtatattgtaattgtttg

SEQ ID NO: 14040 - DNA, 25 bp, Artificial
  probe
  misc_feature (1)..(25): SEQ ID NO: 6080; WAN02498T_at; Start 5; Stop 29
cgtaaaggtgctattttcttgcctg

SEQ ID NO: 14041 - DNA, 25 bp, Artificial
  probe
  misc_feature (1)..(25): SEQ ID NO: 6080; WAN02498T_at; Start 147; Stop 171
tgaactatttgatattatgataacc

SEQ ID NO: 14042 - DNA, 25 bp, Artificial
  probe
  misc_feature (1)..(25): SEQ ID NO: 6080; WAN02498T_at; Start 16; Stop 40
tattttcttgcctgctgaactcatc

SEQ ID NO: 14043 - DNA, 25 bp, Artificial
  probe
  misc_feature (1)..(25): SEQ ID NO: 6080; WAN02498T_at; Start 21; Stop 45
tcttgcctgctgaactcatcgattt

SEQ ID NO: 14044 - DNA, 25 bp, Artificial
  probe
  misc_feature (1)..(25): SEQ ID NO: 6080; WAN02498T_at; Start 11; Stop 35
ggtgctattttcttgcctgctgaac

SEQ ID NO: 14045 - DNA, 25 bp, Artificial
  probe
  misc_feature (1)..(25): SEQ ID NO: 6080; WAN02498T_at; Start 134; Stop 158
tagcgtatttaattgaactatttga

SEQ ID NO: 14046 - DNA, 25 bp, Artificial
  probe
  misc_feature (1)..(25): SEQ ID NO: 6080; WAN02498T_at; Start 19; Stop 43
tttcttgcctgctgaactcatcgat

SEQ ID NO: 14047 - DNA, 25 bp, Artificial
  probe
  misc_feature (1)..(25): SEQ ID NO: 6080; WAN02498T_at; Start 29; Stop 53
gctgaactcatcgatttaatacctt

SEQ ID NO: 14048 - DNA, 25 bp, Artificial
  probe
  misc_feature (1)..(25): SEQ ID NO: 6080; WAN02498T_at; Start 25; Stop 49
gcctgctgaactcatcgatttaata

SEQ ID NO: 14049 - DNA, 25 bp, Artificial
  probe
  misc_feature (1)..(25): SEQ ID NO: 6080; WAN02498T_at; Start 28; Stop 52
tgctgaactcatcgatttaatacct

SEQ ID NO: 14050 - DNA, 25 bp, Artificial
  probe
  misc_feature (1)..(25): SEQ ID NO: 6080; WAN02498T_at; Start 148; Stop 172
gaactatttgatattatgataacct

SEQ ID NO: 14051 - DNA, 25 bp, Artificial
  probe
  misc_feature (1)..(25): SEQ ID NO: 6080; WAN02498T_at; Start 83; Stop 107
gtttgtactttacattttagaatga

SEQ ID NO: 14052 - DNA, 25 bp, Artificial
  probe
  misc_feature (1)..(25): SEQ ID NO: 6080; WAN02498T_at; Start 18; Stop 42
ttttcttgcctgctgaactcatcga

SEQ ID NO: 14053 - DNA, 25 bp, Artificial
  probe
  misc_feature (1)..(25): SEQ ID NO: 6080; WAN02498T_at; Start 62; Stop 86
cccctctagtatattgtaattgttt

SEQ ID NO: 14054 - DNA, 25 bp, Artificial
  probe
  misc_feature (1)..(25): SEQ ID NO: 6080; WAN02498T_at; Start 55; Stop 79
tttactccccctctagtatattgta

SEQ ID NO: 14055 - DNA, 25 bp, Artificial
  probe
  misc_feature (1)..(25): SEQ ID NO: 6080; WAN02498T_at; Start 23; Stop 47
ttgcctgctgaactcatcgatttaa

SEQ ID NO: 14056 - DNA, 25 bp, Artificial
  probe
  misc_feature (1)..(25): SEQ ID NO: 6080; WAN02498T_at; Start 8; Stop 32
aaaggtgctattttcttgcctgctg

SEQ ID NO: 14057 - DNA, 25 bp, Artificial
  probe
  misc_feature (1)..(25): SEQ ID NO: 6080; WAN02498T_at; Start 22; Stop 46
cttgcctgctgaactcatcgattta

SEQ ID NO: 14058 - DNA, 25 bp, Artificial
  probe
  misc_feature (1)..(25): SEQ ID NO: 6223; WAN02498U_at; Start 11; Stop 35
ggtataatattctaaagcacaaggg

SEQ ID NO: 14059 - DNA, 25 bp, Artificial
  probe
  misc_feature (1)..(25): SEQ ID NO: 6223; WAN02498U_at; Start 2; Stop 26
tgattgtgtggtataatattctaaa

SEQ ID NO: 14060 - DNA, 25 bp, Artificial
  probe
  misc_feature (1)..(25): SEQ ID NO: 6223; WAN02498U_at; Start 33; Stop 57
gggatagtatagaaggagtacacct

SEQ ID NO: 14061 - DNA, 25 bp, Artificial
  probe
  misc_feature (1)..(25): SEQ ID NO: 6223; WAN02498U_at; Start 8; Stop 32
tgtggtataatattctaaagcacaa

SEQ ID NO: 14062 - DNA, 25 bp, Artificial
  probe
  misc_feature (1)..(25): SEQ ID NO: 6223; WAN02498U_at; Start 19; Stop 43
attctaaagcacaagggatagtata

SEQ ID NO: 14063 - DNA, 25 bp, Artificial
  probe
  misc_feature (1)..(25): SEQ ID NO: 6223; WAN02498U_at; Start 1; Stop 25
ttgattgtgtggtataatattctaa

SEQ ID NO: 14064 - DNA, 25 bp, Artificial
  probe
  misc_feature (1)..(25): SEQ ID NO: 6223; WAN02498U_at; Start 18; Stop 42
tattctaaagcacaagggatagtat

SEQ ID NO: 14065 - DNA, 25 bp, Artificial
  probe
  misc_feature (1)..(25): SEQ ID NO: 6223; WAN02498U_at; Start 15; Stop 39
taatattctaaagcacaagggatag

SEQ ID NO: 14066 - DNA, 25 bp, Artificial
  probe
  misc_feature (1)..(25): SEQ ID NO: 6223; WAN02498U_at; Start 23; Stop 47
taaagcacaagggatagtatagaag

SEQ ID NO: 14067 - DNA, 25 bp, Artificial
  probe
  misc_feature (1)..(25): SEQ ID NO: 6223; WAN02498U_at; Start 20; Stop 44
ttctaaagcacaagggatagtatag

SEQ ID NO: 14068 - DNA, 25 bp, Artificial
  probe
  misc_feature (1)..(25): SEQ ID NO: 6223; WAN02498U_at; Start 13; Stop 37
tataatattctaaagcacaagggat

SEQ ID NO: 14069 - DNA, 25 bp, Artificial
  probe
  misc_feature (1)..(25): SEQ ID NO: 6223; WAN02498U_at; Start 31; Stop 55
aagggatagtatagaaggagtacac

SEQ ID NO: 14070 - DNA, 25 bp, Artificial
  probe
  misc_feature (1)..(25): SEQ ID NO: 6223; WAN02498U_at; Start 12; Stop 36
gtataatattctaaagcacaaggga

SEQ ID NO: 14071 - DNA, 25 bp, Artificial
  probe
  misc_feature (1)..(25): SEQ ID NO: 6223; WAN02498U_at; Start 27; Stop 51
gcacaagggatagtatagaaggagt

SEQ ID NO: 14072 - DNA, 25 bp, Artificial
  probe
  misc_feature (1)..(25): SEQ ID NO: 6223; WAN02498U_at; Start 5; Stop 29
ttgtgtggtataatattctaaagca

SEQ ID NO: 14073 - DNA, 25 bp, Artificial
  probe
  misc_feature (1)..(25): SEQ ID NO: 6223; WAN02498U_at; Start 22; Stop 46
ctaaagcacaagggatagtatagaa

SEQ ID NO: 14074 - DNA, 25 bp, Artificial
  probe
  misc_feature (1)..(25): SEQ ID NO: 6223; WAN02498U_at; Start 21; Stop 45
tctaaagcacaagggatagtataga

SEQ ID NO: 14075 - DNA, 25 bp, Artificial
  probe
  misc_feature (1)..(25): SEQ ID NO: 6223; WAN02498U_at; Start 14; Stop 38
ataatattctaaagcacaagggata

SEQ ID NO: 14076 - DNA, 25 bp, Artificial
  probe
  misc_feature (1)..(25): SEQ ID NO: 6223; WAN02498U_at; Start 26; Stop 50
agcacaagggatagtatagaaggag

SEQ ID NO: 14077 - DNA, 25 bp, Artificial
  probe
  misc_feature (1)..(25): SEQ ID NO: 6223; WAN02498U_at; Start 6; Stop 30
tgtgtggtataatattctaaagcac

SEQ ID NO: 14078 - DNA, 25 bp, Artificial
  probe
  misc_feature (1)..(25): SEQ ID NO: 6223; WAN02498U_at; Start 3; Stop 27
gattgtgtggtataatattctaaag

SEQ ID NO: 14079 - DNA, 25 bp, Artificial
  probe
  misc_feature (1)..(25): SEQ ID NO: 6223; WAN02498U_at; Start 29; Stop 53
acaagggatagtatagaaggagtac

SEQ ID NO: 14080 - DNA, 25 bp, Artificial
  probe
  misc_feature (1)..(25): SEQ ID NO: 6223; WAN02498U_at; Start 10; Stop 34
tggtataatattctaaagcacaagg

SEQ ID NO: 14081 - DNA, 25 bp, Artificial
  probe
  misc_feature (1)..(25): SEQ ID NO: 6223; WAN02498U_at; Start 30; Stop 54
caagggatagtatagaaggagtaca

SEQ ID NO: 14082 - DNA, 25 bp, Artificial
  probe
  misc_feature (1)..(25): SEQ ID NO: 6223; WAN02498U_at; Start 32; Stop 56
agggatagtatagaaggagtacacc

SEQ ID NO: 14083 - DNA, 25 bp, Artificial
  probe
  misc_feature (1)..(25): SEQ ID NO: 6223; WAN02498U_at; Start 16; Stop 40
aatattctaaagcacaagggatagt

SEQ ID NO: 14084 - DNA, 25 bp, Artificial
  probe
  misc_feature (1)..(25): SEQ ID NO: 6223; WAN02498U_at; Start 17; Stop 41
atattctaaagcacaagggatagta

SEQ ID NO: 14085 - DNA, 25 bp, Artificial
  probe
  misc_feature (1)..(25): SEQ ID NO: 6223; WAN02498U_at; Start 25; Stop 49
aagcacaagggatagtatagaagga

SEQ ID NO: 14086 - DNA, 25 bp, Artificial
  probe
  misc_feature (1)..(25): SEQ ID NO: 6223; WAN02498U_at; Start 4; Stop 28
attgtgtggtataatattctaaagc

SEQ ID NO: 14087 - DNA, 25 bp, Artificial
  probe
  misc_feature (1)..(25): SEQ ID NO: 6223; WAN02498U_at; Start 9; Stop 33
gtggtataatattctaaagcacaag

SEQ ID NO: 14088 - DNA, 25 bp, Artificial
  probe
  misc_feature (1)..(25): SEQ ID NO: 6223; WAN02498U_at; Start 24; Stop 48
aaagcacaagggatagtatagaagg

SEQ ID NO: 14089 - DNA, 25 bp, Artificial
  probe
  misc_feature (1)..(25): SEQ ID NO: 6223; WAN02498U_at; Start 28; Stop 52
cacaagggatagtatagaaggagta

SEQ ID NO: 14090 - DNA, 25 bp, Artificial
  probe
  misc_feature (1)..(25): SEQ ID NO: 6223; WAN02498U_at; Start 7; Stop 31
gtgtggtataatattctaaagcaca

SEQ ID NO: 14091 - DNA, 25 bp, Artificial
  probe
  misc_feature (1)..(25): SEQ ID NO: 6240; WAN02498V_at; Start 6; Stop 30
aaagtcagccataaggtacacaaaa

SEQ ID NO: 14092 - DNA, 25 bp, Artificial
  probe
  misc_feature (1)..(25): SEQ ID NO: 6240; WAN02498V_at; Start 24; Stop 48
cacaaaaagggtagtattttagcat

SEQ ID NO: 14093 - DNA, 25 bp, Artificial
  probe
  misc_feature (1)..(25): SEQ ID NO: 6240; WAN02498V_at; Start 5; Stop 29
aaaagtcagccataaggtacacaaa

SEQ ID NO: 14094 - DNA, 25 bp, Artificial
  probe
  misc_feature (1)..(25): SEQ ID NO: 6240; WAN02498V_at; Start 4; Stop 28
gaaaagtcagccataaggtacacaa

SEQ ID NO: 14095 - DNA, 25 bp, Artificial
  probe
  misc_feature (1)..(25): SEQ ID NO: 6240; WAN02498V_at; Start 11; Stop 35
cagccataaggtacacaaaaagggt

SEQ ID NO: 14096 - DNA, 25 bp, Artificial
  probe
  misc_feature (1)..(25): SEQ ID NO: 6240; WAN02498V_at; Start 10; Stop 34
tcagccataaggtacacaaaaaggg

SEQ ID NO: 14097 - DNA, 25 bp, Artificial
  probe
  misc_feature (1)..(25): SEQ ID NO: 6240; WAN02498V_at; Start 7; Stop 31
aagtcagccataaggtacacaaaaa

SEQ ID NO: 14098 - DNA, 25 bp, Artificial
  probe
  misc_feature (1)..(25): SEQ ID NO: 6240; WAN02498V_at; Start 34; Stop 58
gtagtattttagcatacgaacccta

SEQ ID NO: 14099 - DNA, 25 bp, Artificial
  probe
  misc_feature (1)..(25): SEQ ID NO: 6240; WAN02498V_at; Start 3; Stop 27
tgaaaagtcagccataaggtacaca

SEQ ID NO: 14100 - DNA, 25 bp, Artificial
  probe
  misc_feature (1)..(25): SEQ ID NO: 6240; WAN02498V_at; Start 2; Stop 26
ttgaaaagtcagccataaggtacac

SEQ ID NO: 14101 - DNA, 25 bp, Artificial
  probe
  misc_feature (1)..(25): SEQ ID NO: 6240; WAN02498V_at; Start 1; Stop 25
tttgaaaagtcagccataaggtaca

SEQ ID NO: 14102 - DNA, 25 bp, Artificial
  probe
  misc_feature (1)..(25): SEQ ID NO: 6240; WAN02498V_at; Start 9; Stop 33
gtcagccataaggtacacaaaaagg

SEQ ID NO: 14103 - DNA, 25 bp, Artificial
  probe
  misc_feature (1)..(25): SEQ ID NO: 6240; WAN02498V_at; Start 8; Stop 32
agtcagccataaggtacacaaaaag

SEQ ID NO: 14104 - DNA, 25 bp, Artificial
  probe
  misc_feature (1)..(25): SEQ ID NO: 6240; WAN02498V_at; Start 35; Stop 59
tagtattttagcatacgaaccctaa

SEQ ID NO: 14105 - DNA, 25 bp, Artificial
  probe
  misc_feature (1)..(25): SEQ ID NO: 6143; WAN02498W_at; Start 124; Stop 148
gatttatacaggaggtagaaccgta

SEQ ID NO: 14106 - DNA, 25 bp, Artificial
  probe
  misc_feature (1)..(25): SEQ ID NO: 6143; WAN02498W_at; Start 59; Stop 83
tagccaaagccgttttagaggctaa

SEQ ID NO: 14107 - DNA, 25 bp, Artificial
  probe
  misc_feature (1)..(25): SEQ ID NO: 6143; WAN02498W_at; Start 18; Stop 42
taacacgtttatagagacaagtggt

SEQ ID NO: 14108 - DNA, 25 bp, Artificial
  probe
  misc_feature (1)..(25): SEQ ID NO: 6143; WAN02498W_at; Start 44; Stop 68
aataatattaaccactagccaaagc

SEQ ID NO: 14109 - DNA, 25 bp, Artificial
  probe
  misc_feature (1)..(25): SEQ ID NO: 6143; WAN02498W_at; Start 31; Stop 55
gagacaagtggtaaataatattaac

SEQ ID NO: 14110 - DNA, 25 bp, Artificial
  probe
  misc_feature (1)..(25): SEQ ID NO: 6143; WAN02498W_at; Start 40; Stop 64
ggtaaataatattaaccactagcca

SEQ ID NO: 14111 - DNA, 25 bp, Artificial
  probe
  misc_feature (1)..(25): SEQ ID NO: 6143; WAN02498W_at; Start 86; Stop 110
aagaggctagaggaggcaattaaaa

SEQ ID NO: 14112 - DNA, 25 bp, Artificial
  probe
  misc_feature (1)..(25): SEQ ID NO: 6143; WAN02498W_at; Start 16; Stop 40
tctaacacgtttatagagacaagtg

SEQ ID NO: 14113 - DNA, 25 bp, Artificial
  probe
  misc_feature (1)..(25): SEQ ID NO: 6143; WAN02498W_at; Start 95; Stop 119
gaggaggcaattaaaaagtaagcta

SEQ ID NO: 14114 - DNA, 25 bp, Artificial
  probe
  misc_feature (1)..(25): SEQ ID NO: 6143; WAN02498W_at; Start 81; Stop 105
taaaaaagaggctagaggaggcaat

SEQ ID NO: 14115 - DNA, 25 bp, Artificial
  probe
  misc_feature (1)..(25): SEQ ID NO: 6143; WAN02498W_at; Start 88; Stop 112
gaggctagaggaggcaattaaaaag

SEQ ID NO: 14116 - DNA, 25 bp, Artificial
  probe
  misc_feature (1)..(25): SEQ ID NO: 6143; WAN02498W_at; Start 90; Stop 114
ggctagaggaggcaattaaaaagta

SEQ ID NO: 14117 - DNA, 25 bp, Artificial
  probe
  misc_feature (1)..(25): SEQ ID NO: 6143; WAN02498W_at; Start 102; Stop 126
caattaaaaagtaagctaaccagat

SEQ ID NO: 14118 - DNA, 25 bp, Artificial
  probe
  misc_feature (1)..(25): SEQ ID NO: 6143; WAN02498W_at; Start 91; Stop 115
gctagaggaggcaattaaaaagtaa

SEQ ID NO: 14119 - DNA, 25 bp, Artificial
  probe
  misc_feature (1)..(25): SEQ ID NO: 6143; WAN02498W_at; Start 80; Stop 104
ctaaaaaagaggctagaggaggcaa

SEQ ID NO: 14120 - DNA, 25 bp, Artificial
  probe
  misc_feature (1)..(25): SEQ ID NO: 6143; WAN02498W_at; Start 101; Stop 125
gcaattaaaaagtaagctaaccaga

SEQ ID NO: 14121 - DNA, 25 bp, Artificial
  probe
  misc_feature (1)..(25): SEQ ID NO: 6143; WAN02498W_at; Start 85; Stop 109
aaagaggctagaggaggcaattaaa

SEQ ID NO: 14122 - DNA, 25 bp, Artificial
  probe
  misc_feature (1)..(25): SEQ ID NO: 6143; WAN02498W_at; Start 72; Stop 96
tttagaggctaaaaaagaggctaga

SEQ ID NO: 14123 - DNA, 25 bp, Artificial
  probe
  misc_feature (1)..(25): SEQ ID NO: 6143; WAN02498W_at; Start 83; Stop 107
aaaaagaggctagaggaggcaatta

SEQ ID NO: 14124 - DNA, 25 bp, Artificial
  probe
  misc_feature (1)..(25): SEQ ID NO: 6143; WAN02498W_at; Start 74; Stop 98
tagaggctaaaaaagaggctagagg

SEQ ID NO: 14125 - DNA, 25 bp, Artificial
  probe
  misc_feature (1)..(25): SEQ ID NO: 6143; WAN02498W_at; Start 122; Stop 146
cagatttatacaggaggtagaaccg

SEQ ID NO: 14126 - DNA, 25 bp, Artificial
  probe
  misc_feature (1)..(25): SEQ ID NO: 6143; WAN02498W_at; Start 54; Stop 78
accactagccaaagccgttttagag

SEQ ID NO: 14127 - DNA, 25 bp, Artificial
  probe
  misc_feature (1)..(25): SEQ ID NO: 6143; WAN02498W_at; Start 113; Stop 137
taagctaaccagatttatacaggag

SEQ ID NO: 14128 - DNA, 25 bp, Artificial
  probe
  misc_feature (1)..(25): SEQ ID NO: 6143; WAN02498W_at; Start 46; Stop 70
taatattaaccactagccaaagccg

SEQ ID NO: 14129 - DNA, 25 bp, Artificial
  probe
  misc_feature (1)..(25): SEQ ID NO: 6143; WAN02498W_at; Start 55; Stop 79
ccactagccaaagccgttttagagg

SEQ ID NO: 14130 - DNA, 25 bp, Artificial
  probe
  misc_feature (1)..(25): SEQ ID NO: 6143; WAN02498W_at; Start 111; Stop 135
agtaagctaaccagatttatacagg

SEQ ID NO: 14131 - DNA, 25 bp, Artificial
  probe
  misc_feature (1)..(25): SEQ ID NO: 6143; WAN02498W_at; Start 8; Stop 32
taaaggcctctaacacgtttataga

SEQ ID NO: 14132 - DNA, 25 bp, Artificial
  probe
  misc_feature (1)..(25): SEQ ID NO: 6143; WAN02498W_at; Start 23; Stop 47
cgtttatagagacaagtggtaaata

SEQ ID NO: 14133 - DNA, 25 bp, Artificial
  probe
  misc_feature (1)..(25): SEQ ID NO: 6143; WAN02498W_at; Start 93; Stop 117
tagaggaggcaattaaaaagtaagc

SEQ ID NO: 14134 - DNA, 25 bp, Artificial
  probe
  misc_feature (1)..(25): SEQ ID NO: 6143; WAN02498W_at; Start 21; Stop 45
cacgtttatagagacaagtggtaaa

SEQ ID NO: 14135 - DNA, 25 bp, Artificial
  probe
  misc_feature (1)..(25): SEQ ID NO: 6143; WAN02498W_at; Start 47; Stop 71
aatattaaccactagccaaagccgt

SEQ ID NO: 14136 - DNA, 25 bp, Artificial
  probe
  misc_feature (1)..(25): SEQ ID NO: 6143; WAN02498W_at; Start 10; Stop 34
aaggcctctaacacgtttatagaga

SEQ ID NO: 14137 - DNA, 25 bp, Artificial
  probe
  misc_feature (1)..(25): SEQ ID NO: 6143; WAN02498W_at; Start 48; Stop 72
atattaaccactagccaaagccgtt

SEQ ID NO: 14138 - DNA, 25 bp, Artificial
  probe
  misc_feature (1)..(25): SEQ ID NO: 6143; WAN02498W_at; Start 12; Stop 36
ggcctctaacacgtttatagagaca

SEQ ID NO: 14139 - DNA, 25 bp, Artificial
  probe
  misc_feature (1)..(25): SEQ ID NO: 6078; WAN02498X_at; Start 18; Stop 42
ttgtaaataatctcctcttatttta

SEQ ID NO: 14140 - DNA, 25 bp, Artificial
  probe
  misc_feature (1)..(25): SEQ ID NO: 6078; WAN02498X_at; Start 39; Stop 63
tttatcaaaattagaggaaaatgac

SEQ ID NO: 14141 - DNA, 25 bp, Artificial
  probe
  misc_feature (1)..(25): SEQ ID NO: 6078; WAN02498X_at; Start 26; Stop 50
aatctcctcttattttatcaaaatt

SEQ ID NO: 14142 - DNA, 25 bp, Artificial
  probe
  misc_feature (1)..(25): SEQ ID NO: 6078; WAN02498X_at; Start 37; Stop 61
attttatcaaaattagaggaaaatg

SEQ ID NO: 14143 - DNA, 25 bp, Artificial
  probe
  misc_feature (1)..(25): SEQ ID NO: 6078; WAN02498X_at; Start 28; Stop 52
tctcctcttattttatcaaaattag

SEQ ID NO: 14144 - DNA, 25 bp, Artificial
  probe
  misc_feature (1)..(25): SEQ ID NO: 6078; WAN02498X_at; Start 16; Stop 40
ctttgtaaataatctcctcttattt

SEQ ID NO: 14145 - DNA, 25 bp, Artificial
  probe
  misc_feature (1)..(25): SEQ ID NO: 6078; WAN02498X_at; Start 43; Stop 67
tcaaaattagaggaaaatgacaact

SEQ ID NO: 14146 - DNA, 25 bp, Artificial
  probe
  misc_feature (1)..(25): SEQ ID NO: 6078; WAN02498X_at; Start 40; Stop 64
ttatcaaaattagaggaaaatgaca

SEQ ID NO: 14147 - DNA, 25 bp, Artificial
  probe
  misc_feature (1)..(25): SEQ ID NO: 6078; WAN02498X_at; Start 30; Stop 54
tcctcttattttatcaaaattagag

SEQ ID NO: 14148 - DNA, 25 bp, Artificial
  probe
  misc_feature (1)..(25): SEQ ID NO: 6078; WAN02498X_at; Start 52; Stop 76
gaggaaaatgacaacttaatttata

SEQ ID NO: 14149 - DNA, 25 bp, Artificial
  probe
  misc_feature (1)..(25): SEQ ID NO: 6078; WAN02498X_at; Start 44; Stop 68
caaaattagaggaaaatgacaactt

SEQ ID NO: 14150 - DNA, 25 bp, Artificial
  probe
  misc_feature (1)..(25): SEQ ID NO: 6078; WAN02498X_at; Start 42; Stop 66
atcaaaattagaggaaaatgacaac

SEQ ID NO: 14151 - DNA, 25 bp, Artificial
  probe
  misc_feature (1)..(25): SEQ ID NO: 6078; WAN02498X_at; Start 24; Stop 48
ataatctcctcttattttatcaaaa

SEQ ID NO: 14152 - DNA, 25 bp, Artificial
  probe
  misc_feature (1)..(25): SEQ ID NO: 6078; WAN02498X_at; Start 51; Stop 75
agaggaaaatgacaacttaatttat

SEQ ID NO: 14153 - DNA, 25 bp, Artificial
  probe
  misc_feature (1)..(25): SEQ ID NO: 6078; WAN02498X_at; Start 23; Stop 47
aataatctcctcttattttatcaaa

SEQ ID NO: 14154 - DNA, 25 bp, Artificial
  probe
  misc_feature (1)..(25): SEQ ID NO: 6078; WAN02498X_at; Start 47; Stop 71
aattagaggaaaatgacaacttaat

SEQ ID NO: 14155 - DNA, 25 bp, Artificial
  probe
  misc_feature (1)..(25): SEQ ID NO: 6078; WAN02498X_at; Start 32; Stop 56
ctcttattttatcaaaattagagga

SEQ ID NO: 14156 - DNA, 25 bp, Artificial
  probe
  misc_feature (1)..(25): SEQ ID NO: 6078; WAN02498X_at; Start 29; Stop 53
ctcctcttattttatcaaaattaga

SEQ ID NO: 14157 - DNA, 25 bp, Artificial
  probe
  misc_feature (1)..(25): SEQ ID NO: 6078; WAN02498X_at; Start 48; Stop 72
attagaggaaaatgacaacttaatt

SEQ ID NO: 14158 - DNA, 25 bp, Artificial
  probe
  misc_feature (1)..(25): SEQ ID NO: 6078; WAN02498X_at; Start 31; Stop 55
cctcttattttatcaaaattagagg

SEQ ID NO: 14159 - DNA, 25 bp, Artificial
  probe
  misc_feature (1)..(25): SEQ ID NO: 6078; WAN02498X_at; Start 20; Stop 44
gtaaataatctcctcttattttatc

SEQ ID NO: 14160 - DNA, 25 bp, Artificial
  probe
  misc_feature (1)..(25): SEQ ID NO: 6078; WAN02498X_at; Start 21; Stop 45
taaataatctcctcttattttatca

SEQ ID NO: 14161 - DNA, 25 bp, Artificial
  probe
  misc_feature (1)..(25): SEQ ID NO: 6078; WAN02498X_at; Start 38; Stop 62
ttttatcaaaattagaggaaaatga

SEQ ID NO: 14162 - DNA, 25 bp, Artificial
  probe
  misc_feature (1)..(25): SEQ ID NO: 6078; WAN02498X_at; Start 25; Stop 49
taatctcctcttattttatcaaaat

SEQ ID NO: 14163 - DNA, 25 bp, Artificial
  probe
  misc_feature (1)..(25): SEQ ID NO: 6078; WAN02498X_at; Start 33; Stop 57
tcttattttatcaaaattagaggaa

SEQ ID NO: 14164 - DNA, 25 bp, Artificial
  probe
  misc_feature (1)..(25): SEQ ID NO: 6078; WAN02498X_at; Start 50; Stop 74
tagaggaaaatgacaacttaattta

SEQ ID NO: 14165 - DNA, 25 bp, Artificial
  probe
  misc_feature (1)..(25): SEQ ID NO: 6078; WAN02498X_at; Start 27; Stop 51
atctcctcttattttatcaaaatta

SEQ ID NO: 14166 - DNA, 25 bp, Artificial
  probe
  misc_feature (1)..(25): SEQ ID NO: 6078; WAN02498X_at; Start 22; Stop 46
aaataatctcctcttattttatcaa

SEQ ID NO: 14167 - DNA, 25 bp, Artificial
  probe
  misc_feature (1)..(25): SEQ ID NO: 6078; WAN02498X_at; Start 15; Stop 39
cctttgtaaataatctcctcttatt

SEQ ID NO: 14168 - DNA, 25 bp, Artificial
  probe
  misc_feature (1)..(25): SEQ ID NO: 6078; WAN02498X_at; Start 14; Stop 38
ccctttgtaaataatctcctcttat

SEQ ID NO: 14169 - DNA, 25 bp, Artificial
  probe
  misc_feature (1)..(25): SEQ ID NO: 6078; WAN02498X_at; Start 41; Stop 65
tatcaaaattagaggaaaatgacaa

SEQ ID NO: 14170 - DNA, 25 bp, Artificial
  probe
  misc_feature (1)..(25): SEQ ID NO: 6078; WAN02498X_at; Start 19; Stop 43
tgtaaataatctcctcttattttat

SEQ ID NO: 14171 - DNA, 25 bp, Artificial
  probe
  misc_feature (1)..(25): SEQ ID NO: 6155; WAN02498Y_at; Start 4; Stop 28
ttacacctccttaaagaacataata

SEQ ID NO: 14172 - DNA, 25 bp, Artificial
  probe
  misc_feature (1)..(25): SEQ ID NO: 6155; WAN02498Y_at; Start 77; Stop 101
aagttttataatctaggtatgcaaa

SEQ ID NO: 14173 - DNA, 25 bp, Artificial
  probe
  misc_feature (1)..(25): SEQ ID NO: 6155; WAN02498Y_at; Start 94; Stop 118
tatgcaaaagtaaaggaggtataga

SEQ ID NO: 14174 - DNA, 25 bp, Artificial
  probe
  misc_feature (1)..(25): SEQ ID NO: 6155; WAN02498Y_at; Start 5; Stop 29
tacacctccttaaagaacataataa

SEQ ID NO: 14175 - DNA, 25 bp, Artificial
  probe
  misc_feature (1)..(25): SEQ ID NO: 6155; WAN02498Y_at; Start 74; Stop 98
ataaagttttataatctaggtatgc

SEQ ID NO: 14176 - DNA, 25 bp, Artificial
  probe
  misc_feature (1)..(25): SEQ ID NO: 6155; WAN02498Y_at; Start 76; Stop 100
aaagttttataatctaggtatgcaa

SEQ ID NO: 14177 - DNA, 25 bp, Artificial
  probe
  misc_feature (1)..(25): SEQ ID NO: 6155; WAN02498Y_at; Start 81; Stop 105
tttataatctaggtatgcaaaagta

SEQ ID NO: 14178 - DNA, 25 bp, Artificial
  probe
  misc_feature (1)..(25): SEQ ID NO: 6155; WAN02498Y_at; Start 79; Stop 103
gttttataatctaggtatgcaaaag

SEQ ID NO: 14179 - DNA, 25 bp, Artificial
  probe
  misc_feature (1)..(25): SEQ ID NO: 6155; WAN02498Y_at; Start 83; Stop 107
tataatctaggtatgcaaaagtaaa

SEQ ID NO: 14180 - DNA, 25 bp, Artificial
  probe
  misc_feature (1)..(25): SEQ ID NO: 6155; WAN02498Y_at; Start 82; Stop 106
ttataatctaggtatgcaaaagtaa

SEQ ID NO: 14181 - DNA, 25 bp, Artificial
  probe
  misc_feature (1)..(25): SEQ ID NO: 6155; WAN02498Y_at; Start 95; Stop 119
atgcaaaagtaaaggaggtatagaa

SEQ ID NO: 14182 - DNA, 25 bp, Artificial
  probe
  misc_feature (1)..(25): SEQ ID NO: 6155; WAN02498Y_at; Start 73; Stop 97
aataaagttttataatctaggtatg

SEQ ID NO: 14183 - DNA, 25 bp, Artificial
  probe
  misc_feature (1)..(25): SEQ ID NO: 6155; WAN02498Y_at; Start 75; Stop 99
taaagttttataatctaggtatgca

SEQ ID NO: 14184 - DNA, 25 bp, Artificial
  probe
  misc_feature (1)..(25): SEQ ID NO: 6155; WAN02498Y_at; Start 78; Stop 102
agttttataatctaggtatgcaaaa

SEQ ID NO: 14185 - DNA, 25 bp, Artificial
  probe
  misc_feature (1)..(25): SEQ ID NO: 6155; WAN02498Y_at; Start 80; Stop 104
ttttataatctaggtatgcaaaagt

SEQ ID NO: 14186 - DNA, 25 bp, Artificial
  probe
  misc_feature (1)..(25): SEQ ID NO: 6194; WAN02498Z_at; Start 34; Stop 58
gaaataagcactttggggcgctttc

SEQ ID NO: 14187 - DNA, 25 bp, Artificial
  probe
  misc_feature (1)..(25): SEQ ID NO: 6194; WAN02498Z_at; Start 1; Stop 25
tctctttatgtgattataggctata

SEQ ID NO: 14188 - DNA, 25 bp, Artificial
  probe
  misc_feature (1)..(25): SEQ ID NO: 6194; WAN02498Z_at; Start 4; Stop 28
ctttatgtgattataggctataaag

SEQ ID NO: 14189 - DNA, 25 bp, Artificial
  probe
  misc_feature (1)..(25): SEQ ID NO: 6194; WAN02498Z_at; Start 40; Stop 64
agcactttggggcgctttcccttag

SEQ ID NO: 14190 - DNA, 25 bp, Artificial
  probe
  misc_feature (1)..(25): SEQ ID NO: 6194; WAN02498Z_at; Start 110; Stop 134
tggtatagtaagagggtagcccgga

SEQ ID NO: 14191 - DNA, 25 bp, Artificial
  probe
  misc_feature (1)..(25): SEQ ID NO: 6194; WAN02498Z_at; Start 99; Stop 123
ctactaatttttggtatagtaagag

SEQ ID NO: 14192 - DNA, 25 bp, Artificial
  probe
  misc_feature (1)..(25): SEQ ID NO: 6194; WAN02498Z_at; Start 6; Stop 30
ttatgtgattataggctataaagcc

SEQ ID NO: 14193 - DNA, 25 bp, Artificial
  probe
  misc_feature (1)..(25): SEQ ID NO: 6194; WAN02498Z_at; Start 29; Stop 53
cctttgaaataagcactttggggcg

SEQ ID NO: 14194 - DNA, 25 bp, Artificial
  probe
  misc_feature (1)..(25): SEQ ID NO: 6194; WAN02498Z_at; Start 3; Stop 27
tctttatgtgattataggctataaa

SEQ ID NO: 14195 - DNA, 25 bp, Artificial
  probe
  misc_feature (1)..(25): SEQ ID NO: 6194; WAN02498Z_at; Start 30; Stop 54
ctttgaaataagcactttggggcgc

SEQ ID NO: 14196 - DNA, 25 bp, Artificial
  probe
  misc_feature (1)..(25): SEQ ID NO: 6194; WAN02498Z_at; Start 25; Stop 49
aaagcctttgaaataagcactttgg

SEQ ID NO: 14197 - DNA, 25 bp, Artificial
  probe
  misc_feature (1)..(25): SEQ ID NO: 6194; WAN02498Z_at; Start 26; Stop 50
aagcctttgaaataagcactttggg

SEQ ID NO: 14198 - DNA, 25 bp, Artificial
  probe
  misc_feature (1)..(25): SEQ ID NO: 6194; WAN02498Z_at; Start 11; Stop 35
tgattataggctataaagcctttga

SEQ ID NO: 14199 - DNA, 25 bp, Artificial
  probe
  misc_feature (1)..(25): SEQ ID NO: 6194; WAN02498Z_at; Start 7; Stop 31
tatgtgattataggctataaagcct

SEQ ID NO: 14200 - DNA, 25 bp, Artificial
  probe
  misc_feature (1)..(25): SEQ ID NO: 6194; WAN02498Z_at; Start 33; Stop 57
tgaaataagcactttggggcgcttt

SEQ ID NO: 14201 - DNA, 25 bp, Artificial
  probe
  misc_feature (1)..(25): SEQ ID NO: 6194; WAN02498Z_at; Start 32; Stop 56
ttgaaataagcactttggggcgctt

SEQ ID NO: 14202 - DNA, 25 bp, Artificial
  probe
  misc_feature (1)..(25): SEQ ID NO: 6194; WAN02498Z_at; Start 31; Stop 55
tttgaaataagcactttggggcgct

SEQ ID NO: 14203 - DNA, 25 bp, Artificial
  probe
  misc_feature (1)..(25): SEQ ID NO: 6194; WAN02498Z_at; Start 44; Stop 68
ctttggggcgctttcccttagtgct

SEQ ID NO: 14204 - DNA, 25 bp, Artificial
  probe
  misc_feature (1)..(25): SEQ ID NO: 6194; WAN02498Z_at; Start 24; Stop 48
taaagcctttgaaataagcactttg

SEQ ID NO: 14205 - DNA, 25 bp, Artificial
  probe
  misc_feature (1)..(25): SEQ ID NO: 6194; WAN02498Z_at; Start 37; Stop 61
ataagcactttggggcgctttccct

SEQ ID NO: 14206 - DNA, 25 bp, Artificial
  probe
  misc_feature (1)..(25): SEQ ID NO: 6194; WAN02498Z_at; Start 28; Stop 52
gcctttgaaataagcactttggggc

SEQ ID NO: 14207 - DNA, 25 bp, Artificial
  probe
  misc_feature (1)..(25): SEQ ID NO: 6194; WAN02498Z_at; Start 42; Stop 66
cactttggggcgctttcccttagtg

SEQ ID NO: 14208 - DNA, 25 bp, Artificial
  probe
  misc_feature (1)..(25): SEQ ID NO: 6194; WAN02498Z_at; Start 23; Stop 47
ataaagcctttgaaataagcacttt

SEQ ID NO: 14209 - DNA, 25 bp, Artificial
  probe
  misc_feature (1)..(25): SEQ ID NO: 6194; WAN02498Z_at; Start 2; Stop 26
ctctttatgtgattataggctataa

SEQ ID NO: 14210 - DNA, 25 bp, Artificial
  probe
  misc_feature (1)..(25): SEQ ID NO: 6194; WAN02498Z_at; Start 27; Stop 51
agcctttgaaataagcactttgggg

SEQ ID NO: 14211 - DNA, 25 bp, Artificial
  probe
  misc_feature (1)..(25): SEQ ID NO: 6194; WAN02498Z_at; Start 9; Stop 33
tgtgattataggctataaagccttt

SEQ ID NO: 14212 - DNA, 25 bp, Artificial
  probe
  misc_feature (1)..(25): SEQ ID NO: 6194; WAN02498Z_at; Start 114; Stop 138
atagtaagagggtagcccggaaatg

SEQ ID NO: 14213 - DNA, 25 bp, Artificial
  probe
  misc_feature (1)..(25): SEQ ID NO: 6194; WAN02498Z_at; Start 8; Stop 32
atgtgattataggctataaagcctt

SEQ ID NO: 14214 - DNA, 25 bp, Artificial
  probe
  misc_feature (1)..(25): SEQ ID NO: 6194; WAN02498Z_at; Start 10; Stop 34
gtgattataggctataaagcctttg

SEQ ID NO: 14215 - DNA, 25 bp, Artificial
  probe
  misc_feature (1)..(25): SEQ ID NO: 6194; WAN02498Z_at; Start 22; Stop 46
tataaagcctttgaaataagcactt

SEQ ID NO: 14216 - DNA, 25 bp, Artificial
  probe
  misc_feature (1)..(25): SEQ ID NO: 6194; WAN02498Z_at; Start 51; Stop 75
gcgctttcccttagtgctttttata

SEQ ID NO: 14217 - DNA, 25 bp, Artificial
  probe
  misc_feature (1)..(25): SEQ ID NO: 6194; WAN02498Z_at; Start 5; Stop 29
tttatgtgattataggctataaagc

SEQ ID NO: 14218 - DNA, 25 bp, Artificial
  probe
  misc_feature (1)..(25): SEQ ID NO: 6179; WAN024992_at; Start 220; Stop 244
cagactatttattgggattaactga

SEQ ID NO: 14219 - DNA, 25 bp, Artificial
  probe
  misc_feature (1)..(25): SEQ ID NO: 6179; WAN024992_at; Start 72; Stop 96
gatttgagggaggatcatgatctgc

SEQ ID NO: 14220 - DNA, 25 bp, Artificial
  probe
  misc_feature (1)..(25): SEQ ID NO: 6179; WAN024992_at; Start 212; Stop 236
cgtcagtacagactatttattggga

SEQ ID NO: 14221 - DNA, 25 bp, Artificial
  probe
  misc_feature (1)..(25): SEQ ID NO: 6179; WAN024992_at; Start 193; Stop 217
aactctcagatttctatgacgtcag

SEQ ID NO: 14222 - DNA, 25 bp, Artificial
  probe
  misc_feature (1)..(25): SEQ ID NO: 6179; WAN024992_at; Start 210; Stop 234
gacgtcagtacagactatttattgg

SEQ ID NO: 14223 - DNA, 25 bp, Artificial
  probe
  misc_feature (1)..(25): SEQ ID NO: 6179; WAN024992_at; Start 82; Stop 106
aggatcatgatctgccccaaaagca

SEQ ID NO: 14224 - DNA, 25 bp, Artificial
  probe
  misc_feature (1)..(25): SEQ ID NO: 6179; WAN024992_at; Start 262; Stop 286
gctttagaaaataatctcctcaatt

SEQ ID NO: 14225 - DNA, 25 bp, Artificial
  probe
  misc_feature (1)..(25): SEQ ID NO: 6179; WAN024992_at; Start 188; Stop 212
ggttaaactctcagatttctatgac

SEQ ID NO: 14226 - DNA, 25 bp, Artificial
  probe
  misc_feature (1)..(25): SEQ ID NO: 6179; WAN024992_at; Start 180; Stop 204
gatgtattggttaaactctcagatt

SEQ ID NO: 14227 - DNA, 25 bp, Artificial
  probe
  misc_feature (1)..(25): SEQ ID NO: 6179; WAN024992_at; Start 198; Stop 222
tcagatttctatgacgtcagtacag

SEQ ID NO: 14228 - DNA, 25 bp, Artificial
  probe
  misc_feature (1)..(25): SEQ ID NO: 6179; WAN024992_at; Start 87; Stop 111
catgatctgccccaaaagcaaatag

SEQ ID NO: 14229 - DNA, 25 bp, Artificial
  probe
  misc_feature (1)..(25): SEQ ID NO: 6179; WAN024992_at; Start 21; Stop 45
tatggtctatactttttcttaggag

SEQ ID NO: 14230 - DNA, 25 bp, Artificial
  probe
  misc_feature (1)..(25): SEQ ID NO: 6179; WAN024992_at; Start 42; Stop 66
ggagaaagctagatgtacagacgtt

SEQ ID NO: 14231 - DNA, 25 bp, Artificial
  probe
  misc_feature (1)..(25): SEQ ID NO: 6179; WAN024992_at; Start 74; Stop 98
tttgagggaggatcatgatctgccc

SEQ ID NO: 14232 - DNA, 25 bp, Artificial
  probe
  misc_feature (1)..(25): SEQ ID NO: 6179; WAN024992_at; Start 95; Stop 119
gccccaaaagcaaatagctacaata

SEQ ID NO: 14233 - DNA, 25 bp, Artificial
  probe
  misc_feature (1)..(25): SEQ ID NO: 6179; WAN024992_at; Start 134; Stop 158
ttcagcttatgccaaaattgaacgg

SEQ ID NO: 14234 - DNA, 25 bp, Artificial
  probe
  misc_feature (1)..(25): SEQ ID NO: 6179; WAN024992_at; Start 26; Stop 50
tctatactttttcttaggagaaagc

SEQ ID NO: 14235 - DNA, 25 bp, Artificial
  probe
  misc_feature (1)..(25): SEQ ID NO: 6179; WAN024992_at; Start 69; Stop 93
agagatttgagggaggatcatgatc

SEQ ID NO: 14236 - DNA, 25 bp, Artificial
  probe
  misc_feature (1)..(25): SEQ ID NO: 6179; WAN024992_at; Start 175; Stop 199
cggctgatgtattggttaaactctc

SEQ ID NO: 14237 - DNA, 25 bp, Artificial
  probe
  misc_feature (1)..(25): SEQ ID NO: 6179; WAN024992_at; Start 233; Stop 257
gggattaactgattttcctgataaa

SEQ ID NO: 14238 - DNA, 25 bp, Artificial
  probe
  misc_feature (1)..(25): SEQ ID NO: 6179; WAN024992_at; Start 215; Stop 239
cagtacagactatttattgggatta

SEQ ID NO: 14239 - DNA, 25 bp, Artificial
  probe
  misc_feature (1)..(25): SEQ ID NO: 6179; WAN024992_at; Start 44; Stop 68
agaaagctagatgtacagacgtttg

SEQ ID NO: 14240 - DNA, 25 bp, Artificial
  probe
  misc_feature (1)..(25): SEQ ID NO: 6179; WAN024992_at; Start 167; Stop 191
tgcgttgacggctgatgtattggtt

SEQ ID NO: 14241 - DNA, 25 bp, Artificial
  probe
  misc_feature (1)..(25): SEQ ID NO: 6179; WAN024992_at; Start 201; Stop 225
gatttctatgacgtcagtacagact

SEQ ID NO: 14242 - DNA, 25 bp, Artificial
  probe
  misc_feature (1)..(25): SEQ ID NO: 6179; WAN024992_at; Start 161; Stop 185
tgagcatgcgttgacggctgatgta

SEQ ID NO: 14243 - DNA, 25 bp, Artificial
  probe
  misc_feature (1)..(25): SEQ ID NO: 6179; WAN024992_at; Start 92; Stop 116
tctgccccaaaagcaaatagctaca

SEQ ID NO: 14244 - DNA, 25 bp, Artificial
  probe
  misc_feature (1)..(25): SEQ ID NO: 6179; WAN024992_at; Start 40; Stop 64
taggagaaagctagatgtacagacg

SEQ ID NO: 14245 - DNA, 25 bp, Artificial
  probe
  misc_feature (1)..(25): SEQ ID NO: 6179; WAN024992_at; Start 89; Stop 113
tgatctgccccaaaagcaaatagct

SEQ ID NO: 14246 - DNA, 25 bp, Artificial
  probe
  misc_feature (1)..(25): SEQ ID NO: 6179; WAN024992_at; Start 77; Stop 101
gagggaggatcatgatctgccccaa

SEQ ID NO: 14247 - DNA, 25 bp, Artificial
  probe
  misc_feature (1)..(25): SEQ ID NO: 6179; WAN024992_at; Start 81; Stop 105
gaggatcatgatctgccccaaaagc

SEQ ID NO: 14248 - DNA, 25 bp, Artificial
  probe
  misc_feature (1)..(25): SEQ ID NO: 6179; WAN024992_at; Start 3; Stop 27
tcctaaatagttacaatatatggtc

SEQ ID NO: 14249 - DNA, 25 bp, Artificial
  probe
  misc_feature (1)..(25): SEQ ID NO: 6179; WAN024992_at; Start 37; Stop 61
tcttaggagaaagctagatgtacag

SEQ ID NO: 14250 - DNA, 25 bp, Artificial
  probe
  misc_feature (1)..(25): SEQ ID NO: 6179; WAN024992_at; Start 173; Stop 197
gacggctgatgtattggttaaactc

SEQ ID NO: 14251 - DNA, 25 bp, Artificial
  probe
  misc_feature (1)..(25): SEQ ID NO: 6179; WAN024992_at; Start 205; Stop 229
tctatgacgtcagtacagactattt

SEQ ID NO: 14252 - DNA, 25 bp, Artificial
  probe
  misc_feature (1)..(25): SEQ ID NO: 6235; WAN024993_at; Start 85; Stop 109
ggaaatcttagtcagaggtttctga

SEQ ID NO: 14253 - DNA, 25 bp, Artificial
  probe
  misc_feature (1)..(25): SEQ ID NO: 6235; WAN024993_at; Start 163; Stop 187
tactctcggattgttgtatagaaat

SEQ ID NO: 14254 - DNA, 25 bp, Artificial
  probe
  misc_feature (1)..(25): SEQ ID NO: 6235; WAN024993_at; Start 168; Stop 192
tcggattgttgtatagaaatttaaa

SEQ ID NO: 14255 - DNA, 25 bp, Artificial
  probe
  misc_feature (1)..(25): SEQ ID NO: 6235; WAN024993_at; Start 31; Stop 55
tttcaattagggataatagaattcc

SEQ ID NO: 14256 - DNA, 25 bp, Artificial
  probe
  misc_feature (1)..(25): SEQ ID NO: 6235; WAN024993_at; Start 161; Stop 185
actactctcggattgttgtatagaa

SEQ ID NO: 14257 - DNA, 25 bp, Artificial
  probe
  misc_feature (1)..(25): SEQ ID NO: 6235; WAN024993_at; Start 154; Stop 178
ttgtgagactactctcggattgttg

SEQ ID NO: 14258 - DNA, 25 bp, Artificial
  probe
  misc_feature (1)..(25): SEQ ID NO: 6235; WAN024993_at; Start 149; Stop 173
tcaaattgtgagactactctcggat

SEQ ID NO: 14259 - DNA, 25 bp, Artificial
  probe
  misc_feature (1)..(25): SEQ ID NO: 6235; WAN024993_at; Start 116; Stop 140
cattttttatatattaagagtgatg

SEQ ID NO: 14260 - DNA, 25 bp, Artificial
  probe
  misc_feature (1)..(25): SEQ ID NO: 6235; WAN024993_at; Start 67; Stop 91
tagaaagtgaattaattaggaaatc

SEQ ID NO: 14261 - DNA, 25 bp, Artificial
  probe
  misc_feature (1)..(25): SEQ ID NO: 6235; WAN024993_at; Start 75; Stop 99
gaattaattaggaaatcttagtcag

SEQ ID NO: 14262 - DNA, 25 bp, Artificial
  probe
  misc_feature (1)..(25): SEQ ID NO: 6235; WAN024993_at; Start 130; Stop 154
taagagtgatgtgaaatgttcaaat

SEQ ID NO: 14263 - DNA, 25 bp, Artificial
  probe
  misc_feature (1)..(25): SEQ ID NO: 6235; WAN024993_at; Start 152; Stop 176
aattgtgagactactctcggattgt

SEQ ID NO: 14264 - DNA, 25 bp, Artificial
  probe
  misc_feature (1)..(25): SEQ ID NO: 6235; WAN024993_at; Start 155; Stop 179
tgtgagactactctcggattgttgt

SEQ ID NO: 14265 - DNA, 25 bp, Artificial
  probe
  misc_feature (1)..(25): SEQ ID NO: 6235; WAN024993_at; Start 195; Stop 219
tttattgtgagctttttaaggaaga

SEQ ID NO: 14266 - DNA, 25 bp, Artificial
  probe
  misc_feature (1)..(25): SEQ ID NO: 6235; WAN024993_at; Start 40; Stop 64
gggataatagaattccttactatga

SEQ ID NO: 14267 - DNA, 25 bp, Artificial
  probe
  misc_feature (1)..(25): SEQ ID NO: 6235; WAN024993_at; Start 146; Stop 170
tgttcaaattgtgagactactctcg

SEQ ID NO: 14268 - DNA, 25 bp, Artificial
  probe
  misc_feature (1)..(25): SEQ ID NO: 6235; WAN024993_at; Start 79; Stop 103
taattaggaaatcttagtcagaggt

SEQ ID NO: 14269 - DNA, 25 bp, Artificial
  probe
  misc_feature (1)..(25): SEQ ID NO: 6235; WAN024993_at; Start 150; Stop 174
caaattgtgagactactctcggatt

SEQ ID NO: 14270 - DNA, 25 bp, Artificial
  probe
  misc_feature (1)..(25): SEQ ID NO: 6235; WAN024993_at; Start 148; Stop 172
ttcaaattgtgagactactctcgga

SEQ ID NO: 14271 - DNA, 25 bp, Artificial
  probe
  misc_feature (1)..(25): SEQ ID NO: 6235; WAN024993_at; Start 147; Stop 171
gttcaaattgtgagactactctcgg

SEQ ID NO: 14272 - DNA, 25 bp, Artificial
  probe
  misc_feature (1)..(25): SEQ ID NO: 6235; WAN024993_at; Start 34; Stop 58
caattagggataatagaattcctta

SEQ ID NO: 14273 - DNA, 25 bp, Artificial
  probe
  misc_feature (1)..(25): SEQ ID NO: 6235; WAN024993_at; Start 25; Stop 49
ttcaattttcaattagggataatag

SEQ ID NO: 14274 - DNA, 25 bp, Artificial
  probe
  misc_feature (1)..(25): SEQ ID NO: 6235; WAN024993_at; Start 82; Stop 106
ttaggaaatcttagtcagaggtttc

SEQ ID NO: 14275 - DNA, 25 bp, Artificial
  probe
  misc_feature (1)..(25): SEQ ID NO: 6235; WAN024993_at; Start 97; Stop 121
cagaggtttctgattaattcatttt

SEQ ID NO: 14276 - DNA, 25 bp, Artificial
  probe
  misc_feature (1)..(25): SEQ ID NO: 6235; WAN024993_at; Start 141; Stop 165
tgaaatgttcaaattgtgagactac

SEQ ID NO: 14277 - DNA, 25 bp, Artificial
  probe
  misc_feature (1)..(25): SEQ ID NO: 6235; WAN024993_at; Start 157; Stop 181
tgagactactctcggattgttgtat

SEQ ID NO: 14278 - DNA, 25 bp, Artificial
  probe
  misc_feature (1)..(25): SEQ ID NO: 6235; WAN024993_at; Start 127; Stop 151
tattaagagtgatgtgaaatgttca

SEQ ID NO: 14279 - DNA, 25 bp, Artificial
  probe
  misc_feature (1)..(25): SEQ ID NO: 6235; WAN024993_at; Start 160; Stop 184
gactactctcggattgttgtataga

SEQ ID NO: 14280 - DNA, 25 bp, Artificial
  probe
  misc_feature (1)..(25): SEQ ID NO: 6235; WAN024993_at; Start 93; Stop 117
tagtcagaggtttctgattaattca

SEQ ID NO: 14281 - DNA, 25 bp, Artificial
  probe
  misc_feature (1)..(25): SEQ ID NO: 6235; WAN024993_at; Start 143; Stop 167
aaatgttcaaattgtgagactactc

SEQ ID NO: 14282 - DNA, 25 bp, Artificial
  probe
  misc_feature (1)..(25): SEQ ID NO: 6235; WAN024993_at; Start 47; Stop 71
tagaattccttactatgatatagaa

SEQ ID NO: 14283 - DNA, 25 bp, Artificial
  probe
  misc_feature (1)..(25): SEQ ID NO: 6235; WAN024993_at; Start 62; Stop 86
tgatatagaaagtgaattaattagg

SEQ ID NO: 14284 - DNA, 25 bp, Artificial
  probe
  misc_feature (1)..(25): SEQ ID NO: 6235; WAN024993_at; Start 165; Stop 189
ctctcggattgttgtatagaaattt

SEQ ID NO: 14285 - DNA, 25 bp, Artificial
  probe
  misc_feature (1)..(25): SEQ ID NO: 6235; WAN024993_at; Start 86; Stop 110
gaaatcttagtcagaggtttctgat

SEQ ID NO: 14286 - DNA, 25 bp, Artificial
  probe
  misc_feature (1)..(25): SEQ ID NO: 6117; WAN024994_at; Start 274; Stop 298
caaataaagtaatagaaaaggagct

SEQ ID NO: 14287 - DNA, 25 bp, Artificial
  probe
  misc_feature (1)..(25): SEQ ID NO: 6117; WAN024994_at; Start 250; Stop 274
caatgtacaagtaagttttgattcc

SEQ ID NO: 14288 - DNA, 25 bp, Artificial
  probe
  misc_feature (1)..(25): SEQ ID NO: 6117; WAN024994_at; Start 265; Stop 289
ttttgattccaaataaagtaataga

SEQ ID NO: 14289 - DNA, 25 bp, Artificial
  probe
  misc_feature (1)..(25): SEQ ID NO: 6117; WAN024994_at; Start 57; Stop 81
gatattttatgatgggcgaagtttt

SEQ ID NO: 14290 - DNA, 25 bp, Artificial
  probe
  misc_feature (1)..(25): SEQ ID NO: 6117; WAN024994_at; Start 226; Stop 250
gaaagcgtagaatagaggtgtttcc

SEQ ID NO: 14291 - DNA, 25 bp, Artificial
  probe
  misc_feature (1)..(25): SEQ ID NO: 6117; WAN024994_at; Start 208; Stop 232
agtgtcatgcagcaatatgaaagcg

SEQ ID NO: 14292 - DNA, 25 bp, Artificial
  probe
  misc_feature (1)..(25): SEQ ID NO: 6117; WAN024994_at; Start 196; Stop 220
tttgattttgaaagtgtcatgcagc

SEQ ID NO: 14293 - DNA, 25 bp, Artificial
  probe
  misc_feature (1)..(25): SEQ ID NO: 6117; WAN024994_at; Start 55; Stop 79
tagatattttatgatgggcgaagtt

SEQ ID NO: 14294 - DNA, 25 bp, Artificial
  probe
  misc_feature (1)..(25): SEQ ID NO: 6117; WAN024994_at; Start 220; Stop 244
caatatgaaagcgtagaatagaggt

SEQ ID NO: 14295 - DNA, 25 bp, Artificial
  probe
  misc_feature (1)..(25): SEQ ID NO: 6117; WAN024994_at; Start 198; Stop 222
tgattttgaaagtgtcatgcagcaa

SEQ ID NO: 14296 - DNA, 25 bp, Artificial
  probe
  misc_feature (1)..(25): SEQ ID NO: 6117; WAN024994_at; Start 233; Stop 257
tagaatagaggtgtttccaatgtac

SEQ ID NO: 14297 - DNA, 25 bp, Artificial
  probe
  misc_feature (1)..(25): SEQ ID NO: 6117; WAN024994_at; Start 64; Stop 88
tatgatgggcgaagtttttataact

SEQ ID NO: 14298 - DNA, 25 bp, Artificial
  probe
  misc_feature (1)..(25): SEQ ID NO: 6117; WAN024994_at; Start 230; Stop 254
gcgtagaatagaggtgtttccaatg

SEQ ID NO: 14299 - DNA, 25 bp, Artificial
  probe
  misc_feature (1)..(25): SEQ ID NO: 6117; WAN024994_at; Start 210; Stop 234
tgtcatgcagcaatatgaaagcgta

SEQ ID NO: 14300 - DNA, 25 bp, Artificial
  probe
  misc_feature (1)..(25): SEQ ID NO: 6117; WAN024994_at; Start 204; Stop 228
tgaaagtgtcatgcagcaatatgaa

SEQ ID NO: 14301 - DNA, 25 bp, Artificial
  probe
  misc_feature (1)..(25): SEQ ID NO: 6117; WAN024994_at; Start 189; Stop 213
ttagcaatttgattttgaaagtgtc

SEQ ID NO: 14302 - DNA, 25 bp, Artificial
  probe
  misc_feature (1)..(25): SEQ ID NO: 6117; WAN024994_at; Start 253; Stop 277
tgtacaagtaagttttgattccaaa

SEQ ID NO: 14303 - DNA, 25 bp, Artificial
  probe
  misc_feature (1)..(25): SEQ ID NO: 6117; WAN024994_at; Start 278; Stop 302
taaagtaatagaaaaggagctatat

SEQ ID NO: 14304 - DNA, 25 bp, Artificial
  probe
  misc_feature (1)..(25): SEQ ID NO: 6117; WAN024994_at; Start 130; Stop 154
caaaacaattttttgagatatatgt

SEQ ID NO: 14305 - DNA, 25 bp, Artificial
  probe
  misc_feature (1)..(25): SEQ ID NO: 6117; WAN024994_at; Start 52; Stop 76
aaatagatattttatgatgggcgaa

SEQ ID NO: 14306 - DNA, 25 bp, Artificial
  probe
  misc_feature (1)..(25): SEQ ID NO: 6117; WAN024994_at; Start 236; Stop 260
aatagaggtgtttccaatgtacaag

SEQ ID NO: 14307 - DNA, 25 bp, Artificial
  probe
  misc_feature (1)..(25): SEQ ID NO: 6117; WAN024994_at; Start 241; Stop 265
aggtgtttccaatgtacaagtaagt

SEQ ID NO: 14308 - DNA, 25 bp, Artificial
  probe
  misc_feature (1)..(25): SEQ ID NO: 6117; WAN024994_at; Start 238; Stop 262
tagaggtgtttccaatgtacaagta

SEQ ID NO: 14309 - DNA, 25 bp, Artificial
  probe
  misc_feature (1)..(25): SEQ ID NO: 6117; WAN024994_at; Start 213; Stop 237
catgcagcaatatgaaagcgtagaa

SEQ ID NO: 14310 - DNA, 25 bp, Artificial
  probe
  misc_feature (1)..(25): SEQ ID NO: 6117; WAN024994_at; Start 82; Stop 106
tataactagttcctataagtacaga

SEQ ID NO: 14311 - DNA, 25 bp, Artificial
  probe
  misc_feature (1)..(25): SEQ ID NO: 6117; WAN024994_at; Start 1; Stop 25
gagattatagtcacttaaaaatcaa

SEQ ID NO: 14312 - DNA, 25 bp, Artificial
  probe
  misc_feature (1)..(25): SEQ ID NO: 6117; WAN024994_at; Start 193; Stop 217
caatttgattttgaaagtgtcatgc

SEQ ID NO: 14313 - DNA, 25 bp, Artificial
  probe
  misc_feature (1)..(25): SEQ ID NO: 6117; WAN024994_at; Start 66; Stop 90
tgatgggcgaagtttttataactag

SEQ ID NO: 14314 - DNA, 25 bp, Artificial
  probe
  misc_feature (1)..(25): SEQ ID NO: 6117; WAN024994_at; Start 216; Stop 240
gcagcaatatgaaagcgtagaatag

SEQ ID NO: 14315 - DNA, 25 bp, Artificial
  probe
  misc_feature (1)..(25): SEQ ID NO: 6117; WAN024994_at; Start 228; Stop 252
aagcgtagaatagaggtgtttccaa

SEQ ID NO: 14316 - DNA, 25 bp, Artificial
  probe
  misc_feature (1)..(25): SEQ ID NO: 6117; WAN024994_at; Start 202; Stop 226
tttgaaagtgtcatgcagcaatatg

SEQ ID NO: 14317 - DNA, 25 bp, Artificial
  probe
  misc_feature (1)..(25): SEQ ID NO: 6117; WAN024994_at; Start 235; Stop 259
gaatagaggtgtttccaatgtacaa

SEQ ID NO: 14318 - DNA, 25 bp, Artificial
  probe
  misc_feature (1)..(25): SEQ ID NO: 6117; WAN024994_at; Start 240; Stop 264
gaggtgtttccaatgtacaagtaag

SEQ ID NO: 14319 - DNA, 25 bp, Artificial
  probe
  misc_feature (1)..(25): SEQ ID NO: 6117; WAN024994_at; Start 223; Stop 247
tatgaaagcgtagaatagaggtgtt

SEQ ID NO: 14320 - DNA, 25 bp, Artificial
  probe
  misc_feature (1)..(25): SEQ ID NO: 6201; WAN024995_at; Start 15; Stop 39
atccgtgatatactagtctaaccta

SEQ ID NO: 14321 - DNA, 25 bp, Artificial
  probe
  misc_feature (1)..(25): SEQ ID NO: 6201; WAN024995_at; Start 16; Stop 40
tccgtgatatactagtctaacctag

SEQ ID NO: 14322 - DNA, 25 bp, Artificial
  probe
  misc_feature (1)..(25): SEQ ID NO: 6201; WAN024995_at; Start 20; Stop 44
tgatatactagtctaacctagcaga

SEQ ID NO: 14323 - DNA, 25 bp, Artificial
  probe
  misc_feature (1)..(25): SEQ ID NO: 6201; WAN024995_at; Start 2; Stop 26
gaaagccgagcctatccgtgatata

SEQ ID NO: 14324 - DNA, 25 bp, Artificial
  probe
  misc_feature (1)..(25): SEQ ID NO: 6201; WAN024995_at; Start 12; Stop 36
cctatccgtgatatactagtctaac

SEQ ID NO: 14325 - DNA, 25 bp, Artificial
  probe
  misc_feature (1)..(25): SEQ ID NO: 6201; WAN024995_at; Start 3; Stop 27
aaagccgagcctatccgtgatatac

SEQ ID NO: 14326 - DNA, 25 bp, Artificial
  probe
  misc_feature (1)..(25): SEQ ID NO: 6201; WAN024995_at; Start 1; Stop 25
tgaaagccgagcctatccgtgatat

SEQ ID NO: 14327 - DNA, 25 bp, Artificial
  probe
  misc_feature (1)..(25): SEQ ID NO: 6201; WAN024995_at; Start 9; Stop 33
gagcctatccgtgatatactagtct

SEQ ID NO: 14328 - DNA, 25 bp, Artificial
  probe
  misc_feature (1)..(25): SEQ ID NO: 6201; WAN024995_at; Start 17; Stop 41
ccgtgatatactagtctaacctagc

SEQ ID NO: 14329 - DNA, 25 bp, Artificial
  probe
  misc_feature (1)..(25): SEQ ID NO: 6201; WAN024995_at; Start 6; Stop 30
gccgagcctatccgtgatatactag

SEQ ID NO: 14330 - DNA, 25 bp, Artificial
  probe
  misc_feature (1)..(25): SEQ ID NO: 6201; WAN024995_at; Start 5; Stop 29
agccgagcctatccgtgatatacta

SEQ ID NO: 14331 - DNA, 25 bp, Artificial
  probe
  misc_feature (1)..(25): SEQ ID NO: 6201; WAN024995_at; Start 7; Stop 31
ccgagcctatccgtgatatactagt

SEQ ID NO: 14332 - DNA, 25 bp, Artificial
  probe
  misc_feature (1)..(25): SEQ ID NO: 6201; WAN024995_at; Start 4; Stop 28
aagccgagcctatccgtgatatact

SEQ ID NO: 14333 - DNA, 25 bp, Artificial
  probe
  misc_feature (1)..(25): SEQ ID NO: 6201; WAN024995_at; Start 19; Stop 43
gtgatatactagtctaacctagcag

SEQ ID NO: 14334 - DNA, 25 bp, Artificial
  probe
  misc_feature (1)..(25): SEQ ID NO: 6201; WAN024995_at; Start 8; Stop 32
cgagcctatccgtgatatactagtc

SEQ ID NO: 14335 - DNA, 25 bp, Artificial
  probe
  misc_feature (1)..(25): SEQ ID NO: 6201; WAN024995_at; Start 10; Stop 34
agcctatccgtgatatactagtcta

SEQ ID NO: 14336 - DNA, 25 bp, Artificial
  probe
  misc_feature (1)..(25): SEQ ID NO: 6201; WAN024995_at; Start 13; Stop 37
ctatccgtgatatactagtctaacc

SEQ ID NO: 14337 - DNA, 25 bp, Artificial
  probe
  misc_feature (1)..(25): SEQ ID NO: 6201; WAN024995_at; Start 18; Stop 42
cgtgatatactagtctaacctagca

SEQ ID NO: 14338 - DNA, 25 bp, Artificial
  probe
  misc_feature (1)..(25): SEQ ID NO: 6201; WAN024995_at; Start 14; Stop 38
tatccgtgatatactagtctaacct

SEQ ID NO: 14339 - DNA, 25 bp, Artificial
  probe
  misc_feature (1)..(25): SEQ ID NO: 6201; WAN024995_at; Start 11; Stop 35
gcctatccgtgatatactagtctaa

SEQ ID NO: 14340 - DNA, 25 bp, Artificial
  probe
  misc_feature (1)..(25): SEQ ID NO: 6104; WAN024996_at; Start 5; Stop 29
aatataaaaacctatcatatccagc

SEQ ID NO: 14341 - DNA, 25 bp, Artificial
  probe
  misc_feature (1)..(25): SEQ ID NO: 6104; WAN024996_at; Start 12; Stop 36
aaacctatcatatccagctttagag

SEQ ID NO: 14342 - DNA, 25 bp, Artificial
  probe
  misc_feature (1)..(25): SEQ ID NO: 6104; WAN024996_at; Start 11; Stop 35
aaaacctatcatatccagctttaga

SEQ ID NO: 14343 - DNA, 25 bp, Artificial
  probe
  misc_feature (1)..(25): SEQ ID NO: 6104; WAN024996_at; Start 18; Stop 42
atcatatccagctttagagcttgtg

SEQ ID NO: 14344 - DNA, 25 bp, Artificial
  probe
  misc_feature (1)..(25): SEQ ID NO: 6104; WAN024996_at; Start 44; Stop 68
gataggctttttgtatagagggtaa

SEQ ID NO: 14345 - DNA, 25 bp, Artificial
  probe
  misc_feature (1)..(25): SEQ ID NO: 6104; WAN024996_at; Start 42; Stop 66
gtgataggctttttgtatagagggt

SEQ ID NO: 14346 - DNA, 25 bp, Artificial
  probe
  misc_feature (1)..(25): SEQ ID NO: 6104; WAN024996_at; Start 29; Stop 53
ctttagagcttgtgtgataggcttt

SEQ ID NO: 14347 - DNA, 25 bp, Artificial
  probe
  misc_feature (1)..(25): SEQ ID NO: 6104; WAN024996_at; Start 9; Stop 33
taaaaacctatcatatccagcttta

SEQ ID NO: 14348 - DNA, 25 bp, Artificial
  probe
  misc_feature (1)..(25): SEQ ID NO: 6104; WAN024996_at; Start 43; Stop 67
tgataggctttttgtatagagggta

SEQ ID NO: 14349 - DNA, 25 bp, Artificial
  probe
  misc_feature (1)..(25): SEQ ID NO: 6104; WAN024996_at; Start 16; Stop 40
ctatcatatccagctttagagcttg

SEQ ID NO: 14350 - DNA, 25 bp, Artificial
  probe
  misc_feature (1)..(25): SEQ ID NO: 6104; WAN024996_at; Start 36; Stop 60
gcttgtgtgataggctttttgtata

SEQ ID NO: 14351 - DNA, 25 bp, Artificial
  probe
  misc_feature (1)..(25): SEQ ID NO: 6104; WAN024996_at; Start 46; Stop 70
taggctttttgtatagagggtaaga

SEQ ID NO: 14352 - DNA, 25 bp, Artificial
  probe
  misc_feature (1)..(25): SEQ ID NO: 6104; WAN024996_at; Start 10; Stop 34
aaaaacctatcatatccagctttag

SEQ ID NO: 14353 - DNA, 25 bp, Artificial
  probe
  misc_feature (1)..(25): SEQ ID NO: 6104; WAN024996_at; Start 7; Stop 31
tataaaaacctatcatatccagctt

SEQ ID NO: 14354 - DNA, 25 bp, Artificial
  probe
  misc_feature (1)..(25): SEQ ID NO: 6104; WAN024996_at; Start 19; Stop 43
tcatatccagctttagagcttgtgt

SEQ ID NO: 14355 - DNA, 25 bp, Artificial
  probe
  misc_feature (1)..(25): SEQ ID NO: 6104; WAN024996_at; Start 39; Stop 63
tgtgtgataggctttttgtatagag

SEQ ID NO: 14356 - DNA, 25 bp, Artificial
  probe
  misc_feature (1)..(25): SEQ ID NO: 6104; WAN024996_at; Start 13; Stop 37
aacctatcatatccagctttagagc

SEQ ID NO: 14357 - DNA, 25 bp, Artificial
  probe
  misc_feature (1)..(25): SEQ ID NO: 6104; WAN024996_at; Start 25; Stop 49
ccagctttagagcttgtgtgatagg

SEQ ID NO: 14358 - DNA, 25 bp, Artificial
  probe
  misc_feature (1)..(25): SEQ ID NO: 6104; WAN024996_at; Start 20; Stop 44
catatccagctttagagcttgtgtg

SEQ ID NO: 14359 - DNA, 25 bp, Artificial
  probe
  misc_feature (1)..(25): SEQ ID NO: 6104; WAN024996_at; Start 32; Stop 56
tagagcttgtgtgataggctttttg

SEQ ID NO: 14360 - DNA, 25 bp, Artificial
  probe
  misc_feature (1)..(25): SEQ ID NO: 6104; WAN024996_at; Start 28; Stop 52
gctttagagcttgtgtgataggctt

SEQ ID NO: 14361 - DNA, 25 bp, Artificial
  probe
  misc_feature (1)..(25): SEQ ID NO: 6104; WAN024996_at; Start 30; Stop 54
tttagagcttgtgtgataggctttt

SEQ ID NO: 14362 - DNA, 25 bp, Artificial
  probe
  misc_feature (1)..(25): SEQ ID NO: 6104; WAN024996_at; Start 15; Stop 39
cctatcatatccagctttagagctt

SEQ ID NO: 14363 - DNA, 25 bp, Artificial
  probe
  misc_feature (1)..(25): SEQ ID NO: 6104; WAN024996_at; Start 21; Stop 45
atatccagctttagagcttgtgtga

SEQ ID NO: 14364 - DNA, 25 bp, Artificial
  probe
  misc_feature (1)..(25): SEQ ID NO: 6104; WAN024996_at; Start 27; Stop 51
agctttagagcttgtgtgataggct

SEQ ID NO: 14365 - DNA, 25 bp, Artificial
  probe
  misc_feature (1)..(25): SEQ ID NO: 6104; WAN024996_at; Start 45; Stop 69
ataggctttttgtatagagggtaag

SEQ ID NO: 14366 - DNA, 25 bp, Artificial
  probe
  misc_feature (1)..(25): SEQ ID NO: 6104; WAN024996_at; Start 14; Stop 38
acctatcatatccagctttagagct

SEQ ID NO: 14367 - DNA, 25 bp, Artificial
  probe
  misc_feature (1)..(25): SEQ ID NO: 6104; WAN024996_at; Start 41; Stop 65
tgtgataggctttttgtatagaggg

SEQ ID NO: 14368 - DNA, 25 bp, Artificial
  probe
  misc_feature (1)..(25): SEQ ID NO: 6104; WAN024996_at; Start 26; Stop 50
cagctttagagcttgtgtgataggc

SEQ ID NO: 14369 - DNA, 25 bp, Artificial
  probe
  misc_feature (1)..(25): SEQ ID NO: 6104; WAN024996_at; Start 8; Stop 32
ataaaaacctatcatatccagcttt

SEQ ID NO: 14370 - DNA, 25 bp, Artificial
  probe
  misc_feature (1)..(25): SEQ ID NO: 6104; WAN024996_at; Start 34; Stop 58
gagcttgtgtgataggctttttgta

SEQ ID NO: 14371 - DNA, 25 bp, Artificial
  probe
  misc_feature (1)..(25): SEQ ID NO: 6104; WAN024996_at; Start 17; Stop 41
tatcatatccagctttagagcttgt

SEQ ID NO: 14372 - DNA, 25 bp, Artificial
  probe
  misc_feature (1)..(25): SEQ ID NO: 6104; WAN024996_at; Start 22; Stop 46
tatccagctttagagcttgtgtgat

SEQ ID NO: 14373 - DNA, 25 bp, Artificial
  probe
  misc_feature (1)..(25): SEQ ID NO: 6104; WAN024996_at; Start 24; Stop 48
tccagctttagagcttgtgtgatag

SEQ ID NO: 14374 - DNA, 25 bp, Artificial
  probe
  misc_feature (1)..(25): SEQ ID NO: 5987; WAN024997_at; Start 11; Stop 35
aatagaagaattttcaacgtaaatg

SEQ ID NO: 14375 - DNA, 25 bp, Artificial
  probe
  misc_feature (1)..(25): SEQ ID NO: 5987; WAN024997_at; Start 12; Stop 36
atagaagaattttcaacgtaaatgt

SEQ ID NO: 14376 - DNA, 25 bp, Artificial
  probe
  misc_feature (1)..(25): SEQ ID NO: 5987; WAN024997_at; Start 34; Stop 58
tgtggtataatcagtaagaatgtta

SEQ ID NO: 14377 - DNA, 25 bp, Artificial
  probe
  misc_feature (1)..(25): SEQ ID NO: 5987; WAN024997_at; Start 20; Stop 44
attttcaacgtaaatgtggtataat

SEQ ID NO: 14378 - DNA, 25 bp, Artificial
  probe
  misc_feature (1)..(25): SEQ ID NO: 5987; WAN024997_at; Start 41; Stop 65
taatcagtaagaatgttaaaagaaa

SEQ ID NO: 14379 - DNA, 25 bp, Artificial
  probe
  misc_feature (1)..(25): SEQ ID NO: 5987; WAN024997_at; Start 37; Stop 61
ggtataatcagtaagaatgttaaaa

SEQ ID NO: 14380 - DNA, 25 bp, Artificial
  probe
  misc_feature (1)..(25): SEQ ID NO: 5987; WAN024997_at; Start 14; Stop 38
agaagaattttcaacgtaaatgtgg

SEQ ID NO: 14381 - DNA, 25 bp, Artificial
  probe
  misc_feature (1)..(25): SEQ ID NO: 5987; WAN024997_at; Start 40; Stop 64
ataatcagtaagaatgttaaaagaa

SEQ ID NO: 14382 - DNA, 25 bp, Artificial
  probe
  misc_feature (1)..(25): SEQ ID NO: 5987; WAN024997_at; Start 35; Stop 59
gtggtataatcagtaagaatgttaa

SEQ ID NO: 14383 - DNA, 25 bp, Artificial
  probe
  misc_feature (1)..(25): SEQ ID NO: 5987; WAN024997_at; Start 38; Stop 62
gtataatcagtaagaatgttaaaag

SEQ ID NO: 14384 - DNA, 25 bp, Artificial
  probe
  misc_feature (1)..(25): SEQ ID NO: 5987; WAN024997_at; Start 50; Stop 74
agaatgttaaaagaaaaaggagcat

SEQ ID NO: 14385 - DNA, 25 bp, Artificial
  probe
  misc_feature (1)..(25): SEQ ID NO: 5987; WAN024997_at; Start 36; Stop 60
tggtataatcagtaagaatgttaaa

SEQ ID NO: 14386 - DNA, 25 bp, Artificial
  probe
  misc_feature (1)..(25): SEQ ID NO: 5987; WAN024997_at; Start 18; Stop 42
gaattttcaacgtaaatgtggtata

SEQ ID NO: 14387 - DNA, 25 bp, Artificial
  probe
  misc_feature (1)..(25): SEQ ID NO: 5987; WAN024997_at; Start 33; Stop 57
atgtggtataatcagtaagaatgtt

SEQ ID NO: 14388 - DNA, 25 bp, Artificial
  probe
  misc_feature (1)..(25): SEQ ID NO: 5987; WAN024997_at; Start 21; Stop 45
ttttcaacgtaaatgtggtataatc

SEQ ID NO: 14389 - DNA, 25 bp, Artificial
  probe
  misc_feature (1)..(25): SEQ ID NO: 5987; WAN024997_at; Start 32; Stop 56
aatgtggtataatcagtaagaatgt

SEQ ID NO: 14390 - DNA, 25 bp, Artificial
  probe
  misc_feature (1)..(25): SEQ ID NO: 5987; WAN024997_at; Start 51; Stop 75
gaatgttaaaagaaaaaggagcata

SEQ ID NO: 14391 - DNA, 25 bp, Artificial
  probe
  misc_feature (1)..(25): SEQ ID NO: 5987; WAN024997_at; Start 17; Stop 41
agaattttcaacgtaaatgtggtat

SEQ ID NO: 14392 - DNA, 25 bp, Artificial
  probe
  misc_feature (1)..(25): SEQ ID NO: 5987; WAN024997_at; Start 13; Stop 37
tagaagaattttcaacgtaaatgtg

SEQ ID NO: 14393 - DNA, 25 bp, Artificial
  probe
  misc_feature (1)..(25): SEQ ID NO: 5987; WAN024997_at; Start 39; Stop 63
tataatcagtaagaatgttaaaaga

SEQ ID NO: 14394 - DNA, 25 bp, Artificial
  probe
  misc_feature (1)..(25): SEQ ID NO: 6183; WAN024998_at; Start 19; Stop 43
acggtaatgatttgttataatactt

SEQ ID NO: 14395 - DNA, 25 bp, Artificial
  probe
  misc_feature (1)..(25): SEQ ID NO: 6183; WAN024998_at; Start 30; Stop 54
ttgttataatacttcaaaggaggaa

SEQ ID NO: 14396 - DNA, 25 bp, Artificial
  probe
  misc_feature (1)..(25): SEQ ID NO: 6183; WAN024998_at; Start 21; Stop 45
ggtaatgatttgttataatacttca

SEQ ID NO: 14397 - DNA, 25 bp, Artificial
  probe
  misc_feature (1)..(25): SEQ ID NO: 6183; WAN024998_at; Start 20; Stop 44
cggtaatgatttgttataatacttc

SEQ ID NO: 14398 - DNA, 25 bp, Artificial
  probe
  misc_feature (1)..(25): SEQ ID NO: 6183; WAN024998_at; Start 3; Stop 27
ttctgccattgtaattacggtaatg

SEQ ID NO: 14399 - DNA, 25 bp, Artificial
  probe
  misc_feature (1)..(25): SEQ ID NO: 6183; WAN024998_at; Start 10; Stop 34
attgtaattacggtaatgatttgtt

SEQ ID NO: 14400 - DNA, 25 bp, Artificial
  probe
  misc_feature (1)..(25): SEQ ID NO: 6183; WAN024998_at; Start 31; Stop 55
tgttataatacttcaaaggaggaaa

SEQ ID NO: 14401 - DNA, 25 bp, Artificial
  probe
  misc_feature (1)..(25): SEQ ID NO: 6183; WAN024998_at; Start 33; Stop 57
ttataatacttcaaaggaggaaatc

SEQ ID NO: 14402 - DNA, 25 bp, Artificial
  probe
  misc_feature (1)..(25): SEQ ID NO: 6183; WAN024998_at; Start 6; Stop 30
tgccattgtaattacggtaatgatt

SEQ ID NO: 14403 - DNA, 25 bp, Artificial
  probe
  misc_feature (1)..(25): SEQ ID NO: 6183; WAN024998_at; Start 25; Stop 49
atgatttgttataatacttcaaagg

SEQ ID NO: 14404 - DNA, 25 bp, Artificial
  probe
  misc_feature (1)..(25): SEQ ID NO: 6183; WAN024998_at; Start 1; Stop 25
tattctgccattgtaattacggtaa

SEQ ID NO: 14405 - DNA, 25 bp, Artificial
  probe
  misc_feature (1)..(25): SEQ ID NO: 6183; WAN024998_at; Start 9; Stop 33
cattgtaattacggtaatgatttgt

SEQ ID NO: 14406 - DNA, 25 bp, Artificial
  probe
  misc_feature (1)..(25): SEQ ID NO: 6183; WAN024998_at; Start 35; Stop 59
ataatacttcaaaggaggaaatcag

SEQ ID NO: 14407 - DNA, 25 bp, Artificial
  probe
  misc_feature (1)..(25): SEQ ID NO: 6183; WAN024998_at; Start 17; Stop 41
ttacggtaatgatttgttataatac

SEQ ID NO: 14408 - DNA, 25 bp, Artificial
  probe
  misc_feature (1)..(25): SEQ ID NO: 6183; WAN024998_at; Start 11; Stop 35
ttgtaattacggtaatgatttgtta

SEQ ID NO: 14409 - DNA, 25 bp, Artificial
  probe
  misc_feature (1)..(25): SEQ ID NO: 6183; WAN024998_at; Start 14; Stop 38
taattacggtaatgatttgttataa

SEQ ID NO: 14410 - DNA, 25 bp, Artificial
  probe
  misc_feature (1)..(25): SEQ ID NO: 6183; WAN024998_at; Start 28; Stop 52
atttgttataatacttcaaaggagg

SEQ ID NO: 14411 - DNA, 25 bp, Artificial
  probe
  misc_feature (1)..(25): SEQ ID NO: 6183; WAN024998_at; Start 2; Stop 26
attctgccattgtaattacggtaat

SEQ ID NO: 14412 - DNA, 25 bp, Artificial
  probe
  misc_feature (1)..(25): SEQ ID NO: 6183; WAN024998_at; Start 15; Stop 39
aattacggtaatgatttgttataat

SEQ ID NO: 14413 - DNA, 25 bp, Artificial
  probe
  misc_feature (1)..(25): SEQ ID NO: 6183; WAN024998_at; Start 8; Stop 32
ccattgtaattacggtaatgatttg

SEQ ID NO: 14414 - DNA, 25 bp, Artificial
  probe
  misc_feature (1)..(25): SEQ ID NO: 6183; WAN024998_at; Start 18; Stop 42
tacggtaatgatttgttataatact

SEQ ID NO: 14415 - DNA, 25 bp, Artificial
  probe
  misc_feature (1)..(25): SEQ ID NO: 6183; WAN024998_at; Start 13; Stop 37
gtaattacggtaatgatttgttata

SEQ ID NO: 14416 - DNA, 25 bp, Artificial
  probe
  misc_feature (1)..(25): SEQ ID NO: 6183; WAN024998_at; Start 4; Stop 28
tctgccattgtaattacggtaatga

SEQ ID NO: 14417 - DNA, 25 bp, Artificial
  probe
  misc_feature (1)..(25): SEQ ID NO: 6183; WAN024998_at; Start 34; Stop 58
tataatacttcaaaggaggaaatca

SEQ ID NO: 14418 - DNA, 25 bp, Artificial
  probe
  misc_feature (1)..(25): SEQ ID NO: 6183; WAN024998_at; Start 26; Stop 50
tgatttgttataatacttcaaagga

SEQ ID NO: 14419 - DNA, 25 bp, Artificial
  probe
  misc_feature (1)..(25): SEQ ID NO: 6183; WAN024998_at; Start 5; Stop 29
ctgccattgtaattacggtaatgat

SEQ ID NO: 14420 - DNA, 25 bp, Artificial
  probe
  misc_feature (1)..(25): SEQ ID NO: 6183; WAN024998_at; Start 12; Stop 36
tgtaattacggtaatgatttgttat

SEQ ID NO: 14421 - DNA, 25 bp, Artificial
  probe
  misc_feature (1)..(25): SEQ ID NO: 6183; WAN024998_at; Start 27; Stop 51
gatttgttataatacttcaaaggag

SEQ ID NO: 14422 - DNA, 25 bp, Artificial
  probe
  misc_feature (1)..(25): SEQ ID NO: 6183; WAN024998_at; Start 24; Stop 48
aatgatttgttataatacttcaaag

SEQ ID NO: 14423 - DNA, 25 bp, Artificial
  probe
  misc_feature (1)..(25): SEQ ID NO: 6183; WAN024998_at; Start 22; Stop 46
gtaatgatttgttataatacttcaa

SEQ ID NO: 14424 - DNA, 25 bp, Artificial
  probe
  misc_feature (1)..(25): SEQ ID NO: 6183; WAN024998_at; Start 16; Stop 40
attacggtaatgatttgttataata

SEQ ID NO: 14425 - DNA, 25 bp, Artificial
  probe
  misc_feature (1)..(25): SEQ ID NO: 6183; WAN024998_at; Start 7; Stop 31
gccattgtaattacggtaatgattt

SEQ ID NO: 14426 - DNA, 25 bp, Artificial
  probe
  misc_feature (1)..(25): SEQ ID NO: 6183; WAN024998_at; Start 29; Stop 53
tttgttataatacttcaaaggagga

SEQ ID NO: 14427 - DNA, 25 bp, Artificial
  probe
  misc_feature (1)..(25): SEQ ID NO: 6183; WAN024998_at; Start 23; Stop 47
taatgatttgttataatacttcaaa

SEQ ID NO: 14428 - DNA, 25 bp, Artificial
  probe
  misc_feature (1)..(25): SEQ ID NO: 6004; WAN024999_at; Start 216; Stop 240
gcagtattctaaaggtacttttaga

SEQ ID NO: 14429 - DNA, 25 bp, Artificial
  probe
  misc_feature (1)..(25): SEQ ID NO: 6004; WAN024999_at; Start 157; Stop 181
taaattgatttgttagagctctact

SEQ ID NO: 14430 - DNA, 25 bp, Artificial
  probe
  misc_feature (1)..(25): SEQ ID NO: 6004; WAN024999_at; Start 61; Stop 85
cgtttagtattcttcttgctaagaa

SEQ ID NO: 14431 - DNA, 25 bp, Artificial
  probe
  misc_feature (1)..(25): SEQ ID NO: 6004; WAN024999_at; Start 265; Stop 289
taatagaggtagctctttaatggag

SEQ ID NO: 14432 - DNA, 25 bp, Artificial
  probe
  misc_feature (1)..(25): SEQ ID NO: 6004; WAN024999_at; Start 249; Stop 273
aagcctttacatggtataatagagg

SEQ ID NO: 14433 - DNA, 25 bp, Artificial
  probe
  misc_feature (1)..(25): SEQ ID NO: 6004; WAN024999_at; Start 147; Stop 171
catccgtacttaaattgatttgtta

SEQ ID NO: 14434 - DNA, 25 bp, Artificial
  probe
  misc_feature (1)..(25): SEQ ID NO: 6004; WAN024999_at; Start 131; Stop 155
gagttgatttggtttacatccgtac

SEQ ID NO: 14435 - DNA, 25 bp, Artificial
  probe
  misc_feature (1)..(25): SEQ ID NO: 6004; WAN024999_at; Start 128; Stop 152
ttagagttgatttggtttacatccg

SEQ ID NO: 14436 - DNA, 25 bp, Artificial
  probe
  misc_feature (1)..(25): SEQ ID NO: 6004; WAN024999_at; Start 75; Stop 99
cttgctaagaaactaaatttgttcg

SEQ ID NO: 14437 - DNA, 25 bp, Artificial
  probe
  misc_feature (1)..(25): SEQ ID NO: 6004; WAN024999_at; Start 223; Stop 247
tctaaaggtacttttagatgaaata

SEQ ID NO: 14438 - DNA, 25 bp, Artificial
  probe
  misc_feature (1)..(25): SEQ ID NO: 6004; WAN024999_at; Start 200; Stop 224
tttcaaggataaataagcagtattc

SEQ ID NO: 14439 - DNA, 25 bp, Artificial
  probe
  misc_feature (1)..(25): SEQ ID NO: 6004; WAN024999_at; Start 67; Stop 91
gtattcttcttgctaagaaactaaa

SEQ ID NO: 14440 - DNA, 25 bp, Artificial
  probe
  misc_feature (1)..(25): SEQ ID NO: 6004; WAN024999_at; Start 203; Stop 227
caaggataaataagcagtattctaa

SEQ ID NO: 14441 - DNA, 25 bp, Artificial
  probe
  misc_feature (1)..(25): SEQ ID NO: 6004; WAN024999_at; Start 135; Stop 159
tgatttggtttacatccgtacttaa

SEQ ID NO: 14442 - DNA, 25 bp, Artificial
  probe
  misc_feature (1)..(25): SEQ ID NO: 6004; WAN024999_at; Start 34; Stop 58
cattattcttaattcacaaaaaacg

SEQ ID NO: 14443 - DNA, 25 bp, Artificial
  probe
  misc_feature (1)..(25): SEQ ID NO: 6004; WAN024999_at; Start 256; Stop 280
tacatggtataatagaggtagctct

SEQ ID NO: 14444 - DNA, 25 bp, Artificial
  probe
  misc_feature (1)..(25): SEQ ID NO: 6004; WAN024999_at; Start 253; Stop 277
ctttacatggtataatagaggtagc

SEQ ID NO: 14445 - DNA, 25 bp, Artificial
  probe
  misc_feature (1)..(25): SEQ ID NO: 6004; WAN024999_at; Start 268; Stop 292
tagaggtagctctttaatggaggtg

SEQ ID NO: 14446 - DNA, 25 bp, Artificial
  probe
  misc_feature (1)..(25): SEQ ID NO: 6004; WAN024999_at; Start 195; Stop 219
ttcaatttcaaggataaataagcag

SEQ ID NO: 14447 - DNA, 25 bp, Artificial
  probe
  misc_feature (1)..(25): SEQ ID NO: 6004; WAN024999_at; Start 167; Stop 191
tgttagagctctacttttattaaaa

SEQ ID NO: 14448 - DNA, 25 bp, Artificial
  probe
  misc_feature (1)..(25): SEQ ID NO: 6004; WAN024999_at; Start 151; Stop 175
cgtacttaaattgatttgttagagc

SEQ ID NO: 14449 - DNA, 25 bp, Artificial
  probe
  misc_feature (1)..(25): SEQ ID NO: 6004; WAN024999_at; Start 246; Stop 270
taaaagcctttacatggtataatag

SEQ ID NO: 14450 - DNA, 25 bp, Artificial
  probe
  misc_feature (1)..(25): SEQ ID NO: 6004; WAN024999_at; Start 113; Stop 137
gtaaatctatttttgttagagttga

SEQ ID NO: 14451 - DNA, 25 bp, Artificial
  probe
  misc_feature (1)..(25): SEQ ID NO: 6004; WAN024999_at; Start 1; Stop 25
aatagttagacaaaaaatgttgata

SEQ ID NO: 14452 - DNA, 25 bp, Artificial
  probe
  misc_feature (1)..(25): SEQ ID NO: 6004; WAN024999_at; Start 57; Stop 81
cgaacgtttagtattcttcttgcta

SEQ ID NO: 14453 - DNA, 25 bp, Artificial
  probe
  misc_feature (1)..(25): SEQ ID NO: 6004; WAN024999_at; Start 270; Stop 294
gaggtagctctttaatggaggtgtt

SEQ ID NO: 14454 - DNA, 25 bp, Artificial
  probe
  misc_feature (1)..(25): SEQ ID NO: 6004; WAN024999_at; Start 273; Stop 297
gtagctctttaatggaggtgtttga

SEQ ID NO: 14455 - DNA, 25 bp, Artificial
  probe
  misc_feature (1)..(25): SEQ ID NO: 6004; WAN024999_at; Start 239; Stop 263
gatgaaataaaagcctttacatggt

SEQ ID NO: 14456 - DNA, 25 bp, Artificial
  probe
  misc_feature (1)..(25): SEQ ID NO: 6004; WAN024999_at; Start 258; Stop 282
catggtataatagaggtagctcttt

SEQ ID NO: 14457 - DNA, 25 bp, Artificial
  probe
  misc_feature (1)..(25): SEQ ID NO: 6004; WAN024999_at; Start 209; Stop 233
taaataagcagtattctaaaggtac

SEQ ID NO: 14458 - DNA, 25 bp, Artificial
  probe
  misc_feature (1)..(25): SEQ ID NO: 6004; WAN024999_at; Start 140; Stop 164
tggtttacatccgtacttaaattga

SEQ ID NO: 14459 - DNA, 25 bp, Artificial
  probe
  misc_feature (1)..(25): SEQ ID NO: 6004; WAN024999_at; Start 251; Stop 275
gcctttacatggtataatagaggta

SEQ ID NO: 14460 - DNA, 25 bp, Artificial
  probe
  misc_feature (1)..(25): SEQ ID NO: 6004; WAN024999_at; Start 235; Stop 259
tttagatgaaataaaagcctttaca

SEQ ID NO: 14461 - DNA, 25 bp, Artificial
  probe
  misc_feature (1)..(25): SEQ ID NO: 6004; WAN024999_at; Start 197; Stop 221
caatttcaaggataaataagcagta

SEQ ID NO: 14462 - DNA, 25 bp, Artificial
  probe
  misc_feature (1)..(25): SEQ ID NO: 6142; WAN02499A_at; Start 3; Stop 27
agtagcaggtttgaataactcacat

SEQ ID NO: 14463 - DNA, 25 bp, Artificial
  probe
  misc_feature (1)..(25): SEQ ID NO: 6142; WAN02499A_at; Start 19; Stop 43
aactcacattcaaaaagccgtataa

SEQ ID NO: 14464 - DNA, 25 bp, Artificial
  probe
  misc_feature (1)..(25): SEQ ID NO: 6142; WAN02499A_at; Start 2; Stop 26
tagtagcaggtttgaataactcaca

SEQ ID NO: 14465 - DNA, 25 bp, Artificial
  probe
  misc_feature (1)..(25): SEQ ID NO: 6142; WAN02499A_at; Start 15; Stop 39
gaataactcacattcaaaaagccgt

SEQ ID NO: 14466 - DNA, 25 bp, Artificial
  probe
  misc_feature (1)..(25): SEQ ID NO: 6142; WAN02499A_at; Start 9; Stop 33
aggtttgaataactcacattcaaaa

SEQ ID NO: 14467 - DNA, 25 bp, Artificial
  probe
  misc_feature (1)..(25): SEQ ID NO: 6142; WAN02499A_at; Start 18; Stop 42
taactcacattcaaaaagccgtata

SEQ ID NO: 14468 - DNA, 25 bp, Artificial
  probe
  misc_feature (1)..(25): SEQ ID NO: 6142; WAN02499A_at; Start 22; Stop 46
tcacattcaaaaagccgtataaagc

SEQ ID NO: 14469 - DNA, 25 bp, Artificial
  probe
  misc_feature (1)..(25): SEQ ID NO: 6142; WAN02499A_at; Start 4; Stop 28
gtagcaggtttgaataactcacatt

SEQ ID NO: 14470 - DNA, 25 bp, Artificial
  probe
  misc_feature (1)..(25): SEQ ID NO: 6142; WAN02499A_at; Start 21; Stop 45
ctcacattcaaaaagccgtataaag

SEQ ID NO: 14471 - DNA, 25 bp, Artificial
  probe
  misc_feature (1)..(25): SEQ ID NO: 6142; WAN02499A_at; Start 11; Stop 35
gtttgaataactcacattcaaaaag

SEQ ID NO: 14472 - DNA, 25 bp, Artificial
  probe
  misc_feature (1)..(25): SEQ ID NO: 6142; WAN02499A_at; Start 5; Stop 29
tagcaggtttgaataactcacattc

SEQ ID NO: 14473 - DNA, 25 bp, Artificial
  probe
  misc_feature (1)..(25): SEQ ID NO: 6142; WAN02499A_at; Start 6; Stop 30
agcaggtttgaataactcacattca

SEQ ID NO: 14474 - DNA, 25 bp, Artificial
  probe
  misc_feature (1)..(25): SEQ ID NO: 6142; WAN02499A_at; Start 14; Stop 38
tgaataactcacattcaaaaagccg

SEQ ID NO: 14475 - DNA, 25 bp, Artificial
  probe
  misc_feature (1)..(25): SEQ ID NO: 6142; WAN02499A_at; Start 12; Stop 36
tttgaataactcacattcaaaaagc

SEQ ID NO: 14476 - DNA, 25 bp, Artificial
  probe
  misc_feature (1)..(25): SEQ ID NO: 6142; WAN02499A_at; Start 20; Stop 44
actcacattcaaaaagccgtataaa

SEQ ID NO: 14477 - DNA, 25 bp, Artificial
  probe
  misc_feature (1)..(25): SEQ ID NO: 6142; WAN02499A_at; Start 1; Stop 25
gtagtagcaggtttgaataactcac

SEQ ID NO: 14478 - DNA, 25 bp, Artificial
  probe
  misc_feature (1)..(25): SEQ ID NO: 6142; WAN02499A_at; Start 10; Stop 34
ggtttgaataactcacattcaaaaa

SEQ ID NO: 14479 - DNA, 25 bp, Artificial
  probe
  misc_feature (1)..(25): SEQ ID NO: 6142; WAN02499A_at; Start 13; Stop 37
ttgaataactcacattcaaaaagcc

SEQ ID NO: 14480 - DNA, 25 bp, Artificial
  probe
  misc_feature (1)..(25): SEQ ID NO: 6142; WAN02499A_at; Start 23; Stop 47
cacattcaaaaagccgtataaagcg

SEQ ID NO: 14481 - DNA, 25 bp, Artificial
  probe
  misc_feature (1)..(25): SEQ ID NO: 6142; WAN02499A_at; Start 16; Stop 40
aataactcacattcaaaaagccgta

SEQ ID NO: 14482 - DNA, 25 bp, Artificial
  probe
  misc_feature (1)..(25): SEQ ID NO: 6142; WAN02499A_at; Start 8; Stop 32
caggtttgaataactcacattcaaa

SEQ ID NO: 14483 - DNA, 25 bp, Artificial
  probe
  misc_feature (1)..(25): SEQ ID NO: 6142; WAN02499A_at; Start 7; Stop 31
gcaggtttgaataactcacattcaa

SEQ ID NO: 14484 - DNA, 25 bp, Artificial
  probe
  misc_feature (1)..(25): SEQ ID NO: 6142; WAN02499A_at; Start 17; Stop 41
ataactcacattcaaaaagccgtat

SEQ ID NO: 14485 - DNA, 25 bp, Artificial
  probe
  misc_feature (1)..(25): SEQ ID NO: 6028; WAN02499B_at; Start 26; Stop 50
agagatgatggtcacctcttgtcaa

SEQ ID NO: 14486 - DNA, 25 bp, Artificial
  probe
  misc_feature (1)..(25): SEQ ID NO: 6028; WAN02499B_at; Start 15; Stop 39
acaaaaaaacaagagatgatggtca

SEQ ID NO: 14487 - DNA, 25 bp, Artificial
  probe
  misc_feature (1)..(25): SEQ ID NO: 6028; WAN02499B_at; Start 14; Stop 38
cacaaaaaaacaagagatgatggtc

SEQ ID NO: 14488 - DNA, 25 bp, Artificial
  probe
  misc_feature (1)..(25): SEQ ID NO: 6028; WAN02499B_at; Start 24; Stop 48
caagagatgatggtcacctcttgtc

SEQ ID NO: 14489 - DNA, 25 bp, Artificial
  probe
  misc_feature (1)..(25): SEQ ID NO: 6028; WAN02499B_at; Start 9; Stop 33
tgtaccacaaaaaaacaagagatga

SEQ ID NO: 14490 - DNA, 25 bp, Artificial
  probe
  misc_feature (1)..(25): SEQ ID NO: 6028; WAN02499B_at; Start 31; Stop 55
tgatggtcacctcttgtcaagaatg

SEQ ID NO: 14491 - DNA, 25 bp, Artificial
  probe
  misc_feature (1)..(25): SEQ ID NO: 6028; WAN02499B_at; Start 12; Stop 36
accacaaaaaaacaagagatgatgg

SEQ ID NO: 14492 - DNA, 25 bp, Artificial
  probe
  misc_feature (1)..(25): SEQ ID NO: 6028; WAN02499B_at; Start 33; Stop 57
atggtcacctcttgtcaagaatgca

SEQ ID NO: 14493 - DNA, 25 bp, Artificial
  probe
  misc_feature (1)..(25): SEQ ID NO: 6028; WAN02499B_at; Start 19; Stop 43
aaaaacaagagatgatggtcacctc

SEQ ID NO: 14494 - DNA, 25 bp, Artificial
  probe
  misc_feature (1)..(25): SEQ ID NO: 6028; WAN02499B_at; Start 17; Stop 41
aaaaaaacaagagatgatggtcacc

SEQ ID NO: 14495 - DNA, 25 bp, Artificial
  probe
  misc_feature (1)..(25): SEQ ID NO: 6028; WAN02499B_at; Start 18; Stop 42
aaaaaacaagagatgatggtcacct

SEQ ID NO: 14496 - DNA, 25 bp, Artificial
  probe
  misc_feature (1)..(25): SEQ ID NO: 6028; WAN02499B_at; Start 20; Stop 44
aaaacaagagatgatggtcacctct

SEQ ID NO: 14497 - DNA, 25 bp, Artificial
  probe
  misc_feature (1)..(25): SEQ ID NO: 6028; WAN02499B_at; Start 27; Stop 51
gagatgatggtcacctcttgtcaag

SEQ ID NO: 14498 - DNA, 25 bp, Artificial
  probe
  misc_feature (1)..(25): SEQ ID NO: 6028; WAN02499B_at; Start 8; Stop 32
ttgtaccacaaaaaaacaagagatg

SEQ ID NO: 14499 - DNA, 25 bp, Artificial
  probe
  misc_feature (1)..(25): SEQ ID NO: 6028; WAN02499B_at; Start 21; Stop 45
aaacaagagatgatggtcacctctt

SEQ ID NO: 14500 - DNA, 25 bp, Artificial
  probe
  misc_feature (1)..(25): SEQ ID NO: 6028; WAN02499B_at; Start 34; Stop 58
tggtcacctcttgtcaagaatgcaa

SEQ ID NO: 14501 - DNA, 25 bp, Artificial
  probe
  misc_feature (1)..(25): SEQ ID NO: 6028; WAN02499B_at; Start 16; Stop 40
caaaaaaacaagagatgatggtcac

SEQ ID NO: 14502 - DNA, 25 bp, Artificial
  probe
  misc_feature (1)..(25): SEQ ID NO: 6028; WAN02499B_at; Start 32; Stop 56
gatggtcacctcttgtcaagaatgc

SEQ ID NO: 14503 - DNA, 25 bp, Artificial
  probe
  misc_feature (1)..(25): SEQ ID NO: 6028; WAN02499B_at; Start 25; Stop 49
aagagatgatggtcacctcttgtca

SEQ ID NO: 14504 - DNA, 25 bp, Artificial
  probe
  misc_feature (1)..(25): SEQ ID NO: 6028; WAN02499B_at; Start 22; Stop 46
aacaagagatgatggtcacctcttg

SEQ ID NO: 14505 - DNA, 25 bp, Artificial
  probe
  misc_feature (1)..(25): SEQ ID NO: 6028; WAN02499B_at; Start 7; Stop 31
attgtaccacaaaaaaacaagagat

SEQ ID NO: 14506 - DNA, 25 bp, Artificial
  probe
  misc_feature (1)..(25): SEQ ID NO: 6028; WAN02499B_at; Start 23; Stop 47
acaagagatgatggtcacctcttgt

SEQ ID NO: 14507 - DNA, 25 bp, Artificial
  probe
  misc_feature (1)..(25): SEQ ID NO: 6028; WAN02499B_at; Start 30; Stop 54
atgatggtcacctcttgtcaagaat

SEQ ID NO: 14508 - DNA, 25 bp, Artificial
  probe
  misc_feature (1)..(25): SEQ ID NO: 6028; WAN02499B_at; Start 29; Stop 53
gatgatggtcacctcttgtcaagaa

SEQ ID NO: 14509 - DNA, 25 bp, Artificial
  probe
  misc_feature (1)..(25): SEQ ID NO: 6028; WAN02499B_at; Start 11; Stop 35
taccacaaaaaaacaagagatgatg

SEQ ID NO: 14510 - DNA, 25 bp, Artificial
  probe
  misc_feature (1)..(25): SEQ ID NO: 6028; WAN02499B_at; Start 6; Stop 30
tattgtaccacaaaaaaacaagaga

SEQ ID NO: 14511 - DNA, 25 bp, Artificial
  probe
  misc_feature (1)..(25): SEQ ID NO: 6028; WAN02499B_at; Start 13; Stop 37
ccacaaaaaaacaagagatgatggt

SEQ ID NO: 14512 - DNA, 25 bp, Artificial
  probe
  misc_feature (1)..(25): SEQ ID NO: 6028; WAN02499B_at; Start 10; Stop 34
gtaccacaaaaaaacaagagatgat

SEQ ID NO: 14513 - DNA, 25 bp, Artificial
  probe
  misc_feature (1)..(25): SEQ ID NO: 6028; WAN02499B_at; Start 28; Stop 52
agatgatggtcacctcttgtcaaga

SEQ ID NO: 14514 - DNA, 25 bp, Artificial
  probe
  misc_feature (1)..(25): SEQ ID NO: 6026; WAN02499C_at; Start 25; Stop 49
ccatatcggacttattagtgttagt

SEQ ID NO: 14515 - DNA, 25 bp, Artificial
  probe
  misc_feature (1)..(25): SEQ ID NO: 6026; WAN02499C_at; Start 2; Stop 26
gcaactaataggtcaagaatttacc

SEQ ID NO: 14516 - DNA, 25 bp, Artificial
  probe
  misc_feature (1)..(25): SEQ ID NO: 6026; WAN02499C_at; Start 13; Stop 37
gtcaagaatttaccatatcggactt

SEQ ID NO: 14517 - DNA, 25 bp, Artificial
  probe
  misc_feature (1)..(25): SEQ ID NO: 6026; WAN02499C_at; Start 21; Stop 45
tttaccatatcggacttattagtgt

SEQ ID NO: 14518 - DNA, 25 bp, Artificial
  probe
  misc_feature (1)..(25): SEQ ID NO: 6026; WAN02499C_at; Start 23; Stop 47
taccatatcggacttattagtgtta

SEQ ID NO: 14519 - DNA, 25 bp, Artificial
  probe
  misc_feature (1)..(25): SEQ ID NO: 6026; WAN02499C_at; Start 20; Stop 44
atttaccatatcggacttattagtg

SEQ ID NO: 14520 - DNA, 25 bp, Artificial
  probe
  misc_feature (1)..(25): SEQ ID NO: 6026; WAN02499C_at; Start 9; Stop 33
ataggtcaagaatttaccatatcgg

SEQ ID NO: 14521 - DNA, 25 bp, Artificial
  probe
  misc_feature (1)..(25): SEQ ID NO: 6026; WAN02499C_at; Start 17; Stop 41
agaatttaccatatcggacttatta

SEQ ID NO: 14522 - DNA, 25 bp, Artificial
  probe
  misc_feature (1)..(25): SEQ ID NO: 6026; WAN02499C_at; Start 19; Stop 43
aatttaccatatcggacttattagt

SEQ ID NO: 14523 - DNA, 25 bp, Artificial
  probe
  misc_feature (1)..(25): SEQ ID NO: 6026; WAN02499C_at; Start 3; Stop 27
caactaataggtcaagaatttacca

SEQ ID NO: 14524 - DNA, 25 bp, Artificial
  probe
  misc_feature (1)..(25): SEQ ID NO: 6026; WAN02499C_at; Start 5; Stop 29
actaataggtcaagaatttaccata

SEQ ID NO: 14525 - DNA, 25 bp, Artificial
  probe
  misc_feature (1)..(25): SEQ ID NO: 6026; WAN02499C_at; Start 8; Stop 32
aataggtcaagaatttaccatatcg

SEQ ID NO: 14526 - DNA, 25 bp, Artificial
  probe
  misc_feature (1)..(25): SEQ ID NO: 6026; WAN02499C_at; Start 26; Stop 50
catatcggacttattagtgttagta

SEQ ID NO: 14527 - DNA, 25 bp, Artificial
  probe
  misc_feature (1)..(25): SEQ ID NO: 6026; WAN02499C_at; Start 12; Stop 36
ggtcaagaatttaccatatcggact

SEQ ID NO: 14528 - DNA, 25 bp, Artificial
  probe
  misc_feature (1)..(25): SEQ ID NO: 6026; WAN02499C_at; Start 7; Stop 31
taataggtcaagaatttaccatatc

SEQ ID NO: 14529 - DNA, 25 bp, Artificial
  probe
  misc_feature (1)..(25): SEQ ID NO: 6026; WAN02499C_at; Start 28; Stop 52
tatcggacttattagtgttagtagg

SEQ ID NO: 14530 - DNA, 25 bp, Artificial
  probe
  misc_feature (1)..(25): SEQ ID NO: 6026; WAN02499C_at; Start 22; Stop 46
ttaccatatcggacttattagtgtt

SEQ ID NO: 14531 - DNA, 25 bp, Artificial
  probe
  misc_feature (1)..(25): SEQ ID NO: 6026; WAN02499C_at; Start 1; Stop 25
agcaactaataggtcaagaatttac

SEQ ID NO: 14532 - DNA, 25 bp, Artificial
  probe
  misc_feature (1)..(25): SEQ ID NO: 6026; WAN02499C_at; Start 15; Stop 39
caagaatttaccatatcggacttat

SEQ ID NO: 14533 - DNA, 25 bp, Artificial
  probe
  misc_feature (1)..(25): SEQ ID NO: 6026; WAN02499C_at; Start 10; Stop 34
taggtcaagaatttaccatatcgga

SEQ ID NO: 14534 - DNA, 25 bp, Artificial
  probe
  misc_feature (1)..(25): SEQ ID NO: 6026; WAN02499C_at; Start 6; Stop 30
ctaataggtcaagaatttaccatat

SEQ ID NO: 14535 - DNA, 25 bp, Artificial
  probe
  misc_feature (1)..(25): SEQ ID NO: 6026; WAN02499C_at; Start 24; Stop 48
accatatcggacttattagtgttag

SEQ ID NO: 14536 - DNA, 25 bp, Artificial
  probe
  misc_feature (1)..(25): SEQ ID NO: 6026; WAN02499C_at; Start 14; Stop 38
tcaagaatttaccatatcggactta

SEQ ID NO: 14537 - DNA, 25 bp, Artificial
  probe
  misc_feature (1)..(25): SEQ ID NO: 6026; WAN02499C_at; Start 29; Stop 53
atcggacttattagtgttagtaggg

SEQ ID NO: 14538 - DNA, 25 bp, Artificial
  probe
  misc_feature (1)..(25): SEQ ID NO: 6026; WAN02499C_at; Start 30; Stop 54
tcggacttattagtgttagtaggga

SEQ ID NO: 14539 - DNA, 25 bp, Artificial
  probe
  misc_feature (1)..(25): SEQ ID NO: 6026; WAN02499C_at; Start 11; Stop 35
aggtcaagaatttaccatatcggac

SEQ ID NO: 14540 - DNA, 25 bp, Artificial
  probe
  misc_feature (1)..(25): SEQ ID NO: 6026; WAN02499C_at; Start 33; Stop 57
gacttattagtgttagtagggaaga

SEQ ID NO: 14541 - DNA, 25 bp, Artificial
  probe
  misc_feature (1)..(25): SEQ ID NO: 6026; WAN02499C_at; Start 27; Stop 51
atatcggacttattagtgttagtag

SEQ ID NO: 14542 - DNA, 25 bp, Artificial
  probe
  misc_feature (1)..(25): SEQ ID NO: 6026; WAN02499C_at; Start 4; Stop 28
aactaataggtcaagaatttaccat

SEQ ID NO: 14543 - DNA, 25 bp, Artificial
  probe
  misc_feature (1)..(25): SEQ ID NO: 6026; WAN02499C_at; Start 16; Stop 40
aagaatttaccatatcggacttatt

SEQ ID NO: 14544 - DNA, 25 bp, Artificial
  probe
  misc_feature (1)..(25): SEQ ID NO: 6026; WAN02499C_at; Start 18; Stop 42
gaatttaccatatcggacttattag

SEQ ID NO: 14545 - DNA, 25 bp, Artificial
  probe
  misc_feature (1)..(25): SEQ ID NO: 5981; WAN02499D_at; Start 135; Stop 159
tatatttggttagtactggttgcat

SEQ ID NO: 14546 - DNA, 25 bp, Artificial
  probe
  misc_feature (1)..(25): SEQ ID NO: 5981; WAN02499D_at; Start 107; Stop 131
gaataaaattcgttaatggcatcta

SEQ ID NO: 14547 - DNA, 25 bp, Artificial
  probe
  misc_feature (1)..(25): SEQ ID NO: 5981; WAN02499D_at; Start 133; Stop 157
tttatatttggttagtactggttgc

SEQ ID NO: 14548 - DNA, 25 bp, Artificial
  probe
  misc_feature (1)..(25): SEQ ID NO: 5981; WAN02499D_at; Start 126; Stop 150
catctattttatatttggttagtac

SEQ ID NO: 14549 - DNA, 25 bp, Artificial
  probe
  misc_feature (1)..(25): SEQ ID NO: 5981; WAN02499D_at; Start 4; Stop 28
agagagtttcggctctctttttgct

SEQ ID NO: 14550 - DNA, 25 bp, Artificial
  probe
  misc_feature (1)..(25): SEQ ID NO: 5981; WAN02499D_at; Start 110; Stop 134
taaaattcgttaatggcatctattt

SEQ ID NO: 14551 - DNA, 25 bp, Artificial
  probe
  misc_feature (1)..(25): SEQ ID NO: 5981; WAN02499D_at; Start 27; Stop 51
ctaggaattttacaatagtttgaat

SEQ ID NO: 14552 - DNA, 25 bp, Artificial
  probe
  misc_feature (1)..(25): SEQ ID NO: 5981; WAN02499D_at; Start 50; Stop 74
attgctttttagttaacaccatctc

SEQ ID NO: 14553 - DNA, 25 bp, Artificial
  probe
  misc_feature (1)..(25): SEQ ID NO: 5981; WAN02499D_at; Start 105; Stop 129
ttgaataaaattcgttaatggcatc

SEQ ID NO: 14554 - DNA, 25 bp, Artificial
  probe
  misc_feature (1)..(25): SEQ ID NO: 5981; WAN02499D_at; Start 31; Stop 55
gaattttacaatagtttgaattgct

SEQ ID NO: 14555 - DNA, 25 bp, Artificial
  probe
  misc_feature (1)..(25): SEQ ID NO: 5981; WAN02499D_at; Start 69; Stop 93
catctcttttacttgtatagtatga

SEQ ID NO: 14556 - DNA, 25 bp, Artificial
  probe
  misc_feature (1)..(25): SEQ ID NO: 5981; WAN02499D_at; Start 103; Stop 127
acttgaataaaattcgttaatggca

SEQ ID NO: 14557 - DNA, 25 bp, Artificial
  probe
  misc_feature (1)..(25): SEQ ID NO: 5981; WAN02499D_at; Start 79; Stop 103
acttgtatagtatgaatgggaaaaa

SEQ ID NO: 14558 - DNA, 25 bp, Artificial
  probe
  misc_feature (1)..(25): SEQ ID NO: 5981; WAN02499D_at; Start 134; Stop 158
ttatatttggttagtactggttgca

SEQ ID NO: 14559 - DNA, 25 bp, Artificial
  probe
  misc_feature (1)..(25): SEQ ID NO: 5981; WAN02499D_at; Start 123; Stop 147
tggcatctattttatatttggttag

SEQ ID NO: 14560 - DNA, 25 bp, Artificial
  probe
  misc_feature (1)..(25): SEQ ID NO: 5981; WAN02499D_at; Start 30; Stop 54
ggaattttacaatagtttgaattgc

SEQ ID NO: 14561 - DNA, 25 bp, Artificial
  probe
  misc_feature (1)..(25): SEQ ID NO: 5981; WAN02499D_at; Start 52; Stop 76
tgctttttagttaacaccatctctt

SEQ ID NO: 14562 - DNA, 25 bp, Artificial
  probe
  misc_feature (1)..(25): SEQ ID NO: 5981; WAN02499D_at; Start 48; Stop 72
gaattgctttttagttaacaccatc

SEQ ID NO: 14563 - DNA, 25 bp, Artificial
  probe
  misc_feature (1)..(25): SEQ ID NO: 5981; WAN02499D_at; Start 106; Stop 130
tgaataaaattcgttaatggcatct

SEQ ID NO: 14564 - DNA, 25 bp, Artificial
  probe
  misc_feature (1)..(25): SEQ ID NO: 5981; WAN02499D_at; Start 140; Stop 164
ttggttagtactggttgcatattat

SEQ ID NO: 14565 - DNA, 25 bp, Artificial
  probe
  misc_feature (1)..(25): SEQ ID NO: 5981; WAN02499D_at; Start 46; Stop 70
ttgaattgctttttagttaacacca

SEQ ID NO: 14566 - DNA, 25 bp, Artificial
  probe
  misc_feature (1)..(25): SEQ ID NO: 5981; WAN02499D_at; Start 120; Stop 144
taatggcatctattttatatttggt

SEQ ID NO: 14567 - DNA, 25 bp, Artificial
  probe
  misc_feature (1)..(25): SEQ ID NO: 5981; WAN02499D_at; Start 74; Stop 98
cttttacttgtatagtatgaatggg

SEQ ID NO: 14568 - DNA, 25 bp, Artificial
  probe
  misc_feature (1)..(25): SEQ ID NO: 5981; WAN02499D_at; Start 51; Stop 75
ttgctttttagttaacaccatctct

SEQ ID NO: 14569 - DNA, 25 bp, Artificial
  probe
  misc_feature (1)..(25): SEQ ID NO: 5981; WAN02499D_at; Start 64; Stop 88
aacaccatctcttttacttgtatag

SEQ ID NO: 14570 - DNA, 25 bp, Artificial
  probe
  misc_feature (1)..(25): SEQ ID NO: 5981; WAN02499D_at; Start 47; Stop 71
tgaattgctttttagttaacaccat

SEQ ID NO: 14571 - DNA, 25 bp, Artificial
  probe
  misc_feature (1)..(25): SEQ ID NO: 5981; WAN02499D_at; Start 66; Stop 90
caccatctcttttacttgtatagta

SEQ ID NO: 14572 - DNA, 25 bp, Artificial
  probe
  misc_feature (1)..(25): SEQ ID NO: 5981; WAN02499D_at; Start 108; Stop 132
aataaaattcgttaatggcatctat

SEQ ID NO: 14573 - DNA, 25 bp, Artificial
  probe
  misc_feature (1)..(25): SEQ ID NO: 5981; WAN02499D_at; Start 112; Stop 136
aaattcgttaatggcatctatttta

SEQ ID NO: 14574 - DNA, 25 bp, Artificial
  probe
  misc_feature (1)..(25): SEQ ID NO: 5981; WAN02499D_at; Start 78; Stop 102
tacttgtatagtatgaatgggaaaa

SEQ ID NO: 14575 - DNA, 25 bp, Artificial
  probe
  misc_feature (1)..(25): SEQ ID NO: 5981; WAN02499D_at; Start 139; Stop 163
tttggttagtactggttgcatatta

SEQ ID NO: 14576 - DNA, 25 bp, Artificial
  probe
  misc_feature (1)..(25): SEQ ID NO: 5981; WAN02499D_at; Start 59; Stop 83
tagttaacaccatctcttttacttg

SEQ ID NO: 14577 - DNA, 25 bp, Artificial
  probe
  misc_feature (1)..(25): SEQ ID NO: 5981; WAN02499D_at; Start 61; Stop 85
gttaacaccatctcttttacttgta

SEQ ID NO: 14578 - DNA, 25 bp, Artificial
  probe
  misc_feature (1)..(25): SEQ ID NO: 5981; WAN02499D_at; Start 137; Stop 161
tatttggttagtactggttgcatat

SEQ ID NO: 14579 - DNA, 25 bp, Artificial
  probe
  misc_feature (1)..(25): SEQ ID NO: 6169; WAN02499E_at; Start 20; Stop 44
actgatactagtaagtggtaaagga

SEQ ID NO: 14580 - DNA, 25 bp, Artificial
  probe
  misc_feature (1)..(25): SEQ ID NO: 6169; WAN02499E_at; Start 12; Stop 36
tttgctatactgatactagtaagtg

SEQ ID NO: 14581 - DNA, 25 bp, Artificial
  probe
  misc_feature (1)..(25): SEQ ID NO: 6169; WAN02499E_at; Start 6; Stop 30
gagaattttgctatactgatactag

SEQ ID NO: 14582 - DNA, 25 bp, Artificial
  probe
  misc_feature (1)..(25): SEQ ID NO: 6169; WAN02499E_at; Start 14; Stop 38
tgctatactgatactagtaagtggt

SEQ ID NO: 14583 - DNA, 25 bp, Artificial
  probe
  misc_feature (1)..(25): SEQ ID NO: 6169; WAN02499E_at; Start 21; Stop 45
ctgatactagtaagtggtaaaggag

SEQ ID NO: 14584 - DNA, 25 bp, Artificial
  probe
  misc_feature (1)..(25): SEQ ID NO: 6169; WAN02499E_at; Start 22; Stop 46
tgatactagtaagtggtaaaggagc

SEQ ID NO: 14585 - DNA, 25 bp, Artificial
  probe
  misc_feature (1)..(25): SEQ ID NO: 6169; WAN02499E_at; Start 9; Stop 33
aattttgctatactgatactagtaa

SEQ ID NO: 14586 - DNA, 25 bp, Artificial
  probe
  misc_feature (1)..(25): SEQ ID NO: 6169; WAN02499E_at; Start 23; Stop 47
gatactagtaagtggtaaaggagca

SEQ ID NO: 14587 - DNA, 25 bp, Artificial
  probe
  misc_feature (1)..(25): SEQ ID NO: 6169; WAN02499E_at; Start 8; Stop 32
gaattttgctatactgatactagta

SEQ ID NO: 14588 - DNA, 25 bp, Artificial
  probe
  misc_feature (1)..(25): SEQ ID NO: 6169; WAN02499E_at; Start 18; Stop 42
atactgatactagtaagtggtaaag

SEQ ID NO: 14589 - DNA, 25 bp, Artificial
  probe
  misc_feature (1)..(25): SEQ ID NO: 6169; WAN02499E_at; Start 13; Stop 37
ttgctatactgatactagtaagtgg

SEQ ID NO: 14590 - DNA, 25 bp, Artificial
  probe
  misc_feature (1)..(25): SEQ ID NO: 6169; WAN02499E_at; Start 19; Stop 43
tactgatactagtaagtggtaaagg

SEQ ID NO: 14591 - DNA, 25 bp, Artificial
  probe
  misc_feature (1)..(25): SEQ ID NO: 6169; WAN02499E_at; Start 15; Stop 39
gctatactgatactagtaagtggta

SEQ ID NO: 14592 - DNA, 25 bp, Artificial
  probe
  misc_feature (1)..(25): SEQ ID NO: 6169; WAN02499E_at; Start 1; Stop 25
tagaggagaattttgctatactgat

SEQ ID NO: 14593 - DNA, 25 bp, Artificial
  probe
  misc_feature (1)..(25): SEQ ID NO: 6169; WAN02499E_at; Start 7; Stop 31
agaattttgctatactgatactagt

SEQ ID NO: 14594 - DNA, 25 bp, Artificial
  probe
  misc_feature (1)..(25): SEQ ID NO: 6169; WAN02499E_at; Start 17; Stop 41
tatactgatactagtaagtggtaaa

SEQ ID NO: 14595 - DNA, 25 bp, Artificial
  probe
  misc_feature (1)..(25): SEQ ID NO: 6169; WAN02499E_at; Start 3; Stop 27
gaggagaattttgctatactgatac

SEQ ID NO: 14596 - DNA, 25 bp, Artificial
  probe
  misc_feature (1)..(25): SEQ ID NO: 6169; WAN02499E_at; Start 24; Stop 48
atactagtaagtggtaaaggagcag

SEQ ID NO: 14597 - DNA, 25 bp, Artificial
  probe
  misc_feature (1)..(25): SEQ ID NO: 6169; WAN02499E_at; Start 16; Stop 40
ctatactgatactagtaagtggtaa

SEQ ID NO: 14598 - DNA, 25 bp, Artificial
  probe
  misc_feature (1)..(25): SEQ ID NO: 6169; WAN02499E_at; Start 4; Stop 28
aggagaattttgctatactgatact

SEQ ID NO: 14599 - DNA, 25 bp, Artificial
  probe
  misc_feature (1)..(25): SEQ ID NO: 6169; WAN02499E_at; Start 5; Stop 29
ggagaattttgctatactgatacta

SEQ ID NO: 14600 - DNA, 25 bp, Artificial
  probe
  misc_feature (1)..(25): SEQ ID NO: 6169; WAN02499E_at; Start 2; Stop 26
agaggagaattttgctatactgata

SEQ ID NO: 14601 - DNA, 25 bp, Artificial
  probe
  misc_feature (1)..(25): SEQ ID NO: 6169; WAN02499E_at; Start 11; Stop 35
ttttgctatactgatactagtaagt

SEQ ID NO: 14602 - DNA, 25 bp, Artificial
  probe
  misc_feature (1)..(25): SEQ ID NO: 6169; WAN02499E_at; Start 10; Stop 34
attttgctatactgatactagtaag

SEQ ID NO: 14603 - DNA, 25 bp, Artificial
  probe
  misc_feature (1)..(25): SEQ ID NO: 6077; WAN02499F_at; Start 17; Stop 41
caaagttttaggtcgcttgataata

SEQ ID NO: 14604 - DNA, 25 bp, Artificial
  probe
  misc_feature (1)..(25): SEQ ID NO: 6077; WAN02499F_at; Start 37; Stop 61
taatatgcgttttttgaattttata

SEQ ID NO: 14605 - DNA, 25 bp, Artificial
  probe
  misc_feature (1)..(25): SEQ ID NO: 6077; WAN02499F_at; Start 21; Stop 45
gttttaggtcgcttgataatatgcg

SEQ ID NO: 14606 - DNA, 25 bp, Artificial
  probe
  misc_feature (1)..(25): SEQ ID NO: 6077; WAN02499F_at; Start 14; Stop 38
gcccaaagttttaggtcgcttgata

SEQ ID NO: 14607 - DNA, 25 bp, Artificial
  probe
  misc_feature (1)..(25): SEQ ID NO: 6077; WAN02499F_at; Start 4; Stop 28
atattatagagcccaaagttttagg

SEQ ID NO: 14608 - DNA, 25 bp, Artificial
  probe
  misc_feature (1)..(25): SEQ ID NO: 6077; WAN02499F_at; Start 11; Stop 35
agagcccaaagttttaggtcgcttg

SEQ ID NO: 14609 - DNA, 25 bp, Artificial
  probe
  misc_feature (1)..(25): SEQ ID NO: 6077; WAN02499F_at; Start 22; Stop 46
ttttaggtcgcttgataatatgcgt

SEQ ID NO: 14610 - DNA, 25 bp, Artificial
  probe
  misc_feature (1)..(25): SEQ ID NO: 6077; WAN02499F_at; Start 19; Stop 43
aagttttaggtcgcttgataatatg

SEQ ID NO: 14611 - DNA, 25 bp, Artificial
  probe
  misc_feature (1)..(25): SEQ ID NO: 6077; WAN02499F_at; Start 41; Stop 65
atgcgttttttgaattttatagact

SEQ ID NO: 14612 - DNA, 25 bp, Artificial
  probe
  misc_feature (1)..(25): SEQ ID NO: 6077; WAN02499F_at; Start 38; Stop 62
aatatgcgttttttgaattttatag

SEQ ID NO: 14613 - DNA, 25 bp, Artificial
  probe
  misc_feature (1)..(25): SEQ ID NO: 6077; WAN02499F_at; Start 48; Stop 72
ttttgaattttatagactgctcgtt

SEQ ID NO: 14614 - DNA, 25 bp, Artificial
  probe
  misc_feature (1)..(25): SEQ ID NO: 6077; WAN02499F_at; Start 8; Stop 32
tatagagcccaaagttttaggtcgc

SEQ ID NO: 14615 - DNA, 25 bp, Artificial
  probe
  misc_feature (1)..(25): SEQ ID NO: 6077; WAN02499F_at; Start 3; Stop 27
aatattatagagcccaaagttttag

SEQ ID NO: 14616 - DNA, 25 bp, Artificial
  probe
  misc_feature (1)..(25): SEQ ID NO: 6077; WAN02499F_at; Start 44; Stop 68
cgttttttgaattttatagactgct

SEQ ID NO: 14617 - DNA, 25 bp, Artificial
  probe
  misc_feature (1)..(25): SEQ ID NO: 6077; WAN02499F_at; Start 43; Stop 67
gcgttttttgaattttatagactgc

SEQ ID NO: 14618 - DNA, 25 bp, Artificial
  probe
  misc_feature (1)..(25): SEQ ID NO: 6077; WAN02499F_at; Start 39; Stop 63
atatgcgttttttgaattttataga

SEQ ID NO: 14619 - DNA, 25 bp, Artificial
  probe
  misc_feature (1)..(25): SEQ ID NO: 6077; WAN02499F_at; Start 9; Stop 33
atagagcccaaagttttaggtcgct

SEQ ID NO: 14620 - DNA, 25 bp, Artificial
  probe
  misc_feature (1)..(25): SEQ ID NO: 6077; WAN02499F_at; Start 20; Stop 44
agttttaggtcgcttgataatatgc

SEQ ID NO: 14621 - DNA, 25 bp, Artificial
  probe
  misc_feature (1)..(25): SEQ ID NO: 6077; WAN02499F_at; Start 13; Stop 37
agcccaaagttttaggtcgcttgat

SEQ ID NO: 14622 - DNA, 25 bp, Artificial
  probe
  misc_feature (1)..(25): SEQ ID NO: 6077; WAN02499F_at; Start 16; Stop 40
ccaaagttttaggtcgcttgataat

SEQ ID NO: 14623 - DNA, 25 bp, Artificial
  probe
  misc_feature (1)..(25): SEQ ID NO: 6077; WAN02499F_at; Start 45; Stop 69
gttttttgaattttatagactgctc

SEQ ID NO: 14624 - DNA, 25 bp, Artificial
  probe
  misc_feature (1)..(25): SEQ ID NO: 6077; WAN02499F_at; Start 42; Stop 66
tgcgttttttgaattttatagactg

SEQ ID NO: 14625 - DNA, 25 bp, Artificial
  probe
  misc_feature (1)..(25): SEQ ID NO: 6077; WAN02499F_at; Start 40; Stop 64
tatgcgttttttgaattttatagac

SEQ ID NO: 14626 - DNA, 25 bp, Artificial
  probe
  misc_feature (1)..(25): SEQ ID NO: 6077; WAN02499F_at; Start 35; Stop 59
gataatatgcgttttttgaatttta

SEQ ID NO: 14627 - DNA, 25 bp, Artificial
  probe
  misc_feature (1)..(25): SEQ ID NO: 6077; WAN02499F_at; Start 47; Stop 71
tttttgaattttatagactgctcgt

SEQ ID NO: 14628 - DNA, 25 bp, Artificial
  probe
  misc_feature (1)..(25): SEQ ID NO: 6077; WAN02499F_at; Start 46; Stop 70
ttttttgaattttatagactgctcg

SEQ ID NO: 14629 - DNA, 25 bp, Artificial
  probe
  misc_feature (1)..(25): SEQ ID NO: 6077; WAN02499F_at; Start 18; Stop 42
aaagttttaggtcgcttgataatat

SEQ ID NO: 14630 - DNA, 25 bp, Artificial
  probe
  misc_feature (1)..(25): SEQ ID NO: 6077; WAN02499F_at; Start 12; Stop 36
gagcccaaagttttaggtcgcttga

SEQ ID NO: 14631 - DNA, 25 bp, Artificial
  probe
  misc_feature (1)..(25): SEQ ID NO: 6173; WAN02499G_at; Start 172; Stop 196
tcacaatttaccgatgacacagaaa

SEQ ID NO: 14632 - DNA, 25 bp, Artificial
  probe
  misc_feature (1)..(25): SEQ ID NO: 6173; WAN02499G_at; Start 150; Stop 174
tttcgccaattccatacctatttca

SEQ ID NO: 14633 - DNA, 25 bp, Artificial
  probe
  misc_feature (1)..(25): SEQ ID NO: 6173; WAN02499G_at; Start 175; Stop 199
caatttaccgatgacacagaaaaac

SEQ ID NO: 14634 - DNA, 25 bp, Artificial
  probe
  misc_feature (1)..(25): SEQ ID NO: 6173; WAN02499G_at; Start 160; Stop 184
tccatacctatttcacaatttaccg

SEQ ID NO: 14635 - DNA, 25 bp, Artificial
  probe
  misc_feature (1)..(25): SEQ ID NO: 6173; WAN02499G_at; Start 34; Stop 58
tattatttagtcaaagaacatccca

SEQ ID NO: 14636 - DNA, 25 bp, Artificial
  probe
  misc_feature (1)..(25): SEQ ID NO: 6173; WAN02499G_at; Start 47; Stop 71
aagaacatcccatatgagggcatga

SEQ ID NO: 14637 - DNA, 25 bp, Artificial
  probe
  misc_feature (1)..(25): SEQ ID NO: 6173; WAN02499G_at; Start 10; Stop 34
tatccagatatatctcgataatcat

SEQ ID NO: 14638 - DNA, 25 bp, Artificial
  probe
  misc_feature (1)..(25): SEQ ID NO: 6173; WAN02499G_at; Start 104; Stop 128
gaagtatatatatttcatagaacct

SEQ ID NO: 14639 - DNA, 25 bp, Artificial
  probe
  misc_feature (1)..(25): SEQ ID NO: 6173; WAN02499G_at; Start 66; Stop 90
gcatgaaatgctaagtttagcttgc

SEQ ID NO: 14640 - DNA, 25 bp, Artificial
  probe
  misc_feature (1)..(25): SEQ ID NO: 6173; WAN02499G_at; Start 154; Stop 178
gccaattccatacctatttcacaat

SEQ ID NO: 14641 - DNA, 25 bp, Artificial
  probe
  misc_feature (1)..(25): SEQ ID NO: 6173; WAN02499G_at; Start 43; Stop 67
gtcaaagaacatcccatatgagggc

SEQ ID NO: 14642 - DNA, 25 bp, Artificial
  probe
  misc_feature (1)..(25): SEQ ID NO: 6173; WAN02499G_at; Start 80; Stop 104
gtttagcttgctcactattaagatg

SEQ ID NO: 14643 - DNA, 25 bp, Artificial
  probe
  misc_feature (1)..(25): SEQ ID NO: 6173; WAN02499G_at; Start 166; Stop 190
cctatttcacaatttaccgatgaca

SEQ ID NO: 14644 - DNA, 25 bp, Artificial
  probe
  misc_feature (1)..(25): SEQ ID NO: 6173; WAN02499G_at; Start 41; Stop 65
tagtcaaagaacatcccatatgagg

SEQ ID NO: 14645 - DNA, 25 bp, Artificial
  probe
  misc_feature (1)..(25): SEQ ID NO: 6173; WAN02499G_at; Start 85; Stop 109
gcttgctcactattaagatgaagta

SEQ ID NO: 14646 - DNA, 25 bp, Artificial
  probe
  misc_feature (1)..(25): SEQ ID NO: 6173; WAN02499G_at; Start 74; Stop 98
tgctaagtttagcttgctcactatt

SEQ ID NO: 14647 - DNA, 25 bp, Artificial
  probe
  misc_feature (1)..(25): SEQ ID NO: 6173; WAN02499G_at; Start 121; Stop 145
tagaacctattgtgaaggattttta

SEQ ID NO: 14648 - DNA, 25 bp, Artificial
  probe
  misc_feature (1)..(25): SEQ ID NO: 6173; WAN02499G_at; Start 146; Stop 170
taattttcgccaattccatacctat

SEQ ID NO: 14649 - DNA, 25 bp, Artificial
  probe
  misc_feature (1)..(25): SEQ ID NO: 6173; WAN02499G_at; Start 89; Stop 113
gctcactattaagatgaagtatata

SEQ ID NO: 14650 - DNA, 25 bp, Artificial
  probe
  misc_feature (1)..(25): SEQ ID NO: 6173; WAN02499G_at; Start 3; Stop 27
gttcatttatccagatatatctcga

SEQ ID NO: 14651 - DNA, 25 bp, Artificial
  probe
  misc_feature (1)..(25): SEQ ID NO: 6173; WAN02499G_at; Start 182; Stop 206
ccgatgacacagaaaaacaattgaa

SEQ ID NO: 14652 - DNA, 25 bp, Artificial
  probe
  misc_feature (1)..(25): SEQ ID NO: 6173; WAN02499G_at; Start 83; Stop 107
tagcttgctcactattaagatgaag

SEQ ID NO: 14653 - DNA, 25 bp, Artificial
  probe
  misc_feature (1)..(25): SEQ ID NO: 6173; WAN02499G_at; Start 49; Stop 73
gaacatcccatatgagggcatgaaa

SEQ ID NO: 14654 - DNA, 25 bp, Artificial
  probe
  misc_feature (1)..(25): SEQ ID NO: 6173; WAN02499G_at; Start 180; Stop 204
taccgatgacacagaaaaacaattg

SEQ ID NO: 14655 - DNA, 25 bp, Artificial
  probe
  misc_feature (1)..(25): SEQ ID NO: 6173; WAN02499G_at; Start 170; Stop 194
tttcacaatttaccgatgacacaga

SEQ ID NO: 14656 - DNA, 25 bp, Artificial
  probe
  misc_feature (1)..(25): SEQ ID NO: 6173; WAN02499G_at; Start 70; Stop 94
gaaatgctaagtttagcttgctcac

SEQ ID NO: 14657 - DNA, 25 bp, Artificial
  probe
  misc_feature (1)..(25): SEQ ID NO: 6173; WAN02499G_at; Start 62; Stop 86
gagggcatgaaatgctaagtttagc

SEQ ID NO: 14658 - DNA, 25 bp, Artificial
  probe
  misc_feature (1)..(25): SEQ ID NO: 6173; WAN02499G_at; Start 131; Stop 155
tgtgaaggatttttataattttcgc

SEQ ID NO: 14659 - DNA, 25 bp, Artificial
  probe
  misc_feature (1)..(25): SEQ ID NO: 6173; WAN02499G_at; Start 77; Stop 101
taagtttagcttgctcactattaag

SEQ ID NO: 14660 - DNA, 25 bp, Artificial
  probe
  misc_feature (1)..(25): SEQ ID NO: 6173; WAN02499G_at; Start 52; Stop 76
catcccatatgagggcatgaaatgc

SEQ ID NO: 14661 - DNA, 25 bp, Artificial
  probe
  misc_feature (1)..(25): SEQ ID NO: 6173; WAN02499G_at; Start 45; Stop 69
caaagaacatcccatatgagggcat

SEQ ID NO: 14662 - DNA, 25 bp, Artificial
  probe
  misc_feature (1)..(25): SEQ ID NO: 6173; WAN02499G_at; Start 14; Stop 38
cagatatatctcgataatcatatta

SEQ ID NO: 14663 - DNA, 25 bp, Artificial
  probe
  misc_feature (1)..(25): SEQ ID NO: 6173; WAN02499G_at; Start 56; Stop 80
ccatatgagggcatgaaatgctaag

SEQ ID NO: 14664 - DNA, 25 bp, Artificial
  probe
  misc_feature (1)..(25): SEQ ID NO: 6173; WAN02499G_at; Start 37; Stop 61
tatttagtcaaagaacatcccatat

SEQ ID NO: 14665 - DNA, 25 bp, Artificial
  probe
  misc_feature (1)..(25): SEQ ID NO: 6216; WAN02499H_at; Start 57; Stop 81
caacattgcaactttcttctcaggt

SEQ ID NO: 14666 - DNA, 25 bp, Artificial
  probe
  misc_feature (1)..(25): SEQ ID NO: 6216; WAN02499H_at; Start 50; Stop 74
ccaaaaacaacattgcaactttctt

SEQ ID NO: 14667 - DNA, 25 bp, Artificial
  probe
  misc_feature (1)..(25): SEQ ID NO: 6216; WAN02499H_at; Start 5; Stop 29
ttagattaggtactacataacaaat

SEQ ID NO: 14668 - DNA, 25 bp, Artificial
  probe
  misc_feature (1)..(25): SEQ ID NO: 6216; WAN02499H_at; Start 55; Stop 79
aacaacattgcaactttcttctcag

SEQ ID NO: 14669 - DNA, 25 bp, Artificial
  probe
  misc_feature (1)..(25): SEQ ID NO: 6216; WAN02499H_at; Start 49; Stop 73
accaaaaacaacattgcaactttct

SEQ ID NO: 14670 - DNA, 25 bp, Artificial
  probe
  misc_feature (1)..(25): SEQ ID NO: 6216; WAN02499H_at; Start 56; Stop 80
acaacattgcaactttcttctcagg

SEQ ID NO: 14671 - DNA, 25 bp, Artificial
  probe
  misc_feature (1)..(25): SEQ ID NO: 6216; WAN02499H_at; Start 40; Stop 64
caaacccgcaccaaaaacaacattg

SEQ ID NO: 14672 - DNA, 25 bp, Artificial
  probe
  misc_feature (1)..(25): SEQ ID NO: 6216; WAN02499H_at; Start 51; Stop 75
caaaaacaacattgcaactttcttc

SEQ ID NO: 14673 - DNA, 25 bp, Artificial
  probe
  misc_feature (1)..(25): SEQ ID NO: 6216; WAN02499H_at; Start 3; Stop 27
ccttagattaggtactacataacaa

SEQ ID NO: 14674 - DNA, 25 bp, Artificial
  probe
  misc_feature (1)..(25): SEQ ID NO: 6216; WAN02499H_at; Start 47; Stop 71
gcaccaaaaacaacattgcaacttt

SEQ ID NO: 14675 - DNA, 25 bp, Artificial
  probe
  misc_feature (1)..(25): SEQ ID NO: 6216; WAN02499H_at; Start 58; Stop 82
aacattgcaactttcttctcaggta

SEQ ID NO: 14676 - DNA, 25 bp, Artificial
  probe
  misc_feature (1)..(25): SEQ ID NO: 6216; WAN02499H_at; Start 52; Stop 76
aaaaacaacattgcaactttcttct

SEQ ID NO: 14677 - DNA, 25 bp, Artificial
  probe
  misc_feature (1)..(25): SEQ ID NO: 6216; WAN02499H_at; Start 54; Stop 78
aaacaacattgcaactttcttctca

SEQ ID NO: 14678 - DNA, 25 bp, Artificial
  probe
  misc_feature (1)..(25): SEQ ID NO: 6216; WAN02499H_at; Start 59; Stop 83
acattgcaactttcttctcaggtaa

SEQ ID NO: 14679 - DNA, 25 bp, Artificial
  probe
  misc_feature (1)..(25): SEQ ID NO: 6216; WAN02499H_at; Start 48; Stop 72
caccaaaaacaacattgcaactttc

SEQ ID NO: 14680 - DNA, 25 bp, Artificial
  probe
  misc_feature (1)..(25): SEQ ID NO: 6216; WAN02499H_at; Start 60; Stop 84
cattgcaactttcttctcaggtaat

SEQ ID NO: 14681 - DNA, 25 bp, Artificial
  probe
  misc_feature (1)..(25): SEQ ID NO: 6216; WAN02499H_at; Start 7; Stop 31
agattaggtactacataacaaattt

SEQ ID NO: 14682 - DNA, 25 bp, Artificial
  probe
  misc_feature (1)..(25): SEQ ID NO: 6216; WAN02499H_at; Start 4; Stop 28
cttagattaggtactacataacaaa

SEQ ID NO: 14683 - DNA, 25 bp, Artificial
  probe
  misc_feature (1)..(25): SEQ ID NO: 6216; WAN02499H_at; Start 2; Stop 26
tccttagattaggtactacataaca

SEQ ID NO: 14684 - DNA, 25 bp, Artificial
  probe
  misc_feature (1)..(25): SEQ ID NO: 6216; WAN02499H_at; Start 53; Stop 77
aaaacaacattgcaactttcttctc

SEQ ID NO: 14685 - DNA, 25 bp, Artificial
  probe
  misc_feature (1)..(25): SEQ ID NO: 6216; WAN02499H_at; Start 1; Stop 25
ttccttagattaggtactacataac

SEQ ID NO: 14686 - DNA, 25 bp, Artificial
  probe
  misc_feature (1)..(25): SEQ ID NO: 6216; WAN02499H_at; Start 45; Stop 69
ccgcaccaaaaacaacattgcaact

SEQ ID NO: 14687 - DNA, 25 bp, Artificial
  probe
  misc_feature (1)..(25): SEQ ID NO: 6216; WAN02499H_at; Start 44; Stop 68
cccgcaccaaaaacaacattgcaac

SEQ ID NO: 14688 - DNA, 25 bp, Artificial
  probe
  misc_feature (1)..(25): SEQ ID NO: 6216; WAN02499H_at; Start 61; Stop 85
attgcaactttcttctcaggtaatg

SEQ ID NO: 14689 - DNA, 25 bp, Artificial
  probe
  misc_feature (1)..(25): SEQ ID NO: 6216; WAN02499H_at; Start 6; Stop 30
tagattaggtactacataacaaatt

SEQ ID NO: 14690 - DNA, 25 bp, Artificial
  probe
  misc_feature (1)..(25): SEQ ID NO: 6216; WAN02499H_at; Start 43; Stop 67
acccgcaccaaaaacaacattgcaa

SEQ ID NO: 14691 - DNA, 25 bp, Artificial
  probe
  misc_feature (1)..(25): SEQ ID NO: 6216; WAN02499H_at; Start 42; Stop 66
aacccgcaccaaaaacaacattgca

SEQ ID NO: 14692 - DNA, 25 bp, Artificial
  probe
  misc_feature (1)..(25): SEQ ID NO: 6216; WAN02499H_at; Start 46; Stop 70
cgcaccaaaaacaacattgcaactt

SEQ ID NO: 14693 - DNA, 25 bp, Artificial
  probe
  misc_feature (1)..(25): SEQ ID NO: 6208; WAN02499I_at; Start 25; Stop 49
ttgggttttacatttgataatgtta

SEQ ID NO: 14694 - DNA, 25 bp, Artificial
  probe
  misc_feature (1)..(25): SEQ ID NO: 6208; WAN02499I_at; Start 26; Stop 50
tgggttttacatttgataatgttat

SEQ ID NO: 14695 - DNA, 25 bp, Artificial
  probe
  misc_feature (1)..(25): SEQ ID NO: 6208; WAN02499I_at; Start 35; Stop 59
catttgataatgttataataaaaag

SEQ ID NO: 14696 - DNA, 25 bp, Artificial
  probe
  misc_feature (1)..(25): SEQ ID NO: 6208; WAN02499I_at; Start 37; Stop 61
tttgataatgttataataaaaagga

SEQ ID NO: 14697 - DNA, 25 bp, Artificial
  probe
  misc_feature (1)..(25): SEQ ID NO: 6208; WAN02499I_at; Start 36; Stop 60
atttgataatgttataataaaaagg

SEQ ID NO: 14698 - DNA, 25 bp, Artificial
  probe
  misc_feature (1)..(25): SEQ ID NO: 6208; WAN02499I_at; Start 39; Stop 63
tgataatgttataataaaaaggaga

SEQ ID NO: 14699 - DNA, 25 bp, Artificial
  probe
  misc_feature (1)..(25): SEQ ID NO: 6208; WAN02499I_at; Start 40; Stop 64
gataatgttataataaaaaggagaa

SEQ ID NO: 14700 - DNA, 25 bp, Artificial
  probe
  misc_feature (1)..(25): SEQ ID NO: 6208; WAN02499I_at; Start 27; Stop 51
gggttttacatttgataatgttata

SEQ ID NO: 14701 - DNA, 25 bp, Artificial
  probe
  misc_feature (1)..(25): SEQ ID NO: 6208; WAN02499I_at; Start 28; Stop 52
ggttttacatttgataatgttataa

SEQ ID NO: 14702 - DNA, 25 bp, Artificial
  probe
  misc_feature (1)..(25): SEQ ID NO: 6208; WAN02499I_at; Start 38; Stop 62
ttgataatgttataataaaaaggag

SEQ ID NO: 14703 - DNA, 25 bp, Artificial
  probe
  misc_feature (1)..(25): SEQ ID NO: 6196; WAN02499J_at; Start 22; Stop 46
caaggtgaggtcatagtagggagga

SEQ ID NO: 14704 - DNA, 25 bp, Artificial
  probe
  misc_feature (1)..(25): SEQ ID NO: 6196; WAN02499J_at; Start 3; Stop 27
ttacagcagtagagcctgacaaggt

SEQ ID NO: 14705 - DNA, 25 bp, Artificial
  probe
  misc_feature (1)..(25): SEQ ID NO: 6196; WAN02499J_at; Start 26; Stop 50
gtgaggtcatagtagggaggatttc

SEQ ID NO: 14706 - DNA, 25 bp, Artificial
  probe
  misc_feature (1)..(25): SEQ ID NO: 6196; WAN02499J_at; Start 1; Stop 25
tcttacagcagtagagcctgacaag

SEQ ID NO: 14707 - DNA, 25 bp, Artificial
  probe
  misc_feature (1)..(25): SEQ ID NO: 6196; WAN02499J_at; Start 6; Stop 30
cagcagtagagcctgacaaggtgag

SEQ ID NO: 14708 - DNA, 25 bp, Artificial
  probe
  misc_feature (1)..(25): SEQ ID NO: 6196; WAN02499J_at; Start 2; Stop 26
cttacagcagtagagcctgacaagg

SEQ ID NO: 14709 - DNA, 25 bp, Artificial
  probe
  misc_feature (1)..(25): SEQ ID NO: 6196; WAN02499J_at; Start 12; Stop 36
tagagcctgacaaggtgaggtcata

SEQ ID NO: 14710 - DNA, 25 bp, Artificial
  probe
  misc_feature (1)..(25): SEQ ID NO: 6196; WAN02499J_at; Start 10; Stop 34
agtagagcctgacaaggtgaggtca

SEQ ID NO: 14711 - DNA, 25 bp, Artificial
  probe
  misc_feature (1)..(25): SEQ ID NO: 6196; WAN02499J_at; Start 14; Stop 38
gagcctgacaaggtgaggtcatagt

SEQ ID NO: 14712 - DNA, 25 bp, Artificial
  probe
  misc_feature (1)..(25): SEQ ID NO: 6196; WAN02499J_at; Start 23; Stop 47
aaggtgaggtcatagtagggaggat

SEQ ID NO: 14713 - DNA, 25 bp, Artificial
  probe
  misc_feature (1)..(25): SEQ ID NO: 6196; WAN02499J_at; Start 13; Stop 37
agagcctgacaaggtgaggtcatag

SEQ ID NO: 14714 - DNA, 25 bp, Artificial
  probe
  misc_feature (1)..(25): SEQ ID NO: 6196; WAN02499J_at; Start 27; Stop 51
tgaggtcatagtagggaggatttct

SEQ ID NO: 14715 - DNA, 25 bp, Artificial
  probe
  misc_feature (1)..(25): SEQ ID NO: 6196; WAN02499J_at; Start 18; Stop 42
ctgacaaggtgaggtcatagtaggg

SEQ ID NO: 14716 - DNA, 25 bp, Artificial
  probe
  misc_feature (1)..(25): SEQ ID NO: 6196; WAN02499J_at; Start 11; Stop 35
gtagagcctgacaaggtgaggtcat

SEQ ID NO: 14717 - DNA, 25 bp, Artificial
  probe
  misc_feature (1)..(25): SEQ ID NO: 6196; WAN02499J_at; Start 15; Stop 39
agcctgacaaggtgaggtcatagta

SEQ ID NO: 14718 - DNA, 25 bp, Artificial
  probe
  misc_feature (1)..(25): SEQ ID NO: 6196; WAN02499J_at; Start 21; Stop 45
acaaggtgaggtcatagtagggagg

SEQ ID NO: 14719 - DNA, 25 bp, Artificial
  probe
  misc_feature (1)..(25): SEQ ID NO: 6196; WAN02499J_at; Start 25; Stop 49
ggtgaggtcatagtagggaggattt

SEQ ID NO: 14720 - DNA, 25 bp, Artificial
  probe
  misc_feature (1)..(25): SEQ ID NO: 6196; WAN02499J_at; Start 20; Stop 44
gacaaggtgaggtcatagtagggag

SEQ ID NO: 14721 - DNA, 25 bp, Artificial
  probe
  misc_feature (1)..(25): SEQ ID NO: 6196; WAN02499J_at; Start 4; Stop 28
tacagcagtagagcctgacaaggtg

SEQ ID NO: 14722 - DNA, 25 bp, Artificial
  probe
  misc_feature (1)..(25): SEQ ID NO: 6196; WAN02499J_at; Start 7; Stop 31
agcagtagagcctgacaaggtgagg

SEQ ID NO: 14723 - DNA, 25 bp, Artificial
  probe
  misc_feature (1)..(25): SEQ ID NO: 6196; WAN02499J_at; Start 5; Stop 29
acagcagtagagcctgacaaggtga

SEQ ID NO: 14724 - DNA, 25 bp, Artificial
  probe
  misc_feature (1)..(25): SEQ ID NO: 6196; WAN02499J_at; Start 17; Stop 41
cctgacaaggtgaggtcatagtagg

SEQ ID NO: 14725 - DNA, 25 bp, Artificial
  probe
  misc_feature (1)..(25): SEQ ID NO: 6196; WAN02499J_at; Start 24; Stop 48
aggtgaggtcatagtagggaggatt

SEQ ID NO: 14726 - DNA, 25 bp, Artificial
  probe
  misc_feature (1)..(25): SEQ ID NO: 6196; WAN02499J_at; Start 9; Stop 33
cagtagagcctgacaaggtgaggtc

SEQ ID NO: 14727 - DNA, 25 bp, Artificial
  probe
  misc_feature (1)..(25): SEQ ID NO: 6196; WAN02499J_at; Start 19; Stop 43
tgacaaggtgaggtcatagtaggga

SEQ ID NO: 14728 - DNA, 25 bp, Artificial
  probe
  misc_feature (1)..(25): SEQ ID NO: 6196; WAN02499J_at; Start 8; Stop 32
gcagtagagcctgacaaggtgaggt

SEQ ID NO: 14729 - DNA, 25 bp, Artificial
  probe
  misc_feature (1)..(25): SEQ ID NO: 6196; WAN02499J_at; Start 16; Stop 40
gcctgacaaggtgaggtcatagtag

SEQ ID NO: 14730 - DNA, 25 bp, Artificial
  probe
  misc_feature (1)..(25): SEQ ID NO: 6030; WAN02499K_at; Start 51; Stop 75
gaaggctctattaaattgttagtga

SEQ ID NO: 14731 - DNA, 25 bp, Artificial
  probe
  misc_feature (1)..(25): SEQ ID NO: 6030; WAN02499K_at; Start 18; Stop 42
ctttctatccttttctgacaggata

SEQ ID NO: 14732 - DNA, 25 bp, Artificial
  probe
  misc_feature (1)..(25): SEQ ID NO: 6030; WAN02499K_at; Start 41; Stop 65
tatttgagtagaaggctctattaaa

SEQ ID NO: 14733 - DNA, 25 bp, Artificial
  probe
  misc_feature (1)..(25): SEQ ID NO: 6030; WAN02499K_at; Start 54; Stop 78
ggctctattaaattgttagtgaaat

SEQ ID NO: 14734 - DNA, 25 bp, Artificial
  probe
  misc_feature (1)..(25): SEQ ID NO: 6030; WAN02499K_at; Start 37; Stop 61
aggatatttgagtagaaggctctat

SEQ ID NO: 14735 - DNA, 25 bp, Artificial
  probe
  misc_feature (1)..(25): SEQ ID NO: 6030; WAN02499K_at; Start 15; Stop 39
tagctttctatccttttctgacagg

SEQ ID NO: 14736 - DNA, 25 bp, Artificial
  probe
  misc_feature (1)..(25): SEQ ID NO: 6030; WAN02499K_at; Start 17; Stop 41
gctttctatccttttctgacaggat

SEQ ID NO: 14737 - DNA, 25 bp, Artificial
  probe
  misc_feature (1)..(25): SEQ ID NO: 6030; WAN02499K_at; Start 23; Stop 47
tatccttttctgacaggatatttga

SEQ ID NO: 14738 - DNA, 25 bp, Artificial
  probe
  misc_feature (1)..(25): SEQ ID NO: 6030; WAN02499K_at; Start 48; Stop 72
gtagaaggctctattaaattgttag

SEQ ID NO: 14739 - DNA, 25 bp, Artificial
  probe
  misc_feature (1)..(25): SEQ ID NO: 6030; WAN02499K_at; Start 49; Stop 73
tagaaggctctattaaattgttagt

SEQ ID NO: 14740 - DNA, 25 bp, Artificial
  probe
  misc_feature (1)..(25): SEQ ID NO: 6030; WAN02499K_at; Start 45; Stop 69
tgagtagaaggctctattaaattgt

SEQ ID NO: 14741 - DNA, 25 bp, Artificial
  probe
  misc_feature (1)..(25): SEQ ID NO: 6030; WAN02499K_at; Start 26; Stop 50
ccttttctgacaggatatttgagta

SEQ ID NO: 14742 - DNA, 25 bp, Artificial
  probe
  misc_feature (1)..(25): SEQ ID NO: 6030; WAN02499K_at; Start 28; Stop 52
ttttctgacaggatatttgagtaga

SEQ ID NO: 14743 - DNA, 25 bp, Artificial
  probe
  misc_feature (1)..(25): SEQ ID NO: 6030; WAN02499K_at; Start 14; Stop 38
gtagctttctatccttttctgacag

SEQ ID NO: 14744 - DNA, 25 bp, Artificial
  probe
  misc_feature (1)..(25): SEQ ID NO: 6030; WAN02499K_at; Start 38; Stop 62
ggatatttgagtagaaggctctatt

SEQ ID NO: 14745 - DNA, 25 bp, Artificial
  probe
  misc_feature (1)..(25): SEQ ID NO: 6030; WAN02499K_at; Start 25; Stop 49
tccttttctgacaggatatttgagt

SEQ ID NO: 14746 - DNA, 25 bp, Artificial
  probe
  misc_feature (1)..(25): SEQ ID NO: 6030; WAN02499K_at; Start 33; Stop 57
tgacaggatatttgagtagaaggct

SEQ ID NO: 14747 - DNA, 25 bp, Artificial
  probe
  misc_feature (1)..(25): SEQ ID NO: 6030; WAN02499K_at; Start 31; Stop 55
tctgacaggatatttgagtagaagg

SEQ ID NO: 14748 - DNA, 25 bp, Artificial
  probe
  misc_feature (1)..(25): SEQ ID NO: 6030; WAN02499K_at; Start 27; Stop 51
cttttctgacaggatatttgagtag

SEQ ID NO: 14749 - DNA, 25 bp, Artificial
  probe
  misc_feature (1)..(25): SEQ ID NO: 6030; WAN02499K_at; Start 32; Stop 56
ctgacaggatatttgagtagaaggc

SEQ ID NO: 14750 - DNA, 25 bp, Artificial
  probe
  misc_feature (1)..(25): SEQ ID NO: 6030; WAN02499K_at; Start 35; Stop 59
acaggatatttgagtagaaggctct

SEQ ID NO: 14751 - DNA, 25 bp, Artificial
  probe
  misc_feature (1)..(25): SEQ ID NO: 6030; WAN02499K_at; Start 52; Stop 76
aaggctctattaaattgttagtgaa

SEQ ID NO: 14752 - DNA, 25 bp, Artificial
  probe
  misc_feature (1)..(25): SEQ ID NO: 6030; WAN02499K_at; Start 39; Stop 63
gatatttgagtagaaggctctatta

SEQ ID NO: 14753 - DNA, 25 bp, Artificial
  probe
  misc_feature (1)..(25): SEQ ID NO: 6030; WAN02499K_at; Start 3; Stop 27
tattataaaaagtagctttctatcc

SEQ ID NO: 14754 - DNA, 25 bp, Artificial
  probe
  misc_feature (1)..(25): SEQ ID NO: 6030; WAN02499K_at; Start 50; Stop 74
agaaggctctattaaattgttagtg

SEQ ID NO: 14755 - DNA, 25 bp, Artificial
  probe
  misc_feature (1)..(25): SEQ ID NO: 6030; WAN02499K_at; Start 34; Stop 58
gacaggatatttgagtagaaggctc

SEQ ID NO: 14756 - DNA, 25 bp, Artificial
  probe
  misc_feature (1)..(25): SEQ ID NO: 6030; WAN02499K_at; Start 46; Stop 70
gagtagaaggctctattaaattgtt

SEQ ID NO: 14757 - DNA, 25 bp, Artificial
  probe
  misc_feature (1)..(25): SEQ ID NO: 6030; WAN02499K_at; Start 55; Stop 79
gctctattaaattgttagtgaaata

SEQ ID NO: 14758 - DNA, 25 bp, Artificial
  probe
  misc_feature (1)..(25): SEQ ID NO: 6030; WAN02499K_at; Start 29; Stop 53
tttctgacaggatatttgagtagaa

SEQ ID NO: 14759 - DNA, 25 bp, Artificial
  probe
  misc_feature (1)..(25): SEQ ID NO: 6030; WAN02499K_at; Start 16; Stop 40
agctttctatccttttctgacagga

SEQ ID NO: 14760 - DNA, 25 bp, Artificial
  probe
  misc_feature (1)..(25): SEQ ID NO: 6030; WAN02499K_at; Start 13; Stop 37
agtagctttctatccttttctgaca

SEQ ID NO: 14761 - DNA, 25 bp, Artificial
  probe
  misc_feature (1)..(25): SEQ ID NO: 6030; WAN02499K_at; Start 36; Stop 60
caggatatttgagtagaaggctcta

SEQ ID NO: 14762 - DNA, 25 bp, Artificial
  probe
  misc_feature (1)..(25): SEQ ID NO: 6030; WAN02499K_at; Start 12; Stop 36
aagtagctttctatccttttctgac

SEQ ID NO: 14763 - DNA, 25 bp, Artificial
  probe
  misc_feature (1)..(25): SEQ ID NO: 6030; WAN02499K_at; Start 24; Stop 48
atccttttctgacaggatatttgag

SEQ ID NO: 14764 - DNA, 25 bp, Artificial
  probe
  misc_feature (1)..(25): SEQ ID NO: 6113; WAN02499L_at; Start 15; Stop 39
ttatgaggattctattctgatttat

SEQ ID NO: 14765 - DNA, 25 bp, Artificial
  probe
  misc_feature (1)..(25): SEQ ID NO: 6113; WAN02499L_at; Start 10; Stop 34
taaaattatgaggattctattctga

SEQ ID NO: 14766 - DNA, 25 bp, Artificial
  probe
  misc_feature (1)..(25): SEQ ID NO: 6113; WAN02499L_at; Start 8; Stop 32
agtaaaattatgaggattctattct

SEQ ID NO: 14767 - DNA, 25 bp, Artificial
  probe
  misc_feature (1)..(25): SEQ ID NO: 6113; WAN02499L_at; Start 17; Stop 41
atgaggattctattctgatttattt

SEQ ID NO: 14768 - DNA, 25 bp, Artificial
  probe
  misc_feature (1)..(25): SEQ ID NO: 6113; WAN02499L_at; Start 1; Stop 25
gacttatagtaaaattatgaggatt

SEQ ID NO: 14769 - DNA, 25 bp, Artificial
  probe
  misc_feature (1)..(25): SEQ ID NO: 6113; WAN02499L_at; Start 5; Stop 29
tatagtaaaattatgaggattctat

SEQ ID NO: 14770 - DNA, 25 bp, Artificial
  probe
  misc_feature (1)..(25): SEQ ID NO: 6113; WAN02499L_at; Start 19; Stop 43
gaggattctattctgatttatttta

SEQ ID NO: 14771 - DNA, 25 bp, Artificial
  probe
  misc_feature (1)..(25): SEQ ID NO: 6113; WAN02499L_at; Start 3; Stop 27
cttatagtaaaattatgaggattct

SEQ ID NO: 14772 - DNA, 25 bp, Artificial
  probe
  misc_feature (1)..(25): SEQ ID NO: 6113; WAN02499L_at; Start 4; Stop 28
ttatagtaaaattatgaggattcta

SEQ ID NO: 14773 - DNA, 25 bp, Artificial
  probe
  misc_feature (1)..(25): SEQ ID NO: 6113; WAN02499L_at; Start 7; Stop 31
tagtaaaattatgaggattctattc

SEQ ID NO: 14774 - DNA, 25 bp, Artificial
  probe
  misc_feature (1)..(25): SEQ ID NO: 6113; WAN02499L_at; Start 11; Stop 35
aaaattatgaggattctattctgat

SEQ ID NO: 14775 - DNA, 25 bp, Artificial
  probe
  misc_feature (1)..(25): SEQ ID NO: 6113; WAN02499L_at; Start 13; Stop 37
aattatgaggattctattctgattt

SEQ ID NO: 14776 - DNA, 25 bp, Artificial
  probe
  misc_feature (1)..(25): SEQ ID NO: 6113; WAN02499L_at; Start 12; Stop 36
aaattatgaggattctattctgatt

SEQ ID NO: 14777 - DNA, 25 bp, Artificial
  probe
  misc_feature (1)..(25): SEQ ID NO: 6113; WAN02499L_at; Start 14; Stop 38
attatgaggattctattctgattta

SEQ ID NO: 14778 - DNA, 25 bp, Artificial
  probe
  misc_feature (1)..(25): SEQ ID NO: 6113; WAN02499L_at; Start 2; Stop 26
acttatagtaaaattatgaggattc

SEQ ID NO: 14779 - DNA, 25 bp, Artificial
  probe
  misc_feature (1)..(25): SEQ ID NO: 6113; WAN02499L_at; Start 9; Stop 33
gtaaaattatgaggattctattctg

SEQ ID NO: 14780 - DNA, 25 bp, Artificial
  probe
  misc_feature (1)..(25): SEQ ID NO: 6113; WAN02499L_at; Start 18; Stop 42
tgaggattctattctgatttatttt

SEQ ID NO: 14781 - DNA, 25 bp, Artificial
  probe
  misc_feature (1)..(25): SEQ ID NO: 6113; WAN02499L_at; Start 6; Stop 30
atagtaaaattatgaggattctatt

SEQ ID NO: 14782 - DNA, 25 bp, Artificial
  probe
  misc_feature (1)..(25): SEQ ID NO: 6113; WAN02499L_at; Start 16; Stop 40
tatgaggattctattctgatttatt

SEQ ID NO: 14783 - DNA, 25 bp, Artificial
  probe
  misc_feature (1)..(25): SEQ ID NO: 6019; WAN02499M_at; Start 27; Stop 51
aagaagatagtagacgtatatactt

SEQ ID NO: 14784 - DNA, 25 bp, Artificial
  probe
  misc_feature (1)..(25): SEQ ID NO: 6019; WAN02499M_at; Start 28; Stop 52
agaagatagtagacgtatatacttt

SEQ ID NO: 14785 - DNA, 25 bp, Artificial
  probe
  misc_feature (1)..(25): SEQ ID NO: 6019; WAN02499M_at; Start 20; Stop 44
tacctttaagaagatagtagacgta

SEQ ID NO: 14786 - DNA, 25 bp, Artificial
  probe
  misc_feature (1)..(25): SEQ ID NO: 6019; WAN02499M_at; Start 31; Stop 55
agatagtagacgtatatactttttt

SEQ ID NO: 14787 - DNA, 25 bp, Artificial
  probe
  misc_feature (1)..(25): SEQ ID NO: 6019; WAN02499M_at; Start 22; Stop 46
cctttaagaagatagtagacgtata

SEQ ID NO: 14788 - DNA, 25 bp, Artificial
  probe
  misc_feature (1)..(25): SEQ ID NO: 6019; WAN02499M_at; Start 12; Stop 36
ggtactgctacctttaagaagatag

SEQ ID NO: 14789 - DNA, 25 bp, Artificial
  probe
  misc_feature (1)..(25): SEQ ID NO: 6019; WAN02499M_at; Start 8; Stop 32
aataggtactgctacctttaagaag

SEQ ID NO: 14790 - DNA, 25 bp, Artificial
  probe
  misc_feature (1)..(25): SEQ ID NO: 6019; WAN02499M_at; Start 82; Stop 106
aatctatttgtttattgaatttaag

SEQ ID NO: 14791 - DNA, 25 bp, Artificial
  probe
  misc_feature (1)..(25): SEQ ID NO: 6019; WAN02499M_at; Start 14; Stop 38
tactgctacctttaagaagatagta

SEQ ID NO: 14792 - DNA, 25 bp, Artificial
  probe
  misc_feature (1)..(25): SEQ ID NO: 6019; WAN02499M_at; Start 32; Stop 56
gatagtagacgtatatactttttta

SEQ ID NO: 14793 - DNA, 25 bp, Artificial
  probe
  misc_feature (1)..(25): SEQ ID NO: 6019; WAN02499M_at; Start 19; Stop 43
ctacctttaagaagatagtagacgt

SEQ ID NO: 14794 - DNA, 25 bp, Artificial
  probe
  misc_feature (1)..(25): SEQ ID NO: 6019; WAN02499M_at; Start 83; Stop 107
atctatttgtttattgaatttaaga

SEQ ID NO: 14795 - DNA, 25 bp, Artificial
  probe
  misc_feature (1)..(25): SEQ ID NO: 6019; WAN02499M_at; Start 55; Stop 79
taagaaaatcaaaaagatactataa

SEQ ID NO: 14796 - DNA, 25 bp, Artificial
  probe
  misc_feature (1)..(25): SEQ ID NO: 6019; WAN02499M_at; Start 30; Stop 54
aagatagtagacgtatatacttttt

SEQ ID NO: 14797 - DNA, 25 bp, Artificial
  probe
  misc_feature (1)..(25): SEQ ID NO: 6019; WAN02499M_at; Start 15; Stop 39
actgctacctttaagaagatagtag

SEQ ID NO: 14798 - DNA, 25 bp, Artificial
  probe
  misc_feature (1)..(25): SEQ ID NO: 6019; WAN02499M_at; Start 94; Stop 118
tattgaatttaagactttggtaaca

SEQ ID NO: 14799 - DNA, 25 bp, Artificial
  probe
  misc_feature (1)..(25): SEQ ID NO: 6019; WAN02499M_at; Start 13; Stop 37
gtactgctacctttaagaagatagt

SEQ ID NO: 14800 - DNA, 25 bp, Artificial
  probe
  misc_feature (1)..(25): SEQ ID NO: 6019; WAN02499M_at; Start 23; Stop 47
ctttaagaagatagtagacgtatat

SEQ ID NO: 14801 - DNA, 25 bp, Artificial
  probe
  misc_feature (1)..(25): SEQ ID NO: 6019; WAN02499M_at; Start 24; Stop 48
tttaagaagatagtagacgtatata

SEQ ID NO: 14802 - DNA, 25 bp, Artificial
  probe
  misc_feature (1)..(25): SEQ ID NO: 6019; WAN02499M_at; Start 18; Stop 42
gctacctttaagaagatagtagacg

SEQ ID NO: 14803 - DNA, 25 bp, Artificial
  probe
  misc_feature (1)..(25): SEQ ID NO: 6019; WAN02499M_at; Start 26; Stop 50
taagaagatagtagacgtatatact

SEQ ID NO: 14804 - DNA, 25 bp, Artificial
  probe
  misc_feature (1)..(25): SEQ ID NO: 6019; WAN02499M_at; Start 11; Stop 35
aggtactgctacctttaagaagata

SEQ ID NO: 14805 - DNA, 25 bp, Artificial
  probe
  misc_feature (1)..(25): SEQ ID NO: 6019; WAN02499M_at; Start 84; Stop 108
tctatttgtttattgaatttaagac

SEQ ID NO: 14806 - DNA, 25 bp, Artificial
  probe
  misc_feature (1)..(25): SEQ ID NO: 6019; WAN02499M_at; Start 9; Stop 33
ataggtactgctacctttaagaaga

SEQ ID NO: 14807 - DNA, 25 bp, Artificial
  probe
  misc_feature (1)..(25): SEQ ID NO: 6019; WAN02499M_at; Start 25; Stop 49
ttaagaagatagtagacgtatatac

SEQ ID NO: 14808 - DNA, 25 bp, Artificial
  probe
  misc_feature (1)..(25): SEQ ID NO: 6019; WAN02499M_at; Start 17; Stop 41
tgctacctttaagaagatagtagac

SEQ ID NO: 14809 - DNA, 25 bp, Artificial
  probe
  misc_feature (1)..(25): SEQ ID NO: 6019; WAN02499M_at; Start 54; Stop 78
ttaagaaaatcaaaaagatactata

SEQ ID NO: 14810 - DNA, 25 bp, Artificial
  probe
  misc_feature (1)..(25): SEQ ID NO: 6019; WAN02499M_at; Start 85; Stop 109
ctatttgtttattgaatttaagact

SEQ ID NO: 14811 - DNA, 25 bp, Artificial
  probe
  misc_feature (1)..(25): SEQ ID NO: 6019; WAN02499M_at; Start 16; Stop 40
ctgctacctttaagaagatagtaga

SEQ ID NO: 14812 - DNA, 25 bp, Artificial
  probe
  misc_feature (1)..(25): SEQ ID NO: 6019; WAN02499M_at; Start 122; Stop 146
tgaaaataaaaaggaggtattcatc

SEQ ID NO: 14813 - DNA, 25 bp, Artificial
  probe
  misc_feature (1)..(25): SEQ ID NO: 6019; WAN02499M_at; Start 29; Stop 53
gaagatagtagacgtatatactttt

SEQ ID NO: 14814 - DNA, 25 bp, Artificial
  probe
  misc_feature (1)..(25): SEQ ID NO: 6019; WAN02499M_at; Start 10; Stop 34
taggtactgctacctttaagaagat

SEQ ID NO: 14815 - DNA, 25 bp, Artificial
  probe
  misc_feature (1)..(25): SEQ ID NO: 6019; WAN02499M_at; Start 21; Stop 45
acctttaagaagatagtagacgtat

SEQ ID NO: 14816 - DNA, 25 bp, Artificial
  probe
  misc_feature (1)..(25): SEQ ID NO: 6242; WAN02499N_at; Start 49; Stop 73
agtgacctccttcgaagttccatac

SEQ ID NO: 14817 - DNA, 25 bp, Artificial
  probe
  misc_feature (1)..(25): SEQ ID NO: 6242; WAN02499N_at; Start 47; Stop 71
gtagtgacctccttcgaagttccat

SEQ ID NO: 14818 - DNA, 25 bp, Artificial
  probe
  misc_feature (1)..(25): SEQ ID NO: 6242; WAN02499N_at; Start 130; Stop 154
ggtgttttcattacggcagaaagtc

SEQ ID NO: 14819 - DNA, 25 bp, Artificial
  probe
  misc_feature (1)..(25): SEQ ID NO: 6242; WAN02499N_at; Start 41; Stop 65
cggacggtagtgacctccttcgaag

SEQ ID NO: 14820 - DNA, 25 bp, Artificial
  probe
  misc_feature (1)..(25): SEQ ID NO: 6242; WAN02499N_at; Start 31; Stop 55
taagtaatgacggacggtagtgacc

SEQ ID NO: 14821 - DNA, 25 bp, Artificial
  probe
  misc_feature (1)..(25): SEQ ID NO: 6242; WAN02499N_at; Start 138; Stop 162
cattacggcagaaagtcttcgattt

SEQ ID NO: 14822 - DNA, 25 bp, Artificial
  probe
  misc_feature (1)..(25): SEQ ID NO: 6242; WAN02499N_at; Start 110; Stop 134
gctgaaaccaagctgtttcaggtgt

SEQ ID NO: 14823 - DNA, 25 bp, Artificial
  probe
  misc_feature (1)..(25): SEQ ID NO: 6242; WAN02499N_at; Start 35; Stop 59
taatgacggacggtagtgacctcct

SEQ ID NO: 14824 - DNA, 25 bp, Artificial
  probe
  misc_feature (1)..(25): SEQ ID NO: 6242; WAN02499N_at; Start 121; Stop 145
gctgtttcaggtgttttcattacgg

SEQ ID NO: 14825 - DNA, 25 bp, Artificial
  probe
  misc_feature (1)..(25): SEQ ID NO: 6242; WAN02499N_at; Start 20; Stop 44
taagactttcctaagtaatgacgga

SEQ ID NO: 14826 - DNA, 25 bp, Artificial
  probe
  misc_feature (1)..(25): SEQ ID NO: 6242; WAN02499N_at; Start 127; Stop 151
tcaggtgttttcattacggcagaaa

SEQ ID NO: 14827 - DNA, 25 bp, Artificial
  probe
  misc_feature (1)..(25): SEQ ID NO: 6242; WAN02499N_at; Start 124; Stop 148
gtttcaggtgttttcattacggcag

SEQ ID NO: 14828 - DNA, 25 bp, Artificial
  probe
  misc_feature (1)..(25): SEQ ID NO: 6242; WAN02499N_at; Start 117; Stop 141
ccaagctgtttcaggtgttttcatt

SEQ ID NO: 14829 - DNA, 25 bp, Artificial
  probe
  misc_feature (1)..(25): SEQ ID NO: 6242; WAN02499N_at; Start 99; Stop 123
gtttccggacagctgaaaccaagct

SEQ ID NO: 14830 - DNA, 25 bp, Artificial
  probe
  misc_feature (1)..(25): SEQ ID NO: 6242; WAN02499N_at; Start 140; Stop 164
ttacggcagaaagtcttcgatttag

SEQ ID NO: 14831 - DNA, 25 bp, Artificial
  probe
  misc_feature (1)..(25): SEQ ID NO: 6242; WAN02499N_at; Start 46; Stop 70
ggtagtgacctccttcgaagttcca

SEQ ID NO: 14832 - DNA, 25 bp, Artificial
  probe
  misc_feature (1)..(25): SEQ ID NO: 6242; WAN02499N_at; Start 134; Stop 158
ttttcattacggcagaaagtcttcg

SEQ ID NO: 14833 - DNA, 25 bp, Artificial
  probe
  misc_feature (1)..(25): SEQ ID NO: 6242; WAN02499N_at; Start 38; Stop 62
tgacggacggtagtgacctccttcg

SEQ ID NO: 14834 - DNA, 25 bp, Artificial
  probe
  misc_feature (1)..(25): SEQ ID NO: 6242; WAN02499N_at; Start 22; Stop 46
agactttcctaagtaatgacggacg

SEQ ID NO: 14835 - DNA, 25 bp, Artificial
  probe
  misc_feature (1)..(25): SEQ ID NO: 6242; WAN02499N_at; Start 28; Stop 52
tcctaagtaatgacggacggtagtg

SEQ ID NO: 14836 - DNA, 25 bp, Artificial
  probe
  misc_feature (1)..(25): SEQ ID NO: 6242; WAN02499N_at; Start 29; Stop 53
cctaagtaatgacggacggtagtga

SEQ ID NO: 14837 - DNA, 25 bp, Artificial
  probe
  misc_feature (1)..(25): SEQ ID NO: 6242; WAN02499N_at; Start 95; Stop 119
taaagtttccggacagctgaaacca

SEQ ID NO: 14838 - DNA, 25 bp, Artificial
  probe
  misc_feature (1)..(25): SEQ ID NO: 6242; WAN02499N_at; Start 102; Stop 126
tccggacagctgaaaccaagctgtt

SEQ ID NO: 14839 - DNA, 25 bp, Artificial
  probe
  misc_feature (1)..(25): SEQ ID NO: 6242; WAN02499N_at; Start 125; Stop 149
tttcaggtgttttcattacggcaga

SEQ ID NO: 14840 - DNA, 25 bp, Artificial
  probe
  misc_feature (1)..(25): SEQ ID NO: 6242; WAN02499N_at; Start 33; Stop 57
agtaatgacggacggtagtgacctc

SEQ ID NO: 14841 - DNA, 25 bp, Artificial
  probe
  misc_feature (1)..(25): SEQ ID NO: 6242; WAN02499N_at; Start 136; Stop 160
ttcattacggcagaaagtcttcgat

SEQ ID NO: 14842 - DNA, 25 bp, Artificial
  probe
  misc_feature (1)..(25): SEQ ID NO: 6242; WAN02499N_at; Start 100; Stop 124
tttccggacagctgaaaccaagctg

SEQ ID NO: 14843 - DNA, 25 bp, Artificial
  probe
  misc_feature (1)..(25): SEQ ID NO: 6242; WAN02499N_at; Start 97; Stop 121
aagtttccggacagctgaaaccaag

SEQ ID NO: 14844 - DNA, 25 bp, Artificial
  probe
  misc_feature (1)..(25): SEQ ID NO: 6242; WAN02499N_at; Start 128; Stop 152
caggtgttttcattacggcagaaag

SEQ ID NO: 14845 - DNA, 25 bp, Artificial
  probe
  misc_feature (1)..(25): SEQ ID NO: 6242; WAN02499N_at; Start 115; Stop 139
aaccaagctgtttcaggtgttttca

SEQ ID NO: 14846 - DNA, 25 bp, Artificial
  probe
  misc_feature (1)..(25): SEQ ID NO: 6242; WAN02499N_at; Start 105; Stop 129
ggacagctgaaaccaagctgtttca

SEQ ID NO: 14847 - DNA, 25 bp, Artificial
  probe
  misc_feature (1)..(25): SEQ ID NO: 6242; WAN02499N_at; Start 52; Stop 76
gacctccttcgaagttccataccta

SEQ ID NO: 14848 - DNA, 25 bp, Artificial
  probe
  misc_feature (1)..(25): SEQ ID NO: 6242; WAN02499N_at; Start 36; Stop 60
aatgacggacggtagtgacctcctt

SEQ ID NO: 14849 - DNA, 25 bp, Artificial
  probe
  misc_feature (1)..(25): SEQ ID NO: 6242; WAN02499N_at; Start 39; Stop 63
gacggacggtagtgacctccttcga

SEQ ID NO: 14850 - DNA, 25 bp, Artificial
  probe
  misc_feature (1)..(25): SEQ ID NO: 6180; WAN02499O_x_at; Start 24; Stop 48
cactgacatatttcgtttgaatctc

SEQ ID NO: 14851 - DNA, 25 bp, Artificial
  probe
  misc_feature (1)..(25): SEQ ID NO: 6180; WAN02499O_x_at; Start 1; Stop 25
tatgaaggctaggaatgccaaagca

SEQ ID NO: 14852 - DNA, 25 bp, Artificial
  probe
  misc_feature (1)..(25): SEQ ID NO: 6180; WAN02499O_x_at; Start 6; Stop 30
aggctaggaatgccaaagcactgac

SEQ ID NO: 14853 - DNA, 25 bp, Artificial
  probe
  misc_feature (1)..(25): SEQ ID NO: 6180; WAN02499O_x_at; Start 22; Stop 46
agcactgacatatttcgtttgaatc

SEQ ID NO: 14854 - DNA, 25 bp, Artificial
  probe
  misc_feature (1)..(25): SEQ ID NO: 6180; WAN02499O_x_at; Start 7; Stop 31
ggctaggaatgccaaagcactgaca

SEQ ID NO: 14855 - DNA, 25 bp, Artificial
  probe
  misc_feature (1)..(25): SEQ ID NO: 6180; WAN02499O_x_at; Start 9; Stop 33
ctaggaatgccaaagcactgacata

SEQ ID NO: 14856 - DNA, 25 bp, Artificial
  probe
  misc_feature (1)..(25): SEQ ID NO: 6180; WAN02499O_x_at; Start 11; Stop 35
aggaatgccaaagcactgacatatt

SEQ ID NO: 14857 - DNA, 25 bp, Artificial
  probe
  misc_feature (1)..(25): SEQ ID NO: 6180; WAN02499O_x_at; Start 25; Stop 49
actgacatatttcgtttgaatctca

SEQ ID NO: 14858 - DNA, 25 bp, Artificial
  probe
  misc_feature (1)..(25): SEQ ID NO: 6180; WAN02499O_x_at; Start 8; Stop 32
gctaggaatgccaaagcactgacat

SEQ ID NO: 14859 - DNA, 25 bp, Artificial
  probe
  misc_feature (1)..(25): SEQ ID NO: 6180; WAN02499O_x_at; Start 21; Stop 45
aagcactgacatatttcgtttgaat

SEQ ID NO: 14860 - DNA, 25 bp, Artificial
  probe
  misc_feature (1)..(25): SEQ ID NO: 6180; WAN02499O_x_at; Start 19; Stop 43
caaagcactgacatatttcgtttga

SEQ ID NO: 14861 - DNA, 25 bp, Artificial
  probe
  misc_feature (1)..(25): SEQ ID NO: 6180; WAN02499O_x_at; Start 5; Stop 29
aaggctaggaatgccaaagcactga

SEQ ID NO: 14862 - DNA, 25 bp, Artificial
  probe
  misc_feature (1)..(25): SEQ ID NO: 6180; WAN02499O_x_at; Start 20; Stop 44
aaagcactgacatatttcgtttgaa

SEQ ID NO: 14863 - DNA, 25 bp, Artificial
  probe
  misc_feature (1)..(25): SEQ ID NO: 6180; WAN02499O_x_at; Start 18; Stop 42
ccaaagcactgacatatttcgtttg

SEQ ID NO: 14864 - DNA, 25 bp, Artificial
  probe
  misc_feature (1)..(25): SEQ ID NO: 6180; WAN02499O_x_at; Start 13; Stop 37
gaatgccaaagcactgacatatttc

SEQ ID NO: 14865 - DNA, 25 bp, Artificial
  probe
  misc_feature (1)..(25): SEQ ID NO: 6180; WAN02499O_x_at; Start 15; Stop 39
atgccaaagcactgacatatttcgt

SEQ ID NO: 14866 - DNA, 25 bp, Artificial
  probe
  misc_feature (1)..(25): SEQ ID NO: 6180; WAN02499O_x_at; Start 3; Stop 27
tgaaggctaggaatgccaaagcact

SEQ ID NO: 14867 - DNA, 25 bp, Artificial
  probe
  misc_feature (1)..(25): SEQ ID NO: 6180; WAN02499O_x_at; Start 16; Stop 40
tgccaaagcactgacatatttcgtt

SEQ ID NO: 14868 - DNA, 25 bp, Artificial
  probe
  misc_feature (1)..(25): SEQ ID NO: 6180; WAN02499O_x_at; Start 26; Stop 50
ctgacatatttcgtttgaatctcat

SEQ ID NO: 14869 - DNA, 25 bp, Artificial
  probe
  misc_feature (1)..(25): SEQ ID NO: 6180; WAN02499O_x_at; Start 14; Stop 38
aatgccaaagcactgacatatttcg

SEQ ID NO: 14870 - DNA, 25 bp, Artificial
  probe
  misc_feature (1)..(25): SEQ ID NO: 6180; WAN02499O_x_at; Start 2; Stop 26
atgaaggctaggaatgccaaagcac

SEQ ID NO: 14871 - DNA, 25 bp, Artificial
  probe
  misc_feature (1)..(25): SEQ ID NO: 6180; WAN02499O_x_at; Start 23; Stop 47
gcactgacatatttcgtttgaatct

SEQ ID NO: 14872 - DNA, 25 bp, Artificial
  probe
  misc_feature (1)..(25): SEQ ID NO: 6180; WAN02499O_x_at; Start 4; Stop 28
gaaggctaggaatgccaaagcactg

SEQ ID NO: 14873 - DNA, 25 bp, Artificial
  probe
  misc_feature (1)..(25): SEQ ID NO: 6180; WAN02499O_x_at; Start 10; Stop 34
taggaatgccaaagcactgacatat

SEQ ID NO: 14874 - DNA, 25 bp, Artificial
  probe
  misc_feature (1)..(25): SEQ ID NO: 6180; WAN02499O_x_at; Start 12; Stop 36
ggaatgccaaagcactgacatattt

SEQ ID NO: 14875 - DNA, 25 bp, Artificial
  probe
  misc_feature (1)..(25): SEQ ID NO: 6180; WAN02499O_x_at; Start 17; Stop 41
gccaaagcactgacatatttcgttt

SEQ ID NO: 14876 - DNA, 25 bp, Artificial
  probe
  misc_feature (1)..(25): SEQ ID NO: 6181; WAN02499P_at; Start 162; Stop 186
aaacgataggactggtctggtaatc

SEQ ID NO: 14877 - DNA, 25 bp, Artificial
  probe
  misc_feature (1)..(25): SEQ ID NO: 6181; WAN02499P_at; Start 186; Stop 210
cattttaggaatggacaggactggg

SEQ ID NO: 14878 - DNA, 25 bp, Artificial
  probe
  misc_feature (1)..(25): SEQ ID NO: 6181; WAN02499P_at; Start 80; Stop 104
tcatggtgatgtggcatgaatcaca

SEQ ID NO: 14879 - DNA, 25 bp, Artificial
  probe
  misc_feature (1)..(25): SEQ ID NO: 6181; WAN02499P_at; Start 32; Stop 56
caggctgaagggaagaccagagtac

SEQ ID NO: 14880 - DNA, 25 bp, Artificial
  probe
  misc_feature (1)..(25): SEQ ID NO: 6181; WAN02499P_at; Start 96; Stop 120
tgaatcacaataacggatatgaggc

SEQ ID NO: 14881 - DNA, 25 bp, Artificial
  probe
  misc_feature (1)..(25): SEQ ID NO: 6181; WAN02499P_at; Start 191; Stop 215
taggaatggacaggactgggattct

SEQ ID NO: 14882 - DNA, 25 bp, Artificial
  probe
  misc_feature (1)..(25): SEQ ID NO: 6181; WAN02499P_at; Start 171; Stop 195
gactggtctggtaatcattttagga

SEQ ID NO: 14883 - DNA, 25 bp, Artificial
  probe
  misc_feature (1)..(25): SEQ ID NO: 6181; WAN02499P_at; Start 101; Stop 125
cacaataacggatatgaggctgggc

SEQ ID NO: 14884 - DNA, 25 bp, Artificial
  probe
  misc_feature (1)..(25): SEQ ID NO: 6181; WAN02499P_at; Start 138; Stop 162
cctcattgtgggttattgtttgtaa

SEQ ID NO: 14885 - DNA, 25 bp, Artificial
  probe
  misc_feature (1)..(25): SEQ ID NO: 6181; WAN02499P_at; Start 135; Stop 159
cagcctcattgtgggttattgtttg

SEQ ID NO: 14886 - DNA, 25 bp, Artificial
  probe
  misc_feature (1)..(25): SEQ ID NO: 6181; WAN02499P_at; Start 54; Stop 78
tactctgaggtgatgttaatcagga

SEQ ID NO: 14887 - DNA, 25 bp, Artificial
  probe
  misc_feature (1)..(25): SEQ ID NO: 6181; WAN02499P_at; Start 188; Stop 212
ttttaggaatggacaggactgggat

SEQ ID NO: 14888 - DNA, 25 bp, Artificial
  probe
  misc_feature (1)..(25): SEQ ID NO: 6181; WAN02499P_at; Start 48; Stop 72
ccagagtactctgaggtgatgttaa

SEQ ID NO: 14889 - DNA, 25 bp, Artificial
  probe
  misc_feature (1)..(25): SEQ ID NO: 6181; WAN02499P_at; Start 87; Stop 111
gatgtggcatgaatcacaataacgg

SEQ ID NO: 14890 - DNA, 25 bp, Artificial
  probe
  misc_feature (1)..(25): SEQ ID NO: 6181; WAN02499P_at; Start 121; Stop 145
tgggcagattgtgccagcctcattg

SEQ ID NO: 14891 - DNA, 25 bp, Artificial
  probe
  misc_feature (1)..(25): SEQ ID NO: 6181; WAN02499P_at; Start 28; Stop 52
atagcaggctgaagggaagaccaga

SEQ ID NO: 14892 - DNA, 25 bp, Artificial
  probe
  misc_feature (1)..(25): SEQ ID NO: 6181; WAN02499P_at; Start 154; Stop 178
tgtttgtaaaacgataggactggtc

SEQ ID NO: 14893 - DNA, 25 bp, Artificial
  probe
  misc_feature (1)..(25): SEQ ID NO: 6181; WAN02499P_at; Start 182; Stop 206
taatcattttaggaatggacaggac

SEQ ID NO: 14894 - DNA, 25 bp, Artificial
  probe
  misc_feature (1)..(25): SEQ ID NO: 6181; WAN02499P_at; Start 165; Stop 189
cgataggactggtctggtaatcatt

SEQ ID NO: 14895 - DNA, 25 bp, Artificial
  probe
  misc_feature (1)..(25): SEQ ID NO: 6181; WAN02499P_at; Start 70; Stop 94
taatcaggaatcatggtgatgtggc

SEQ ID NO: 14896 - DNA, 25 bp, Artificial
  probe
  misc_feature (1)..(25): SEQ ID NO: 6181; WAN02499P_at; Start 38; Stop 62
gaagggaagaccagagtactctgag

SEQ ID NO: 14897 - DNA, 25 bp, Artificial
  probe
  misc_feature (1)..(25): SEQ ID NO: 6181; WAN02499P_at; Start 127; Stop 151
gattgtgccagcctcattgtgggtt

SEQ ID NO: 14898 - DNA, 25 bp, Artificial
  probe
  misc_feature (1)..(25): SEQ ID NO: 6181; WAN02499P_at; Start 130; Stop 154
tgtgccagcctcattgtgggttatt

SEQ ID NO: 14899 - DNA, 25 bp, Artificial
  probe
  misc_feature (1)..(25): SEQ ID NO: 6181; WAN02499P_at; Start 125; Stop 149
cagattgtgccagcctcattgtggg

SEQ ID NO: 14900 - DNA, 25 bp, Artificial
  probe
  misc_feature (1)..(25): SEQ ID NO: 6181; WAN02499P_at; Start 57; Stop 81
tctgaggtgatgttaatcaggaatc

SEQ ID NO: 14901 - DNA, 25 bp, Artificial
  probe
  misc_feature (1)..(25): SEQ ID NO: 6181; WAN02499P_at; Start 106; Stop 130
taacggatatgaggctgggcagatt

SEQ ID NO: 14902 - DNA, 25 bp, Artificial
  probe
  misc_feature (1)..(25): SEQ ID NO: 6181; WAN02499P_at; Start 12; Stop 36
catcattatgaaaaagatagcaggc

SEQ ID NO: 14903 - DNA, 25 bp, Artificial
  probe
  misc_feature (1)..(25): SEQ ID NO: 6181; WAN02499P_at; Start 158; Stop 182
tgtaaaacgataggactggtctggt

SEQ ID NO: 14904 - DNA, 25 bp, Artificial
  probe
  misc_feature (1)..(25): SEQ ID NO: 6181; WAN02499P_at; Start 42; Stop 66
ggaagaccagagtactctgaggtga

SEQ ID NO: 14905 - DNA, 25 bp, Artificial
  probe
  misc_feature (1)..(25): SEQ ID NO: 6181; WAN02499P_at; Start 25; Stop 49
aagatagcaggctgaagggaagacc

SEQ ID NO: 14906 - DNA, 25 bp, Artificial
  probe
  misc_feature (1)..(25): SEQ ID NO: 6181; WAN02499P_at; Start 103; Stop 127
caataacggatatgaggctgggcag

SEQ ID NO: 14907 - DNA, 25 bp, Artificial
  probe
  misc_feature (1)..(25): SEQ ID NO: 6181; WAN02499P_at; Start 90; Stop 114
gtggcatgaatcacaataacggata

SEQ ID NO: 14908 - DNA, 25 bp, Artificial
  probe
  misc_feature (1)..(25): SEQ ID NO: 6181; WAN02499P_at; Start 35; Stop 59
gctgaagggaagaccagagtactct

SEQ ID NO: 14909 - DNA, 25 bp, Artificial
  probe
  misc_feature (1)..(25): SEQ ID NO: 6181; WAN02499P_at; Start 73; Stop 97
tcaggaatcatggtgatgtggcatg

SEQ ID NO: 14910 - DNA, 25 bp, Artificial
  probe
  misc_feature (1)..(25): SEQ ID NO: 6031; WAN02499Q_at; Start 44; Stop 68
gaagtagcactcaagaagagattta

SEQ ID NO: 14911 - DNA, 25 bp, Artificial
  probe
  misc_feature (1)..(25): SEQ ID NO: 6031; WAN02499Q_at; Start 170; Stop 194
taattcattacattgctcacagttg

SEQ ID NO: 14912 - DNA, 25 bp, Artificial
  probe
  misc_feature (1)..(25): SEQ ID NO: 6031; WAN02499Q_at; Start 135; Stop 159
aacttgcacagaaaaaggattatta

SEQ ID NO: 14913 - DNA, 25 bp, Artificial
  probe
  misc_feature (1)..(25): SEQ ID NO: 6031; WAN02499Q_at; Start 199; Stop 223
taagagatatgaataaggagaaatc

SEQ ID NO: 14914 - DNA, 25 bp, Artificial
  probe
  misc_feature (1)..(25): SEQ ID NO: 6031; WAN02499Q_at; Start 129; Stop 153
ttcgaaaacttgcacagaaaaagga

SEQ ID NO: 14915 - DNA, 25 bp, Artificial
  probe
  misc_feature (1)..(25): SEQ ID NO: 6031; WAN02499Q_at; Start 121; Stop 145
gagatgttttcgaaaacttgcacag

SEQ ID NO: 14916 - DNA, 25 bp, Artificial
  probe
  misc_feature (1)..(25): SEQ ID NO: 6031; WAN02499Q_at; Start 167; Stop 191
gtgtaattcattacattgctcacag

SEQ ID NO: 14917 - DNA, 25 bp, Artificial
  probe
  misc_feature (1)..(25): SEQ ID NO: 6031; WAN02499Q_at; Start 145; Stop 169
gaaaaaggattattattgtcatgtg

SEQ ID NO: 14918 - DNA, 25 bp, Artificial
  probe
  misc_feature (1)..(25): SEQ ID NO: 6031; WAN02499Q_at; Start 9; Stop 33
aatgataatatctatgttctgaacg

SEQ ID NO: 14919 - DNA, 25 bp, Artificial
  probe
  misc_feature (1)..(25): SEQ ID NO: 6031; WAN02499Q_at; Start 141; Stop 165
cacagaaaaaggattattattgtca

SEQ ID NO: 14920 - DNA, 25 bp, Artificial
  probe
  misc_feature (1)..(25): SEQ ID NO: 6031; WAN02499Q_at; Start 51; Stop 75
cactcaagaagagatttaagtttac

SEQ ID NO: 14921 - DNA, 25 bp, Artificial
  probe
  misc_feature (1)..(25): SEQ ID NO: 6031; WAN02499Q_at; Start 174; Stop 198
tcattacattgctcacagttgattt

SEQ ID NO: 14922 - DNA, 25 bp, Artificial
  probe
  misc_feature (1)..(25): SEQ ID NO: 6031; WAN02499Q_at; Start 41; Stop 65
taagaagtagcactcaagaagagat

SEQ ID NO: 14923 - DNA, 25 bp, Artificial
  probe
  misc_feature (1)..(25): SEQ ID NO: 6031; WAN02499Q_at; Start 152; Stop 176
gattattattgtcatgtgtaattca

SEQ ID NO: 14924 - DNA, 25 bp, Artificial
  probe
  misc_feature (1)..(25): SEQ ID NO: 6031; WAN02499Q_at; Start 35; Stop 59
tacttttaagaagtagcactcaaga

SEQ ID NO: 14925 - DNA, 25 bp, Artificial
  probe
  misc_feature (1)..(25): SEQ ID NO: 6031; WAN02499Q_at; Start 96; Stop 120
cgtaagtaaactatcattgaaaggg

SEQ ID NO: 14926 - DNA, 25 bp, Artificial
  probe
  misc_feature (1)..(25): SEQ ID NO: 6031; WAN02499Q_at; Start 29; Stop 53
gaacgatacttttaagaagtagcac

SEQ ID NO: 14927 - DNA, 25 bp, Artificial
  probe
  misc_feature (1)..(25): SEQ ID NO: 6031; WAN02499Q_at; Start 87; Stop 111
tgttttattcgtaagtaaactatca

SEQ ID NO: 14928 - DNA, 25 bp, Artificial
  probe
  misc_feature (1)..(25): SEQ ID NO: 6031; WAN02499Q_at; Start 47; Stop 71
gtagcactcaagaagagatttaagt

SEQ ID NO: 14929 - DNA, 25 bp, Artificial
  probe
  misc_feature (1)..(25): SEQ ID NO: 6031; WAN02499Q_at; Start 102; Stop 126
taaactatcattgaaaggggagatg

SEQ ID NO: 14930 - DNA, 25 bp, Artificial
  probe
  misc_feature (1)..(25): SEQ ID NO: 6031; WAN02499Q_at; Start 183; Stop 207
tgctcacagttgattttaagagata

SEQ ID NO: 14931 - DNA, 25 bp, Artificial
  probe
  misc_feature (1)..(25): SEQ ID NO: 6031; WAN02499Q_at; Start 12; Stop 36
gataatatctatgttctgaacgata

SEQ ID NO: 14932 - DNA, 25 bp, Artificial
  probe
  misc_feature (1)..(25): SEQ ID NO: 6031; WAN02499Q_at; Start 119; Stop 143
gggagatgttttcgaaaacttgcac

SEQ ID NO: 14933 - DNA, 25 bp, Artificial
  probe
  misc_feature (1)..(25): SEQ ID NO: 6031; WAN02499Q_at; Start 32; Stop 56
cgatacttttaagaagtagcactca

SEQ ID NO: 14934 - DNA, 25 bp, Artificial
  probe
  misc_feature (1)..(25): SEQ ID NO: 6031; WAN02499Q_at; Start 23; Stop 47
tgttctgaacgatacttttaagaag

SEQ ID NO: 14935 - DNA, 25 bp, Artificial
  probe
  misc_feature (1)..(25): SEQ ID NO: 6031; WAN02499Q_at; Start 187; Stop 211
cacagttgattttaagagatatgaa

SEQ ID NO: 14936 - DNA, 25 bp, Artificial
  probe
  misc_feature (1)..(25): SEQ ID NO: 6031; WAN02499Q_at; Start 130; Stop 154
tcgaaaacttgcacagaaaaaggat

SEQ ID NO: 14937 - DNA, 25 bp, Artificial
  probe
  misc_feature (1)..(25): SEQ ID NO: 6031; WAN02499Q_at; Start 178; Stop 202
tacattgctcacagttgattttaag

SEQ ID NO: 14938 - DNA, 25 bp, Artificial
  probe
  misc_feature (1)..(25): SEQ ID NO: 6031; WAN02499Q_at; Start 180; Stop 204
cattgctcacagttgattttaagag

SEQ ID NO: 14939 - DNA, 25 bp, Artificial
  probe
  misc_feature (1)..(25): SEQ ID NO: 6031; WAN02499Q_at; Start 132; Stop 156
gaaaacttgcacagaaaaaggatta

SEQ ID NO: 14940 - DNA, 25 bp, Artificial
  probe
  misc_feature (1)..(25): SEQ ID NO: 6031; WAN02499Q_at; Start 39; Stop 63
tttaagaagtagcactcaagaagag

SEQ ID NO: 14941 - DNA, 25 bp, Artificial
  probe
  misc_feature (1)..(25): SEQ ID NO: 6031; WAN02499Q_at; Start 123; Stop 147
gatgttttcgaaaacttgcacagaa

SEQ ID NO: 14942 - DNA, 25 bp, Artificial
  probe
  misc_feature (1)..(25): SEQ ID NO: 6031; WAN02499Q_at; Start 21; Stop 45
tatgttctgaacgatacttttaaga

SEQ ID NO: 14943 - DNA, 25 bp, Artificial
  probe
  misc_feature (1)..(25): SEQ ID NO: 6031; WAN02499Q_at; Start 58; Stop 82
gaagagatttaagtttacttggtga

SEQ ID NO: 14944 - DNA, 25 bp, Artificial
  probe
  misc_feature (1)..(25): SEQ ID NO: 6094; WAN02499R_at; Start 110; Stop 134
gaaagtacctatgaatcatagaagg

SEQ ID NO: 14945 - DNA, 25 bp, Artificial
  probe
  misc_feature (1)..(25): SEQ ID NO: 6094; WAN02499R_at; Start 41; Stop 65
gaacggattaactcagtgagataaa

SEQ ID NO: 14946 - DNA, 25 bp, Artificial
  probe
  misc_feature (1)..(25): SEQ ID NO: 6094; WAN02499R_at; Start 106; Stop 130
gattgaaagtacctatgaatcatag

SEQ ID NO: 14947 - DNA, 25 bp, Artificial
  probe
  misc_feature (1)..(25): SEQ ID NO: 6094; WAN02499R_at; Start 117; Stop 141
cctatgaatcatagaaggattaact

SEQ ID NO: 14948 - DNA, 25 bp, Artificial
  probe
  misc_feature (1)..(25): SEQ ID NO: 6094; WAN02499R_at; Start 44; Stop 68
cggattaactcagtgagataaattt

SEQ ID NO: 14949 - DNA, 25 bp, Artificial
  probe
  misc_feature (1)..(25): SEQ ID NO: 6094; WAN02499R_at; Start 96; Stop 120
cgtgtatacagattgaaagtaccta

SEQ ID NO: 14950 - DNA, 25 bp, Artificial
  probe
  misc_feature (1)..(25): SEQ ID NO: 6094; WAN02499R_at; Start 83; Stop 107
taatccgtttcttcgtgtatacaga

SEQ ID NO: 14951 - DNA, 25 bp, Artificial
  probe
  misc_feature (1)..(25): SEQ ID NO: 6094; WAN02499R_at; Start 66; Stop 90
ttttatcagaacataagtaatccgt

SEQ ID NO: 14952 - DNA, 25 bp, Artificial
  probe
  misc_feature (1)..(25): SEQ ID NO: 6094; WAN02499R_at; Start 39; Stop 63
gtgaacggattaactcagtgagata

SEQ ID NO: 14953 - DNA, 25 bp, Artificial
  probe
  misc_feature (1)..(25): SEQ ID NO: 6094; WAN02499R_at; Start 75; Stop 99
aacataagtaatccgtttcttcgtg

SEQ ID NO: 14954 - DNA, 25 bp, Artificial
  probe
  misc_feature (1)..(25): SEQ ID NO: 6094; WAN02499R_at; Start 23; Stop 47
tttgctacgtttgttagtgaacgga

SEQ ID NO: 14955 - DNA, 25 bp, Artificial
  probe
  misc_feature (1)..(25): SEQ ID NO: 6094; WAN02499R_at; Start 130; Stop 154
gaaggattaacttgttctatgaata

SEQ ID NO: 14956 - DNA, 25 bp, Artificial
  probe
  misc_feature (1)..(25): SEQ ID NO: 6094; WAN02499R_at; Start 73; Stop 97
agaacataagtaatccgtttcttcg

SEQ ID NO: 14957 - DNA, 25 bp, Artificial
  probe
  misc_feature (1)..(25): SEQ ID NO: 6094; WAN02499R_at; Start 102; Stop 126
tacagattgaaagtacctatgaatc

SEQ ID NO: 14958 - DNA, 25 bp, Artificial
  probe
  misc_feature (1)..(25): SEQ ID NO: 6094; WAN02499R_at; Start 15; Stop 39
tatacgcttttgctacgtttgttag

SEQ ID NO: 14959 - DNA, 25 bp, Artificial
  probe
  misc_feature (1)..(25): SEQ ID NO: 6094; WAN02499R_at; Start 88; Stop 112
cgtttcttcgtgtatacagattgaa

SEQ ID NO: 14960 - DNA, 25 bp, Artificial
  probe
  misc_feature (1)..(25): SEQ ID NO: 6094; WAN02499R_at; Start 54; Stop 78
cagtgagataaattttatcagaaca

SEQ ID NO: 14961 - DNA, 25 bp, Artificial
  probe
  misc_feature (1)..(25): SEQ ID NO: 6094; WAN02499R_at; Start 31; Stop 55
gtttgttagtgaacggattaactca

SEQ ID NO: 14962 - DNA, 25 bp, Artificial
  probe
  misc_feature (1)..(25): SEQ ID NO: 6094; WAN02499R_at; Start 2; Stop 26
tataacgcacttttatacgcttttg

SEQ ID NO: 14963 - DNA, 25 bp, Artificial
  probe
  misc_feature (1)..(25): SEQ ID NO: 6094; WAN02499R_at; Start 9; Stop 33
cacttttatacgcttttgctacgtt

SEQ ID NO: 14964 - DNA, 25 bp, Artificial
  probe
  misc_feature (1)..(25): SEQ ID NO: 6094; WAN02499R_at; Start 122; Stop 146
gaatcatagaaggattaacttgttc

SEQ ID NO: 14965 - DNA, 25 bp, Artificial
  probe
  misc_feature (1)..(25): SEQ ID NO: 6094; WAN02499R_at; Start 79; Stop 103
taagtaatccgtttcttcgtgtata

SEQ ID NO: 14966 - DNA, 25 bp, Artificial
  probe
  misc_feature (1)..(25): SEQ ID NO: 6094; WAN02499R_at; Start 94; Stop 118
ttcgtgtatacagattgaaagtacc

SEQ ID NO: 14967 - DNA, 25 bp, Artificial
  probe
  misc_feature (1)..(25): SEQ ID NO: 6094; WAN02499R_at; Start 98; Stop 122
tgtatacagattgaaagtacctatg

SEQ ID NO: 14968 - DNA, 25 bp, Artificial
  probe
  misc_feature (1)..(25): SEQ ID NO: 6094; WAN02499R_at; Start 77; Stop 101
cataagtaatccgtttcttcgtgta

SEQ ID NO: 14969 - DNA, 25 bp, Artificial
  probe
  misc_feature (1)..(25): SEQ ID NO: 6094; WAN02499R_at; Start 69; Stop 93
tatcagaacataagtaatccgtttc

SEQ ID NO: 14970 - DNA, 25 bp, Artificial
  probe
  misc_feature (1)..(25): SEQ ID NO: 6094; WAN02499R_at; Start 17; Stop 41
tacgcttttgctacgtttgttagtg

SEQ ID NO: 14971 - DNA, 25 bp, Artificial
  probe
  misc_feature (1)..(25): SEQ ID NO: 6094; WAN02499R_at; Start 7; Stop 31
cgcacttttatacgcttttgctacg

SEQ ID NO: 14972 - DNA, 25 bp, Artificial
  probe
  misc_feature (1)..(25): SEQ ID NO: 6094; WAN02499R_at; Start 19; Stop 43
cgcttttgctacgtttgttagtgaa

SEQ ID NO: 14973 - DNA, 25 bp, Artificial
  probe
  misc_feature (1)..(25): SEQ ID NO: 6094; WAN02499R_at; Start 37; Stop 61
tagtgaacggattaactcagtgaga

SEQ ID NO: 14974 - DNA, 25 bp, Artificial
  probe
  misc_feature (1)..(25): SEQ ID NO: 6094; WAN02499R_at; Start 49; Stop 73
taactcagtgagataaattttatca

SEQ ID NO: 14975 - DNA, 25 bp, Artificial
  probe
  misc_feature (1)..(25): SEQ ID NO: 6094; WAN02499R_at; Start 26; Stop 50
gctacgtttgttagtgaacggatta

SEQ ID NO: 14976 - DNA, 25 bp, Artificial
  probe
  misc_feature (1)..(25): SEQ ID NO: 6094; WAN02499R_at; Start 34; Stop 58
tgttagtgaacggattaactcagtg

SEQ ID NO: 14977 - DNA, 25 bp, Artificial
  probe
  misc_feature (1)..(25): SEQ ID NO: 6094; WAN02499R_at; Start 86; Stop 110
tccgtttcttcgtgtatacagattg

SEQ ID NO: 14978 - DNA, 25 bp, Artificial
  probe
  misc_feature (1)..(25): SEQ ID NO: 6000; WAN02499S_at; Start 126; Stop 150
aaaaacacttttgttcactagcaga

SEQ ID NO: 14979 - DNA, 25 bp, Artificial
  probe
  misc_feature (1)..(25): SEQ ID NO: 6000; WAN02499S_at; Start 69; Stop 93
aaaagccctataatctccacagtgg

SEQ ID NO: 14980 - DNA, 25 bp, Artificial
  probe
  misc_feature (1)..(25): SEQ ID NO: 6000; WAN02499S_at; Start 230; Stop 254
gaagcccctttttgtgtgtagacag

SEQ ID NO: 14981 - DNA, 25 bp, Artificial
  probe
  misc_feature (1)..(25): SEQ ID NO: 6000; WAN02499S_at; Start 233; Stop 257
gcccctttttgtgtgtagacagtac

SEQ ID NO: 14982 - DNA, 25 bp, Artificial
  probe
  misc_feature (1)..(25): SEQ ID NO: 6000; WAN02499S_at; Start 235; Stop 259
ccctttttgtgtgtagacagtacga

SEQ ID NO: 14983 - DNA, 25 bp, Artificial
  probe
  misc_feature (1)..(25): SEQ ID NO: 6000; WAN02499S_at; Start 219; Stop 243
agatggcttaggaagcccctttttg

SEQ ID NO: 14984 - DNA, 25 bp, Artificial
  probe
  misc_feature (1)..(25): SEQ ID NO: 6000; WAN02499S_at; Start 118; Stop 142
gagccagaaaaaacacttttgttca

SEQ ID NO: 14985 - DNA, 25 bp, Artificial
  probe
  misc_feature (1)..(25): SEQ ID NO: 6000; WAN02499S_at; Start 27; Stop 51
gcgcttttcattataagtcttatgg

SEQ ID NO: 14986 - DNA, 25 bp, Artificial
  probe
  misc_feature (1)..(25): SEQ ID NO: 6000; WAN02499S_at; Start 21; Stop 45
gtttaggcgcttttcattataagtc

SEQ ID NO: 14987 - DNA, 25 bp, Artificial
  probe
  misc_feature (1)..(25): SEQ ID NO: 6000; WAN02499S_at; Start 158; Stop 182
gagcagaagtgtttttctgttcaga

SEQ ID NO: 14988 - DNA, 25 bp, Artificial
  probe
  misc_feature (1)..(25): SEQ ID NO: 6000; WAN02499S_at; Start 210; Stop 234
taagaatagagatggcttaggaagc

SEQ ID NO: 14989 - DNA, 25 bp, Artificial
  probe
  misc_feature (1)..(25): SEQ ID NO: 6000; WAN02499S_at; Start 173; Stop 197
tctgttcagatttacccaaaactgg

SEQ ID NO: 14990 - DNA, 25 bp, Artificial
  probe
  misc_feature (1)..(25): SEQ ID NO: 6000; WAN02499S_at; Start 44; Stop 68
tcttatgggacttttttgatactca

SEQ ID NO: 14991 - DNA, 25 bp, Artificial
  probe
  misc_feature (1)..(25): SEQ ID NO: 6000; WAN02499S_at; Start 18; Stop 42
gttgtttaggcgcttttcattataa

SEQ ID NO: 14992 - DNA, 25 bp, Artificial
  probe
  misc_feature (1)..(25): SEQ ID NO: 6000; WAN02499S_at; Start 216; Stop 240
tagagatggcttaggaagccccttt

SEQ ID NO: 14993 - DNA, 25 bp, Artificial
  probe
  misc_feature (1)..(25): SEQ ID NO: 6000; WAN02499S_at; Start 73; Stop 97
gccctataatctccacagtgggatt

SEQ ID NO: 14994 - DNA, 25 bp, Artificial
  probe
  misc_feature (1)..(25): SEQ ID NO: 6000; WAN02499S_at; Start 137; Stop 161
tgttcactagcagaaactagagagc

SEQ ID NO: 14995 - DNA, 25 bp, Artificial
  probe
  misc_feature (1)..(25): SEQ ID NO: 6000; WAN02499S_at; Start 213; Stop 237
gaatagagatggcttaggaagcccc

SEQ ID NO: 14996 - DNA, 25 bp, Artificial
  probe
  misc_feature (1)..(25): SEQ ID NO: 6000; WAN02499S_at; Start 114; Stop 138
tatagagccagaaaaaacacttttg

SEQ ID NO: 14997 - DNA, 25 bp, Artificial
  probe
  misc_feature (1)..(25): SEQ ID NO: 6000; WAN02499S_at; Start 227; Stop 251
taggaagcccctttttgtgtgtaga

SEQ ID NO: 14998 - DNA, 25 bp, Artificial
  probe
  misc_feature (1)..(25): SEQ ID NO: 6000; WAN02499S_at; Start 131; Stop 155
cacttttgttcactagcagaaacta

SEQ ID NO: 14999 - DNA, 25 bp, Artificial
  probe
  misc_feature (1)..(25): SEQ ID NO: 6000; WAN02499S_at; Start 144; Stop 168
tagcagaaactagagagcagaagtg

SEQ ID NO: 15000 - DNA, 25 bp, Artificial
  probe
  misc_feature (1)..(25): SEQ ID NO: 6000; WAN02499S_at; Start 189; Stop 213
caaaactgggaaatatggggataag

SEQ ID NO: 15001 - DNA, 25 bp, Artificial
  probe
  misc_feature (1)..(25): SEQ ID NO: 6000; WAN02499S_at; Start 71; Stop 95
aagccctataatctccacagtggga

SEQ ID NO: 15002 - DNA, 25 bp, Artificial
  probe
  misc_feature (1)..(25): SEQ ID NO: 6000; WAN02499S_at; Start 240; Stop 264
tttgtgtgtagacagtacgatgaac

SEQ ID NO: 15003 - DNA, 25 bp, Artificial
  probe
  misc_feature (1)..(25): SEQ ID NO: 6000; WAN02499S_at; Start 110; Stop 134
aaattatagagccagaaaaaacact

SEQ ID NO: 15004 - DNA, 25 bp, Artificial
  probe
  misc_feature (1)..(25): SEQ ID NO: 6000; WAN02499S_at; Start 146; Stop 170
gcagaaactagagagcagaagtgtt

SEQ ID NO: 15005 - DNA, 25 bp, Artificial
  probe
  misc_feature (1)..(25): SEQ ID NO: 6000; WAN02499S_at; Start 57; Stop 81
ttttgatactcaaaaagccctataa

SEQ ID NO: 15006 - DNA, 25 bp, Artificial
  probe
  misc_feature (1)..(25): SEQ ID NO: 6000; WAN02499S_at; Start 82; Stop 106
tctccacagtgggatttacccacta

SEQ ID NO: 15007 - DNA, 25 bp, Artificial
  probe
  misc_feature (1)..(25): SEQ ID NO: 6000; WAN02499S_at; Start 151; Stop 175
aactagagagcagaagtgtttttct

SEQ ID NO: 15008 - DNA, 25 bp, Artificial
  probe
  misc_feature (1)..(25): SEQ ID NO: 6000; WAN02499S_at; Start 79; Stop 103
taatctccacagtgggatttaccca

SEQ ID NO: 15009 - DNA, 25 bp, Artificial
  probe
  misc_feature (1)..(25): SEQ ID NO: 6000; WAN02499S_at; Start 47; Stop 71
tatgggacttttttgatactcaaaa

SEQ ID NO: 15010 - DNA, 25 bp, Artificial
  probe
  misc_feature (1)..(25): SEQ ID NO: 6000; WAN02499S_at; Start 140; Stop 164
tcactagcagaaactagagagcaga

SEQ ID NO: 15011 - DNA, 25 bp, Artificial
  probe
  misc_feature (1)..(25): SEQ ID NO: 6000; WAN02499S_at; Start 175; Stop 199
tgttcagatttacccaaaactggga

SEQ ID NO: 15012 - DNA, 25 bp, Artificial
  probe
  misc_feature (1)..(25): SEQ ID NO: 6188; WAN02499T_s_at; Start 17; Stop 41
aagaagaggctgagattggtgattc

SEQ ID NO: 15013 - DNA, 25 bp, Artificial
  probe
  misc_feature (1)..(25): SEQ ID NO: 6188; WAN02499T_s_at; Start 5; Stop 29
ttctcacgatagaagaagaggctga

SEQ ID NO: 15014 - DNA, 25 bp, Artificial
  probe
  misc_feature (1)..(25): SEQ ID NO: 6188; WAN02499T_s_at; Start 6; Stop 30
tctcacgatagaagaagaggctgag

SEQ ID NO: 15015 - DNA, 25 bp, Artificial
  probe
  misc_feature (1)..(25): SEQ ID NO: 6188; WAN02499T_s_at; Start 9; Stop 33
cacgatagaagaagaggctgagatt

SEQ ID NO: 15016 - DNA, 25 bp, Artificial
  probe
  misc_feature (1)..(25): SEQ ID NO: 6188; WAN02499T_s_at; Start 13; Stop 37
atagaagaagaggctgagattggtg

SEQ ID NO: 15017 - DNA, 25 bp, Artificial
  probe
  misc_feature (1)..(25): SEQ ID NO: 6188; WAN02499T_s_at; Start 4; Stop 28
cttctcacgatagaagaagaggctg

SEQ ID NO: 15018 - DNA, 25 bp, Artificial
  probe
  misc_feature (1)..(25): SEQ ID NO: 6188; WAN02499T_s_at; Start 8; Stop 32
tcacgatagaagaagaggctgagat

SEQ ID NO: 15019 - DNA, 25 bp, Artificial
  probe
  misc_feature (1)..(25): SEQ ID NO: 6188; WAN02499T_s_at; Start 7; Stop 31
ctcacgatagaagaagaggctgaga

SEQ ID NO: 15020 - DNA, 25 bp, Artificial
  probe
  misc_feature (1)..(25): SEQ ID NO: 6188; WAN02499T_s_at; Start 3; Stop 27
acttctcacgatagaagaagaggct

SEQ ID NO: 15021 - DNA, 25 bp, Artificial
  probe
  misc_feature (1)..(25): SEQ ID NO: 6188; WAN02499T_s_at; Start 15; Stop 39
agaagaagaggctgagattggtgat

SEQ ID NO: 15022 - DNA, 25 bp, Artificial
  probe
  misc_feature (1)..(25): SEQ ID NO: 6188; WAN02499T_s_at; Start 16; Stop 40
gaagaagaggctgagattggtgatt

SEQ ID NO: 15023 - DNA, 25 bp, Artificial
  probe
  misc_feature (1)..(25): SEQ ID NO: 6188; WAN02499T_s_at; Start 18; Stop 42
agaagaggctgagattggtgattct

SEQ ID NO: 15024 - DNA, 25 bp, Artificial
  probe
  misc_feature (1)..(25): SEQ ID NO: 6188; WAN02499T_s_at; Start 2; Stop 26
cacttctcacgatagaagaagaggc

SEQ ID NO: 15025 - DNA, 25 bp, Artificial
  probe
  misc_feature (1)..(25): SEQ ID NO: 6188; WAN02499T_s_at; Start 12; Stop 36
gatagaagaagaggctgagattggt

SEQ ID NO: 15026 - DNA, 25 bp, Artificial
  probe
  misc_feature (1)..(25): SEQ ID NO: 6188; WAN02499T_s_at; Start 10; Stop 34
acgatagaagaagaggctgagattg

SEQ ID NO: 15027 - DNA, 25 bp, Artificial
  probe
  misc_feature (1)..(25): SEQ ID NO: 6188; WAN02499T_s_at; Start 14; Stop 38
tagaagaagaggctgagattggtga

SEQ ID NO: 15028 - DNA, 25 bp, Artificial
  probe
  misc_feature (1)..(25): SEQ ID NO: 6188; WAN02499T_s_at; Start 19; Stop 43
gaagaggctgagattggtgattctc

SEQ ID NO: 15029 - DNA, 25 bp, Artificial
  probe
  misc_feature (1)..(25): SEQ ID NO: 6188; WAN02499T_s_at; Start 11; Stop 35
cgatagaagaagaggctgagattgg

SEQ ID NO: 15030 - DNA, 25 bp, Artificial
  probe
  misc_feature (1)..(25): SEQ ID NO: 6188; WAN02499T_s_at; Start 1; Stop 25
tcacttctcacgatagaagaagagg

SEQ ID NO: 15031 - DNA, 25 bp, Artificial
  probe
  misc_feature (1)..(25): SEQ ID NO: 6202; WAN02499U_at; Start 85; Stop 109
taaaagcatgtgaaatctacacatg

SEQ ID NO: 15032 - DNA, 25 bp, Artificial
  probe
  misc_feature (1)..(25): SEQ ID NO: 6202; WAN02499U_at; Start 54; Stop 78
ttgttgtacttgacctgacgattgg

SEQ ID NO: 15033 - DNA, 25 bp, Artificial
  probe
  misc_feature (1)..(25): SEQ ID NO: 6202; WAN02499U_at; Start 27; Stop 51
aacactcgcttaatcaaagaagtga

SEQ ID NO: 15034 - DNA, 25 bp, Artificial
  probe
  misc_feature (1)..(25): SEQ ID NO: 6202; WAN02499U_at; Start 82; Stop 106
gattaaaagcatgtgaaatctacac

SEQ ID NO: 15035 - DNA, 25 bp, Artificial
  probe
  misc_feature (1)..(25): SEQ ID NO: 6202; WAN02499U_at; Start 44; Stop 68
agaagtgactttgttgtacttgacc

SEQ ID NO: 15036 - DNA, 25 bp, Artificial
  probe
  misc_feature (1)..(25): SEQ ID NO: 6202; WAN02499U_at; Start 13; Stop 37
tataattatattagaacactcgctt

SEQ ID NO: 15037 - DNA, 25 bp, Artificial
  probe
  misc_feature (1)..(25): SEQ ID NO: 6202; WAN02499U_at; Start 29; Stop 53
cactcgcttaatcaaagaagtgact

SEQ ID NO: 15038 - DNA, 25 bp, Artificial
  probe
  misc_feature (1)..(25): SEQ ID NO: 6202; WAN02499U_at; Start 18; Stop 42
ttatattagaacactcgcttaatca

SEQ ID NO: 15039 - DNA, 25 bp, Artificial
  probe
  misc_feature (1)..(25): SEQ ID NO: 6202; WAN02499U_at; Start 33; Stop 57
cgcttaatcaaagaagtgactttgt

SEQ ID NO: 15040 - DNA, 25 bp, Artificial
  probe
  misc_feature (1)..(25): SEQ ID NO: 6202; WAN02499U_at; Start 26; Stop 50
gaacactcgcttaatcaaagaagtg

SEQ ID NO: 15041 - DNA, 25 bp, Artificial
  probe
  misc_feature (1)..(25): SEQ ID NO: 6202; WAN02499U_at; Start 53; Stop 77
tttgttgtacttgacctgacgattg

SEQ ID NO: 15042 - DNA, 25 bp, Artificial
  probe
  misc_feature (1)..(25): SEQ ID NO: 6202; WAN02499U_at; Start 78; Stop 102
gggagattaaaagcatgtgaaatct

SEQ ID NO: 15043 - DNA, 25 bp, Artificial
  probe
  misc_feature (1)..(25): SEQ ID NO: 6202; WAN02499U_at; Start 31; Stop 55
ctcgcttaatcaaagaagtgacttt

SEQ ID NO: 15044 - DNA, 25 bp, Artificial
  probe
  misc_feature (1)..(25): SEQ ID NO: 6202; WAN02499U_at; Start 52; Stop 76
ctttgttgtacttgacctgacgatt

SEQ ID NO: 15045 - DNA, 25 bp, Artificial
  probe
  misc_feature (1)..(25): SEQ ID NO: 6202; WAN02499U_at; Start 48; Stop 72
gtgactttgttgtacttgacctgac

SEQ ID NO: 15046 - DNA, 25 bp, Artificial
  probe
  misc_feature (1)..(25): SEQ ID NO: 6202; WAN02499U_at; Start 50; Stop 74
gactttgttgtacttgacctgacga

SEQ ID NO: 15047 - DNA, 25 bp, Artificial
  probe
  misc_feature (1)..(25): SEQ ID NO: 6202; WAN02499U_at; Start 30; Stop 54
actcgcttaatcaaagaagtgactt

SEQ ID NO: 15048 - DNA, 25 bp, Artificial
  probe
  misc_feature (1)..(25): SEQ ID NO: 6202; WAN02499U_at; Start 4; Stop 28
cagggcgcttataattatattagaa

SEQ ID NO: 15049 - DNA, 25 bp, Artificial
  probe
  misc_feature (1)..(25): SEQ ID NO: 6202; WAN02499U_at; Start 6; Stop 30
gggcgcttataattatattagaaca

SEQ ID NO: 15050 - DNA, 25 bp, Artificial
  probe
  misc_feature (1)..(25): SEQ ID NO: 6202; WAN02499U_at; Start 51; Stop 75
actttgttgtacttgacctgacgat

SEQ ID NO: 15051 - DNA, 25 bp, Artificial
  probe
  misc_feature (1)..(25): SEQ ID NO: 6202; WAN02499U_at; Start 21; Stop 45
tattagaacactcgcttaatcaaag

SEQ ID NO: 15052 - DNA, 25 bp, Artificial
  probe
  misc_feature (1)..(25): SEQ ID NO: 6202; WAN02499U_at; Start 45; Stop 69
gaagtgactttgttgtacttgacct

SEQ ID NO: 15053 - DNA, 25 bp, Artificial
  probe
  misc_feature (1)..(25): SEQ ID NO: 6202; WAN02499U_at; Start 65; Stop 89
gacctgacgattggggagattaaaa

SEQ ID NO: 15054 - DNA, 25 bp, Artificial
  probe
  misc_feature (1)..(25): SEQ ID NO: 6202; WAN02499U_at; Start 2; Stop 26
gacagggcgcttataattatattag

SEQ ID NO: 15055 - DNA, 25 bp, Artificial
  probe
  misc_feature (1)..(25): SEQ ID NO: 6202; WAN02499U_at; Start 24; Stop 48
tagaacactcgcttaatcaaagaag

SEQ ID NO: 15056 - DNA, 25 bp, Artificial
  probe
  misc_feature (1)..(25): SEQ ID NO: 6202; WAN02499U_at; Start 60; Stop 84
tacttgacctgacgattggggagat

SEQ ID NO: 15057 - DNA, 25 bp, Artificial
  probe
  misc_feature (1)..(25): SEQ ID NO: 6202; WAN02499U_at; Start 10; Stop 34
gcttataattatattagaacactcg

SEQ ID NO: 15058 - DNA, 25 bp, Artificial
  probe
  misc_feature (1)..(25): SEQ ID NO: 6202; WAN02499U_at; Start 47; Stop 71
agtgactttgttgtacttgacctga

SEQ ID NO: 15059 - DNA, 25 bp, Artificial
  probe
  misc_feature (1)..(25): SEQ ID NO: 6202; WAN02499U_at; Start 49; Stop 73
tgactttgttgtacttgacctgacg

SEQ ID NO: 15060 - DNA, 25 bp, Artificial
  probe
  misc_feature (1)..(25): SEQ ID NO: 6202; WAN02499U_at; Start 15; Stop 39
taattatattagaacactcgcttaa

SEQ ID NO: 15061 - DNA, 25 bp, Artificial
  probe
  misc_feature (1)..(25): SEQ ID NO: 6202; WAN02499U_at; Start 55; Stop 79
tgttgtacttgacctgacgattggg

SEQ ID NO: 15062 - DNA, 25 bp, Artificial
  probe
  misc_feature (1)..(25): SEQ ID NO: 6202; WAN02499U_at; Start 1; Stop 25
tgacagggcgcttataattatatta

SEQ ID NO: 15063 - DNA, 25 bp, Artificial
  probe
  misc_feature (1)..(25): SEQ ID NO: 6202; WAN02499U_at; Start 93; Stop 117
tgtgaaatctacacatgctttttcg

SEQ ID NO: 15064 - DNA, 25 bp, Artificial
  probe
  misc_feature (1)..(25): SEQ ID NO: 6202; WAN02499U_at; Start 32; Stop 56
tcgcttaatcaaagaagtgactttg

SEQ ID NO: 15065 - DNA, 25 bp, Artificial
  probe
  misc_feature (1)..(25): SEQ ID NO: 6069; WAN02499V_at; Start 27; Stop 51
gagatgattaattcttagtagaaca

SEQ ID NO: 15066 - DNA, 25 bp, Artificial
  probe
  misc_feature (1)..(25): SEQ ID NO: 6069; WAN02499V_at; Start 24; Stop 48
aacgagatgattaattcttagtaga

SEQ ID NO: 15067 - DNA, 25 bp, Artificial
  probe
  misc_feature (1)..(25): SEQ ID NO: 6069; WAN02499V_at; Start 30; Stop 54
atgattaattcttagtagaacaaga

SEQ ID NO: 15068 - DNA, 25 bp, Artificial
  probe
  misc_feature (1)..(25): SEQ ID NO: 6069; WAN02499V_at; Start 17; Stop 41
aaatcaaaacgagatgattaattct

SEQ ID NO: 15069 - DNA, 25 bp, Artificial
  probe
  misc_feature (1)..(25): SEQ ID NO: 6069; WAN02499V_at; Start 26; Stop 50
cgagatgattaattcttagtagaac

SEQ ID NO: 15070 - DNA, 25 bp, Artificial
  probe
  misc_feature (1)..(25): SEQ ID NO: 6069; WAN02499V_at; Start 16; Stop 40
taaatcaaaacgagatgattaattc

SEQ ID NO: 15071 - DNA, 25 bp, Artificial
  probe
  misc_feature (1)..(25): SEQ ID NO: 6069; WAN02499V_at; Start 31; Stop 55
tgattaattcttagtagaacaagag

SEQ ID NO: 15072 - DNA, 25 bp, Artificial
  probe
  misc_feature (1)..(25): SEQ ID NO: 6069; WAN02499V_at; Start 35; Stop 59
taattcttagtagaacaagagtaaa

SEQ ID NO: 15073 - DNA, 25 bp, Artificial
  probe
  misc_feature (1)..(25): SEQ ID NO: 6069; WAN02499V_at; Start 19; Stop 43
atcaaaacgagatgattaattctta

SEQ ID NO: 15074 - DNA, 25 bp, Artificial
  probe
  misc_feature (1)..(25): SEQ ID NO: 6069; WAN02499V_at; Start 21; Stop 45
caaaacgagatgattaattcttagt

SEQ ID NO: 15075 - DNA, 25 bp, Artificial
  probe
  misc_feature (1)..(25): SEQ ID NO: 6069; WAN02499V_at; Start 25; Stop 49
acgagatgattaattcttagtagaa

SEQ ID NO: 15076 - DNA, 25 bp, Artificial
  probe
  misc_feature (1)..(25): SEQ ID NO: 6069; WAN02499V_at; Start 23; Stop 47
aaacgagatgattaattcttagtag

SEQ ID NO: 15077 - DNA, 25 bp, Artificial
  probe
  misc_feature (1)..(25): SEQ ID NO: 6069; WAN02499V_at; Start 32; Stop 56
gattaattcttagtagaacaagagt

SEQ ID NO: 15078 - DNA, 25 bp, Artificial
  probe
  misc_feature (1)..(25): SEQ ID NO: 6069; WAN02499V_at; Start 12; Stop 36
ttaataaatcaaaacgagatgatta

SEQ ID NO: 15079 - DNA, 25 bp, Artificial
  probe
  misc_feature (1)..(25): SEQ ID NO: 6069; WAN02499V_at; Start 8; Stop 32
atttttaataaatcaaaacgagatg

SEQ ID NO: 15080 - DNA, 25 bp, Artificial
  probe
  misc_feature (1)..(25): SEQ ID NO: 6069; WAN02499V_at; Start 22; Stop 46
aaaacgagatgattaattcttagta

SEQ ID NO: 15081 - DNA, 25 bp, Artificial
  probe
  misc_feature (1)..(25): SEQ ID NO: 6069; WAN02499V_at; Start 11; Stop 35
tttaataaatcaaaacgagatgatt

SEQ ID NO: 15082 - DNA, 25 bp, Artificial
  probe
  misc_feature (1)..(25): SEQ ID NO: 6069; WAN02499V_at; Start 18; Stop 42
aatcaaaacgagatgattaattctt

SEQ ID NO: 15083 - DNA, 25 bp, Artificial
  probe
  misc_feature (1)..(25): SEQ ID NO: 6069; WAN02499V_at; Start 34; Stop 58
ttaattcttagtagaacaagagtaa

SEQ ID NO: 15084 - DNA, 25 bp, Artificial
  probe
  misc_feature (1)..(25): SEQ ID NO: 6069; WAN02499V_at; Start 28; Stop 52
agatgattaattcttagtagaacaa

SEQ ID NO: 15085 - DNA, 25 bp, Artificial
  probe
  misc_feature (1)..(25): SEQ ID NO: 6069; WAN02499V_at; Start 37; Stop 61
attcttagtagaacaagagtaaaat

SEQ ID NO: 15086 - DNA, 25 bp, Artificial
  probe
  misc_feature (1)..(25): SEQ ID NO: 6069; WAN02499V_at; Start 9; Stop 33
tttttaataaatcaaaacgagatga

SEQ ID NO: 15087 - DNA, 25 bp, Artificial
  probe
  misc_feature (1)..(25): SEQ ID NO: 6069; WAN02499V_at; Start 29; Stop 53
gatgattaattcttagtagaacaag

SEQ ID NO: 15088 - DNA, 25 bp, Artificial
  probe
  misc_feature (1)..(25): SEQ ID NO: 6069; WAN02499V_at; Start 20; Stop 44
tcaaaacgagatgattaattcttag

SEQ ID NO: 15089 - DNA, 25 bp, Artificial
  probe
  misc_feature (1)..(25): SEQ ID NO: 6069; WAN02499V_at; Start 15; Stop 39
ataaatcaaaacgagatgattaatt

SEQ ID NO: 15090 - DNA, 25 bp, Artificial
  probe
  misc_feature (1)..(25): SEQ ID NO: 6069; WAN02499V_at; Start 13; Stop 37
taataaatcaaaacgagatgattaa

SEQ ID NO: 15091 - DNA, 25 bp, Artificial
  probe
  misc_feature (1)..(25): SEQ ID NO: 6069; WAN02499V_at; Start 14; Stop 38
aataaatcaaaacgagatgattaat

SEQ ID NO: 15092 - DNA, 25 bp, Artificial
  probe
  misc_feature (1)..(25): SEQ ID NO: 6069; WAN02499V_at; Start 10; Stop 34
ttttaataaatcaaaacgagatgat

SEQ ID NO: 15093 - DNA, 25 bp, Artificial
  probe
  misc_feature (1)..(25): SEQ ID NO: 6069; WAN02499V_at; Start 33; Stop 57
attaattcttagtagaacaagagta

SEQ ID NO: 15094 - DNA, 25 bp, Artificial
  probe
  misc_feature (1)..(25): SEQ ID NO: 6008; WAN02499W_at; Start 57; Stop 81
agagagttaactattaaaacagcat

SEQ ID NO: 15095 - DNA, 25 bp, Artificial
  probe
  misc_feature (1)..(25): SEQ ID NO: 6008; WAN02499W_at; Start 43; Stop 67
atcatgtattgtcgagagagttaac

SEQ ID NO: 15096 - DNA, 25 bp, Artificial
  probe
  misc_feature (1)..(25): SEQ ID NO: 6008; WAN02499W_at; Start 48; Stop 72
gtattgtcgagagagttaactatta

SEQ ID NO: 15097 - DNA, 25 bp, Artificial
  probe
  misc_feature (1)..(25): SEQ ID NO: 6008; WAN02499W_at; Start 40; Stop 64
tgtatcatgtattgtcgagagagtt

SEQ ID NO: 15098 - DNA, 25 bp, Artificial
  probe
  misc_feature (1)..(25): SEQ ID NO: 6008; WAN02499W_at; Start 36; Stop 60
ataatgtatcatgtattgtcgagag

SEQ ID NO: 15099 - DNA, 25 bp, Artificial
  probe
  misc_feature (1)..(25): SEQ ID NO: 6008; WAN02499W_at; Start 11; Stop 35
gatacattaaaattatcaaggatat

SEQ ID NO: 15100 - DNA, 25 bp, Artificial
  probe
  misc_feature (1)..(25): SEQ ID NO: 6008; WAN02499W_at; Start 35; Stop 59
tataatgtatcatgtattgtcgaga

SEQ ID NO: 15101 - DNA, 25 bp, Artificial
  probe
  misc_feature (1)..(25): SEQ ID NO: 6008; WAN02499W_at; Start 60; Stop 84
gagttaactattaaaacagcatata

SEQ ID NO: 15102 - DNA, 25 bp, Artificial
  probe
  misc_feature (1)..(25): SEQ ID NO: 6008; WAN02499W_at; Start 39; Stop 63
atgtatcatgtattgtcgagagagt

SEQ ID NO: 15103 - DNA, 25 bp, Artificial
  probe
  misc_feature (1)..(25): SEQ ID NO: 6008; WAN02499W_at; Start 38; Stop 62
aatgtatcatgtattgtcgagagag

SEQ ID NO: 15104 - DNA, 25 bp, Artificial
  probe
  misc_feature (1)..(25): SEQ ID NO: 6008; WAN02499W_at; Start 42; Stop 66
tatcatgtattgtcgagagagttaa

SEQ ID NO: 15105 - DNA, 25 bp, Artificial
  probe
  misc_feature (1)..(25): SEQ ID NO: 6008; WAN02499W_at; Start 71; Stop 95
taaaacagcatataaaataaggagg

SEQ ID NO: 15106 - DNA, 25 bp, Artificial
  probe
  misc_feature (1)..(25): SEQ ID NO: 6008; WAN02499W_at; Start 46; Stop 70
atgtattgtcgagagagttaactat

SEQ ID NO: 15107 - DNA, 25 bp, Artificial
  probe
  misc_feature (1)..(25): SEQ ID NO: 6008; WAN02499W_at; Start 62; Stop 86
gttaactattaaaacagcatataaa

SEQ ID NO: 15108 - DNA, 25 bp, Artificial
  probe
  misc_feature (1)..(25): SEQ ID NO: 6008; WAN02499W_at; Start 50; Stop 74
attgtcgagagagttaactattaaa

SEQ ID NO: 15109 - DNA, 25 bp, Artificial
  probe
  misc_feature (1)..(25): SEQ ID NO: 6008; WAN02499W_at; Start 45; Stop 69
catgtattgtcgagagagttaacta

SEQ ID NO: 15110 - DNA, 25 bp, Artificial
  probe
  misc_feature (1)..(25): SEQ ID NO: 6008; WAN02499W_at; Start 33; Stop 57
tatataatgtatcatgtattgtcga

SEQ ID NO: 15111 - DNA, 25 bp, Artificial
  probe
  misc_feature (1)..(25): SEQ ID NO: 6008; WAN02499W_at; Start 37; Stop 61
taatgtatcatgtattgtcgagaga

SEQ ID NO: 15112 - DNA, 25 bp, Artificial
  probe
  misc_feature (1)..(25): SEQ ID NO: 6008; WAN02499W_at; Start 27; Stop 51
caaggatatataatgtatcatgtat

SEQ ID NO: 15113 - DNA, 25 bp, Artificial
  probe
  misc_feature (1)..(25): SEQ ID NO: 6008; WAN02499W_at; Start 41; Stop 65
gtatcatgtattgtcgagagagtta

SEQ ID NO: 15114 - DNA, 25 bp, Artificial
  probe
  misc_feature (1)..(25): SEQ ID NO: 6008; WAN02499W_at; Start 53; Stop 77
gtcgagagagttaactattaaaaca

SEQ ID NO: 15115 - DNA, 25 bp, Artificial
  probe
  misc_feature (1)..(25): SEQ ID NO: 6008; WAN02499W_at; Start 47; Stop 71
tgtattgtcgagagagttaactatt

SEQ ID NO: 15116 - DNA, 25 bp, Artificial
  probe
  misc_feature (1)..(25): SEQ ID NO: 6008; WAN02499W_at; Start 24; Stop 48
tatcaaggatatataatgtatcatg

SEQ ID NO: 15117 - DNA, 25 bp, Artificial
  probe
  misc_feature (1)..(25): SEQ ID NO: 6008; WAN02499W_at; Start 56; Stop 80
gagagagttaactattaaaacagca

SEQ ID NO: 15118 - DNA, 25 bp, Artificial
  probe
  misc_feature (1)..(25): SEQ ID NO: 6008; WAN02499W_at; Start 54; Stop 78
tcgagagagttaactattaaaacag

SEQ ID NO: 15119 - DNA, 25 bp, Artificial
  probe
  misc_feature (1)..(25): SEQ ID NO: 6008; WAN02499W_at; Start 44; Stop 68
tcatgtattgtcgagagagttaact

SEQ ID NO: 15120 - DNA, 25 bp, Artificial
  probe
  misc_feature (1)..(25): SEQ ID NO: 6008; WAN02499W_at; Start 59; Stop 83
agagttaactattaaaacagcatat

SEQ ID NO: 15121 - DNA, 25 bp, Artificial
  probe
  misc_feature (1)..(25): SEQ ID NO: 6008; WAN02499W_at; Start 72; Stop 96
aaaacagcatataaaataaggaggg

SEQ ID NO: 15122 - DNA, 25 bp, Artificial
  probe
  misc_feature (1)..(25): SEQ ID NO: 6008; WAN02499W_at; Start 55; Stop 79
cgagagagttaactattaaaacagc

SEQ ID NO: 15123 - DNA, 25 bp, Artificial
  probe
  misc_feature (1)..(25): SEQ ID NO: 6008; WAN02499W_at; Start 52; Stop 76
tgtcgagagagttaactattaaaac

SEQ ID NO: 15124 - DNA, 25 bp, Artificial
  probe
  misc_feature (1)..(25): SEQ ID NO: 6008; WAN02499W_at; Start 8; Stop 32
taagatacattaaaattatcaagga

SEQ ID NO: 15125 - DNA, 25 bp, Artificial
  probe
  misc_feature (1)..(25): SEQ ID NO: 6008; WAN02499W_at; Start 49; Stop 73
tattgtcgagagagttaactattaa

SEQ ID NO: 15126 - DNA, 25 bp, Artificial
  probe
  misc_feature (1)..(25): SEQ ID NO: 6008; WAN02499W_at; Start 58; Stop 82
gagagttaactattaaaacagcata

SEQ ID NO: 15127 - DNA, 25 bp, Artificial
  probe
  misc_feature (1)..(25): SEQ ID NO: 6008; WAN02499W_at; Start 75; Stop 99
acagcatataaaataaggagggggc

SEQ ID NO: 15128 - DNA, 25 bp, Artificial
  probe
  misc_feature (1)..(25): SEQ ID NO: 6011; WAN02499X_at; Start 44; Stop 68
tcttacagagcatacttatcagttt

SEQ ID NO: 15129 - DNA, 25 bp, Artificial
  probe
  misc_feature (1)..(25): SEQ ID NO: 6011; WAN02499X_at; Start 306; Stop 330
gtactgcctgatttaatttgtcaaa

SEQ ID NO: 15130 - DNA, 25 bp, Artificial
  probe
  misc_feature (1)..(25): SEQ ID NO: 6011; WAN02499X_at; Start 63; Stop 87
cagtttattagcttatgtactgatt

SEQ ID NO: 15131 - DNA, 25 bp, Artificial
  probe
  misc_feature (1)..(25): SEQ ID NO: 6011; WAN02499X_at; Start 236; Stop 260
gaggataaaagaattatatttctga

SEQ ID NO: 15132 - DNA, 25 bp, Artificial
  probe
  misc_feature (1)..(25): SEQ ID NO: 6011; WAN02499X_at; Start 171; Stop 195
gagaactcatatattactgaaacaa

SEQ ID NO: 15133 - DNA, 25 bp, Artificial
  probe
  misc_feature (1)..(25): SEQ ID NO: 6011; WAN02499X_at; Start 150; Stop 174
tggaccttctaattcattattgaga

SEQ ID NO: 15134 - DNA, 25 bp, Artificial
  probe
  misc_feature (1)..(25): SEQ ID NO: 6011; WAN02499X_at; Start 138; Stop 162
gaataattgaactggaccttctaat

SEQ ID NO: 15135 - DNA, 25 bp, Artificial
  probe
  misc_feature (1)..(25): SEQ ID NO: 6011; WAN02499X_at; Start 303; Stop 327
catgtactgcctgatttaatttgtc

SEQ ID NO: 15136 - DNA, 25 bp, Artificial
  probe
  misc_feature (1)..(25): SEQ ID NO: 6011; WAN02499X_at; Start 3; Stop 27
tgaatatagtatggaaggggactac

SEQ ID NO: 15137 - DNA, 25 bp, Artificial
  probe
  misc_feature (1)..(25): SEQ ID NO: 6011; WAN02499X_at; Start 282; Stop 306
tatattgagtttctgtagttgcatg

SEQ ID NO: 15138 - DNA, 25 bp, Artificial
  probe
  misc_feature (1)..(25): SEQ ID NO: 6011; WAN02499X_at; Start 256; Stop 280
tctgaaaatcattgagtgaccaaat

SEQ ID NO: 15139 - DNA, 25 bp, Artificial
  probe
  misc_feature (1)..(25): SEQ ID NO: 6011; WAN02499X_at; Start 289; Stop 313
agtttctgtagttgcatgtactgcc

SEQ ID NO: 15140 - DNA, 25 bp, Artificial
  probe
  misc_feature (1)..(25): SEQ ID NO: 6011; WAN02499X_at; Start 311; Stop 335
gcctgatttaatttgtcaaatggaa

SEQ ID NO: 15141 - DNA, 25 bp, Artificial
  probe
  misc_feature (1)..(25): SEQ ID NO: 6011; WAN02499X_at; Start 39; Stop 63
ggcattcttacagagcatacttatc

SEQ ID NO: 15142 - DNA, 25 bp, Artificial
  probe
  misc_feature (1)..(25): SEQ ID NO: 6011; WAN02499X_at; Start 102; Stop 126
cgatatgtcttcaaataatattcgg

SEQ ID NO: 15143 - DNA, 25 bp, Artificial
  probe
  misc_feature (1)..(25): SEQ ID NO: 6011; WAN02499X_at; Start 97; Stop 121
gaaaccgatatgtcttcaaataata

SEQ ID NO: 15144 - DNA, 25 bp, Artificial
  probe
  misc_feature (1)..(25): SEQ ID NO: 6011; WAN02499X_at; Start 91; Stop 115
atttcagaaaccgatatgtcttcaa

SEQ ID NO: 15145 - DNA, 25 bp, Artificial
  probe
  misc_feature (1)..(25): SEQ ID NO: 6011; WAN02499X_at; Start 115; Stop 139
aataatattcggtctatttggaaga

SEQ ID NO: 15146 - DNA, 25 bp, Artificial
  probe
  misc_feature (1)..(25): SEQ ID NO: 6011; WAN02499X_at; Start 297; Stop 321
tagttgcatgtactgcctgatttaa

SEQ ID NO: 15147 - DNA, 25 bp, Artificial
  probe
  misc_feature (1)..(25): SEQ ID NO: 6011; WAN02499X_at; Start 275; Stop 299
ccaaatatatattgagtttctgtag

SEQ ID NO: 15148 - DNA, 25 bp, Artificial
  probe
  misc_feature (1)..(25): SEQ ID NO: 6011; WAN02499X_at; Start 225; Stop 249
tatctgacgtagaggataaaagaat

SEQ ID NO: 15149 - DNA, 25 bp, Artificial
  probe
  misc_feature (1)..(25): SEQ ID NO: 6011; WAN02499X_at; Start 216; Stop 240
gaaaagttttatctgacgtagagga

SEQ ID NO: 15150 - DNA, 25 bp, Artificial
  probe
  misc_feature (1)..(25): SEQ ID NO: 6011; WAN02499X_at; Start 193; Stop 217
caaataaattttgtttagatggaga

SEQ ID NO: 15151 - DNA, 25 bp, Artificial
  probe
  misc_feature (1)..(25): SEQ ID NO: 6011; WAN02499X_at; Start 146; Stop 170
gaactggaccttctaattcattatt

SEQ ID NO: 15152 - DNA, 25 bp, Artificial
  probe
  misc_feature (1)..(25): SEQ ID NO: 6011; WAN02499X_at; Start 135; Stop 159
gaagaataattgaactggaccttct

SEQ ID NO: 15153 - DNA, 25 bp, Artificial
  probe
  misc_feature (1)..(25): SEQ ID NO: 6011; WAN02499X_at; Start 41; Stop 65
cattcttacagagcatacttatcag

SEQ ID NO: 15154 - DNA, 25 bp, Artificial
  probe
  misc_feature (1)..(25): SEQ ID NO: 6011; WAN02499X_at; Start 293; Stop 317
tctgtagttgcatgtactgcctgat

SEQ ID NO: 15155 - DNA, 25 bp, Artificial
  probe
  misc_feature (1)..(25): SEQ ID NO: 6011; WAN02499X_at; Start 204; Stop 228
tgtttagatggagaaaagttttatc

SEQ ID NO: 15156 - DNA, 25 bp, Artificial
  probe
  misc_feature (1)..(25): SEQ ID NO: 6011; WAN02499X_at; Start 252; Stop 276
tatttctgaaaatcattgagtgacc

SEQ ID NO: 15157 - DNA, 25 bp, Artificial
  probe
  misc_feature (1)..(25): SEQ ID NO: 6011; WAN02499X_at; Start 49; Stop 73
cagagcatacttatcagtttattag

SEQ ID NO: 15158 - DNA, 25 bp, Artificial
  probe
  misc_feature (1)..(25): SEQ ID NO: 6011; WAN02499X_at; Start 157; Stop 181
tctaattcattattgagaactcata

SEQ ID NO: 15159 - DNA, 25 bp, Artificial
  probe
  misc_feature (1)..(25): SEQ ID NO: 6011; WAN02499X_at; Start 58; Stop 82
cttatcagtttattagcttatgtac

SEQ ID NO: 15160 - DNA, 25 bp, Artificial
  probe
  misc_feature (1)..(25): SEQ ID NO: 6011; WAN02499X_at; Start 131; Stop 155
tttggaagaataattgaactggacc

SEQ ID NO: 15161 - DNA, 25 bp, Artificial
  probe
  misc_feature (1)..(25): SEQ ID NO: 6011; WAN02499X_at; Start 265; Stop 289
cattgagtgaccaaatatatattga

SEQ ID NO: 15162 - DNA, 25 bp, Artificial
  probe
  misc_feature (1)..(25): SEQ ID NO: 6219; WAN02499Y_at; Start 61; Stop 85
gcttgttgatgtttccttttgtgtc

SEQ ID NO: 15163 - DNA, 25 bp, Artificial
  probe
  misc_feature (1)..(25): SEQ ID NO: 6219; WAN02499Y_at; Start 34; Stop 58
tattgttcagatagtcggcatgtaa

SEQ ID NO: 15164 - DNA, 25 bp, Artificial
  probe
  misc_feature (1)..(25): SEQ ID NO: 6219; WAN02499Y_at; Start 6; Stop 30
tatgtcggctttctaatgcttttca

SEQ ID NO: 15165 - DNA, 25 bp, Artificial
  probe
  misc_feature (1)..(25): SEQ ID NO: 6219; WAN02499Y_at; Start 52; Stop 76
catgtaaaggcttgttgatgtttcc

SEQ ID NO: 15166 - DNA, 25 bp, Artificial
  probe
  misc_feature (1)..(25): SEQ ID NO: 6219; WAN02499Y_at; Start 109; Stop 133
ctggattactgaggatgccaaactt

SEQ ID NO: 15167 - DNA, 25 bp, Artificial
  probe
  misc_feature (1)..(25): SEQ ID NO: 6219; WAN02499Y_at; Start 8; Stop 32
tgtcggctttctaatgcttttcatt

SEQ ID NO: 15168 - DNA, 25 bp, Artificial
  probe
  misc_feature (1)..(25): SEQ ID NO: 6219; WAN02499Y_at; Start 29; Stop 53
cattttattgttcagatagtcggca

SEQ ID NO: 15169 - DNA, 25 bp, Artificial
  probe
  misc_feature (1)..(25): SEQ ID NO: 6219; WAN02499Y_at; Start 85; Stop 109
cgatatatgtaaaaacaaattgttc

SEQ ID NO: 15170 - DNA, 25 bp, Artificial
  probe
  misc_feature (1)..(25): SEQ ID NO: 6219; WAN02499Y_at; Start 28; Stop 52
tcattttattgttcagatagtcggc

SEQ ID NO: 15171 - DNA, 25 bp, Artificial
  probe
  misc_feature (1)..(25): SEQ ID NO: 6219; WAN02499Y_at; Start 111; Stop 135
ggattactgaggatgccaaactttg

SEQ ID NO: 15172 - DNA, 25 bp, Artificial
  probe
  misc_feature (1)..(25): SEQ ID NO: 6219; WAN02499Y_at; Start 105; Stop 129
tgttctggattactgaggatgccaa

SEQ ID NO: 15173 - DNA, 25 bp, Artificial
  probe
  misc_feature (1)..(25): SEQ ID NO: 6219; WAN02499Y_at; Start 67; Stop 91
tgatgtttccttttgtgtcgatata

SEQ ID NO: 15174 - DNA, 25 bp, Artificial
  probe
  misc_feature (1)..(25): SEQ ID NO: 6219; WAN02499Y_at; Start 71; Stop 95
gtttccttttgtgtcgatatatgta

SEQ ID NO: 15175 - DNA, 25 bp, Artificial
  probe
  misc_feature (1)..(25): SEQ ID NO: 6219; WAN02499Y_at; Start 48; Stop 72
tcggcatgtaaaggcttgttgatgt

SEQ ID NO: 15176 - DNA, 25 bp, Artificial
  probe
  misc_feature (1)..(25): SEQ ID NO: 6219; WAN02499Y_at; Start 74; Stop 98
tccttttgtgtcgatatatgtaaaa

SEQ ID NO: 15177 - DNA, 25 bp, Artificial
  probe
  misc_feature (1)..(25): SEQ ID NO: 6219; WAN02499Y_at; Start 45; Stop 69
tagtcggcatgtaaaggcttgttga

SEQ ID NO: 15178 - DNA, 25 bp, Artificial
  probe
  misc_feature (1)..(25): SEQ ID NO: 6219; WAN02499Y_at; Start 103; Stop 127
attgttctggattactgaggatgcc

SEQ ID NO: 15179 - DNA, 25 bp, Artificial
  probe
  misc_feature (1)..(25): SEQ ID NO: 6219; WAN02499Y_at; Start 107; Stop 131
ttctggattactgaggatgccaaac

SEQ ID NO: 15180 - DNA, 25 bp, Artificial
  probe
  misc_feature (1)..(25): SEQ ID NO: 6219; WAN02499Y_at; Start 108; Stop 132
tctggattactgaggatgccaaact

SEQ ID NO: 15181 - DNA, 25 bp, Artificial
  probe
  misc_feature (1)..(25): SEQ ID NO: 6219; WAN02499Y_at; Start 98; Stop 122
aacaaattgttctggattactgagg

SEQ ID NO: 15182 - DNA, 25 bp, Artificial
  probe
  misc_feature (1)..(25): SEQ ID NO: 6219; WAN02499Y_at; Start 43; Stop 67
gatagtcggcatgtaaaggcttgtt

SEQ ID NO: 15183 - DNA, 25 bp, Artificial
  probe
  misc_feature (1)..(25): SEQ ID NO: 6219; WAN02499Y_at; Start 40; Stop 64
tcagatagtcggcatgtaaaggctt

SEQ ID NO: 15184 - DNA, 25 bp, Artificial
  probe
  misc_feature (1)..(25): SEQ ID NO: 6219; WAN02499Y_at; Start 100; Stop 124
caaattgttctggattactgaggat

SEQ ID NO: 15185 - DNA, 25 bp, Artificial
  probe
  misc_feature (1)..(25): SEQ ID NO: 6219; WAN02499Y_at; Start 37; Stop 61
tgttcagatagtcggcatgtaaagg

SEQ ID NO: 15186 - DNA, 25 bp, Artificial
  probe
  misc_feature (1)..(25): SEQ ID NO: 6219; WAN02499Y_at; Start 11; Stop 35
cggctttctaatgcttttcatttta

SEQ ID NO: 15187 - DNA, 25 bp, Artificial
  probe
  misc_feature (1)..(25): SEQ ID NO: 6219; WAN02499Y_at; Start 104; Stop 128
ttgttctggattactgaggatgcca

SEQ ID NO: 15188 - DNA, 25 bp, Artificial
  probe
  misc_feature (1)..(25): SEQ ID NO: 6219; WAN02499Y_at; Start 31; Stop 55
ttttattgttcagatagtcggcatg

SEQ ID NO: 15189 - DNA, 25 bp, Artificial
  probe
  misc_feature (1)..(25): SEQ ID NO: 6219; WAN02499Y_at; Start 54; Stop 78
tgtaaaggcttgttgatgtttcctt

SEQ ID NO: 15190 - DNA, 25 bp, Artificial
  probe
  misc_feature (1)..(25): SEQ ID NO: 6219; WAN02499Y_at; Start 2; Stop 26
tctttatgtcggctttctaatgctt

SEQ ID NO: 15191 - DNA, 25 bp, Artificial
  probe
  misc_feature (1)..(25): SEQ ID NO: 6219; WAN02499Y_at; Start 82; Stop 106
tgtcgatatatgtaaaaacaaattg

SEQ ID NO: 15192 - DNA, 25 bp, Artificial
  probe
  misc_feature (1)..(25): SEQ ID NO: 6219; WAN02499Y_at; Start 64; Stop 88
tgttgatgtttccttttgtgtcgat

SEQ ID NO: 15193 - DNA, 25 bp, Artificial
  probe
  misc_feature (1)..(25): SEQ ID NO: 6219; WAN02499Y_at; Start 102; Stop 126
aattgttctggattactgaggatgc

SEQ ID NO: 15194 - DNA, 25 bp, Artificial
  probe
  misc_feature (1)..(25): SEQ ID NO: 6219; WAN02499Y_at; Start 41; Stop 65
cagatagtcggcatgtaaaggcttg

SEQ ID NO: 15195 - DNA, 25 bp, Artificial
  probe
  misc_feature (1)..(25): SEQ ID NO: 6219; WAN02499Y_at; Start 99; Stop 123
acaaattgttctggattactgagga

SEQ ID NO: 15196 - DNA, 25 bp, Artificial
  probe
  misc_feature (1)..(25): SEQ ID NO: 6138; WAN02499Z_at; Start 54; Stop 78
cgccgtccgctaatcttttcataga

SEQ ID NO: 15197 - DNA, 25 bp, Artificial
  probe
  misc_feature (1)..(25): SEQ ID NO: 6138; WAN02499Z_at; Start 84; Stop 108
tcccttttaggagcctagctttcta

SEQ ID NO: 15198 - DNA, 25 bp, Artificial
  probe
  misc_feature (1)..(25): SEQ ID NO: 6138; WAN02499Z_at; Start 31; Stop 55
caacaattgaagtctgctcaaaacg

SEQ ID NO: 15199 - DNA, 25 bp, Artificial
  probe
  misc_feature (1)..(25): SEQ ID NO: 6138; WAN02499Z_at; Start 7; Stop 31
taaactctccgtctacttgtcctgc

SEQ ID NO: 15200 - DNA, 25 bp, Artificial
  probe
  misc_feature (1)..(25): SEQ ID NO: 6138; WAN02499Z_at; Start 9; Stop 33
aactctccgtctacttgtcctgcaa

SEQ ID NO: 15201 - DNA, 25 bp, Artificial
  probe
  misc_feature (1)..(25): SEQ ID NO: 6138; WAN02499Z_at; Start 51; Stop 75
aaacgccgtccgctaatcttttcat

SEQ ID NO: 15202 - DNA, 25 bp, Artificial
  probe
  misc_feature (1)..(25): SEQ ID NO: 6138; WAN02499Z_at; Start 82; Stop 106
tctcccttttaggagcctagctttc

SEQ ID NO: 15203 - DNA, 25 bp, Artificial
  probe
  misc_feature (1)..(25): SEQ ID NO: 6138; WAN02499Z_at; Start 34; Stop 58
caattgaagtctgctcaaaacgccg

SEQ ID NO: 15204 - DNA, 25 bp, Artificial
  probe
  misc_feature (1)..(25): SEQ ID NO: 6138; WAN02499Z_at; Start 86; Stop 110
ccttttaggagcctagctttctagt

SEQ ID NO: 15205 - DNA, 25 bp, Artificial
  probe
  misc_feature (1)..(25): SEQ ID NO: 6138; WAN02499Z_at; Start 73; Stop 97
catagactttctcccttttaggagc

SEQ ID NO: 15206 - DNA, 25 bp, Artificial
  probe
  misc_feature (1)..(25): SEQ ID NO: 6138; WAN02499Z_at; Start 1; Stop 25
gggctataaactctccgtctacttg

SEQ ID NO: 15207 - DNA, 25 bp, Artificial
  probe
  misc_feature (1)..(25): SEQ ID NO: 6138; WAN02499Z_at; Start 2; Stop 26
ggctataaactctccgtctacttgt

SEQ ID NO: 15208 - DNA, 25 bp, Artificial
  probe
  misc_feature (1)..(25): SEQ ID NO: 6138; WAN02499Z_at; Start 8; Stop 32
aaactctccgtctacttgtcctgca

SEQ ID NO: 15209 - DNA, 25 bp, Artificial
  probe
  misc_feature (1)..(25): SEQ ID NO: 6138; WAN02499Z_at; Start 5; Stop 29
tataaactctccgtctacttgtcct

SEQ ID NO: 15210 - DNA, 25 bp, Artificial
  probe
  misc_feature (1)..(25): SEQ ID NO: 6138; WAN02499Z_at; Start 18; Stop 42
tctacttgtcctgcaacaattgaag

SEQ ID NO: 15211 - DNA, 25 bp, Artificial
  probe
  misc_feature (1)..(25): SEQ ID NO: 6138; WAN02499Z_at; Start 24; Stop 48
tgtcctgcaacaattgaagtctgct

SEQ ID NO: 15212 - DNA, 25 bp, Artificial
  probe
  misc_feature (1)..(25): SEQ ID NO: 6138; WAN02499Z_at; Start 26; Stop 50
tcctgcaacaattgaagtctgctca

SEQ ID NO: 15213 - DNA, 25 bp, Artificial
  probe
  misc_feature (1)..(25): SEQ ID NO: 6138; WAN02499Z_at; Start 12; Stop 36
tctccgtctacttgtcctgcaacaa

SEQ ID NO: 15214 - DNA, 25 bp, Artificial
  probe
  misc_feature (1)..(25): SEQ ID NO: 6138; WAN02499Z_at; Start 52; Stop 76
aacgccgtccgctaatcttttcata

SEQ ID NO: 15215 - DNA, 25 bp, Artificial
  probe
  misc_feature (1)..(25): SEQ ID NO: 6138; WAN02499Z_at; Start 47; Stop 71
ctcaaaacgccgtccgctaatcttt

SEQ ID NO: 15216 - DNA, 25 bp, Artificial
  probe
  misc_feature (1)..(25): SEQ ID NO: 6138; WAN02499Z_at; Start 41; Stop 65
agtctgctcaaaacgccgtccgcta

SEQ ID NO: 15217 - DNA, 25 bp, Artificial
  probe
  misc_feature (1)..(25): SEQ ID NO: 6138; WAN02499Z_at; Start 20; Stop 44
tacttgtcctgcaacaattgaagtc

SEQ ID NO: 15218 - DNA, 25 bp, Artificial
  probe
  misc_feature (1)..(25): SEQ ID NO: 6138; WAN02499Z_at; Start 57; Stop 81
cgtccgctaatcttttcatagactt

SEQ ID NO: 15219 - DNA, 25 bp, Artificial
  probe
  misc_feature (1)..(25): SEQ ID NO: 6138; WAN02499Z_at; Start 62; Stop 86
gctaatcttttcatagactttctcc

SEQ ID NO: 15220 - DNA, 25 bp, Artificial
  probe
  misc_feature (1)..(25): SEQ ID NO: 6138; WAN02499Z_at; Start 55; Stop 79
gccgtccgctaatcttttcatagac

SEQ ID NO: 15221 - DNA, 25 bp, Artificial
  probe
  misc_feature (1)..(25): SEQ ID NO: 6138; WAN02499Z_at; Start 37; Stop 61
ttgaagtctgctcaaaacgccgtcc

SEQ ID NO: 15222 - DNA, 25 bp, Artificial
  probe
  misc_feature (1)..(25): SEQ ID NO: 6138; WAN02499Z_at; Start 14; Stop 38
tccgtctacttgtcctgcaacaatt

SEQ ID NO: 15223 - DNA, 25 bp, Artificial
  probe
  misc_feature (1)..(25): SEQ ID NO: 6138; WAN02499Z_at; Start 28; Stop 52
ctgcaacaattgaagtctgctcaaa

SEQ ID NO: 15224 - DNA, 25 bp, Artificial
  probe
  misc_feature (1)..(25): SEQ ID NO: 6138; WAN02499Z_at; Start 22; Stop 46
cttgtcctgcaacaattgaagtctg

SEQ ID NO: 15225 - DNA, 25 bp, Artificial
  probe
  misc_feature (1)..(25): SEQ ID NO: 6138; WAN02499Z_at; Start 42; Stop 66
gtctgctcaaaacgccgtccgctaa

SEQ ID NO: 15226 - DNA, 25 bp, Artificial
  probe
  misc_feature (1)..(25): SEQ ID NO: 6138; WAN02499Z_at; Start 38; Stop 62
tgaagtctgctcaaaacgccgtccg

SEQ ID NO: 15227 - DNA, 25 bp, Artificial
  probe
  misc_feature (1)..(25): SEQ ID NO: 6138; WAN02499Z_at; Start 35; Stop 59
aattgaagtctgctcaaaacgccgt

SEQ ID NO: 15228 - DNA, 25 bp, Artificial
  probe
  misc_feature (1)..(25): SEQ ID NO: 6138; WAN02499Z_at; Start 16; Stop 40
cgtctacttgtcctgcaacaattga

SEQ ID NO: 15229 - DNA, 25 bp, Artificial
  probe
  misc_feature (1)..(25): SEQ ID NO: 6138; WAN02499Z_at; Start 79; Stop 103
ctttctcccttttaggagcctagct

SEQ ID NO: 15230 - DNA, 25 bp, Artificial
  probe
  misc_feature (1)..(25): SEQ ID NO: 6165; WAN0249A2_at; Start 41; Stop 65
ttttaaattatgcaggcagtagcct

SEQ ID NO: 15231 - DNA, 25 bp, Artificial
  probe
  misc_feature (1)..(25): SEQ ID NO: 6165; WAN0249A2_at; Start 73; Stop 97
tatacaaatggataaagtaaggata

SEQ ID NO: 15232 - DNA, 25 bp, Artificial
  probe
  misc_feature (1)..(25): SEQ ID NO: 6165; WAN0249A2_at; Start 55; Stop 79
ggcagtagccttttattatatacaa

SEQ ID NO: 15233 - DNA, 25 bp, Artificial
  probe
  misc_feature (1)..(25): SEQ ID NO: 6165; WAN0249A2_at; Start 32; Stop 56
tactggatgttttaaattatgcagg

SEQ ID NO: 15234 - DNA, 25 bp, Artificial
  probe
  misc_feature (1)..(25): SEQ ID NO: 6165; WAN0249A2_at; Start 48; Stop 72
ttatgcaggcagtagccttttatta

SEQ ID NO: 15235 - DNA, 25 bp, Artificial
  probe
  misc_feature (1)..(25): SEQ ID NO: 6165; WAN0249A2_at; Start 33; Stop 57
actggatgttttaaattatgcaggc

SEQ ID NO: 15236 - DNA, 25 bp, Artificial
  probe
  misc_feature (1)..(25): SEQ ID NO: 6165; WAN0249A2_at; Start 20; Stop 44
tatatgaaaggttactggatgtttt

SEQ ID NO: 15237 - DNA, 25 bp, Artificial
  probe
  misc_feature (1)..(25): SEQ ID NO: 6165; WAN0249A2_at; Start 22; Stop 46
tatgaaaggttactggatgttttaa

SEQ ID NO: 15238 - DNA, 25 bp, Artificial
  probe
  misc_feature (1)..(25): SEQ ID NO: 6165; WAN0249A2_at; Start 15; Stop 39
ggcaatatatgaaaggttactggat

SEQ ID NO: 15239 - DNA, 25 bp, Artificial
  probe
  misc_feature (1)..(25): SEQ ID NO: 6165; WAN0249A2_at; Start 40; Stop 64
gttttaaattatgcaggcagtagcc

SEQ ID NO: 15240 - DNA, 25 bp, Artificial
  probe
  misc_feature (1)..(25): SEQ ID NO: 6165; WAN0249A2_at; Start 49; Stop 73
tatgcaggcagtagccttttattat

SEQ ID NO: 15241 - DNA, 25 bp, Artificial
  probe
  misc_feature (1)..(25): SEQ ID NO: 6165; WAN0249A2_at; Start 59; Stop 83
gtagccttttattatatacaaatgg

SEQ ID NO: 15242 - DNA, 25 bp, Artificial
  probe
  misc_feature (1)..(25): SEQ ID NO: 6165; WAN0249A2_at; Start 39; Stop 63
tgttttaaattatgcaggcagtagc

SEQ ID NO: 15243 - DNA, 25 bp, Artificial
  probe
  misc_feature (1)..(25): SEQ ID NO: 6165; WAN0249A2_at; Start 10; Stop 34
cttatggcaatatatgaaaggttac

SEQ ID NO: 15244 - DNA, 25 bp, Artificial
  probe
  misc_feature (1)..(25): SEQ ID NO: 6165; WAN0249A2_at; Start 14; Stop 38
tggcaatatatgaaaggttactgga

SEQ ID NO: 15245 - DNA, 25 bp, Artificial
  probe
  misc_feature (1)..(25): SEQ ID NO: 6165; WAN0249A2_at; Start 43; Stop 67
ttaaattatgcaggcagtagccttt

SEQ ID NO: 15246 - DNA, 25 bp, Artificial
  probe
  misc_feature (1)..(25): SEQ ID NO: 6165; WAN0249A2_at; Start 53; Stop 77
caggcagtagccttttattatatac

SEQ ID NO: 15247 - DNA, 25 bp, Artificial
  probe
  misc_feature (1)..(25): SEQ ID NO: 6165; WAN0249A2_at; Start 45; Stop 69
aaattatgcaggcagtagcctttta

SEQ ID NO: 15248 - DNA, 25 bp, Artificial
  probe
  misc_feature (1)..(25): SEQ ID NO: 6165; WAN0249A2_at; Start 77; Stop 101
caaatggataaagtaaggataatac

SEQ ID NO: 15249 - DNA, 25 bp, Artificial
  probe
  misc_feature (1)..(25): SEQ ID NO: 6165; WAN0249A2_at; Start 42; Stop 66
tttaaattatgcaggcagtagcctt

SEQ ID NO: 15250 - DNA, 25 bp, Artificial
  probe
  misc_feature (1)..(25): SEQ ID NO: 6165; WAN0249A2_at; Start 46; Stop 70
aattatgcaggcagtagccttttat

SEQ ID NO: 15251 - DNA, 25 bp, Artificial
  probe
  misc_feature (1)..(25): SEQ ID NO: 6165; WAN0249A2_at; Start 36; Stop 60
ggatgttttaaattatgcaggcagt

SEQ ID NO: 15252 - DNA, 25 bp, Artificial
  probe
  misc_feature (1)..(25): SEQ ID NO: 6165; WAN0249A2_at; Start 62; Stop 86
gccttttattatatacaaatggata

SEQ ID NO: 15253 - DNA, 25 bp, Artificial
  probe
  misc_feature (1)..(25): SEQ ID NO: 6165; WAN0249A2_at; Start 12; Stop 36
tatggcaatatatgaaaggttactg

SEQ ID NO: 15254 - DNA, 25 bp, Artificial
  probe
  misc_feature (1)..(25): SEQ ID NO: 6165; WAN0249A2_at; Start 35; Stop 59
tggatgttttaaattatgcaggcag

SEQ ID NO: 15255 - DNA, 25 bp, Artificial
  probe
  misc_feature (1)..(25): SEQ ID NO: 6165; WAN0249A2_at; Start 52; Stop 76
gcaggcagtagccttttattatata

SEQ ID NO: 15256 - DNA, 25 bp, Artificial
  probe
  misc_feature (1)..(25): SEQ ID NO: 6165; WAN0249A2_at; Start 16; Stop 40
gcaatatatgaaaggttactggatg

SEQ ID NO: 15257 - DNA, 25 bp, Artificial
  probe
  misc_feature (1)..(25): SEQ ID NO: 6165; WAN0249A2_at; Start 1; Stop 25
taatttaaacttatggcaatatatg

SEQ ID NO: 15258 - DNA, 25 bp, Artificial
  probe
  misc_feature (1)..(25): SEQ ID NO: 6165; WAN0249A2_at; Start 56; Stop 80
gcagtagccttttattatatacaaa

SEQ ID NO: 15259 - DNA, 25 bp, Artificial
  probe
  misc_feature (1)..(25): SEQ ID NO: 6165; WAN0249A2_at; Start 37; Stop 61
gatgttttaaattatgcaggcagta

SEQ ID NO: 15260 - DNA, 25 bp, Artificial
  probe
  misc_feature (1)..(25): SEQ ID NO: 6165; WAN0249A2_at; Start 6; Stop 30
taaacttatggcaatatatgaaagg

SEQ ID NO: 15261 - DNA, 25 bp, Artificial
  probe
  misc_feature (1)..(25): SEQ ID NO: 6165; WAN0249A2_at; Start 17; Stop 41
caatatatgaaaggttactggatgt

SEQ ID NO: 15262 - DNA, 25 bp, Artificial
  probe
  misc_feature (1)..(25): SEQ ID NO: 6165; WAN0249A2_at; Start 71; Stop 95
tatatacaaatggataaagtaagga

SEQ ID NO: 15263 - DNA, 25 bp, Artificial
  probe
  misc_feature (1)..(25): SEQ ID NO: 6165; WAN0249A2_at; Start 29; Stop 53
ggttactggatgttttaaattatgc

SEQ ID NO: 15264 - DNA, 25 bp, Artificial
  probe
  misc_feature (1)..(25): SEQ ID NO: 6032; WAN0249A3_at; Start 16; Stop 40
tcagttatacaaggttgtgatcact

SEQ ID NO: 15265 - DNA, 25 bp, Artificial
  probe
  misc_feature (1)..(25): SEQ ID NO: 6032; WAN0249A3_at; Start 37; Stop 61
cacttcctgtatatccttattaaac

SEQ ID NO: 15266 - DNA, 25 bp, Artificial
  probe
  misc_feature (1)..(25): SEQ ID NO: 6032; WAN0249A3_at; Start 57; Stop 81
taaacactattttatagcccatggc

SEQ ID NO: 15267 - DNA, 25 bp, Artificial
  probe
  misc_feature (1)..(25): SEQ ID NO: 6032; WAN0249A3_at; Start 60; Stop 84
acactattttatagcccatggcaag

SEQ ID NO: 15268 - DNA, 25 bp, Artificial
  probe
  misc_feature (1)..(25): SEQ ID NO: 6032; WAN0249A3_at; Start 13; Stop 37
ttttcagttatacaaggttgtgatc

SEQ ID NO: 15269 - DNA, 25 bp, Artificial
  probe
  misc_feature (1)..(25): SEQ ID NO: 6032; WAN0249A3_at; Start 8; Stop 32
tctccttttcagttatacaaggttg

SEQ ID NO: 15270 - DNA, 25 bp, Artificial
  probe
  misc_feature (1)..(25): SEQ ID NO: 6032; WAN0249A3_at; Start 27; Stop 51
aggttgtgatcacttcctgtatatc

SEQ ID NO: 15271 - DNA, 25 bp, Artificial
  probe
  misc_feature (1)..(25): SEQ ID NO: 6032; WAN0249A3_at; Start 24; Stop 48
acaaggttgtgatcacttcctgtat

SEQ ID NO: 15272 - DNA, 25 bp, Artificial
  probe
  misc_feature (1)..(25): SEQ ID NO: 6032; WAN0249A3_at; Start 4; Stop 28
tttctctccttttcagttatacaag

SEQ ID NO: 15273 - DNA, 25 bp, Artificial
  probe
  misc_feature (1)..(25): SEQ ID NO: 6032; WAN0249A3_at; Start 11; Stop 35
ccttttcagttatacaaggttgtga

SEQ ID NO: 15274 - DNA, 25 bp, Artificial
  probe
  misc_feature (1)..(25): SEQ ID NO: 6032; WAN0249A3_at; Start 42; Stop 66
cctgtatatccttattaaacactat

SEQ ID NO: 15275 - DNA, 25 bp, Artificial
  probe
  misc_feature (1)..(25): SEQ ID NO: 6032; WAN0249A3_at; Start 12; Stop 36
cttttcagttatacaaggttgtgat

SEQ ID NO: 15276 - DNA, 25 bp, Artificial
  probe
  misc_feature (1)..(25): SEQ ID NO: 6032; WAN0249A3_at; Start 59; Stop 83
aacactattttatagcccatggcaa

SEQ ID NO: 15277 - DNA, 25 bp, Artificial
  probe
  misc_feature (1)..(25): SEQ ID NO: 6032; WAN0249A3_at; Start 31; Stop 55
tgtgatcacttcctgtatatcctta

SEQ ID NO: 15278 - DNA, 25 bp, Artificial
  probe
  misc_feature (1)..(25): SEQ ID NO: 6032; WAN0249A3_at; Start 32; Stop 56
gtgatcacttcctgtatatccttat

SEQ ID NO: 15279 - DNA, 25 bp, Artificial
  probe
  misc_feature (1)..(25): SEQ ID NO: 6032; WAN0249A3_at; Start 15; Stop 39
ttcagttatacaaggttgtgatcac

SEQ ID NO: 15280 - DNA, 25 bp, Artificial
  probe
  misc_feature (1)..(25): SEQ ID NO: 6032; WAN0249A3_at; Start 29; Stop 53
gttgtgatcacttcctgtatatcct

SEQ ID NO: 15281 - DNA, 25 bp, Artificial
  probe
  misc_feature (1)..(25): SEQ ID NO: 6032; WAN0249A3_at; Start 23; Stop 47
tacaaggttgtgatcacttcctgta

SEQ ID NO: 15282 - DNA, 25 bp, Artificial
  probe
  misc_feature (1)..(25): SEQ ID NO: 6032; WAN0249A3_at; Start 28; Stop 52
ggttgtgatcacttcctgtatatcc

SEQ ID NO: 15283 - DNA, 25 bp, Artificial
  probe
  misc_feature (1)..(25): SEQ ID NO: 6032; WAN0249A3_at; Start 58; Stop 82
aaacactattttatagcccatggca

SEQ ID NO: 15284 - DNA, 25 bp, Artificial
  probe
  misc_feature (1)..(25): SEQ ID NO: 6032; WAN0249A3_at; Start 61; Stop 85
cactattttatagcccatggcaagg

SEQ ID NO: 15285 - DNA, 25 bp, Artificial
  probe
  misc_feature (1)..(25): SEQ ID NO: 6032; WAN0249A3_at; Start 25; Stop 49
caaggttgtgatcacttcctgtata

SEQ ID NO: 15286 - DNA, 25 bp, Artificial
  probe
  misc_feature (1)..(25): SEQ ID NO: 6032; WAN0249A3_at; Start 41; Stop 65
tcctgtatatccttattaaacacta

SEQ ID NO: 15287 - DNA, 25 bp, Artificial
  probe
  misc_feature (1)..(25): SEQ ID NO: 6032; WAN0249A3_at; Start 26; Stop 50
aaggttgtgatcacttcctgtatat

SEQ ID NO: 15288 - DNA, 25 bp, Artificial
  probe
  misc_feature (1)..(25): SEQ ID NO: 6032; WAN0249A3_at; Start 22; Stop 46
atacaaggttgtgatcacttcctgt

SEQ ID NO: 15289 - DNA, 25 bp, Artificial
  probe
  misc_feature (1)..(25): SEQ ID NO: 6032; WAN0249A3_at; Start 64; Stop 88
tattttatagcccatggcaaggaac

SEQ ID NO: 15290 - DNA, 25 bp, Artificial
  probe
  misc_feature (1)..(25): SEQ ID NO: 6032; WAN0249A3_at; Start 17; Stop 41
cagttatacaaggttgtgatcactt

SEQ ID NO: 15291 - DNA, 25 bp, Artificial
  probe
  misc_feature (1)..(25): SEQ ID NO: 6032; WAN0249A3_at; Start 19; Stop 43
gttatacaaggttgtgatcacttcc

SEQ ID NO: 15292 - DNA, 25 bp, Artificial
  probe
  misc_feature (1)..(25): SEQ ID NO: 6032; WAN0249A3_at; Start 21; Stop 45
tatacaaggttgtgatcacttcctg

SEQ ID NO: 15293 - DNA, 25 bp, Artificial
  probe
  misc_feature (1)..(25): SEQ ID NO: 6032; WAN0249A3_at; Start 2; Stop 26
gttttctctccttttcagttataca

SEQ ID NO: 15294 - DNA, 25 bp, Artificial
  probe
  misc_feature (1)..(25): SEQ ID NO: 6032; WAN0249A3_at; Start 6; Stop 30
tctctccttttcagttatacaaggt

SEQ ID NO: 15295 - DNA, 25 bp, Artificial
  probe
  misc_feature (1)..(25): SEQ ID NO: 6032; WAN0249A3_at; Start 10; Stop 34
tccttttcagttatacaaggttgtg

SEQ ID NO: 15296 - DNA, 25 bp, Artificial
  probe
  misc_feature (1)..(25): SEQ ID NO: 6032; WAN0249A3_at; Start 65; Stop 89
attttatagcccatggcaaggaacc

SEQ ID NO: 15297 - DNA, 25 bp, Artificial
  probe
  misc_feature (1)..(25): SEQ ID NO: 6032; WAN0249A3_at; Start 34; Stop 58
gatcacttcctgtatatccttatta

SEQ ID NO: 15298 - DNA, 25 bp, Artificial
  probe
  misc_feature (1)..(25): SEQ ID NO: 6185; WAN0249A4_at; Start 47; Stop 71
tgatataatatgcaaaagctaggag

SEQ ID NO: 15299 - DNA, 25 bp, Artificial
  probe
  misc_feature (1)..(25): SEQ ID NO: 6185; WAN0249A4_at; Start 52; Stop 76
taatatgcaaaagctaggaggtggt

SEQ ID NO: 15300 - DNA, 25 bp, Artificial
  probe
  misc_feature (1)..(25): SEQ ID NO: 6185; WAN0249A4_at; Start 9; Stop 33
ctaactatcagaatattttgacaaa

SEQ ID NO: 15301 - DNA, 25 bp, Artificial
  probe
  misc_feature (1)..(25): SEQ ID NO: 6185; WAN0249A4_at; Start 55; Stop 79
tatgcaaaagctaggaggtggtcag

SEQ ID NO: 15302 - DNA, 25 bp, Artificial
  probe
  misc_feature (1)..(25): SEQ ID NO: 6185; WAN0249A4_at; Start 13; Stop 37
ctatcagaatattttgacaaatgat

SEQ ID NO: 15303 - DNA, 25 bp, Artificial
  probe
  misc_feature (1)..(25): SEQ ID NO: 6185; WAN0249A4_at; Start 6; Stop 30
tttctaactatcagaatattttgac

SEQ ID NO: 15304 - DNA, 25 bp, Artificial
  probe
  misc_feature (1)..(25): SEQ ID NO: 6185; WAN0249A4_at; Start 28; Stop 52
gacaaatgattgtaaataatgatat

SEQ ID NO: 15305 - DNA, 25 bp, Artificial
  probe
  misc_feature (1)..(25): SEQ ID NO: 6185; WAN0249A4_at; Start 27; Stop 51
tgacaaatgattgtaaataatgata

SEQ ID NO: 15306 - DNA, 25 bp, Artificial
  probe
  misc_feature (1)..(25): SEQ ID NO: 6185; WAN0249A4_at; Start 8; Stop 32
tctaactatcagaatattttgacaa

SEQ ID NO: 15307 - DNA, 25 bp, Artificial
  probe
  misc_feature (1)..(25): SEQ ID NO: 6185; WAN0249A4_at; Start 50; Stop 74
tataatatgcaaaagctaggaggtg

SEQ ID NO: 15308 - DNA, 25 bp, Artificial
  probe
  misc_feature (1)..(25): SEQ ID NO: 6185; WAN0249A4_at; Start 12; Stop 36
actatcagaatattttgacaaatga

SEQ ID NO: 15309 - DNA, 25 bp, Artificial
  probe
  misc_feature (1)..(25): SEQ ID NO: 6185; WAN0249A4_at; Start 44; Stop 68
taatgatataatatgcaaaagctag

SEQ ID NO: 15310 - DNA, 25 bp, Artificial
  probe
  misc_feature (1)..(25): SEQ ID NO: 6185; WAN0249A4_at; Start 14; Stop 38
tatcagaatattttgacaaatgatt

SEQ ID NO: 15311 - DNA, 25 bp, Artificial
  probe
  misc_feature (1)..(25): SEQ ID NO: 6185; WAN0249A4_at; Start 10; Stop 34
taactatcagaatattttgacaaat

SEQ ID NO: 15312 - DNA, 25 bp, Artificial
  probe
  misc_feature (1)..(25): SEQ ID NO: 6185; WAN0249A4_at; Start 7; Stop 31
ttctaactatcagaatattttgaca

SEQ ID NO: 15313 - DNA, 25 bp, Artificial
  probe
  misc_feature (1)..(25): SEQ ID NO: 6185; WAN0249A4_at; Start 53; Stop 77
aatatgcaaaagctaggaggtggtc

SEQ ID NO: 15314 - DNA, 25 bp, Artificial
  probe
  misc_feature (1)..(25): SEQ ID NO: 6185; WAN0249A4_at; Start 49; Stop 73
atataatatgcaaaagctaggaggt

SEQ ID NO: 15315 - DNA, 25 bp, Artificial
  probe
  misc_feature (1)..(25): SEQ ID NO: 6185; WAN0249A4_at; Start 54; Stop 78
atatgcaaaagctaggaggtggtca

SEQ ID NO: 15316 - DNA, 25 bp, Artificial
  probe
  misc_feature (1)..(25): SEQ ID NO: 6185; WAN0249A4_at; Start 42; Stop 66
aataatgatataatatgcaaaagct

SEQ ID NO: 15317 - DNA, 25 bp, Artificial
  probe
  misc_feature (1)..(25): SEQ ID NO: 6185; WAN0249A4_at; Start 46; Stop 70
atgatataatatgcaaaagctagga

SEQ ID NO: 15318 - DNA, 25 bp, Artificial
  probe
  misc_feature (1)..(25): SEQ ID NO: 6185; WAN0249A4_at; Start 15; Stop 39
atcagaatattttgacaaatgattg

SEQ ID NO: 15319 - DNA, 25 bp, Artificial
  probe
  misc_feature (1)..(25): SEQ ID NO: 6185; WAN0249A4_at; Start 11; Stop 35
aactatcagaatattttgacaaatg

SEQ ID NO: 15320 - DNA, 25 bp, Artificial
  probe
  misc_feature (1)..(25): SEQ ID NO: 6185; WAN0249A4_at; Start 41; Stop 65
aaataatgatataatatgcaaaagc

SEQ ID NO: 15321 - DNA, 25 bp, Artificial
  probe
  misc_feature (1)..(25): SEQ ID NO: 6185; WAN0249A4_at; Start 35; Stop 59
gattgtaaataatgatataatatgc

SEQ ID NO: 15322 - DNA, 25 bp, Artificial
  probe
  misc_feature (1)..(25): SEQ ID NO: 6185; WAN0249A4_at; Start 19; Stop 43
gaatattttgacaaatgattgtaaa

SEQ ID NO: 15323 - DNA, 25 bp, Artificial
  probe
  misc_feature (1)..(25): SEQ ID NO: 6185; WAN0249A4_at; Start 26; Stop 50
ttgacaaatgattgtaaataatgat

SEQ ID NO: 15324 - DNA, 25 bp, Artificial
  probe
  misc_feature (1)..(25): SEQ ID NO: 6185; WAN0249A4_at; Start 48; Stop 72
gatataatatgcaaaagctaggagg

SEQ ID NO: 15325 - DNA, 25 bp, Artificial
  probe
  misc_feature (1)..(25): SEQ ID NO: 6185; WAN0249A4_at; Start 30; Stop 54
caaatgattgtaaataatgatataa

SEQ ID NO: 15326 - DNA, 25 bp, Artificial
  probe
  misc_feature (1)..(25): SEQ ID NO: 6185; WAN0249A4_at; Start 25; Stop 49
tttgacaaatgattgtaaataatga

SEQ ID NO: 15327 - DNA, 25 bp, Artificial
  probe
  misc_feature (1)..(25): SEQ ID NO: 6185; WAN0249A4_at; Start 17; Stop 41
cagaatattttgacaaatgattgta

SEQ ID NO: 15328 - DNA, 25 bp, Artificial
  probe
  misc_feature (1)..(25): SEQ ID NO: 6185; WAN0249A4_at; Start 51; Stop 75
ataatatgcaaaagctaggaggtgg

SEQ ID NO: 15329 - DNA, 25 bp, Artificial
  probe
  misc_feature (1)..(25): SEQ ID NO: 6185; WAN0249A4_at; Start 45; Stop 69
aatgatataatatgcaaaagctagg

SEQ ID NO: 15330 - DNA, 25 bp, Artificial
  probe
  misc_feature (1)..(25): SEQ ID NO: 6185; WAN0249A4_at; Start 16; Stop 40
tcagaatattttgacaaatgattgt

SEQ ID NO: 15331 - DNA, 25 bp, Artificial
  probe
  misc_feature (1)..(25): SEQ ID NO: 6185; WAN0249A4_at; Start 38; Stop 62
tgtaaataatgatataatatgcaaa

SEQ ID NO: 15332 - DNA, 25 bp, Artificial
  probe
  misc_feature (1)..(25): SEQ ID NO: 6086; WAN0249A5_at; Start 45; Stop 69
tttcgcttagccttctagtctgatt

SEQ ID NO: 15333 - DNA, 25 bp, Artificial
  probe
  misc_feature (1)..(25): SEQ ID NO: 6086; WAN0249A5_at; Start 25; Stop 49
ggagctaactcaagttatgctttcg

SEQ ID NO: 15334 - DNA, 25 bp, Artificial
  probe
  misc_feature (1)..(25): SEQ ID NO: 6086; WAN0249A5_at; Start 16; Stop 40
cgaactatgggagctaactcaagtt

SEQ ID NO: 15335 - DNA, 25 bp, Artificial
  probe
  misc_feature (1)..(25): SEQ ID NO: 6086; WAN0249A5_at; Start 54; Stop 78
gccttctagtctgatttcgattttt

SEQ ID NO: 15336 - DNA, 25 bp, Artificial
  probe
  misc_feature (1)..(25): SEQ ID NO: 6086; WAN0249A5_at; Start 8; Stop 32
tagtttcccgaactatgggagctaa

SEQ ID NO: 15337 - DNA, 25 bp, Artificial
  probe
  misc_feature (1)..(25): SEQ ID NO: 6086; WAN0249A5_at; Start 42; Stop 66
tgctttcgcttagccttctagtctg

SEQ ID NO: 15338 - DNA, 25 bp, Artificial
  probe
  misc_feature (1)..(25): SEQ ID NO: 6086; WAN0249A5_at; Start 52; Stop 76
tagccttctagtctgatttcgattt

SEQ ID NO: 15339 - DNA, 25 bp, Artificial
  probe
  misc_feature (1)..(25): SEQ ID NO: 6086; WAN0249A5_at; Start 51; Stop 75
ttagccttctagtctgatttcgatt

SEQ ID NO: 15340 - DNA, 25 bp, Artificial
  probe
  misc_feature (1)..(25): SEQ ID NO: 6086; WAN0249A5_at; Start 19; Stop 43
actatgggagctaactcaagttatg

SEQ ID NO: 15341 - DNA, 25 bp, Artificial
  probe
  misc_feature (1)..(25): SEQ ID NO: 6086; WAN0249A5_at; Start 20; Stop 44
ctatgggagctaactcaagttatgc

SEQ ID NO: 15342 - DNA, 25 bp, Artificial
  probe
  misc_feature (1)..(25): SEQ ID NO: 6086; WAN0249A5_at; Start 48; Stop 72
cgcttagccttctagtctgatttcg

SEQ ID NO: 15343 - DNA, 25 bp, Artificial
  probe
  misc_feature (1)..(25): SEQ ID NO: 6086; WAN0249A5_at; Start 15; Stop 39
ccgaactatgggagctaactcaagt

SEQ ID NO: 15344 - DNA, 25 bp, Artificial
  probe
  misc_feature (1)..(25): SEQ ID NO: 6086; WAN0249A5_at; Start 17; Stop 41
gaactatgggagctaactcaagtta

SEQ ID NO: 15345 - DNA, 25 bp, Artificial
  probe
  misc_feature (1)..(25): SEQ ID NO: 6086; WAN0249A5_at; Start 14; Stop 38
cccgaactatgggagctaactcaag

SEQ ID NO: 15346 - DNA, 25 bp, Artificial
  probe
  misc_feature (1)..(25): SEQ ID NO: 6086; WAN0249A5_at; Start 32; Stop 56
actcaagttatgctttcgcttagcc

SEQ ID NO: 15347 - DNA, 25 bp, Artificial
  probe
  misc_feature (1)..(25): SEQ ID NO: 6086; WAN0249A5_at; Start 40; Stop 64
tatgctttcgcttagccttctagtc

SEQ ID NO: 15348 - DNA, 25 bp, Artificial
  probe
  misc_feature (1)..(25): SEQ ID NO: 6086; WAN0249A5_at; Start 44; Stop 68
ctttcgcttagccttctagtctgat

SEQ ID NO: 15349 - DNA, 25 bp, Artificial
  probe
  misc_feature (1)..(25): SEQ ID NO: 6086; WAN0249A5_at; Start 55; Stop 79
ccttctagtctgatttcgattttta

SEQ ID NO: 15350 - DNA, 25 bp, Artificial
  probe
  misc_feature (1)..(25): SEQ ID NO: 6086; WAN0249A5_at; Start 31; Stop 55
aactcaagttatgctttcgcttagc

SEQ ID NO: 15351 - DNA, 25 bp, Artificial
  probe
  misc_feature (1)..(25): SEQ ID NO: 6086; WAN0249A5_at; Start 33; Stop 57
ctcaagttatgctttcgcttagcct

SEQ ID NO: 15352 - DNA, 25 bp, Artificial
  probe
  misc_feature (1)..(25): SEQ ID NO: 6086; WAN0249A5_at; Start 38; Stop 62
gttatgctttcgcttagccttctag

SEQ ID NO: 15353 - DNA, 25 bp, Artificial
  probe
  misc_feature (1)..(25): SEQ ID NO: 6086; WAN0249A5_at; Start 21; Stop 45
tatgggagctaactcaagttatgct

SEQ ID NO: 15354 - DNA, 25 bp, Artificial
  probe
  misc_feature (1)..(25): SEQ ID NO: 6086; WAN0249A5_at; Start 1; Stop 25
cctcccatagtttcccgaactatgg

SEQ ID NO: 15355 - DNA, 25 bp, Artificial
  probe
  misc_feature (1)..(25): SEQ ID NO: 6086; WAN0249A5_at; Start 12; Stop 36
ttcccgaactatgggagctaactca

SEQ ID NO: 15356 - DNA, 25 bp, Artificial
  probe
  misc_feature (1)..(25): SEQ ID NO: 6086; WAN0249A5_at; Start 23; Stop 47
tgggagctaactcaagttatgcttt

SEQ ID NO: 15357 - DNA, 25 bp, Artificial
  probe
  misc_feature (1)..(25): SEQ ID NO: 6086; WAN0249A5_at; Start 35; Stop 59
caagttatgctttcgcttagccttc

SEQ ID NO: 15358 - DNA, 25 bp, Artificial
  probe
  misc_feature (1)..(25): SEQ ID NO: 6086; WAN0249A5_at; Start 26; Stop 50
gagctaactcaagttatgctttcgc

SEQ ID NO: 15359 - DNA, 25 bp, Artificial
  probe
  misc_feature (1)..(25): SEQ ID NO: 6086; WAN0249A5_at; Start 6; Stop 30
catagtttcccgaactatgggagct

SEQ ID NO: 15360 - DNA, 25 bp, Artificial
  probe
  misc_feature (1)..(25): SEQ ID NO: 6086; WAN0249A5_at; Start 49; Stop 73
gcttagccttctagtctgatttcga

SEQ ID NO: 15361 - DNA, 25 bp, Artificial
  probe
  misc_feature (1)..(25): SEQ ID NO: 6086; WAN0249A5_at; Start 28; Stop 52
gctaactcaagttatgctttcgctt

SEQ ID NO: 15362 - DNA, 25 bp, Artificial
  probe
  misc_feature (1)..(25): SEQ ID NO: 6086; WAN0249A5_at; Start 36; Stop 60
aagttatgctttcgcttagccttct

SEQ ID NO: 15363 - DNA, 25 bp, Artificial
  probe
  misc_feature (1)..(25): SEQ ID NO: 6086; WAN0249A5_at; Start 30; Stop 54
taactcaagttatgctttcgcttag

SEQ ID NO: 15364 - DNA, 25 bp, Artificial
  probe
  misc_feature (1)..(25): SEQ ID NO: 6086; WAN0249A5_at; Start 11; Stop 35
tttcccgaactatgggagctaactc

SEQ ID NO: 15365 - DNA, 25 bp, Artificial
  probe
  misc_feature (1)..(25): SEQ ID NO: 6086; WAN0249A5_at; Start 50; Stop 74
cttagccttctagtctgatttcgat

SEQ ID NO: 15366 - DNA, 25 bp, Artificial
  probe
  misc_feature (1)..(25): SEQ ID NO: 6152; WAN0249A6_at; Start 55; Stop 79
gcataaataggcctaggaatgatat

SEQ ID NO: 15367 - DNA, 25 bp, Artificial
  probe
  misc_feature (1)..(25): SEQ ID NO: 6152; WAN0249A6_at; Start 52; Stop 76
atagcataaataggcctaggaatga

SEQ ID NO: 15368 - DNA, 25 bp, Artificial
  probe
  misc_feature (1)..(25): SEQ ID NO: 6152; WAN0249A6_at; Start 75; Stop 99
gatatttttatgtcattttcctggg

SEQ ID NO: 15369 - DNA, 25 bp, Artificial
  probe
  misc_feature (1)..(25): SEQ ID NO: 6152; WAN0249A6_at; Start 2; Stop 26
ttcgttcagcttcatttgaccgact

SEQ ID NO: 15370 - DNA, 25 bp, Artificial
  probe
  misc_feature (1)..(25): SEQ ID NO: 6152; WAN0249A6_at; Start 18; Stop 42
tgaccgactgaatactcatattttt

SEQ ID NO: 15371 - DNA, 25 bp, Artificial
  probe
  misc_feature (1)..(25): SEQ ID NO: 6152; WAN0249A6_at; Start 34; Stop 58
catatttttcagagagaaatagcat

SEQ ID NO: 15372 - DNA, 25 bp, Artificial
  probe
  misc_feature (1)..(25): SEQ ID NO: 6152; WAN0249A6_at; Start 27; Stop 51
gaatactcatatttttcagagagaa

SEQ ID NO: 15373 - DNA, 25 bp, Artificial
  probe
  misc_feature (1)..(25): SEQ ID NO: 6152; WAN0249A6_at; Start 43; Stop 67
cagagagaaatagcataaataggcc

SEQ ID NO: 15374 - DNA, 25 bp, Artificial
  probe
  misc_feature (1)..(25): SEQ ID NO: 6152; WAN0249A6_at; Start 13; Stop 37
tcatttgaccgactgaatactcata

SEQ ID NO: 15375 - DNA, 25 bp, Artificial
  probe
  misc_feature (1)..(25): SEQ ID NO: 6152; WAN0249A6_at; Start 32; Stop 56
ctcatatttttcagagagaaatagc

SEQ ID NO: 15376 - DNA, 25 bp, Artificial
  probe
  misc_feature (1)..(25): SEQ ID NO: 6152; WAN0249A6_at; Start 47; Stop 71
gagaaatagcataaataggcctagg

SEQ ID NO: 15377 - DNA, 25 bp, Artificial
  probe
  misc_feature (1)..(25): SEQ ID NO: 6152; WAN0249A6_at; Start 8; Stop 32
cagcttcatttgaccgactgaatac

SEQ ID NO: 15378 - DNA, 25 bp, Artificial
  probe
  misc_feature (1)..(25): SEQ ID NO: 6152; WAN0249A6_at; Start 45; Stop 69
gagagaaatagcataaataggccta

SEQ ID NO: 15379 - DNA, 25 bp, Artificial
  probe
  misc_feature (1)..(25): SEQ ID NO: 6152; WAN0249A6_at; Start 49; Stop 73
gaaatagcataaataggcctaggaa

SEQ ID NO: 15380 - DNA, 25 bp, Artificial
  probe
  misc_feature (1)..(25): SEQ ID NO: 6152; WAN0249A6_at; Start 3; Stop 27
tcgttcagcttcatttgaccgactg

SEQ ID NO: 15381 - DNA, 25 bp, Artificial
  probe
  misc_feature (1)..(25): SEQ ID NO: 6152; WAN0249A6_at; Start 1; Stop 25
gttcgttcagcttcatttgaccgac

SEQ ID NO: 15382 - DNA, 25 bp, Artificial
  probe
  misc_feature (1)..(25): SEQ ID NO: 6152; WAN0249A6_at; Start 5; Stop 29
gttcagcttcatttgaccgactgaa

SEQ ID NO: 15383 - DNA, 25 bp, Artificial
  probe
  misc_feature (1)..(25): SEQ ID NO: 6152; WAN0249A6_at; Start 56; Stop 80
cataaataggcctaggaatgatatt

SEQ ID NO: 15384 - DNA, 25 bp, Artificial
  probe
  misc_feature (1)..(25): SEQ ID NO: 6152; WAN0249A6_at; Start 16; Stop 40
tttgaccgactgaatactcatattt

SEQ ID NO: 15385 - DNA, 25 bp, Artificial
  probe
  misc_feature (1)..(25): SEQ ID NO: 6152; WAN0249A6_at; Start 64; Stop 88
ggcctaggaatgatatttttatgtc

SEQ ID NO: 15386 - DNA, 25 bp, Artificial
  probe
  misc_feature (1)..(25): SEQ ID NO: 6152; WAN0249A6_at; Start 4; Stop 28
cgttcagcttcatttgaccgactga

SEQ ID NO: 15387 - DNA, 25 bp, Artificial
  probe
  misc_feature (1)..(25): SEQ ID NO: 6152; WAN0249A6_at; Start 11; Stop 35
cttcatttgaccgactgaatactca

SEQ ID NO: 15388 - DNA, 25 bp, Artificial
  probe
  misc_feature (1)..(25): SEQ ID NO: 6152; WAN0249A6_at; Start 7; Stop 31
tcagcttcatttgaccgactgaata

SEQ ID NO: 15389 - DNA, 25 bp, Artificial
  probe
  misc_feature (1)..(25): SEQ ID NO: 6152; WAN0249A6_at; Start 41; Stop 65
ttcagagagaaatagcataaatagg

SEQ ID NO: 15390 - DNA, 25 bp, Artificial
  probe
  misc_feature (1)..(25): SEQ ID NO: 6152; WAN0249A6_at; Start 14; Stop 38
catttgaccgactgaatactcatat

SEQ ID NO: 15391 - DNA, 25 bp, Artificial
  probe
  misc_feature (1)..(25): SEQ ID NO: 6152; WAN0249A6_at; Start 62; Stop 86
taggcctaggaatgatatttttatg

SEQ ID NO: 15392 - DNA, 25 bp, Artificial
  probe
  misc_feature (1)..(25): SEQ ID NO: 6152; WAN0249A6_at; Start 51; Stop 75
aatagcataaataggcctaggaatg

SEQ ID NO: 15393 - DNA, 25 bp, Artificial
  probe
  misc_feature (1)..(25): SEQ ID NO: 6152; WAN0249A6_at; Start 9; Stop 33
agcttcatttgaccgactgaatact

SEQ ID NO: 15394 - DNA, 25 bp, Artificial
  probe
  misc_feature (1)..(25): SEQ ID NO: 6152; WAN0249A6_at; Start 23; Stop 47
gactgaatactcatatttttcagag

SEQ ID NO: 15395 - DNA, 25 bp, Artificial
  probe
  misc_feature (1)..(25): SEQ ID NO: 6152; WAN0249A6_at; Start 19; Stop 43
gaccgactgaatactcatatttttc

SEQ ID NO: 15396 - DNA, 25 bp, Artificial
  probe
  misc_feature (1)..(25): SEQ ID NO: 6152; WAN0249A6_at; Start 83; Stop 107
tatgtcattttcctgggtttttctg

SEQ ID NO: 15397 - DNA, 25 bp, Artificial
  probe
  misc_feature (1)..(25): SEQ ID NO: 6152; WAN0249A6_at; Start 42; Stop 66
tcagagagaaatagcataaataggc

SEQ ID NO: 15398 - DNA, 25 bp, Artificial
  probe
  misc_feature (1)..(25): SEQ ID NO: 6152; WAN0249A6_at; Start 65; Stop 89
gcctaggaatgatatttttatgtca

SEQ ID NO: 15399 - DNA, 25 bp, Artificial
  probe
  misc_feature (1)..(25): SEQ ID NO: 6152; WAN0249A6_at; Start 58; Stop 82
taaataggcctaggaatgatatttt

SEQ ID NO: 15400 - DNA, 25 bp, Artificial
  probe
  misc_feature (1)..(25): SEQ ID NO: 6058; WAN0249A7_at; Start 20; Stop 44
gagcatcaattgtagaaagtgctcc

SEQ ID NO: 15401 - DNA, 25 bp, Artificial
  probe
  misc_feature (1)..(25): SEQ ID NO: 6058; WAN0249A7_at; Start 16; Stop 40
ggtagagcatcaattgtagaaagtg

SEQ ID NO: 15402 - DNA, 25 bp, Artificial
  probe
  misc_feature (1)..(25): SEQ ID NO: 6058; WAN0249A7_at; Start 53; Stop 77
gtcagatacgtggaaaatttgatat

SEQ ID NO: 15403 - DNA, 25 bp, Artificial
  probe
  misc_feature (1)..(25): SEQ ID NO: 6058; WAN0249A7_at; Start 57; Stop 81
gatacgtggaaaatttgatatgata

SEQ ID NO: 15404 - DNA, 25 bp, Artificial
  probe
  misc_feature (1)..(25): SEQ ID NO: 6058; WAN0249A7_at; Start 42; Stop 66
tccttattctagtcagatacgtgga

SEQ ID NO: 15405 - DNA, 25 bp, Artificial
  probe
  misc_feature (1)..(25): SEQ ID NO: 6058; WAN0249A7_at; Start 12; Stop 36
tgaaggtagagcatcaattgtagaa

SEQ ID NO: 15406 - DNA, 25 bp, Artificial
  probe
  misc_feature (1)..(25): SEQ ID NO: 6058; WAN0249A7_at; Start 38; Stop 62
gtgctccttattctagtcagatacg

SEQ ID NO: 15407 - DNA, 25 bp, Artificial
  probe
  misc_feature (1)..(25): SEQ ID NO: 6058; WAN0249A7_at; Start 44; Stop 68
cttattctagtcagatacgtggaaa

SEQ ID NO: 15408 - DNA, 25 bp, Artificial
  probe
  misc_feature (1)..(25): SEQ ID NO: 6058; WAN0249A7_at; Start 35; Stop 59
aaagtgctccttattctagtcagat

SEQ ID NO: 15409 - DNA, 25 bp, Artificial
  probe
  misc_feature (1)..(25): SEQ ID NO: 6058; WAN0249A7_at; Start 80; Stop 104
tagtagggaataaggagaagaataa

SEQ ID NO: 15410 - DNA, 25 bp, Artificial
  probe
  misc_feature (1)..(25): SEQ ID NO: 6058; WAN0249A7_at; Start 34; Stop 58
gaaagtgctccttattctagtcaga

SEQ ID NO: 15411 - DNA, 25 bp, Artificial
  probe
  misc_feature (1)..(25): SEQ ID NO: 6058; WAN0249A7_at; Start 13; Stop 37
gaaggtagagcatcaattgtagaaa

SEQ ID NO: 15412 - DNA, 25 bp, Artificial
  probe
  misc_feature (1)..(25): SEQ ID NO: 6058; WAN0249A7_at; Start 43; Stop 67
ccttattctagtcagatacgtggaa

SEQ ID NO: 15413 - DNA, 25 bp, Artificial
  probe
  misc_feature (1)..(25): SEQ ID NO: 6058; WAN0249A7_at; Start 50; Stop 74
ctagtcagatacgtggaaaatttga

SEQ ID NO: 15414 - DNA, 25 bp, Artificial
  probe
  misc_feature (1)..(25): SEQ ID NO: 6058; WAN0249A7_at; Start 51; Stop 75
tagtcagatacgtggaaaatttgat

SEQ ID NO: 15415 - DNA, 25 bp, Artificial
  probe
  misc_feature (1)..(25): SEQ ID NO: 6058; WAN0249A7_at; Start 75; Stop 99
tatgatagtagggaataaggagaag

SEQ ID NO: 15416 - DNA, 25 bp, Artificial
  probe
  misc_feature (1)..(25): SEQ ID NO: 6058; WAN0249A7_at; Start 64; Stop 88
ggaaaatttgatatgatagtaggga

SEQ ID NO: 15417 - DNA, 25 bp, Artificial
  probe
  misc_feature (1)..(25): SEQ ID NO: 6058; WAN0249A7_at; Start 55; Stop 79
cagatacgtggaaaatttgatatga

SEQ ID NO: 15418 - DNA, 25 bp, Artificial
  probe
  misc_feature (1)..(25): SEQ ID NO: 6058; WAN0249A7_at; Start 14; Stop 38
aaggtagagcatcaattgtagaaag

SEQ ID NO: 15419 - DNA, 25 bp, Artificial
  probe
  misc_feature (1)..(25): SEQ ID NO: 6058; WAN0249A7_at; Start 40; Stop 64
gctccttattctagtcagatacgtg

SEQ ID NO: 15420 - DNA, 25 bp, Artificial
  probe
  misc_feature (1)..(25): SEQ ID NO: 6058; WAN0249A7_at; Start 23; Stop 47
catcaattgtagaaagtgctcctta

SEQ ID NO: 15421 - DNA, 25 bp, Artificial
  probe
  misc_feature (1)..(25): SEQ ID NO: 6058; WAN0249A7_at; Start 73; Stop 97
gatatgatagtagggaataaggaga

SEQ ID NO: 15422 - DNA, 25 bp, Artificial
  probe
  misc_feature (1)..(25): SEQ ID NO: 6058; WAN0249A7_at; Start 2; Stop 26
tggtatgtgatgaaggtagagcatc

SEQ ID NO: 15423 - DNA, 25 bp, Artificial
  probe
  misc_feature (1)..(25): SEQ ID NO: 6058; WAN0249A7_at; Start 36; Stop 60
aagtgctccttattctagtcagata

SEQ ID NO: 15424 - DNA, 25 bp, Artificial
  probe
  misc_feature (1)..(25): SEQ ID NO: 6058; WAN0249A7_at; Start 77; Stop 101
tgatagtagggaataaggagaagaa

SEQ ID NO: 15425 - DNA, 25 bp, Artificial
  probe
  misc_feature (1)..(25): SEQ ID NO: 6058; WAN0249A7_at; Start 49; Stop 73
tctagtcagatacgtggaaaatttg

SEQ ID NO: 15426 - DNA, 25 bp, Artificial
  probe
  misc_feature (1)..(25): SEQ ID NO: 6058; WAN0249A7_at; Start 18; Stop 42
tagagcatcaattgtagaaagtgct

SEQ ID NO: 15427 - DNA, 25 bp, Artificial
  probe
  misc_feature (1)..(25): SEQ ID NO: 6058; WAN0249A7_at; Start 46; Stop 70
tattctagtcagatacgtggaaaat

SEQ ID NO: 15428 - DNA, 25 bp, Artificial
  probe
  misc_feature (1)..(25): SEQ ID NO: 6058; WAN0249A7_at; Start 10; Stop 34
gatgaaggtagagcatcaattgtag

SEQ ID NO: 15429 - DNA, 25 bp, Artificial
  probe
  misc_feature (1)..(25): SEQ ID NO: 6058; WAN0249A7_at; Start 7; Stop 31
tgtgatgaaggtagagcatcaattg

SEQ ID NO: 15430 - DNA, 25 bp, Artificial
  probe
  misc_feature (1)..(25): SEQ ID NO: 6058; WAN0249A7_at; Start 22; Stop 46
gcatcaattgtagaaagtgctcctt

SEQ ID NO: 15431 - DNA, 25 bp, Artificial
  probe
  misc_feature (1)..(25): SEQ ID NO: 6058; WAN0249A7_at; Start 5; Stop 29
tatgtgatgaaggtagagcatcaat

SEQ ID NO: 15432 - DNA, 25 bp, Artificial
  probe
  misc_feature (1)..(25): SEQ ID NO: 6058; WAN0249A7_at; Start 61; Stop 85
cgtggaaaatttgatatgatagtag

SEQ ID NO: 15433 - DNA, 25 bp, Artificial
  probe
  misc_feature (1)..(25): SEQ ID NO: 6058; WAN0249A7_at; Start 26; Stop 50
caattgtagaaagtgctccttattc

SEQ ID NO: 15434 - DNA, 25 bp, Artificial
  probe
  misc_feature (1)..(25): SEQ ID NO: 6040; WAN0249A8_at; Start 33; Stop 57
attgttttttgctgagtgggatgct

SEQ ID NO: 15435 - DNA, 25 bp, Artificial
  probe
  misc_feature (1)..(25): SEQ ID NO: 6040; WAN0249A8_at; Start 52; Stop 76
gatgcttcaagttgtctggcttgac

SEQ ID NO: 15436 - DNA, 25 bp, Artificial
  probe
  misc_feature (1)..(25): SEQ ID NO: 6040; WAN0249A8_at; Start 13; Stop 37
cctagaagattttttctgggattgt

SEQ ID NO: 15437 - DNA, 25 bp, Artificial
  probe
  misc_feature (1)..(25): SEQ ID NO: 6040; WAN0249A8_at; Start 42; Stop 66
tgctgagtgggatgcttcaagttgt

SEQ ID NO: 15438 - DNA, 25 bp, Artificial
  probe
  misc_feature (1)..(25): SEQ ID NO: 6040; WAN0249A8_at; Start 14; Stop 38
ctagaagattttttctgggattgtt

SEQ ID NO: 15439 - DNA, 25 bp, Artificial
  probe
  misc_feature (1)..(25): SEQ ID NO: 6040; WAN0249A8_at; Start 38; Stop 62
tttttgctgagtgggatgcttcaag

SEQ ID NO: 15440 - DNA, 25 bp, Artificial
  probe
  misc_feature (1)..(25): SEQ ID NO: 6040; WAN0249A8_at; Start 37; Stop 61
ttttttgctgagtgggatgcttcaa

SEQ ID NO: 15441 - DNA, 25 bp, Artificial
  probe
  misc_feature (1)..(25): SEQ ID NO: 6040; WAN0249A8_at; Start 55; Stop 79
gcttcaagttgtctggcttgacttt

SEQ ID NO: 15442 - DNA, 25 bp, Artificial
  probe
  misc_feature (1)..(25): SEQ ID NO: 6040; WAN0249A8_at; Start 34; Stop 58
ttgttttttgctgagtgggatgctt

SEQ ID NO: 15443 - DNA, 25 bp, Artificial
  probe
  misc_feature (1)..(25): SEQ ID NO: 6040; WAN0249A8_at; Start 49; Stop 73
tgggatgcttcaagttgtctggctt

SEQ ID NO: 15444 - DNA, 25 bp, Artificial
  probe
  misc_feature (1)..(25): SEQ ID NO: 6040; WAN0249A8_at; Start 40; Stop 64
tttgctgagtgggatgcttcaagtt

SEQ ID NO: 15445 - DNA, 25 bp, Artificial
  probe
  misc_feature (1)..(25): SEQ ID NO: 6040; WAN0249A8_at; Start 8; Stop 32
acaatcctagaagattttttctggg

SEQ ID NO: 15446 - DNA, 25 bp, Artificial
  probe
  misc_feature (1)..(25): SEQ ID NO: 6040; WAN0249A8_at; Start 1; Stop 25
atacaaaacaatcctagaagatttt

SEQ ID NO: 15447 - DNA, 25 bp, Artificial
  probe
  misc_feature (1)..(25): SEQ ID NO: 6040; WAN0249A8_at; Start 26; Stop 50
ttctgggattgttttttgctgagtg

SEQ ID NO: 15448 - DNA, 25 bp, Artificial
  probe
  misc_feature (1)..(25): SEQ ID NO: 6040; WAN0249A8_at; Start 43; Stop 67
gctgagtgggatgcttcaagttgtc

SEQ ID NO: 15449 - DNA, 25 bp, Artificial
  probe
  misc_feature (1)..(25): SEQ ID NO: 6040; WAN0249A8_at; Start 24; Stop 48
ttttctgggattgttttttgctgag

SEQ ID NO: 15450 - DNA, 25 bp, Artificial
  probe
  misc_feature (1)..(25): SEQ ID NO: 6040; WAN0249A8_at; Start 53; Stop 77
atgcttcaagttgtctggcttgact

SEQ ID NO: 15451 - DNA, 25 bp, Artificial
  probe
  misc_feature (1)..(25): SEQ ID NO: 6040; WAN0249A8_at; Start 12; Stop 36
tcctagaagattttttctgggattg

SEQ ID NO: 15452 - DNA, 25 bp, Artificial
  probe
  misc_feature (1)..(25): SEQ ID NO: 6040; WAN0249A8_at; Start 36; Stop 60
gttttttgctgagtgggatgcttca

SEQ ID NO: 15453 - DNA, 25 bp, Artificial
  probe
  misc_feature (1)..(25): SEQ ID NO: 6040; WAN0249A8_at; Start 35; Stop 59
tgttttttgctgagtgggatgcttc

SEQ ID NO: 15454 - DNA, 25 bp, Artificial
  probe
  misc_feature (1)..(25): SEQ ID NO: 6040; WAN0249A8_at; Start 7; Stop 31
aacaatcctagaagattttttctgg

SEQ ID NO: 15455 - DNA, 25 bp, Artificial
  probe
  misc_feature (1)..(25): SEQ ID NO: 6040; WAN0249A8_at; Start 54; Stop 78
tgcttcaagttgtctggcttgactt

SEQ ID NO: 15456 - DNA, 25 bp, Artificial
  probe
  misc_feature (1)..(25): SEQ ID NO: 6040; WAN0249A8_at; Start 28; Stop 52
ctgggattgttttttgctgagtggg

SEQ ID NO: 15457 - DNA, 25 bp, Artificial
  probe
  misc_feature (1)..(25): SEQ ID NO: 6040; WAN0249A8_at; Start 41; Stop 65
ttgctgagtgggatgcttcaagttg

SEQ ID NO: 15458 - DNA, 25 bp, Artificial
  probe
  misc_feature (1)..(25): SEQ ID NO: 6040; WAN0249A8_at; Start 48; Stop 72
gtgggatgcttcaagttgtctggct

SEQ ID NO: 15459 - DNA, 25 bp, Artificial
  probe
  misc_feature (1)..(25): SEQ ID NO: 6040; WAN0249A8_at; Start 10; Stop 34
aatcctagaagattttttctgggat

SEQ ID NO: 15460 - DNA, 25 bp, Artificial
  probe
  misc_feature (1)..(25): SEQ ID NO: 6040; WAN0249A8_at; Start 25; Stop 49
tttctgggattgttttttgctgagt

SEQ ID NO: 15461 - DNA, 25 bp, Artificial
  probe
  misc_feature (1)..(25): SEQ ID NO: 6040; WAN0249A8_at; Start 45; Stop 69
tgagtgggatgcttcaagttgtctg

SEQ ID NO: 15462 - DNA, 25 bp, Artificial
  probe
  misc_feature (1)..(25): SEQ ID NO: 6040; WAN0249A8_at; Start 44; Stop 68
ctgagtgggatgcttcaagttgtct

SEQ ID NO: 15463 - DNA, 25 bp, Artificial
  probe
  misc_feature (1)..(25): SEQ ID NO: 6040; WAN0249A8_at; Start 51; Stop 75
ggatgcttcaagttgtctggcttga

SEQ ID NO: 15464 - DNA, 25 bp, Artificial
  probe
  misc_feature (1)..(25): SEQ ID NO: 6040; WAN0249A8_at; Start 50; Stop 74
gggatgcttcaagttgtctggcttg

SEQ ID NO: 15465 - DNA, 25 bp, Artificial
  probe
  misc_feature (1)..(25): SEQ ID NO: 6040; WAN0249A8_at; Start 27; Stop 51
tctgggattgttttttgctgagtgg

SEQ ID NO: 15466 - DNA, 25 bp, Artificial
  probe
  misc_feature (1)..(25): SEQ ID NO: 6040; WAN0249A8_at; Start 56; Stop 80
cttcaagttgtctggcttgactttc

SEQ ID NO: 15467 - DNA, 25 bp, Artificial
  probe
  misc_feature (1)..(25): SEQ ID NO: 6040; WAN0249A8_at; Start 29; Stop 53
tgggattgttttttgctgagtggga

SEQ ID NO: 15468 - DNA, 25 bp, Artificial
  probe
  misc_feature (1)..(25): SEQ ID NO: 6125; WAN0249A9_at; Start 40; Stop 64
gatgaggagtcagatgacaaatcga

SEQ ID NO: 15469 - DNA, 25 bp, Artificial
  probe
  misc_feature (1)..(25): SEQ ID NO: 6125; WAN0249A9_at; Start 19; Stop 43
ttgagtagtgtttcttgtaaggatg

SEQ ID NO: 15470 - DNA, 25 bp, Artificial
  probe
  misc_feature (1)..(25): SEQ ID NO: 6125; WAN0249A9_at; Start 41; Stop 65
atgaggagtcagatgacaaatcgac

SEQ ID NO: 15471 - DNA, 25 bp, Artificial
  probe
  misc_feature (1)..(25): SEQ ID NO: 6125; WAN0249A9_at; Start 36; Stop 60
taaggatgaggagtcagatgacaaa

SEQ ID NO: 15472 - DNA, 25 bp, Artificial
  probe
  misc_feature (1)..(25): SEQ ID NO: 6125; WAN0249A9_at; Start 14; Stop 38
cattgttgagtagtgtttcttgtaa

SEQ ID NO: 15473 - DNA, 25 bp, Artificial
  probe
  misc_feature (1)..(25): SEQ ID NO: 6125; WAN0249A9_at; Start 33; Stop 57
ttgtaaggatgaggagtcagatgac

SEQ ID NO: 15474 - DNA, 25 bp, Artificial
  probe
  misc_feature (1)..(25): SEQ ID NO: 6125; WAN0249A9_at; Start 8; Stop 32
gagtttcattgttgagtagtgtttc

SEQ ID NO: 15475 - DNA, 25 bp, Artificial
  probe
  misc_feature (1)..(25): SEQ ID NO: 6125; WAN0249A9_at; Start 49; Stop 73
tcagatgacaaatcgactccttttt

SEQ ID NO: 15476 - DNA, 25 bp, Artificial
  probe
  misc_feature (1)..(25): SEQ ID NO: 6125; WAN0249A9_at; Start 39; Stop 63
ggatgaggagtcagatgacaaatcg

SEQ ID NO: 15477 - DNA, 25 bp, Artificial
  probe
  misc_feature (1)..(25): SEQ ID NO: 6125; WAN0249A9_at; Start 38; Stop 62
aggatgaggagtcagatgacaaatc

SEQ ID NO: 15478 - DNA, 25 bp, Artificial
  probe
  misc_feature (1)..(25): SEQ ID NO: 6125; WAN0249A9_at; Start 1; Stop 25
gattgtagagtttcattgttgagta

SEQ ID NO: 15479 - DNA, 25 bp, Artificial
  probe
  misc_feature (1)..(25): SEQ ID NO: 6125; WAN0249A9_at; Start 29; Stop 53
tttcttgtaaggatgaggagtcaga

SEQ ID NO: 15480 - DNA, 25 bp, Artificial
  probe
  misc_feature (1)..(25): SEQ ID NO: 6125; WAN0249A9_at; Start 32; Stop 56
cttgtaaggatgaggagtcagatga

SEQ ID NO: 15481 - DNA, 25 bp, Artificial
  probe
  misc_feature (1)..(25): SEQ ID NO: 6125; WAN0249A9_at; Start 45; Stop 69
ggagtcagatgacaaatcgactcct

SEQ ID NO: 15482 - DNA, 25 bp, Artificial
  probe
  misc_feature (1)..(25): SEQ ID NO: 6125; WAN0249A9_at; Start 34; Stop 58
tgtaaggatgaggagtcagatgaca

SEQ ID NO: 15483 - DNA, 25 bp, Artificial
  probe
  misc_feature (1)..(25): SEQ ID NO: 6125; WAN0249A9_at; Start 43; Stop 67
gaggagtcagatgacaaatcgactc

SEQ ID NO: 15484 - DNA, 25 bp, Artificial
  probe
  misc_feature (1)..(25): SEQ ID NO: 6125; WAN0249A9_at; Start 4; Stop 28
tgtagagtttcattgttgagtagtg

SEQ ID NO: 15485 - DNA, 25 bp, Artificial
  probe
  misc_feature (1)..(25): SEQ ID NO: 6125; WAN0249A9_at; Start 31; Stop 55
tcttgtaaggatgaggagtcagatg

SEQ ID NO: 15486 - DNA, 25 bp, Artificial
  probe
  misc_feature (1)..(25): SEQ ID NO: 6125; WAN0249A9_at; Start 50; Stop 74
cagatgacaaatcgactcctttttc

SEQ ID NO: 15487 - DNA, 25 bp, Artificial
  probe
  misc_feature (1)..(25): SEQ ID NO: 6125; WAN0249A9_at; Start 52; Stop 76
gatgacaaatcgactcctttttctt

SEQ ID NO: 15488 - DNA, 25 bp, Artificial
  probe
  misc_feature (1)..(25): SEQ ID NO: 6125; WAN0249A9_at; Start 30; Stop 54
ttcttgtaaggatgaggagtcagat

SEQ ID NO: 15489 - DNA, 25 bp, Artificial
  probe
  misc_feature (1)..(25): SEQ ID NO: 6125; WAN0249A9_at; Start 46; Stop 70
gagtcagatgacaaatcgactcctt

SEQ ID NO: 15490 - DNA, 25 bp, Artificial
  probe
  misc_feature (1)..(25): SEQ ID NO: 6125; WAN0249A9_at; Start 42; Stop 66
tgaggagtcagatgacaaatcgact

SEQ ID NO: 15491 - DNA, 25 bp, Artificial
  probe
  misc_feature (1)..(25): SEQ ID NO: 6125; WAN0249A9_at; Start 48; Stop 72
gtcagatgacaaatcgactcctttt

SEQ ID NO: 15492 - DNA, 25 bp, Artificial
  probe
  misc_feature (1)..(25): SEQ ID NO: 6125; WAN0249A9_at; Start 54; Stop 78
tgacaaatcgactcctttttcttat

SEQ ID NO: 15493 - DNA, 25 bp, Artificial
  probe
  misc_feature (1)..(25): SEQ ID NO: 6125; WAN0249A9_at; Start 28; Stop 52
gtttcttgtaaggatgaggagtcag

SEQ ID NO: 15494 - DNA, 25 bp, Artificial
  probe
  misc_feature (1)..(25): SEQ ID NO: 6125; WAN0249A9_at; Start 27; Stop 51
tgtttcttgtaaggatgaggagtca

SEQ ID NO: 15495 - DNA, 25 bp, Artificial
  probe
  misc_feature (1)..(25): SEQ ID NO: 6125; WAN0249A9_at; Start 21; Stop 45
gagtagtgtttcttgtaaggatgag

SEQ ID NO: 15496 - DNA, 25 bp, Artificial
  probe
  misc_feature (1)..(25): SEQ ID NO: 6125; WAN0249A9_at; Start 23; Stop 47
gtagtgtttcttgtaaggatgagga

SEQ ID NO: 15497 - DNA, 25 bp, Artificial
  probe
  misc_feature (1)..(25): SEQ ID NO: 6125; WAN0249A9_at; Start 26; Stop 50
gtgtttcttgtaaggatgaggagtc

SEQ ID NO: 15498 - DNA, 25 bp, Artificial
  probe
  misc_feature (1)..(25): SEQ ID NO: 6125; WAN0249A9_at; Start 24; Stop 48
tagtgtttcttgtaaggatgaggag

SEQ ID NO: 15499 - DNA, 25 bp, Artificial
  probe
  misc_feature (1)..(25): SEQ ID NO: 6125; WAN0249A9_at; Start 17; Stop 41
tgttgagtagtgtttcttgtaagga

SEQ ID NO: 15500 - DNA, 25 bp, Artificial
  probe
  misc_feature (1)..(25): SEQ ID NO: 6125; WAN0249A9_at; Start 47; Stop 71
agtcagatgacaaatcgactccttt

SEQ ID NO: 15501 - DNA, 25 bp, Artificial
  probe
  misc_feature (1)..(25): SEQ ID NO: 6125; WAN0249A9_at; Start 35; Stop 59
gtaaggatgaggagtcagatgacaa

SEQ ID NO: 15502 - DNA, 25 bp, Artificial
  probe
  misc_feature (1)..(25): SEQ ID NO: 6184; WAN0249AA_at; Start 62; Stop 86
tgaagtccacacttacttgttgaga

SEQ ID NO: 15503 - DNA, 25 bp, Artificial
  probe
  misc_feature (1)..(25): SEQ ID NO: 6184; WAN0249AA_at; Start 69; Stop 93
cacacttacttgttgagatgttatc

SEQ ID NO: 15504 - DNA, 25 bp, Artificial
  probe
  misc_feature (1)..(25): SEQ ID NO: 6184; WAN0249AA_at; Start 64; Stop 88
aagtccacacttacttgttgagatg

SEQ ID NO: 15505 - DNA, 25 bp, Artificial
  probe
  misc_feature (1)..(25): SEQ ID NO: 6184; WAN0249AA_at; Start 213; Stop 237
ctcagaaaattccatactatattat

SEQ ID NO: 15506 - DNA, 25 bp, Artificial
  probe
  misc_feature (1)..(25): SEQ ID NO: 6184; WAN0249AA_at; Start 49; Stop 73
gctgtaattagtctgaagtccacac

SEQ ID NO: 15507 - DNA, 25 bp, Artificial
  probe
  misc_feature (1)..(25): SEQ ID NO: 6184; WAN0249AA_at; Start 10; Stop 34
gcccattaaaagcataagcggtaat

SEQ ID NO: 15508 - DNA, 25 bp, Artificial
  probe
  misc_feature (1)..(25): SEQ ID NO: 6184; WAN0249AA_at; Start 116; Stop 140
tactgtattttttatagtatgcaga

SEQ ID NO: 15509 - DNA, 25 bp, Artificial
  probe
  misc_feature (1)..(25): SEQ ID NO: 6184; WAN0249AA_at; Start 45; Stop 69
aaatgctgtaattagtctgaagtcc

SEQ ID NO: 15510 - DNA, 25 bp, Artificial
  probe
  misc_feature (1)..(25): SEQ ID NO: 6184; WAN0249AA_at; Start 57; Stop 81
tagtctgaagtccacacttacttgt

SEQ ID NO: 15511 - DNA, 25 bp, Artificial
  probe
  misc_feature (1)..(25): SEQ ID NO: 6184; WAN0249AA_at; Start 71; Stop 95
cacttacttgttgagatgttatctc

SEQ ID NO: 15512 - DNA, 25 bp, Artificial
  probe
  misc_feature (1)..(25): SEQ ID NO: 6184; WAN0249AA_at; Start 66; Stop 90
gtccacacttacttgttgagatgtt

SEQ ID NO: 15513 - DNA, 25 bp, Artificial
  probe
  misc_feature (1)..(25): SEQ ID NO: 6184; WAN0249AA_at; Start 210; Stop 234
gtactcagaaaattccatactatat

SEQ ID NO: 15514 - DNA, 25 bp, Artificial
  probe
  misc_feature (1)..(25): SEQ ID NO: 6184; WAN0249AA_at; Start 282; Stop 306
agaatatagaaaaagcgaggttaat

SEQ ID NO: 15515 - DNA, 25 bp, Artificial
  probe
  misc_feature (1)..(25): SEQ ID NO: 6184; WAN0249AA_at; Start 83; Stop 107
gagatgttatctctgttttttatcg

SEQ ID NO: 15516 - DNA, 25 bp, Artificial
  probe
  misc_feature (1)..(25): SEQ ID NO: 6184; WAN0249AA_at; Start 51; Stop 75
tgtaattagtctgaagtccacactt

SEQ ID NO: 15517 - DNA, 25 bp, Artificial
  probe
  misc_feature (1)..(25): SEQ ID NO: 6184; WAN0249AA_at; Start 15; Stop 39
ttaaaagcataagcggtaatctaat

SEQ ID NO: 15518 - DNA, 25 bp, Artificial
  probe
  misc_feature (1)..(25): SEQ ID NO: 6184; WAN0249AA_at; Start 152; Stop 176
tatatttcaatagaaatttctatcg

SEQ ID NO: 15519 - DNA, 25 bp, Artificial
  probe
  misc_feature (1)..(25): SEQ ID NO: 6184; WAN0249AA_at; Start 21; Stop 45
gcataagcggtaatctaatttaaaa

SEQ ID NO: 15520 - DNA, 25 bp, Artificial
  probe
  misc_feature (1)..(25): SEQ ID NO: 6184; WAN0249AA_at; Start 128; Stop 152
tatagtatgcagaatatttttaagt

SEQ ID NO: 15521 - DNA, 25 bp, Artificial
  probe
  misc_feature (1)..(25): SEQ ID NO: 6184; WAN0249AA_at; Start 164; Stop 188
gaaatttctatcgatttattgtata

SEQ ID NO: 15522 - DNA, 25 bp, Artificial
  probe
  misc_feature (1)..(25): SEQ ID NO: 6184; WAN0249AA_at; Start 205; Stop 229
gaaaagtactcagaaaattccatac

SEQ ID NO: 15523 - DNA, 25 bp, Artificial
  probe
  misc_feature (1)..(25): SEQ ID NO: 6184; WAN0249AA_at; Start 191; Stop 215
gataagtaattgttgaaaagtactc

SEQ ID NO: 15524 - DNA, 25 bp, Artificial
  probe
  misc_feature (1)..(25): SEQ ID NO: 6184; WAN0249AA_at; Start 6; Stop 30
tatagcccattaaaagcataagcgg

SEQ ID NO: 15525 - DNA, 25 bp, Artificial
  probe
  misc_feature (1)..(25): SEQ ID NO: 6184; WAN0249AA_at; Start 12; Stop 36
ccattaaaagcataagcggtaatct

SEQ ID NO: 15526 - DNA, 25 bp, Artificial
  probe
  misc_feature (1)..(25): SEQ ID NO: 6184; WAN0249AA_at; Start 42; Stop 66
aaaaaatgctgtaattagtctgaag

SEQ ID NO: 15527 - DNA, 25 bp, Artificial
  probe
  misc_feature (1)..(25): SEQ ID NO: 6184; WAN0249AA_at; Start 28; Stop 52
cggtaatctaatttaaaaaatgctg

SEQ ID NO: 15528 - DNA, 25 bp, Artificial
  probe
  misc_feature (1)..(25): SEQ ID NO: 6184; WAN0249AA_at; Start 175; Stop 199
cgatttattgtataatgataagtaa

SEQ ID NO: 15529 - DNA, 25 bp, Artificial
  probe
  misc_feature (1)..(25): SEQ ID NO: 6184; WAN0249AA_at; Start 8; Stop 32
tagcccattaaaagcataagcggta

SEQ ID NO: 15530 - DNA, 25 bp, Artificial
  probe
  misc_feature (1)..(25): SEQ ID NO: 6184; WAN0249AA_at; Start 196; Stop 220
gtaattgttgaaaagtactcagaaa

SEQ ID NO: 15531 - DNA, 25 bp, Artificial
  probe
  misc_feature (1)..(25): SEQ ID NO: 6184; WAN0249AA_at; Start 277; Stop 301
tataaagaatatagaaaaagcgagg

SEQ ID NO: 15532 - DNA, 25 bp, Artificial
  probe
  misc_feature (1)..(25): SEQ ID NO: 6184; WAN0249AA_at; Start 47; Stop 71
atgctgtaattagtctgaagtccac

SEQ ID NO: 15533 - DNA, 25 bp, Artificial
  probe
  misc_feature (1)..(25): SEQ ID NO: 6184; WAN0249AA_at; Start 201; Stop 225
tgttgaaaagtactcagaaaattcc

SEQ ID NO: 15534 - DNA, 25 bp, Artificial
  probe
  misc_feature (1)..(25): SEQ ID NO: 6184; WAN0249AA_at; Start 59; Stop 83
gtctgaagtccacacttacttgttg

SEQ ID NO: 15535 - DNA, 25 bp, Artificial
  probe
  misc_feature (1)..(25): SEQ ID NO: 6184; WAN0249AA_at; Start 53; Stop 77
taattagtctgaagtccacacttac

SEQ ID NO: 15536 - DNA, 25 bp, Artificial
  probe
  misc_feature (1)..(25): SEQ ID NO: 5999; WAN0249AB_at; Start 86; Stop 110
agctatctgttaatataatattcaa

SEQ ID NO: 15537 - DNA, 25 bp, Artificial
  probe
  misc_feature (1)..(25): SEQ ID NO: 5999; WAN0249AB_at; Start 35; Stop 59
taggtacgcagagacaaatagtagg

SEQ ID NO: 15538 - DNA, 25 bp, Artificial
  probe
  misc_feature (1)..(25): SEQ ID NO: 5999; WAN0249AB_at; Start 64; Stop 88
tatgatataactaagcgttgaaagc

SEQ ID NO: 15539 - DNA, 25 bp, Artificial
  probe
  misc_feature (1)..(25): SEQ ID NO: 5999; WAN0249AB_at; Start 66; Stop 90
tgatataactaagcgttgaaagcta

SEQ ID NO: 15540 - DNA, 25 bp, Artificial
  probe
  misc_feature (1)..(25): SEQ ID NO: 5999; WAN0249AB_at; Start 37; Stop 61
ggtacgcagagacaaatagtaggaa

SEQ ID NO: 15541 - DNA, 25 bp, Artificial
  probe
  misc_feature (1)..(25): SEQ ID NO: 5999; WAN0249AB_at; Start 71; Stop 95
taactaagcgttgaaagctatctgt

SEQ ID NO: 15542 - DNA, 25 bp, Artificial
  probe
  misc_feature (1)..(25): SEQ ID NO: 5999; WAN0249AB_at; Start 132; Stop 156
gaaacgaagaaaattgtatttgcta

SEQ ID NO: 15543 - DNA, 25 bp, Artificial
  probe
  misc_feature (1)..(25): SEQ ID NO: 5999; WAN0249AB_at; Start 29; Stop 53
taggaataggtacgcagagacaaat

SEQ ID NO: 15544 - DNA, 25 bp, Artificial
  probe
  misc_feature (1)..(25): SEQ ID NO: 5999; WAN0249AB_at; Start 32; Stop 56
gaataggtacgcagagacaaatagt

SEQ ID NO: 15545 - DNA, 25 bp, Artificial
  probe
  misc_feature (1)..(25): SEQ ID NO: 5999; WAN0249AB_at; Start 101; Stop 125
taatattcaaactacaataaggagt

SEQ ID NO: 15546 - DNA, 25 bp, Artificial
  probe
  misc_feature (1)..(25): SEQ ID NO: 5999; WAN0249AB_at; Start 25; Stop 49
gagctaggaataggtacgcagagac

SEQ ID NO: 15547 - DNA, 25 bp, Artificial
  probe
  misc_feature (1)..(25): SEQ ID NO: 5999; WAN0249AB_at; Start 8; Stop 32
attgcgcctacttttgggagctagg

SEQ ID NO: 15548 - DNA, 25 bp, Artificial
  probe
  misc_feature (1)..(25): SEQ ID NO: 5999; WAN0249AB_at; Start 74; Stop 98
ctaagcgttgaaagctatctgttaa

SEQ ID NO: 15549 - DNA, 25 bp, Artificial
  probe
  misc_feature (1)..(25): SEQ ID NO: 5999; WAN0249AB_at; Start 41; Stop 65
cgcagagacaaatagtaggaaaata

SEQ ID NO: 15550 - DNA, 25 bp, Artificial
  probe
  misc_feature (1)..(25): SEQ ID NO: 5999; WAN0249AB_at; Start 20; Stop 44
tttgggagctaggaataggtacgca

SEQ ID NO: 15551 - DNA, 25 bp, Artificial
  probe
  misc_feature (1)..(25): SEQ ID NO: 5999; WAN0249AB_at; Start 137; Stop 161
gaagaaaattgtatttgctagtgcc

SEQ ID NO: 15552 - DNA, 25 bp, Artificial
  probe
  misc_feature (1)..(25): SEQ ID NO: 5999; WAN0249AB_at; Start 69; Stop 93
tataactaagcgttgaaagctatct

SEQ ID NO: 15553 - DNA, 25 bp, Artificial
  probe
  misc_feature (1)..(25): SEQ ID NO: 5999; WAN0249AB_at; Start 6; Stop 30
tcattgcgcctacttttgggagcta

SEQ ID NO: 15554 - DNA, 25 bp, Artificial
  probe
  misc_feature (1)..(25): SEQ ID NO: 5999; WAN0249AB_at; Start 4; Stop 28
agtcattgcgcctacttttgggagc

SEQ ID NO: 15555 - DNA, 25 bp, Artificial
  probe
  misc_feature (1)..(25): SEQ ID NO: 5999; WAN0249AB_at; Start 59; Stop 83
gaaaatatgatataactaagcgttg

SEQ ID NO: 15556 - DNA, 25 bp, Artificial
  probe
  misc_feature (1)..(25): SEQ ID NO: 5999; WAN0249AB_at; Start 79; Stop 103
cgttgaaagctatctgttaatataa

SEQ ID NO: 15557 - DNA, 25 bp, Artificial
  probe
  misc_feature (1)..(25): SEQ ID NO: 5999; WAN0249AB_at; Start 45; Stop 69
gagacaaatagtaggaaaatatgat

SEQ ID NO: 15558 - DNA, 25 bp, Artificial
  probe
  misc_feature (1)..(25): SEQ ID NO: 5999; WAN0249AB_at; Start 15; Stop 39
ctacttttgggagctaggaataggt

SEQ ID NO: 15559 - DNA, 25 bp, Artificial
  probe
  misc_feature (1)..(25): SEQ ID NO: 5999; WAN0249AB_at; Start 108; Stop 132
caaactacaataaggagtaagaaag

SEQ ID NO: 15560 - DNA, 25 bp, Artificial
  probe
  misc_feature (1)..(25): SEQ ID NO: 5999; WAN0249AB_at; Start 104; Stop 128
tattcaaactacaataaggagtaag

SEQ ID NO: 15561 - DNA, 25 bp, Artificial
  probe
  misc_feature (1)..(25): SEQ ID NO: 5999; WAN0249AB_at; Start 18; Stop 42
cttttgggagctaggaataggtacg

SEQ ID NO: 15562 - DNA, 25 bp, Artificial
  probe
  misc_feature (1)..(25): SEQ ID NO: 5999; WAN0249AB_at; Start 10; Stop 34
tgcgcctacttttgggagctaggaa

SEQ ID NO: 15563 - DNA, 25 bp, Artificial
  probe
  misc_feature (1)..(25): SEQ ID NO: 5999; WAN0249AB_at; Start 7; Stop 31
cattgcgcctacttttgggagctag

SEQ ID NO: 15564 - DNA, 25 bp, Artificial
  probe
  misc_feature (1)..(25): SEQ ID NO: 5999; WAN0249AB_at; Start 31; Stop 55
ggaataggtacgcagagacaaatag

SEQ ID NO: 15565 - DNA, 25 bp, Artificial
  probe
  misc_feature (1)..(25): SEQ ID NO: 5999; WAN0249AB_at; Start 13; Stop 37
gcctacttttgggagctaggaatag

SEQ ID NO: 15566 - DNA, 25 bp, Artificial
  probe
  misc_feature (1)..(25): SEQ ID NO: 5999; WAN0249AB_at; Start 39; Stop 63
tacgcagagacaaatagtaggaaaa

SEQ ID NO: 15567 - DNA, 25 bp, Artificial
  probe
  misc_feature (1)..(25): SEQ ID NO: 5999; WAN0249AB_at; Start 27; Stop 51
gctaggaataggtacgcagagacaa

SEQ ID NO: 15568 - DNA, 25 bp, Artificial
  probe
  misc_feature (1)..(25): SEQ ID NO: 5999; WAN0249AB_at; Start 11; Stop 35
gcgcctacttttgggagctaggaat

SEQ ID NO: 15569 - DNA, 25 bp, Artificial
  probe
  misc_feature (1)..(25): SEQ ID NO: 5999; WAN0249AB_at; Start 3; Stop 27
gagtcattgcgcctacttttgggag

SEQ ID NO: 15570 - DNA, 25 bp, Artificial
  probe
  misc_feature (1)..(25): SEQ ID NO: 6168; WAN0249AC_at; Start 27; Stop 51
tcagtagacgctttgtcctatagga

SEQ ID NO: 15571 - DNA, 25 bp, Artificial
  probe
  misc_feature (1)..(25): SEQ ID NO: 6168; WAN0249AC_at; Start 44; Stop 68
ctataggatcaaagctagagccctg

SEQ ID NO: 15572 - DNA, 25 bp, Artificial
  probe
  misc_feature (1)..(25): SEQ ID NO: 6168; WAN0249AC_at; Start 33; Stop 57
gacgctttgtcctataggatcaaag

SEQ ID NO: 15573 - DNA, 25 bp, Artificial
  probe
  misc_feature (1)..(25): SEQ ID NO: 6168; WAN0249AC_at; Start 20; Stop 44
catttagtcagtagacgctttgtcc

SEQ ID NO: 15574 - DNA, 25 bp, Artificial
  probe
  misc_feature (1)..(25): SEQ ID NO: 6168; WAN0249AC_at; Start 40; Stop 64
tgtcctataggatcaaagctagagc

SEQ ID NO: 15575 - DNA, 25 bp, Artificial
  probe
  misc_feature (1)..(25): SEQ ID NO: 6168; WAN0249AC_at; Start 10; Stop 34
aaggcttaagcatttagtcagtaga

SEQ ID NO: 15576 - DNA, 25 bp, Artificial
  probe
  misc_feature (1)..(25): SEQ ID NO: 6168; WAN0249AC_at; Start 28; Stop 52
cagtagacgctttgtcctataggat

SEQ ID NO: 15577 - DNA, 25 bp, Artificial
  probe
  misc_feature (1)..(25): SEQ ID NO: 6168; WAN0249AC_at; Start 61; Stop 85
gagccctgactagtatttttagata

SEQ ID NO: 15578 - DNA, 25 bp, Artificial
  probe
  misc_feature (1)..(25): SEQ ID NO: 6168; WAN0249AC_at; Start 9; Stop 33
aaaggcttaagcatttagtcagtag

SEQ ID NO: 15579 - DNA, 25 bp, Artificial
  probe
  misc_feature (1)..(25): SEQ ID NO: 6168; WAN0249AC_at; Start 43; Stop 67
cctataggatcaaagctagagccct

SEQ ID NO: 15580 - DNA, 25 bp, Artificial
  probe
  misc_feature (1)..(25): SEQ ID NO: 6168; WAN0249AC_at; Start 50; Stop 74
gatcaaagctagagccctgactagt

SEQ ID NO: 15581 - DNA, 25 bp, Artificial
  probe
  misc_feature (1)..(25): SEQ ID NO: 6168; WAN0249AC_at; Start 51; Stop 75
atcaaagctagagccctgactagta

SEQ ID NO: 15582 - DNA, 25 bp, Artificial
  probe
  misc_feature (1)..(25): SEQ ID NO: 6168; WAN0249AC_at; Start 45; Stop 69
tataggatcaaagctagagccctga

SEQ ID NO: 15583 - DNA, 25 bp, Artificial
  probe
  misc_feature (1)..(25): SEQ ID NO: 6168; WAN0249AC_at; Start 30; Stop 54
gtagacgctttgtcctataggatca

SEQ ID NO: 15584 - DNA, 25 bp, Artificial
  probe
  misc_feature (1)..(25): SEQ ID NO: 6168; WAN0249AC_at; Start 16; Stop 40
taagcatttagtcagtagacgcttt

SEQ ID NO: 15585 - DNA, 25 bp, Artificial
  probe
  misc_feature (1)..(25): SEQ ID NO: 6168; WAN0249AC_at; Start 57; Stop 81
gctagagccctgactagtattttta

SEQ ID NO: 15586 - DNA, 25 bp, Artificial
  probe
  misc_feature (1)..(25): SEQ ID NO: 6168; WAN0249AC_at; Start 31; Stop 55
tagacgctttgtcctataggatcaa

SEQ ID NO: 15587 - DNA, 25 bp, Artificial
  probe
  misc_feature (1)..(25): SEQ ID NO: 6168; WAN0249AC_at; Start 14; Stop 38
cttaagcatttagtcagtagacgct

SEQ ID NO: 15588 - DNA, 25 bp, Artificial
  probe
  misc_feature (1)..(25): SEQ ID NO: 6168; WAN0249AC_at; Start 49; Stop 73
ggatcaaagctagagccctgactag

SEQ ID NO: 15589 - DNA, 25 bp, Artificial
  probe
  misc_feature (1)..(25): SEQ ID NO: 6168; WAN0249AC_at; Start 59; Stop 83
tagagccctgactagtatttttaga

SEQ ID NO: 15590 - DNA, 25 bp, Artificial
  probe
  misc_feature (1)..(25): SEQ ID NO: 6168; WAN0249AC_at; Start 39; Stop 63
ttgtcctataggatcaaagctagag

SEQ ID NO: 15591 - DNA, 25 bp, Artificial
  probe
  misc_feature (1)..(25): SEQ ID NO: 6168; WAN0249AC_at; Start 26; Stop 50
gtcagtagacgctttgtcctatagg

SEQ ID NO: 15592 - DNA, 25 bp, Artificial
  probe
  misc_feature (1)..(25): SEQ ID NO: 6168; WAN0249AC_at; Start 46; Stop 70
ataggatcaaagctagagccctgac

SEQ ID NO: 15593 - DNA, 25 bp, Artificial
  probe
  misc_feature (1)..(25): SEQ ID NO: 6168; WAN0249AC_at; Start 19; Stop 43
gcatttagtcagtagacgctttgtc

SEQ ID NO: 15594 - DNA, 25 bp, Artificial
  probe
  misc_feature (1)..(25): SEQ ID NO: 6168; WAN0249AC_at; Start 29; Stop 53
agtagacgctttgtcctataggatc

SEQ ID NO: 15595 - DNA, 25 bp, Artificial
  probe
  misc_feature (1)..(25): SEQ ID NO: 6168; WAN0249AC_at; Start 12; Stop 36
ggcttaagcatttagtcagtagacg

SEQ ID NO: 15596 - DNA, 25 bp, Artificial
  probe
  misc_feature (1)..(25): SEQ ID NO: 6168; WAN0249AC_at; Start 23; Stop 47
ttagtcagtagacgctttgtcctat

SEQ ID NO: 15597 - DNA, 25 bp, Artificial
  probe
  misc_feature (1)..(25): SEQ ID NO: 6168; WAN0249AC_at; Start 54; Stop 78
aaagctagagccctgactagtattt

SEQ ID NO: 15598 - DNA, 25 bp, Artificial
  probe
  misc_feature (1)..(25): SEQ ID NO: 6168; WAN0249AC_at; Start 42; Stop 66
tcctataggatcaaagctagagccc

SEQ ID NO: 15599 - DNA, 25 bp, Artificial
  probe
  misc_feature (1)..(25): SEQ ID NO: 6168; WAN0249AC_at; Start 47; Stop 71
taggatcaaagctagagccctgact

SEQ ID NO: 15600 - DNA, 25 bp, Artificial
  probe
  misc_feature (1)..(25): SEQ ID NO: 6168; WAN0249AC_at; Start 22; Stop 46
tttagtcagtagacgctttgtccta

SEQ ID NO: 15601 - DNA, 25 bp, Artificial
  probe
  misc_feature (1)..(25): SEQ ID NO: 6168; WAN0249AC_at; Start 13; Stop 37
gcttaagcatttagtcagtagacgc

SEQ ID NO: 15602 - DNA, 25 bp, Artificial
  probe
  misc_feature (1)..(25): SEQ ID NO: 6168; WAN0249AC_at; Start 41; Stop 65
gtcctataggatcaaagctagagcc

SEQ ID NO: 15603 - DNA, 25 bp, Artificial
  probe
  misc_feature (1)..(25): SEQ ID NO: 6168; WAN0249AC_at; Start 25; Stop 49
agtcagtagacgctttgtcctatag

SEQ ID NO: 15604 - DNA, 25 bp, Artificial
  probe
  misc_feature (1)..(25): SEQ ID NO: 6207; WAN0249AD_at; Start 44; Stop 68
tggtaaaatatctctagtattaaac

SEQ ID NO: 15605 - DNA, 25 bp, Artificial
  probe
  misc_feature (1)..(25): SEQ ID NO: 6207; WAN0249AD_at; Start 22; Stop 46
tgtggaaaattcttgctatctatgg

SEQ ID NO: 15606 - DNA, 25 bp, Artificial
  probe
  misc_feature (1)..(25): SEQ ID NO: 6207; WAN0249AD_at; Start 41; Stop 65
ctatggtaaaatatctctagtatta

SEQ ID NO: 15607 - DNA, 25 bp, Artificial
  probe
  misc_feature (1)..(25): SEQ ID NO: 6207; WAN0249AD_at; Start 12; Stop 36
tttcacagcttgtggaaaattcttg

SEQ ID NO: 15608 - DNA, 25 bp, Artificial
  probe
  misc_feature (1)..(25): SEQ ID NO: 6207; WAN0249AD_at; Start 1; Stop 25
tgtggattatttttcacagcttgtg

SEQ ID NO: 15609 - DNA, 25 bp, Artificial
  probe
  misc_feature (1)..(25): SEQ ID NO: 6207; WAN0249AD_at; Start 31; Stop 55
ttcttgctatctatggtaaaatatc

SEQ ID NO: 15610 - DNA, 25 bp, Artificial
  probe
  misc_feature (1)..(25): SEQ ID NO: 6207; WAN0249AD_at; Start 18; Stop 42
agcttgtggaaaattcttgctatct

SEQ ID NO: 15611 - DNA, 25 bp, Artificial
  probe
  misc_feature (1)..(25): SEQ ID NO: 6207; WAN0249AD_at; Start 2; Stop 26
gtggattatttttcacagcttgtgg

SEQ ID NO: 15612 - DNA, 25 bp, Artificial
  probe
  misc_feature (1)..(25): SEQ ID NO: 6207; WAN0249AD_at; Start 23; Stop 47
gtggaaaattcttgctatctatggt

SEQ ID NO: 15613 - DNA, 25 bp, Artificial
  probe
  misc_feature (1)..(25): SEQ ID NO: 6207; WAN0249AD_at; Start 19; Stop 43
gcttgtggaaaattcttgctatcta

SEQ ID NO: 15614 - DNA, 25 bp, Artificial
  probe
  misc_feature (1)..(25): SEQ ID NO: 6207; WAN0249AD_at; Start 14; Stop 38
tcacagcttgtggaaaattcttgct

SEQ ID NO: 15615 - DNA, 25 bp, Artificial
  probe
  misc_feature (1)..(25): SEQ ID NO: 6207; WAN0249AD_at; Start 35; Stop 59
tgctatctatggtaaaatatctcta

SEQ ID NO: 15616 - DNA, 25 bp, Artificial
  probe
  misc_feature (1)..(25): SEQ ID NO: 6207; WAN0249AD_at; Start 37; Stop 61
ctatctatggtaaaatatctctagt

SEQ ID NO: 15617 - DNA, 25 bp, Artificial
  probe
  misc_feature (1)..(25): SEQ ID NO: 6207; WAN0249AD_at; Start 10; Stop 34
tttttcacagcttgtggaaaattct

SEQ ID NO: 15618 - DNA, 25 bp, Artificial
  probe
  misc_feature (1)..(25): SEQ ID NO: 6207; WAN0249AD_at; Start 15; Stop 39
cacagcttgtggaaaattcttgcta

SEQ ID NO: 15619 - DNA, 25 bp, Artificial
  probe
  misc_feature (1)..(25): SEQ ID NO: 6207; WAN0249AD_at; Start 20; Stop 44
cttgtggaaaattcttgctatctat

SEQ ID NO: 15620 - DNA, 25 bp, Artificial
  probe
  misc_feature (1)..(25): SEQ ID NO: 6207; WAN0249AD_at; Start 36; Stop 60
gctatctatggtaaaatatctctag

SEQ ID NO: 15621 - DNA, 25 bp, Artificial
  probe
  misc_feature (1)..(25): SEQ ID NO: 6207; WAN0249AD_at; Start 32; Stop 56
tcttgctatctatggtaaaatatct

SEQ ID NO: 15622 - DNA, 25 bp, Artificial
  probe
  misc_feature (1)..(25): SEQ ID NO: 6207; WAN0249AD_at; Start 8; Stop 32
tatttttcacagcttgtggaaaatt

SEQ ID NO: 15623 - DNA, 25 bp, Artificial
  probe
  misc_feature (1)..(25): SEQ ID NO: 6207; WAN0249AD_at; Start 27; Stop 51
aaaattcttgctatctatggtaaaa

SEQ ID NO: 15624 - DNA, 25 bp, Artificial
  probe
  misc_feature (1)..(25): SEQ ID NO: 6207; WAN0249AD_at; Start 17; Stop 41
cagcttgtggaaaattcttgctatc

SEQ ID NO: 15625 - DNA, 25 bp, Artificial
  probe
  misc_feature (1)..(25): SEQ ID NO: 6207; WAN0249AD_at; Start 5; Stop 29
gattatttttcacagcttgtggaaa

SEQ ID NO: 15626 - DNA, 25 bp, Artificial
  probe
  misc_feature (1)..(25): SEQ ID NO: 6207; WAN0249AD_at; Start 13; Stop 37
ttcacagcttgtggaaaattcttgc

SEQ ID NO: 15627 - DNA, 25 bp, Artificial
  probe
  misc_feature (1)..(25): SEQ ID NO: 6207; WAN0249AD_at; Start 33; Stop 57
cttgctatctatggtaaaatatctc

SEQ ID NO: 15628 - DNA, 25 bp, Artificial
  probe
  misc_feature (1)..(25): SEQ ID NO: 6207; WAN0249AD_at; Start 6; Stop 30
attatttttcacagcttgtggaaaa

SEQ ID NO: 15629 - DNA, 25 bp, Artificial
  probe
  misc_feature (1)..(25): SEQ ID NO: 6207; WAN0249AD_at; Start 25; Stop 49
ggaaaattcttgctatctatggtaa

SEQ ID NO: 15630 - DNA, 25 bp, Artificial
  probe
  misc_feature (1)..(25): SEQ ID NO: 6207; WAN0249AD_at; Start 26; Stop 50
gaaaattcttgctatctatggtaaa

SEQ ID NO: 15631 - DNA, 25 bp, Artificial
  probe
  misc_feature (1)..(25): SEQ ID NO: 6207; WAN0249AD_at; Start 3; Stop 27
tggattatttttcacagcttgtgga

SEQ ID NO: 15632 - DNA, 25 bp, Artificial
  probe
  misc_feature (1)..(25): SEQ ID NO: 6207; WAN0249AD_at; Start 16; Stop 40
acagcttgtggaaaattcttgctat

SEQ ID NO: 15633 - DNA, 25 bp, Artificial
  probe
  misc_feature (1)..(25): SEQ ID NO: 6207; WAN0249AD_at; Start 34; Stop 58
ttgctatctatggtaaaatatctct

SEQ ID NO: 15634 - DNA, 25 bp, Artificial
  probe
  misc_feature (1)..(25): SEQ ID NO: 6207; WAN0249AD_at; Start 38; Stop 62
tatctatggtaaaatatctctagta

SEQ ID NO: 15635 - DNA, 25 bp, Artificial
  probe
  misc_feature (1)..(25): SEQ ID NO: 6207; WAN0249AD_at; Start 24; Stop 48
tggaaaattcttgctatctatggta

SEQ ID NO: 15636 - DNA, 25 bp, Artificial
  probe
  misc_feature (1)..(25): SEQ ID NO: 6207; WAN0249AD_at; Start 29; Stop 53
aattcttgctatctatggtaaaata

SEQ ID NO: 15637 - DNA, 25 bp, Artificial
  probe
  misc_feature (1)..(25): SEQ ID NO: 6207; WAN0249AD_at; Start 4; Stop 28
ggattatttttcacagcttgtggaa

SEQ ID NO: 15638 - DNA, 25 bp, Artificial
  probe
  misc_feature (1)..(25): SEQ ID NO: 6043; WAN0249AE_at; Start 80; Stop 104
gggtgcagttcattaatcggtcgat

SEQ ID NO: 15639 - DNA, 25 bp, Artificial
  probe
  misc_feature (1)..(25): SEQ ID NO: 6043; WAN0249AE_at; Start 4; Stop 28
gatctgaactttattttcataactc

SEQ ID NO: 15640 - DNA, 25 bp, Artificial
  probe
  misc_feature (1)..(25): SEQ ID NO: 6043; WAN0249AE_at; Start 1; Stop 25
atagatctgaactttattttcataa

SEQ ID NO: 15641 - DNA, 25 bp, Artificial
  probe
  misc_feature (1)..(25): SEQ ID NO: 6043; WAN0249AE_at; Start 12; Stop 36
ctttattttcataactcaatttcat

SEQ ID NO: 15642 - DNA, 25 bp, Artificial
  probe
  misc_feature (1)..(25): SEQ ID NO: 6043; WAN0249AE_at; Start 22; Stop 46
ataactcaatttcataataaaacac

SEQ ID NO: 15643 - DNA, 25 bp, Artificial
  probe
  misc_feature (1)..(25): SEQ ID NO: 6043; WAN0249AE_at; Start 14; Stop 38
ttattttcataactcaatttcataa

SEQ ID NO: 15644 - DNA, 25 bp, Artificial
  probe
  misc_feature (1)..(25): SEQ ID NO: 6043; WAN0249AE_at; Start 83; Stop 107
tgcagttcattaatcggtcgatttt

SEQ ID NO: 15645 - DNA, 25 bp, Artificial
  probe
  misc_feature (1)..(25): SEQ ID NO: 6043; WAN0249AE_at; Start 19; Stop 43
ttcataactcaatttcataataaaa

SEQ ID NO: 15646 - DNA, 25 bp, Artificial
  probe
  misc_feature (1)..(25): SEQ ID NO: 6043; WAN0249AE_at; Start 18; Stop 42
tttcataactcaatttcataataaa

SEQ ID NO: 15647 - DNA, 25 bp, Artificial
  probe
  misc_feature (1)..(25): SEQ ID NO: 6043; WAN0249AE_at; Start 3; Stop 27
agatctgaactttattttcataact

SEQ ID NO: 15648 - DNA, 25 bp, Artificial
  probe
  misc_feature (1)..(25): SEQ ID NO: 6043; WAN0249AE_at; Start 13; Stop 37
tttattttcataactcaatttcata

SEQ ID NO: 15649 - DNA, 25 bp, Artificial
  probe
  misc_feature (1)..(25): SEQ ID NO: 6043; WAN0249AE_at; Start 20; Stop 44
tcataactcaatttcataataaaac

SEQ ID NO: 15650 - DNA, 25 bp, Artificial
  probe
  misc_feature (1)..(25): SEQ ID NO: 6043; WAN0249AE_at; Start 23; Stop 47
taactcaatttcataataaaacacc

SEQ ID NO: 15651 - DNA, 25 bp, Artificial
  probe
  misc_feature (1)..(25): SEQ ID NO: 6043; WAN0249AE_at; Start 17; Stop 41
ttttcataactcaatttcataataa

SEQ ID NO: 15652 - DNA, 25 bp, Artificial
  probe
  misc_feature (1)..(25): SEQ ID NO: 6043; WAN0249AE_at; Start 81; Stop 105
ggtgcagttcattaatcggtcgatt

SEQ ID NO: 15653 - DNA, 25 bp, Artificial
  probe
  misc_feature (1)..(25): SEQ ID NO: 6043; WAN0249AE_at; Start 21; Stop 45
cataactcaatttcataataaaaca

SEQ ID NO: 15654 - DNA, 25 bp, Artificial
  probe
  misc_feature (1)..(25): SEQ ID NO: 6043; WAN0249AE_at; Start 27; Stop 51
tcaatttcataataaaacaccccaa

SEQ ID NO: 15655 - DNA, 25 bp, Artificial
  probe
  misc_feature (1)..(25): SEQ ID NO: 6043; WAN0249AE_at; Start 85; Stop 109
cagttcattaatcggtcgatttttt

SEQ ID NO: 15656 - DNA, 25 bp, Artificial
  probe
  misc_feature (1)..(25): SEQ ID NO: 6043; WAN0249AE_at; Start 5; Stop 29
atctgaactttattttcataactca

SEQ ID NO: 15657 - DNA, 25 bp, Artificial
  probe
  misc_feature (1)..(25): SEQ ID NO: 6043; WAN0249AE_at; Start 84; Stop 108
gcagttcattaatcggtcgattttt

SEQ ID NO: 15658 - DNA, 25 bp, Artificial
  probe
  misc_feature (1)..(25): SEQ ID NO: 6043; WAN0249AE_at; Start 82; Stop 106
gtgcagttcattaatcggtcgattt

SEQ ID NO: 15659 - DNA, 25 bp, Artificial
  probe
  misc_feature (1)..(25): SEQ ID NO: 6043; WAN0249AE_at; Start 26; Stop 50
ctcaatttcataataaaacacccca

SEQ ID NO: 15660 - DNA, 25 bp, Artificial
  probe
  misc_feature (1)..(25): SEQ ID NO: 6043; WAN0249AE_at; Start 105; Stop 129
tttttttgtagaaacagttgcctga

SEQ ID NO: 15661 - DNA, 25 bp, Artificial
  probe
  misc_feature (1)..(25): SEQ ID NO: 6043; WAN0249AE_at; Start 79; Stop 103
ggggtgcagttcattaatcggtcga

SEQ ID NO: 15662 - DNA, 25 bp, Artificial
  probe
  misc_feature (1)..(25): SEQ ID NO: 6043; WAN0249AE_at; Start 11; Stop 35
actttattttcataactcaatttca

SEQ ID NO: 15663 - DNA, 25 bp, Artificial
  probe
  misc_feature (1)..(25): SEQ ID NO: 6043; WAN0249AE_at; Start 2; Stop 26
tagatctgaactttattttcataac

SEQ ID NO: 15664 - DNA, 25 bp, Artificial
  probe
  misc_feature (1)..(25): SEQ ID NO: 6043; WAN0249AE_at; Start 16; Stop 40
attttcataactcaatttcataata

SEQ ID NO: 15665 - DNA, 25 bp, Artificial
  probe
  misc_feature (1)..(25): SEQ ID NO: 6043; WAN0249AE_at; Start 15; Stop 39
tattttcataactcaatttcataat

SEQ ID NO: 15666 - DNA, 25 bp, Artificial
  probe
  misc_feature (1)..(25): SEQ ID NO: 6111; WAN0249AF_at; Start 7; Stop 31
tcccttggtttgatgctcgattttt

SEQ ID NO: 15667 - DNA, 25 bp, Artificial
  probe
  misc_feature (1)..(25): SEQ ID NO: 6111; WAN0249AF_at; Start 2; Stop 26
actcctcccttggtttgatgctcga

SEQ ID NO: 15668 - DNA, 25 bp, Artificial
  probe
  misc_feature (1)..(25): SEQ ID NO: 6111; WAN0249AF_at; Start 1; Stop 25
gactcctcccttggtttgatgctcg

SEQ ID NO: 15669 - DNA, 25 bp, Artificial
  probe
  misc_feature (1)..(25): SEQ ID NO: 6111; WAN0249AF_at; Start 17; Stop 41
tgatgctcgatttttaaaataaggt

SEQ ID NO: 15670 - DNA, 25 bp, Artificial
  probe
  misc_feature (1)..(25): SEQ ID NO: 6111; WAN0249AF_at; Start 9; Stop 33
ccttggtttgatgctcgatttttaa

SEQ ID NO: 15671 - DNA, 25 bp, Artificial
  probe
  misc_feature (1)..(25): SEQ ID NO: 6111; WAN0249AF_at; Start 19; Stop 43
atgctcgatttttaaaataaggtga

SEQ ID NO: 15672 - DNA, 25 bp, Artificial
  probe
  misc_feature (1)..(25): SEQ ID NO: 6111; WAN0249AF_at; Start 10; Stop 34
cttggtttgatgctcgatttttaaa

SEQ ID NO: 15673 - DNA, 25 bp, Artificial
  probe
  misc_feature (1)..(25): SEQ ID NO: 6111; WAN0249AF_at; Start 16; Stop 40
ttgatgctcgatttttaaaataagg

SEQ ID NO: 15674 - DNA, 25 bp, Artificial
  probe
  misc_feature (1)..(25): SEQ ID NO: 6111; WAN0249AF_at; Start 12; Stop 36
tggtttgatgctcgatttttaaaat

SEQ ID NO: 15675 - DNA, 25 bp, Artificial
  probe
  misc_feature (1)..(25): SEQ ID NO: 6111; WAN0249AF_at; Start 8; Stop 32
cccttggtttgatgctcgattttta

SEQ ID NO: 15676 - DNA, 25 bp, Artificial
  probe
  misc_feature (1)..(25): SEQ ID NO: 6111; WAN0249AF_at; Start 11; Stop 35
ttggtttgatgctcgatttttaaaa

SEQ ID NO: 15677 - DNA, 25 bp, Artificial
  probe
  misc_feature (1)..(25): SEQ ID NO: 6111; WAN0249AF_at; Start 13; Stop 37
ggtttgatgctcgatttttaaaata

SEQ ID NO: 15678 - DNA, 25 bp, Artificial
  probe
  misc_feature (1)..(25): SEQ ID NO: 6111; WAN0249AF_at; Start 4; Stop 28
tcctcccttggtttgatgctcgatt

SEQ ID NO: 15679 - DNA, 25 bp, Artificial
  probe
  misc_feature (1)..(25): SEQ ID NO: 6111; WAN0249AF_at; Start 6; Stop 30
ctcccttggtttgatgctcgatttt

SEQ ID NO: 15680 - DNA, 25 bp, Artificial
  probe
  misc_feature (1)..(25): SEQ ID NO: 6111; WAN0249AF_at; Start 18; Stop 42
gatgctcgatttttaaaataaggtg

SEQ ID NO: 15681 - DNA, 25 bp, Artificial
  probe
  misc_feature (1)..(25): SEQ ID NO: 6111; WAN0249AF_at; Start 15; Stop 39
tttgatgctcgatttttaaaataag

SEQ ID NO: 15682 - DNA, 25 bp, Artificial
  probe
  misc_feature (1)..(25): SEQ ID NO: 6111; WAN0249AF_at; Start 20; Stop 44
tgctcgatttttaaaataaggtgac

SEQ ID NO: 15683 - DNA, 25 bp, Artificial
  probe
  misc_feature (1)..(25): SEQ ID NO: 6111; WAN0249AF_at; Start 5; Stop 29
cctcccttggtttgatgctcgattt

SEQ ID NO: 15684 - DNA, 25 bp, Artificial
  probe
  misc_feature (1)..(25): SEQ ID NO: 6111; WAN0249AF_at; Start 14; Stop 38
gtttgatgctcgatttttaaaataa

SEQ ID NO: 15685 - DNA, 25 bp, Artificial
  probe
  misc_feature (1)..(25): SEQ ID NO: 6111; WAN0249AF_at; Start 3; Stop 27
ctcctcccttggtttgatgctcgat

SEQ ID NO: 15686 - DNA, 25 bp, Artificial
  probe
  misc_feature (1)..(25): SEQ ID NO: 5985; WAN0249AG_at; Start 1; Stop 25
aaagcgcttgacaattaatgaaagc

SEQ ID NO: 15687 - DNA, 25 bp, Artificial
  probe
  misc_feature (1)..(25): SEQ ID NO: 5985; WAN0249AG_at; Start 7; Stop 31
cttgacaattaatgaaagcgctgtt

SEQ ID NO: 15688 - DNA, 25 bp, Artificial
  probe
  misc_feature (1)..(25): SEQ ID NO: 5985; WAN0249AG_at; Start 54; Stop 78
cgtttcaaaaataggctagaagctt

SEQ ID NO: 15689 - DNA, 25 bp, Artificial
  probe
  misc_feature (1)..(25): SEQ ID NO: 5985; WAN0249AG_at; Start 36; Stop 60
tataatcaacaaatgaaacgtttca

SEQ ID NO: 15690 - DNA, 25 bp, Artificial
  probe
  misc_feature (1)..(25): SEQ ID NO: 5985; WAN0249AG_at; Start 26; Stop 50
gctgttataatataatcaacaaatg

SEQ ID NO: 15691 - DNA, 25 bp, Artificial
  probe
  misc_feature (1)..(25): SEQ ID NO: 5985; WAN0249AG_at; Start 59; Stop 83
caaaaataggctagaagcttgttta

SEQ ID NO: 15692 - DNA, 25 bp, Artificial
  probe
  misc_feature (1)..(25): SEQ ID NO: 5985; WAN0249AG_at; Start 9; Stop 33
tgacaattaatgaaagcgctgttat

SEQ ID NO: 15693 - DNA, 25 bp, Artificial
  probe
  misc_feature (1)..(25): SEQ ID NO: 5985; WAN0249AG_at; Start 25; Stop 49
cgctgttataatataatcaacaaat

SEQ ID NO: 15694 - DNA, 25 bp, Artificial
  probe
  misc_feature (1)..(25): SEQ ID NO: 5985; WAN0249AG_at; Start 49; Stop 73
tgaaacgtttcaaaaataggctaga

SEQ ID NO: 15695 - DNA, 25 bp, Artificial
  probe
  misc_feature (1)..(25): SEQ ID NO: 5985; WAN0249AG_at; Start 21; Stop 45
aaagcgctgttataatataatcaac

SEQ ID NO: 15696 - DNA, 25 bp, Artificial
  probe
  misc_feature (1)..(25): SEQ ID NO: 5985; WAN0249AG_at; Start 37; Stop 61
ataatcaacaaatgaaacgtttcaa

SEQ ID NO: 15697 - DNA, 25 bp, Artificial
  probe
  misc_feature (1)..(25): SEQ ID NO: 5985; WAN0249AG_at; Start 17; Stop 41
aatgaaagcgctgttataatataat

SEQ ID NO: 15698 - DNA, 25 bp, Artificial
  probe
  misc_feature (1)..(25): SEQ ID NO: 5985; WAN0249AG_at; Start 2; Stop 26
aagcgcttgacaattaatgaaagcg

SEQ ID NO: 15699 - DNA, 25 bp, Artificial
  probe
  misc_feature (1)..(25): SEQ ID NO: 5985; WAN0249AG_at; Start 22; Stop 46
aagcgctgttataatataatcaaca

SEQ ID NO: 15700 - DNA, 25 bp, Artificial
  probe
  misc_feature (1)..(25): SEQ ID NO: 5985; WAN0249AG_at; Start 6; Stop 30
gcttgacaattaatgaaagcgctgt

SEQ ID NO: 15701 - DNA, 25 bp, Artificial
  probe
  misc_feature (1)..(25): SEQ ID NO: 5985; WAN0249AG_at; Start 35; Stop 59
atataatcaacaaatgaaacgtttc

SEQ ID NO: 15702 - DNA, 25 bp, Artificial
  probe
  misc_feature (1)..(25): SEQ ID NO: 5985; WAN0249AG_at; Start 55; Stop 79
gtttcaaaaataggctagaagcttg

SEQ ID NO: 15703 - DNA, 25 bp, Artificial
  probe
  misc_feature (1)..(25): SEQ ID NO: 5985; WAN0249AG_at; Start 11; Stop 35
acaattaatgaaagcgctgttataa

SEQ ID NO: 15704 - DNA, 25 bp, Artificial
  probe
  misc_feature (1)..(25): SEQ ID NO: 5985; WAN0249AG_at; Start 4; Stop 28
gcgcttgacaattaatgaaagcgct

SEQ ID NO: 15705 - DNA, 25 bp, Artificial
  probe
  misc_feature (1)..(25): SEQ ID NO: 5985; WAN0249AG_at; Start 58; Stop 82
tcaaaaataggctagaagcttgttt

SEQ ID NO: 15706 - DNA, 25 bp, Artificial
  probe
  misc_feature (1)..(25): SEQ ID NO: 5985; WAN0249AG_at; Start 57; Stop 81
ttcaaaaataggctagaagcttgtt

SEQ ID NO: 15707 - DNA, 25 bp, Artificial
  probe
  misc_feature (1)..(25): SEQ ID NO: 5985; WAN0249AG_at; Start 12; Stop 36
caattaatgaaagcgctgttataat

SEQ ID NO: 15708 - DNA, 25 bp, Artificial
  probe
  misc_feature (1)..(25): SEQ ID NO: 5985; WAN0249AG_at; Start 48; Stop 72
atgaaacgtttcaaaaataggctag

SEQ ID NO: 15709 - DNA, 25 bp, Artificial
  probe
  misc_feature (1)..(25): SEQ ID NO: 5985; WAN0249AG_at; Start 38; Stop 62
taatcaacaaatgaaacgtttcaaa

SEQ ID NO: 15710 - DNA, 25 bp, Artificial
  probe
  misc_feature (1)..(25): SEQ ID NO: 5985; WAN0249AG_at; Start 18; Stop 42
atgaaagcgctgttataatataatc

SEQ ID NO: 15711 - DNA, 25 bp, Artificial
  probe
  misc_feature (1)..(25): SEQ ID NO: 5985; WAN0249AG_at; Start 16; Stop 40
taatgaaagcgctgttataatataa

SEQ ID NO: 15712 - DNA, 25 bp, Artificial
  probe
  misc_feature (1)..(25): SEQ ID NO: 5985; WAN0249AG_at; Start 24; Stop 48
gcgctgttataatataatcaacaaa

SEQ ID NO: 15713 - DNA, 25 bp, Artificial
  probe
  misc_feature (1)..(25): SEQ ID NO: 5985; WAN0249AG_at; Start 20; Stop 44
gaaagcgctgttataatataatcaa

SEQ ID NO: 15714 - DNA, 25 bp, Artificial
  probe
  misc_feature (1)..(25): SEQ ID NO: 5985; WAN0249AG_at; Start 8; Stop 32
ttgacaattaatgaaagcgctgtta

SEQ ID NO: 15715 - DNA, 25 bp, Artificial
  probe
  misc_feature (1)..(25): SEQ ID NO: 5985; WAN0249AG_at; Start 3; Stop 27
agcgcttgacaattaatgaaagcgc

SEQ ID NO: 15716 - DNA, 25 bp, Artificial
  probe
  misc_feature (1)..(25): SEQ ID NO: 5985; WAN0249AG_at; Start 23; Stop 47
agcgctgttataatataatcaacaa

SEQ ID NO: 15717 - DNA, 25 bp, Artificial
  probe
  misc_feature (1)..(25): SEQ ID NO: 5985; WAN0249AG_at; Start 5; Stop 29
cgcttgacaattaatgaaagcgctg

SEQ ID NO: 15718 - DNA, 25 bp, Artificial
  probe
  misc_feature (1)..(25): SEQ ID NO: 5985; WAN0249AG_at; Start 19; Stop 43
tgaaagcgctgttataatataatca

SEQ ID NO: 15719 - DNA, 25 bp, Artificial
  probe
  misc_feature (1)..(25): SEQ ID NO: 5985; WAN0249AG_at; Start 10; Stop 34
gacaattaatgaaagcgctgttata

SEQ ID NO: 15720 - DNA, 25 bp, Artificial
  probe
  misc_feature (1)..(25): SEQ ID NO: 6195; WAN0249AH_at; Start 51; Stop 75
cttgttaatagcctagtttgatata

SEQ ID NO: 15721 - DNA, 25 bp, Artificial
  probe
  misc_feature (1)..(25): SEQ ID NO: 6195; WAN0249AH_at; Start 60; Stop 84
agcctagtttgatatatatgattaa

SEQ ID NO: 15722 - DNA, 25 bp, Artificial
  probe
  misc_feature (1)..(25): SEQ ID NO: 6195; WAN0249AH_at; Start 50; Stop 74
tcttgttaatagcctagtttgatat

SEQ ID NO: 15723 - DNA, 25 bp, Artificial
  probe
  misc_feature (1)..(25): SEQ ID NO: 6195; WAN0249AH_at; Start 58; Stop 82
atagcctagtttgatatatatgatt

SEQ ID NO: 15724 - DNA, 25 bp, Artificial
  probe
  misc_feature (1)..(25): SEQ ID NO: 6195; WAN0249AH_at; Start 62; Stop 86
cctagtttgatatatatgattaaag

SEQ ID NO: 15725 - DNA, 25 bp, Artificial
  probe
  misc_feature (1)..(25): SEQ ID NO: 6195; WAN0249AH_at; Start 49; Stop 73
ttcttgttaatagcctagtttgata

SEQ ID NO: 15726 - DNA, 25 bp, Artificial
  probe
  misc_feature (1)..(25): SEQ ID NO: 6195; WAN0249AH_at; Start 64; Stop 88
tagtttgatatatatgattaaagga

SEQ ID NO: 15727 - DNA, 25 bp, Artificial
  probe
  misc_feature (1)..(25): SEQ ID NO: 6195; WAN0249AH_at; Start 52; Stop 76
ttgttaatagcctagtttgatatat

SEQ ID NO: 15728 - DNA, 25 bp, Artificial
  probe
  misc_feature (1)..(25): SEQ ID NO: 6195; WAN0249AH_at; Start 53; Stop 77
tgttaatagcctagtttgatatata

SEQ ID NO: 15729 - DNA, 25 bp, Artificial
  probe
  misc_feature (1)..(25): SEQ ID NO: 6195; WAN0249AH_at; Start 61; Stop 85
gcctagtttgatatatatgattaaa

SEQ ID NO: 15730 - DNA, 25 bp, Artificial
  probe
  misc_feature (1)..(25): SEQ ID NO: 6195; WAN0249AH_at; Start 55; Stop 79
ttaatagcctagtttgatatatatg

SEQ ID NO: 15731 - DNA, 25 bp, Artificial
  probe
  misc_feature (1)..(25): SEQ ID NO: 6195; WAN0249AH_at; Start 59; Stop 83
tagcctagtttgatatatatgatta

SEQ ID NO: 15732 - DNA, 25 bp, Artificial
  probe
  misc_feature (1)..(25): SEQ ID NO: 6195; WAN0249AH_at; Start 48; Stop 72
tttcttgttaatagcctagtttgat

SEQ ID NO: 15733 - DNA, 25 bp, Artificial
  probe
  misc_feature (1)..(25): SEQ ID NO: 6195; WAN0249AH_at; Start 57; Stop 81
aatagcctagtttgatatatatgat

SEQ ID NO: 15734 - DNA, 25 bp, Artificial
  probe
  misc_feature (1)..(25): SEQ ID NO: 6195; WAN0249AH_at; Start 63; Stop 87
ctagtttgatatatatgattaaagg

SEQ ID NO: 15735 - DNA, 25 bp, Artificial
  probe
  misc_feature (1)..(25): SEQ ID NO: 6195; WAN0249AH_at; Start 54; Stop 78
gttaatagcctagtttgatatatat

SEQ ID NO: 15736 - DNA, 25 bp, Artificial
  probe
  misc_feature (1)..(25): SEQ ID NO: 6195; WAN0249AH_at; Start 47; Stop 71
ctttcttgttaatagcctagtttga

SEQ ID NO: 15737 - DNA, 25 bp, Artificial
  probe
  misc_feature (1)..(25): SEQ ID NO: 6195; WAN0249AH_at; Start 46; Stop 70
cctttcttgttaatagcctagtttg

SEQ ID NO: 15738 - DNA, 25 bp, Artificial
  probe
  misc_feature (1)..(25): SEQ ID NO: 6195; WAN0249AH_at; Start 56; Stop 80
taatagcctagtttgatatatatga

SEQ ID NO: 15739 - DNA, 25 bp, Artificial
  probe
  misc_feature (1)..(25): SEQ ID NO: 6195; WAN0249AH_at; Start 65; Stop 89
agtttgatatatatgattaaaggag

SEQ ID NO: 15740 - DNA, 25 bp, Artificial
  probe
  misc_feature (1)..(25): SEQ ID NO: 6129; WAN0249AI_at; Start 168; Stop 192
cgtcaccacttcagaaaagtataaa

SEQ ID NO: 15741 - DNA, 25 bp, Artificial
  probe
  misc_feature (1)..(25): SEQ ID NO: 6129; WAN0249AI_at; Start 98; Stop 122
caactgcggaaaatttgagacctta

SEQ ID NO: 15742 - DNA, 25 bp, Artificial
  probe
  misc_feature (1)..(25): SEQ ID NO: 6129; WAN0249AI_at; Start 49; Stop 73
catagagaatacttttcgctgtggt

SEQ ID NO: 15743 - DNA, 25 bp, Artificial
  probe
  misc_feature (1)..(25): SEQ ID NO: 6129; WAN0249AI_at; Start 90; Stop 114
gattgtaccaactgcggaaaatttg

SEQ ID NO: 15744 - DNA, 25 bp, Artificial
  probe
  misc_feature (1)..(25): SEQ ID NO: 6129; WAN0249AI_at; Start 85; Stop 109
caagtgattgtaccaactgcggaaa

SEQ ID NO: 15745 - DNA, 25 bp, Artificial
  probe
  misc_feature (1)..(25): SEQ ID NO: 6129; WAN0249AI_at; Start 61; Stop 85
ttttcgctgtggtgtaagttggtac

SEQ ID NO: 15746 - DNA, 25 bp, Artificial
  probe
  misc_feature (1)..(25): SEQ ID NO: 6129; WAN0249AI_at; Start 133; Stop 157
ttagtcatgaaagtccgaaggactt

SEQ ID NO: 15747 - DNA, 25 bp, Artificial
  probe
  misc_feature (1)..(25): SEQ ID NO: 6129; WAN0249AI_at; Start 28; Stop 52
ttgggcgagcaaggcgagccccata

SEQ ID NO: 15748 - DNA, 25 bp, Artificial
  probe
  misc_feature (1)..(25): SEQ ID NO: 6129; WAN0249AI_at; Start 146; Stop 170
tccgaaggactttgctgacgtccgt

SEQ ID NO: 15749 - DNA, 25 bp, Artificial
  probe
  misc_feature (1)..(25): SEQ ID NO: 6129; WAN0249AI_at; Start 45; Stop 69
gccccatagagaatacttttcgctg

SEQ ID NO: 15750 - DNA, 25 bp, Artificial
  probe
  misc_feature (1)..(25): SEQ ID NO: 6129; WAN0249AI_at; Start 40; Stop 64
ggcgagccccatagagaatactttt

SEQ ID NO: 15751 - DNA, 25 bp, Artificial
  probe
  misc_feature (1)..(25): SEQ ID NO: 6129; WAN0249AI_at; Start 37; Stop 61
caaggcgagccccatagagaatact

SEQ ID NO: 15752 - DNA, 25 bp, Artificial
  probe
  misc_feature (1)..(25): SEQ ID NO: 6129; WAN0249AI_at; Start 125; Stop 149
ctcaaattttagtcatgaaagtccg

SEQ ID NO: 15753 - DNA, 25 bp, Artificial
  probe
  misc_feature (1)..(25): SEQ ID NO: 6129; WAN0249AI_at; Start 151; Stop 175
aggactttgctgacgtccgtcacca

SEQ ID NO: 15754 - DNA, 25 bp, Artificial
  probe
  misc_feature (1)..(25): SEQ ID NO: 6129; WAN0249AI_at; Start 171; Stop 195
caccacttcagaaaagtataaaaag

SEQ ID NO: 15755 - DNA, 25 bp, Artificial
  probe
  misc_feature (1)..(25): SEQ ID NO: 6129; WAN0249AI_at; Start 95; Stop 119
taccaactgcggaaaatttgagacc

SEQ ID NO: 15756 - DNA, 25 bp, Artificial
  probe
  misc_feature (1)..(25): SEQ ID NO: 6129; WAN0249AI_at; Start 2; Stop 26
cacagaaaggaaagggttgtctgaa

SEQ ID NO: 15757 - DNA, 25 bp, Artificial
  probe
  misc_feature (1)..(25): SEQ ID NO: 6129; WAN0249AI_at; Start 162; Stop 186
gacgtccgtcaccacttcagaaaag

SEQ ID NO: 15758 - DNA, 25 bp, Artificial
  probe
  misc_feature (1)..(25): SEQ ID NO: 6129; WAN0249AI_at; Start 149; Stop 173
gaaggactttgctgacgtccgtcac

SEQ ID NO: 15759 - DNA, 25 bp, Artificial
  probe
  misc_feature (1)..(25): SEQ ID NO: 6129; WAN0249AI_at; Start 165; Stop 189
gtccgtcaccacttcagaaaagtat

SEQ ID NO: 15760 - DNA, 25 bp, Artificial
  probe
  misc_feature (1)..(25): SEQ ID NO: 6129; WAN0249AI_at; Start 26; Stop 50
atttgggcgagcaaggcgagcccca

SEQ ID NO: 15761 - DNA, 25 bp, Artificial
  probe
  misc_feature (1)..(25): SEQ ID NO: 6129; WAN0249AI_at; Start 159; Stop 183
gctgacgtccgtcaccacttcagaa

SEQ ID NO: 15762 - DNA, 25 bp, Artificial
  probe
  misc_feature (1)..(25): SEQ ID NO: 6129; WAN0249AI_at; Start 101; Stop 125
ctgcggaaaatttgagaccttaggc

SEQ ID NO: 15763 - DNA, 25 bp, Artificial
  probe
  misc_feature (1)..(25): SEQ ID NO: 6129; WAN0249AI_at; Start 18; Stop 42
ttgtctgaatttgggcgagcaaggc

SEQ ID NO: 15764 - DNA, 25 bp, Artificial
  probe
  misc_feature (1)..(25): SEQ ID NO: 6129; WAN0249AI_at; Start 64; Stop 88
tcgctgtggtgtaagttggtacaag

SEQ ID NO: 15765 - DNA, 25 bp, Artificial
  probe
  misc_feature (1)..(25): SEQ ID NO: 6129; WAN0249AI_at; Start 121; Stop 145
taggctcaaattttagtcatgaaag

SEQ ID NO: 15766 - DNA, 25 bp, Artificial
  probe
  misc_feature (1)..(25): SEQ ID NO: 6129; WAN0249AI_at; Start 71; Stop 95
ggtgtaagttggtacaagtgattgt

SEQ ID NO: 15767 - DNA, 25 bp, Artificial
  probe
  misc_feature (1)..(25): SEQ ID NO: 6129; WAN0249AI_at; Start 131; Stop 155
ttttagtcatgaaagtccgaaggac

SEQ ID NO: 15768 - DNA, 25 bp, Artificial
  probe
  misc_feature (1)..(25): SEQ ID NO: 6129; WAN0249AI_at; Start 141; Stop 165
gaaagtccgaaggactttgctgacg

SEQ ID NO: 15769 - DNA, 25 bp, Artificial
  probe
  misc_feature (1)..(25): SEQ ID NO: 6129; WAN0249AI_at; Start 83; Stop 107
tacaagtgattgtaccaactgcgga

SEQ ID NO: 15770 - DNA, 25 bp, Artificial
  probe
  misc_feature (1)..(25): SEQ ID NO: 6129; WAN0249AI_at; Start 53; Stop 77
gagaatacttttcgctgtggtgtaa

SEQ ID NO: 15771 - DNA, 25 bp, Artificial
  probe
  misc_feature (1)..(25): SEQ ID NO: 6129; WAN0249AI_at; Start 129; Stop 153
aattttagtcatgaaagtccgaagg

SEQ ID NO: 15772 - DNA, 25 bp, Artificial
  probe
  misc_feature (1)..(25): SEQ ID NO: 6129; WAN0249AI_at; Start 43; Stop 67
gagccccatagagaatacttttcgc

SEQ ID NO: 15773 - DNA, 25 bp, Artificial
  probe
  misc_feature (1)..(25): SEQ ID NO: 6129; WAN0249AI_at; Start 55; Stop 79
gaatacttttcgctgtggtgtaagt

SEQ ID NO: 15774 - DNA, 25 bp, Artificial
  probe
  misc_feature (1)..(25): SEQ ID NO: 6070; WAN0249AJ_at; Start 11; Stop 35
ctagaaaaatgtgaatattttctac

SEQ ID NO: 15775 - DNA, 25 bp, Artificial
  probe
  misc_feature (1)..(25): SEQ ID NO: 6070; WAN0249AJ_at; Start 2; Stop 26
ttgttcctcctagaaaaatgtgaat

SEQ ID NO: 15776 - DNA, 25 bp, Artificial
  probe
  misc_feature (1)..(25): SEQ ID NO: 6070; WAN0249AJ_at; Start 20; Stop 44
tgtgaatattttctacatttataaa

SEQ ID NO: 15777 - DNA, 25 bp, Artificial
  probe
  misc_feature (1)..(25): SEQ ID NO: 6070; WAN0249AJ_at; Start 13; Stop 37
agaaaaatgtgaatattttctacat

SEQ ID NO: 15778 - DNA, 25 bp, Artificial
  probe
  misc_feature (1)..(25): SEQ ID NO: 6070; WAN0249AJ_at; Start 51; Stop 75
agaaaaaggtggtattattatatca

SEQ ID NO: 15779 - DNA, 25 bp, Artificial
  probe
  misc_feature (1)..(25): SEQ ID NO: 6070; WAN0249AJ_at; Start 4; Stop 28
gttcctcctagaaaaatgtgaatat

SEQ ID NO: 15780 - DNA, 25 bp, Artificial
  probe
  misc_feature (1)..(25): SEQ ID NO: 6070; WAN0249AJ_at; Start 8; Stop 32
ctcctagaaaaatgtgaatattttc

SEQ ID NO: 15781 - DNA, 25 bp, Artificial
  probe
  misc_feature (1)..(25): SEQ ID NO: 6070; WAN0249AJ_at; Start 14; Stop 38
gaaaaatgtgaatattttctacatt

SEQ ID NO: 15782 - DNA, 25 bp, Artificial
  probe
  misc_feature (1)..(25): SEQ ID NO: 6070; WAN0249AJ_at; Start 56; Stop 80
aaggtggtattattatatcaaaaag

SEQ ID NO: 15783 - DNA, 25 bp, Artificial
  probe
  misc_feature (1)..(25): SEQ ID NO: 6070; WAN0249AJ_at; Start 50; Stop 74
tagaaaaaggtggtattattatatc

SEQ ID NO: 15784 - DNA, 25 bp, Artificial
  probe
  misc_feature (1)..(25): SEQ ID NO: 6070; WAN0249AJ_at; Start 5; Stop 29
ttcctcctagaaaaatgtgaatatt

SEQ ID NO: 15785 - DNA, 25 bp, Artificial
  probe
  misc_feature (1)..(25): SEQ ID NO: 6070; WAN0249AJ_at; Start 52; Stop 76
gaaaaaggtggtattattatatcaa

SEQ ID NO: 15786 - DNA, 25 bp, Artificial
  probe
  misc_feature (1)..(25): SEQ ID NO: 6070; WAN0249AJ_at; Start 9; Stop 33
tcctagaaaaatgtgaatattttct

SEQ ID NO: 15787 - DNA, 25 bp, Artificial
  probe
  misc_feature (1)..(25): SEQ ID NO: 6070; WAN0249AJ_at; Start 6; Stop 30
tcctcctagaaaaatgtgaatattt

SEQ ID NO: 15788 - DNA, 25 bp, Artificial
  probe
  misc_feature (1)..(25): SEQ ID NO: 6070; WAN0249AJ_at; Start 7; Stop 31
cctcctagaaaaatgtgaatatttt

SEQ ID NO: 15789 - DNA, 25 bp, Artificial
  probe
  misc_feature (1)..(25): SEQ ID NO: 6070; WAN0249AJ_at; Start 10; Stop 34
cctagaaaaatgtgaatattttcta

SEQ ID NO: 15790 - DNA, 25 bp, Artificial
  probe
  misc_feature (1)..(25): SEQ ID NO: 6070; WAN0249AJ_at; Start 21; Stop 45
gtgaatattttctacatttataaaa

SEQ ID NO: 15791 - DNA, 25 bp, Artificial
  probe
  misc_feature (1)..(25): SEQ ID NO: 6070; WAN0249AJ_at; Start 12; Stop 36
tagaaaaatgtgaatattttctaca

SEQ ID NO: 15792 - DNA, 25 bp, Artificial
  probe
  misc_feature (1)..(25): SEQ ID NO: 6070; WAN0249AJ_at; Start 3; Stop 27
tgttcctcctagaaaaatgtgaata

SEQ ID NO: 15793 - DNA, 25 bp, Artificial
  probe
  misc_feature (1)..(25): SEQ ID NO: 6070; WAN0249AJ_at; Start 1; Stop 25
attgttcctcctagaaaaatgtgaa

SEQ ID NO: 15794 - DNA, 25 bp, Artificial
  probe
  misc_feature (1)..(25): SEQ ID NO: 6036; WAN0249AK_at; Start 6; Stop 30
gaaattagagtctatacataataag

SEQ ID NO: 15795 - DNA, 25 bp, Artificial
  probe
  misc_feature (1)..(25): SEQ ID NO: 6036; WAN0249AK_at; Start 18; Stop 42
tatacataataagtaaaggaggaat

SEQ ID NO: 15796 - DNA, 25 bp, Artificial
  probe
  misc_feature (1)..(25): SEQ ID NO: 6036; WAN0249AK_at; Start 55; Stop 79
ccatcgtttagaataagtctatatt

SEQ ID NO: 15797 - DNA, 25 bp, Artificial
  probe
  misc_feature (1)..(25): SEQ ID NO: 6036; WAN0249AK_at; Start 85; Stop 109
tagaagttataaggaatcttcttga

SEQ ID NO: 15798 - DNA, 25 bp, Artificial
  probe
  misc_feature (1)..(25): SEQ ID NO: 6036; WAN0249AK_at; Start 101; Stop 125
tcttcttgaataaaaaatgaaagga

SEQ ID NO: 15799 - DNA, 25 bp, Artificial
  probe
  misc_feature (1)..(25): SEQ ID NO: 6036; WAN0249AK_at; Start 35; Stop 59
ggaggaatttgtatgatataccatc

SEQ ID NO: 15800 - DNA, 25 bp, Artificial
  probe
  misc_feature (1)..(25): SEQ ID NO: 6036; WAN0249AK_at; Start 32; Stop 56
aaaggaggaatttgtatgatatacc

SEQ ID NO: 15801 - DNA, 25 bp, Artificial
  probe
  misc_feature (1)..(25): SEQ ID NO: 6036; WAN0249AK_at; Start 95; Stop 119
aaggaatcttcttgaataaaaaatg

SEQ ID NO: 15802 - DNA, 25 bp, Artificial
  probe
  misc_feature (1)..(25): SEQ ID NO: 6036; WAN0249AK_at; Start 51; Stop 75
tataccatcgtttagaataagtcta

SEQ ID NO: 15803 - DNA, 25 bp, Artificial
  probe
  misc_feature (1)..(25): SEQ ID NO: 6036; WAN0249AK_at; Start 43; Stop 67
ttgtatgatataccatcgtttagaa

SEQ ID NO: 15804 - DNA, 25 bp, Artificial
  probe
  misc_feature (1)..(25): SEQ ID NO: 6036; WAN0249AK_at; Start 15; Stop 39
gtctatacataataagtaaaggagg

SEQ ID NO: 15805 - DNA, 25 bp, Artificial
  probe
  misc_feature (1)..(25): SEQ ID NO: 6036; WAN0249AK_at; Start 45; Stop 69
gtatgatataccatcgtttagaata

SEQ ID NO: 15806 - DNA, 25 bp, Artificial
  probe
  misc_feature (1)..(25): SEQ ID NO: 6036; WAN0249AK_at; Start 41; Stop 65
atttgtatgatataccatcgtttag

SEQ ID NO: 15807 - DNA, 25 bp, Artificial
  probe
  misc_feature (1)..(25): SEQ ID NO: 6036; WAN0249AK_at; Start 16; Stop 40
tctatacataataagtaaaggagga

SEQ ID NO: 15808 - DNA, 25 bp, Artificial
  probe
  misc_feature (1)..(25): SEQ ID NO: 6036; WAN0249AK_at; Start 44; Stop 68
tgtatgatataccatcgtttagaat

SEQ ID NO: 15809 - DNA, 25 bp, Artificial
  probe
  misc_feature (1)..(25): SEQ ID NO: 6036; WAN0249AK_at; Start 87; Stop 111
gaagttataaggaatcttcttgaat

SEQ ID NO: 15810 - DNA, 25 bp, Artificial
  probe
  misc_feature (1)..(25): SEQ ID NO: 6036; WAN0249AK_at; Start 82; Stop 106
aaatagaagttataaggaatcttct

SEQ ID NO: 15811 - DNA, 25 bp, Artificial
  probe
  misc_feature (1)..(25): SEQ ID NO: 6036; WAN0249AK_at; Start 46; Stop 70
tatgatataccatcgtttagaataa

SEQ ID NO: 15812 - DNA, 25 bp, Artificial
  probe
  misc_feature (1)..(25): SEQ ID NO: 6036; WAN0249AK_at; Start 48; Stop 72
tgatataccatcgtttagaataagt

SEQ ID NO: 15813 - DNA, 25 bp, Artificial
  probe
  misc_feature (1)..(25): SEQ ID NO: 6036; WAN0249AK_at; Start 33; Stop 57
aaggaggaatttgtatgatatacca

SEQ ID NO: 15814 - DNA, 25 bp, Artificial
  probe
  misc_feature (1)..(25): SEQ ID NO: 6036; WAN0249AK_at; Start 22; Stop 46
cataataagtaaaggaggaatttgt

SEQ ID NO: 15815 - DNA, 25 bp, Artificial
  probe
  misc_feature (1)..(25): SEQ ID NO: 6036; WAN0249AK_at; Start 38; Stop 62
ggaatttgtatgatataccatcgtt

SEQ ID NO: 15816 - DNA, 25 bp, Artificial
  probe
  misc_feature (1)..(25): SEQ ID NO: 6036; WAN0249AK_at; Start 56; Stop 80
catcgtttagaataagtctatattt

SEQ ID NO: 15817 - DNA, 25 bp, Artificial
  probe
  misc_feature (1)..(25): SEQ ID NO: 6036; WAN0249AK_at; Start 92; Stop 116
tataaggaatcttcttgaataaaaa

SEQ ID NO: 15818 - DNA, 25 bp, Artificial
  probe
  misc_feature (1)..(25): SEQ ID NO: 6036; WAN0249AK_at; Start 25; Stop 49
aataagtaaaggaggaatttgtatg

SEQ ID NO: 15819 - DNA, 25 bp, Artificial
  probe
  misc_feature (1)..(25): SEQ ID NO: 6036; WAN0249AK_at; Start 53; Stop 77
taccatcgtttagaataagtctata

SEQ ID NO: 15820 - DNA, 25 bp, Artificial
  probe
  misc_feature (1)..(25): SEQ ID NO: 6036; WAN0249AK_at; Start 107; Stop 131
tgaataaaaaatgaaaggaaacaga

SEQ ID NO: 15821 - DNA, 25 bp, Artificial
  probe
  misc_feature (1)..(25): SEQ ID NO: 6036; WAN0249AK_at; Start 97; Stop 121
ggaatcttcttgaataaaaaatgaa

SEQ ID NO: 15822 - DNA, 25 bp, Artificial
  probe
  misc_feature (1)..(25): SEQ ID NO: 6036; WAN0249AK_at; Start 39; Stop 63
gaatttgtatgatataccatcgttt

SEQ ID NO: 15823 - DNA, 25 bp, Artificial
  probe
  misc_feature (1)..(25): SEQ ID NO: 6036; WAN0249AK_at; Start 11; Stop 35
tagagtctatacataataagtaaag

SEQ ID NO: 15824 - DNA, 25 bp, Artificial
  probe
  misc_feature (1)..(25): SEQ ID NO: 6036; WAN0249AK_at; Start 36; Stop 60
gaggaatttgtatgatataccatcg

SEQ ID NO: 15825 - DNA, 25 bp, Artificial
  probe
  misc_feature (1)..(25): SEQ ID NO: 6036; WAN0249AK_at; Start 2; Stop 26
taaagaaattagagtctatacataa

SEQ ID NO: 15826 - DNA, 25 bp, Artificial
  probe
  misc_feature (1)..(25): SEQ ID NO: 6036; WAN0249AK_at; Start 13; Stop 37
gagtctatacataataagtaaagga

SEQ ID NO: 15827 - DNA, 25 bp, Artificial
  probe
  misc_feature (1)..(25): SEQ ID NO: 6036; WAN0249AK_at; Start 49; Stop 73
gatataccatcgtttagaataagtc

SEQ ID NO: 15828 - DNA, 25 bp, Artificial
  probe
  misc_feature (1)..(25): SEQ ID NO: 6116; WAN0249AL_at; Start 62; Stop 86
ttagttctgttgatctggattgctt

SEQ ID NO: 15829 - DNA, 25 bp, Artificial
  probe
  misc_feature (1)..(25): SEQ ID NO: 6116; WAN0249AL_at; Start 73; Stop 97
gatctggattgctttcttctttctt

SEQ ID NO: 15830 - DNA, 25 bp, Artificial
  probe
  misc_feature (1)..(25): SEQ ID NO: 6116; WAN0249AL_at; Start 66; Stop 90
ttctgttgatctggattgctttctt

SEQ ID NO: 15831 - DNA, 25 bp, Artificial
  probe
  misc_feature (1)..(25): SEQ ID NO: 6116; WAN0249AL_at; Start 64; Stop 88
agttctgttgatctggattgctttc

SEQ ID NO: 15832 - DNA, 25 bp, Artificial
  probe
  misc_feature (1)..(25): SEQ ID NO: 6116; WAN0249AL_at; Start 36; Stop 60
cacgctattctaaggtctatattgg

SEQ ID NO: 15833 - DNA, 25 bp, Artificial
  probe
  misc_feature (1)..(25): SEQ ID NO: 6116; WAN0249AL_at; Start 38; Stop 62
cgctattctaaggtctatattggtt

SEQ ID NO: 15834 - DNA, 25 bp, Artificial
  probe
  misc_feature (1)..(25): SEQ ID NO: 6116; WAN0249AL_at; Start 70; Stop 94
gttgatctggattgctttcttcttt

SEQ ID NO: 15835 - DNA, 25 bp, Artificial
  probe
  misc_feature (1)..(25): SEQ ID NO: 6116; WAN0249AL_at; Start 33; Stop 57
ttacacgctattctaaggtctatat

SEQ ID NO: 15836 - DNA, 25 bp, Artificial
  probe
  misc_feature (1)..(25): SEQ ID NO: 6116; WAN0249AL_at; Start 32; Stop 56
attacacgctattctaaggtctata

SEQ ID NO: 15837 - DNA, 25 bp, Artificial
  probe
  misc_feature (1)..(25): SEQ ID NO: 6116; WAN0249AL_at; Start 35; Stop 59
acacgctattctaaggtctatattg

SEQ ID NO: 15838 - DNA, 25 bp, Artificial
  probe
  misc_feature (1)..(25): SEQ ID NO: 6116; WAN0249AL_at; Start 34; Stop 58
tacacgctattctaaggtctatatt

SEQ ID NO: 15839 - DNA, 25 bp, Artificial
  probe
  misc_feature (1)..(25): SEQ ID NO: 6116; WAN0249AL_at; Start 30; Stop 54
ttattacacgctattctaaggtcta

SEQ ID NO: 15840 - DNA, 25 bp, Artificial
  probe
  misc_feature (1)..(25): SEQ ID NO: 6116; WAN0249AL_at; Start 72; Stop 96
tgatctggattgctttcttctttct

SEQ ID NO: 15841 - DNA, 25 bp, Artificial
  probe
  misc_feature (1)..(25): SEQ ID NO: 6116; WAN0249AL_at; Start 39; Stop 63
gctattctaaggtctatattggttt

SEQ ID NO: 15842 - DNA, 25 bp, Artificial
  probe
  misc_feature (1)..(25): SEQ ID NO: 6116; WAN0249AL_at; Start 65; Stop 89
gttctgttgatctggattgctttct

SEQ ID NO: 15843 - DNA, 25 bp, Artificial
  probe
  misc_feature (1)..(25): SEQ ID NO: 6116; WAN0249AL_at; Start 69; Stop 93
tgttgatctggattgctttcttctt

SEQ ID NO: 15844 - DNA, 25 bp, Artificial
  probe
  misc_feature (1)..(25): SEQ ID NO: 6116; WAN0249AL_at; Start 40; Stop 64
ctattctaaggtctatattggttta

SEQ ID NO: 15845 - DNA, 25 bp, Artificial
  probe
  misc_feature (1)..(25): SEQ ID NO: 6116; WAN0249AL_at; Start 74; Stop 98
atctggattgctttcttctttcttc

SEQ ID NO: 15846 - DNA, 25 bp, Artificial
  probe
  misc_feature (1)..(25): SEQ ID NO: 6116; WAN0249AL_at; Start 61; Stop 85
tttagttctgttgatctggattgct

SEQ ID NO: 15847 - DNA, 25 bp, Artificial
  probe
  misc_feature (1)..(25): SEQ ID NO: 6116; WAN0249AL_at; Start 71; Stop 95
ttgatctggattgctttcttctttc

SEQ ID NO: 15848 - DNA, 25 bp, Artificial
  probe
  misc_feature (1)..(25): SEQ ID NO: 6116; WAN0249AL_at; Start 28; Stop 52
atttattacacgctattctaaggtc

SEQ ID NO: 15849 - DNA, 25 bp, Artificial
  probe
  misc_feature (1)..(25): SEQ ID NO: 6116; WAN0249AL_at; Start 67; Stop 91
tctgttgatctggattgctttcttc

SEQ ID NO: 15850 - DNA, 25 bp, Artificial
  probe
  misc_feature (1)..(25): SEQ ID NO: 6116; WAN0249AL_at; Start 60; Stop 84
gtttagttctgttgatctggattgc

SEQ ID NO: 15851 - DNA, 25 bp, Artificial
  probe
  misc_feature (1)..(25): SEQ ID NO: 6116; WAN0249AL_at; Start 63; Stop 87
tagttctgttgatctggattgcttt

SEQ ID NO: 15852 - DNA, 25 bp, Artificial
  probe
  misc_feature (1)..(25): SEQ ID NO: 6116; WAN0249AL_at; Start 31; Stop 55
tattacacgctattctaaggtctat

SEQ ID NO: 15853 - DNA, 25 bp, Artificial
  probe
  misc_feature (1)..(25): SEQ ID NO: 6116; WAN0249AL_at; Start 37; Stop 61
acgctattctaaggtctatattggt

SEQ ID NO: 15854 - DNA, 25 bp, Artificial
  probe
  misc_feature (1)..(25): SEQ ID NO: 6116; WAN0249AL_at; Start 29; Stop 53
tttattacacgctattctaaggtct

SEQ ID NO: 15855 - DNA, 25 bp, Artificial
  probe
  misc_feature (1)..(25): SEQ ID NO: 6116; WAN0249AL_at; Start 75; Stop 99
tctggattgctttcttctttcttcc

SEQ ID NO: 15856 - DNA, 25 bp, Artificial
  probe
  misc_feature (1)..(25): SEQ ID NO: 6116; WAN0249AL_at; Start 1; Stop 25
gagatggcttatggcacatctaaaa

SEQ ID NO: 15857 - DNA, 25 bp, Artificial
  probe
  misc_feature (1)..(25): SEQ ID NO: 6116; WAN0249AL_at; Start 68; Stop 92
ctgttgatctggattgctttcttct

SEQ ID NO: 15858 - DNA, 25 bp, Artificial
  probe
  misc_feature (1)..(25): SEQ ID NO: 6085; WAN0249AM_at; Start 98; Stop 122
tatcctgcacgactaattttgagtt

SEQ ID NO: 15859 - DNA, 25 bp, Artificial
  probe
  misc_feature (1)..(25): SEQ ID NO: 6085; WAN0249AM_at; Start 91; Stop 115
ggtatcctatcctgcacgactaatt

SEQ ID NO: 15860 - DNA, 25 bp, Artificial
  probe
  misc_feature (1)..(25): SEQ ID NO: 6085; WAN0249AM_at; Start 157; Stop 181
taaatcagcatttaacgatagtatg

SEQ ID NO: 15861 - DNA, 25 bp, Artificial
  probe
  misc_feature (1)..(25): SEQ ID NO: 6085; WAN0249AM_at; Start 89; Stop 113
agggtatcctatcctgcacgactaa

SEQ ID NO: 15862 - DNA, 25 bp, Artificial
  probe
  misc_feature (1)..(25): SEQ ID NO: 6085; WAN0249AM_at; Start 124; Stop 148
gaaactgaggagtttataactcaaa

SEQ ID NO: 15863 - DNA, 25 bp, Artificial
  probe
  misc_feature (1)..(25): SEQ ID NO: 6085; WAN0249AM_at; Start 5; Stop 29
caggtattttagaatgtatattgct

SEQ ID NO: 15864 - DNA, 25 bp, Artificial
  probe
  misc_feature (1)..(25): SEQ ID NO: 6085; WAN0249AM_at; Start 96; Stop 120
cctatcctgcacgactaattttgag

SEQ ID NO: 15865 - DNA, 25 bp, Artificial
  probe
  misc_feature (1)..(25): SEQ ID NO: 6085; WAN0249AM_at; Start 104; Stop 128
gcacgactaattttgagttcgaaac

SEQ ID NO: 15866 - DNA, 25 bp, Artificial
  probe
  misc_feature (1)..(25): SEQ ID NO: 6085; WAN0249AM_at; Start 19; Stop 43
tgtatattgcttagatattccttat

SEQ ID NO: 15867 - DNA, 25 bp, Artificial
  probe
  misc_feature (1)..(25): SEQ ID NO: 6085; WAN0249AM_at; Start 164; Stop 188
gcatttaacgatagtatgtttgtca

SEQ ID NO: 15868 - DNA, 25 bp, Artificial
  probe
  misc_feature (1)..(25): SEQ ID NO: 6085; WAN0249AM_at; Start 88; Stop 112
aagggtatcctatcctgcacgacta

SEQ ID NO: 15869 - DNA, 25 bp, Artificial
  probe
  misc_feature (1)..(25): SEQ ID NO: 6085; WAN0249AM_at; Start 92; Stop 116
gtatcctatcctgcacgactaattt

SEQ ID NO: 15870 - DNA, 25 bp, Artificial
  probe
  misc_feature (1)..(25): SEQ ID NO: 6085; WAN0249AM_at; Start 101; Stop 125
cctgcacgactaattttgagttcga

SEQ ID NO: 15871 - DNA, 25 bp, Artificial
  probe
  misc_feature (1)..(25): SEQ ID NO: 6085; WAN0249AM_at; Start 107; Stop 131
cgactaattttgagttcgaaactga

SEQ ID NO: 15872 - DNA, 25 bp, Artificial
  probe
  misc_feature (1)..(25): SEQ ID NO: 6085; WAN0249AM_at; Start 90; Stop 114
gggtatcctatcctgcacgactaat

SEQ ID NO: 15873 - DNA, 25 bp, Artificial
  probe
  misc_feature (1)..(25): SEQ ID NO: 6085; WAN0249AM_at; Start 78; Stop 102
taagtttatgaagggtatcctatcc

SEQ ID NO: 15874 - DNA, 25 bp, Artificial
  probe
  misc_feature (1)..(25): SEQ ID NO: 6085; WAN0249AM_at; Start 87; Stop 111
gaagggtatcctatcctgcacgact

SEQ ID NO: 15875 - DNA, 25 bp, Artificial
  probe
  misc_feature (1)..(25): SEQ ID NO: 6085; WAN0249AM_at; Start 122; Stop 146
tcgaaactgaggagtttataactca

SEQ ID NO: 15876 - DNA, 25 bp, Artificial
  probe
  misc_feature (1)..(25): SEQ ID NO: 6085; WAN0249AM_at; Start 153; Stop 177
cgattaaatcagcatttaacgatag

SEQ ID NO: 15877 - DNA, 25 bp, Artificial
  probe
  misc_feature (1)..(25): SEQ ID NO: 6085; WAN0249AM_at; Start 129; Stop 153
tgaggagtttataactcaaaatttc

SEQ ID NO: 15878 - DNA, 25 bp, Artificial
  probe
  misc_feature (1)..(25): SEQ ID NO: 6085; WAN0249AM_at; Start 81; Stop 105
gtttatgaagggtatcctatcctgc

SEQ ID NO: 15879 - DNA, 25 bp, Artificial
  probe
  misc_feature (1)..(25): SEQ ID NO: 6085; WAN0249AM_at; Start 138; Stop 162
tataactcaaaatttcgattaaatc

SEQ ID NO: 15880 - DNA, 25 bp, Artificial
  probe
  misc_feature (1)..(25): SEQ ID NO: 6085; WAN0249AM_at; Start 115; Stop 139
tttgagttcgaaactgaggagttta

SEQ ID NO: 15881 - DNA, 25 bp, Artificial
  probe
  misc_feature (1)..(25): SEQ ID NO: 6085; WAN0249AM_at; Start 169; Stop 193
taacgatagtatgtttgtcataaaa

SEQ ID NO: 15882 - DNA, 25 bp, Artificial
  probe
  misc_feature (1)..(25): SEQ ID NO: 6085; WAN0249AM_at; Start 111; Stop 135
taattttgagttcgaaactgaggag

SEQ ID NO: 15883 - DNA, 25 bp, Artificial
  probe
  misc_feature (1)..(25): SEQ ID NO: 6085; WAN0249AM_at; Start 172; Stop 196
cgatagtatgtttgtcataaaatga

SEQ ID NO: 15884 - DNA, 25 bp, Artificial
  probe
  misc_feature (1)..(25): SEQ ID NO: 6085; WAN0249AM_at; Start 16; Stop 40
gaatgtatattgcttagatattcct

SEQ ID NO: 15885 - DNA, 25 bp, Artificial
  probe
  misc_feature (1)..(25): SEQ ID NO: 6085; WAN0249AM_at; Start 84; Stop 108
tatgaagggtatcctatcctgcacg

SEQ ID NO: 15886 - DNA, 25 bp, Artificial
  probe
  misc_feature (1)..(25): SEQ ID NO: 6085; WAN0249AM_at; Start 83; Stop 107
ttatgaagggtatcctatcctgcac

SEQ ID NO: 15887 - DNA, 25 bp, Artificial
  probe
  misc_feature (1)..(25): SEQ ID NO: 6085; WAN0249AM_at; Start 112; Stop 136
aattttgagttcgaaactgaggagt

SEQ ID NO: 15888 - DNA, 25 bp, Artificial
  probe
  misc_feature (1)..(25): SEQ ID NO: 6085; WAN0249AM_at; Start 74; Stop 98
tatataagtttatgaagggtatcct

SEQ ID NO: 15889 - DNA, 25 bp, Artificial
  probe
  misc_feature (1)..(25): SEQ ID NO: 6085; WAN0249AM_at; Start 1; Stop 25
cctacaggtattttagaatgtatat

SEQ ID NO: 15890 - DNA, 25 bp, Artificial
  probe
  misc_feature (1)..(25): SEQ ID NO: 6085; WAN0249AM_at; Start 161; Stop 185
tcagcatttaacgatagtatgtttg

SEQ ID NO: 15891 - DNA, 25 bp, Artificial
  probe
  misc_feature (1)..(25): SEQ ID NO: 6085; WAN0249AM_at; Start 86; Stop 110
tgaagggtatcctatcctgcacgac

SEQ ID NO: 15892 - DNA, 25 bp, Artificial
  probe
  misc_feature (1)..(25): SEQ ID NO: 6041; WAN0249AN_at; Start 4; Stop 28
ctatcaatattaatgcggagtgtaa

SEQ ID NO: 15893 - DNA, 25 bp, Artificial
  probe
  misc_feature (1)..(25): SEQ ID NO: 6041; WAN0249AN_at; Start 86; Stop 110
aagaggaacgaatgaagatgaaagc

SEQ ID NO: 15894 - DNA, 25 bp, Artificial
  probe
  misc_feature (1)..(25): SEQ ID NO: 6041; WAN0249AN_at; Start 24; Stop 48
tgtaatgctccgctaaaataaaacc

SEQ ID NO: 15895 - DNA, 25 bp, Artificial
  probe
  misc_feature (1)..(25): SEQ ID NO: 6041; WAN0249AN_at; Start 104; Stop 128
tgaaagctagagattcaccattgaa

SEQ ID NO: 15896 - DNA, 25 bp, Artificial
  probe
  misc_feature (1)..(25): SEQ ID NO: 6041; WAN0249AN_at; Start 13; Stop 37
ttaatgcggagtgtaatgctccgct

SEQ ID NO: 15897 - DNA, 25 bp, Artificial
  probe
  misc_feature (1)..(25): SEQ ID NO: 6041; WAN0249AN_at; Start 72; Stop 96
ttgtttaggatggaaagaggaacga

SEQ ID NO: 15898 - DNA, 25 bp, Artificial
  probe
  misc_feature (1)..(25): SEQ ID NO: 6041; WAN0249AN_at; Start 19; Stop 43
cggagtgtaatgctccgctaaaata

SEQ ID NO: 15899 - DNA, 25 bp, Artificial
  probe
  misc_feature (1)..(25): SEQ ID NO: 6041; WAN0249AN_at; Start 27; Stop 51
aatgctccgctaaaataaaacctat

SEQ ID NO: 15900 - DNA, 25 bp, Artificial
  probe
  misc_feature (1)..(25): SEQ ID NO: 6041; WAN0249AN_at; Start 11; Stop 35
tattaatgcggagtgtaatgctccg

SEQ ID NO: 15901 - DNA, 25 bp, Artificial
  probe
  misc_feature (1)..(25): SEQ ID NO: 6041; WAN0249AN_at; Start 107; Stop 131
aagctagagattcaccattgaattg

SEQ ID NO: 15902 - DNA, 25 bp, Artificial
  probe
  misc_feature (1)..(25): SEQ ID NO: 6041; WAN0249AN_at; Start 1; Stop 25
atactatcaatattaatgcggagtg

SEQ ID NO: 15903 - DNA, 25 bp, Artificial
  probe
  misc_feature (1)..(25): SEQ ID NO: 6041; WAN0249AN_at; Start 15; Stop 39
aatgcggagtgtaatgctccgctaa

SEQ ID NO: 15904 - DNA, 25 bp, Artificial
  probe
  misc_feature (1)..(25): SEQ ID NO: 6041; WAN0249AN_at; Start 88; Stop 112
gaggaacgaatgaagatgaaagcta

SEQ ID NO: 15905 - DNA, 25 bp, Artificial
  probe
  misc_feature (1)..(25): SEQ ID NO: 6041; WAN0249AN_at; Start 29; Stop 53
tgctccgctaaaataaaacctatta

SEQ ID NO: 15906 - DNA, 25 bp, Artificial
  probe
  misc_feature (1)..(25): SEQ ID NO: 6041; WAN0249AN_at; Start 68; Stop 92
tactttgtttaggatggaaagagga

SEQ ID NO: 15907 - DNA, 25 bp, Artificial
  probe
  misc_feature (1)..(25): SEQ ID NO: 6041; WAN0249AN_at; Start 91; Stop 115
gaacgaatgaagatgaaagctagag

SEQ ID NO: 15908 - DNA, 25 bp, Artificial
  probe
  misc_feature (1)..(25): SEQ ID NO: 6041; WAN0249AN_at; Start 64; Stop 88
acactactttgtttaggatggaaag

SEQ ID NO: 15909 - DNA, 25 bp, Artificial
  probe
  misc_feature (1)..(25): SEQ ID NO: 6041; WAN0249AN_at; Start 98; Stop 122
tgaagatgaaagctagagattcacc

SEQ ID NO: 15910 - DNA, 25 bp, Artificial
  probe
  misc_feature (1)..(25): SEQ ID NO: 6041; WAN0249AN_at; Start 102; Stop 126
gatgaaagctagagattcaccattg

SEQ ID NO: 15911 - DNA, 25 bp, Artificial
  probe
  misc_feature (1)..(25): SEQ ID NO: 6041; WAN0249AN_at; Start 94; Stop 118
cgaatgaagatgaaagctagagatt

SEQ ID NO: 15912 - DNA, 25 bp, Artificial
  probe
  misc_feature (1)..(25): SEQ ID NO: 6041; WAN0249AN_at; Start 21; Stop 45
gagtgtaatgctccgctaaaataaa

SEQ ID NO: 15913 - DNA, 25 bp, Artificial
  probe
  misc_feature (1)..(25): SEQ ID NO: 6041; WAN0249AN_at; Start 109; Stop 133
gctagagattcaccattgaattgat

SEQ ID NO: 15914 - DNA, 25 bp, Artificial
  probe
  misc_feature (1)..(25): SEQ ID NO: 6041; WAN0249AN_at; Start 105; Stop 129
gaaagctagagattcaccattgaat

SEQ ID NO: 15915 - DNA, 25 bp, Artificial
  probe
  misc_feature (1)..(25): SEQ ID NO: 6041; WAN0249AN_at; Start 77; Stop 101
taggatggaaagaggaacgaatgaa

SEQ ID NO: 15916 - DNA, 25 bp, Artificial
  probe
  misc_feature (1)..(25): SEQ ID NO: 6041; WAN0249AN_at; Start 26; Stop 50
taatgctccgctaaaataaaaccta

SEQ ID NO: 15917 - DNA, 25 bp, Artificial
  probe
  misc_feature (1)..(25): SEQ ID NO: 6041; WAN0249AN_at; Start 17; Stop 41
tgcggagtgtaatgctccgctaaaa

SEQ ID NO: 15918 - DNA, 25 bp, Artificial
  probe
  misc_feature (1)..(25): SEQ ID NO: 6041; WAN0249AN_at; Start 80; Stop 104
gatggaaagaggaacgaatgaagat

SEQ ID NO: 15919 - DNA, 25 bp, Artificial
  probe
  misc_feature (1)..(25): SEQ ID NO: 6041; WAN0249AN_at; Start 113; Stop 137
gagattcaccattgaattgattttg

SEQ ID NO: 15920 - DNA, 25 bp, Artificial
  probe
  misc_feature (1)..(25): SEQ ID NO: 6041; WAN0249AN_at; Start 9; Stop 33
aatattaatgcggagtgtaatgctc

SEQ ID NO: 15921 - DNA, 25 bp, Artificial
  probe
  misc_feature (1)..(25): SEQ ID NO: 6041; WAN0249AN_at; Start 83; Stop 107
ggaaagaggaacgaatgaagatgaa

SEQ ID NO: 15922 - DNA, 25 bp, Artificial
  probe
  misc_feature (1)..(25): SEQ ID NO: 6041; WAN0249AN_at; Start 75; Stop 99
tttaggatggaaagaggaacgaatg

SEQ ID NO: 15923 - DNA, 25 bp, Artificial
  probe
  misc_feature (1)..(25): SEQ ID NO: 6041; WAN0249AN_at; Start 121; Stop 145
ccattgaattgattttgtttttaga

SEQ ID NO: 15924 - DNA, 25 bp, Artificial
  probe
  misc_feature (1)..(25): SEQ ID NO: 6041; WAN0249AN_at; Start 65; Stop 89
cactactttgtttaggatggaaaga

SEQ ID NO: 15925 - DNA, 25 bp, Artificial
  probe
  misc_feature (1)..(25): SEQ ID NO: 6041; WAN0249AN_at; Start 99; Stop 123
gaagatgaaagctagagattcacca

SEQ ID NO: 15926 - DNA, 25 bp, Artificial
  probe
  misc_feature (1)..(25): SEQ ID NO: 6174; WAN0249AO_at; Start 63; Stop 87
agttaatgaatatttctggagaacg

SEQ ID NO: 15927 - DNA, 25 bp, Artificial
  probe
  misc_feature (1)..(25): SEQ ID NO: 6174; WAN0249AO_at; Start 50; Stop 74
gtataaaaatgaaagttaatgaata

SEQ ID NO: 15928 - DNA, 25 bp, Artificial
  probe
  misc_feature (1)..(25): SEQ ID NO: 6174; WAN0249AO_at; Start 65; Stop 89
ttaatgaatatttctggagaacgag

SEQ ID NO: 15929 - DNA, 25 bp, Artificial
  probe
  misc_feature (1)..(25): SEQ ID NO: 6174; WAN0249AO_at; Start 59; Stop 83
tgaaagttaatgaatatttctggag

SEQ ID NO: 15930 - DNA, 25 bp, Artificial
  probe
  misc_feature (1)..(25): SEQ ID NO: 6174; WAN0249AO_at; Start 62; Stop 86
aagttaatgaatatttctggagaac

SEQ ID NO: 15931 - DNA, 25 bp, Artificial
  probe
  misc_feature (1)..(25): SEQ ID NO: 6174; WAN0249AO_at; Start 67; Stop 91
aatgaatatttctggagaacgagct

SEQ ID NO: 15932 - DNA, 25 bp, Artificial
  probe
  misc_feature (1)..(25): SEQ ID NO: 6174; WAN0249AO_at; Start 64; Stop 88
gttaatgaatatttctggagaacga

SEQ ID NO: 15933 - DNA, 25 bp, Artificial
  probe
  misc_feature (1)..(25): SEQ ID NO: 6174; WAN0249AO_at; Start 66; Stop 90
taatgaatatttctggagaacgagc

SEQ ID NO: 15934 - DNA, 25 bp, Artificial
  probe
  misc_feature (1)..(25): SEQ ID NO: 6174; WAN0249AO_at; Start 57; Stop 81
aatgaaagttaatgaatatttctgg

SEQ ID NO: 15935 - DNA, 25 bp, Artificial
  probe
  misc_feature (1)..(25): SEQ ID NO: 6174; WAN0249AO_at; Start 69; Stop 93
tgaatatttctggagaacgagctgt

SEQ ID NO: 15936 - DNA, 25 bp, Artificial
  probe
  misc_feature (1)..(25): SEQ ID NO: 6174; WAN0249AO_at; Start 61; Stop 85
aaagttaatgaatatttctggagaa

SEQ ID NO: 15937 - DNA, 25 bp, Artificial
  probe
  misc_feature (1)..(25): SEQ ID NO: 6174; WAN0249AO_at; Start 70; Stop 94
gaatatttctggagaacgagctgtc

SEQ ID NO: 15938 - DNA, 25 bp, Artificial
  probe
  misc_feature (1)..(25): SEQ ID NO: 6174; WAN0249AO_at; Start 49; Stop 73
agtataaaaatgaaagttaatgaat

SEQ ID NO: 15939 - DNA, 25 bp, Artificial
  probe
  misc_feature (1)..(25): SEQ ID NO: 6174; WAN0249AO_at; Start 58; Stop 82
atgaaagttaatgaatatttctgga

SEQ ID NO: 15940 - DNA, 25 bp, Artificial
  probe
  misc_feature (1)..(25): SEQ ID NO: 6174; WAN0249AO_at; Start 56; Stop 80
aaatgaaagttaatgaatatttctg

SEQ ID NO: 15941 - DNA, 25 bp, Artificial
  probe
  misc_feature (1)..(25): SEQ ID NO: 6174; WAN0249AO_at; Start 55; Stop 79
aaaatgaaagttaatgaatatttct

SEQ ID NO: 15942 - DNA, 25 bp, Artificial
  probe
  misc_feature (1)..(25): SEQ ID NO: 6174; WAN0249AO_at; Start 68; Stop 92
atgaatatttctggagaacgagctg

SEQ ID NO: 15943 - DNA, 25 bp, Artificial
  probe
  misc_feature (1)..(25): SEQ ID NO: 6174; WAN0249AO_at; Start 51; Stop 75
tataaaaatgaaagttaatgaatat

SEQ ID NO: 15944 - DNA, 25 bp, Artificial
  probe
  misc_feature (1)..(25): SEQ ID NO: 6174; WAN0249AO_at; Start 60; Stop 84
gaaagttaatgaatatttctggaga

SEQ ID NO: 15945 - DNA, 25 bp, Artificial
  probe
  misc_feature (1)..(25): SEQ ID NO: 5989; WAN0249AP_at; Start 25; Stop 49
acgattatgctgacttttttgataa

SEQ ID NO: 15946 - DNA, 25 bp, Artificial
  probe
  misc_feature (1)..(25): SEQ ID NO: 5989; WAN0249AP_at; Start 1; Stop 25
aaatcagataagagaaaagtcagca

SEQ ID NO: 15947 - DNA, 25 bp, Artificial
  probe
  misc_feature (1)..(25): SEQ ID NO: 5989; WAN0249AP_at; Start 8; Stop 32
ataagagaaaagtcagcacgattat

SEQ ID NO: 15948 - DNA, 25 bp, Artificial
  probe
  misc_feature (1)..(25): SEQ ID NO: 5989; WAN0249AP_at; Start 21; Stop 45
cagcacgattatgctgacttttttg

SEQ ID NO: 15949 - DNA, 25 bp, Artificial
  probe
  misc_feature (1)..(25): SEQ ID NO: 5989; WAN0249AP_at; Start 12; Stop 36
gagaaaagtcagcacgattatgctg

SEQ ID NO: 15950 - DNA, 25 bp, Artificial
  probe
  misc_feature (1)..(25): SEQ ID NO: 5989; WAN0249AP_at; Start 24; Stop 48
cacgattatgctgacttttttgata

SEQ ID NO: 15951 - DNA, 25 bp, Artificial
  probe
  misc_feature (1)..(25): SEQ ID NO: 5989; WAN0249AP_at; Start 9; Stop 33
taagagaaaagtcagcacgattatg

SEQ ID NO: 15952 - DNA, 25 bp, Artificial
  probe
  misc_feature (1)..(25): SEQ ID NO: 5989; WAN0249AP_at; Start 15; Stop 39
aaaagtcagcacgattatgctgact

SEQ ID NO: 15953 - DNA, 25 bp, Artificial
  probe
  misc_feature (1)..(25): SEQ ID NO: 5989; WAN0249AP_at; Start 6; Stop 30
agataagagaaaagtcagcacgatt

SEQ ID NO: 15954 - DNA, 25 bp, Artificial
  probe
  misc_feature (1)..(25): SEQ ID NO: 5989; WAN0249AP_at; Start 14; Stop 38
gaaaagtcagcacgattatgctgac

SEQ ID NO: 15955 - DNA, 25 bp, Artificial
  probe
  misc_feature (1)..(25): SEQ ID NO: 5989; WAN0249AP_at; Start 2; Stop 26
aatcagataagagaaaagtcagcac

SEQ ID NO: 15956 - DNA, 25 bp, Artificial
  probe
  misc_feature (1)..(25): SEQ ID NO: 5989; WAN0249AP_at; Start 4; Stop 28
tcagataagagaaaagtcagcacga

SEQ ID NO: 15957 - DNA, 25 bp, Artificial
  probe
  misc_feature (1)..(25): SEQ ID NO: 5989; WAN0249AP_at; Start 23; Stop 47
gcacgattatgctgacttttttgat

SEQ ID NO: 15958 - DNA, 25 bp, Artificial
  probe
  misc_feature (1)..(25): SEQ ID NO: 5989; WAN0249AP_at; Start 26; Stop 50
cgattatgctgacttttttgataac

SEQ ID NO: 15959 - DNA, 25 bp, Artificial
  probe
  misc_feature (1)..(25): SEQ ID NO: 5989; WAN0249AP_at; Start 10; Stop 34
aagagaaaagtcagcacgattatgc

SEQ ID NO: 15960 - DNA, 25 bp, Artificial
  probe
  misc_feature (1)..(25): SEQ ID NO: 5989; WAN0249AP_at; Start 16; Stop 40
aaagtcagcacgattatgctgactt

SEQ ID NO: 15961 - DNA, 25 bp, Artificial
  probe
  misc_feature (1)..(25): SEQ ID NO: 5989; WAN0249AP_at; Start 3; Stop 27
atcagataagagaaaagtcagcacg

SEQ ID NO: 15962 - DNA, 25 bp, Artificial
  probe
  misc_feature (1)..(25): SEQ ID NO: 5989; WAN0249AP_at; Start 22; Stop 46
agcacgattatgctgacttttttga

SEQ ID NO: 15963 - DNA, 25 bp, Artificial
  probe
  misc_feature (1)..(25): SEQ ID NO: 5989; WAN0249AP_at; Start 20; Stop 44
tcagcacgattatgctgactttttt

SEQ ID NO: 15964 - DNA, 25 bp, Artificial
  probe
  misc_feature (1)..(25): SEQ ID NO: 5989; WAN0249AP_at; Start 7; Stop 31
gataagagaaaagtcagcacgatta

SEQ ID NO: 15965 - DNA, 25 bp, Artificial
  probe
  misc_feature (1)..(25): SEQ ID NO: 5989; WAN0249AP_at; Start 13; Stop 37
agaaaagtcagcacgattatgctga

SEQ ID NO: 15966 - DNA, 25 bp, Artificial
  probe
  misc_feature (1)..(25): SEQ ID NO: 5989; WAN0249AP_at; Start 18; Stop 42
agtcagcacgattatgctgactttt

SEQ ID NO: 15967 - DNA, 25 bp, Artificial
  probe
  misc_feature (1)..(25): SEQ ID NO: 5989; WAN0249AP_at; Start 17; Stop 41
aagtcagcacgattatgctgacttt

SEQ ID NO: 15968 - DNA, 25 bp, Artificial
  probe
  misc_feature (1)..(25): SEQ ID NO: 5989; WAN0249AP_at; Start 5; Stop 29
cagataagagaaaagtcagcacgat

SEQ ID NO: 15969 - DNA, 25 bp, Artificial
  probe
  misc_feature (1)..(25): SEQ ID NO: 5989; WAN0249AP_at; Start 11; Stop 35
agagaaaagtcagcacgattatgct

SEQ ID NO: 15970 - DNA, 25 bp, Artificial
  probe
  misc_feature (1)..(25): SEQ ID NO: 5989; WAN0249AP_at; Start 19; Stop 43
gtcagcacgattatgctgacttttt

SEQ ID NO: 15971 - DNA, 25 bp, Artificial
  probe
  misc_feature (1)..(25): SEQ ID NO: 6178; WAN0249AQ_at; Start 138; Stop 162
atgcctcaaatagttgtacattgta

SEQ ID NO: 15972 - DNA, 25 bp, Artificial
  probe
  misc_feature (1)..(25): SEQ ID NO: 6178; WAN0249AQ_at; Start 86; Stop 110
ggcttttaagtgcaaaaacagaata

SEQ ID NO: 15973 - DNA, 25 bp, Artificial
  probe
  misc_feature (1)..(25): SEQ ID NO: 6178; WAN0249AQ_at; Start 31; Stop 55
aaattagagcaagaaaattgtcgtt

SEQ ID NO: 15974 - DNA, 25 bp, Artificial
  probe
  misc_feature (1)..(25): SEQ ID NO: 6178; WAN0249AQ_at; Start 82; Stop 106
aagtggcttttaagtgcaaaaacag

SEQ ID NO: 15975 - DNA, 25 bp, Artificial
  probe
  misc_feature (1)..(25): SEQ ID NO: 6178; WAN0249AQ_at; Start 141; Stop 165
cctcaaatagttgtacattgtaaac

SEQ ID NO: 15976 - DNA, 25 bp, Artificial
  probe
  misc_feature (1)..(25): SEQ ID NO: 6178; WAN0249AQ_at; Start 165; Stop 189
ctataaaatactatctaggagttta

SEQ ID NO: 15977 - DNA, 25 bp, Artificial
  probe
  misc_feature (1)..(25): SEQ ID NO: 6178; WAN0249AQ_at; Start 133; Stop 157
gattaatgcctcaaatagttgtaca

SEQ ID NO: 15978 - DNA, 25 bp, Artificial
  probe
  misc_feature (1)..(25): SEQ ID NO: 6178; WAN0249AQ_at; Start 34; Stop 58
ttagagcaagaaaattgtcgttagt

SEQ ID NO: 15979 - DNA, 25 bp, Artificial
  probe
  misc_feature (1)..(25): SEQ ID NO: 6178; WAN0249AQ_at; Start 81; Stop 105
taagtggcttttaagtgcaaaaaca

SEQ ID NO: 15980 - DNA, 25 bp, Artificial
  probe
  misc_feature (1)..(25): SEQ ID NO: 6178; WAN0249AQ_at; Start 124; Stop 148
gaaaatattgattaatgcctcaaat

SEQ ID NO: 15981 - DNA, 25 bp, Artificial
  probe
  misc_feature (1)..(25): SEQ ID NO: 6178; WAN0249AQ_at; Start 85; Stop 109
tggcttttaagtgcaaaaacagaat

SEQ ID NO: 15982 - DNA, 25 bp, Artificial
  probe
  misc_feature (1)..(25): SEQ ID NO: 6178; WAN0249AQ_at; Start 83; Stop 107
agtggcttttaagtgcaaaaacaga

SEQ ID NO: 15983 - DNA, 25 bp, Artificial
  probe
  misc_feature (1)..(25): SEQ ID NO: 6178; WAN0249AQ_at; Start 159; Stop 183
tgtaaactataaaatactatctagg

SEQ ID NO: 15984 - DNA, 25 bp, Artificial
  probe
  misc_feature (1)..(25): SEQ ID NO: 6178; WAN0249AQ_at; Start 142; Stop 166
ctcaaatagttgtacattgtaaact

SEQ ID NO: 15985 - DNA, 25 bp, Artificial
  probe
  misc_feature (1)..(25): SEQ ID NO: 6178; WAN0249AQ_at; Start 39; Stop 63
gcaagaaaattgtcgttagtaatcg

SEQ ID NO: 15986 - DNA, 25 bp, Artificial
  probe
  misc_feature (1)..(25): SEQ ID NO: 6178; WAN0249AQ_at; Start 90; Stop 114
tttaagtgcaaaaacagaatatatt

SEQ ID NO: 15987 - DNA, 25 bp, Artificial
  probe
  misc_feature (1)..(25): SEQ ID NO: 6178; WAN0249AQ_at; Start 65; Stop 89
aaaaattagaataatataagtggct

SEQ ID NO: 15988 - DNA, 25 bp, Artificial
  probe
  misc_feature (1)..(25): SEQ ID NO: 6178; WAN0249AQ_at; Start 104; Stop 128
cagaatatattaattgttcagaaaa

SEQ ID NO: 15989 - DNA, 25 bp, Artificial
  probe
  misc_feature (1)..(25): SEQ ID NO: 6178; WAN0249AQ_at; Start 84; Stop 108
gtggcttttaagtgcaaaaacagaa

SEQ ID NO: 15990 - DNA, 25 bp, Artificial
  probe
  misc_feature (1)..(25): SEQ ID NO: 6178; WAN0249AQ_at; Start 140; Stop 164
gcctcaaatagttgtacattgtaaa

SEQ ID NO: 15991 - DNA, 25 bp, Artificial
  probe
  misc_feature (1)..(25): SEQ ID NO: 6178; WAN0249AQ_at; Start 118; Stop 142
tgttcagaaaatattgattaatgcc

SEQ ID NO: 15992 - DNA, 25 bp, Artificial
  probe
  misc_feature (1)..(25): SEQ ID NO: 6178; WAN0249AQ_at; Start 77; Stop 101
aatataagtggcttttaagtgcaaa

SEQ ID NO: 15993 - DNA, 25 bp, Artificial
  probe
  misc_feature (1)..(25): SEQ ID NO: 6178; WAN0249AQ_at; Start 95; Stop 119
gtgcaaaaacagaatatattaattg

SEQ ID NO: 15994 - DNA, 25 bp, Artificial
  probe
  misc_feature (1)..(25): SEQ ID NO: 6178; WAN0249AQ_at; Start 76; Stop 100
taatataagtggcttttaagtgcaa

SEQ ID NO: 15995 - DNA, 25 bp, Artificial
  probe
  misc_feature (1)..(25): SEQ ID NO: 6178; WAN0249AQ_at; Start 29; Stop 53
aaaaattagagcaagaaaattgtcg

SEQ ID NO: 15996 - DNA, 25 bp, Artificial
  probe
  misc_feature (1)..(25): SEQ ID NO: 6178; WAN0249AQ_at; Start 132; Stop 156
tgattaatgcctcaaatagttgtac

SEQ ID NO: 15997 - DNA, 25 bp, Artificial
  probe
  misc_feature (1)..(25): SEQ ID NO: 6178; WAN0249AQ_at; Start 161; Stop 185
taaactataaaatactatctaggag

SEQ ID NO: 15998 - DNA, 25 bp, Artificial
  probe
  misc_feature (1)..(25): SEQ ID NO: 6178; WAN0249AQ_at; Start 40; Stop 64
caagaaaattgtcgttagtaatcgg

SEQ ID NO: 15999 - DNA, 25 bp, Artificial
  probe
  misc_feature (1)..(25): SEQ ID NO: 6178; WAN0249AQ_at; Start 120; Stop 144
ttcagaaaatattgattaatgcctc

SEQ ID NO: 16000 - DNA, 25 bp, Artificial
  probe
  misc_feature (1)..(25): SEQ ID NO: 6178; WAN0249AQ_at; Start 122; Stop 146
cagaaaatattgattaatgcctcaa

SEQ ID NO: 16001 - DNA, 25 bp, Artificial
  probe
  misc_feature (1)..(25): SEQ ID NO: 6178; WAN0249AQ_at; Start 136; Stop 160
taatgcctcaaatagttgtacattg

SEQ ID NO: 16002 - DNA, 25 bp, Artificial
  probe
  misc_feature (1)..(25): SEQ ID NO: 6178; WAN0249AQ_at; Start 152; Stop 176
tgtacattgtaaactataaaatact

SEQ ID NO: 16003 - DNA, 25 bp, Artificial
  probe
  misc_feature (1)..(25): SEQ ID NO: 6178; WAN0249AQ_at; Start 79; Stop 103
tataagtggcttttaagtgcaaaaa

SEQ ID NO: 16004 - DNA, 25 bp, Artificial
  probe
  misc_feature (1)..(25): SEQ ID NO: 6178; WAN0249AQ_at; Start 87; Stop 111
gcttttaagtgcaaaaacagaatat

SEQ ID NO: 16005 - DNA, 25 bp, Artificial
  probe
  misc_feature (1)..(25): SEQ ID NO: 6189; WAN0249AR_at; Start 47; Stop 71
tagatctcgaatgaaagaatattct

SEQ ID NO: 16006 - DNA, 25 bp, Artificial
  probe
  misc_feature (1)..(25): SEQ ID NO: 6189; WAN0249AR_at; Start 5; Stop 29
ccaaaagcagtcactaatttctcga

SEQ ID NO: 16007 - DNA, 25 bp, Artificial
  probe
  misc_feature (1)..(25): SEQ ID NO: 6189; WAN0249AR_at; Start 4; Stop 28
gccaaaagcagtcactaatttctcg

SEQ ID NO: 16008 - DNA, 25 bp, Artificial
  probe
  misc_feature (1)..(25): SEQ ID NO: 6189; WAN0249AR_at; Start 49; Stop 73
gatctcgaatgaaagaatattctta

SEQ ID NO: 16009 - DNA, 25 bp, Artificial
  probe
  misc_feature (1)..(25): SEQ ID NO: 6189; WAN0249AR_at; Start 41; Stop 65
aagtgatagatctcgaatgaaagaa

SEQ ID NO: 16010 - DNA, 25 bp, Artificial
  probe
  misc_feature (1)..(25): SEQ ID NO: 6189; WAN0249AR_at; Start 44; Stop 68
tgatagatctcgaatgaaagaatat

SEQ ID NO: 16011 - DNA, 25 bp, Artificial
  probe
  misc_feature (1)..(25): SEQ ID NO: 6189; WAN0249AR_at; Start 42; Stop 66
agtgatagatctcgaatgaaagaat

SEQ ID NO: 16012 - DNA, 25 bp, Artificial
  probe
  misc_feature (1)..(25): SEQ ID NO: 6189; WAN0249AR_at; Start 16; Stop 40
cactaatttctcgaaagaagatgat

SEQ ID NO: 16013 - DNA, 25 bp, Artificial
  probe
  misc_feature (1)..(25): SEQ ID NO: 6189; WAN0249AR_at; Start 6; Stop 30
caaaagcagtcactaatttctcgaa

SEQ ID NO: 16014 - DNA, 25 bp, Artificial
  probe
  misc_feature (1)..(25): SEQ ID NO: 6189; WAN0249AR_at; Start 15; Stop 39
tcactaatttctcgaaagaagatga

SEQ ID NO: 16015 - DNA, 25 bp, Artificial
  probe
  misc_feature (1)..(25): SEQ ID NO: 6189; WAN0249AR_at; Start 1; Stop 25
tcagccaaaagcagtcactaatttc

SEQ ID NO: 16016 - DNA, 25 bp, Artificial
  probe
  misc_feature (1)..(25): SEQ ID NO: 6189; WAN0249AR_at; Start 25; Stop 49
ctcgaaagaagatgataagtgatag

SEQ ID NO: 16017 - DNA, 25 bp, Artificial
  probe
  misc_feature (1)..(25): SEQ ID NO: 6189; WAN0249AR_at; Start 35; Stop 59
gatgataagtgatagatctcgaatg

SEQ ID NO: 16018 - DNA, 25 bp, Artificial
  probe
  misc_feature (1)..(25): SEQ ID NO: 6189; WAN0249AR_at; Start 11; Stop 35
gcagtcactaatttctcgaaagaag

SEQ ID NO: 16019 - DNA, 25 bp, Artificial
  probe
  misc_feature (1)..(25): SEQ ID NO: 6189; WAN0249AR_at; Start 37; Stop 61
tgataagtgatagatctcgaatgaa

SEQ ID NO: 16020 - DNA, 25 bp, Artificial
  probe
  misc_feature (1)..(25): SEQ ID NO: 6189; WAN0249AR_at; Start 27; Stop 51
cgaaagaagatgataagtgatagat

SEQ ID NO: 16021 - DNA, 25 bp, Artificial
  probe
  misc_feature (1)..(25): SEQ ID NO: 6189; WAN0249AR_at; Start 12; Stop 36
cagtcactaatttctcgaaagaaga

SEQ ID NO: 16022 - DNA, 25 bp, Artificial
  probe
  misc_feature (1)..(25): SEQ ID NO: 6189; WAN0249AR_at; Start 7; Stop 31
aaaagcagtcactaatttctcgaaa

SEQ ID NO: 16023 - DNA, 25 bp, Artificial
  probe
  misc_feature (1)..(25): SEQ ID NO: 6189; WAN0249AR_at; Start 40; Stop 64
taagtgatagatctcgaatgaaaga

SEQ ID NO: 16024 - DNA, 25 bp, Artificial
  probe
  misc_feature (1)..(25): SEQ ID NO: 6189; WAN0249AR_at; Start 14; Stop 38
gtcactaatttctcgaaagaagatg

SEQ ID NO: 16025 - DNA, 25 bp, Artificial
  probe
  misc_feature (1)..(25): SEQ ID NO: 6189; WAN0249AR_at; Start 45; Stop 69
gatagatctcgaatgaaagaatatt

SEQ ID NO: 16026 - DNA, 25 bp, Artificial
  probe
  misc_feature (1)..(25): SEQ ID NO: 6189; WAN0249AR_at; Start 19; Stop 43
taatttctcgaaagaagatgataag

SEQ ID NO: 16027 - DNA, 25 bp, Artificial
  probe
  misc_feature (1)..(25): SEQ ID NO: 6189; WAN0249AR_at; Start 2; Stop 26
cagccaaaagcagtcactaatttct

SEQ ID NO: 16028 - DNA, 25 bp, Artificial
  probe
  misc_feature (1)..(25): SEQ ID NO: 6189; WAN0249AR_at; Start 38; Stop 62
gataagtgatagatctcgaatgaaa

SEQ ID NO: 16029 - DNA, 25 bp, Artificial
  probe
  misc_feature (1)..(25): SEQ ID NO: 6189; WAN0249AR_at; Start 9; Stop 33
aagcagtcactaatttctcgaaaga

SEQ ID NO: 16030 - DNA, 25 bp, Artificial
  probe
  misc_feature (1)..(25): SEQ ID NO: 6189; WAN0249AR_at; Start 33; Stop 57
aagatgataagtgatagatctcgaa

SEQ ID NO: 16031 - DNA, 25 bp, Artificial
  probe
  misc_feature (1)..(25): SEQ ID NO: 6189; WAN0249AR_at; Start 28; Stop 52
gaaagaagatgataagtgatagatc

SEQ ID NO: 16032 - DNA, 25 bp, Artificial
  probe
  misc_feature (1)..(25): SEQ ID NO: 6189; WAN0249AR_at; Start 22; Stop 46
tttctcgaaagaagatgataagtga

SEQ ID NO: 16033 - DNA, 25 bp, Artificial
  probe
  misc_feature (1)..(25): SEQ ID NO: 6189; WAN0249AR_at; Start 17; Stop 41
actaatttctcgaaagaagatgata

SEQ ID NO: 16034 - DNA, 25 bp, Artificial
  probe
  misc_feature (1)..(25): SEQ ID NO: 6189; WAN0249AR_at; Start 8; Stop 32
aaagcagtcactaatttctcgaaag

SEQ ID NO: 16035 - DNA, 25 bp, Artificial
  probe
  misc_feature (1)..(25): SEQ ID NO: 6189; WAN0249AR_at; Start 23; Stop 47
ttctcgaaagaagatgataagtgat

SEQ ID NO: 16036 - DNA, 25 bp, Artificial
  probe
  misc_feature (1)..(25): SEQ ID NO: 6189; WAN0249AR_at; Start 32; Stop 56
gaagatgataagtgatagatctcga

SEQ ID NO: 16037 - DNA, 25 bp, Artificial
  probe
  misc_feature (1)..(25): SEQ ID NO: 6189; WAN0249AR_at; Start 24; Stop 48
tctcgaaagaagatgataagtgata

SEQ ID NO: 16038 - DNA, 25 bp, Artificial
  probe
  misc_feature (1)..(25): SEQ ID NO: 6189; WAN0249AR_at; Start 10; Stop 34
agcagtcactaatttctcgaaagaa

SEQ ID NO: 16039 - DNA, 25 bp, Artificial
  probe
  misc_feature (1)..(25): SEQ ID NO: 6084; WAN0249AS_at; Start 1; Stop 25
ccctattaggtggctataattgatt

SEQ ID NO: 16040 - DNA, 25 bp, Artificial
  probe
  misc_feature (1)..(25): SEQ ID NO: 6084; WAN0249AS_at; Start 12; Stop 36
ggctataattgatttagactttcta

SEQ ID NO: 16041 - DNA, 25 bp, Artificial
  probe
  misc_feature (1)..(25): SEQ ID NO: 6084; WAN0249AS_at; Start 4; Stop 28
tattaggtggctataattgatttag

SEQ ID NO: 16042 - DNA, 25 bp, Artificial
  probe
  misc_feature (1)..(25): SEQ ID NO: 6084; WAN0249AS_at; Start 6; Stop 30
ttaggtggctataattgatttagac

SEQ ID NO: 16043 - DNA, 25 bp, Artificial
  probe
  misc_feature (1)..(25): SEQ ID NO: 6084; WAN0249AS_at; Start 11; Stop 35
tggctataattgatttagactttct

SEQ ID NO: 16044 - DNA, 25 bp, Artificial
  probe
  misc_feature (1)..(25): SEQ ID NO: 6084; WAN0249AS_at; Start 10; Stop 34
gtggctataattgatttagactttc

SEQ ID NO: 16045 - DNA, 25 bp, Artificial
  probe
  misc_feature (1)..(25): SEQ ID NO: 6084; WAN0249AS_at; Start 5; Stop 29
attaggtggctataattgatttaga

SEQ ID NO: 16046 - DNA, 25 bp, Artificial
  probe
  misc_feature (1)..(25): SEQ ID NO: 6084; WAN0249AS_at; Start 13; Stop 37
gctataattgatttagactttctaa

SEQ ID NO: 16047 - DNA, 25 bp, Artificial
  probe
  misc_feature (1)..(25): SEQ ID NO: 6084; WAN0249AS_at; Start 3; Stop 27
ctattaggtggctataattgattta

SEQ ID NO: 16048 - DNA, 25 bp, Artificial
  probe
  misc_feature (1)..(25): SEQ ID NO: 6084; WAN0249AS_at; Start 2; Stop 26
cctattaggtggctataattgattt

SEQ ID NO: 16049 - DNA, 25 bp, Artificial
  probe
  misc_feature (1)..(25): SEQ ID NO: 6084; WAN0249AS_at; Start 7; Stop 31
taggtggctataattgatttagact

SEQ ID NO: 16050 - DNA, 25 bp, Artificial
  probe
  misc_feature (1)..(25): SEQ ID NO: 6084; WAN0249AS_at; Start 9; Stop 33
ggtggctataattgatttagacttt

SEQ ID NO: 16051 - DNA, 25 bp, Artificial
  probe
  misc_feature (1)..(25): SEQ ID NO: 6084; WAN0249AS_at; Start 8; Stop 32
aggtggctataattgatttagactt

SEQ ID NO: 16052 - DNA, 25 bp, Artificial
  probe
  misc_feature (1)..(25): SEQ ID NO: 6084; WAN0249AS_at; Start 14; Stop 38
ctataattgatttagactttctaaa

SEQ ID NO: 16053 - DNA, 25 bp, Artificial
  probe
  misc_feature (1)..(25): SEQ ID NO: 6084; WAN0249AS_at; Start 15; Stop 39
tataattgatttagactttctaaaa

SEQ ID NO: 16054 - DNA, 25 bp, Artificial
  probe
  misc_feature (1)..(25): SEQ ID NO: 6050; WAN0249AT_at; Start 1; Stop 25
atgagattgttggaaatcttgataa

SEQ ID NO: 16055 - DNA, 25 bp, Artificial
  probe
  misc_feature (1)..(25): SEQ ID NO: 6050; WAN0249AT_at; Start 37; Stop 61
gatttccatacagactcacagagtt

SEQ ID NO: 16056 - DNA, 25 bp, Artificial
  probe
  misc_feature (1)..(25): SEQ ID NO: 6050; WAN0249AT_at; Start 43; Stop 67
catacagactcacagagttagttag

SEQ ID NO: 16057 - DNA, 25 bp, Artificial
  probe
  misc_feature (1)..(25): SEQ ID NO: 6050; WAN0249AT_at; Start 28; Stop 52
ttagcattggatttccatacagact

SEQ ID NO: 16058 - DNA, 25 bp, Artificial
  probe
  misc_feature (1)..(25): SEQ ID NO: 6050; WAN0249AT_at; Start 25; Stop 49
aatttagcattggatttccatacag

SEQ ID NO: 16059 - DNA, 25 bp, Artificial
  probe
  misc_feature (1)..(25): SEQ ID NO: 6050; WAN0249AT_at; Start 31; Stop 55
gcattggatttccatacagactcac

SEQ ID NO: 16060 - DNA, 25 bp, Artificial
  probe
  misc_feature (1)..(25): SEQ ID NO: 6050; WAN0249AT_at; Start 14; Stop 38
aaatcttgataaatttagcattgga

SEQ ID NO: 16061 - DNA, 25 bp, Artificial
  probe
  misc_feature (1)..(25): SEQ ID NO: 6050; WAN0249AT_at; Start 40; Stop 64
ttccatacagactcacagagttagt

SEQ ID NO: 16062 - DNA, 25 bp, Artificial
  probe
  misc_feature (1)..(25): SEQ ID NO: 6050; WAN0249AT_at; Start 24; Stop 48
aaatttagcattggatttccataca

SEQ ID NO: 16063 - DNA, 25 bp, Artificial
  probe
  misc_feature (1)..(25): SEQ ID NO: 6050; WAN0249AT_at; Start 19; Stop 43
ttgataaatttagcattggatttcc

SEQ ID NO: 16064 - DNA, 25 bp, Artificial
  probe
  misc_feature (1)..(25): SEQ ID NO: 6050; WAN0249AT_at; Start 41; Stop 65
tccatacagactcacagagttagtt

SEQ ID NO: 16065 - DNA, 25 bp, Artificial
  probe
  misc_feature (1)..(25): SEQ ID NO: 6050; WAN0249AT_at; Start 20; Stop 44
tgataaatttagcattggatttcca

SEQ ID NO: 16066 - DNA, 25 bp, Artificial
  probe
  misc_feature (1)..(25): SEQ ID NO: 6050; WAN0249AT_at; Start 33; Stop 57
attggatttccatacagactcacag

SEQ ID NO: 16067 - DNA, 25 bp, Artificial
  probe
  misc_feature (1)..(25): SEQ ID NO: 6050; WAN0249AT_at; Start 23; Stop 47
taaatttagcattggatttccatac

SEQ ID NO: 16068 - DNA, 25 bp, Artificial
  probe
  misc_feature (1)..(25): SEQ ID NO: 6050; WAN0249AT_at; Start 26; Stop 50
atttagcattggatttccatacaga

SEQ ID NO: 16069 - DNA, 25 bp, Artificial
  probe
  misc_feature (1)..(25): SEQ ID NO: 6050; WAN0249AT_at; Start 22; Stop 46
ataaatttagcattggatttccata

SEQ ID NO: 16070 - DNA, 25 bp, Artificial
  probe
  misc_feature (1)..(25): SEQ ID NO: 6050; WAN0249AT_at; Start 34; Stop 58
ttggatttccatacagactcacaga

SEQ ID NO: 16071 - DNA, 25 bp, Artificial
  probe
  misc_feature (1)..(25): SEQ ID NO: 6050; WAN0249AT_at; Start 35; Stop 59
tggatttccatacagactcacagag

SEQ ID NO: 16072 - DNA, 25 bp, Artificial
  probe
  misc_feature (1)..(25): SEQ ID NO: 6050; WAN0249AT_at; Start 2; Stop 26
tgagattgttggaaatcttgataaa

SEQ ID NO: 16073 - DNA, 25 bp, Artificial
  probe
  misc_feature (1)..(25): SEQ ID NO: 6050; WAN0249AT_at; Start 39; Stop 63
tttccatacagactcacagagttag

SEQ ID NO: 16074 - DNA, 25 bp, Artificial
  probe
  misc_feature (1)..(25): SEQ ID NO: 6050; WAN0249AT_at; Start 21; Stop 45
gataaatttagcattggatttccat

SEQ ID NO: 16075 - DNA, 25 bp, Artificial
  probe
  misc_feature (1)..(25): SEQ ID NO: 6050; WAN0249AT_at; Start 42; Stop 66
ccatacagactcacagagttagtta

SEQ ID NO: 16076 - DNA, 25 bp, Artificial
  probe
  misc_feature (1)..(25): SEQ ID NO: 6050; WAN0249AT_at; Start 32; Stop 56
cattggatttccatacagactcaca

SEQ ID NO: 16077 - DNA, 25 bp, Artificial
  probe
  misc_feature (1)..(25): SEQ ID NO: 6050; WAN0249AT_at; Start 29; Stop 53
tagcattggatttccatacagactc

SEQ ID NO: 16078 - DNA, 25 bp, Artificial
  probe
  misc_feature (1)..(25): SEQ ID NO: 6050; WAN0249AT_at; Start 17; Stop 41
tcttgataaatttagcattggattt

SEQ ID NO: 16079 - DNA, 25 bp, Artificial
  probe
  misc_feature (1)..(25): SEQ ID NO: 6050; WAN0249AT_at; Start 27; Stop 51
tttagcattggatttccatacagac

SEQ ID NO: 16080 - DNA, 25 bp, Artificial
  probe
  misc_feature (1)..(25): SEQ ID NO: 6050; WAN0249AT_at; Start 36; Stop 60
ggatttccatacagactcacagagt

SEQ ID NO: 16081 - DNA, 25 bp, Artificial
  probe
  misc_feature (1)..(25): SEQ ID NO: 6050; WAN0249AT_at; Start 15; Stop 39
aatcttgataaatttagcattggat

SEQ ID NO: 16082 - DNA, 25 bp, Artificial
  probe
  misc_feature (1)..(25): SEQ ID NO: 6050; WAN0249AT_at; Start 16; Stop 40
atcttgataaatttagcattggatt

SEQ ID NO: 16083 - DNA, 25 bp, Artificial
  probe
  misc_feature (1)..(25): SEQ ID NO: 6050; WAN0249AT_at; Start 38; Stop 62
atttccatacagactcacagagtta

SEQ ID NO: 16084 - DNA, 25 bp, Artificial
  probe
  misc_feature (1)..(25): SEQ ID NO: 6050; WAN0249AT_at; Start 30; Stop 54
agcattggatttccatacagactca

SEQ ID NO: 16085 - DNA, 25 bp, Artificial
  probe
  misc_feature (1)..(25): SEQ ID NO: 6050; WAN0249AT_at; Start 18; Stop 42
cttgataaatttagcattggatttc

SEQ ID NO: 16086 - DNA, 25 bp, Artificial
  probe
  misc_feature (1)..(25): SEQ ID NO: 6034; WAN0249AU_at; Start 315; Stop 339
gacaaactagataaaggagttaatc

SEQ ID NO: 16087 - DNA, 25 bp, Artificial
  probe
  misc_feature (1)..(25): SEQ ID NO: 6034; WAN0249AU_at; Start 176; Stop 200
tgaatccactccgtcttgattagcg

SEQ ID NO: 16088 - DNA, 25 bp, Artificial
  probe
  misc_feature (1)..(25): SEQ ID NO: 6034; WAN0249AU_at; Start 301; Stop 325
gactcaaacgatgcgacaaactaga

SEQ ID NO: 16089 - DNA, 25 bp, Artificial
  probe
  misc_feature (1)..(25): SEQ ID NO: 6034; WAN0249AU_at; Start 182; Stop 206
cactccgtcttgattagcgtgcctg

SEQ ID NO: 16090 - DNA, 25 bp, Artificial
  probe
  misc_feature (1)..(25): SEQ ID NO: 6034; WAN0249AU_at; Start 243; Stop 267
caactggcacaagacgtgtgtgaga

SEQ ID NO: 16091 - DNA, 25 bp, Artificial
  probe
  misc_feature (1)..(25): SEQ ID NO: 6034; WAN0249AU_at; Start 221; Stop 245
gagagtatttccctgtgaagggcaa

SEQ ID NO: 16092 - DNA, 25 bp, Artificial
  probe
  misc_feature (1)..(25): SEQ ID NO: 6034; WAN0249AU_at; Start 196; Stop 220
tagcgtgcctgtgtaagtagggact

SEQ ID NO: 16093 - DNA, 25 bp, Artificial
  probe
  misc_feature (1)..(25): SEQ ID NO: 6034; WAN0249AU_at; Start 236; Stop 260
tgaagggcaactggcacaagacgtg

SEQ ID NO: 16094 - DNA, 25 bp, Artificial
  probe
  misc_feature (1)..(25): SEQ ID NO: 6034; WAN0249AU_at; Start 232; Stop 256
cctgtgaagggcaactggcacaaga

SEQ ID NO: 16095 - DNA, 25 bp, Artificial
  probe
  misc_feature (1)..(25): SEQ ID NO: 6034; WAN0249AU_at; Start 279; Stop 303
gacacggagtttatcgtttccagac

SEQ ID NO: 16096 - DNA, 25 bp, Artificial
  probe
  misc_feature (1)..(25): SEQ ID NO: 6034; WAN0249AU_at; Start 143; Stop 167
tatctataataaagctacctgttct

SEQ ID NO: 16097 - DNA, 25 bp, Artificial
  probe
  misc_feature (1)..(25): SEQ ID NO: 6034; WAN0249AU_at; Start 165; Stop 189
tctttgaaaattgaatccactccgt

SEQ ID NO: 16098 - DNA, 25 bp, Artificial
  probe
  misc_feature (1)..(25): SEQ ID NO: 6034; WAN0249AU_at; Start 217; Stop 241
gactgagagtatttccctgtgaagg

SEQ ID NO: 16099 - DNA, 25 bp, Artificial
  probe
  misc_feature (1)..(25): SEQ ID NO: 6034; WAN0249AU_at; Start 21; Stop 45
ctactgtatttttagacgaagaacg

SEQ ID NO: 16100 - DNA, 25 bp, Artificial
  probe
  misc_feature (1)..(25): SEQ ID NO: 6034; WAN0249AU_at; Start 190; Stop 214
cttgattagcgtgcctgtgtaagta

SEQ ID NO: 16101 - DNA, 25 bp, Artificial
  probe
  misc_feature (1)..(25): SEQ ID NO: 6034; WAN0249AU_at; Start 15; Stop 39
tattccctactgtatttttagacga

SEQ ID NO: 16102 - DNA, 25 bp, Artificial
  probe
  misc_feature (1)..(25): SEQ ID NO: 6034; WAN0249AU_at; Start 294; Stop 318
gtttccagactcaaacgatgcgaca

SEQ ID NO: 16103 - DNA, 25 bp, Artificial
  probe
  misc_feature (1)..(25): SEQ ID NO: 6034; WAN0249AU_at; Start 186; Stop 210
ccgtcttgattagcgtgcctgtgta

SEQ ID NO: 16104 - DNA, 25 bp, Artificial
  probe
  misc_feature (1)..(25): SEQ ID NO: 6034; WAN0249AU_at; Start 203; Stop 227
cctgtgtaagtagggactgagagta

SEQ ID NO: 16105 - DNA, 25 bp, Artificial
  probe
  misc_feature (1)..(25): SEQ ID NO: 6034; WAN0249AU_at; Start 264; Stop 288
gagaattttctaacagacacggagt

SEQ ID NO: 16106 - DNA, 25 bp, Artificial
  probe
  misc_feature (1)..(25): SEQ ID NO: 6034; WAN0249AU_at; Start 85; Stop 109
tagtatgaatttagctctacagaaa

SEQ ID NO: 16107 - DNA, 25 bp, Artificial
  probe
  misc_feature (1)..(25): SEQ ID NO: 6034; WAN0249AU_at; Start 133; Stop 157
caactactcttatctataataaagc

SEQ ID NO: 16108 - DNA, 25 bp, Artificial
  probe
  misc_feature (1)..(25): SEQ ID NO: 6034; WAN0249AU_at; Start 252; Stop 276
caagacgtgtgtgagaattttctaa

SEQ ID NO: 16109 - DNA, 25 bp, Artificial
  probe
  misc_feature (1)..(25): SEQ ID NO: 6034; WAN0249AU_at; Start 98; Stop 122
gctctacagaaaaataaaaaatgtg

SEQ ID NO: 16110 - DNA, 25 bp, Artificial
  probe
  misc_feature (1)..(25): SEQ ID NO: 6034; WAN0249AU_at; Start 209; Stop 233
taagtagggactgagagtatttccc

SEQ ID NO: 16111 - DNA, 25 bp, Artificial
  probe
  misc_feature (1)..(25): SEQ ID NO: 6034; WAN0249AU_at; Start 2; Stop 26
taaaagaatgaaatattccctactg

SEQ ID NO: 16112 - DNA, 25 bp, Artificial
  probe
  misc_feature (1)..(25): SEQ ID NO: 6034; WAN0249AU_at; Start 226; Stop 250
tatttccctgtgaagggcaactggc

SEQ ID NO: 16113 - DNA, 25 bp, Artificial
  probe
  misc_feature (1)..(25): SEQ ID NO: 6034; WAN0249AU_at; Start 270; Stop 294
tttctaacagacacggagtttatcg

SEQ ID NO: 16114 - DNA, 25 bp, Artificial
  probe
  misc_feature (1)..(25): SEQ ID NO: 6034; WAN0249AU_at; Start 155; Stop 179
agctacctgttctttgaaaattgaa

SEQ ID NO: 16115 - DNA, 25 bp, Artificial
  probe
  misc_feature (1)..(25): SEQ ID NO: 6034; WAN0249AU_at; Start 71; Stop 95
tcaaactctttgattagtatgaatt

SEQ ID NO: 16116 - DNA, 25 bp, Artificial
  probe
  misc_feature (1)..(25): SEQ ID NO: 6034; WAN0249AU_at; Start 170; Stop 194
gaaaattgaatccactccgtcttga

SEQ ID NO: 16117 - DNA, 25 bp, Artificial
  probe
  misc_feature (1)..(25): SEQ ID NO: 6034; WAN0249AU_at; Start 309; Stop 333
cgatgcgacaaactagataaaggag

SEQ ID NO: 16118 - DNA, 25 bp, Artificial
  probe
  misc_feature (1)..(25): SEQ ID NO: 6034; WAN0249AU_at; Start 38; Stop 62
gaagaacgttagttaataatactca

SEQ ID NO: 16119 - DNA, 25 bp, Artificial
  probe
  misc_feature (1)..(25): SEQ ID NO: 6034; WAN0249AU_at; Start 283; Stop 307
cggagtttatcgtttccagactcaa

SEQ ID NO: 16120 - DNA, 25 bp, Artificial
  probe
  misc_feature (1)..(25): SEQ ID NO: 6098; WAN0249AV_at; Start 157; Stop 181
ggagagaaatataatgatttttgaa

SEQ ID NO: 16121 - DNA, 25 bp, Artificial
  probe
  misc_feature (1)..(25): SEQ ID NO: 6098; WAN0249AV_at; Start 189; Stop 213
tcaaaaaatagcgaattgtagaaaa

SEQ ID NO: 16122 - DNA, 25 bp, Artificial
  probe
  misc_feature (1)..(25): SEQ ID NO: 6098; WAN0249AV_at; Start 113; Stop 137
taataaaaatctatgggtaatgttc

SEQ ID NO: 16123 - DNA, 25 bp, Artificial
  probe
  misc_feature (1)..(25): SEQ ID NO: 6098; WAN0249AV_at; Start 1; Stop 25
ctgacaccacgagtataattattag

SEQ ID NO: 16124 - DNA, 25 bp, Artificial
  probe
  misc_feature (1)..(25): SEQ ID NO: 6098; WAN0249AV_at; Start 13; Stop 37
gtataattattagaaacgtggaatc

SEQ ID NO: 16125 - DNA, 25 bp, Artificial
  probe
  misc_feature (1)..(25): SEQ ID NO: 6098; WAN0249AV_at; Start 3; Stop 27
gacaccacgagtataattattagaa

SEQ ID NO: 16126 - DNA, 25 bp, Artificial
  probe
  misc_feature (1)..(25): SEQ ID NO: 6098; WAN0249AV_at; Start 5; Stop 29
caccacgagtataattattagaaac

SEQ ID NO: 16127 - DNA, 25 bp, Artificial
  probe
  misc_feature (1)..(25): SEQ ID NO: 6098; WAN0249AV_at; Start 88; Stop 112
cttatgtaataaaacattgaggaaa

SEQ ID NO: 16128 - DNA, 25 bp, Artificial
  probe
  misc_feature (1)..(25): SEQ ID NO: 6098; WAN0249AV_at; Start 14; Stop 38
tataattattagaaacgtggaatct

SEQ ID NO: 16129 - DNA, 25 bp, Artificial
  probe
  misc_feature (1)..(25): SEQ ID NO: 6098; WAN0249AV_at; Start 197; Stop 221
tagcgaattgtagaaaacgcttaac

SEQ ID NO: 16130 - DNA, 25 bp, Artificial
  probe
  misc_feature (1)..(25): SEQ ID NO: 6098; WAN0249AV_at; Start 86; Stop 110
aacttatgtaataaaacattgagga

SEQ ID NO: 16131 - DNA, 25 bp, Artificial
  probe
  misc_feature (1)..(25): SEQ ID NO: 6098; WAN0249AV_at; Start 150; Stop 174
taggttaggagagaaatataatgat

SEQ ID NO: 16132 - DNA, 25 bp, Artificial
  probe
  misc_feature (1)..(25): SEQ ID NO: 6098; WAN0249AV_at; Start 186; Stop 210
gattcaaaaaatagcgaattgtaga

SEQ ID NO: 16133 - DNA, 25 bp, Artificial
  probe
  misc_feature (1)..(25): SEQ ID NO: 6098; WAN0249AV_at; Start 7; Stop 31
ccacgagtataattattagaaacgt

SEQ ID NO: 16134 - DNA, 25 bp, Artificial
  probe
  misc_feature (1)..(25): SEQ ID NO: 6098; WAN0249AV_at; Start 124; Stop 148
tatgggtaatgttctgaaagtactt

SEQ ID NO: 16135 - DNA, 25 bp, Artificial
  probe
  misc_feature (1)..(25): SEQ ID NO: 6098; WAN0249AV_at; Start 120; Stop 144
aatctatgggtaatgttctgaaagt

SEQ ID NO: 16136 - DNA, 25 bp, Artificial
  probe
  misc_feature (1)..(25): SEQ ID NO: 6098; WAN0249AV_at; Start 92; Stop 116
tgtaataaaacattgaggaaataat

SEQ ID NO: 16137 - DNA, 25 bp, Artificial
  probe
  misc_feature (1)..(25): SEQ ID NO: 6098; WAN0249AV_at; Start 117; Stop 141
aaaaatctatgggtaatgttctgaa

SEQ ID NO: 16138 - DNA, 25 bp, Artificial
  probe
  misc_feature (1)..(25): SEQ ID NO: 6098; WAN0249AV_at; Start 10; Stop 34
cgagtataattattagaaacgtgga

SEQ ID NO: 16139 - DNA, 25 bp, Artificial
  probe
  misc_feature (1)..(25): SEQ ID NO: 6098; WAN0249AV_at; Start 179; Stop 203
gaaaattgattcaaaaaatagcgaa

SEQ ID NO: 16140 - DNA, 25 bp, Artificial
  probe
  misc_feature (1)..(25): SEQ ID NO: 6098; WAN0249AV_at; Start 148; Stop 172
tttaggttaggagagaaatataatg

SEQ ID NO: 16141 - DNA, 25 bp, Artificial
  probe
  misc_feature (1)..(25): SEQ ID NO: 6098; WAN0249AV_at; Start 193; Stop 217
aaaatagcgaattgtagaaaacgct

SEQ ID NO: 16142 - DNA, 25 bp, Artificial
  probe
  misc_feature (1)..(25): SEQ ID NO: 6098; WAN0249AV_at; Start 122; Stop 146
tctatgggtaatgttctgaaagtac

SEQ ID NO: 16143 - DNA, 25 bp, Artificial
  probe
  misc_feature (1)..(25): SEQ ID NO: 6098; WAN0249AV_at; Start 123; Stop 147
ctatgggtaatgttctgaaagtact

SEQ ID NO: 16144 - DNA, 25 bp, Artificial
  probe
  misc_feature (1)..(25): SEQ ID NO: 6098; WAN0249AV_at; Start 105; Stop 129
tgaggaaataataaaaatctatggg

SEQ ID NO: 16145 - DNA, 25 bp, Artificial
  probe
  misc_feature (1)..(25): SEQ ID NO: 6098; WAN0249AV_at; Start 199; Stop 223
gcgaattgtagaaaacgcttaacaa

SEQ ID NO: 16146 - DNA, 25 bp, Artificial
  probe
  misc_feature (1)..(25): SEQ ID NO: 6098; WAN0249AV_at; Start 177; Stop 201
ttgaaaattgattcaaaaaatagcg

SEQ ID NO: 16147 - DNA, 25 bp, Artificial
  probe
  misc_feature (1)..(25): SEQ ID NO: 6098; WAN0249AV_at; Start 115; Stop 139
ataaaaatctatgggtaatgttctg

SEQ ID NO: 16148 - DNA, 25 bp, Artificial
  probe
  misc_feature (1)..(25): SEQ ID NO: 6098; WAN0249AV_at; Start 195; Stop 219
aatagcgaattgtagaaaacgctta

SEQ ID NO: 16149 - DNA, 25 bp, Artificial
  probe
  misc_feature (1)..(25): SEQ ID NO: 6098; WAN0249AV_at; Start 205; Stop 229
tgtagaaaacgcttaacaaatggtg

SEQ ID NO: 16150 - DNA, 25 bp, Artificial
  probe
  misc_feature (1)..(25): SEQ ID NO: 6098; WAN0249AV_at; Start 15; Stop 39
ataattattagaaacgtggaatctt

SEQ ID NO: 16151 - DNA, 25 bp, Artificial
  probe
  misc_feature (1)..(25): SEQ ID NO: 6098; WAN0249AV_at; Start 119; Stop 143
aaatctatgggtaatgttctgaaag

SEQ ID NO: 16152 - DNA, 25 bp, Artificial
  probe
  misc_feature (1)..(25): SEQ ID NO: 6098; WAN0249AV_at; Start 125; Stop 149
atgggtaatgttctgaaagtacttt

SEQ ID NO: 16153 - DNA, 25 bp, Artificial
  probe
  misc_feature (1)..(25): SEQ ID NO: 6098; WAN0249AV_at; Start 2; Stop 26
tgacaccacgagtataattattaga

SEQ ID NO: 16154 - DNA, 25 bp, Artificial
  probe
  misc_feature (1)..(25): SEQ ID NO: 6088; WAN0249AW_at; Start 28; Stop 52
aatacttacttaatcacataaataa

SEQ ID NO: 16155 - DNA, 25 bp, Artificial
  probe
  misc_feature (1)..(25): SEQ ID NO: 6088; WAN0249AW_at; Start 39; Stop 63
aatcacataaataattacttaatac

SEQ ID NO: 16156 - DNA, 25 bp, Artificial
  probe
  misc_feature (1)..(25): SEQ ID NO: 6088; WAN0249AW_at; Start 23; Stop 47
actgcaatacttacttaatcacata

SEQ ID NO: 16157 - DNA, 25 bp, Artificial
  probe
  misc_feature (1)..(25): SEQ ID NO: 6088; WAN0249AW_at; Start 30; Stop 54
tacttacttaatcacataaataatt

SEQ ID NO: 16158 - DNA, 25 bp, Artificial
  probe
  misc_feature (1)..(25): SEQ ID NO: 6088; WAN0249AW_at; Start 40; Stop 64
atcacataaataattacttaataca

SEQ ID NO: 16159 - DNA, 25 bp, Artificial
  probe
  misc_feature (1)..(25): SEQ ID NO: 6088; WAN0249AW_at; Start 42; Stop 66
cacataaataattacttaatacaaa

SEQ ID NO: 16160 - DNA, 25 bp, Artificial
  probe
  misc_feature (1)..(25): SEQ ID NO: 6088; WAN0249AW_at; Start 32; Stop 56
cttacttaatcacataaataattac

SEQ ID NO: 16161 - DNA, 25 bp, Artificial
  probe
  misc_feature (1)..(25): SEQ ID NO: 6088; WAN0249AW_at; Start 41; Stop 65
tcacataaataattacttaatacaa

SEQ ID NO: 16162 - DNA, 25 bp, Artificial
  probe
  misc_feature (1)..(25): SEQ ID NO: 6088; WAN0249AW_at; Start 29; Stop 53
atacttacttaatcacataaataat

SEQ ID NO: 16163 - DNA, 25 bp, Artificial
  probe
  misc_feature (1)..(25): SEQ ID NO: 6088; WAN0249AW_at; Start 20; Stop 44
attactgcaatacttacttaatcac

SEQ ID NO: 16164 - DNA, 25 bp, Artificial
  probe
  misc_feature (1)..(25): SEQ ID NO: 6088; WAN0249AW_at; Start 26; Stop 50
gcaatacttacttaatcacataaat

SEQ ID NO: 16165 - DNA, 25 bp, Artificial
  probe
  misc_feature (1)..(25): SEQ ID NO: 6088; WAN0249AW_at; Start 35; Stop 59
acttaatcacataaataattactta

SEQ ID NO: 16166 - DNA, 25 bp, Artificial
  probe
  misc_feature (1)..(25): SEQ ID NO: 6088; WAN0249AW_at; Start 36; Stop 60
cttaatcacataaataattacttaa

SEQ ID NO: 16167 - DNA, 25 bp, Artificial
  probe
  misc_feature (1)..(25): SEQ ID NO: 6088; WAN0249AW_at; Start 22; Stop 46
tactgcaatacttacttaatcacat

SEQ ID NO: 16168 - DNA, 25 bp, Artificial
  probe
  misc_feature (1)..(25): SEQ ID NO: 6088; WAN0249AW_at; Start 13; Stop 37
atttttaattactgcaatacttact

SEQ ID NO: 16169 - DNA, 25 bp, Artificial
  probe
  misc_feature (1)..(25): SEQ ID NO: 6088; WAN0249AW_at; Start 16; Stop 40
tttaattactgcaatacttacttaa

SEQ ID NO: 16170 - DNA, 25 bp, Artificial
  probe
  misc_feature (1)..(25): SEQ ID NO: 6088; WAN0249AW_at; Start 21; Stop 45
ttactgcaatacttacttaatcaca

SEQ ID NO: 16171 - DNA, 25 bp, Artificial
  probe
  misc_feature (1)..(25): SEQ ID NO: 6088; WAN0249AW_at; Start 34; Stop 58
tacttaatcacataaataattactt

SEQ ID NO: 16172 - DNA, 25 bp, Artificial
  probe
  misc_feature (1)..(25): SEQ ID NO: 6088; WAN0249AW_at; Start 15; Stop 39
ttttaattactgcaatacttactta

SEQ ID NO: 16173 - DNA, 25 bp, Artificial
  probe
  misc_feature (1)..(25): SEQ ID NO: 6088; WAN0249AW_at; Start 31; Stop 55
acttacttaatcacataaataatta

SEQ ID NO: 16174 - DNA, 25 bp, Artificial
  probe
  misc_feature (1)..(25): SEQ ID NO: 6088; WAN0249AW_at; Start 24; Stop 48
ctgcaatacttacttaatcacataa

SEQ ID NO: 16175 - DNA, 25 bp, Artificial
  probe
  misc_feature (1)..(25): SEQ ID NO: 6088; WAN0249AW_at; Start 18; Stop 42
taattactgcaatacttacttaatc

SEQ ID NO: 16176 - DNA, 25 bp, Artificial
  probe
  misc_feature (1)..(25): SEQ ID NO: 6088; WAN0249AW_at; Start 44; Stop 68
cataaataattacttaatacaaata

SEQ ID NO: 16177 - DNA, 25 bp, Artificial
  probe
  misc_feature (1)..(25): SEQ ID NO: 6088; WAN0249AW_at; Start 27; Stop 51
caatacttacttaatcacataaata

SEQ ID NO: 16178 - DNA, 25 bp, Artificial
  probe
  misc_feature (1)..(25): SEQ ID NO: 6088; WAN0249AW_at; Start 17; Stop 41
ttaattactgcaatacttacttaat

SEQ ID NO: 16179 - DNA, 25 bp, Artificial
  probe
  misc_feature (1)..(25): SEQ ID NO: 6088; WAN0249AW_at; Start 33; Stop 57
ttacttaatcacataaataattact

SEQ ID NO: 16180 - DNA, 25 bp, Artificial
  probe
  misc_feature (1)..(25): SEQ ID NO: 6088; WAN0249AW_at; Start 25; Stop 49
tgcaatacttacttaatcacataaa

SEQ ID NO: 16181 - DNA, 25 bp, Artificial
  probe
  misc_feature (1)..(25): SEQ ID NO: 6088; WAN0249AW_at; Start 19; Stop 43
aattactgcaatacttacttaatca

SEQ ID NO: 16182 - DNA, 25 bp, Artificial
  probe
  misc_feature (1)..(25): SEQ ID NO: 6005; WAN0249AX_at; Start 10; Stop 34
aaattatcagtgattaagtttgata

SEQ ID NO: 16183 - DNA, 25 bp, Artificial
  probe
  misc_feature (1)..(25): SEQ ID NO: 6005; WAN0249AX_at; Start 1; Stop 25
aatcgtttaaaattatcagtgatta

SEQ ID NO: 16184 - DNA, 25 bp, Artificial
  probe
  misc_feature (1)..(25): SEQ ID NO: 6005; WAN0249AX_at; Start 8; Stop 32
taaaattatcagtgattaagtttga

SEQ ID NO: 16185 - DNA, 25 bp, Artificial
  probe
  misc_feature (1)..(25): SEQ ID NO: 6005; WAN0249AX_at; Start 3; Stop 27
tcgtttaaaattatcagtgattaag

SEQ ID NO: 16186 - DNA, 25 bp, Artificial
  probe
  misc_feature (1)..(25): SEQ ID NO: 6005; WAN0249AX_at; Start 35; Stop 59
atcttttaggagtgtagagatgctg

SEQ ID NO: 16187 - DNA, 25 bp, Artificial
  probe
  misc_feature (1)..(25): SEQ ID NO: 6005; WAN0249AX_at; Start 20; Stop 44
tgattaagtttgataatcttttagg

SEQ ID NO: 16188 - DNA, 25 bp, Artificial
  probe
  misc_feature (1)..(25): SEQ ID NO: 6005; WAN0249AX_at; Start 37; Stop 61
cttttaggagtgtagagatgctggt

SEQ ID NO: 16189 - DNA, 25 bp, Artificial
  probe
  misc_feature (1)..(25): SEQ ID NO: 6005; WAN0249AX_at; Start 7; Stop 31
ttaaaattatcagtgattaagtttg

SEQ ID NO: 16190 - DNA, 25 bp, Artificial
  probe
  misc_feature (1)..(25): SEQ ID NO: 6005; WAN0249AX_at; Start 16; Stop 40
tcagtgattaagtttgataatcttt

SEQ ID NO: 16191 - DNA, 25 bp, Artificial
  probe
  misc_feature (1)..(25): SEQ ID NO: 6005; WAN0249AX_at; Start 14; Stop 38
tatcagtgattaagtttgataatct

SEQ ID NO: 16192 - DNA, 25 bp, Artificial
  probe
  misc_feature (1)..(25): SEQ ID NO: 6005; WAN0249AX_at; Start 11; Stop 35
aattatcagtgattaagtttgataa

SEQ ID NO: 16193 - DNA, 25 bp, Artificial
  probe
  misc_feature (1)..(25): SEQ ID NO: 6005; WAN0249AX_at; Start 39; Stop 63
tttaggagtgtagagatgctggttt

SEQ ID NO: 16194 - DNA, 25 bp, Artificial
  probe
  misc_feature (1)..(25): SEQ ID NO: 6005; WAN0249AX_at; Start 19; Stop 43
gtgattaagtttgataatcttttag

SEQ ID NO: 16195 - DNA, 25 bp, Artificial
  probe
  misc_feature (1)..(25): SEQ ID NO: 6005; WAN0249AX_at; Start 36; Stop 60
tcttttaggagtgtagagatgctgg

SEQ ID NO: 16196 - DNA, 25 bp, Artificial
  probe
  misc_feature (1)..(25): SEQ ID NO: 6005; WAN0249AX_at; Start 13; Stop 37
ttatcagtgattaagtttgataatc

SEQ ID NO: 16197 - DNA, 25 bp, Artificial
  probe
  misc_feature (1)..(25): SEQ ID NO: 6005; WAN0249AX_at; Start 22; Stop 46
attaagtttgataatcttttaggag

SEQ ID NO: 16198 - DNA, 25 bp, Artificial
  probe
  misc_feature (1)..(25): SEQ ID NO: 6005; WAN0249AX_at; Start 21; Stop 45
gattaagtttgataatcttttagga

SEQ ID NO: 16199 - DNA, 25 bp, Artificial
  probe
  misc_feature (1)..(25): SEQ ID NO: 6005; WAN0249AX_at; Start 40; Stop 64
ttaggagtgtagagatgctggttta

SEQ ID NO: 16200 - DNA, 25 bp, Artificial
  probe
  misc_feature (1)..(25): SEQ ID NO: 6005; WAN0249AX_at; Start 9; Stop 33
aaaattatcagtgattaagtttgat

SEQ ID NO: 16201 - DNA, 25 bp, Artificial
  probe
  misc_feature (1)..(25): SEQ ID NO: 6005; WAN0249AX_at; Start 2; Stop 26
atcgtttaaaattatcagtgattaa

SEQ ID NO: 16202 - DNA, 25 bp, Artificial
  probe
  misc_feature (1)..(25): SEQ ID NO: 6005; WAN0249AX_at; Start 4; Stop 28
cgtttaaaattatcagtgattaagt

SEQ ID NO: 16203 - DNA, 25 bp, Artificial
  probe
  misc_feature (1)..(25): SEQ ID NO: 6005; WAN0249AX_at; Start 38; Stop 62
ttttaggagtgtagagatgctggtt

SEQ ID NO: 16204 - DNA, 25 bp, Artificial
  probe
  misc_feature (1)..(25): SEQ ID NO: 6005; WAN0249AX_at; Start 34; Stop 58
aatcttttaggagtgtagagatgct

SEQ ID NO: 16205 - DNA, 25 bp, Artificial
  probe
  misc_feature (1)..(25): SEQ ID NO: 6005; WAN0249AX_at; Start 15; Stop 39
atcagtgattaagtttgataatctt

SEQ ID NO: 16206 - DNA, 25 bp, Artificial
  probe
  misc_feature (1)..(25): SEQ ID NO: 6005; WAN0249AX_at; Start 18; Stop 42
agtgattaagtttgataatctttta

SEQ ID NO: 16207 - DNA, 25 bp, Artificial
  probe
  misc_feature (1)..(25): SEQ ID NO: 6005; WAN0249AX_at; Start 17; Stop 41
cagtgattaagtttgataatctttt

SEQ ID NO: 16208 - DNA, 25 bp, Artificial
  probe
  misc_feature (1)..(25): SEQ ID NO: 6140; WAN0249AY_at; Start 2; Stop 26
taattagacatcaaaaaccgctcag

SEQ ID NO: 16209 - DNA, 25 bp, Artificial
  probe
  misc_feature (1)..(25): SEQ ID NO: 6140; WAN0249AY_at; Start 25; Stop 49
agctgagcggttttagtctattctt

SEQ ID NO: 16210 - DNA, 25 bp, Artificial
  probe
  misc_feature (1)..(25): SEQ ID NO: 6140; WAN0249AY_at; Start 28; Stop 52
tgagcggttttagtctattctttcc

SEQ ID NO: 16211 - DNA, 25 bp, Artificial
  probe
  misc_feature (1)..(25): SEQ ID NO: 6140; WAN0249AY_at; Start 4; Stop 28
attagacatcaaaaaccgctcagct

SEQ ID NO: 16212 - DNA, 25 bp, Artificial
  probe
  misc_feature (1)..(25): SEQ ID NO: 6140; WAN0249AY_at; Start 27; Stop 51
ctgagcggttttagtctattctttc

SEQ ID NO: 16213 - DNA, 25 bp, Artificial
  probe
  misc_feature (1)..(25): SEQ ID NO: 6140; WAN0249AY_at; Start 24; Stop 48
cagctgagcggttttagtctattct

SEQ ID NO: 16214 - DNA, 25 bp, Artificial
  probe
  misc_feature (1)..(25): SEQ ID NO: 6140; WAN0249AY_at; Start 26; Stop 50
gctgagcggttttagtctattcttt

SEQ ID NO: 16215 - DNA, 25 bp, Artificial
  probe
  misc_feature (1)..(25): SEQ ID NO: 6140; WAN0249AY_at; Start 5; Stop 29
ttagacatcaaaaaccgctcagctg

SEQ ID NO: 16216 - DNA, 25 bp, Artificial
  probe
  misc_feature (1)..(25): SEQ ID NO: 6140; WAN0249AY_at; Start 3; Stop 27
aattagacatcaaaaaccgctcagc

SEQ ID NO: 16217 - DNA, 25 bp, Artificial
  probe
  misc_feature (1)..(25): SEQ ID NO: 6140; WAN0249AY_at; Start 1; Stop 25
gtaattagacatcaaaaaccgctca

SEQ ID NO: 16218 - DNA, 25 bp, Artificial
  probe
  misc_feature (1)..(25): SEQ ID NO: 6246; WAN0249AZ_at; Start 11; Stop 35
agcctaaaaataagagagcgaggtt

SEQ ID NO: 16219 - DNA, 25 bp, Artificial
  probe
  misc_feature (1)..(25): SEQ ID NO: 6246; WAN0249AZ_at; Start 25; Stop 49
agagcgaggttgattttgtaaatat

SEQ ID NO: 16220 - DNA, 25 bp, Artificial
  probe
  misc_feature (1)..(25): SEQ ID NO: 6246; WAN0249AZ_at; Start 23; Stop 47
agagagcgaggttgattttgtaaat

SEQ ID NO: 16221 - DNA, 25 bp, Artificial
  probe
  misc_feature (1)..(25): SEQ ID NO: 6246; WAN0249AZ_at; Start 21; Stop 45
taagagagcgaggttgattttgtaa

SEQ ID NO: 16222 - DNA, 25 bp, Artificial
  probe
  misc_feature (1)..(25): SEQ ID NO: 6246; WAN0249AZ_at; Start 24; Stop 48
gagagcgaggttgattttgtaaata

SEQ ID NO: 16223 - DNA, 25 bp, Artificial
  probe
  misc_feature (1)..(25): SEQ ID NO: 6246; WAN0249AZ_at; Start 15; Stop 39
taaaaataagagagcgaggttgatt

SEQ ID NO: 16224 - DNA, 25 bp, Artificial
  probe
  misc_feature (1)..(25): SEQ ID NO: 6246; WAN0249AZ_at; Start 20; Stop 44
ataagagagcgaggttgattttgta

SEQ ID NO: 16225 - DNA, 25 bp, Artificial
  probe
  misc_feature (1)..(25): SEQ ID NO: 6246; WAN0249AZ_at; Start 9; Stop 33
cgagcctaaaaataagagagcgagg

SEQ ID NO: 16226 - DNA, 25 bp, Artificial
  probe
  misc_feature (1)..(25): SEQ ID NO: 6246; WAN0249AZ_at; Start 14; Stop 38
ctaaaaataagagagcgaggttgat

SEQ ID NO: 16227 - DNA, 25 bp, Artificial
  probe
  misc_feature (1)..(25): SEQ ID NO: 6246; WAN0249AZ_at; Start 17; Stop 41
aaaataagagagcgaggttgatttt

SEQ ID NO: 16228 - DNA, 25 bp, Artificial
  probe
  misc_feature (1)..(25): SEQ ID NO: 6246; WAN0249AZ_at; Start 5; Stop 29
ttcccgagcctaaaaataagagagc

SEQ ID NO: 16229 - DNA, 25 bp, Artificial
  probe
  misc_feature (1)..(25): SEQ ID NO: 6246; WAN0249AZ_at; Start 26; Stop 50
gagcgaggttgattttgtaaatatt

SEQ ID NO: 16230 - DNA, 25 bp, Artificial
  probe
  misc_feature (1)..(25): SEQ ID NO: 6246; WAN0249AZ_at; Start 13; Stop 37
cctaaaaataagagagcgaggttga

SEQ ID NO: 16231 - DNA, 25 bp, Artificial
  probe
  misc_feature (1)..(25): SEQ ID NO: 6246; WAN0249AZ_at; Start 19; Stop 43
aataagagagcgaggttgattttgt

SEQ ID NO: 16232 - DNA, 25 bp, Artificial
  probe
  misc_feature (1)..(25): SEQ ID NO: 6246; WAN0249AZ_at; Start 10; Stop 34
gagcctaaaaataagagagcgaggt

SEQ ID NO: 16233 - DNA, 25 bp, Artificial
  probe
  misc_feature (1)..(25): SEQ ID NO: 6246; WAN0249AZ_at; Start 27; Stop 51
agcgaggttgattttgtaaatattt

SEQ ID NO: 16234 - DNA, 25 bp, Artificial
  probe
  misc_feature (1)..(25): SEQ ID NO: 6246; WAN0249AZ_at; Start 16; Stop 40
aaaaataagagagcgaggttgattt

SEQ ID NO: 16235 - DNA, 25 bp, Artificial
  probe
  misc_feature (1)..(25): SEQ ID NO: 6246; WAN0249AZ_at; Start 6; Stop 30
tcccgagcctaaaaataagagagcg

SEQ ID NO: 16236 - DNA, 25 bp, Artificial
  probe
  misc_feature (1)..(25): SEQ ID NO: 6246; WAN0249AZ_at; Start 18; Stop 42
aaataagagagcgaggttgattttg

SEQ ID NO: 16237 - DNA, 25 bp, Artificial
  probe
  misc_feature (1)..(25): SEQ ID NO: 6246; WAN0249AZ_at; Start 7; Stop 31
cccgagcctaaaaataagagagcga

SEQ ID NO: 16238 - DNA, 25 bp, Artificial
  probe
  misc_feature (1)..(25): SEQ ID NO: 6246; WAN0249AZ_at; Start 8; Stop 32
ccgagcctaaaaataagagagcgag

SEQ ID NO: 16239 - DNA, 25 bp, Artificial
  probe
  misc_feature (1)..(25): SEQ ID NO: 6246; WAN0249AZ_at; Start 12; Stop 36
gcctaaaaataagagagcgaggttg

SEQ ID NO: 16240 - DNA, 25 bp, Artificial
  probe
  misc_feature (1)..(25): SEQ ID NO: 6246; WAN0249AZ_at; Start 22; Stop 46
aagagagcgaggttgattttgtaaa

SEQ ID NO: 16241 - DNA, 25 bp, Artificial
  probe
  misc_feature (1)..(25): SEQ ID NO: 6016; WAN0249B2_at; Start 19; Stop 43
taaaaggtagacgacgcctcagtaa

SEQ ID NO: 16242 - DNA, 25 bp, Artificial
  probe
  misc_feature (1)..(25): SEQ ID NO: 6016; WAN0249B2_at; Start 14; Stop 38
gagaataaaaggtagacgacgcctc

SEQ ID NO: 16243 - DNA, 25 bp, Artificial
  probe
  misc_feature (1)..(25): SEQ ID NO: 6016; WAN0249B2_at; Start 23; Stop 47
aggtagacgacgcctcagtaaaaat

SEQ ID NO: 16244 - DNA, 25 bp, Artificial
  probe
  misc_feature (1)..(25): SEQ ID NO: 6016; WAN0249B2_at; Start 16; Stop 40
gaataaaaggtagacgacgcctcag

SEQ ID NO: 16245 - DNA, 25 bp, Artificial
  probe
  misc_feature (1)..(25): SEQ ID NO: 6016; WAN0249B2_at; Start 17; Stop 41
aataaaaggtagacgacgcctcagt

SEQ ID NO: 16246 - DNA, 25 bp, Artificial
  probe
  misc_feature (1)..(25): SEQ ID NO: 6016; WAN0249B2_at; Start 13; Stop 37
agagaataaaaggtagacgacgcct

SEQ ID NO: 16247 - DNA, 25 bp, Artificial
  probe
  misc_feature (1)..(25): SEQ ID NO: 6016; WAN0249B2_at; Start 28; Stop 52
gacgacgcctcagtaaaaattggcc

SEQ ID NO: 16248 - DNA, 25 bp, Artificial
  probe
  misc_feature (1)..(25): SEQ ID NO: 6016; WAN0249B2_at; Start 25; Stop 49
gtagacgacgcctcagtaaaaattg

SEQ ID NO: 16249 - DNA, 25 bp, Artificial
  probe
  misc_feature (1)..(25): SEQ ID NO: 6016; WAN0249B2_at; Start 30; Stop 54
cgacgcctcagtaaaaattggcccg

SEQ ID NO: 16250 - DNA, 25 bp, Artificial
  probe
  misc_feature (1)..(25): SEQ ID NO: 6016; WAN0249B2_at; Start 15; Stop 39
agaataaaaggtagacgacgcctca

SEQ ID NO: 16251 - DNA, 25 bp, Artificial
  probe
  misc_feature (1)..(25): SEQ ID NO: 6016; WAN0249B2_at; Start 18; Stop 42
ataaaaggtagacgacgcctcagta

SEQ ID NO: 16252 - DNA, 25 bp, Artificial
  probe
  misc_feature (1)..(25): SEQ ID NO: 6016; WAN0249B2_at; Start 26; Stop 50
tagacgacgcctcagtaaaaattgg

SEQ ID NO: 16253 - DNA, 25 bp, Artificial
  probe
  misc_feature (1)..(25): SEQ ID NO: 6016; WAN0249B2_at; Start 27; Stop 51
agacgacgcctcagtaaaaattggc

SEQ ID NO: 16254 - DNA, 25 bp, Artificial
  probe
  misc_feature (1)..(25): SEQ ID NO: 6093; WAN0249B3_at; Start 216; Stop 240
cacataattttgttaaggaagggat

SEQ ID NO: 16255 - DNA, 25 bp, Artificial
  probe
  misc_feature (1)..(25): SEQ ID NO: 6093; WAN0249B3_at; Start 568; Stop 592
tgtattcttctaaaacagattgccc

SEQ ID NO: 16256 - DNA, 25 bp, Artificial
  probe
  misc_feature (1)..(25): SEQ ID NO: 6093; WAN0249B3_at; Start 194; Stop 218
gcagtaatccagtaacaaaagtcac

SEQ ID NO: 16257 - DNA, 25 bp, Artificial
  probe
  misc_feature (1)..(25): SEQ ID NO: 6093; WAN0249B3_at; Start 8; Stop 32
tctcctgagaaaagtataatatata

SEQ ID NO: 16258 - DNA, 25 bp, Artificial
  probe
  misc_feature (1)..(25): SEQ ID NO: 6093; WAN0249B3_at; Start 40; Stop 64
gaaatcattcaaagtgtcctaactg

SEQ ID NO: 16259 - DNA, 25 bp, Artificial
  probe
  misc_feature (1)..(25): SEQ ID NO: 6093; WAN0249B3_at; Start 56; Stop 80
tcctaactggacattttgaactaaa

SEQ ID NO: 16260 - DNA, 25 bp, Artificial
  probe
  misc_feature (1)..(25): SEQ ID NO: 6093; WAN0249B3_at; Start 369; Stop 393
tccgttgcattaacagatgtatata

SEQ ID NO: 16261 - DNA, 25 bp, Artificial
  probe
  misc_feature (1)..(25): SEQ ID NO: 6093; WAN0249B3_at; Start 123; Stop 147
taagacaatattaagaaagacggtc

SEQ ID NO: 16262 - DNA, 25 bp, Artificial
  probe
  misc_feature (1)..(25): SEQ ID NO: 6093; WAN0249B3_at; Start 253; Stop 277
gattactactaaccagcaaattgaa

SEQ ID NO: 16263 - DNA, 25 bp, Artificial
  probe
  misc_feature (1)..(25): SEQ ID NO: 6093; WAN0249B3_at; Start 602; Stop 626
aactgtgattgattaaattccaaaa

SEQ ID NO: 16264 - DNA, 25 bp, Artificial
  probe
  misc_feature (1)..(25): SEQ ID NO: 6093; WAN0249B3_at; Start 340; Stop 364
tagccactccctacttatcaataaa

SEQ ID NO: 16265 - DNA, 25 bp, Artificial
  probe
  misc_feature (1)..(25): SEQ ID NO: 6093; WAN0249B3_at; Start 361; Stop 385
taaaattatccgttgcattaacaga

SEQ ID NO: 16266 - DNA, 25 bp, Artificial
  probe
  misc_feature (1)..(25): SEQ ID NO: 6093; WAN0249B3_at; Start 160; Stop 184
ccgtctaaaaatgttataagctatt

SEQ ID NO: 16267 - DNA, 25 bp, Artificial
  probe
  misc_feature (1)..(25): SEQ ID NO: 6093; WAN0249B3_at; Start 326; Stop 350
taaaagttgaataatagccactccc

SEQ ID NO: 16268 - DNA, 25 bp, Artificial
  probe
  misc_feature (1)..(25): SEQ ID NO: 6093; WAN0249B3_at; Start 620; Stop 644
tccaaaaatatattccaaaggcgct

SEQ ID NO: 16269 - DNA, 25 bp, Artificial
  probe
  misc_feature (1)..(25): SEQ ID NO: 6093; WAN0249B3_at; Start 477; Stop 501
taattggagtcctttatgatgcttt

SEQ ID NO: 16270 - DNA, 25 bp, Artificial
  probe
  misc_feature (1)..(25): SEQ ID NO: 6093; WAN0249B3_at; Start 405; Stop 429
ggatttcaaagcaattaactagact

SEQ ID NO: 16271 - DNA, 25 bp, Artificial
  probe
  misc_feature (1)..(25): SEQ ID NO: 6093; WAN0249B3_at; Start 134; Stop 158
taagaaagacggtcaaaatctatta

SEQ ID NO: 16272 - DNA, 25 bp, Artificial
  probe
  misc_feature (1)..(25): SEQ ID NO: 6093; WAN0249B3_at; Start 184; Stop 208
taaaaaatcagcagtaatccagtaa

SEQ ID NO: 16273 - DNA, 25 bp, Artificial
  probe
  misc_feature (1)..(25): SEQ ID NO: 6093; WAN0249B3_at; Start 534; Stop 558
ctgaactaaagtaatagcataatga

SEQ ID NO: 16274 - DNA, 25 bp, Artificial
  probe
  misc_feature (1)..(25): SEQ ID NO: 6093; WAN0249B3_at; Start 585; Stop 609
gattgcccttcacattcaactgtga

SEQ ID NO: 16275 - DNA, 25 bp, Artificial
  probe
  misc_feature (1)..(25): SEQ ID NO: 6093; WAN0249B3_at; Start 397; Stop 421
caatccatggatttcaaagcaatta

SEQ ID NO: 16276 - DNA, 25 bp, Artificial
  probe
  misc_feature (1)..(25): SEQ ID NO: 6093; WAN0249B3_at; Start 520; Stop 544
tctcaatattttaactgaactaaag

SEQ ID NO: 16277 - DNA, 25 bp, Artificial
  probe
  misc_feature (1)..(25): SEQ ID NO: 6093; WAN0249B3_at; Start 436; Stop 460
gtcaataaccacaaaattagattag

SEQ ID NO: 16278 - DNA, 25 bp, Artificial
  probe
  misc_feature (1)..(25): SEQ ID NO: 6093; WAN0249B3_at; Start 550; Stop 574
gcataatgatatcttgattgtattc

SEQ ID NO: 16279 - DNA, 25 bp, Artificial
  probe
  misc_feature (1)..(25): SEQ ID NO: 6093; WAN0249B3_at; Start 424; Stop 448
tagactttatttgtcaataaccaca

SEQ ID NO: 16280 - DNA, 25 bp, Artificial
  probe
  misc_feature (1)..(25): SEQ ID NO: 6093; WAN0249B3_at; Start 229; Stop 253
taaggaagggattaatgatgtccag

SEQ ID NO: 16281 - DNA, 25 bp, Artificial
  probe
  misc_feature (1)..(25): SEQ ID NO: 6093; WAN0249B3_at; Start 281; Stop 305
tggtcaacatgatatttctaatatg

SEQ ID NO: 16282 - DNA, 25 bp, Artificial
  probe
  misc_feature (1)..(25): SEQ ID NO: 6093; WAN0249B3_at; Start 104; Stop 128
taagcatatctattataggtaagac

SEQ ID NO: 16283 - DNA, 25 bp, Artificial
  probe
  misc_feature (1)..(25): SEQ ID NO: 6093; WAN0249B3_at; Start 305; Stop 329
gaatctcttactttcagaacctaaa

SEQ ID NO: 16284 - DNA, 25 bp, Artificial
  probe
  misc_feature (1)..(25): SEQ ID NO: 6093; WAN0249B3_at; Start 384; Stop 408
gatgtatataaaccaatccatggat

SEQ ID NO: 16285 - DNA, 25 bp, Artificial
  probe
  misc_feature (1)..(25): SEQ ID NO: 6093; WAN0249B3_at; Start 634; Stop 658
ccaaaggcgctctaaattctctata

SEQ ID NO: 16286 - DNA, 25 bp, Artificial
  probe
  misc_feature (1)..(25): SEQ ID NO: 6093; WAN0249B3_at; Start 244; Stop 268
tgatgtccagattactactaaccag

SEQ ID NO: 16287 - DNA, 25 bp, Artificial
  probe
  misc_feature (1)..(25): SEQ ID NO: 6093; WAN0249B3_at; Start 265; Stop 289
ccagcaaattgaaaaatggtcaaca

SEQ ID NO: 16288 - DNA, 25 bp, Artificial
  probe
  misc_feature (1)..(25): SEQ ID NO: 6107; WAN0249B4_at; Start 275; Stop 299
cattagatcagttgaaacctaggag

SEQ ID NO: 16289 - DNA, 25 bp, Artificial
  probe
  misc_feature (1)..(25): SEQ ID NO: 6107; WAN0249B4_at; Start 160; Stop 184
taatcctaaaaattcacaagttgaa

SEQ ID NO: 16290 - DNA, 25 bp, Artificial
  probe
  misc_feature (1)..(25): SEQ ID NO: 6107; WAN0249B4_at; Start 348; Stop 372
gaaacttaagttatatggcaatgaa

SEQ ID NO: 16291 - DNA, 25 bp, Artificial
  probe
  misc_feature (1)..(25): SEQ ID NO: 6107; WAN0249B4_at; Start 307; Stop 331
taatatctaactaattccttatgag

SEQ ID NO: 16292 - DNA, 25 bp, Artificial
  probe
  misc_feature (1)..(25): SEQ ID NO: 6107; WAN0249B4_at; Start 334; Stop 358
tactgacatgcgatgaaacttaagt

SEQ ID NO: 16293 - DNA, 25 bp, Artificial
  probe
  misc_feature (1)..(25): SEQ ID NO: 6107; WAN0249B4_at; Start 282; Stop 306
tcagttgaaacctaggagctaacac

SEQ ID NO: 16294 - DNA, 25 bp, Artificial
  probe
  misc_feature (1)..(25): SEQ ID NO: 6107; WAN0249B4_at; Start 197; Stop 221
tgttgagccaactatcccaaaatac

SEQ ID NO: 16295 - DNA, 25 bp, Artificial
  probe
  misc_feature (1)..(25): SEQ ID NO: 6107; WAN0249B4_at; Start 95; Stop 119
gatttaaccttaatatgttattgta

SEQ ID NO: 16296 - DNA, 25 bp, Artificial
  probe
  misc_feature (1)..(25): SEQ ID NO: 6107; WAN0249B4_at; Start 142; Stop 166
tcataaagtcaaataaaataatcct

SEQ ID NO: 16297 - DNA, 25 bp, Artificial
  probe
  misc_feature (1)..(25): SEQ ID NO: 6107; WAN0249B4_at; Start 1; Stop 25
gaataactccttaattatgaatatt

SEQ ID NO: 16298 - DNA, 25 bp, Artificial
  probe
  misc_feature (1)..(25): SEQ ID NO: 6107; WAN0249B4_at; Start 322; Stop 346
tccttatgagattactgacatgcga

SEQ ID NO: 16299 - DNA, 25 bp, Artificial
  probe
  misc_feature (1)..(25): SEQ ID NO: 6107; WAN0249B4_at; Start 240; Stop 264
gtcgaaatgtatactttaagaattc

SEQ ID NO: 16300 - DNA, 25 bp, Artificial
  probe
  misc_feature (1)..(25): SEQ ID NO: 6107; WAN0249B4_at; Start 225; Stop 249
tgtcataattacagtgtcgaaatgt

SEQ ID NO: 16301 - DNA, 25 bp, Artificial
  probe
  misc_feature (1)..(25): SEQ ID NO: 6107; WAN0249B4_at; Start 127; Stop 151
gaacgtaaacaatactcataaagtc

SEQ ID NO: 16302 - DNA, 25 bp, Artificial
  probe
  misc_feature (1)..(25): SEQ ID NO: 6107; WAN0249B4_at; Start 72; Stop 96
catcttagttcattcataaatatga

SEQ ID NO: 16303 - DNA, 25 bp, Artificial
  probe
  misc_feature (1)..(25): SEQ ID NO: 6107; WAN0249B4_at; Start 256; Stop 280
taagaattcttacattaatcattag

SEQ ID NO: 16304 - DNA, 25 bp, Artificial
  probe
  misc_feature (1)..(25): SEQ ID NO: 6107; WAN0249B4_at; Start 113; Stop 137
tattgtaaagtattgaacgtaaaca

SEQ ID NO: 16305 - DNA, 25 bp, Artificial
  probe
  misc_feature (1)..(25): SEQ ID NO: 6107; WAN0249B4_at; Start 66; Stop 90
gatcctcatcttagttcattcataa

SEQ ID NO: 16306 - DNA, 25 bp, Artificial
  probe
  misc_feature (1)..(25): SEQ ID NO: 6107; WAN0249B4_at; Start 205; Stop 229
caactatcccaaaatacttctgtca

SEQ ID NO: 16307 - DNA, 25 bp, Artificial
  probe
  misc_feature (1)..(25): SEQ ID NO: 6107; WAN0249B4_at; Start 219; Stop 243
tacttctgtcataattacagtgtcg

SEQ ID NO: 16308 - DNA, 25 bp, Artificial
  probe
  misc_feature (1)..(25): SEQ ID NO: 6107; WAN0249B4_at; Start 328; Stop 352
tgagattactgacatgcgatgaaac

SEQ ID NO: 16309 - DNA, 25 bp, Artificial
  probe
  misc_feature (1)..(25): SEQ ID NO: 6107; WAN0249B4_at; Start 191; Stop 215
tcaatttgttgagccaactatccca

SEQ ID NO: 16310 - DNA, 25 bp, Artificial
  probe
  misc_feature (1)..(25): SEQ ID NO: 6107; WAN0249B4_at; Start 169; Stop 193
aaattcacaagttgaaaagatttca

SEQ ID NO: 16311 - DNA, 25 bp, Artificial
  probe
  misc_feature (1)..(25): SEQ ID NO: 6107; WAN0249B4_at; Start 288; Stop 312
gaaacctaggagctaacactaatat

SEQ ID NO: 16312 - DNA, 25 bp, Artificial
  probe
  misc_feature (1)..(25): SEQ ID NO: 6107; WAN0249B4_at; Start 236; Stop 260
cagtgtcgaaatgtatactttaaga

SEQ ID NO: 16313 - DNA, 25 bp, Artificial
  probe
  misc_feature (1)..(25): SEQ ID NO: 6107; WAN0249B4_at; Start 200; Stop 224
tgagccaactatcccaaaatacttc

SEQ ID NO: 16314 - DNA, 25 bp, Artificial
  probe
  misc_feature (1)..(25): SEQ ID NO: 6107; WAN0249B4_at; Start 184; Stop 208
aaagatttcaatttgttgagccaac

SEQ ID NO: 16315 - DNA, 25 bp, Artificial
  probe
  misc_feature (1)..(25): SEQ ID NO: 6107; WAN0249B4_at; Start 268; Stop 292
cattaatcattagatcagttgaaac

SEQ ID NO: 16316 - DNA, 25 bp, Artificial
  probe
  misc_feature (1)..(25): SEQ ID NO: 6107; WAN0249B4_at; Start 51; Stop 75
tcaaaaaatgattatgatcctcatc

SEQ ID NO: 16317 - DNA, 25 bp, Artificial
  probe
  misc_feature (1)..(25): SEQ ID NO: 6107; WAN0249B4_at; Start 338; Stop 362
gacatgcgatgaaacttaagttata

SEQ ID NO: 16318 - DNA, 25 bp, Artificial
  probe
  misc_feature (1)..(25): SEQ ID NO: 6107; WAN0249B4_at; Start 285; Stop 309
gttgaaacctaggagctaacactaa

SEQ ID NO: 16319 - DNA, 25 bp, Artificial
  probe
  misc_feature (1)..(25): SEQ ID NO: 6107; WAN0249B4_at; Start 296; Stop 320
ggagctaacactaatatctaactaa

SEQ ID NO: 16320 - DNA, 25 bp, Artificial
  probe
  misc_feature (1)..(25): SEQ ID NO: 6107; WAN0249B4_at; Start 280; Stop 304
gatcagttgaaacctaggagctaac

SEQ ID NO: 16321 - DNA, 25 bp, Artificial
  probe
  misc_feature (1)..(25): SEQ ID NO: 6107; WAN0249B4_at; Start 357; Stop 381
gttatatggcaatgaagagtttctc

SEQ ID NO: 16322 - DNA, 25 bp, Artificial
  probe
  misc_feature (1)..(25): SEQ ID NO: 6089; WAN0249B5_at; Start 31; Stop 55
cataatttagtcataatcaatagaa

SEQ ID NO: 16323 - DNA, 25 bp, Artificial
  probe
  misc_feature (1)..(25): SEQ ID NO: 6089; WAN0249B5_at; Start 30; Stop 54
tcataatttagtcataatcaataga

SEQ ID NO: 16324 - DNA, 25 bp, Artificial
  probe
  misc_feature (1)..(25): SEQ ID NO: 6089; WAN0249B5_at; Start 56; Stop 80
ttagctttagatactctaaagactt

SEQ ID NO: 16325 - DNA, 25 bp, Artificial
  probe
  misc_feature (1)..(25): SEQ ID NO: 6089; WAN0249B5_at; Start 64; Stop 88
agatactctaaagacttaggtgtac

SEQ ID NO: 16326 - DNA, 25 bp, Artificial
  probe
  misc_feature (1)..(25): SEQ ID NO: 6089; WAN0249B5_at; Start 66; Stop 90
atactctaaagacttaggtgtacac

SEQ ID NO: 16327 - DNA, 25 bp, Artificial
  probe
  misc_feature (1)..(25): SEQ ID NO: 6089; WAN0249B5_at; Start 40; Stop 64
gtcataatcaatagaattagcttta

SEQ ID NO: 16328 - DNA, 25 bp, Artificial
  probe
  misc_feature (1)..(25): SEQ ID NO: 6089; WAN0249B5_at; Start 65; Stop 89
gatactctaaagacttaggtgtaca

SEQ ID NO: 16329 - DNA, 25 bp, Artificial
  probe
  misc_feature (1)..(25): SEQ ID NO: 6089; WAN0249B5_at; Start 53; Stop 77
gaattagctttagatactctaaaga

SEQ ID NO: 16330 - DNA, 25 bp, Artificial
  probe
  misc_feature (1)..(25): SEQ ID NO: 6089; WAN0249B5_at; Start 19; Stop 43
cgttattttattcataatttagtca

SEQ ID NO: 16331 - DNA, 25 bp, Artificial
  probe
  misc_feature (1)..(25): SEQ ID NO: 6089; WAN0249B5_at; Start 60; Stop 84
ctttagatactctaaagacttaggt

SEQ ID NO: 16332 - DNA, 25 bp, Artificial
  probe
  misc_feature (1)..(25): SEQ ID NO: 6089; WAN0249B5_at; Start 42; Stop 66
cataatcaatagaattagctttaga

SEQ ID NO: 16333 - DNA, 25 bp, Artificial
  probe
  misc_feature (1)..(25): SEQ ID NO: 6089; WAN0249B5_at; Start 55; Stop 79
attagctttagatactctaaagact

SEQ ID NO: 16334 - DNA, 25 bp, Artificial
  probe
  misc_feature (1)..(25): SEQ ID NO: 6089; WAN0249B5_at; Start 29; Stop 53
ttcataatttagtcataatcaatag

SEQ ID NO: 16335 - DNA, 25 bp, Artificial
  probe
  misc_feature (1)..(25): SEQ ID NO: 6089; WAN0249B5_at; Start 61; Stop 85
tttagatactctaaagacttaggtg

SEQ ID NO: 16336 - DNA, 25 bp, Artificial
  probe
  misc_feature (1)..(25): SEQ ID NO: 6089; WAN0249B5_at; Start 47; Stop 71
tcaatagaattagctttagatactc

SEQ ID NO: 16337 - DNA, 25 bp, Artificial
  probe
  misc_feature (1)..(25): SEQ ID NO: 6089; WAN0249B5_at; Start 38; Stop 62
tagtcataatcaatagaattagctt

SEQ ID NO: 16338 - DNA, 25 bp, Artificial
  probe
  misc_feature (1)..(25): SEQ ID NO: 6089; WAN0249B5_at; Start 49; Stop 73
aatagaattagctttagatactcta

SEQ ID NO: 16339 - DNA, 25 bp, Artificial
  probe
  misc_feature (1)..(25): SEQ ID NO: 6089; WAN0249B5_at; Start 54; Stop 78
aattagctttagatactctaaagac

SEQ ID NO: 16340 - DNA, 25 bp, Artificial
  probe
  misc_feature (1)..(25): SEQ ID NO: 6089; WAN0249B5_at; Start 41; Stop 65
tcataatcaatagaattagctttag

SEQ ID NO: 16341 - DNA, 25 bp, Artificial
  probe
  misc_feature (1)..(25): SEQ ID NO: 6089; WAN0249B5_at; Start 58; Stop 82
agctttagatactctaaagacttag

SEQ ID NO: 16342 - DNA, 25 bp, Artificial
  probe
  misc_feature (1)..(25): SEQ ID NO: 6089; WAN0249B5_at; Start 48; Stop 72
caatagaattagctttagatactct

SEQ ID NO: 16343 - DNA, 25 bp, Artificial
  probe
  misc_feature (1)..(25): SEQ ID NO: 6089; WAN0249B5_at; Start 62; Stop 86
ttagatactctaaagacttaggtgt

SEQ ID NO: 16344 - DNA, 25 bp, Artificial
  probe
  misc_feature (1)..(25): SEQ ID NO: 6089; WAN0249B5_at; Start 59; Stop 83
gctttagatactctaaagacttagg

SEQ ID NO: 16345 - DNA, 25 bp, Artificial
  probe
  misc_feature (1)..(25): SEQ ID NO: 6089; WAN0249B5_at; Start 57; Stop 81
tagctttagatactctaaagactta

SEQ ID NO: 16346 - DNA, 25 bp, Artificial
  probe
  misc_feature (1)..(25): SEQ ID NO: 6089; WAN0249B5_at; Start 68; Stop 92
actctaaagacttaggtgtacacct

SEQ ID NO: 16347 - DNA, 25 bp, Artificial
  probe
  misc_feature (1)..(25): SEQ ID NO: 6089; WAN0249B5_at; Start 63; Stop 87
tagatactctaaagacttaggtgta

SEQ ID NO: 16348 - DNA, 25 bp, Artificial
  probe
  misc_feature (1)..(25): SEQ ID NO: 6089; WAN0249B5_at; Start 36; Stop 60
tttagtcataatcaatagaattagc

SEQ ID NO: 16349 - DNA, 25 bp, Artificial
  probe
  misc_feature (1)..(25): SEQ ID NO: 6089; WAN0249B5_at; Start 67; Stop 91
tactctaaagacttaggtgtacacc

SEQ ID NO: 16350 - DNA, 25 bp, Artificial
  probe
  misc_feature (1)..(25): SEQ ID NO: 6089; WAN0249B5_at; Start 52; Stop 76
agaattagctttagatactctaaag

SEQ ID NO: 16351 - DNA, 25 bp, Artificial
  probe
  misc_feature (1)..(25): SEQ ID NO: 6089; WAN0249B5_at; Start 45; Stop 69
aatcaatagaattagctttagatac

SEQ ID NO: 16352 - DNA, 25 bp, Artificial
  probe
  misc_feature (1)..(25): SEQ ID NO: 6089; WAN0249B5_at; Start 51; Stop 75
tagaattagctttagatactctaaa

SEQ ID NO: 16353 - DNA, 25 bp, Artificial
  probe
  misc_feature (1)..(25): SEQ ID NO: 6089; WAN0249B5_at; Start 50; Stop 74
atagaattagctttagatactctaa

SEQ ID NO: 16354 - DNA, 25 bp, Artificial
  probe
  misc_feature (1)..(25): SEQ ID NO: 6089; WAN0249B5_at; Start 37; Stop 61
ttagtcataatcaatagaattagct

SEQ ID NO: 16355 - DNA, 25 bp, Artificial
  probe
  misc_feature (1)..(25): SEQ ID NO: 6089; WAN0249B5_at; Start 39; Stop 63
agtcataatcaatagaattagcttt

SEQ ID NO: 16356 - DNA, 25 bp, Artificial
  probe
  misc_feature (1)..(25): SEQ ID NO: 6164; WAN0249B6_at; Start 52; Stop 76
ctgtgatttatttacatcttcttct

SEQ ID NO: 16357 - DNA, 25 bp, Artificial
  probe
  misc_feature (1)..(25): SEQ ID NO: 6164; WAN0249B6_at; Start 49; Stop 73
tgactgtgatttatttacatcttct

SEQ ID NO: 16358 - DNA, 25 bp, Artificial
  probe
  misc_feature (1)..(25): SEQ ID NO: 6164; WAN0249B6_at; Start 46; Stop 70
ttttgactgtgatttatttacatct

SEQ ID NO: 16359 - DNA, 25 bp, Artificial
  probe
  misc_feature (1)..(25): SEQ ID NO: 6164; WAN0249B6_at; Start 38; Stop 62
aaacggctttttgactgtgatttat

SEQ ID NO: 16360 - DNA, 25 bp, Artificial
  probe
  misc_feature (1)..(25): SEQ ID NO: 6164; WAN0249B6_at; Start 39; Stop 63
aacggctttttgactgtgatttatt

SEQ ID NO: 16361 - DNA, 25 bp, Artificial
  probe
  misc_feature (1)..(25): SEQ ID NO: 6164; WAN0249B6_at; Start 42; Stop 66
ggctttttgactgtgatttatttac

SEQ ID NO: 16362 - DNA, 25 bp, Artificial
  probe
  misc_feature (1)..(25): SEQ ID NO: 6164; WAN0249B6_at; Start 54; Stop 78
gtgatttatttacatcttcttctac

SEQ ID NO: 16363 - DNA, 25 bp, Artificial
  probe
  misc_feature (1)..(25): SEQ ID NO: 6164; WAN0249B6_at; Start 44; Stop 68
ctttttgactgtgatttatttacat

SEQ ID NO: 16364 - DNA, 25 bp, Artificial
  probe
  misc_feature (1)..(25): SEQ ID NO: 6164; WAN0249B6_at; Start 43; Stop 67
gctttttgactgtgatttatttaca

SEQ ID NO: 16365 - DNA, 25 bp, Artificial
  probe
  misc_feature (1)..(25): SEQ ID NO: 6164; WAN0249B6_at; Start 45; Stop 69
tttttgactgtgatttatttacatc

SEQ ID NO: 16366 - DNA, 25 bp, Artificial
  probe
  misc_feature (1)..(25): SEQ ID NO: 6164; WAN0249B6_at; Start 40; Stop 64
acggctttttgactgtgatttattt

SEQ ID NO: 16367 - DNA, 25 bp, Artificial
  probe
  misc_feature (1)..(25): SEQ ID NO: 6164; WAN0249B6_at; Start 48; Stop 72
ttgactgtgatttatttacatcttc

SEQ ID NO: 16368 - DNA, 25 bp, Artificial
  probe
  misc_feature (1)..(25): SEQ ID NO: 6164; WAN0249B6_at; Start 53; Stop 77
tgtgatttatttacatcttcttcta

SEQ ID NO: 16369 - DNA, 25 bp, Artificial
  probe
  misc_feature (1)..(25): SEQ ID NO: 6164; WAN0249B6_at; Start 41; Stop 65
cggctttttgactgtgatttattta

SEQ ID NO: 16370 - DNA, 25 bp, Artificial
  probe
  misc_feature (1)..(25): SEQ ID NO: 6164; WAN0249B6_at; Start 51; Stop 75
actgtgatttatttacatcttcttc

SEQ ID NO: 16371 - DNA, 25 bp, Artificial
  probe
  misc_feature (1)..(25): SEQ ID NO: 6164; WAN0249B6_at; Start 1; Stop 25
taattctccccttcattataacaaa

SEQ ID NO: 16372 - DNA, 25 bp, Artificial
  probe
  misc_feature (1)..(25): SEQ ID NO: 6164; WAN0249B6_at; Start 47; Stop 71
tttgactgtgatttatttacatctt

SEQ ID NO: 16373 - DNA, 25 bp, Artificial
  probe
  misc_feature (1)..(25): SEQ ID NO: 6164; WAN0249B6_at; Start 50; Stop 74
gactgtgatttatttacatcttctt

SEQ ID NO: 16374 - DNA, 25 bp, Artificial
  probe
  misc_feature (1)..(25): SEQ ID NO: 6119; WAN0249B7_at; Start 27; Stop 51
gggcagggtcttgacagagacacct

SEQ ID NO: 16375 - DNA, 25 bp, Artificial
  probe
  misc_feature (1)..(25): SEQ ID NO: 6119; WAN0249B7_at; Start 47; Stop 71
cacctgaaagctgcgcagcttcttt

SEQ ID NO: 16376 - DNA, 25 bp, Artificial
  probe
  misc_feature (1)..(25): SEQ ID NO: 6119; WAN0249B7_at; Start 126; Stop 150
cagagtcaagcgtttttgagaaagg

SEQ ID NO: 16377 - DNA, 25 bp, Artificial
  probe
  misc_feature (1)..(25): SEQ ID NO: 6119; WAN0249B7_at; Start 59; Stop 83
gcgcagcttcttttatatggtacat

SEQ ID NO: 16378 - DNA, 25 bp, Artificial
  probe
  misc_feature (1)..(25): SEQ ID NO: 6119; WAN0249B7_at; Start 56; Stop 80
gctgcgcagcttcttttatatggta

SEQ ID NO: 16379 - DNA, 25 bp, Artificial
  probe
  misc_feature (1)..(25): SEQ ID NO: 6119; WAN0249B7_at; Start 7; Stop 31
tatcttgtcatagtgatgcagggca

SEQ ID NO: 16380 - DNA, 25 bp, Artificial
  probe
  misc_feature (1)..(25): SEQ ID NO: 6119; WAN0249B7_at; Start 74; Stop 98
tatggtacatgatttcctccttaca

SEQ ID NO: 16381 - DNA, 25 bp, Artificial
  probe
  misc_feature (1)..(25): SEQ ID NO: 6119; WAN0249B7_at; Start 99; Stop 123
atgatagtataacccctccccttag

SEQ ID NO: 16382 - DNA, 25 bp, Artificial
  probe
  misc_feature (1)..(25): SEQ ID NO: 6119; WAN0249B7_at; Start 32; Stop 56
gggtcttgacagagacacctgaaag

SEQ ID NO: 16383 - DNA, 25 bp, Artificial
  probe
  misc_feature (1)..(25): SEQ ID NO: 6119; WAN0249B7_at; Start 29; Stop 53
gcagggtcttgacagagacacctga

SEQ ID NO: 16384 - DNA, 25 bp, Artificial
  probe
  misc_feature (1)..(25): SEQ ID NO: 6119; WAN0249B7_at; Start 132; Stop 156
caagcgtttttgagaaaggtgtgaa

SEQ ID NO: 16385 - DNA, 25 bp, Artificial
  probe
  misc_feature (1)..(25): SEQ ID NO: 6119; WAN0249B7_at; Start 61; Stop 85
gcagcttcttttatatggtacatga

SEQ ID NO: 16386 - DNA, 25 bp, Artificial
  probe
  misc_feature (1)..(25): SEQ ID NO: 6119; WAN0249B7_at; Start 14; Stop 38
tcatagtgatgcagggcagggtctt

SEQ ID NO: 16387 - DNA, 25 bp, Artificial
  probe
  misc_feature (1)..(25): SEQ ID NO: 6119; WAN0249B7_at; Start 9; Stop 33
tcttgtcatagtgatgcagggcagg

SEQ ID NO: 16388 - DNA, 25 bp, Artificial
  probe
  misc_feature (1)..(25): SEQ ID NO: 6119; WAN0249B7_at; Start 43; Stop 67
gagacacctgaaagctgcgcagctt

SEQ ID NO: 16389 - DNA, 25 bp, Artificial
  probe
  misc_feature (1)..(25): SEQ ID NO: 6119; WAN0249B7_at; Start 45; Stop 69
gacacctgaaagctgcgcagcttct

SEQ ID NO: 16390 - DNA, 25 bp, Artificial
  probe
  misc_feature (1)..(25): SEQ ID NO: 6119; WAN0249B7_at; Start 77; Stop 101
ggtacatgatttcctccttacaatg

SEQ ID NO: 16391 - DNA, 25 bp, Artificial
  probe
  misc_feature (1)..(25): SEQ ID NO: 6119; WAN0249B7_at; Start 95; Stop 119
tacaatgatagtataacccctcccc

SEQ ID NO: 16392 - DNA, 25 bp, Artificial
  probe
  misc_feature (1)..(25): SEQ ID NO: 6119; WAN0249B7_at; Start 81; Stop 105
catgatttcctccttacaatgatag

SEQ ID NO: 16393 - DNA, 25 bp, Artificial
  probe
  misc_feature (1)..(25): SEQ ID NO: 6119; WAN0249B7_at; Start 88; Stop 112
tcctccttacaatgatagtataacc

SEQ ID NO: 16394 - DNA, 25 bp, Artificial
  probe
  misc_feature (1)..(25): SEQ ID NO: 6119; WAN0249B7_at; Start 69; Stop 93
ttttatatggtacatgatttcctcc

SEQ ID NO: 16395 - DNA, 25 bp, Artificial
  probe
  misc_feature (1)..(25): SEQ ID NO: 6119; WAN0249B7_at; Start 37; Stop 61
ttgacagagacacctgaaagctgcg

SEQ ID NO: 16396 - DNA, 25 bp, Artificial
  probe
  misc_feature (1)..(25): SEQ ID NO: 6119; WAN0249B7_at; Start 117; Stop 141
cccttaggtcagagtcaagcgtttt

SEQ ID NO: 16397 - DNA, 25 bp, Artificial
  probe
  misc_feature (1)..(25): SEQ ID NO: 6119; WAN0249B7_at; Start 121; Stop 145
taggtcagagtcaagcgtttttgag

SEQ ID NO: 16398 - DNA, 25 bp, Artificial
  probe
  misc_feature (1)..(25): SEQ ID NO: 6119; WAN0249B7_at; Start 39; Stop 63
gacagagacacctgaaagctgcgca

SEQ ID NO: 16399 - DNA, 25 bp, Artificial
  probe
  misc_feature (1)..(25): SEQ ID NO: 6119; WAN0249B7_at; Start 25; Stop 49
cagggcagggtcttgacagagacac

SEQ ID NO: 16400 - DNA, 25 bp, Artificial
  probe
  misc_feature (1)..(25): SEQ ID NO: 6119; WAN0249B7_at; Start 113; Stop 137
cctccccttaggtcagagtcaagcg

SEQ ID NO: 16401 - DNA, 25 bp, Artificial
  probe
  misc_feature (1)..(25): SEQ ID NO: 6119; WAN0249B7_at; Start 93; Stop 117
cttacaatgatagtataacccctcc

SEQ ID NO: 16402 - DNA, 25 bp, Artificial
  probe
  misc_feature (1)..(25): SEQ ID NO: 6119; WAN0249B7_at; Start 115; Stop 139
tccccttaggtcagagtcaagcgtt

SEQ ID NO: 16403 - DNA, 25 bp, Artificial
  probe
  misc_feature (1)..(25): SEQ ID NO: 6119; WAN0249B7_at; Start 119; Stop 143
cttaggtcagagtcaagcgtttttg

SEQ ID NO: 16404 - DNA, 25 bp, Artificial
  probe
  misc_feature (1)..(25): SEQ ID NO: 6119; WAN0249B7_at; Start 1; Stop 25
gagtcctatcttgtcatagtgatgc

SEQ ID NO: 16405 - DNA, 25 bp, Artificial
  probe
  misc_feature (1)..(25): SEQ ID NO: 6119; WAN0249B7_at; Start 35; Stop 59
tcttgacagagacacctgaaagctg

SEQ ID NO: 16406 - DNA, 25 bp, Artificial
  probe
  misc_feature (1)..(25): SEQ ID NO: 6119; WAN0249B7_at; Start 84; Stop 108
gatttcctccttacaatgatagtat

SEQ ID NO: 16407 - DNA, 25 bp, Artificial
  probe
  misc_feature (1)..(25): SEQ ID NO: 6119; WAN0249B7_at; Start 41; Stop 65
cagagacacctgaaagctgcgcagc

SEQ ID NO: 16408 - DNA, 25 bp, Artificial
  probe
  misc_feature (1)..(25): SEQ ID NO: 6018; WAN0249B8_at; Start 22; Stop 46
ggcagatacagacaaagctgatcta

SEQ ID NO: 16409 - DNA, 25 bp, Artificial
  probe
  misc_feature (1)..(25): SEQ ID NO: 6018; WAN0249B8_at; Start 20; Stop 44
aaggcagatacagacaaagctgatc

SEQ ID NO: 16410 - DNA, 25 bp, Artificial
  probe
  misc_feature (1)..(25): SEQ ID NO: 6018; WAN0249B8_at; Start 11; Stop 35
tagcataaaaaggcagatacagaca

SEQ ID NO: 16411 - DNA, 25 bp, Artificial
  probe
  misc_feature (1)..(25): SEQ ID NO: 6018; WAN0249B8_at; Start 31; Stop 55
agacaaagctgatctacctttttac

SEQ ID NO: 16412 - DNA, 25 bp, Artificial
  probe
  misc_feature (1)..(25): SEQ ID NO: 6018; WAN0249B8_at; Start 35; Stop 59
aaagctgatctacctttttacgatt

SEQ ID NO: 16413 - DNA, 25 bp, Artificial
  probe
  misc_feature (1)..(25): SEQ ID NO: 6018; WAN0249B8_at; Start 21; Stop 45
aggcagatacagacaaagctgatct

SEQ ID NO: 16414 - DNA, 25 bp, Artificial
  probe
  misc_feature (1)..(25): SEQ ID NO: 6018; WAN0249B8_at; Start 6; Stop 30
aagtatagcataaaaaggcagatac

SEQ ID NO: 16415 - DNA, 25 bp, Artificial
  probe
  misc_feature (1)..(25): SEQ ID NO: 6018; WAN0249B8_at; Start 28; Stop 52
tacagacaaagctgatctacctttt

SEQ ID NO: 16416 - DNA, 25 bp, Artificial
  probe
  misc_feature (1)..(25): SEQ ID NO: 6018; WAN0249B8_at; Start 25; Stop 49
agatacagacaaagctgatctacct

SEQ ID NO: 16417 - DNA, 25 bp, Artificial
  probe
  misc_feature (1)..(25): SEQ ID NO: 6018; WAN0249B8_at; Start 38; Stop 62
gctgatctacctttttacgatttta

SEQ ID NO: 16418 - DNA, 25 bp, Artificial
  probe
  misc_feature (1)..(25): SEQ ID NO: 6018; WAN0249B8_at; Start 36; Stop 60
aagctgatctacctttttacgattt

SEQ ID NO: 16419 - DNA, 25 bp, Artificial
  probe
  misc_feature (1)..(25): SEQ ID NO: 6018; WAN0249B8_at; Start 10; Stop 34
atagcataaaaaggcagatacagac

SEQ ID NO: 16420 - DNA, 25 bp, Artificial
  probe
  misc_feature (1)..(25): SEQ ID NO: 6018; WAN0249B8_at; Start 32; Stop 56
gacaaagctgatctacctttttacg

SEQ ID NO: 16421 - DNA, 25 bp, Artificial
  probe
  misc_feature (1)..(25): SEQ ID NO: 6018; WAN0249B8_at; Start 12; Stop 36
agcataaaaaggcagatacagacaa

SEQ ID NO: 16422 - DNA, 25 bp, Artificial
  probe
  misc_feature (1)..(25): SEQ ID NO: 6018; WAN0249B8_at; Start 8; Stop 32
gtatagcataaaaaggcagatacag

SEQ ID NO: 16423 - DNA, 25 bp, Artificial
  probe
  misc_feature (1)..(25): SEQ ID NO: 6018; WAN0249B8_at; Start 23; Stop 47
gcagatacagacaaagctgatctac

SEQ ID NO: 16424 - DNA, 25 bp, Artificial
  probe
  misc_feature (1)..(25): SEQ ID NO: 6018; WAN0249B8_at; Start 34; Stop 58
caaagctgatctacctttttacgat

SEQ ID NO: 16425 - DNA, 25 bp, Artificial
  probe
  misc_feature (1)..(25): SEQ ID NO: 6018; WAN0249B8_at; Start 15; Stop 39
ataaaaaggcagatacagacaaagc

SEQ ID NO: 16426 - DNA, 25 bp, Artificial
  probe
  misc_feature (1)..(25): SEQ ID NO: 6018; WAN0249B8_at; Start 16; Stop 40
taaaaaggcagatacagacaaagct

SEQ ID NO: 16427 - DNA, 25 bp, Artificial
  probe
  misc_feature (1)..(25): SEQ ID NO: 6018; WAN0249B8_at; Start 17; Stop 41
aaaaaggcagatacagacaaagctg

SEQ ID NO: 16428 - DNA, 25 bp, Artificial
  probe
  misc_feature (1)..(25): SEQ ID NO: 6018; WAN0249B8_at; Start 30; Stop 54
cagacaaagctgatctaccttttta

SEQ ID NO: 16429 - DNA, 25 bp, Artificial
  probe
  misc_feature (1)..(25): SEQ ID NO: 6018; WAN0249B8_at; Start 7; Stop 31
agtatagcataaaaaggcagataca

SEQ ID NO: 16430 - DNA, 25 bp, Artificial
  probe
  misc_feature (1)..(25): SEQ ID NO: 6018; WAN0249B8_at; Start 33; Stop 57
acaaagctgatctacctttttacga

SEQ ID NO: 16431 - DNA, 25 bp, Artificial
  probe
  misc_feature (1)..(25): SEQ ID NO: 6018; WAN0249B8_at; Start 14; Stop 38
cataaaaaggcagatacagacaaag

SEQ ID NO: 16432 - DNA, 25 bp, Artificial
  probe
  misc_feature (1)..(25): SEQ ID NO: 6018; WAN0249B8_at; Start 18; Stop 42
aaaaggcagatacagacaaagctga

SEQ ID NO: 16433 - DNA, 25 bp, Artificial
  probe
  misc_feature (1)..(25): SEQ ID NO: 6018; WAN0249B8_at; Start 27; Stop 51
atacagacaaagctgatctaccttt

SEQ ID NO: 16434 - DNA, 25 bp, Artificial
  probe
  misc_feature (1)..(25): SEQ ID NO: 6018; WAN0249B8_at; Start 19; Stop 43
aaaggcagatacagacaaagctgat

SEQ ID NO: 16435 - DNA, 25 bp, Artificial
  probe
  misc_feature (1)..(25): SEQ ID NO: 6018; WAN0249B8_at; Start 9; Stop 33
tatagcataaaaaggcagatacaga

SEQ ID NO: 16436 - DNA, 25 bp, Artificial
  probe
  misc_feature (1)..(25): SEQ ID NO: 6018; WAN0249B8_at; Start 37; Stop 61
agctgatctacctttttacgatttt

SEQ ID NO: 16437 - DNA, 25 bp, Artificial
  probe
  misc_feature (1)..(25): SEQ ID NO: 6018; WAN0249B8_at; Start 29; Stop 53
acagacaaagctgatctaccttttt

SEQ ID NO: 16438 - DNA, 25 bp, Artificial
  probe
  misc_feature (1)..(25): SEQ ID NO: 6018; WAN0249B8_at; Start 39; Stop 63
ctgatctacctttttacgattttat

SEQ ID NO: 16439 - DNA, 25 bp, Artificial
  probe
  misc_feature (1)..(25): SEQ ID NO: 6018; WAN0249B8_at; Start 26; Stop 50
gatacagacaaagctgatctacctt

SEQ ID NO: 16440 - DNA, 25 bp, Artificial
  probe
  misc_feature (1)..(25): SEQ ID NO: 6018; WAN0249B8_at; Start 24; Stop 48
cagatacagacaaagctgatctacc

SEQ ID NO: 16441 - DNA, 25 bp, Artificial
  probe
  misc_feature (1)..(25): SEQ ID NO: 6018; WAN0249B8_at; Start 13; Stop 37
gcataaaaaggcagatacagacaaa

SEQ ID NO: 16442 - DNA, 25 bp, Artificial
  probe
  misc_feature (1)..(25): SEQ ID NO: 5998; WAN0249B9_at; Start 31; Stop 55
cagattcattccactagatttcgaa

SEQ ID NO: 16443 - DNA, 25 bp, Artificial
  probe
  misc_feature (1)..(25): SEQ ID NO: 5998; WAN0249B9_at; Start 12; Stop 36
aaagctcgatggactattccagatt

SEQ ID NO: 16444 - DNA, 25 bp, Artificial
  probe
  misc_feature (1)..(25): SEQ ID NO: 5998; WAN0249B9_at; Start 29; Stop 53
tccagattcattccactagatttcg

SEQ ID NO: 16445 - DNA, 25 bp, Artificial
  probe
  misc_feature (1)..(25): SEQ ID NO: 5998; WAN0249B9_at; Start 10; Stop 34
agaaagctcgatggactattccaga

SEQ ID NO: 16446 - DNA, 25 bp, Artificial
  probe
  misc_feature (1)..(25): SEQ ID NO: 5998; WAN0249B9_at; Start 1; Stop 25
aagagtattagaaagctcgatggac

SEQ ID NO: 16447 - DNA, 25 bp, Artificial
  probe
  misc_feature (1)..(25): SEQ ID NO: 5998; WAN0249B9_at; Start 4; Stop 28
agtattagaaagctcgatggactat

SEQ ID NO: 16448 - DNA, 25 bp, Artificial
  probe
  misc_feature (1)..(25): SEQ ID NO: 5998; WAN0249B9_at; Start 8; Stop 32
ttagaaagctcgatggactattcca

SEQ ID NO: 16449 - DNA, 25 bp, Artificial
  probe
  misc_feature (1)..(25): SEQ ID NO: 5998; WAN0249B9_at; Start 7; Stop 31
attagaaagctcgatggactattcc

SEQ ID NO: 16450 - DNA, 25 bp, Artificial
  probe
  misc_feature (1)..(25): SEQ ID NO: 5998; WAN0249B9_at; Start 9; Stop 33
tagaaagctcgatggactattccag

SEQ ID NO: 16451 - DNA, 25 bp, Artificial
  probe
  misc_feature (1)..(25): SEQ ID NO: 5998; WAN0249B9_at; Start 26; Stop 50
tattccagattcattccactagatt

SEQ ID NO: 16452 - DNA, 25 bp, Artificial
  probe
  misc_feature (1)..(25): SEQ ID NO: 5998; WAN0249B9_at; Start 11; Stop 35
gaaagctcgatggactattccagat

SEQ ID NO: 16453 - DNA, 25 bp, Artificial
  probe
  misc_feature (1)..(25): SEQ ID NO: 5998; WAN0249B9_at; Start 30; Stop 54
ccagattcattccactagatttcga

SEQ ID NO: 16454 - DNA, 25 bp, Artificial
  probe
  misc_feature (1)..(25): SEQ ID NO: 5998; WAN0249B9_at; Start 3; Stop 27
gagtattagaaagctcgatggacta

SEQ ID NO: 16455 - DNA, 25 bp, Artificial
  probe
  misc_feature (1)..(25): SEQ ID NO: 5998; WAN0249B9_at; Start 25; Stop 49
ctattccagattcattccactagat

SEQ ID NO: 16456 - DNA, 25 bp, Artificial
  probe
  misc_feature (1)..(25): SEQ ID NO: 5998; WAN0249B9_at; Start 24; Stop 48
actattccagattcattccactaga

SEQ ID NO: 16457 - DNA, 25 bp, Artificial
  probe
  misc_feature (1)..(25): SEQ ID NO: 5998; WAN0249B9_at; Start 28; Stop 52
ttccagattcattccactagatttc

SEQ ID NO: 16458 - DNA, 25 bp, Artificial
  probe
  misc_feature (1)..(25): SEQ ID NO: 5998; WAN0249B9_at; Start 27; Stop 51
attccagattcattccactagattt

SEQ ID NO: 16459 - DNA, 25 bp, Artificial
  probe
  misc_feature (1)..(25): SEQ ID NO: 5998; WAN0249B9_at; Start 5; Stop 29
gtattagaaagctcgatggactatt

SEQ ID NO: 16460 - DNA, 25 bp, Artificial
  probe
  misc_feature (1)..(25): SEQ ID NO: 5998; WAN0249B9_at; Start 6; Stop 30
tattagaaagctcgatggactattc

SEQ ID NO: 16461 - DNA, 25 bp, Artificial
  probe
  misc_feature (1)..(25): SEQ ID NO: 5998; WAN0249B9_at; Start 2; Stop 26
agagtattagaaagctcgatggact

SEQ ID NO: 16462 - DNA, 25 bp, Artificial
  probe
  misc_feature (1)..(25): SEQ ID NO: 6020; WAN0249BA_at; Start 38; Stop 62
cattctttcactgtagaatcgtgtt

SEQ ID NO: 16463 - DNA, 25 bp, Artificial
  probe
  misc_feature (1)..(25): SEQ ID NO: 6020; WAN0249BA_at; Start 44; Stop 68
ttcactgtagaatcgtgttataaaa

SEQ ID NO: 16464 - DNA, 25 bp, Artificial
  probe
  misc_feature (1)..(25): SEQ ID NO: 6020; WAN0249BA_at; Start 43; Stop 67
tttcactgtagaatcgtgttataaa

SEQ ID NO: 16465 - DNA, 25 bp, Artificial
  probe
  misc_feature (1)..(25): SEQ ID NO: 6020; WAN0249BA_at; Start 65; Stop 89
aaaatctaaaacaaaggagatctct

SEQ ID NO: 16466 - DNA, 25 bp, Artificial
  probe
  misc_feature (1)..(25): SEQ ID NO: 6020; WAN0249BA_at; Start 50; Stop 74
gtagaatcgtgttataaaatctaaa

SEQ ID NO: 16467 - DNA, 25 bp, Artificial
  probe
  misc_feature (1)..(25): SEQ ID NO: 6020; WAN0249BA_at; Start 33; Stop 57
aagaacattctttcactgtagaatc

SEQ ID NO: 16468 - DNA, 25 bp, Artificial
  probe
  misc_feature (1)..(25): SEQ ID NO: 6020; WAN0249BA_at; Start 53; Stop 77
gaatcgtgttataaaatctaaaaca

SEQ ID NO: 16469 - DNA, 25 bp, Artificial
  probe
  misc_feature (1)..(25): SEQ ID NO: 6020; WAN0249BA_at; Start 64; Stop 88
taaaatctaaaacaaaggagatctc

SEQ ID NO: 16470 - DNA, 25 bp, Artificial
  probe
  misc_feature (1)..(25): SEQ ID NO: 6020; WAN0249BA_at; Start 37; Stop 61
acattctttcactgtagaatcgtgt

SEQ ID NO: 16471 - DNA, 25 bp, Artificial
  probe
  misc_feature (1)..(25): SEQ ID NO: 6020; WAN0249BA_at; Start 51; Stop 75
tagaatcgtgttataaaatctaaaa

SEQ ID NO: 16472 - DNA, 25 bp, Artificial
  probe
  misc_feature (1)..(25): SEQ ID NO: 6020; WAN0249BA_at; Start 34; Stop 58
agaacattctttcactgtagaatcg

SEQ ID NO: 16473 - DNA, 25 bp, Artificial
  probe
  misc_feature (1)..(25): SEQ ID NO: 6020; WAN0249BA_at; Start 46; Stop 70
cactgtagaatcgtgttataaaatc

SEQ ID NO: 16474 - DNA, 25 bp, Artificial
  probe
  misc_feature (1)..(25): SEQ ID NO: 6020; WAN0249BA_at; Start 62; Stop 86
tataaaatctaaaacaaaggagatc

SEQ ID NO: 16475 - DNA, 25 bp, Artificial
  probe
  misc_feature (1)..(25): SEQ ID NO: 6020; WAN0249BA_at; Start 36; Stop 60
aacattctttcactgtagaatcgtg

SEQ ID NO: 16476 - DNA, 25 bp, Artificial
  probe
  misc_feature (1)..(25): SEQ ID NO: 6020; WAN0249BA_at; Start 39; Stop 63
attctttcactgtagaatcgtgtta

SEQ ID NO: 16477 - DNA, 25 bp, Artificial
  probe
  misc_feature (1)..(25): SEQ ID NO: 6020; WAN0249BA_at; Start 32; Stop 56
caagaacattctttcactgtagaat

SEQ ID NO: 16478 - DNA, 25 bp, Artificial
  probe
  misc_feature (1)..(25): SEQ ID NO: 6020; WAN0249BA_at; Start 42; Stop 66
ctttcactgtagaatcgtgttataa

SEQ ID NO: 16479 - DNA, 25 bp, Artificial
  probe
  misc_feature (1)..(25): SEQ ID NO: 6020; WAN0249BA_at; Start 41; Stop 65
tctttcactgtagaatcgtgttata

SEQ ID NO: 16480 - DNA, 25 bp, Artificial
  probe
  misc_feature (1)..(25): SEQ ID NO: 6020; WAN0249BA_at; Start 40; Stop 64
ttctttcactgtagaatcgtgttat

SEQ ID NO: 16481 - DNA, 25 bp, Artificial
  probe
  misc_feature (1)..(25): SEQ ID NO: 6020; WAN0249BA_at; Start 45; Stop 69
tcactgtagaatcgtgttataaaat

SEQ ID NO: 16482 - DNA, 25 bp, Artificial
  probe
  misc_feature (1)..(25): SEQ ID NO: 6020; WAN0249BA_at; Start 63; Stop 87
ataaaatctaaaacaaaggagatct

SEQ ID NO: 16483 - DNA, 25 bp, Artificial
  probe
  misc_feature (1)..(25): SEQ ID NO: 6020; WAN0249BA_at; Start 35; Stop 59
gaacattctttcactgtagaatcgt

SEQ ID NO: 16484 - DNA, 25 bp, Artificial
  probe
  misc_feature (1)..(25): SEQ ID NO: 6020; WAN0249BA_at; Start 48; Stop 72
ctgtagaatcgtgttataaaatcta

SEQ ID NO: 16485 - DNA, 25 bp, Artificial
  probe
  misc_feature (1)..(25): SEQ ID NO: 6020; WAN0249BA_at; Start 66; Stop 90
aaatctaaaacaaaggagatctctc

SEQ ID NO: 16486 - DNA, 25 bp, Artificial
  probe
  misc_feature (1)..(25): SEQ ID NO: 6020; WAN0249BA_at; Start 47; Stop 71
actgtagaatcgtgttataaaatct

SEQ ID NO: 16487 - DNA, 25 bp, Artificial
  probe
  misc_feature (1)..(25): SEQ ID NO: 5994; WAN0249BB_at; Start 41; Stop 65
ccgtactgcccgacatagcctatta

SEQ ID NO: 16488 - DNA, 25 bp, Artificial
  probe
  misc_feature (1)..(25): SEQ ID NO: 5994; WAN0249BB_at; Start 191; Stop 215
ttacgttcagagataagagcagcac

SEQ ID NO: 16489 - DNA, 25 bp, Artificial
  probe
  misc_feature (1)..(25): SEQ ID NO: 5994; WAN0249BB_at; Start 52; Stop 76
gacatagcctattaccctttcacga

SEQ ID NO: 16490 - DNA, 25 bp, Artificial
  probe
  misc_feature (1)..(25): SEQ ID NO: 5994; WAN0249BB_at; Start 152; Stop 176
aagagttgtctattatgaactagga

SEQ ID NO: 16491 - DNA, 25 bp, Artificial
  probe
  misc_feature (1)..(25): SEQ ID NO: 5994; WAN0249BB_at; Start 139; Stop 163
cagtcattggtctaagagttgtcta

SEQ ID NO: 16492 - DNA, 25 bp, Artificial
  probe
  misc_feature (1)..(25): SEQ ID NO: 5994; WAN0249BB_at; Start 56; Stop 80
tagcctattaccctttcacgacctg

SEQ ID NO: 16493 - DNA, 25 bp, Artificial
  probe
  misc_feature (1)..(25): SEQ ID NO: 5994; WAN0249BB_at; Start 75; Stop 99
gacctgatgccgtataacgggtagc

SEQ ID NO: 16494 - DNA, 25 bp, Artificial
  probe
  misc_feature (1)..(25): SEQ ID NO: 5994; WAN0249BB_at; Start 92; Stop 116
cgggtagcttctgcctcttcgaaag

SEQ ID NO: 16495 - DNA, 25 bp, Artificial
  probe
  misc_feature (1)..(25): SEQ ID NO: 5994; WAN0249BB_at; Start 87; Stop 111
tataacgggtagcttctgcctcttc

SEQ ID NO: 16496 - DNA, 25 bp, Artificial
  probe
  misc_feature (1)..(25): SEQ ID NO: 5994; WAN0249BB_at; Start 137; Stop 161
tccagtcattggtctaagagttgtc

SEQ ID NO: 16497 - DNA, 25 bp, Artificial
  probe
  misc_feature (1)..(25): SEQ ID NO: 5994; WAN0249BB_at; Start 158; Stop 182
tgtctattatgaactaggataatgg

SEQ ID NO: 16498 - DNA, 25 bp, Artificial
  probe
  misc_feature (1)..(25): SEQ ID NO: 5994; WAN0249BB_at; Start 103; Stop 127
tgcctcttcgaaagtcaaaaaacac

SEQ ID NO: 16499 - DNA, 25 bp, Artificial
  probe
  misc_feature (1)..(25): SEQ ID NO: 5994; WAN0249BB_at; Start 85; Stop 109
cgtataacgggtagcttctgcctct

SEQ ID NO: 16500 - DNA, 25 bp, Artificial
  probe
  misc_feature (1)..(25): SEQ ID NO: 5994; WAN0249BB_at; Start 147; Stop 171
ggtctaagagttgtctattatgaac

SEQ ID NO: 16501 - DNA, 25 bp, Artificial
  probe
  misc_feature (1)..(25): SEQ ID NO: 5994; WAN0249BB_at; Start 98; Stop 122
gcttctgcctcttcgaaagtcaaaa

SEQ ID NO: 16502 - DNA, 25 bp, Artificial
  probe
  misc_feature (1)..(25): SEQ ID NO: 5994; WAN0249BB_at; Start 21; Stop 45
tcagtcatttcttagccccaccgta

SEQ ID NO: 16503 - DNA, 25 bp, Artificial
  probe
  misc_feature (1)..(25): SEQ ID NO: 5994; WAN0249BB_at; Start 171; Stop 195
ctaggataatggtttttgtcttacg

SEQ ID NO: 16504 - DNA, 25 bp, Artificial
  probe
  misc_feature (1)..(25): SEQ ID NO: 5994; WAN0249BB_at; Start 130; Stop 154
taaacgatccagtcattggtctaag

SEQ ID NO: 16505 - DNA, 25 bp, Artificial
  probe
  misc_feature (1)..(25): SEQ ID NO: 5994; WAN0249BB_at; Start 61; Stop 85
tattaccctttcacgacctgatgcc

SEQ ID NO: 16506 - DNA, 25 bp, Artificial
  probe
  misc_feature (1)..(25): SEQ ID NO: 5994; WAN0249BB_at; Start 121; Stop 145
aaaacactttaaacgatccagtcat

SEQ ID NO: 16507 - DNA, 25 bp, Artificial
  probe
  misc_feature (1)..(25): SEQ ID NO: 5994; WAN0249BB_at; Start 178; Stop 202
aatggtttttgtcttacgttcagag

SEQ ID NO: 16508 - DNA, 25 bp, Artificial
  probe
  misc_feature (1)..(25): SEQ ID NO: 5994; WAN0249BB_at; Start 83; Stop 107
gccgtataacgggtagcttctgcct

SEQ ID NO: 16509 - DNA, 25 bp, Artificial
  probe
  misc_feature (1)..(25): SEQ ID NO: 5994; WAN0249BB_at; Start 96; Stop 120
tagcttctgcctcttcgaaagtcaa

SEQ ID NO: 16510 - DNA, 25 bp, Artificial
  probe
  misc_feature (1)..(25): SEQ ID NO: 5994; WAN0249BB_at; Start 58; Stop 82
gcctattaccctttcacgacctgat

SEQ ID NO: 16511 - DNA, 25 bp, Artificial
  probe
  misc_feature (1)..(25): SEQ ID NO: 5994; WAN0249BB_at; Start 71; Stop 95
tcacgacctgatgccgtataacggg

SEQ ID NO: 16512 - DNA, 25 bp, Artificial
  probe
  misc_feature (1)..(25): SEQ ID NO: 5994; WAN0249BB_at; Start 6; Stop 30
catcaaccagtttactcagtcattt

SEQ ID NO: 16513 - DNA, 25 bp, Artificial
  probe
  misc_feature (1)..(25): SEQ ID NO: 5994; WAN0249BB_at; Start 89; Stop 113
taacgggtagcttctgcctcttcga

SEQ ID NO: 16514 - DNA, 25 bp, Artificial
  probe
  misc_feature (1)..(25): SEQ ID NO: 5994; WAN0249BB_at; Start 1; Stop 25
aacaacatcaaccagtttactcagt

SEQ ID NO: 16515 - DNA, 25 bp, Artificial
  probe
  misc_feature (1)..(25): SEQ ID NO: 5994; WAN0249BB_at; Start 79; Stop 103
tgatgccgtataacgggtagcttct

SEQ ID NO: 16516 - DNA, 25 bp, Artificial
  probe
  misc_feature (1)..(25): SEQ ID NO: 5994; WAN0249BB_at; Start 125; Stop 149
cactttaaacgatccagtcattggt

SEQ ID NO: 16517 - DNA, 25 bp, Artificial
  probe
  misc_feature (1)..(25): SEQ ID NO: 5994; WAN0249BB_at; Start 43; Stop 67
gtactgcccgacatagcctattacc

SEQ ID NO: 16518 - DNA, 25 bp, Artificial
  probe
  misc_feature (1)..(25): SEQ ID NO: 5994; WAN0249BB_at; Start 14; Stop 38
agtttactcagtcatttcttagccc

SEQ ID NO: 16519 - DNA, 25 bp, Artificial
  probe
  misc_feature (1)..(25): SEQ ID NO: 5994; WAN0249BB_at; Start 64; Stop 88
taccctttcacgacctgatgccgta

SEQ ID NO: 16520 - DNA, 25 bp, Artificial
  probe
  misc_feature (1)..(25): SEQ ID NO: 5994; WAN0249BB_at; Start 132; Stop 156
aacgatccagtcattggtctaagag

SEQ ID NO: 16521 - DNA, 25 bp, Artificial
  probe
  misc_feature (1)..(25): SEQ ID NO: 6134; WAN0249BC_at; Start 25; Stop 49
tttggcattcctagtcttcatatca

SEQ ID NO: 16522 - DNA, 25 bp, Artificial
  probe
  misc_feature (1)..(25): SEQ ID NO: 6134; WAN0249BC_at; Start 24; Stop 48
ttttggcattcctagtcttcatatc

SEQ ID NO: 16523 - DNA, 25 bp, Artificial
  probe
  misc_feature (1)..(25): SEQ ID NO: 6134; WAN0249BC_at; Start 23; Stop 47
gttttggcattcctagtcttcatat

SEQ ID NO: 16524 - DNA, 25 bp, Artificial
  probe
  misc_feature (1)..(25): SEQ ID NO: 6134; WAN0249BC_at; Start 26; Stop 50
ttggcattcctagtcttcatatcat

SEQ ID NO: 16525 - DNA, 25 bp, Artificial
  probe
  misc_feature (1)..(25): SEQ ID NO: 6009; WAN0249BD_at; Start 140; Stop 164
tcaatgaaattattgctcgtgtagg

SEQ ID NO: 16526 - DNA, 25 bp, Artificial
  probe
  misc_feature (1)..(25): SEQ ID NO: 6009; WAN0249BD_at; Start 147; Stop 171
aattattgctcgtgtaggaaaacag

SEQ ID NO: 16527 - DNA, 25 bp, Artificial
  probe
  misc_feature (1)..(25): SEQ ID NO: 6009; WAN0249BD_at; Start 171; Stop 195
gtttaatcttaacatccacgaagag

SEQ ID NO: 16528 - DNA, 25 bp, Artificial
  probe
  misc_feature (1)..(25): SEQ ID NO: 6009; WAN0249BD_at; Start 167; Stop 191
aacagtttaatcttaacatccacga

SEQ ID NO: 16529 - DNA, 25 bp, Artificial
  probe
  misc_feature (1)..(25): SEQ ID NO: 6009; WAN0249BD_at; Start 155; Stop 179
ctcgtgtaggaaaacagtttaatct

SEQ ID NO: 16530 - DNA, 25 bp, Artificial
  probe
  misc_feature (1)..(25): SEQ ID NO: 6009; WAN0249BD_at; Start 121; Stop 145
tatgaccaaaatcagaaaatcaatg

SEQ ID NO: 16531 - DNA, 25 bp, Artificial
  probe
  misc_feature (1)..(25): SEQ ID NO: 6009; WAN0249BD_at; Start 52; Stop 76
gactttaacaattatggttatgtct

SEQ ID NO: 16532 - DNA, 25 bp, Artificial
  probe
  misc_feature (1)..(25): SEQ ID NO: 6009; WAN0249BD_at; Start 111; Stop 135
tgatgctttttatgaccaaaatcag

SEQ ID NO: 16533 - DNA, 25 bp, Artificial
  probe
  misc_feature (1)..(25): SEQ ID NO: 6009; WAN0249BD_at; Start 112; Stop 136
gatgctttttatgaccaaaatcaga

SEQ ID NO: 16534 - DNA, 25 bp, Artificial
  probe
  misc_feature (1)..(25): SEQ ID NO: 6009; WAN0249BD_at; Start 115; Stop 139
gctttttatgaccaaaatcagaaaa

SEQ ID NO: 16535 - DNA, 25 bp, Artificial
  probe
  misc_feature (1)..(25): SEQ ID NO: 6009; WAN0249BD_at; Start 146; Stop 170
aaattattgctcgtgtaggaaaaca

SEQ ID NO: 16536 - DNA, 25 bp, Artificial
  probe
  misc_feature (1)..(25): SEQ ID NO: 6009; WAN0249BD_at; Start 123; Stop 147
tgaccaaaatcagaaaatcaatgaa

SEQ ID NO: 16537 - DNA, 25 bp, Artificial
  probe
  misc_feature (1)..(25): SEQ ID NO: 6009; WAN0249BD_at; Start 151; Stop 175
attgctcgtgtaggaaaacagttta

SEQ ID NO: 16538 - DNA, 25 bp, Artificial
  probe
  misc_feature (1)..(25): SEQ ID NO: 6009; WAN0249BD_at; Start 124; Stop 148
gaccaaaatcagaaaatcaatgaaa

SEQ ID NO: 16539 - DNA, 25 bp, Artificial
  probe
  misc_feature (1)..(25): SEQ ID NO: 6009; WAN0249BD_at; Start 166; Stop 190
aaacagtttaatcttaacatccacg

SEQ ID NO: 16540 - DNA, 25 bp, Artificial
  probe
  misc_feature (1)..(25): SEQ ID NO: 6009; WAN0249BD_at; Start 109; Stop 133
gttgatgctttttatgaccaaaatc

SEQ ID NO: 16541 - DNA, 25 bp, Artificial
  probe
  misc_feature (1)..(25): SEQ ID NO: 6009; WAN0249BD_at; Start 164; Stop 188
gaaaacagtttaatcttaacatcca

SEQ ID NO: 16542 - DNA, 25 bp, Artificial
  probe
  misc_feature (1)..(25): SEQ ID NO: 6009; WAN0249BD_at; Start 145; Stop 169
gaaattattgctcgtgtaggaaaac

SEQ ID NO: 16543 - DNA, 25 bp, Artificial
  probe
  misc_feature (1)..(25): SEQ ID NO: 6009; WAN0249BD_at; Start 114; Stop 138
tgctttttatgaccaaaatcagaaa

SEQ ID NO: 16544 - DNA, 25 bp, Artificial
  probe
  misc_feature (1)..(25): SEQ ID NO: 6009; WAN0249BD_at; Start 144; Stop 168
tgaaattattgctcgtgtaggaaaa

SEQ ID NO: 16545 - DNA, 25 bp, Artificial
  probe
  misc_feature (1)..(25): SEQ ID NO: 6009; WAN0249BD_at; Start 142; Stop 166
aatgaaattattgctcgtgtaggaa

SEQ ID NO: 16546 - DNA, 25 bp, Artificial
  probe
  misc_feature (1)..(25): SEQ ID NO: 6009; WAN0249BD_at; Start 149; Stop 173
ttattgctcgtgtaggaaaacagtt

SEQ ID NO: 16547 - DNA, 25 bp, Artificial
  probe
  misc_feature (1)..(25): SEQ ID NO: 6009; WAN0249BD_at; Start 150; Stop 174
tattgctcgtgtaggaaaacagttt

SEQ ID NO: 16548 - DNA, 25 bp, Artificial
  probe
  misc_feature (1)..(25): SEQ ID NO: 6009; WAN0249BD_at; Start 154; Stop 178
gctcgtgtaggaaaacagtttaatc

SEQ ID NO: 16549 - DNA, 25 bp, Artificial
  probe
  misc_feature (1)..(25): SEQ ID NO: 6009; WAN0249BD_at; Start 172; Stop 196
tttaatcttaacatccacgaagagt

SEQ ID NO: 16550 - DNA, 25 bp, Artificial
  probe
  misc_feature (1)..(25): SEQ ID NO: 6009; WAN0249BD_at; Start 106; Stop 130
gatgttgatgctttttatgaccaaa

SEQ ID NO: 16551 - DNA, 25 bp, Artificial
  probe
  misc_feature (1)..(25): SEQ ID NO: 6009; WAN0249BD_at; Start 153; Stop 177
tgctcgtgtaggaaaacagtttaat

SEQ ID NO: 16552 - DNA, 25 bp, Artificial
  probe
  misc_feature (1)..(25): SEQ ID NO: 6009; WAN0249BD_at; Start 169; Stop 193
cagtttaatcttaacatccacgaag

SEQ ID NO: 16553 - DNA, 25 bp, Artificial
  probe
  misc_feature (1)..(25): SEQ ID NO: 6009; WAN0249BD_at; Start 173; Stop 197
ttaatcttaacatccacgaagagtt

SEQ ID NO: 16554 - DNA, 25 bp, Artificial
  probe
  misc_feature (1)..(25): SEQ ID NO: 6009; WAN0249BD_at; Start 118; Stop 142
ttttatgaccaaaatcagaaaatca

SEQ ID NO: 16555 - DNA, 25 bp, Artificial
  probe
  misc_feature (1)..(25): SEQ ID NO: 6009; WAN0249BD_at; Start 56; Stop 80
ttaacaattatggttatgtcttaga

SEQ ID NO: 16556 - DNA, 25 bp, Artificial
  probe
  misc_feature (1)..(25): SEQ ID NO: 6009; WAN0249BD_at; Start 152; Stop 176
ttgctcgtgtaggaaaacagtttaa

SEQ ID NO: 16557 - DNA, 25 bp, Artificial
  probe
  misc_feature (1)..(25): SEQ ID NO: 6009; WAN0249BD_at; Start 135; Stop 159
gaaaatcaatgaaattattgctcgt

SEQ ID NO: 16558 - DNA, 25 bp, Artificial
  probe
  misc_feature (1)..(25): SEQ ID NO: 6009; WAN0249BD_at; Start 141; Stop 165
caatgaaattattgctcgtgtagga

SEQ ID NO: 16559 - DNA, 25 bp, Artificial
  probe
  misc_feature (1)..(25): SEQ ID NO: 6082; WAN0249BE_at; Start 104; Stop 128
gcactgtttgagacgtttcagcgaa

SEQ ID NO: 16560 - DNA, 25 bp, Artificial
  probe
  misc_feature (1)..(25): SEQ ID NO: 6082; WAN0249BE_at; Start 9; Stop 33
aacaagatgattgtcaattagcccg

SEQ ID NO: 16561 - DNA, 25 bp, Artificial
  probe
  misc_feature (1)..(25): SEQ ID NO: 6082; WAN0249BE_at; Start 34; Stop 58
tcgtcttatttttatgatggaatga

SEQ ID NO: 16562 - DNA, 25 bp, Artificial
  probe
  misc_feature (1)..(25): SEQ ID NO: 6082; WAN0249BE_at; Start 17; Stop 41
gattgtcaattagcccgtcgtctta

SEQ ID NO: 16563 - DNA, 25 bp, Artificial
  probe
  misc_feature (1)..(25): SEQ ID NO: 6082; WAN0249BE_at; Start 74; Stop 98
aatcacttagagaattccagtcaat

SEQ ID NO: 16564 - DNA, 25 bp, Artificial
  probe
  misc_feature (1)..(25): SEQ ID NO: 6082; WAN0249BE_at; Start 31; Stop 55
ccgtcgtcttatttttatgatggaa

SEQ ID NO: 16565 - DNA, 25 bp, Artificial
  probe
  misc_feature (1)..(25): SEQ ID NO: 6082; WAN0249BE_at; Start 91; Stop 115
cagtcaatttctagcactgtttgag

SEQ ID NO: 16566 - DNA, 25 bp, Artificial
  probe
  misc_feature (1)..(25): SEQ ID NO: 6082; WAN0249BE_at; Start 26; Stop 50
ttagcccgtcgtcttatttttatga

SEQ ID NO: 16567 - DNA, 25 bp, Artificial
  probe
  misc_feature (1)..(25): SEQ ID NO: 6082; WAN0249BE_at; Start 63; Stop 87
aaatcggaacaaatcacttagagaa

SEQ ID NO: 16568 - DNA, 25 bp, Artificial
  probe
  misc_feature (1)..(25): SEQ ID NO: 6082; WAN0249BE_at; Start 1; Stop 25
cagtatcaaacaagatgattgtcaa

SEQ ID NO: 16569 - DNA, 25 bp, Artificial
  probe
  misc_feature (1)..(25): SEQ ID NO: 6082; WAN0249BE_at; Start 14; Stop 38
gatgattgtcaattagcccgtcgtc

SEQ ID NO: 16570 - DNA, 25 bp, Artificial
  probe
  misc_feature (1)..(25): SEQ ID NO: 6082; WAN0249BE_at; Start 12; Stop 36
aagatgattgtcaattagcccgtcg

SEQ ID NO: 16571 - DNA, 25 bp, Artificial
  probe
  misc_feature (1)..(25): SEQ ID NO: 6082; WAN0249BE_at; Start 66; Stop 90
tcggaacaaatcacttagagaattc

SEQ ID NO: 16572 - DNA, 25 bp, Artificial
  probe
  misc_feature (1)..(25): SEQ ID NO: 6082; WAN0249BE_at; Start 94; Stop 118
tcaatttctagcactgtttgagacg

SEQ ID NO: 16573 - DNA, 25 bp, Artificial
  probe
  misc_feature (1)..(25): SEQ ID NO: 6082; WAN0249BE_at; Start 105; Stop 129
cactgtttgagacgtttcagcgaac

SEQ ID NO: 16574 - DNA, 25 bp, Artificial
  probe
  misc_feature (1)..(25): SEQ ID NO: 6082; WAN0249BE_at; Start 102; Stop 126
tagcactgtttgagacgtttcagcg

SEQ ID NO: 16575 - DNA, 25 bp, Artificial
  probe
  misc_feature (1)..(25): SEQ ID NO: 6082; WAN0249BE_at; Start 83; Stop 107
gagaattccagtcaatttctagcac

SEQ ID NO: 16576 - DNA, 25 bp, Artificial
  probe
  misc_feature (1)..(25): SEQ ID NO: 6082; WAN0249BE_at; Start 7; Stop 31
caaacaagatgattgtcaattagcc

SEQ ID NO: 16577 - DNA, 25 bp, Artificial
  probe
  misc_feature (1)..(25): SEQ ID NO: 6082; WAN0249BE_at; Start 69; Stop 93
gaacaaatcacttagagaattccag

SEQ ID NO: 16578 - DNA, 25 bp, Artificial
  probe
  misc_feature (1)..(25): SEQ ID NO: 6082; WAN0249BE_at; Start 61; Stop 85
taaaatcggaacaaatcacttagag

SEQ ID NO: 16579 - DNA, 25 bp, Artificial
  probe
  misc_feature (1)..(25): SEQ ID NO: 6082; WAN0249BE_at; Start 30; Stop 54
cccgtcgtcttatttttatgatgga

SEQ ID NO: 16580 - DNA, 25 bp, Artificial
  probe
  misc_feature (1)..(25): SEQ ID NO: 6082; WAN0249BE_at; Start 100; Stop 124
tctagcactgtttgagacgtttcag

SEQ ID NO: 16581 - DNA, 25 bp, Artificial
  probe
  misc_feature (1)..(25): SEQ ID NO: 6082; WAN0249BE_at; Start 16; Stop 40
tgattgtcaattagcccgtcgtctt

SEQ ID NO: 16582 - DNA, 25 bp, Artificial
  probe
  misc_feature (1)..(25): SEQ ID NO: 6082; WAN0249BE_at; Start 15; Stop 39
atgattgtcaattagcccgtcgtct

SEQ ID NO: 16583 - DNA, 25 bp, Artificial
  probe
  misc_feature (1)..(25): SEQ ID NO: 6082; WAN0249BE_at; Start 11; Stop 35
caagatgattgtcaattagcccgtc

SEQ ID NO: 16584 - DNA, 25 bp, Artificial
  probe
  misc_feature (1)..(25): SEQ ID NO: 6082; WAN0249BE_at; Start 28; Stop 52
agcccgtcgtcttatttttatgatg

SEQ ID NO: 16585 - DNA, 25 bp, Artificial
  probe
  misc_feature (1)..(25): SEQ ID NO: 6082; WAN0249BE_at; Start 77; Stop 101
cacttagagaattccagtcaatttc

SEQ ID NO: 16586 - DNA, 25 bp, Artificial
  probe
  misc_feature (1)..(25): SEQ ID NO: 6082; WAN0249BE_at; Start 72; Stop 96
caaatcacttagagaattccagtca

SEQ ID NO: 16587 - DNA, 25 bp, Artificial
  probe
  misc_feature (1)..(25): SEQ ID NO: 6082; WAN0249BE_at; Start 51; Stop 75
tggaatgaaataaaatcggaacaaa

SEQ ID NO: 16588 - DNA, 25 bp, Artificial
  probe
  misc_feature (1)..(25): SEQ ID NO: 6082; WAN0249BE_at; Start 81; Stop 105
tagagaattccagtcaatttctagc

SEQ ID NO: 16589 - DNA, 25 bp, Artificial
  probe
  misc_feature (1)..(25): SEQ ID NO: 6082; WAN0249BE_at; Start 98; Stop 122
tttctagcactgtttgagacgtttc

SEQ ID NO: 16590 - DNA, 25 bp, Artificial
  probe
  misc_feature (1)..(25): SEQ ID NO: 6082; WAN0249BE_at; Start 85; Stop 109
gaattccagtcaatttctagcactg

SEQ ID NO: 16591 - DNA, 25 bp, Artificial
  probe
  misc_feature (1)..(25): SEQ ID NO: 6082; WAN0249BE_at; Start 48; Stop 72
tgatggaatgaaataaaatcggaac

SEQ ID NO: 16592 - DNA, 25 bp, Artificial
  probe
  misc_feature (1)..(25): SEQ ID NO: 6082; WAN0249BE_at; Start 95; Stop 119
caatttctagcactgtttgagacgt

SEQ ID NO: 16593 - DNA, 25 bp, Artificial
  probe
  misc_feature (1)..(25): SEQ ID NO: 6010; WAN0249BF_at; Start 32; Stop 56
ttactaaattcttcctctactacac

SEQ ID NO: 16594 - DNA, 25 bp, Artificial
  probe
  misc_feature (1)..(25): SEQ ID NO: 6010; WAN0249BF_at; Start 43; Stop 67
ttcctctactacactaagtatccgt

SEQ ID NO: 16595 - DNA, 25 bp, Artificial
  probe
  misc_feature (1)..(25): SEQ ID NO: 6010; WAN0249BF_at; Start 44; Stop 68
tcctctactacactaagtatccgtt

SEQ ID NO: 16596 - DNA, 25 bp, Artificial
  probe
  misc_feature (1)..(25): SEQ ID NO: 6010; WAN0249BF_at; Start 41; Stop 65
tcttcctctactacactaagtatcc

SEQ ID NO: 16597 - DNA, 25 bp, Artificial
  probe
  misc_feature (1)..(25): SEQ ID NO: 6010; WAN0249BF_at; Start 38; Stop 62
aattcttcctctactacactaagta

SEQ ID NO: 16598 - DNA, 25 bp, Artificial
  probe
  misc_feature (1)..(25): SEQ ID NO: 6010; WAN0249BF_at; Start 34; Stop 58
actaaattcttcctctactacacta

SEQ ID NO: 16599 - DNA, 25 bp, Artificial
  probe
  misc_feature (1)..(25): SEQ ID NO: 6010; WAN0249BF_at; Start 29; Stop 53
taattactaaattcttcctctacta

SEQ ID NO: 16600 - DNA, 25 bp, Artificial
  probe
  misc_feature (1)..(25): SEQ ID NO: 6010; WAN0249BF_at; Start 53; Stop 77
acactaagtatccgttcaatcacca

SEQ ID NO: 16601 - DNA, 25 bp, Artificial
  probe
  misc_feature (1)..(25): SEQ ID NO: 6010; WAN0249BF_at; Start 52; Stop 76
tacactaagtatccgttcaatcacc

SEQ ID NO: 16602 - DNA, 25 bp, Artificial
  probe
  misc_feature (1)..(25): SEQ ID NO: 6010; WAN0249BF_at; Start 33; Stop 57
tactaaattcttcctctactacact

SEQ ID NO: 16603 - DNA, 25 bp, Artificial
  probe
  misc_feature (1)..(25): SEQ ID NO: 6010; WAN0249BF_at; Start 46; Stop 70
ctctactacactaagtatccgttca

SEQ ID NO: 16604 - DNA, 25 bp, Artificial
  probe
  misc_feature (1)..(25): SEQ ID NO: 6010; WAN0249BF_at; Start 49; Stop 73
tactacactaagtatccgttcaatc

SEQ ID NO: 16605 - DNA, 25 bp, Artificial
  probe
  misc_feature (1)..(25): SEQ ID NO: 6010; WAN0249BF_at; Start 47; Stop 71
tctactacactaagtatccgttcaa

SEQ ID NO: 16606 - DNA, 25 bp, Artificial
  probe
  misc_feature (1)..(25): SEQ ID NO: 6010; WAN0249BF_at; Start 42; Stop 66
cttcctctactacactaagtatccg

SEQ ID NO: 16607 - DNA, 25 bp, Artificial
  probe
  misc_feature (1)..(25): SEQ ID NO: 6010; WAN0249BF_at; Start 37; Stop 61
aaattcttcctctactacactaagt

SEQ ID NO: 16608 - DNA, 25 bp, Artificial
  probe
  misc_feature (1)..(25): SEQ ID NO: 6010; WAN0249BF_at; Start 51; Stop 75
ctacactaagtatccgttcaatcac

SEQ ID NO: 16609 - DNA, 25 bp, Artificial
  probe
  misc_feature (1)..(25): SEQ ID NO: 6010; WAN0249BF_at; Start 31; Stop 55
attactaaattcttcctctactaca

SEQ ID NO: 16610 - DNA, 25 bp, Artificial
  probe
  misc_feature (1)..(25): SEQ ID NO: 6010; WAN0249BF_at; Start 50; Stop 74
actacactaagtatccgttcaatca

SEQ ID NO: 16611 - DNA, 25 bp, Artificial
  probe
  misc_feature (1)..(25): SEQ ID NO: 6010; WAN0249BF_at; Start 48; Stop 72
ctactacactaagtatccgttcaat

SEQ ID NO: 16612 - DNA, 25 bp, Artificial
  probe
  misc_feature (1)..(25): SEQ ID NO: 6010; WAN0249BF_at; Start 36; Stop 60
taaattcttcctctactacactaag

SEQ ID NO: 16613 - DNA, 25 bp, Artificial
  probe
  misc_feature (1)..(25): SEQ ID NO: 6010; WAN0249BF_at; Start 35; Stop 59
ctaaattcttcctctactacactaa

SEQ ID NO: 16614 - DNA, 25 bp, Artificial
  probe
  misc_feature (1)..(25): SEQ ID NO: 6010; WAN0249BF_at; Start 45; Stop 69
cctctactacactaagtatccgttc

SEQ ID NO: 16615 - DNA, 25 bp, Artificial
  probe
  misc_feature (1)..(25): SEQ ID NO: 6010; WAN0249BF_at; Start 40; Stop 64
ttcttcctctactacactaagtatc

SEQ ID NO: 16616 - DNA, 25 bp, Artificial
  probe
  misc_feature (1)..(25): SEQ ID NO: 6010; WAN0249BF_at; Start 39; Stop 63
attcttcctctactacactaagtat

SEQ ID NO: 16617 - DNA, 25 bp, Artificial
  probe
  misc_feature (1)..(25): SEQ ID NO: 6063; WAN0249BG_at; Start 73; Stop 97
actattccatatgccttctgcacat

SEQ ID NO: 16618 - DNA, 25 bp, Artificial
  probe
  misc_feature (1)..(25): SEQ ID NO: 6063; WAN0249BG_at; Start 78; Stop 102
tccatatgccttctgcacattatca

SEQ ID NO: 16619 - DNA, 25 bp, Artificial
  probe
  misc_feature (1)..(25): SEQ ID NO: 6063; WAN0249BG_at; Start 69; Stop 93
aacaactattccatatgccttctgc

SEQ ID NO: 16620 - DNA, 25 bp, Artificial
  probe
  misc_feature (1)..(25): SEQ ID NO: 6063; WAN0249BG_at; Start 80; Stop 104
catatgccttctgcacattatcata

SEQ ID NO: 16621 - DNA, 25 bp, Artificial
  probe
  misc_feature (1)..(25): SEQ ID NO: 6063; WAN0249BG_at; Start 79; Stop 103
ccatatgccttctgcacattatcat

SEQ ID NO: 16622 - DNA, 25 bp, Artificial
  probe
  misc_feature (1)..(25): SEQ ID NO: 6063; WAN0249BG_at; Start 104; Stop 128
acaaccttgaatttccccatccatt

SEQ ID NO: 16623 - DNA, 25 bp, Artificial
  probe
  misc_feature (1)..(25): SEQ ID NO: 6063; WAN0249BG_at; Start 89; Stop 113
tctgcacattatcatacaaccttga

SEQ ID NO: 16624 - DNA, 25 bp, Artificial
  probe
  misc_feature (1)..(25): SEQ ID NO: 6063; WAN0249BG_at; Start 90; Stop 114
ctgcacattatcatacaaccttgaa

SEQ ID NO: 16625 - DNA, 25 bp, Artificial
  probe
  misc_feature (1)..(25): SEQ ID NO: 6063; WAN0249BG_at; Start 98; Stop 122
tatcatacaaccttgaatttcccca

SEQ ID NO: 16626 - DNA, 25 bp, Artificial
  probe
  misc_feature (1)..(25): SEQ ID NO: 6063; WAN0249BG_at; Start 97; Stop 121
ttatcatacaaccttgaatttcccc

SEQ ID NO: 16627 - DNA, 25 bp, Artificial
  probe
  misc_feature (1)..(25): SEQ ID NO: 6063; WAN0249BG_at; Start 64; Stop 88
taaaaaacaactattccatatgcct

SEQ ID NO: 16628 - DNA, 25 bp, Artificial
  probe
  misc_feature (1)..(25): SEQ ID NO: 6063; WAN0249BG_at; Start 85; Stop 109
gccttctgcacattatcatacaacc

SEQ ID NO: 16629 - DNA, 25 bp, Artificial
  probe
  misc_feature (1)..(25): SEQ ID NO: 6063; WAN0249BG_at; Start 62; Stop 86
tctaaaaaacaactattccatatgc

SEQ ID NO: 16630 - DNA, 25 bp, Artificial
  probe
  misc_feature (1)..(25): SEQ ID NO: 6063; WAN0249BG_at; Start 75; Stop 99
tattccatatgccttctgcacatta

SEQ ID NO: 16631 - DNA, 25 bp, Artificial
  probe
  misc_feature (1)..(25): SEQ ID NO: 6063; WAN0249BG_at; Start 66; Stop 90
aaaaacaactattccatatgccttc

SEQ ID NO: 16632 - DNA, 25 bp, Artificial
  probe
  misc_feature (1)..(25): SEQ ID NO: 6063; WAN0249BG_at; Start 65; Stop 89
aaaaaacaactattccatatgcctt

SEQ ID NO: 16633 - DNA, 25 bp, Artificial
  probe
  misc_feature (1)..(25): SEQ ID NO: 6063; WAN0249BG_at; Start 83; Stop 107
atgccttctgcacattatcatacaa

SEQ ID NO: 16634 - DNA, 25 bp, Artificial
  probe
  misc_feature (1)..(25): SEQ ID NO: 6063; WAN0249BG_at; Start 95; Stop 119
cattatcatacaaccttgaatttcc

SEQ ID NO: 16635 - DNA, 25 bp, Artificial
  probe
  misc_feature (1)..(25): SEQ ID NO: 6063; WAN0249BG_at; Start 68; Stop 92
aaacaactattccatatgccttctg

SEQ ID NO: 16636 - DNA, 25 bp, Artificial
  probe
  misc_feature (1)..(25): SEQ ID NO: 6063; WAN0249BG_at; Start 71; Stop 95
caactattccatatgccttctgcac

SEQ ID NO: 16637 - DNA, 25 bp, Artificial
  probe
  misc_feature (1)..(25): SEQ ID NO: 6063; WAN0249BG_at; Start 91; Stop 115
tgcacattatcatacaaccttgaat

SEQ ID NO: 16638 - DNA, 25 bp, Artificial
  probe
  misc_feature (1)..(25): SEQ ID NO: 6063; WAN0249BG_at; Start 19; Stop 43
tagataaaaacagaaaattatgtat

SEQ ID NO: 16639 - DNA, 25 bp, Artificial
  probe
  misc_feature (1)..(25): SEQ ID NO: 6063; WAN0249BG_at; Start 84; Stop 108
tgccttctgcacattatcatacaac

SEQ ID NO: 16640 - DNA, 25 bp, Artificial
  probe
  misc_feature (1)..(25): SEQ ID NO: 6063; WAN0249BG_at; Start 105; Stop 129
caaccttgaatttccccatccattt

SEQ ID NO: 16641 - DNA, 25 bp, Artificial
  probe
  misc_feature (1)..(25): SEQ ID NO: 6063; WAN0249BG_at; Start 99; Stop 123
atcatacaaccttgaatttccccat

SEQ ID NO: 16642 - DNA, 25 bp, Artificial
  probe
  misc_feature (1)..(25): SEQ ID NO: 6063; WAN0249BG_at; Start 72; Stop 96
aactattccatatgccttctgcaca

SEQ ID NO: 16643 - DNA, 25 bp, Artificial
  probe
  misc_feature (1)..(25): SEQ ID NO: 6063; WAN0249BG_at; Start 63; Stop 87
ctaaaaaacaactattccatatgcc

SEQ ID NO: 16644 - DNA, 25 bp, Artificial
  probe
  misc_feature (1)..(25): SEQ ID NO: 6063; WAN0249BG_at; Start 86; Stop 110
ccttctgcacattatcatacaacct

SEQ ID NO: 16645 - DNA, 25 bp, Artificial
  probe
  misc_feature (1)..(25): SEQ ID NO: 6063; WAN0249BG_at; Start 70; Stop 94
acaactattccatatgccttctgca

SEQ ID NO: 16646 - DNA, 25 bp, Artificial
  probe
  misc_feature (1)..(25): SEQ ID NO: 6063; WAN0249BG_at; Start 82; Stop 106
tatgccttctgcacattatcataca

SEQ ID NO: 16647 - DNA, 25 bp, Artificial
  probe
  misc_feature (1)..(25): SEQ ID NO: 6063; WAN0249BG_at; Start 92; Stop 116
gcacattatcatacaaccttgaatt

SEQ ID NO: 16648 - DNA, 25 bp, Artificial
  probe
  misc_feature (1)..(25): SEQ ID NO: 6063; WAN0249BG_at; Start 88; Stop 112
ttctgcacattatcatacaaccttg

SEQ ID NO: 16649 - DNA, 25 bp, Artificial
  probe
  misc_feature (1)..(25): SEQ ID NO: 6063; WAN0249BG_at; Start 77; Stop 101
ttccatatgccttctgcacattatc

SEQ ID NO: 16650 - DNA, 25 bp, Artificial
  probe
  misc_feature (1)..(25): SEQ ID NO: 6063; WAN0249BG_at; Start 103; Stop 127
tacaaccttgaatttccccatccat

SEQ ID NO: 16651 - DNA, 25 bp, Artificial
  probe
  misc_feature (1)..(25): SEQ ID NO: 6209; WAN0249BH_at; Start 268; Stop 292
ggacacttgttaatccaaatgtaac

SEQ ID NO: 16652 - DNA, 25 bp, Artificial
  probe
  misc_feature (1)..(25): SEQ ID NO: 6209; WAN0249BH_at; Start 172; Stop 196
catcagccatcttttctggcaatca

SEQ ID NO: 16653 - DNA, 25 bp, Artificial
  probe
  misc_feature (1)..(25): SEQ ID NO: 6209; WAN0249BH_at; Start 8; Stop 32
taatactactgctaacaccaagcca

SEQ ID NO: 16654 - DNA, 25 bp, Artificial
  probe
  misc_feature (1)..(25): SEQ ID NO: 6209; WAN0249BH_at; Start 259; Stop 283
taatccctaggacacttgttaatcc

SEQ ID NO: 16655 - DNA, 25 bp, Artificial
  probe
  misc_feature (1)..(25): SEQ ID NO: 6209; WAN0249BH_at; Start 156; Stop 180
cagtataaataagattcatcagcca

SEQ ID NO: 16656 - DNA, 25 bp, Artificial
  probe
  misc_feature (1)..(25): SEQ ID NO: 6209; WAN0249BH_at; Start 41; Stop 65
cattgcatcacctaatcctgcgcta

SEQ ID NO: 16657 - DNA, 25 bp, Artificial
  probe
  misc_feature (1)..(25): SEQ ID NO: 6209; WAN0249BH_at; Start 253; Stop 277
tatttctaatccctaggacacttgt

SEQ ID NO: 16658 - DNA, 25 bp, Artificial
  probe
  misc_feature (1)..(25): SEQ ID NO: 6209; WAN0249BH_at; Start 46; Stop 70
catcacctaatcctgcgctacttgt

SEQ ID NO: 16659 - DNA, 25 bp, Artificial
  probe
  misc_feature (1)..(25): SEQ ID NO: 6209; WAN0249BH_at; Start 179; Stop 203
catcttttctggcaatcatatgggt

SEQ ID NO: 16660 - DNA, 25 bp, Artificial
  probe
  misc_feature (1)..(25): SEQ ID NO: 6209; WAN0249BH_at; Start 218; Stop 242
tctagttactcaaaaatatctagct

SEQ ID NO: 16661 - DNA, 25 bp, Artificial
  probe
  misc_feature (1)..(25): SEQ ID NO: 6209; WAN0249BH_at; Start 103; Stop 127
tccaatttcccccatcaagatagct

SEQ ID NO: 16662 - DNA, 25 bp, Artificial
  probe
  misc_feature (1)..(25): SEQ ID NO: 6209; WAN0249BH_at; Start 144; Stop 168
tgcctactgcaacagtataaataag

SEQ ID NO: 16663 - DNA, 25 bp, Artificial
  probe
  misc_feature (1)..(25): SEQ ID NO: 6209; WAN0249BH_at; Start 240; Stop 264
gctatactagagttatttctaatcc

SEQ ID NO: 16664 - DNA, 25 bp, Artificial
  probe
  misc_feature (1)..(25): SEQ ID NO: 6209; WAN0249BH_at; Start 168; Stop 192
gattcatcagccatcttttctggca

SEQ ID NO: 16665 - DNA, 25 bp, Artificial
  probe
  misc_feature (1)..(25): SEQ ID NO: 6209; WAN0249BH_at; Start 135; Stop 159
cctagacaatgcctactgcaacagt

SEQ ID NO: 16666 - DNA, 25 bp, Artificial
  probe
  misc_feature (1)..(25): SEQ ID NO: 6209; WAN0249BH_at; Start 53; Stop 77
taatcctgcgctacttgtccataat

SEQ ID NO: 16667 - DNA, 25 bp, Artificial
  probe
  misc_feature (1)..(25): SEQ ID NO: 6209; WAN0249BH_at; Start 36; Stop 60
tagcacattgcatcacctaatcctg

SEQ ID NO: 16668 - DNA, 25 bp, Artificial
  probe
  misc_feature (1)..(25): SEQ ID NO: 6209; WAN0249BH_at; Start 195; Stop 219
catatgggtagcctaatgatatttc

SEQ ID NO: 16669 - DNA, 25 bp, Artificial
  probe
  misc_feature (1)..(25): SEQ ID NO: 6209; WAN0249BH_at; Start 72; Stop 96
cataatcctttaatgtttctactaa

SEQ ID NO: 16670 - DNA, 25 bp, Artificial
  probe
  misc_feature (1)..(25): SEQ ID NO: 6209; WAN0249BH_at; Start 139; Stop 163
gacaatgcctactgcaacagtataa

SEQ ID NO: 16671 - DNA, 25 bp, Artificial
  probe
  misc_feature (1)..(25): SEQ ID NO: 6209; WAN0249BH_at; Start 5; Stop 29
aaataatactactgctaacaccaag

SEQ ID NO: 16672 - DNA, 25 bp, Artificial
  probe
  misc_feature (1)..(25): SEQ ID NO: 6209; WAN0249BH_at; Start 29; Stop 53
gccaacttagcacattgcatcacct

SEQ ID NO: 16673 - DNA, 25 bp, Artificial
  probe
  misc_feature (1)..(25): SEQ ID NO: 6209; WAN0249BH_at; Start 205; Stop 229
gcctaatgatatttctagttactca

SEQ ID NO: 16674 - DNA, 25 bp, Artificial
  probe
  misc_feature (1)..(25): SEQ ID NO: 6209; WAN0249BH_at; Start 227; Stop 251
tcaaaaatatctagctatactagag

SEQ ID NO: 16675 - DNA, 25 bp, Artificial
  probe
  misc_feature (1)..(25): SEQ ID NO: 6209; WAN0249BH_at; Start 249; Stop 273
gagttatttctaatccctaggacac

SEQ ID NO: 16676 - DNA, 25 bp, Artificial
  probe
  misc_feature (1)..(25): SEQ ID NO: 6209; WAN0249BH_at; Start 128; Stop 152
tatttatcctagacaatgcctactg

SEQ ID NO: 16677 - DNA, 25 bp, Artificial
  probe
  misc_feature (1)..(25): SEQ ID NO: 6209; WAN0249BH_at; Start 14; Stop 38
tactgctaacaccaagccaacttag

SEQ ID NO: 16678 - DNA, 25 bp, Artificial
  probe
  misc_feature (1)..(25): SEQ ID NO: 6209; WAN0249BH_at; Start 183; Stop 207
ttttctggcaatcatatgggtagcc

SEQ ID NO: 16679 - DNA, 25 bp, Artificial
  probe
  misc_feature (1)..(25): SEQ ID NO: 6209; WAN0249BH_at; Start 188; Stop 212
tggcaatcatatgggtagcctaatg

SEQ ID NO: 16680 - DNA, 25 bp, Artificial
  probe
  misc_feature (1)..(25): SEQ ID NO: 6209; WAN0249BH_at; Start 264; Stop 288
cctaggacacttgttaatccaaatg

SEQ ID NO: 16681 - DNA, 25 bp, Artificial
  probe
  misc_feature (1)..(25): SEQ ID NO: 6209; WAN0249BH_at; Start 199; Stop 223
tgggtagcctaatgatatttctagt

SEQ ID NO: 16682 - DNA, 25 bp, Artificial
  probe
  misc_feature (1)..(25): SEQ ID NO: 6209; WAN0249BH_at; Start 60; Stop 84
gcgctacttgtccataatcctttaa

SEQ ID NO: 16683 - DNA, 25 bp, Artificial
  probe
  misc_feature (1)..(25): SEQ ID NO: 6209; WAN0249BH_at; Start 123; Stop 147
tagcttatttatcctagacaatgcc

SEQ ID NO: 16684 - DNA, 25 bp, Artificial
  probe
  misc_feature (1)..(25): SEQ ID NO: 6209; WAN0249BH_at; Start 118; Stop 142
caagatagcttatttatcctagaca

SEQ ID NO: 16685 - DNA, 25 bp, Artificial
  probe
  misc_feature (1)..(25): SEQ ID NO: 6102; WAN0249BI_at; Start 41; Stop 65
attgtataaataatactcctatact

SEQ ID NO: 16686 - DNA, 25 bp, Artificial
  probe
  misc_feature (1)..(25): SEQ ID NO: 6102; WAN0249BI_at; Start 55; Stop 79
actcctatactcatcctttgtcaag

SEQ ID NO: 16687 - DNA, 25 bp, Artificial
  probe
  misc_feature (1)..(25): SEQ ID NO: 6102; WAN0249BI_at; Start 1; Stop 25
cttattcataacaaagccttcttta

SEQ ID NO: 16688 - DNA, 25 bp, Artificial
  probe
  misc_feature (1)..(25): SEQ ID NO: 6102; WAN0249BI_at; Start 56; Stop 80
ctcctatactcatcctttgtcaagc

SEQ ID NO: 16689 - DNA, 25 bp, Artificial
  probe
  misc_feature (1)..(25): SEQ ID NO: 6102; WAN0249BI_at; Start 12; Stop 36
caaagccttctttatgtttattctt

SEQ ID NO: 16690 - DNA, 25 bp, Artificial
  probe
  misc_feature (1)..(25): SEQ ID NO: 6102; WAN0249BI_at; Start 49; Stop 73
aataatactcctatactcatccttt

SEQ ID NO: 16691 - DNA, 25 bp, Artificial
  probe
  misc_feature (1)..(25): SEQ ID NO: 6102; WAN0249BI_at; Start 37; Stop 61
ttttattgtataaataatactccta

SEQ ID NO: 16692 - DNA, 25 bp, Artificial
  probe
  misc_feature (1)..(25): SEQ ID NO: 6102; WAN0249BI_at; Start 40; Stop 64
tattgtataaataatactcctatac

SEQ ID NO: 16693 - DNA, 25 bp, Artificial
  probe
  misc_feature (1)..(25): SEQ ID NO: 6102; WAN0249BI_at; Start 53; Stop 77
atactcctatactcatcctttgtca

SEQ ID NO: 16694 - DNA, 25 bp, Artificial
  probe
  misc_feature (1)..(25): SEQ ID NO: 6102; WAN0249BI_at; Start 38; Stop 62
tttattgtataaataatactcctat

SEQ ID NO: 16695 - DNA, 25 bp, Artificial
  probe
  misc_feature (1)..(25): SEQ ID NO: 6102; WAN0249BI_at; Start 2; Stop 26
ttattcataacaaagccttctttat

SEQ ID NO: 16696 - DNA, 25 bp, Artificial
  probe
  misc_feature (1)..(25): SEQ ID NO: 6102; WAN0249BI_at; Start 52; Stop 76
aatactcctatactcatcctttgtc

SEQ ID NO: 16697 - DNA, 25 bp, Artificial
  probe
  misc_feature (1)..(25): SEQ ID NO: 6102; WAN0249BI_at; Start 6; Stop 30
tcataacaaagccttctttatgttt

SEQ ID NO: 16698 - DNA, 25 bp, Artificial
  probe
  misc_feature (1)..(25): SEQ ID NO: 6102; WAN0249BI_at; Start 3; Stop 27
tattcataacaaagccttctttatg

SEQ ID NO: 16699 - DNA, 25 bp, Artificial
  probe
  misc_feature (1)..(25): SEQ ID NO: 6102; WAN0249BI_at; Start 54; Stop 78
tactcctatactcatcctttgtcaa

SEQ ID NO: 16700 - DNA, 25 bp, Artificial
  probe
  misc_feature (1)..(25): SEQ ID NO: 6102; WAN0249BI_at; Start 42; Stop 66
ttgtataaataatactcctatactc

SEQ ID NO: 16701 - DNA, 25 bp, Artificial
  probe
  misc_feature (1)..(25): SEQ ID NO: 6102; WAN0249BI_at; Start 4; Stop 28
attcataacaaagccttctttatgt

SEQ ID NO: 16702 - DNA, 25 bp, Artificial
  probe
  misc_feature (1)..(25): SEQ ID NO: 6102; WAN0249BI_at; Start 5; Stop 29
ttcataacaaagccttctttatgtt

SEQ ID NO: 16703 - DNA, 25 bp, Artificial
  probe
  misc_feature (1)..(25): SEQ ID NO: 6102; WAN0249BI_at; Start 57; Stop 81
tcctatactcatcctttgtcaagcc

SEQ ID NO: 16704 - DNA, 25 bp, Artificial
  probe
  misc_feature (1)..(25): SEQ ID NO: 6102; WAN0249BI_at; Start 8; Stop 32
ataacaaagccttctttatgtttat

SEQ ID NO: 16705 - DNA, 25 bp, Artificial
  probe
  misc_feature (1)..(25): SEQ ID NO: 6102; WAN0249BI_at; Start 51; Stop 75
taatactcctatactcatcctttgt

SEQ ID NO: 16706 - DNA, 25 bp, Artificial
  probe
  misc_feature (1)..(25): SEQ ID NO: 6102; WAN0249BI_at; Start 11; Stop 35
acaaagccttctttatgtttattct

SEQ ID NO: 16707 - DNA, 25 bp, Artificial
  probe
  misc_feature (1)..(25): SEQ ID NO: 6102; WAN0249BI_at; Start 50; Stop 74
ataatactcctatactcatcctttg

SEQ ID NO: 16708 - DNA, 25 bp, Artificial
  probe
  misc_feature (1)..(25): SEQ ID NO: 6102; WAN0249BI_at; Start 39; Stop 63
ttattgtataaataatactcctata

SEQ ID NO: 16709 - DNA, 25 bp, Artificial
  probe
  misc_feature (1)..(25): SEQ ID NO: 6102; WAN0249BI_at; Start 43; Stop 67
tgtataaataatactcctatactca

SEQ ID NO: 16710 - DNA, 25 bp, Artificial
  probe
  misc_feature (1)..(25): SEQ ID NO: 6102; WAN0249BI_at; Start 7; Stop 31
cataacaaagccttctttatgttta

SEQ ID NO: 16711 - DNA, 25 bp, Artificial
  probe
  misc_feature (1)..(25): SEQ ID NO: 6025; WAN0249BJ_at; Start 13; Stop 37
cgtgaagaaactccctctccaaaag

SEQ ID NO: 16712 - DNA, 25 bp, Artificial
  probe
  misc_feature (1)..(25): SEQ ID NO: 6025; WAN0249BJ_at; Start 2; Stop 26
gagatacctcccgtgaagaaactcc

SEQ ID NO: 16713 - DNA, 25 bp, Artificial
  probe
  misc_feature (1)..(25): SEQ ID NO: 6025; WAN0249BJ_at; Start 10; Stop 34
tcccgtgaagaaactccctctccaa

SEQ ID NO: 16714 - DNA, 25 bp, Artificial
  probe
  misc_feature (1)..(25): SEQ ID NO: 6025; WAN0249BJ_at; Start 1; Stop 25
agagatacctcccgtgaagaaactc

SEQ ID NO: 16715 - DNA, 25 bp, Artificial
  probe
  misc_feature (1)..(25): SEQ ID NO: 6025; WAN0249BJ_at; Start 9; Stop 33
ctcccgtgaagaaactccctctcca

SEQ ID NO: 16716 - DNA, 25 bp, Artificial
  probe
  misc_feature (1)..(25): SEQ ID NO: 6039; WAN0249BK_at; Start 5; Stop 29
tcaagaggagctgggcaaaaactca

SEQ ID NO: 16717 - DNA, 25 bp, Artificial
  probe
  misc_feature (1)..(25): SEQ ID NO: 6039; WAN0249BK_at; Start 24; Stop 48
aactcaatttcatgagaagatgaag

SEQ ID NO: 16718 - DNA, 25 bp, Artificial
  probe
  misc_feature (1)..(25): SEQ ID NO: 6039; WAN0249BK_at; Start 27; Stop 51
tcaatttcatgagaagatgaagtaa

SEQ ID NO: 16719 - DNA, 25 bp, Artificial
  probe
  misc_feature (1)..(25): SEQ ID NO: 6039; WAN0249BK_at; Start 28; Stop 52
caatttcatgagaagatgaagtaat

SEQ ID NO: 16720 - DNA, 25 bp, Artificial
  probe
  misc_feature (1)..(25): SEQ ID NO: 6039; WAN0249BK_at; Start 21; Stop 45
aaaaactcaatttcatgagaagatg

SEQ ID NO: 16721 - DNA, 25 bp, Artificial
  probe
  misc_feature (1)..(25): SEQ ID NO: 6039; WAN0249BK_at; Start 2; Stop 26
taatcaagaggagctgggcaaaaac

SEQ ID NO: 16722 - DNA, 25 bp, Artificial
  probe
  misc_feature (1)..(25): SEQ ID NO: 6039; WAN0249BK_at; Start 32; Stop 56
ttcatgagaagatgaagtaatactc

SEQ ID NO: 16723 - DNA, 25 bp, Artificial
  probe
  misc_feature (1)..(25): SEQ ID NO: 6039; WAN0249BK_at; Start 1; Stop 25
ataatcaagaggagctgggcaaaaa

SEQ ID NO: 16724 - DNA, 25 bp, Artificial
  probe
  misc_feature (1)..(25): SEQ ID NO: 6039; WAN0249BK_at; Start 33; Stop 57
tcatgagaagatgaagtaatactca

SEQ ID NO: 16725 - DNA, 25 bp, Artificial
  probe
  misc_feature (1)..(25): SEQ ID NO: 6039; WAN0249BK_at; Start 25; Stop 49
actcaatttcatgagaagatgaagt

SEQ ID NO: 16726 - DNA, 25 bp, Artificial
  probe
  misc_feature (1)..(25): SEQ ID NO: 6039; WAN0249BK_at; Start 29; Stop 53
aatttcatgagaagatgaagtaata

SEQ ID NO: 16727 - DNA, 25 bp, Artificial
  probe
  misc_feature (1)..(25): SEQ ID NO: 6039; WAN0249BK_at; Start 20; Stop 44
caaaaactcaatttcatgagaagat

SEQ ID NO: 16728 - DNA, 25 bp, Artificial
  probe
  misc_feature (1)..(25): SEQ ID NO: 6039; WAN0249BK_at; Start 3; Stop 27
aatcaagaggagctgggcaaaaact

SEQ ID NO: 16729 - DNA, 25 bp, Artificial
  probe
  misc_feature (1)..(25): SEQ ID NO: 6039; WAN0249BK_at; Start 19; Stop 43
gcaaaaactcaatttcatgagaaga

SEQ ID NO: 16730 - DNA, 25 bp, Artificial
  probe
  misc_feature (1)..(25): SEQ ID NO: 6039; WAN0249BK_at; Start 30; Stop 54
atttcatgagaagatgaagtaatac

SEQ ID NO: 16731 - DNA, 25 bp, Artificial
  probe
  misc_feature (1)..(25): SEQ ID NO: 6039; WAN0249BK_at; Start 4; Stop 28
atcaagaggagctgggcaaaaactc

SEQ ID NO: 16732 - DNA, 25 bp, Artificial
  probe
  misc_feature (1)..(25): SEQ ID NO: 6039; WAN0249BK_at; Start 26; Stop 50
ctcaatttcatgagaagatgaagta

SEQ ID NO: 16733 - DNA, 25 bp, Artificial
  probe
  misc_feature (1)..(25): SEQ ID NO: 6039; WAN0249BK_at; Start 31; Stop 55
tttcatgagaagatgaagtaatact

SEQ ID NO: 16734 - DNA, 25 bp, Artificial
  probe
  misc_feature (1)..(25): SEQ ID NO: 6039; WAN0249BK_at; Start 23; Stop 47
aaactcaatttcatgagaagatgaa

SEQ ID NO: 16735 - DNA, 25 bp, Artificial
  probe
  misc_feature (1)..(25): SEQ ID NO: 6039; WAN0249BK_at; Start 22; Stop 46
aaaactcaatttcatgagaagatga

SEQ ID NO: 16736 - DNA, 25 bp, Artificial
  probe
  misc_feature (1)..(25): SEQ ID NO: 6039; WAN0249BK_at; Start 18; Stop 42
ggcaaaaactcaatttcatgagaag

SEQ ID NO: 16737 - DNA, 25 bp, Artificial
  probe
  misc_feature (1)..(25): SEQ ID NO: 6042; WAN0249BL_at; Start 74; Stop 98
atagacctttgcacatatcgtctca

SEQ ID NO: 16738 - DNA, 25 bp, Artificial
  probe
  misc_feature (1)..(25): SEQ ID NO: 6042; WAN0249BL_at; Start 77; Stop 101
gacctttgcacatatcgtctcaaaa

SEQ ID NO: 16739 - DNA, 25 bp, Artificial
  probe
  misc_feature (1)..(25): SEQ ID NO: 6042; WAN0249BL_at; Start 73; Stop 97
aatagacctttgcacatatcgtctc

SEQ ID NO: 16740 - DNA, 25 bp, Artificial
  probe
  misc_feature (1)..(25): SEQ ID NO: 6042; WAN0249BL_at; Start 44; Stop 68
ttgactcacattaaactattctaat

SEQ ID NO: 16741 - DNA, 25 bp, Artificial
  probe
  misc_feature (1)..(25): SEQ ID NO: 6042; WAN0249BL_at; Start 84; Stop 108
gcacatatcgtctcaaaacattcat

SEQ ID NO: 16742 - DNA, 25 bp, Artificial
  probe
  misc_feature (1)..(25): SEQ ID NO: 6042; WAN0249BL_at; Start 71; Stop 95
ttaatagacctttgcacatatcgtc

SEQ ID NO: 16743 - DNA, 25 bp, Artificial
  probe
  misc_feature (1)..(25): SEQ ID NO: 6042; WAN0249BL_at; Start 72; Stop 96
taatagacctttgcacatatcgtct

SEQ ID NO: 16744 - DNA, 25 bp, Artificial
  probe
  misc_feature (1)..(25): SEQ ID NO: 6042; WAN0249BL_at; Start 76; Stop 100
agacctttgcacatatcgtctcaaa

SEQ ID NO: 16745 - DNA, 25 bp, Artificial
  probe
  misc_feature (1)..(25): SEQ ID NO: 6042; WAN0249BL_at; Start 68; Stop 92
tagttaatagacctttgcacatatc

SEQ ID NO: 16746 - DNA, 25 bp, Artificial
  probe
  misc_feature (1)..(25): SEQ ID NO: 6042; WAN0249BL_at; Start 42; Stop 66
ttttgactcacattaaactattcta

SEQ ID NO: 16747 - DNA, 25 bp, Artificial
  probe
  misc_feature (1)..(25): SEQ ID NO: 6042; WAN0249BL_at; Start 69; Stop 93
agttaatagacctttgcacatatcg

SEQ ID NO: 16748 - DNA, 25 bp, Artificial
  probe
  misc_feature (1)..(25): SEQ ID NO: 6042; WAN0249BL_at; Start 66; Stop 90
aatagttaatagacctttgcacata

SEQ ID NO: 16749 - DNA, 25 bp, Artificial
  probe
  misc_feature (1)..(25): SEQ ID NO: 6042; WAN0249BL_at; Start 46; Stop 70
gactcacattaaactattctaatag

SEQ ID NO: 16750 - DNA, 25 bp, Artificial
  probe
  misc_feature (1)..(25): SEQ ID NO: 6042; WAN0249BL_at; Start 83; Stop 107
tgcacatatcgtctcaaaacattca

SEQ ID NO: 16751 - DNA, 25 bp, Artificial
  probe
  misc_feature (1)..(25): SEQ ID NO: 6042; WAN0249BL_at; Start 61; Stop 85
attctaatagttaatagacctttgc

SEQ ID NO: 16752 - DNA, 25 bp, Artificial
  probe
  misc_feature (1)..(25): SEQ ID NO: 6042; WAN0249BL_at; Start 75; Stop 99
tagacctttgcacatatcgtctcaa

SEQ ID NO: 16753 - DNA, 25 bp, Artificial
  probe
  misc_feature (1)..(25): SEQ ID NO: 6042; WAN0249BL_at; Start 70; Stop 94
gttaatagacctttgcacatatcgt

SEQ ID NO: 16754 - DNA, 25 bp, Artificial
  probe
  misc_feature (1)..(25): SEQ ID NO: 6042; WAN0249BL_at; Start 41; Stop 65
cttttgactcacattaaactattct

SEQ ID NO: 16755 - DNA, 25 bp, Artificial
  probe
  misc_feature (1)..(25): SEQ ID NO: 6042; WAN0249BL_at; Start 63; Stop 87
tctaatagttaatagacctttgcac

SEQ ID NO: 16756 - DNA, 25 bp, Artificial
  probe
  misc_feature (1)..(25): SEQ ID NO: 6042; WAN0249BL_at; Start 40; Stop 64
tcttttgactcacattaaactattc

SEQ ID NO: 16757 - DNA, 25 bp, Artificial
  probe
  misc_feature (1)..(25): SEQ ID NO: 6042; WAN0249BL_at; Start 79; Stop 103
cctttgcacatatcgtctcaaaaca

SEQ ID NO: 16758 - DNA, 25 bp, Artificial
  probe
  misc_feature (1)..(25): SEQ ID NO: 6042; WAN0249BL_at; Start 78; Stop 102
acctttgcacatatcgtctcaaaac

SEQ ID NO: 16759 - DNA, 25 bp, Artificial
  probe
  misc_feature (1)..(25): SEQ ID NO: 6042; WAN0249BL_at; Start 65; Stop 89
taatagttaatagacctttgcacat

SEQ ID NO: 16760 - DNA, 25 bp, Artificial
  probe
  misc_feature (1)..(25): SEQ ID NO: 6042; WAN0249BL_at; Start 38; Stop 62
cttcttttgactcacattaaactat

SEQ ID NO: 16761 - DNA, 25 bp, Artificial
  probe
  misc_feature (1)..(25): SEQ ID NO: 6042; WAN0249BL_at; Start 47; Stop 71
actcacattaaactattctaatagt

SEQ ID NO: 16762 - DNA, 25 bp, Artificial
  probe
  misc_feature (1)..(25): SEQ ID NO: 6042; WAN0249BL_at; Start 64; Stop 88
ctaatagttaatagacctttgcaca

SEQ ID NO: 16763 - DNA, 25 bp, Artificial
  probe
  misc_feature (1)..(25): SEQ ID NO: 6042; WAN0249BL_at; Start 67; Stop 91
atagttaatagacctttgcacatat

SEQ ID NO: 16764 - DNA, 25 bp, Artificial
  probe
  misc_feature (1)..(25): SEQ ID NO: 6042; WAN0249BL_at; Start 43; Stop 67
tttgactcacattaaactattctaa

SEQ ID NO: 16765 - DNA, 25 bp, Artificial
  probe
  misc_feature (1)..(25): SEQ ID NO: 6042; WAN0249BL_at; Start 80; Stop 104
ctttgcacatatcgtctcaaaacat

SEQ ID NO: 16766 - DNA, 25 bp, Artificial
  probe
  misc_feature (1)..(25): SEQ ID NO: 6042; WAN0249BL_at; Start 60; Stop 84
tattctaatagttaatagacctttg

SEQ ID NO: 16767 - DNA, 25 bp, Artificial
  probe
  misc_feature (1)..(25): SEQ ID NO: 6042; WAN0249BL_at; Start 81; Stop 105
tttgcacatatcgtctcaaaacatt

SEQ ID NO: 16768 - DNA, 25 bp, Artificial
  probe
  misc_feature (1)..(25): SEQ ID NO: 6042; WAN0249BL_at; Start 45; Stop 69
tgactcacattaaactattctaata

SEQ ID NO: 16769 - DNA, 25 bp, Artificial
  probe
  misc_feature (1)..(25): SEQ ID NO: 6042; WAN0249BL_at; Start 82; Stop 106
ttgcacatatcgtctcaaaacattc

SEQ ID NO: 16770 - DNA, 25 bp, Artificial
  probe
  misc_feature (1)..(25): SEQ ID NO: 6042; WAN0249BL_at; Start 62; Stop 86
ttctaatagttaatagacctttgca

SEQ ID NO: 16771 - DNA, 25 bp, Artificial
  probe
  misc_feature (1)..(25): SEQ ID NO: 6220; WAN0249BM_at; Start 103; Stop 127
caaaaagcaaactagcaatacttat

SEQ ID NO: 16772 - DNA, 25 bp, Artificial
  probe
  misc_feature (1)..(25): SEQ ID NO: 6220; WAN0249BM_at; Start 44; Stop 68
gcttctttgtcaaaattctcaccca

SEQ ID NO: 16773 - DNA, 25 bp, Artificial
  probe
  misc_feature (1)..(25): SEQ ID NO: 6220; WAN0249BM_at; Start 68; Stop 92
atccagctcacgcagttctgttacc

SEQ ID NO: 16774 - DNA, 25 bp, Artificial
  probe
  misc_feature (1)..(25): SEQ ID NO: 6220; WAN0249BM_at; Start 49; Stop 73
tttgtcaaaattctcacccatccag

SEQ ID NO: 16775 - DNA, 25 bp, Artificial
  probe
  misc_feature (1)..(25): SEQ ID NO: 6220; WAN0249BM_at; Start 80; Stop 104
cagttctgttaccaaagaccgttca

SEQ ID NO: 16776 - DNA, 25 bp, Artificial
  probe
  misc_feature (1)..(25): SEQ ID NO: 6220; WAN0249BM_at; Start 69; Stop 93
tccagctcacgcagttctgttacca

SEQ ID NO: 16777 - DNA, 25 bp, Artificial
  probe
  misc_feature (1)..(25): SEQ ID NO: 6220; WAN0249BM_at; Start 37; Stop 61
ctaatcagcttctttgtcaaaattc

SEQ ID NO: 16778 - DNA, 25 bp, Artificial
  probe
  misc_feature (1)..(25): SEQ ID NO: 6220; WAN0249BM_at; Start 66; Stop 90
ccatccagctcacgcagttctgtta

SEQ ID NO: 16779 - DNA, 25 bp, Artificial
  probe
  misc_feature (1)..(25): SEQ ID NO: 6220; WAN0249BM_at; Start 106; Stop 130
aaagcaaactagcaatacttataac

SEQ ID NO: 16780 - DNA, 25 bp, Artificial
  probe
  misc_feature (1)..(25): SEQ ID NO: 6220; WAN0249BM_at; Start 39; Stop 63
aatcagcttctttgtcaaaattctc

SEQ ID NO: 16781 - DNA, 25 bp, Artificial
  probe
  misc_feature (1)..(25): SEQ ID NO: 6220; WAN0249BM_at; Start 50; Stop 74
ttgtcaaaattctcacccatccagc

SEQ ID NO: 16782 - DNA, 25 bp, Artificial
  probe
  misc_feature (1)..(25): SEQ ID NO: 6220; WAN0249BM_at; Start 51; Stop 75
tgtcaaaattctcacccatccagct

SEQ ID NO: 16783 - DNA, 25 bp, Artificial
  probe
  misc_feature (1)..(25): SEQ ID NO: 6220; WAN0249BM_at; Start 71; Stop 95
cagctcacgcagttctgttaccaaa

SEQ ID NO: 16784 - DNA, 25 bp, Artificial
  probe
  misc_feature (1)..(25): SEQ ID NO: 6220; WAN0249BM_at; Start 47; Stop 71
tctttgtcaaaattctcacccatcc

SEQ ID NO: 16785 - DNA, 25 bp, Artificial
  probe
  misc_feature (1)..(25): SEQ ID NO: 6220; WAN0249BM_at; Start 74; Stop 98
ctcacgcagttctgttaccaaagac

SEQ ID NO: 16786 - DNA, 25 bp, Artificial
  probe
  misc_feature (1)..(25): SEQ ID NO: 6220; WAN0249BM_at; Start 35; Stop 59
ctctaatcagcttctttgtcaaaat

SEQ ID NO: 16787 - DNA, 25 bp, Artificial
  probe
  misc_feature (1)..(25): SEQ ID NO: 6220; WAN0249BM_at; Start 76; Stop 100
cacgcagttctgttaccaaagaccg

SEQ ID NO: 16788 - DNA, 25 bp, Artificial
  probe
  misc_feature (1)..(25): SEQ ID NO: 6220; WAN0249BM_at; Start 16; Stop 40
cgatttttcttcattatatctctaa

SEQ ID NO: 16789 - DNA, 25 bp, Artificial
  probe
  misc_feature (1)..(25): SEQ ID NO: 6220; WAN0249BM_at; Start 34; Stop 58
tctctaatcagcttctttgtcaaaa

SEQ ID NO: 16790 - DNA, 25 bp, Artificial
  probe
  misc_feature (1)..(25): SEQ ID NO: 6220; WAN0249BM_at; Start 109; Stop 133
gcaaactagcaatacttataactta

SEQ ID NO: 16791 - DNA, 25 bp, Artificial
  probe
  misc_feature (1)..(25): SEQ ID NO: 6220; WAN0249BM_at; Start 42; Stop 66
cagcttctttgtcaaaattctcacc

SEQ ID NO: 16792 - DNA, 25 bp, Artificial
  probe
  misc_feature (1)..(25): SEQ ID NO: 6220; WAN0249BM_at; Start 72; Stop 96
agctcacgcagttctgttaccaaag

SEQ ID NO: 16793 - DNA, 25 bp, Artificial
  probe
  misc_feature (1)..(25): SEQ ID NO: 6220; WAN0249BM_at; Start 73; Stop 97
gctcacgcagttctgttaccaaaga

SEQ ID NO: 16794 - DNA, 25 bp, Artificial
  probe
  misc_feature (1)..(25): SEQ ID NO: 6220; WAN0249BM_at; Start 30; Stop 54
tatatctctaatcagcttctttgtc

SEQ ID NO: 16795 - DNA, 25 bp, Artificial
  probe
  misc_feature (1)..(25): SEQ ID NO: 6220; WAN0249BM_at; Start 13; Stop 37
gctcgatttttcttcattatatctc

SEQ ID NO: 16796 - DNA, 25 bp, Artificial
  probe
  misc_feature (1)..(25): SEQ ID NO: 6220; WAN0249BM_at; Start 110; Stop 134
caaactagcaatacttataacttat

SEQ ID NO: 16797 - DNA, 25 bp, Artificial
  probe
  misc_feature (1)..(25): SEQ ID NO: 6220; WAN0249BM_at; Start 32; Stop 56
tatctctaatcagcttctttgtcaa

SEQ ID NO: 16798 - DNA, 25 bp, Artificial
  probe
  misc_feature (1)..(25): SEQ ID NO: 6220; WAN0249BM_at; Start 75; Stop 99
tcacgcagttctgttaccaaagacc

SEQ ID NO: 16799 - DNA, 25 bp, Artificial
  probe
  misc_feature (1)..(25): SEQ ID NO: 6220; WAN0249BM_at; Start 114; Stop 138
ctagcaatacttataacttattaaa

SEQ ID NO: 16800 - DNA, 25 bp, Artificial
  probe
  misc_feature (1)..(25): SEQ ID NO: 6220; WAN0249BM_at; Start 79; Stop 103
gcagttctgttaccaaagaccgttc

SEQ ID NO: 16801 - DNA, 25 bp, Artificial
  probe
  misc_feature (1)..(25): SEQ ID NO: 6220; WAN0249BM_at; Start 78; Stop 102
cgcagttctgttaccaaagaccgtt

SEQ ID NO: 16802 - DNA, 25 bp, Artificial
  probe
  misc_feature (1)..(25): SEQ ID NO: 6220; WAN0249BM_at; Start 77; Stop 101
acgcagttctgttaccaaagaccgt

SEQ ID NO: 16803 - DNA, 25 bp, Artificial
  probe
  misc_feature (1)..(25): SEQ ID NO: 6220; WAN0249BM_at; Start 9; Stop 33
ccttgctcgatttttcttcattata

SEQ ID NO: 16804 - DNA, 25 bp, Artificial
  probe
  misc_feature (1)..(25): SEQ ID NO: 6220; WAN0249BM_at; Start 4; Stop 28
tttttccttgctcgatttttcttca

SEQ ID NO: 16805 - DNA, 25 bp, Artificial
  probe
  misc_feature (1)..(25): SEQ ID NO: 6190; WAN0249BN_at; Start 28; Stop 52
cgaccgattaatgaactgcacccca

SEQ ID NO: 16806 - DNA, 25 bp, Artificial
  probe
  misc_feature (1)..(25): SEQ ID NO: 6190; WAN0249BN_at; Start 21; Stop 45
aaaaaatcgaccgattaatgaactg

SEQ ID NO: 16807 - DNA, 25 bp, Artificial
  probe
  misc_feature (1)..(25): SEQ ID NO: 6190; WAN0249BN_at; Start 23; Stop 47
aaaatcgaccgattaatgaactgca

SEQ ID NO: 16808 - DNA, 25 bp, Artificial
  probe
  misc_feature (1)..(25): SEQ ID NO: 6190; WAN0249BN_at; Start 24; Stop 48
aaatcgaccgattaatgaactgcac

SEQ ID NO: 16809 - DNA, 25 bp, Artificial
  probe
  misc_feature (1)..(25): SEQ ID NO: 6190; WAN0249BN_at; Start 26; Stop 50
atcgaccgattaatgaactgcaccc

SEQ ID NO: 16810 - DNA, 25 bp, Artificial
  probe
  misc_feature (1)..(25): SEQ ID NO: 6190; WAN0249BN_at; Start 27; Stop 51
tcgaccgattaatgaactgcacccc

SEQ ID NO: 16811 - DNA, 25 bp, Artificial
  probe
  misc_feature (1)..(25): SEQ ID NO: 6190; WAN0249BN_at; Start 22; Stop 46
aaaaatcgaccgattaatgaactgc

SEQ ID NO: 16812 - DNA, 25 bp, Artificial
  probe
  misc_feature (1)..(25): SEQ ID NO: 6190; WAN0249BN_at; Start 25; Stop 49
aatcgaccgattaatgaactgcacc

SEQ ID NO: 16813 - DNA, 25 bp, Artificial
  probe
  misc_feature (1)..(25): SEQ ID NO: 6190; WAN0249BN_at; Start 1; Stop 25
tcaggcaactgtttctacaaaaaaa

SEQ ID NO: 16814 - DNA, 25 bp, Artificial
  probe
  misc_feature (1)..(25): SEQ ID NO: 6081; WAN0249BO_at; Start 25; Stop 49
aatcgagcatcaaaccaagggagga

SEQ ID NO: 16815 - DNA, 25 bp, Artificial
  probe
  misc_feature (1)..(25): SEQ ID NO: 6081; WAN0249BO_at; Start 22; Stop 46
aaaaatcgagcatcaaaccaaggga

SEQ ID NO: 16816 - DNA, 25 bp, Artificial
  probe
  misc_feature (1)..(25): SEQ ID NO: 6081; WAN0249BO_at; Start 13; Stop 37
ccttattttaaaaatcgagcatcaa

SEQ ID NO: 16817 - DNA, 25 bp, Artificial
  probe
  misc_feature (1)..(25): SEQ ID NO: 6081; WAN0249BO_at; Start 23; Stop 47
aaaatcgagcatcaaaccaagggag

SEQ ID NO: 16818 - DNA, 25 bp, Artificial
  probe
  misc_feature (1)..(25): SEQ ID NO: 6081; WAN0249BO_at; Start 24; Stop 48
aaatcgagcatcaaaccaagggagg

SEQ ID NO: 16819 - DNA, 25 bp, Artificial
  probe
  misc_feature (1)..(25): SEQ ID NO: 6081; WAN0249BO_at; Start 27; Stop 51
tcgagcatcaaaccaagggaggagt

SEQ ID NO: 16820 - DNA, 25 bp, Artificial
  probe
  misc_feature (1)..(25): SEQ ID NO: 6081; WAN0249BO_at; Start 18; Stop 42
ttttaaaaatcgagcatcaaaccaa

SEQ ID NO: 16821 - DNA, 25 bp, Artificial
  probe
  misc_feature (1)..(25): SEQ ID NO: 6081; WAN0249BO_at; Start 14; Stop 38
cttattttaaaaatcgagcatcaaa

SEQ ID NO: 16822 - DNA, 25 bp, Artificial
  probe
  misc_feature (1)..(25): SEQ ID NO: 6081; WAN0249BO_at; Start 20; Stop 44
ttaaaaatcgagcatcaaaccaagg

SEQ ID NO: 16823 - DNA, 25 bp, Artificial
  probe
  misc_feature (1)..(25): SEQ ID NO: 6081; WAN0249BO_at; Start 17; Stop 41
attttaaaaatcgagcatcaaacca

SEQ ID NO: 16824 - DNA, 25 bp, Artificial
  probe
  misc_feature (1)..(25): SEQ ID NO: 6081; WAN0249BO_at; Start 21; Stop 45
taaaaatcgagcatcaaaccaaggg

SEQ ID NO: 16825 - DNA, 25 bp, Artificial
  probe
  misc_feature (1)..(25): SEQ ID NO: 6081; WAN0249BO_at; Start 26; Stop 50
atcgagcatcaaaccaagggaggag

SEQ ID NO: 16826 - DNA, 25 bp, Artificial
  probe
  misc_feature (1)..(25): SEQ ID NO: 6081; WAN0249BO_at; Start 19; Stop 43
tttaaaaatcgagcatcaaaccaag

SEQ ID NO: 16827 - DNA, 25 bp, Artificial
  probe
  misc_feature (1)..(25): SEQ ID NO: 6081; WAN0249BO_at; Start 15; Stop 39
ttattttaaaaatcgagcatcaaac

SEQ ID NO: 16828 - DNA, 25 bp, Artificial
  probe
  misc_feature (1)..(25): SEQ ID NO: 6081; WAN0249BO_at; Start 16; Stop 40
tattttaaaaatcgagcatcaaacc

SEQ ID NO: 16829 - DNA, 25 bp, Artificial
  probe
  misc_feature (1)..(25): SEQ ID NO: 6071; WAN0249BP_at; Start 50; Stop 74
ttgattatattataacagcgctttc

SEQ ID NO: 16830 - DNA, 25 bp, Artificial
  probe
  misc_feature (1)..(25): SEQ ID NO: 6071; WAN0249BP_at; Start 17; Stop 41
agcttctagcctatttttgaaacgt

SEQ ID NO: 16831 - DNA, 25 bp, Artificial
  probe
  misc_feature (1)..(25): SEQ ID NO: 6071; WAN0249BP_at; Start 55; Stop 79
tatattataacagcgctttcattaa

SEQ ID NO: 16832 - DNA, 25 bp, Artificial
  probe
  misc_feature (1)..(25): SEQ ID NO: 6071; WAN0249BP_at; Start 35; Stop 59
gaaacgtttcatttgttgattatat

SEQ ID NO: 16833 - DNA, 25 bp, Artificial
  probe
  misc_feature (1)..(25): SEQ ID NO: 6071; WAN0249BP_at; Start 46; Stop 70
tttgttgattatattataacagcgc

SEQ ID NO: 16834 - DNA, 25 bp, Artificial
  probe
  misc_feature (1)..(25): SEQ ID NO: 6071; WAN0249BP_at; Start 69; Stop 93
gctttcattaattgtcaagcgcttt

SEQ ID NO: 16835 - DNA, 25 bp, Artificial
  probe
  misc_feature (1)..(25): SEQ ID NO: 6071; WAN0249BP_at; Start 54; Stop 78
ttatattataacagcgctttcatta

SEQ ID NO: 16836 - DNA, 25 bp, Artificial
  probe
  misc_feature (1)..(25): SEQ ID NO: 6071; WAN0249BP_at; Start 14; Stop 38
acaagcttctagcctatttttgaaa

SEQ ID NO: 16837 - DNA, 25 bp, Artificial
  probe
  misc_feature (1)..(25): SEQ ID NO: 6071; WAN0249BP_at; Start 44; Stop 68
catttgttgattatattataacagc

SEQ ID NO: 16838 - DNA, 25 bp, Artificial
  probe
  misc_feature (1)..(25): SEQ ID NO: 6071; WAN0249BP_at; Start 12; Stop 36
aaacaagcttctagcctatttttga

SEQ ID NO: 16839 - DNA, 25 bp, Artificial
  probe
  misc_feature (1)..(25): SEQ ID NO: 6071; WAN0249BP_at; Start 52; Stop 76
gattatattataacagcgctttcat

SEQ ID NO: 16840 - DNA, 25 bp, Artificial
  probe
  misc_feature (1)..(25): SEQ ID NO: 6071; WAN0249BP_at; Start 59; Stop 83
ttataacagcgctttcattaattgt

SEQ ID NO: 16841 - DNA, 25 bp, Artificial
  probe
  misc_feature (1)..(25): SEQ ID NO: 6071; WAN0249BP_at; Start 62; Stop 86
taacagcgctttcattaattgtcaa

SEQ ID NO: 16842 - DNA, 25 bp, Artificial
  probe
  misc_feature (1)..(25): SEQ ID NO: 6071; WAN0249BP_at; Start 67; Stop 91
gcgctttcattaattgtcaagcgct

SEQ ID NO: 16843 - DNA, 25 bp, Artificial
  probe
  misc_feature (1)..(25): SEQ ID NO: 6071; WAN0249BP_at; Start 58; Stop 82
attataacagcgctttcattaattg

SEQ ID NO: 16844 - DNA, 25 bp, Artificial
  probe
  misc_feature (1)..(25): SEQ ID NO: 6071; WAN0249BP_at; Start 53; Stop 77
attatattataacagcgctttcatt

SEQ ID NO: 16845 - DNA, 25 bp, Artificial
  probe
  misc_feature (1)..(25): SEQ ID NO: 6071; WAN0249BP_at; Start 51; Stop 75
tgattatattataacagcgctttca

SEQ ID NO: 16846 - DNA, 25 bp, Artificial
  probe
  misc_feature (1)..(25): SEQ ID NO: 6071; WAN0249BP_at; Start 15; Stop 39
caagcttctagcctatttttgaaac

SEQ ID NO: 16847 - DNA, 25 bp, Artificial
  probe
  misc_feature (1)..(25): SEQ ID NO: 6071; WAN0249BP_at; Start 49; Stop 73
gttgattatattataacagcgcttt

SEQ ID NO: 16848 - DNA, 25 bp, Artificial
  probe
  misc_feature (1)..(25): SEQ ID NO: 6071; WAN0249BP_at; Start 13; Stop 37
aacaagcttctagcctatttttgaa

SEQ ID NO: 16849 - DNA, 25 bp, Artificial
  probe
  misc_feature (1)..(25): SEQ ID NO: 6071; WAN0249BP_at; Start 16; Stop 40
aagcttctagcctatttttgaaacg

SEQ ID NO: 16850 - DNA, 25 bp, Artificial
  probe
  misc_feature (1)..(25): SEQ ID NO: 6071; WAN0249BP_at; Start 61; Stop 85
ataacagcgctttcattaattgtca

SEQ ID NO: 16851 - DNA, 25 bp, Artificial
  probe
  misc_feature (1)..(25): SEQ ID NO: 6071; WAN0249BP_at; Start 36; Stop 60
aaacgtttcatttgttgattatatt

SEQ ID NO: 16852 - DNA, 25 bp, Artificial
  probe
  misc_feature (1)..(25): SEQ ID NO: 6071; WAN0249BP_at; Start 68; Stop 92
cgctttcattaattgtcaagcgctt

SEQ ID NO: 16853 - DNA, 25 bp, Artificial
  probe
  misc_feature (1)..(25): SEQ ID NO: 6071; WAN0249BP_at; Start 47; Stop 71
ttgttgattatattataacagcgct

SEQ ID NO: 16854 - DNA, 25 bp, Artificial
  probe
  misc_feature (1)..(25): SEQ ID NO: 6071; WAN0249BP_at; Start 63; Stop 87
aacagcgctttcattaattgtcaag

SEQ ID NO: 16855 - DNA, 25 bp, Artificial
  probe
  misc_feature (1)..(25): SEQ ID NO: 6071; WAN0249BP_at; Start 60; Stop 84
tataacagcgctttcattaattgtc

SEQ ID NO: 16856 - DNA, 25 bp, Artificial
  probe
  misc_feature (1)..(25): SEQ ID NO: 6071; WAN0249BP_at; Start 34; Stop 58
tgaaacgtttcatttgttgattata

SEQ ID NO: 16857 - DNA, 25 bp, Artificial
  probe
  misc_feature (1)..(25): SEQ ID NO: 6071; WAN0249BP_at; Start 48; Stop 72
tgttgattatattataacagcgctt

SEQ ID NO: 16858 - DNA, 25 bp, Artificial
  probe
  misc_feature (1)..(25): SEQ ID NO: 6071; WAN0249BP_at; Start 11; Stop 35
taaacaagcttctagcctatttttg

SEQ ID NO: 16859 - DNA, 25 bp, Artificial
  probe
  misc_feature (1)..(25): SEQ ID NO: 6071; WAN0249BP_at; Start 45; Stop 69
atttgttgattatattataacagcg

SEQ ID NO: 16860 - DNA, 25 bp, Artificial
  probe
  misc_feature (1)..(25): SEQ ID NO: 6071; WAN0249BP_at; Start 66; Stop 90
agcgctttcattaattgtcaagcgc

SEQ ID NO: 16861 - DNA, 25 bp, Artificial
  probe
  misc_feature (1)..(25): SEQ ID NO: 6071; WAN0249BP_at; Start 64; Stop 88
acagcgctttcattaattgtcaagc

SEQ ID NO: 16862 - DNA, 25 bp, Artificial
  probe
  misc_feature (1)..(25): SEQ ID NO: 6071; WAN0249BP_at; Start 65; Stop 89
cagcgctttcattaattgtcaagcg

SEQ ID NO: 16863 - DNA, 25 bp, Artificial
  probe
  misc_feature (1)..(25): SEQ ID NO: 6096; WAN0249BQ_at; Start 17; Stop 41
tatcaaactaggctattaacaagaa

SEQ ID NO: 16864 - DNA, 25 bp, Artificial
  probe
  misc_feature (1)..(25): SEQ ID NO: 6096; WAN0249BQ_at; Start 14; Stop 38
atatatcaaactaggctattaacaa

SEQ ID NO: 16865 - DNA, 25 bp, Artificial
  probe
  misc_feature (1)..(25): SEQ ID NO: 6096; WAN0249BQ_at; Start 3; Stop 27
cctttaatcatatatatcaaactag

SEQ ID NO: 16866 - DNA, 25 bp, Artificial
  probe
  misc_feature (1)..(25): SEQ ID NO: 6096; WAN0249BQ_at; Start 11; Stop 35
catatatatcaaactaggctattaa

SEQ ID NO: 16867 - DNA, 25 bp, Artificial
  probe
  misc_feature (1)..(25): SEQ ID NO: 6096; WAN0249BQ_at; Start 16; Stop 40
atatcaaactaggctattaacaaga

SEQ ID NO: 16868 - DNA, 25 bp, Artificial
  probe
  misc_feature (1)..(25): SEQ ID NO: 6096; WAN0249BQ_at; Start 9; Stop 33
atcatatatatcaaactaggctatt

SEQ ID NO: 16869 - DNA, 25 bp, Artificial
  probe
  misc_feature (1)..(25): SEQ ID NO: 6096; WAN0249BQ_at; Start 4; Stop 28
ctttaatcatatatatcaaactagg

SEQ ID NO: 16870 - DNA, 25 bp, Artificial
  probe
  misc_feature (1)..(25): SEQ ID NO: 6096; WAN0249BQ_at; Start 10; Stop 34
tcatatatatcaaactaggctatta

SEQ ID NO: 16871 - DNA, 25 bp, Artificial
  probe
  misc_feature (1)..(25): SEQ ID NO: 6096; WAN0249BQ_at; Start 18; Stop 42
atcaaactaggctattaacaagaaa

SEQ ID NO: 16872 - DNA, 25 bp, Artificial
  probe
  misc_feature (1)..(25): SEQ ID NO: 6096; WAN0249BQ_at; Start 12; Stop 36
atatatatcaaactaggctattaac

SEQ ID NO: 16873 - DNA, 25 bp, Artificial
  probe
  misc_feature (1)..(25): SEQ ID NO: 6096; WAN0249BQ_at; Start 15; Stop 39
tatatcaaactaggctattaacaag

SEQ ID NO: 16874 - DNA, 25 bp, Artificial
  probe
  misc_feature (1)..(25): SEQ ID NO: 6096; WAN0249BQ_at; Start 7; Stop 31
taatcatatatatcaaactaggcta

SEQ ID NO: 16875 - DNA, 25 bp, Artificial
  probe
  misc_feature (1)..(25): SEQ ID NO: 6096; WAN0249BQ_at; Start 2; Stop 26
tcctttaatcatatatatcaaacta

SEQ ID NO: 16876 - DNA, 25 bp, Artificial
  probe
  misc_feature (1)..(25): SEQ ID NO: 6096; WAN0249BQ_at; Start 1; Stop 25
ctcctttaatcatatatatcaaact

SEQ ID NO: 16877 - DNA, 25 bp, Artificial
  probe
  misc_feature (1)..(25): SEQ ID NO: 6096; WAN0249BQ_at; Start 13; Stop 37
tatatatcaaactaggctattaaca

SEQ ID NO: 16878 - DNA, 25 bp, Artificial
  probe
  misc_feature (1)..(25): SEQ ID NO: 6096; WAN0249BQ_at; Start 19; Stop 43
tcaaactaggctattaacaagaaag

SEQ ID NO: 16879 - DNA, 25 bp, Artificial
  probe
  misc_feature (1)..(25): SEQ ID NO: 6096; WAN0249BQ_at; Start 20; Stop 44
caaactaggctattaacaagaaagg

SEQ ID NO: 16880 - DNA, 25 bp, Artificial
  probe
  misc_feature (1)..(25): SEQ ID NO: 6096; WAN0249BQ_at; Start 5; Stop 29
tttaatcatatatatcaaactaggc

SEQ ID NO: 16881 - DNA, 25 bp, Artificial
  probe
  misc_feature (1)..(25): SEQ ID NO: 6096; WAN0249BQ_at; Start 8; Stop 32
aatcatatatatcaaactaggctat

SEQ ID NO: 16882 - DNA, 25 bp, Artificial
  probe
  misc_feature (1)..(25): SEQ ID NO: 6096; WAN0249BQ_at; Start 6; Stop 30
ttaatcatatatatcaaactaggct

SEQ ID NO: 16883 - DNA, 25 bp, Artificial
  probe
  misc_feature (1)..(25): SEQ ID NO: 6015; WAN0249BR_at; Start 101; Stop 125
caaattttccgcagttggtacaatc

SEQ ID NO: 16884 - DNA, 25 bp, Artificial
  probe
  misc_feature (1)..(25): SEQ ID NO: 6015; WAN0249BR_at; Start 128; Stop 152
ttgtaccaacttacaccacagcgaa

SEQ ID NO: 16885 - DNA, 25 bp, Artificial
  probe
  misc_feature (1)..(25): SEQ ID NO: 6015; WAN0249BR_at; Start 46; Stop 70
cggacgtcagcaaagtccttcggac

SEQ ID NO: 16886 - DNA, 25 bp, Artificial
  probe
  misc_feature (1)..(25): SEQ ID NO: 6015; WAN0249BR_at; Start 25; Stop 49
tatacttttctgaagtggtgacgga

SEQ ID NO: 16887 - DNA, 25 bp, Artificial
  probe
  misc_feature (1)..(25): SEQ ID NO: 6015; WAN0249BR_at; Start 110; Stop 134
cgcagttggtacaatcacttgtacc

SEQ ID NO: 16888 - DNA, 25 bp, Artificial
  probe
  misc_feature (1)..(25): SEQ ID NO: 6015; WAN0249BR_at; Start 158; Stop 182
ttctctatggggctcgccttgctcg

SEQ ID NO: 16889 - DNA, 25 bp, Artificial
  probe
  misc_feature (1)..(25): SEQ ID NO: 6015; WAN0249BR_at; Start 90; Stop 114
gcctaaggtctcaaattttccgcag

SEQ ID NO: 16890 - DNA, 25 bp, Artificial
  probe
  misc_feature (1)..(25): SEQ ID NO: 6015; WAN0249BR_at; Start 60; Stop 84
gtccttcggactttcatgactaaaa

SEQ ID NO: 16891 - DNA, 25 bp, Artificial
  probe
  misc_feature (1)..(25): SEQ ID NO: 6015; WAN0249BR_at; Start 71; Stop 95
tttcatgactaaaatttgagcctaa

SEQ ID NO: 16892 - DNA, 25 bp, Artificial
  probe
  misc_feature (1)..(25): SEQ ID NO: 6015; WAN0249BR_at; Start 93; Stop 117
taaggtctcaaattttccgcagttg

SEQ ID NO: 16893 - DNA, 25 bp, Artificial
  probe
  misc_feature (1)..(25): SEQ ID NO: 6015; WAN0249BR_at; Start 151; Stop 175
aaaagtattctctatggggctcgcc

SEQ ID NO: 16894 - DNA, 25 bp, Artificial
  probe
  misc_feature (1)..(25): SEQ ID NO: 6015; WAN0249BR_at; Start 144; Stop 168
cacagcgaaaagtattctctatggg

SEQ ID NO: 16895 - DNA, 25 bp, Artificial
  probe
  misc_feature (1)..(25): SEQ ID NO: 6015; WAN0249BR_at; Start 68; Stop 92
gactttcatgactaaaatttgagcc

SEQ ID NO: 16896 - DNA, 25 bp, Artificial
  probe
  misc_feature (1)..(25): SEQ ID NO: 6015; WAN0249BR_at; Start 30; Stop 54
ttttctgaagtggtgacggacgtca

SEQ ID NO: 16897 - DNA, 25 bp, Artificial
  probe
  misc_feature (1)..(25): SEQ ID NO: 6015; WAN0249BR_at; Start 190; Stop 214
tcagacaaccctttcctttctgtgc

SEQ ID NO: 16898 - DNA, 25 bp, Artificial
  probe
  misc_feature (1)..(25): SEQ ID NO: 6015; WAN0249BR_at; Start 27; Stop 51
tacttttctgaagtggtgacggacg

SEQ ID NO: 16899 - DNA, 25 bp, Artificial
  probe
  misc_feature (1)..(25): SEQ ID NO: 6015; WAN0249BR_at; Start 48; Stop 72
gacgtcagcaaagtccttcggactt

SEQ ID NO: 16900 - DNA, 25 bp, Artificial
  probe
  misc_feature (1)..(25): SEQ ID NO: 6015; WAN0249BR_at; Start 44; Stop 68
gacggacgtcagcaaagtccttcgg

SEQ ID NO: 16901 - DNA, 25 bp, Artificial
  probe
  misc_feature (1)..(25): SEQ ID NO: 6015; WAN0249BR_at; Start 43; Stop 67
tgacggacgtcagcaaagtccttcg

SEQ ID NO: 16902 - DNA, 25 bp, Artificial
  probe
  misc_feature (1)..(25): SEQ ID NO: 6015; WAN0249BR_at; Start 103; Stop 127
aattttccgcagttggtacaatcac

SEQ ID NO: 16903 - DNA, 25 bp, Artificial
  probe
  misc_feature (1)..(25): SEQ ID NO: 6015; WAN0249BR_at; Start 108; Stop 132
tccgcagttggtacaatcacttgta

SEQ ID NO: 16904 - DNA, 25 bp, Artificial
  probe
  misc_feature (1)..(25): SEQ ID NO: 6015; WAN0249BR_at; Start 29; Stop 53
cttttctgaagtggtgacggacgtc

SEQ ID NO: 16905 - DNA, 25 bp, Artificial
  probe
  misc_feature (1)..(25): SEQ ID NO: 6015; WAN0249BR_at; Start 40; Stop 64
tggtgacggacgtcagcaaagtcct

SEQ ID NO: 16906 - DNA, 25 bp, Artificial
  probe
  misc_feature (1)..(25): SEQ ID NO: 6015; WAN0249BR_at; Start 139; Stop 163
tacaccacagcgaaaagtattctct

SEQ ID NO: 16907 - DNA, 25 bp, Artificial
  probe
  misc_feature (1)..(25): SEQ ID NO: 6015; WAN0249BR_at; Start 106; Stop 130
tttccgcagttggtacaatcacttg

SEQ ID NO: 16908 - DNA, 25 bp, Artificial
  probe
  misc_feature (1)..(25): SEQ ID NO: 6015; WAN0249BR_at; Start 134; Stop 158
caacttacaccacagcgaaaagtat

SEQ ID NO: 16909 - DNA, 25 bp, Artificial
  probe
  misc_feature (1)..(25): SEQ ID NO: 6015; WAN0249BR_at; Start 66; Stop 90
cggactttcatgactaaaatttgag

SEQ ID NO: 16910 - DNA, 25 bp, Artificial
  probe
  misc_feature (1)..(25): SEQ ID NO: 6015; WAN0249BR_at; Start 33; Stop 57
tctgaagtggtgacggacgtcagca

SEQ ID NO: 16911 - DNA, 25 bp, Artificial
  probe
  misc_feature (1)..(25): SEQ ID NO: 6015; WAN0249BR_at; Start 119; Stop 143
tacaatcacttgtaccaacttacac

SEQ ID NO: 16912 - DNA, 25 bp, Artificial
  probe
  misc_feature (1)..(25): SEQ ID NO: 6015; WAN0249BR_at; Start 131; Stop 155
taccaacttacaccacagcgaaaag

SEQ ID NO: 16913 - DNA, 25 bp, Artificial
  probe
  misc_feature (1)..(25): SEQ ID NO: 6015; WAN0249BR_at; Start 62; Stop 86
ccttcggactttcatgactaaaatt

SEQ ID NO: 16914 - DNA, 25 bp, Artificial
  probe
  misc_feature (1)..(25): SEQ ID NO: 6015; WAN0249BR_at; Start 173; Stop 197
gccttgctcgcccaaattcagacaa

SEQ ID NO: 16915 - DNA, 25 bp, Artificial
  probe
  misc_feature (1)..(25): SEQ ID NO: 6015; WAN0249BR_at; Start 124; Stop 148
tcacttgtaccaacttacaccacag

SEQ ID NO: 16916 - DNA, 25 bp, Artificial
  probe
  misc_feature (1)..(25): SEQ ID NO: 6015; WAN0249BR_at; Start 96; Stop 120
ggtctcaaattttccgcagttggta

SEQ ID NO: 16917 - DNA, 25 bp, Artificial
  probe
  misc_feature (1)..(25): SEQ ID NO: 6241; WAN0249BS_at; Start 105; Stop 129
tgtattattccatattcaatccact

SEQ ID NO: 16918 - DNA, 25 bp, Artificial
  probe
  misc_feature (1)..(25): SEQ ID NO: 6241; WAN0249BS_at; Start 120; Stop 144
tcaatccactatacaagatgaatat

SEQ ID NO: 16919 - DNA, 25 bp, Artificial
  probe
  misc_feature (1)..(25): SEQ ID NO: 6241; WAN0249BS_at; Start 64; Stop 88
gggatctaaagcattttataccaat

SEQ ID NO: 16920 - DNA, 25 bp, Artificial
  probe
  misc_feature (1)..(25): SEQ ID NO: 6241; WAN0249BS_at; Start 117; Stop 141
tattcaatccactatacaagatgaa

SEQ ID NO: 16921 - DNA, 25 bp, Artificial
  probe
  misc_feature (1)..(25): SEQ ID NO: 6241; WAN0249BS_at; Start 41; Stop 65
tagaatgtgaacgaatcaattaggg

SEQ ID NO: 16922 - DNA, 25 bp, Artificial
  probe
  misc_feature (1)..(25): SEQ ID NO: 6241; WAN0249BS_at; Start 36; Stop 60
tgtaatagaatgtgaacgaatcaat

SEQ ID NO: 16923 - DNA, 25 bp, Artificial
  probe
  misc_feature (1)..(25): SEQ ID NO: 6241; WAN0249BS_at; Start 126; Stop 150
cactatacaagatgaatatttctct

SEQ ID NO: 16924 - DNA, 25 bp, Artificial
  probe
  misc_feature (1)..(25): SEQ ID NO: 6241; WAN0249BS_at; Start 28; Stop 52
tagtagattgtaatagaatgtgaac

SEQ ID NO: 16925 - DNA, 25 bp, Artificial
  probe
  misc_feature (1)..(25): SEQ ID NO: 6241; WAN0249BS_at; Start 74; Stop 98
gcattttataccaatgttttataag

SEQ ID NO: 16926 - DNA, 25 bp, Artificial
  probe
  misc_feature (1)..(25): SEQ ID NO: 6241; WAN0249BS_at; Start 135; Stop 159
agatgaatatttctctcaagtttca

SEQ ID NO: 16927 - DNA, 25 bp, Artificial
  probe
  misc_feature (1)..(25): SEQ ID NO: 6241; WAN0249BS_at; Start 95; Stop 119
taagttgtattgtattattccatat

SEQ ID NO: 16928 - DNA, 25 bp, Artificial
  probe
  misc_feature (1)..(25): SEQ ID NO: 6241; WAN0249BS_at; Start 160; Stop 184
taatcaaaataaaaatgactgtatc

SEQ ID NO: 16929 - DNA, 25 bp, Artificial
  probe
  misc_feature (1)..(25): SEQ ID NO: 6241; WAN0249BS_at; Start 112; Stop 136
ttccatattcaatccactatacaag

SEQ ID NO: 16930 - DNA, 25 bp, Artificial
  probe
  misc_feature (1)..(25): SEQ ID NO: 6241; WAN0249BS_at; Start 180; Stop 204
gtatctatagctccataaacaaatc

SEQ ID NO: 16931 - DNA, 25 bp, Artificial
  probe
  misc_feature (1)..(25): SEQ ID NO: 6241; WAN0249BS_at; Start 189; Stop 213
gctccataaacaaatcatagataca

SEQ ID NO: 16932 - DNA, 25 bp, Artificial
  probe
  misc_feature (1)..(25): SEQ ID NO: 6241; WAN0249BS_at; Start 139; Stop 163
gaatatttctctcaagtttcataat

SEQ ID NO: 16933 - DNA, 25 bp, Artificial
  probe
  misc_feature (1)..(25): SEQ ID NO: 6241; WAN0249BS_at; Start 31; Stop 55
tagattgtaatagaatgtgaacgaa

SEQ ID NO: 16934 - DNA, 25 bp, Artificial
  probe
  misc_feature (1)..(25): SEQ ID NO: 6241; WAN0249BS_at; Start 185; Stop 209
tatagctccataaacaaatcataga

SEQ ID NO: 16935 - DNA, 25 bp, Artificial
  probe
  misc_feature (1)..(25): SEQ ID NO: 6241; WAN0249BS_at; Start 9; Stop 33
aactctcatcattttattatagtag

SEQ ID NO: 16936 - DNA, 25 bp, Artificial
  probe
  misc_feature (1)..(25): SEQ ID NO: 6241; WAN0249BS_at; Start 146; Stop 170
tctctcaagtttcataatcaaaata

SEQ ID NO: 16937 - DNA, 25 bp, Artificial
  probe
  misc_feature (1)..(25): SEQ ID NO: 6241; WAN0249BS_at; Start 124; Stop 148
tccactatacaagatgaatatttct

SEQ ID NO: 16938 - DNA, 25 bp, Artificial
  probe
  misc_feature (1)..(25): SEQ ID NO: 6241; WAN0249BS_at; Start 115; Stop 139
catattcaatccactatacaagatg

SEQ ID NO: 16939 - DNA, 25 bp, Artificial
  probe
  misc_feature (1)..(25): SEQ ID NO: 6241; WAN0249BS_at; Start 49; Stop 73
gaacgaatcaattaggggatctaaa

SEQ ID NO: 16940 - DNA, 25 bp, Artificial
  probe
  misc_feature (1)..(25): SEQ ID NO: 6241; WAN0249BS_at; Start 66; Stop 90
gatctaaagcattttataccaatgt

SEQ ID NO: 16941 - DNA, 25 bp, Artificial
  probe
  misc_feature (1)..(25): SEQ ID NO: 6241; WAN0249BS_at; Start 193; Stop 217
cataaacaaatcatagatacagtca

SEQ ID NO: 16942 - DNA, 25 bp, Artificial
  probe
  misc_feature (1)..(25): SEQ ID NO: 6241; WAN0249BS_at; Start 195; Stop 219
taaacaaatcatagatacagtcatt

SEQ ID NO: 16943 - DNA, 25 bp, Artificial
  probe
  misc_feature (1)..(25): SEQ ID NO: 6241; WAN0249BS_at; Start 176; Stop 200
gactgtatctatagctccataaaca

SEQ ID NO: 16944 - DNA, 25 bp, Artificial
  probe
  misc_feature (1)..(25): SEQ ID NO: 6241; WAN0249BS_at; Start 191; Stop 215
tccataaacaaatcatagatacagt

SEQ ID NO: 16945 - DNA, 25 bp, Artificial
  probe
  misc_feature (1)..(25): SEQ ID NO: 6241; WAN0249BS_at; Start 84; Stop 108
ccaatgttttataagttgtattgta

SEQ ID NO: 16946 - DNA, 25 bp, Artificial
  probe
  misc_feature (1)..(25): SEQ ID NO: 6241; WAN0249BS_at; Start 187; Stop 211
tagctccataaacaaatcatagata

SEQ ID NO: 16947 - DNA, 25 bp, Artificial
  probe
  misc_feature (1)..(25): SEQ ID NO: 6241; WAN0249BS_at; Start 131; Stop 155
tacaagatgaatatttctctcaagt

SEQ ID NO: 16948 - DNA, 25 bp, Artificial
  probe
  misc_feature (1)..(25): SEQ ID NO: 6241; WAN0249BS_at; Start 183; Stop 207
tctatagctccataaacaaatcata

SEQ ID NO: 16949 - DNA, 25 bp, Artificial
  probe
  misc_feature (1)..(25): SEQ ID NO: 6241; WAN0249BS_at; Start 173; Stop 197
aatgactgtatctatagctccataa

SEQ ID NO: 16950 - DNA, 25 bp, Artificial
  probe
  misc_feature (1)..(25): SEQ ID NO: 6241; WAN0249BS_at; Start 175; Stop 199
tgactgtatctatagctccataaac

SEQ ID NO: 16951 - DNA, 25 bp, Artificial
  probe
  misc_feature (1)..(25): SEQ ID NO: 6114; WAN0249BT_at; Start 19; Stop 43
tgatataataataccacctttttct

SEQ ID NO: 16952 - DNA, 25 bp, Artificial
  probe
  misc_feature (1)..(25): SEQ ID NO: 6114; WAN0249BT_at; Start 18; Stop 42
ttgatataataataccacctttttc

SEQ ID NO: 16953 - DNA, 25 bp, Artificial
  probe
  misc_feature (1)..(25): SEQ ID NO: 6114; WAN0249BT_at; Start 14; Stop 38
ctttttgatataataataccacctt

SEQ ID NO: 16954 - DNA, 25 bp, Artificial
  probe
  misc_feature (1)..(25): SEQ ID NO: 6114; WAN0249BT_at; Start 64; Stop 88
aaatattcacatttttctaggagga

SEQ ID NO: 16955 - DNA, 25 bp, Artificial
  probe
  misc_feature (1)..(25): SEQ ID NO: 6114; WAN0249BT_at; Start 69; Stop 93
ttcacatttttctaggaggaacaat

SEQ ID NO: 16956 - DNA, 25 bp, Artificial
  probe
  misc_feature (1)..(25): SEQ ID NO: 6114; WAN0249BT_at; Start 59; Stop 83
gtagaaaatattcacatttttctag

SEQ ID NO: 16957 - DNA, 25 bp, Artificial
  probe
  misc_feature (1)..(25): SEQ ID NO: 6114; WAN0249BT_at; Start 61; Stop 85
agaaaatattcacatttttctagga

SEQ ID NO: 16958 - DNA, 25 bp, Artificial
  probe
  misc_feature (1)..(25): SEQ ID NO: 6114; WAN0249BT_at; Start 68; Stop 92
attcacatttttctaggaggaacaa

SEQ ID NO: 16959 - DNA, 25 bp, Artificial
  probe
  misc_feature (1)..(25): SEQ ID NO: 6114; WAN0249BT_at; Start 62; Stop 86
gaaaatattcacatttttctaggag

SEQ ID NO: 16960 - DNA, 25 bp, Artificial
  probe
  misc_feature (1)..(25): SEQ ID NO: 6114; WAN0249BT_at; Start 51; Stop 75
ttataaatgtagaaaatattcacat

SEQ ID NO: 16961 - DNA, 25 bp, Artificial
  probe
  misc_feature (1)..(25): SEQ ID NO: 6114; WAN0249BT_at; Start 20; Stop 44
gatataataataccacctttttcta

SEQ ID NO: 16962 - DNA, 25 bp, Artificial
  probe
  misc_feature (1)..(25): SEQ ID NO: 6114; WAN0249BT_at; Start 60; Stop 84
tagaaaatattcacatttttctagg

SEQ ID NO: 16963 - DNA, 25 bp, Artificial
  probe
  misc_feature (1)..(25): SEQ ID NO: 6114; WAN0249BT_at; Start 56; Stop 80
aatgtagaaaatattcacatttttc

SEQ ID NO: 16964 - DNA, 25 bp, Artificial
  probe
  misc_feature (1)..(25): SEQ ID NO: 6114; WAN0249BT_at; Start 49; Stop 73
ttttataaatgtagaaaatattcac

SEQ ID NO: 16965 - DNA, 25 bp, Artificial
  probe
  misc_feature (1)..(25): SEQ ID NO: 6114; WAN0249BT_at; Start 52; Stop 76
tataaatgtagaaaatattcacatt

SEQ ID NO: 16966 - DNA, 25 bp, Artificial
  probe
  misc_feature (1)..(25): SEQ ID NO: 6114; WAN0249BT_at; Start 65; Stop 89
aatattcacatttttctaggaggaa

SEQ ID NO: 16967 - DNA, 25 bp, Artificial
  probe
  misc_feature (1)..(25): SEQ ID NO: 6114; WAN0249BT_at; Start 67; Stop 91
tattcacatttttctaggaggaaca

SEQ ID NO: 16968 - DNA, 25 bp, Artificial
  probe
  misc_feature (1)..(25): SEQ ID NO: 6114; WAN0249BT_at; Start 63; Stop 87
aaaatattcacatttttctaggagg

SEQ ID NO: 16969 - DNA, 25 bp, Artificial
  probe
  misc_feature (1)..(25): SEQ ID NO: 6114; WAN0249BT_at; Start 66; Stop 90
atattcacatttttctaggaggaac

SEQ ID NO: 16970 - DNA, 25 bp, Artificial
  probe
  misc_feature (1)..(25): SEQ ID NO: 6114; WAN0249BT_at; Start 50; Stop 74
tttataaatgtagaaaatattcaca

SEQ ID NO: 16971 - DNA, 25 bp, Artificial
  probe
  misc_feature (1)..(25): SEQ ID NO: 6114; WAN0249BT_at; Start 58; Stop 82
tgtagaaaatattcacatttttcta

SEQ ID NO: 16972 - DNA, 25 bp, Artificial
  probe
  misc_feature (1)..(25): SEQ ID NO: 6244; WAN0249BU_at; Start 84; Stop 108
tatcatacaaattcctcctttactt

SEQ ID NO: 16973 - DNA, 25 bp, Artificial
  probe
  misc_feature (1)..(25): SEQ ID NO: 6244; WAN0249BU_at; Start 57; Stop 81
aatatagacttattctaaacgatgg

SEQ ID NO: 16974 - DNA, 25 bp, Artificial
  probe
  misc_feature (1)..(25): SEQ ID NO: 6244; WAN0249BU_at; Start 65; Stop 89
cttattctaaacgatggtatatcat

SEQ ID NO: 16975 - DNA, 25 bp, Artificial
  probe
  misc_feature (1)..(25): SEQ ID NO: 6244; WAN0249BU_at; Start 102; Stop 126
tttacttattatgtatagactctaa

SEQ ID NO: 16976 - DNA, 25 bp, Artificial
  probe
  misc_feature (1)..(25): SEQ ID NO: 6244; WAN0249BU_at; Start 63; Stop 87
gacttattctaaacgatggtatatc

SEQ ID NO: 16977 - DNA, 25 bp, Artificial
  probe
  misc_feature (1)..(25): SEQ ID NO: 6244; WAN0249BU_at; Start 17; Stop 41
cattttttattcaagaagattcctt

SEQ ID NO: 16978 - DNA, 25 bp, Artificial
  probe
  misc_feature (1)..(25): SEQ ID NO: 6244; WAN0249BU_at; Start 90; Stop 114
acaaattcctcctttacttattatg

SEQ ID NO: 16979 - DNA, 25 bp, Artificial
  probe
  misc_feature (1)..(25): SEQ ID NO: 6244; WAN0249BU_at; Start 27; Stop 51
tcaagaagattccttataacttcta

SEQ ID NO: 16980 - DNA, 25 bp, Artificial
  probe
  misc_feature (1)..(25): SEQ ID NO: 6244; WAN0249BU_at; Start 80; Stop 104
ggtatatcatacaaattcctccttt

SEQ ID NO: 16981 - DNA, 25 bp, Artificial
  probe
  misc_feature (1)..(25): SEQ ID NO: 6244; WAN0249BU_at; Start 71; Stop 95
ctaaacgatggtatatcatacaaat

SEQ ID NO: 16982 - DNA, 25 bp, Artificial
  probe
  misc_feature (1)..(25): SEQ ID NO: 6244; WAN0249BU_at; Start 70; Stop 94
tctaaacgatggtatatcatacaaa

SEQ ID NO: 16983 - DNA, 25 bp, Artificial
  probe
  misc_feature (1)..(25): SEQ ID NO: 6244; WAN0249BU_at; Start 72; Stop 96
taaacgatggtatatcatacaaatt

SEQ ID NO: 16984 - DNA, 25 bp, Artificial
  probe
  misc_feature (1)..(25): SEQ ID NO: 6244; WAN0249BU_at; Start 97; Stop 121
cctcctttacttattatgtatagac

SEQ ID NO: 16985 - DNA, 25 bp, Artificial
  probe
  misc_feature (1)..(25): SEQ ID NO: 6244; WAN0249BU_at; Start 79; Stop 103
tggtatatcatacaaattcctcctt

SEQ ID NO: 16986 - DNA, 25 bp, Artificial
  probe
  misc_feature (1)..(25): SEQ ID NO: 6244; WAN0249BU_at; Start 68; Stop 92
attctaaacgatggtatatcataca

SEQ ID NO: 16987 - DNA, 25 bp, Artificial
  probe
  misc_feature (1)..(25): SEQ ID NO: 6244; WAN0249BU_at; Start 82; Stop 106
tatatcatacaaattcctcctttac

SEQ ID NO: 16988 - DNA, 25 bp, Artificial
  probe
  misc_feature (1)..(25): SEQ ID NO: 6244; WAN0249BU_at; Start 106; Stop 130
cttattatgtatagactctaatttc

SEQ ID NO: 16989 - DNA, 25 bp, Artificial
  probe
  misc_feature (1)..(25): SEQ ID NO: 6244; WAN0249BU_at; Start 87; Stop 111
catacaaattcctcctttacttatt

SEQ ID NO: 16990 - DNA, 25 bp, Artificial
  probe
  misc_feature (1)..(25): SEQ ID NO: 6244; WAN0249BU_at; Start 69; Stop 93
ttctaaacgatggtatatcatacaa

SEQ ID NO: 16991 - DNA, 25 bp, Artificial
  probe
  misc_feature (1)..(25): SEQ ID NO: 6244; WAN0249BU_at; Start 15; Stop 39
ttcattttttattcaagaagattcc

SEQ ID NO: 16992 - DNA, 25 bp, Artificial
  probe
  misc_feature (1)..(25): SEQ ID NO: 6244; WAN0249BU_at; Start 111; Stop 135
tatgtatagactctaatttctttat

SEQ ID NO: 16993 - DNA, 25 bp, Artificial
  probe
  misc_feature (1)..(25): SEQ ID NO: 6244; WAN0249BU_at; Start 28; Stop 52
caagaagattccttataacttctat

SEQ ID NO: 16994 - DNA, 25 bp, Artificial
  probe
  misc_feature (1)..(25): SEQ ID NO: 6244; WAN0249BU_at; Start 24; Stop 48
tattcaagaagattccttataactt

SEQ ID NO: 16995 - DNA, 25 bp, Artificial
  probe
  misc_feature (1)..(25): SEQ ID NO: 6244; WAN0249BU_at; Start 41; Stop 65
tataacttctattttaaatatagac

SEQ ID NO: 16996 - DNA, 25 bp, Artificial
  probe
  misc_feature (1)..(25): SEQ ID NO: 6244; WAN0249BU_at; Start 77; Stop 101
gatggtatatcatacaaattcctcc

SEQ ID NO: 16997 - DNA, 25 bp, Artificial
  probe
  misc_feature (1)..(25): SEQ ID NO: 6244; WAN0249BU_at; Start 59; Stop 83
tatagacttattctaaacgatggta

SEQ ID NO: 16998 - DNA, 25 bp, Artificial
  probe
  misc_feature (1)..(25): SEQ ID NO: 6244; WAN0249BU_at; Start 67; Stop 91
tattctaaacgatggtatatcatac

SEQ ID NO: 16999 - DNA, 25 bp, Artificial
  probe
  misc_feature (1)..(25): SEQ ID NO: 6244; WAN0249BU_at; Start 91; Stop 115
caaattcctcctttacttattatgt

SEQ ID NO: 17000 - DNA, 25 bp, Artificial
  probe
  misc_feature (1)..(25): SEQ ID NO: 6244; WAN0249BU_at; Start 76; Stop 100
cgatggtatatcatacaaattcctc

SEQ ID NO: 17001 - DNA, 25 bp, Artificial
  probe
  misc_feature (1)..(25): SEQ ID NO: 6244; WAN0249BU_at; Start 64; Stop 88
acttattctaaacgatggtatatca

SEQ ID NO: 17002 - DNA, 25 bp, Artificial
  probe
  misc_feature (1)..(25): SEQ ID NO: 6244; WAN0249BU_at; Start 61; Stop 85
tagacttattctaaacgatggtata

SEQ ID NO: 17003 - DNA, 25 bp, Artificial
  probe
  misc_feature (1)..(25): SEQ ID NO: 6244; WAN0249BU_at; Start 74; Stop 98
aacgatggtatatcatacaaattcc

SEQ ID NO: 17004 - DNA, 25 bp, Artificial
  probe
  misc_feature (1)..(25): SEQ ID NO: 6244; WAN0249BU_at; Start 100; Stop 124
cctttacttattatgtatagactct

SEQ ID NO: 17005 - DNA, 25 bp, Artificial
  probe
  misc_feature (1)..(25): SEQ ID NO: 6244; WAN0249BU_at; Start 81; Stop 105
gtatatcatacaaattcctccttta

SEQ ID NO: 17006 - DNA, 25 bp, Artificial
  probe
  misc_feature (1)..(25): SEQ ID NO: 6135; WAN0249BV_at; Start 48; Stop 72
gaccttagaatagcgtgtaataaat

SEQ ID NO: 17007 - DNA, 25 bp, Artificial
  probe
  misc_feature (1)..(25): SEQ ID NO: 6135; WAN0249BV_at; Start 43; Stop 67
atatagaccttagaatagcgtgtaa

SEQ ID NO: 17008 - DNA, 25 bp, Artificial
  probe
  misc_feature (1)..(25): SEQ ID NO: 6135; WAN0249BV_at; Start 61; Stop 85
cgtgtaataaatgattttagatgtg

SEQ ID NO: 17009 - DNA, 25 bp, Artificial
  probe
  misc_feature (1)..(25): SEQ ID NO: 6135; WAN0249BV_at; Start 59; Stop 83
agcgtgtaataaatgattttagatg

SEQ ID NO: 17010 - DNA, 25 bp, Artificial
  probe
  misc_feature (1)..(25): SEQ ID NO: 6135; WAN0249BV_at; Start 65; Stop 89
taataaatgattttagatgtgccat

SEQ ID NO: 17011 - DNA, 25 bp, Artificial
  probe
  misc_feature (1)..(25): SEQ ID NO: 6135; WAN0249BV_at; Start 73; Stop 97
gattttagatgtgccataagccatc

SEQ ID NO: 17012 - DNA, 25 bp, Artificial
  probe
  misc_feature (1)..(25): SEQ ID NO: 6135; WAN0249BV_at; Start 55; Stop 79
gaatagcgtgtaataaatgatttta

SEQ ID NO: 17013 - DNA, 25 bp, Artificial
  probe
  misc_feature (1)..(25): SEQ ID NO: 6135; WAN0249BV_at; Start 53; Stop 77
tagaatagcgtgtaataaatgattt

SEQ ID NO: 17014 - DNA, 25 bp, Artificial
  probe
  misc_feature (1)..(25): SEQ ID NO: 6135; WAN0249BV_at; Start 64; Stop 88
gtaataaatgattttagatgtgcca

SEQ ID NO: 17015 - DNA, 25 bp, Artificial
  probe
  misc_feature (1)..(25): SEQ ID NO: 6135; WAN0249BV_at; Start 71; Stop 95
atgattttagatgtgccataagcca

SEQ ID NO: 17016 - DNA, 25 bp, Artificial
  probe
  misc_feature (1)..(25): SEQ ID NO: 6135; WAN0249BV_at; Start 41; Stop 65
caatatagaccttagaatagcgtgt

SEQ ID NO: 17017 - DNA, 25 bp, Artificial
  probe
  misc_feature (1)..(25): SEQ ID NO: 6135; WAN0249BV_at; Start 75; Stop 99
ttttagatgtgccataagccatctc

SEQ ID NO: 17018 - DNA, 25 bp, Artificial
  probe
  misc_feature (1)..(25): SEQ ID NO: 6135; WAN0249BV_at; Start 56; Stop 80
aatagcgtgtaataaatgattttag

SEQ ID NO: 17019 - DNA, 25 bp, Artificial
  probe
  misc_feature (1)..(25): SEQ ID NO: 6135; WAN0249BV_at; Start 72; Stop 96
tgattttagatgtgccataagccat

SEQ ID NO: 17020 - DNA, 25 bp, Artificial
  probe
  misc_feature (1)..(25): SEQ ID NO: 6135; WAN0249BV_at; Start 62; Stop 86
gtgtaataaatgattttagatgtgc

SEQ ID NO: 17021 - DNA, 25 bp, Artificial
  probe
  misc_feature (1)..(25): SEQ ID NO: 6135; WAN0249BV_at; Start 42; Stop 66
aatatagaccttagaatagcgtgta

SEQ ID NO: 17022 - DNA, 25 bp, Artificial
  probe
  misc_feature (1)..(25): SEQ ID NO: 6135; WAN0249BV_at; Start 50; Stop 74
ccttagaatagcgtgtaataaatga

SEQ ID NO: 17023 - DNA, 25 bp, Artificial
  probe
  misc_feature (1)..(25): SEQ ID NO: 6135; WAN0249BV_at; Start 46; Stop 70
tagaccttagaatagcgtgtaataa

SEQ ID NO: 17024 - DNA, 25 bp, Artificial
  probe
  misc_feature (1)..(25): SEQ ID NO: 6135; WAN0249BV_at; Start 47; Stop 71
agaccttagaatagcgtgtaataaa

SEQ ID NO: 17025 - DNA, 25 bp, Artificial
  probe
  misc_feature (1)..(25): SEQ ID NO: 6135; WAN0249BV_at; Start 44; Stop 68
tatagaccttagaatagcgtgtaat

SEQ ID NO: 17026 - DNA, 25 bp, Artificial
  probe
  misc_feature (1)..(25): SEQ ID NO: 6135; WAN0249BV_at; Start 51; Stop 75
cttagaatagcgtgtaataaatgat

SEQ ID NO: 17027 - DNA, 25 bp, Artificial
  probe
  misc_feature (1)..(25): SEQ ID NO: 6135; WAN0249BV_at; Start 45; Stop 69
atagaccttagaatagcgtgtaata

SEQ ID NO: 17028 - DNA, 25 bp, Artificial
  probe
  misc_feature (1)..(25): SEQ ID NO: 6135; WAN0249BV_at; Start 58; Stop 82
tagcgtgtaataaatgattttagat

SEQ ID NO: 17029 - DNA, 25 bp, Artificial
  probe
  misc_feature (1)..(25): SEQ ID NO: 6135; WAN0249BV_at; Start 54; Stop 78
agaatagcgtgtaataaatgatttt

SEQ ID NO: 17030 - DNA, 25 bp, Artificial
  probe
  misc_feature (1)..(25): SEQ ID NO: 6135; WAN0249BV_at; Start 74; Stop 98
attttagatgtgccataagccatct

SEQ ID NO: 17031 - DNA, 25 bp, Artificial
  probe
  misc_feature (1)..(25): SEQ ID NO: 6135; WAN0249BV_at; Start 52; Stop 76
ttagaatagcgtgtaataaatgatt

SEQ ID NO: 17032 - DNA, 25 bp, Artificial
  probe
  misc_feature (1)..(25): SEQ ID NO: 6135; WAN0249BV_at; Start 57; Stop 81
atagcgtgtaataaatgattttaga

SEQ ID NO: 17033 - DNA, 25 bp, Artificial
  probe
  misc_feature (1)..(25): SEQ ID NO: 6135; WAN0249BV_at; Start 66; Stop 90
aataaatgattttagatgtgccata

SEQ ID NO: 17034 - DNA, 25 bp, Artificial
  probe
  misc_feature (1)..(25): SEQ ID NO: 6135; WAN0249BV_at; Start 70; Stop 94
aatgattttagatgtgccataagcc

SEQ ID NO: 17035 - DNA, 25 bp, Artificial
  probe
  misc_feature (1)..(25): SEQ ID NO: 6135; WAN0249BV_at; Start 68; Stop 92
taaatgattttagatgtgccataag

SEQ ID NO: 17036 - DNA, 25 bp, Artificial
  probe
  misc_feature (1)..(25): SEQ ID NO: 6135; WAN0249BV_at; Start 60; Stop 84
gcgtgtaataaatgattttagatgt

SEQ ID NO: 17037 - DNA, 25 bp, Artificial
  probe
  misc_feature (1)..(25): SEQ ID NO: 6135; WAN0249BV_at; Start 67; Stop 91
ataaatgattttagatgtgccataa

SEQ ID NO: 17038 - DNA, 25 bp, Artificial
  probe
  misc_feature (1)..(25): SEQ ID NO: 6135; WAN0249BV_at; Start 69; Stop 93
aaatgattttagatgtgccataagc

SEQ ID NO: 17039 - DNA, 25 bp, Artificial
  probe
  misc_feature (1)..(25): SEQ ID NO: 6135; WAN0249BV_at; Start 63; Stop 87
tgtaataaatgattttagatgtgcc

SEQ ID NO: 17040 - DNA, 25 bp, Artificial
  probe
  misc_feature (1)..(25): SEQ ID NO: 6006; WAN0249BW_at; Start 70; Stop 94
tataaactcctcagtttcgaactca

SEQ ID NO: 17041 - DNA, 25 bp, Artificial
  probe
  misc_feature (1)..(25): SEQ ID NO: 6006; WAN0249BW_at; Start 66; Stop 90
gagttataaactcctcagtttcgaa

SEQ ID NO: 17042 - DNA, 25 bp, Artificial
  probe
  misc_feature (1)..(25): SEQ ID NO: 6006; WAN0249BW_at; Start 99; Stop 123
tagtcgtgcaggataggataccctt

SEQ ID NO: 17043 - DNA, 25 bp, Artificial
  probe
  misc_feature (1)..(25): SEQ ID NO: 6006; WAN0249BW_at; Start 30; Stop 54
catactatcgttaaatgctgattta

SEQ ID NO: 17044 - DNA, 25 bp, Artificial
  probe
  misc_feature (1)..(25): SEQ ID NO: 6006; WAN0249BW_at; Start 45; Stop 69
tgctgatttaatcgaaattttgagt

SEQ ID NO: 17045 - DNA, 25 bp, Artificial
  probe
  misc_feature (1)..(25): SEQ ID NO: 6006; WAN0249BW_at; Start 107; Stop 131
caggataggatacccttcataaact

SEQ ID NO: 17046 - DNA, 25 bp, Artificial
  probe
  misc_feature (1)..(25): SEQ ID NO: 6006; WAN0249BW_at; Start 83; Stop 107
gtttcgaactcaaaattagtcgtgc

SEQ ID NO: 17047 - DNA, 25 bp, Artificial
  probe
  misc_feature (1)..(25): SEQ ID NO: 6006; WAN0249BW_at; Start 91; Stop 115
ctcaaaattagtcgtgcaggatagg

SEQ ID NO: 17048 - DNA, 25 bp, Artificial
  probe
  misc_feature (1)..(25): SEQ ID NO: 6006; WAN0249BW_at; Start 186; Stop 210
atatacattctaaaatacctgtagg

SEQ ID NO: 17049 - DNA, 25 bp, Artificial
  probe
  misc_feature (1)..(25): SEQ ID NO: 6006; WAN0249BW_at; Start 88; Stop 112
gaactcaaaattagtcgtgcaggat

SEQ ID NO: 17050 - DNA, 25 bp, Artificial
  probe
  misc_feature (1)..(25): SEQ ID NO: 6006; WAN0249BW_at; Start 96; Stop 120
aattagtcgtgcaggataggatacc

SEQ ID NO: 17051 - DNA, 25 bp, Artificial
  probe
  misc_feature (1)..(25): SEQ ID NO: 6006; WAN0249BW_at; Start 77; Stop 101
tcctcagtttcgaactcaaaattag

SEQ ID NO: 17052 - DNA, 25 bp, Artificial
  probe
  misc_feature (1)..(25): SEQ ID NO: 6006; WAN0249BW_at; Start 86; Stop 110
tcgaactcaaaattagtcgtgcagg

SEQ ID NO: 17053 - DNA, 25 bp, Artificial
  probe
  misc_feature (1)..(25): SEQ ID NO: 6006; WAN0249BW_at; Start 102; Stop 126
tcgtgcaggataggatacccttcat

SEQ ID NO: 17054 - DNA, 25 bp, Artificial
  probe
  misc_feature (1)..(25): SEQ ID NO: 6006; WAN0249BW_at; Start 72; Stop 96
taaactcctcagtttcgaactcaaa

SEQ ID NO: 17055 - DNA, 25 bp, Artificial
  probe
  misc_feature (1)..(25): SEQ ID NO: 6006; WAN0249BW_at; Start 119; Stop 143
cccttcataaacttatataactact

SEQ ID NO: 17056 - DNA, 25 bp, Artificial
  probe
  misc_feature (1)..(25): SEQ ID NO: 6006; WAN0249BW_at; Start 10; Stop 34
atttatcattttatgacaaacatac

SEQ ID NO: 17057 - DNA, 25 bp, Artificial
  probe
  misc_feature (1)..(25): SEQ ID NO: 6006; WAN0249BW_at; Start 114; Stop 138
ggatacccttcataaacttatataa

SEQ ID NO: 17058 - DNA, 25 bp, Artificial
  probe
  misc_feature (1)..(25): SEQ ID NO: 6006; WAN0249BW_at; Start 101; Stop 125
gtcgtgcaggataggatacccttca

SEQ ID NO: 17059 - DNA, 25 bp, Artificial
  probe
  misc_feature (1)..(25): SEQ ID NO: 6006; WAN0249BW_at; Start 100; Stop 124
agtcgtgcaggataggatacccttc

SEQ ID NO: 17060 - DNA, 25 bp, Artificial
  probe
  misc_feature (1)..(25): SEQ ID NO: 6006; WAN0249BW_at; Start 183; Stop 207
gcaatatacattctaaaatacctgt

SEQ ID NO: 17061 - DNA, 25 bp, Artificial
  probe
  misc_feature (1)..(25): SEQ ID NO: 6006; WAN0249BW_at; Start 80; Stop 104
tcagtttcgaactcaaaattagtcg

SEQ ID NO: 17062 - DNA, 25 bp, Artificial
  probe
  misc_feature (1)..(25): SEQ ID NO: 6006; WAN0249BW_at; Start 97; Stop 121
attagtcgtgcaggataggataccc

SEQ ID NO: 17063 - DNA, 25 bp, Artificial
  probe
  misc_feature (1)..(25): SEQ ID NO: 6006; WAN0249BW_at; Start 169; Stop 193
taaggaatatctaagcaatatacat

SEQ ID NO: 17064 - DNA, 25 bp, Artificial
  probe
  misc_feature (1)..(25): SEQ ID NO: 6006; WAN0249BW_at; Start 26; Stop 50
caaacatactatcgttaaatgctga

SEQ ID NO: 17065 - DNA, 25 bp, Artificial
  probe
  misc_feature (1)..(25): SEQ ID NO: 6006; WAN0249BW_at; Start 93; Stop 117
caaaattagtcgtgcaggataggat

SEQ ID NO: 17066 - DNA, 25 bp, Artificial
  probe
  misc_feature (1)..(25): SEQ ID NO: 6006; WAN0249BW_at; Start 65; Stop 89
tgagttataaactcctcagtttcga

SEQ ID NO: 17067 - DNA, 25 bp, Artificial
  probe
  misc_feature (1)..(25): SEQ ID NO: 6006; WAN0249BW_at; Start 112; Stop 136
taggatacccttcataaacttatat

SEQ ID NO: 17068 - DNA, 25 bp, Artificial
  probe
  misc_feature (1)..(25): SEQ ID NO: 6006; WAN0249BW_at; Start 172; Stop 196
ggaatatctaagcaatatacattct

SEQ ID NO: 17069 - DNA, 25 bp, Artificial
  probe
  misc_feature (1)..(25): SEQ ID NO: 6006; WAN0249BW_at; Start 58; Stop 82
gaaattttgagttataaactcctca

SEQ ID NO: 17070 - DNA, 25 bp, Artificial
  probe
  misc_feature (1)..(25): SEQ ID NO: 6006; WAN0249BW_at; Start 109; Stop 133
ggataggatacccttcataaactta

SEQ ID NO: 17071 - DNA, 25 bp, Artificial
  probe
  misc_feature (1)..(25): SEQ ID NO: 6006; WAN0249BW_at; Start 103; Stop 127
cgtgcaggataggatacccttcata

SEQ ID NO: 17072 - DNA, 25 bp, Artificial
  probe
  misc_feature (1)..(25): SEQ ID NO: 6006; WAN0249BW_at; Start 105; Stop 129
tgcaggataggatacccttcataaa

SEQ ID NO: 17073 - DNA, 25 bp, Artificial
  probe
  misc_feature (1)..(25): SEQ ID NO: 6006; WAN0249BW_at; Start 98; Stop 122
ttagtcgtgcaggataggataccct

SEQ ID NO: 17074 - DNA, 25 bp, Artificial
  probe
  misc_feature (1)..(25): SEQ ID NO: 6245; WAN0249BX_at; Start 149; Stop 173
gagcattacactccgcattaatatt

SEQ ID NO: 17075 - DNA, 25 bp, Artificial
  probe
  misc_feature (1)..(25): SEQ ID NO: 6245; WAN0249BX_at; Start 148; Stop 172
ggagcattacactccgcattaatat

SEQ ID NO: 17076 - DNA, 25 bp, Artificial
  probe
  misc_feature (1)..(25): SEQ ID NO: 6245; WAN0249BX_at; Start 64; Stop 88
aatctctagctttcatcttcattcg

SEQ ID NO: 17077 - DNA, 25 bp, Artificial
  probe
  misc_feature (1)..(25): SEQ ID NO: 6245; WAN0249BX_at; Start 155; Stop 179
tacactccgcattaatattgatagt

SEQ ID NO: 17078 - DNA, 25 bp, Artificial
  probe
  misc_feature (1)..(25): SEQ ID NO: 6245; WAN0249BX_at; Start 72; Stop 96
gctttcatcttcattcgttcctctt

SEQ ID NO: 17079 - DNA, 25 bp, Artificial
  probe
  misc_feature (1)..(25): SEQ ID NO: 6245; WAN0249BX_at; Start 137; Stop 161
tttattttagcggagcattacactc

SEQ ID NO: 17080 - DNA, 25 bp, Artificial
  probe
  misc_feature (1)..(25): SEQ ID NO: 6245; WAN0249BX_at; Start 141; Stop 165
ttttagcggagcattacactccgca

SEQ ID NO: 17081 - DNA, 25 bp, Artificial
  probe
  misc_feature (1)..(25): SEQ ID NO: 6245; WAN0249BX_at; Start 82; Stop 106
tcattcgttcctctttccatcctaa

SEQ ID NO: 17082 - DNA, 25 bp, Artificial
  probe
  misc_feature (1)..(25): SEQ ID NO: 6245; WAN0249BX_at; Start 37; Stop 61
tctaaaaacaaaatcaattcaatgg

SEQ ID NO: 17083 - DNA, 25 bp, Artificial
  probe
  misc_feature (1)..(25): SEQ ID NO: 6245; WAN0249BX_at; Start 86; Stop 110
tcgttcctctttccatcctaaacaa

SEQ ID NO: 17084 - DNA, 25 bp, Artificial
  probe
  misc_feature (1)..(25): SEQ ID NO: 6245; WAN0249BX_at; Start 134; Stop 158
ggttttattttagcggagcattaca

SEQ ID NO: 17085 - DNA, 25 bp, Artificial
  probe
  misc_feature (1)..(25): SEQ ID NO: 6245; WAN0249BX_at; Start 157; Stop 181
cactccgcattaatattgatagtat

SEQ ID NO: 17086 - DNA, 25 bp, Artificial
  probe
  misc_feature (1)..(25): SEQ ID NO: 6245; WAN0249BX_at; Start 77; Stop 101
catcttcattcgttcctctttccat

SEQ ID NO: 17087 - DNA, 25 bp, Artificial
  probe
  misc_feature (1)..(25): SEQ ID NO: 6245; WAN0249BX_at; Start 139; Stop 163
tattttagcggagcattacactccg

SEQ ID NO: 17088 - DNA, 25 bp, Artificial
  probe
  misc_feature (1)..(25): SEQ ID NO: 6245; WAN0249BX_at; Start 48; Stop 72
aatcaattcaatggtgaatctctag

SEQ ID NO: 17089 - DNA, 25 bp, Artificial
  probe
  misc_feature (1)..(25): SEQ ID NO: 6245; WAN0249BX_at; Start 146; Stop 170
gcggagcattacactccgcattaat

SEQ ID NO: 17090 - DNA, 25 bp, Artificial
  probe
  misc_feature (1)..(25): SEQ ID NO: 6245; WAN0249BX_at; Start 130; Stop 154
aataggttttattttagcggagcat

SEQ ID NO: 17091 - DNA, 25 bp, Artificial
  probe
  misc_feature (1)..(25): SEQ ID NO: 6245; WAN0249BX_at; Start 56; Stop 80
caatggtgaatctctagctttcatc

SEQ ID NO: 17092 - DNA, 25 bp, Artificial
  probe
  misc_feature (1)..(25): SEQ ID NO: 6245; WAN0249BX_at; Start 83; Stop 107
cattcgttcctctttccatcctaaa

SEQ ID NO: 17093 - DNA, 25 bp, Artificial
  probe
  misc_feature (1)..(25): SEQ ID NO: 6245; WAN0249BX_at; Start 51; Stop 75
caattcaatggtgaatctctagctt

SEQ ID NO: 17094 - DNA, 25 bp, Artificial
  probe
  misc_feature (1)..(25): SEQ ID NO: 6245; WAN0249BX_at; Start 68; Stop 92
tctagctttcatcttcattcgttcc

SEQ ID NO: 17095 - DNA, 25 bp, Artificial
  probe
  misc_feature (1)..(25): SEQ ID NO: 6245; WAN0249BX_at; Start 129; Stop 153
taataggttttattttagcggagca

SEQ ID NO: 17096 - DNA, 25 bp, Artificial
  probe
  misc_feature (1)..(25): SEQ ID NO: 6245; WAN0249BX_at; Start 70; Stop 94
tagctttcatcttcattcgttcctc

SEQ ID NO: 17097 - DNA, 25 bp, Artificial
  probe
  misc_feature (1)..(25): SEQ ID NO: 6245; WAN0249BX_at; Start 60; Stop 84
ggtgaatctctagctttcatcttca

SEQ ID NO: 17098 - DNA, 25 bp, Artificial
  probe
  misc_feature (1)..(25): SEQ ID NO: 6245; WAN0249BX_at; Start 144; Stop 168
tagcggagcattacactccgcatta

SEQ ID NO: 17099 - DNA, 25 bp, Artificial
  probe
  misc_feature (1)..(25): SEQ ID NO: 6245; WAN0249BX_at; Start 94; Stop 118
ctttccatcctaaacaaagtagtgt

SEQ ID NO: 17100 - DNA, 25 bp, Artificial
  probe
  misc_feature (1)..(25): SEQ ID NO: 6245; WAN0249BX_at; Start 39; Stop 63
taaaaacaaaatcaattcaatggtg

SEQ ID NO: 17101 - DNA, 25 bp, Artificial
  probe
  misc_feature (1)..(25): SEQ ID NO: 6245; WAN0249BX_at; Start 132; Stop 156
taggttttattttagcggagcatta

SEQ ID NO: 17102 - DNA, 25 bp, Artificial
  probe
  misc_feature (1)..(25): SEQ ID NO: 6245; WAN0249BX_at; Start 154; Stop 178
ttacactccgcattaatattgatag

SEQ ID NO: 17103 - DNA, 25 bp, Artificial
  probe
  misc_feature (1)..(25): SEQ ID NO: 6245; WAN0249BX_at; Start 45; Stop 69
caaaatcaattcaatggtgaatctc

SEQ ID NO: 17104 - DNA, 25 bp, Artificial
  probe
  misc_feature (1)..(25): SEQ ID NO: 6245; WAN0249BX_at; Start 142; Stop 166
tttagcggagcattacactccgcat

SEQ ID NO: 17105 - DNA, 25 bp, Artificial
  probe
  misc_feature (1)..(25): SEQ ID NO: 6245; WAN0249BX_at; Start 50; Stop 74
tcaattcaatggtgaatctctagct

SEQ ID NO: 17106 - DNA, 25 bp, Artificial
  probe
  misc_feature (1)..(25): SEQ ID NO: 6245; WAN0249BX_at; Start 93; Stop 117
tctttccatcctaaacaaagtagtg

SEQ ID NO: 17107 - DNA, 25 bp, Artificial
  probe
  misc_feature (1)..(25): SEQ ID NO: 6245; WAN0249BX_at; Start 54; Stop 78
ttcaatggtgaatctctagctttca

SEQ ID NO: 17108 - DNA, 25 bp, Artificial
  probe
  misc_feature (1)..(25): SEQ ID NO: 6110; WAN0249BY_at; Start 6; Stop 30
ctcgttctccagaaatattcattaa

SEQ ID NO: 17109 - DNA, 25 bp, Artificial
  probe
  misc_feature (1)..(25): SEQ ID NO: 6110; WAN0249BY_at; Start 4; Stop 28
agctcgttctccagaaatattcatt

SEQ ID NO: 17110 - DNA, 25 bp, Artificial
  probe
  misc_feature (1)..(25): SEQ ID NO: 6110; WAN0249BY_at; Start 7; Stop 31
tcgttctccagaaatattcattaac

SEQ ID NO: 17111 - DNA, 25 bp, Artificial
  probe
  misc_feature (1)..(25): SEQ ID NO: 6110; WAN0249BY_at; Start 15; Stop 39
cagaaatattcattaactttcattt

SEQ ID NO: 17112 - DNA, 25 bp, Artificial
  probe
  misc_feature (1)..(25): SEQ ID NO: 6110; WAN0249BY_at; Start 9; Stop 33
gttctccagaaatattcattaactt

SEQ ID NO: 17113 - DNA, 25 bp, Artificial
  probe
  misc_feature (1)..(25): SEQ ID NO: 6110; WAN0249BY_at; Start 2; Stop 26
acagctcgttctccagaaatattca

SEQ ID NO: 17114 - DNA, 25 bp, Artificial
  probe
  misc_feature (1)..(25): SEQ ID NO: 6110; WAN0249BY_at; Start 3; Stop 27
cagctcgttctccagaaatattcat

SEQ ID NO: 17115 - DNA, 25 bp, Artificial
  probe
  misc_feature (1)..(25): SEQ ID NO: 6110; WAN0249BY_at; Start 5; Stop 29
gctcgttctccagaaatattcatta

SEQ ID NO: 17116 - DNA, 25 bp, Artificial
  probe
  misc_feature (1)..(25): SEQ ID NO: 6110; WAN0249BY_at; Start 1; Stop 25
gacagctcgttctccagaaatattc

SEQ ID NO: 17117 - DNA, 25 bp, Artificial
  probe
  misc_feature (1)..(25): SEQ ID NO: 6110; WAN0249BY_at; Start 8; Stop 32
cgttctccagaaatattcattaact

SEQ ID NO: 17118 - DNA, 25 bp, Artificial
  probe
  misc_feature (1)..(25): SEQ ID NO: 6110; WAN0249BY_at; Start 11; Stop 35
tctccagaaatattcattaactttc

SEQ ID NO: 17119 - DNA, 25 bp, Artificial
  probe
  misc_feature (1)..(25): SEQ ID NO: 6110; WAN0249BY_at; Start 13; Stop 37
tccagaaatattcattaactttcat

SEQ ID NO: 17120 - DNA, 25 bp, Artificial
  probe
  misc_feature (1)..(25): SEQ ID NO: 6110; WAN0249BY_at; Start 10; Stop 34
ttctccagaaatattcattaacttt

SEQ ID NO: 17121 - DNA, 25 bp, Artificial
  probe
  misc_feature (1)..(25): SEQ ID NO: 6110; WAN0249BY_at; Start 14; Stop 38
ccagaaatattcattaactttcatt

SEQ ID NO: 17122 - DNA, 25 bp, Artificial
  probe
  misc_feature (1)..(25): SEQ ID NO: 6110; WAN0249BY_at; Start 12; Stop 36
ctccagaaatattcattaactttca

SEQ ID NO: 17123 - DNA, 25 bp, Artificial
  probe
  misc_feature (1)..(25): SEQ ID NO: 6110; WAN0249BY_at; Start 21; Stop 45
tattcattaactttcatttttatac

SEQ ID NO: 17124 - DNA, 25 bp, Artificial
  probe
  misc_feature (1)..(25): SEQ ID NO: 6149; WAN0249BZ_at; Start 5; Stop 29
tcaaaaaagtcagcataatcgtgct

SEQ ID NO: 17125 - DNA, 25 bp, Artificial
  probe
  misc_feature (1)..(25): SEQ ID NO: 6149; WAN0249BZ_at; Start 19; Stop 43
ataatcgtgctgacttttctcttat

SEQ ID NO: 17126 - DNA, 25 bp, Artificial
  probe
  misc_feature (1)..(25): SEQ ID NO: 6149; WAN0249BZ_at; Start 22; Stop 46
atcgtgctgacttttctcttatctg

SEQ ID NO: 17127 - DNA, 25 bp, Artificial
  probe
  misc_feature (1)..(25): SEQ ID NO: 6149; WAN0249BZ_at; Start 15; Stop 39
cagcataatcgtgctgacttttctc

SEQ ID NO: 17128 - DNA, 25 bp, Artificial
  probe
  misc_feature (1)..(25): SEQ ID NO: 6149; WAN0249BZ_at; Start 7; Stop 31
aaaaaagtcagcataatcgtgctga

SEQ ID NO: 17129 - DNA, 25 bp, Artificial
  probe
  misc_feature (1)..(25): SEQ ID NO: 6149; WAN0249BZ_at; Start 20; Stop 44
taatcgtgctgacttttctcttatc

SEQ ID NO: 17130 - DNA, 25 bp, Artificial
  probe
  misc_feature (1)..(25): SEQ ID NO: 6149; WAN0249BZ_at; Start 9; Stop 33
aaaagtcagcataatcgtgctgact

SEQ ID NO: 17131 - DNA, 25 bp, Artificial
  probe
  misc_feature (1)..(25): SEQ ID NO: 6149; WAN0249BZ_at; Start 6; Stop 30
caaaaaagtcagcataatcgtgctg

SEQ ID NO: 17132 - DNA, 25 bp, Artificial
  probe
  misc_feature (1)..(25): SEQ ID NO: 6149; WAN0249BZ_at; Start 1; Stop 25
gttatcaaaaaagtcagcataatcg

SEQ ID NO: 17133 - DNA, 25 bp, Artificial
  probe
  misc_feature (1)..(25): SEQ ID NO: 6149; WAN0249BZ_at; Start 11; Stop 35
aagtcagcataatcgtgctgacttt

SEQ ID NO: 17134 - DNA, 25 bp, Artificial
  probe
  misc_feature (1)..(25): SEQ ID NO: 6149; WAN0249BZ_at; Start 26; Stop 50
tgctgacttttctcttatctgattt

SEQ ID NO: 17135 - DNA, 25 bp, Artificial
  probe
  misc_feature (1)..(25): SEQ ID NO: 6149; WAN0249BZ_at; Start 23; Stop 47
tcgtgctgacttttctcttatctga

SEQ ID NO: 17136 - DNA, 25 bp, Artificial
  probe
  misc_feature (1)..(25): SEQ ID NO: 6149; WAN0249BZ_at; Start 4; Stop 28
atcaaaaaagtcagcataatcgtgc

SEQ ID NO: 17137 - DNA, 25 bp, Artificial
  probe
  misc_feature (1)..(25): SEQ ID NO: 6149; WAN0249BZ_at; Start 24; Stop 48
cgtgctgacttttctcttatctgat

SEQ ID NO: 17138 - DNA, 25 bp, Artificial
  probe
  misc_feature (1)..(25): SEQ ID NO: 6149; WAN0249BZ_at; Start 25; Stop 49
gtgctgacttttctcttatctgatt

SEQ ID NO: 17139 - DNA, 25 bp, Artificial
  probe
  misc_feature (1)..(25): SEQ ID NO: 6149; WAN0249BZ_at; Start 2; Stop 26
ttatcaaaaaagtcagcataatcgt

SEQ ID NO: 17140 - DNA, 25 bp, Artificial
  probe
  misc_feature (1)..(25): SEQ ID NO: 6149; WAN0249BZ_at; Start 3; Stop 27
tatcaaaaaagtcagcataatcgtg

SEQ ID NO: 17141 - DNA, 25 bp, Artificial
  probe
  misc_feature (1)..(25): SEQ ID NO: 6149; WAN0249BZ_at; Start 18; Stop 42
cataatcgtgctgacttttctctta

SEQ ID NO: 17142 - DNA, 25 bp, Artificial
  probe
  misc_feature (1)..(25): SEQ ID NO: 6149; WAN0249BZ_at; Start 13; Stop 37
gtcagcataatcgtgctgacttttc

SEQ ID NO: 17143 - DNA, 25 bp, Artificial
  probe
  misc_feature (1)..(25): SEQ ID NO: 6149; WAN0249BZ_at; Start 16; Stop 40
agcataatcgtgctgacttttctct

SEQ ID NO: 17144 - DNA, 25 bp, Artificial
  probe
  misc_feature (1)..(25): SEQ ID NO: 6149; WAN0249BZ_at; Start 14; Stop 38
tcagcataatcgtgctgacttttct

SEQ ID NO: 17145 - DNA, 25 bp, Artificial
  probe
  misc_feature (1)..(25): SEQ ID NO: 6149; WAN0249BZ_at; Start 17; Stop 41
gcataatcgtgctgacttttctctt

SEQ ID NO: 17146 - DNA, 25 bp, Artificial
  probe
  misc_feature (1)..(25): SEQ ID NO: 6149; WAN0249BZ_at; Start 12; Stop 36
agtcagcataatcgtgctgactttt

SEQ ID NO: 17147 - DNA, 25 bp, Artificial
  probe
  misc_feature (1)..(25): SEQ ID NO: 6149; WAN0249BZ_at; Start 8; Stop 32
aaaaagtcagcataatcgtgctgac

SEQ ID NO: 17148 - DNA, 25 bp, Artificial
  probe
  misc_feature (1)..(25): SEQ ID NO: 6149; WAN0249BZ_at; Start 10; Stop 34
aaagtcagcataatcgtgctgactt

SEQ ID NO: 17149 - DNA, 25 bp, Artificial
  probe
  misc_feature (1)..(25): SEQ ID NO: 6149; WAN0249BZ_at; Start 21; Stop 45
aatcgtgctgacttttctcttatct

SEQ ID NO: 17150 - DNA, 25 bp, Artificial
  probe
  misc_feature (1)..(25): SEQ ID NO: 6236; WAN0249C2_at; Start 28; Stop 52
tttacaatgtacaactatttgaggc

SEQ ID NO: 17151 - DNA, 25 bp, Artificial
  probe
  misc_feature (1)..(25): SEQ ID NO: 6236; WAN0249C2_at; Start 84; Stop 108
ttctgtttttgcacttaaaagccac

SEQ ID NO: 17152 - DNA, 25 bp, Artificial
  probe
  misc_feature (1)..(25): SEQ ID NO: 6236; WAN0249C2_at; Start 87; Stop 111
tgtttttgcacttaaaagccactta

SEQ ID NO: 17153 - DNA, 25 bp, Artificial
  probe
  misc_feature (1)..(25): SEQ ID NO: 6236; WAN0249C2_at; Start 36; Stop 60
gtacaactatttgaggcattaatca

SEQ ID NO: 17154 - DNA, 25 bp, Artificial
  probe
  misc_feature (1)..(25): SEQ ID NO: 6236; WAN0249C2_at; Start 32; Stop 56
caatgtacaactatttgaggcatta

SEQ ID NO: 17155 - DNA, 25 bp, Artificial
  probe
  misc_feature (1)..(25): SEQ ID NO: 6236; WAN0249C2_at; Start 134; Stop 158
actaacgacaattttcttgctctaa

SEQ ID NO: 17156 - DNA, 25 bp, Artificial
  probe
  misc_feature (1)..(25): SEQ ID NO: 6236; WAN0249C2_at; Start 27; Stop 51
gtttacaatgtacaactatttgagg

SEQ ID NO: 17157 - DNA, 25 bp, Artificial
  probe
  misc_feature (1)..(25): SEQ ID NO: 6236; WAN0249C2_at; Start 38; Stop 62
acaactatttgaggcattaatcaat

SEQ ID NO: 17158 - DNA, 25 bp, Artificial
  probe
  misc_feature (1)..(25): SEQ ID NO: 6236; WAN0249C2_at; Start 139; Stop 163
cgacaattttcttgctctaattttt

SEQ ID NO: 17159 - DNA, 25 bp, Artificial
  probe
  misc_feature (1)..(25): SEQ ID NO: 6236; WAN0249C2_at; Start 133; Stop 157
tactaacgacaattttcttgctcta

SEQ ID NO: 17160 - DNA, 25 bp, Artificial
  probe
  misc_feature (1)..(25): SEQ ID NO: 6236; WAN0249C2_at; Start 29; Stop 53
ttacaatgtacaactatttgaggca

SEQ ID NO: 17161 - DNA, 25 bp, Artificial
  probe
  misc_feature (1)..(25): SEQ ID NO: 6236; WAN0249C2_at; Start 94; Stop 118
gcacttaaaagccacttatattatt

SEQ ID NO: 17162 - DNA, 25 bp, Artificial
  probe
  misc_feature (1)..(25): SEQ ID NO: 6236; WAN0249C2_at; Start 51; Stop 75
gcattaatcaatattttctgaacaa

SEQ ID NO: 17163 - DNA, 25 bp, Artificial
  probe
  misc_feature (1)..(25): SEQ ID NO: 6236; WAN0249C2_at; Start 18; Stop 42
tattttatagtttacaatgtacaac

SEQ ID NO: 17164 - DNA, 25 bp, Artificial
  probe
  misc_feature (1)..(25): SEQ ID NO: 6236; WAN0249C2_at; Start 165; Stop 189
tatactacttagacaaaaaaagata

SEQ ID NO: 17165 - DNA, 25 bp, Artificial
  probe
  misc_feature (1)..(25): SEQ ID NO: 6236; WAN0249C2_at; Start 129; Stop 153
cgattactaacgacaattttcttgc

SEQ ID NO: 17166 - DNA, 25 bp, Artificial
  probe
  misc_feature (1)..(25): SEQ ID NO: 6236; WAN0249C2_at; Start 3; Stop 27
taaactcctagatagtattttatag

SEQ ID NO: 17167 - DNA, 25 bp, Artificial
  probe
  misc_feature (1)..(25): SEQ ID NO: 6236; WAN0249C2_at; Start 86; Stop 110
ctgtttttgcacttaaaagccactt

SEQ ID NO: 17168 - DNA, 25 bp, Artificial
  probe
  misc_feature (1)..(25): SEQ ID NO: 6236; WAN0249C2_at; Start 85; Stop 109
tctgtttttgcacttaaaagccact

SEQ ID NO: 17169 - DNA, 25 bp, Artificial
  probe
  misc_feature (1)..(25): SEQ ID NO: 6236; WAN0249C2_at; Start 91; Stop 115
tttgcacttaaaagccacttatatt

SEQ ID NO: 17170 - DNA, 25 bp, Artificial
  probe
  misc_feature (1)..(25): SEQ ID NO: 6236; WAN0249C2_at; Start 35; Stop 59
tgtacaactatttgaggcattaatc

SEQ ID NO: 17171 - DNA, 25 bp, Artificial
  probe
  misc_feature (1)..(25): SEQ ID NO: 6236; WAN0249C2_at; Start 73; Stop 97
caattaatatattctgtttttgcac

SEQ ID NO: 17172 - DNA, 25 bp, Artificial
  probe
  misc_feature (1)..(25): SEQ ID NO: 6236; WAN0249C2_at; Start 37; Stop 61
tacaactatttgaggcattaatcaa

SEQ ID NO: 17173 - DNA, 25 bp, Artificial
  probe
  misc_feature (1)..(25): SEQ ID NO: 6236; WAN0249C2_at; Start 130; Stop 154
gattactaacgacaattttcttgct

SEQ ID NO: 17174 - DNA, 25 bp, Artificial
  probe
  misc_feature (1)..(25): SEQ ID NO: 6236; WAN0249C2_at; Start 64; Stop 88
ttttctgaacaattaatatattctg

SEQ ID NO: 17175 - DNA, 25 bp, Artificial
  probe
  misc_feature (1)..(25): SEQ ID NO: 6236; WAN0249C2_at; Start 50; Stop 74
ggcattaatcaatattttctgaaca

SEQ ID NO: 17176 - DNA, 25 bp, Artificial
  probe
  misc_feature (1)..(25): SEQ ID NO: 6236; WAN0249C2_at; Start 128; Stop 152
ccgattactaacgacaattttcttg

SEQ ID NO: 17177 - DNA, 25 bp, Artificial
  probe
  misc_feature (1)..(25): SEQ ID NO: 6236; WAN0249C2_at; Start 136; Stop 160
taacgacaattttcttgctctaatt

SEQ ID NO: 17178 - DNA, 25 bp, Artificial
  probe
  misc_feature (1)..(25): SEQ ID NO: 6236; WAN0249C2_at; Start 82; Stop 106
tattctgtttttgcacttaaaagcc

SEQ ID NO: 17179 - DNA, 25 bp, Artificial
  probe
  misc_feature (1)..(25): SEQ ID NO: 6236; WAN0249C2_at; Start 48; Stop 72
gaggcattaatcaatattttctgaa

SEQ ID NO: 17180 - DNA, 25 bp, Artificial
  probe
  misc_feature (1)..(25): SEQ ID NO: 6236; WAN0249C2_at; Start 89; Stop 113
tttttgcacttaaaagccacttata

SEQ ID NO: 17181 - DNA, 25 bp, Artificial
  probe
  misc_feature (1)..(25): SEQ ID NO: 6236; WAN0249C2_at; Start 30; Stop 54
tacaatgtacaactatttgaggcat

SEQ ID NO: 17182 - DNA, 25 bp, Artificial
  probe
  misc_feature (1)..(25): SEQ ID NO: 6236; WAN0249C2_at; Start 9; Stop 33
cctagatagtattttatagtttaca

SEQ ID NO: 17183 - DNA, 25 bp, Artificial
  probe
  misc_feature (1)..(25): SEQ ID NO: 6236; WAN0249C2_at; Start 99; Stop 123
taaaagccacttatattattctaat

SEQ ID NO: 17184 - DNA, 25 bp, Artificial
  probe
  misc_feature (1)..(25): SEQ ID NO: 6162; WAN0249C3_at; Start 28; Stop 52
tcacttatcatcttctttcgagaaa

SEQ ID NO: 17185 - DNA, 25 bp, Artificial
  probe
  misc_feature (1)..(25): SEQ ID NO: 6162; WAN0249C3_at; Start 20; Stop 44
gagatctatcacttatcatcttctt

SEQ ID NO: 17186 - DNA, 25 bp, Artificial
  probe
  misc_feature (1)..(25): SEQ ID NO: 6162; WAN0249C3_at; Start 43; Stop 67
tttcgagaaattagtgactgctttt

SEQ ID NO: 17187 - DNA, 25 bp, Artificial
  probe
  misc_feature (1)..(25): SEQ ID NO: 6162; WAN0249C3_at; Start 40; Stop 64
ttctttcgagaaattagtgactgct

SEQ ID NO: 17188 - DNA, 25 bp, Artificial
  probe
  misc_feature (1)..(25): SEQ ID NO: 6162; WAN0249C3_at; Start 44; Stop 68
ttcgagaaattagtgactgcttttg

SEQ ID NO: 17189 - DNA, 25 bp, Artificial
  probe
  misc_feature (1)..(25): SEQ ID NO: 6162; WAN0249C3_at; Start 4; Stop 28
gaatattctttcattcgagatctat

SEQ ID NO: 17190 - DNA, 25 bp, Artificial
  probe
  misc_feature (1)..(25): SEQ ID NO: 6162; WAN0249C3_at; Start 2; Stop 26
aagaatattctttcattcgagatct

SEQ ID NO: 17191 - DNA, 25 bp, Artificial
  probe
  misc_feature (1)..(25): SEQ ID NO: 6162; WAN0249C3_at; Start 13; Stop 37
ttcattcgagatctatcacttatca

SEQ ID NO: 17192 - DNA, 25 bp, Artificial
  probe
  misc_feature (1)..(25): SEQ ID NO: 6162; WAN0249C3_at; Start 38; Stop 62
tcttctttcgagaaattagtgactg

SEQ ID NO: 17193 - DNA, 25 bp, Artificial
  probe
  misc_feature (1)..(25): SEQ ID NO: 6162; WAN0249C3_at; Start 12; Stop 36
tttcattcgagatctatcacttatc

SEQ ID NO: 17194 - DNA, 25 bp, Artificial
  probe
  misc_feature (1)..(25): SEQ ID NO: 6162; WAN0249C3_at; Start 23; Stop 47
atctatcacttatcatcttctttcg

SEQ ID NO: 17195 - DNA, 25 bp, Artificial
  probe
  misc_feature (1)..(25): SEQ ID NO: 6162; WAN0249C3_at; Start 47; Stop 71
gagaaattagtgactgcttttggct

SEQ ID NO: 17196 - DNA, 25 bp, Artificial
  probe
  misc_feature (1)..(25): SEQ ID NO: 6162; WAN0249C3_at; Start 1; Stop 25
taagaatattctttcattcgagatc

SEQ ID NO: 17197 - DNA, 25 bp, Artificial
  probe
  misc_feature (1)..(25): SEQ ID NO: 6162; WAN0249C3_at; Start 9; Stop 33
ttctttcattcgagatctatcactt

SEQ ID NO: 17198 - DNA, 25 bp, Artificial
  probe
  misc_feature (1)..(25): SEQ ID NO: 6162; WAN0249C3_at; Start 45; Stop 69
tcgagaaattagtgactgcttttgg

SEQ ID NO: 17199 - DNA, 25 bp, Artificial
  probe
  misc_feature (1)..(25): SEQ ID NO: 6162; WAN0249C3_at; Start 41; Stop 65
tctttcgagaaattagtgactgctt

SEQ ID NO: 17200 - DNA, 25 bp, Artificial
  probe
  misc_feature (1)..(25): SEQ ID NO: 6162; WAN0249C3_at; Start 35; Stop 59
tcatcttctttcgagaaattagtga

SEQ ID NO: 17201 - DNA, 25 bp, Artificial
  probe
  misc_feature (1)..(25): SEQ ID NO: 6162; WAN0249C3_at; Start 15; Stop 39
cattcgagatctatcacttatcatc

SEQ ID NO: 17202 - DNA, 25 bp, Artificial
  probe
  misc_feature (1)..(25): SEQ ID NO: 6162; WAN0249C3_at; Start 29; Stop 53
cacttatcatcttctttcgagaaat

SEQ ID NO: 17203 - DNA, 25 bp, Artificial
  probe
  misc_feature (1)..(25): SEQ ID NO: 6162; WAN0249C3_at; Start 49; Stop 73
gaaattagtgactgcttttggctga

SEQ ID NO: 17204 - DNA, 25 bp, Artificial
  probe
  misc_feature (1)..(25): SEQ ID NO: 6162; WAN0249C3_at; Start 10; Stop 34
tctttcattcgagatctatcactta

SEQ ID NO: 17205 - DNA, 25 bp, Artificial
  probe
  misc_feature (1)..(25): SEQ ID NO: 6162; WAN0249C3_at; Start 25; Stop 49
ctatcacttatcatcttctttcgag

SEQ ID NO: 17206 - DNA, 25 bp, Artificial
  probe
  misc_feature (1)..(25): SEQ ID NO: 6162; WAN0249C3_at; Start 46; Stop 70
cgagaaattagtgactgcttttggc

SEQ ID NO: 17207 - DNA, 25 bp, Artificial
  probe
  misc_feature (1)..(25): SEQ ID NO: 6162; WAN0249C3_at; Start 7; Stop 31
tattctttcattcgagatctatcac

SEQ ID NO: 17208 - DNA, 25 bp, Artificial
  probe
  misc_feature (1)..(25): SEQ ID NO: 6162; WAN0249C3_at; Start 11; Stop 35
ctttcattcgagatctatcacttat

SEQ ID NO: 17209 - DNA, 25 bp, Artificial
  probe
  misc_feature (1)..(25): SEQ ID NO: 6162; WAN0249C3_at; Start 18; Stop 42
tcgagatctatcacttatcatcttc

SEQ ID NO: 17210 - DNA, 25 bp, Artificial
  probe
  misc_feature (1)..(25): SEQ ID NO: 6162; WAN0249C3_at; Start 33; Stop 57
tatcatcttctttcgagaaattagt

SEQ ID NO: 17211 - DNA, 25 bp, Artificial
  probe
  misc_feature (1)..(25): SEQ ID NO: 6162; WAN0249C3_at; Start 48; Stop 72
agaaattagtgactgcttttggctg

SEQ ID NO: 17212 - DNA, 25 bp, Artificial
  probe
  misc_feature (1)..(25): SEQ ID NO: 6162; WAN0249C3_at; Start 14; Stop 38
tcattcgagatctatcacttatcat

SEQ ID NO: 17213 - DNA, 25 bp, Artificial
  probe
  misc_feature (1)..(25): SEQ ID NO: 6162; WAN0249C3_at; Start 27; Stop 51
atcacttatcatcttctttcgagaa

SEQ ID NO: 17214 - DNA, 25 bp, Artificial
  probe
  misc_feature (1)..(25): SEQ ID NO: 6162; WAN0249C3_at; Start 42; Stop 66
ctttcgagaaattagtgactgcttt

SEQ ID NO: 17215 - DNA, 25 bp, Artificial
  probe
  misc_feature (1)..(25): SEQ ID NO: 6162; WAN0249C3_at; Start 26; Stop 50
tatcacttatcatcttctttcgaga

SEQ ID NO: 17216 - DNA, 25 bp, Artificial
  probe
  misc_feature (1)..(25): SEQ ID NO: 6162; WAN0249C3_at; Start 39; Stop 63
cttctttcgagaaattagtgactgc

SEQ ID NO: 17217 - DNA, 25 bp, Artificial
  probe
  misc_feature (1)..(25): SEQ ID NO: 6162; WAN0249C3_at; Start 36; Stop 60
catcttctttcgagaaattagtgac

SEQ ID NO: 17218 - DNA, 25 bp, Artificial
  probe
  misc_feature (1)..(25): SEQ ID NO: 5984; WAN0249C4_at; Start 17; Stop 41
gaaagtctaaatcaattatagccac

SEQ ID NO: 17219 - DNA, 25 bp, Artificial
  probe
  misc_feature (1)..(25): SEQ ID NO: 5984; WAN0249C4_at; Start 26; Stop 50
aatcaattatagccacctaataggg

SEQ ID NO: 17220 - DNA, 25 bp, Artificial
  probe
  misc_feature (1)..(25): SEQ ID NO: 5984; WAN0249C4_at; Start 22; Stop 46
tctaaatcaattatagccacctaat

SEQ ID NO: 17221 - DNA, 25 bp, Artificial
  probe
  misc_feature (1)..(25): SEQ ID NO: 5984; WAN0249C4_at; Start 15; Stop 39
tagaaagtctaaatcaattatagcc

SEQ ID NO: 17222 - DNA, 25 bp, Artificial
  probe
  misc_feature (1)..(25): SEQ ID NO: 5984; WAN0249C4_at; Start 20; Stop 44
agtctaaatcaattatagccaccta

SEQ ID NO: 17223 - DNA, 25 bp, Artificial
  probe
  misc_feature (1)..(25): SEQ ID NO: 5984; WAN0249C4_at; Start 25; Stop 49
aaatcaattatagccacctaatagg

SEQ ID NO: 17224 - DNA, 25 bp, Artificial
  probe
  misc_feature (1)..(25): SEQ ID NO: 5984; WAN0249C4_at; Start 23; Stop 47
ctaaatcaattatagccacctaata

SEQ ID NO: 17225 - DNA, 25 bp, Artificial
  probe
  misc_feature (1)..(25): SEQ ID NO: 5984; WAN0249C4_at; Start 21; Stop 45
gtctaaatcaattatagccacctaa

SEQ ID NO: 17226 - DNA, 25 bp, Artificial
  probe
  misc_feature (1)..(25): SEQ ID NO: 5984; WAN0249C4_at; Start 13; Stop 37
tttagaaagtctaaatcaattatag

SEQ ID NO: 17227 - DNA, 25 bp, Artificial
  probe
  misc_feature (1)..(25): SEQ ID NO: 5984; WAN0249C4_at; Start 24; Stop 48
taaatcaattatagccacctaatag

SEQ ID NO: 17228 - DNA, 25 bp, Artificial
  probe
  misc_feature (1)..(25): SEQ ID NO: 5984; WAN0249C4_at; Start 14; Stop 38
ttagaaagtctaaatcaattatagc

SEQ ID NO: 17229 - DNA, 25 bp, Artificial
  probe
  misc_feature (1)..(25): SEQ ID NO: 5984; WAN0249C4_at; Start 12; Stop 36
ttttagaaagtctaaatcaattata

SEQ ID NO: 17230 - DNA, 25 bp, Artificial
  probe
  misc_feature (1)..(25): SEQ ID NO: 5984; WAN0249C4_at; Start 18; Stop 42
aaagtctaaatcaattatagccacc

SEQ ID NO: 17231 - DNA, 25 bp, Artificial
  probe
  misc_feature (1)..(25): SEQ ID NO: 5984; WAN0249C4_at; Start 16; Stop 40
agaaagtctaaatcaattatagcca

SEQ ID NO: 17232 - DNA, 25 bp, Artificial
  probe
  misc_feature (1)..(25): SEQ ID NO: 5984; WAN0249C4_at; Start 19; Stop 43
aagtctaaatcaattatagccacct

SEQ ID NO: 17233 - DNA, 25 bp, Artificial
  probe
  misc_feature (1)..(25): SEQ ID NO: 6092; WAN0249C5_at; Start 15; Stop 39
gagtctgtatggaaatccaatgcta

SEQ ID NO: 17234 - DNA, 25 bp, Artificial
  probe
  misc_feature (1)..(25): SEQ ID NO: 6092; WAN0249C5_at; Start 26; Stop 50
gaaatccaatgctaaatttatcaag

SEQ ID NO: 17235 - DNA, 25 bp, Artificial
  probe
  misc_feature (1)..(25): SEQ ID NO: 6092; WAN0249C5_at; Start 24; Stop 48
tggaaatccaatgctaaatttatca

SEQ ID NO: 17236 - DNA, 25 bp, Artificial
  probe
  misc_feature (1)..(25): SEQ ID NO: 6092; WAN0249C5_at; Start 36; Stop 60
gctaaatttatcaagatttccaaca

SEQ ID NO: 17237 - DNA, 25 bp, Artificial
  probe
  misc_feature (1)..(25): SEQ ID NO: 6092; WAN0249C5_at; Start 4; Stop 28
actaactctgtgagtctgtatggaa

SEQ ID NO: 17238 - DNA, 25 bp, Artificial
  probe
  misc_feature (1)..(25): SEQ ID NO: 6092; WAN0249C5_at; Start 22; Stop 46
tatggaaatccaatgctaaatttat

SEQ ID NO: 17239 - DNA, 25 bp, Artificial
  probe
  misc_feature (1)..(25): SEQ ID NO: 6092; WAN0249C5_at; Start 39; Stop 63
aaatttatcaagatttccaacaatc

SEQ ID NO: 17240 - DNA, 25 bp, Artificial
  probe
  misc_feature (1)..(25): SEQ ID NO: 6092; WAN0249C5_at; Start 9; Stop 33
ctctgtgagtctgtatggaaatcca

SEQ ID NO: 17241 - DNA, 25 bp, Artificial
  probe
  misc_feature (1)..(25): SEQ ID NO: 6092; WAN0249C5_at; Start 14; Stop 38
tgagtctgtatggaaatccaatgct

SEQ ID NO: 17242 - DNA, 25 bp, Artificial
  probe
  misc_feature (1)..(25): SEQ ID NO: 6092; WAN0249C5_at; Start 2; Stop 26
taactaactctgtgagtctgtatgg

SEQ ID NO: 17243 - DNA, 25 bp, Artificial
  probe
  misc_feature (1)..(25): SEQ ID NO: 6092; WAN0249C5_at; Start 3; Stop 27
aactaactctgtgagtctgtatgga

SEQ ID NO: 17244 - DNA, 25 bp, Artificial
  probe
  misc_feature (1)..(25): SEQ ID NO: 6092; WAN0249C5_at; Start 5; Stop 29
ctaactctgtgagtctgtatggaaa

SEQ ID NO: 17245 - DNA, 25 bp, Artificial
  probe
  misc_feature (1)..(25): SEQ ID NO: 6092; WAN0249C5_at; Start 32; Stop 56
caatgctaaatttatcaagatttcc

SEQ ID NO: 17246 - DNA, 25 bp, Artificial
  probe
  misc_feature (1)..(25): SEQ ID NO: 6092; WAN0249C5_at; Start 13; Stop 37
gtgagtctgtatggaaatccaatgc

SEQ ID NO: 17247 - DNA, 25 bp, Artificial
  probe
  misc_feature (1)..(25): SEQ ID NO: 6092; WAN0249C5_at; Start 12; Stop 36
tgtgagtctgtatggaaatccaatg

SEQ ID NO: 17248 - DNA, 25 bp, Artificial
  probe
  misc_feature (1)..(25): SEQ ID NO: 6092; WAN0249C5_at; Start 31; Stop 55
ccaatgctaaatttatcaagatttc

SEQ ID NO: 17249 - DNA, 25 bp, Artificial
  probe
  misc_feature (1)..(25): SEQ ID NO: 6092; WAN0249C5_at; Start 25; Stop 49
ggaaatccaatgctaaatttatcaa

SEQ ID NO: 17250 - DNA, 25 bp, Artificial
  probe
  misc_feature (1)..(25): SEQ ID NO: 6092; WAN0249C5_at; Start 37; Stop 61
ctaaatttatcaagatttccaacaa

SEQ ID NO: 17251 - DNA, 25 bp, Artificial
  probe
  misc_feature (1)..(25): SEQ ID NO: 6092; WAN0249C5_at; Start 8; Stop 32
actctgtgagtctgtatggaaatcc

SEQ ID NO: 17252 - DNA, 25 bp, Artificial
  probe
  misc_feature (1)..(25): SEQ ID NO: 6092; WAN0249C5_at; Start 11; Stop 35
ctgtgagtctgtatggaaatccaat

SEQ ID NO: 17253 - DNA, 25 bp, Artificial
  probe
  misc_feature (1)..(25): SEQ ID NO: 6092; WAN0249C5_at; Start 18; Stop 42
tctgtatggaaatccaatgctaaat

SEQ ID NO: 17254 - DNA, 25 bp, Artificial
  probe
  misc_feature (1)..(25): SEQ ID NO: 6092; WAN0249C5_at; Start 43; Stop 67
ttatcaagatttccaacaatctcat

SEQ ID NO: 17255 - DNA, 25 bp, Artificial
  probe
  misc_feature (1)..(25): SEQ ID NO: 6092; WAN0249C5_at; Start 20; Stop 44
tgtatggaaatccaatgctaaattt

SEQ ID NO: 17256 - DNA, 25 bp, Artificial
  probe
  misc_feature (1)..(25): SEQ ID NO: 6092; WAN0249C5_at; Start 27; Stop 51
aaatccaatgctaaatttatcaaga

SEQ ID NO: 17257 - DNA, 25 bp, Artificial
  probe
  misc_feature (1)..(25): SEQ ID NO: 6092; WAN0249C5_at; Start 17; Stop 41
gtctgtatggaaatccaatgctaaa

SEQ ID NO: 17258 - DNA, 25 bp, Artificial
  probe
  misc_feature (1)..(25): SEQ ID NO: 6092; WAN0249C5_at; Start 21; Stop 45
gtatggaaatccaatgctaaattta

SEQ ID NO: 17259 - DNA, 25 bp, Artificial
  probe
  misc_feature (1)..(25): SEQ ID NO: 6092; WAN0249C5_at; Start 6; Stop 30
taactctgtgagtctgtatggaaat

SEQ ID NO: 17260 - DNA, 25 bp, Artificial
  probe
  misc_feature (1)..(25): SEQ ID NO: 6092; WAN0249C5_at; Start 35; Stop 59
tgctaaatttatcaagatttccaac

SEQ ID NO: 17261 - DNA, 25 bp, Artificial
  probe
  misc_feature (1)..(25): SEQ ID NO: 6092; WAN0249C5_at; Start 10; Stop 34
tctgtgagtctgtatggaaatccaa

SEQ ID NO: 17262 - DNA, 25 bp, Artificial
  probe
  misc_feature (1)..(25): SEQ ID NO: 6092; WAN0249C5_at; Start 28; Stop 52
aatccaatgctaaatttatcaagat

SEQ ID NO: 17263 - DNA, 25 bp, Artificial
  probe
  misc_feature (1)..(25): SEQ ID NO: 6092; WAN0249C5_at; Start 42; Stop 66
tttatcaagatttccaacaatctca

SEQ ID NO: 17264 - DNA, 25 bp, Artificial
  probe
  misc_feature (1)..(25): SEQ ID NO: 6092; WAN0249C5_at; Start 19; Stop 43
ctgtatggaaatccaatgctaaatt

SEQ ID NO: 17265 - DNA, 25 bp, Artificial
  probe
  misc_feature (1)..(25): SEQ ID NO: 6092; WAN0249C5_at; Start 7; Stop 31
aactctgtgagtctgtatggaaatc

SEQ ID NO: 17266 - DNA, 25 bp, Artificial
  probe
  misc_feature (1)..(25): SEQ ID NO: 6092; WAN0249C5_at; Start 16; Stop 40
agtctgtatggaaatccaatgctaa

SEQ ID NO: 17267 - DNA, 25 bp, Artificial
  probe
  misc_feature (1)..(25): SEQ ID NO: 6124; WAN0249C6_at; Start 54; Stop 78
tccgtgtctgttagaaaattctcac

SEQ ID NO: 17268 - DNA, 25 bp, Artificial
  probe
  misc_feature (1)..(25): SEQ ID NO: 6124; WAN0249C6_at; Start 84; Stop 108
tcttgtgccagttgcccttcacagg

SEQ ID NO: 17269 - DNA, 25 bp, Artificial
  probe
  misc_feature (1)..(25): SEQ ID NO: 6124; WAN0249C6_at; Start 40; Stop 64
tggaaacgataaactccgtgtctgt

SEQ ID NO: 17270 - DNA, 25 bp, Artificial
  probe
  misc_feature (1)..(25): SEQ ID NO: 6124; WAN0249C6_at; Start 150; Stop 174
gacggagtggattcaattttcaaag

SEQ ID NO: 17271 - DNA, 25 bp, Artificial
  probe
  misc_feature (1)..(25): SEQ ID NO: 6124; WAN0249C6_at; Start 97; Stop 121
gcccttcacagggaaatactctcag

SEQ ID NO: 17272 - DNA, 25 bp, Artificial
  probe
  misc_feature (1)..(25): SEQ ID NO: 6124; WAN0249C6_at; Start 161; Stop 185
ttcaattttcaaagaacaggtagct

SEQ ID NO: 17273 - DNA, 25 bp, Artificial
  probe
  misc_feature (1)..(25): SEQ ID NO: 6124; WAN0249C6_at; Start 174; Stop 198
gaacaggtagctttattatagataa

SEQ ID NO: 17274 - DNA, 25 bp, Artificial
  probe
  misc_feature (1)..(25): SEQ ID NO: 6124; WAN0249C6_at; Start 295; Stop 319
cgttcttcgtctaaaaatacagtag

SEQ ID NO: 17275 - DNA, 25 bp, Artificial
  probe
  misc_feature (1)..(25): SEQ ID NO: 6124; WAN0249C6_at; Start 89; Stop 113
tgccagttgcccttcacagggaaat

SEQ ID NO: 17276 - DNA, 25 bp, Artificial
  probe
  misc_feature (1)..(25): SEQ ID NO: 6124; WAN0249C6_at; Start 80; Stop 104
cacgtcttgtgccagttgcccttca

SEQ ID NO: 17277 - DNA, 25 bp, Artificial
  probe
  misc_feature (1)..(25): SEQ ID NO: 6124; WAN0249C6_at; Start 140; Stop 164
cgctaatcaagacggagtggattca

SEQ ID NO: 17278 - DNA, 25 bp, Artificial
  probe
  misc_feature (1)..(25): SEQ ID NO: 6124; WAN0249C6_at; Start 34; Stop 58
tgagtctggaaacgataaactccgt

SEQ ID NO: 17279 - DNA, 25 bp, Artificial
  probe
  misc_feature (1)..(25): SEQ ID NO: 6124; WAN0249C6_at; Start 302; Stop 326
cgtctaaaaatacagtagggaatat

SEQ ID NO: 17280 - DNA, 25 bp, Artificial
  probe
  misc_feature (1)..(25): SEQ ID NO: 6124; WAN0249C6_at; Start 258; Stop 282
caaagagtttgaaataaatttgagt

SEQ ID NO: 17281 - DNA, 25 bp, Artificial
  probe
  misc_feature (1)..(25): SEQ ID NO: 6124; WAN0249C6_at; Start 13; Stop 37
tatctagtttgtcgcatcgtttgag

SEQ ID NO: 17282 - DNA, 25 bp, Artificial
  probe
  misc_feature (1)..(25): SEQ ID NO: 6124; WAN0249C6_at; Start 113; Stop 137
tactctcagtccctacttacacagg

SEQ ID NO: 17283 - DNA, 25 bp, Artificial
  probe
  misc_feature (1)..(25): SEQ ID NO: 6124; WAN0249C6_at; Start 4; Stop 28
taactcctttatctagtttgtcgca

SEQ ID NO: 17284 - DNA, 25 bp, Artificial
  probe
  misc_feature (1)..(25): SEQ ID NO: 6124; WAN0249C6_at; Start 229; Stop 253
tttttctgtagagctaaattcatac

SEQ ID NO: 17285 - DNA, 25 bp, Artificial
  probe
  misc_feature (1)..(25): SEQ ID NO: 6124; WAN0249C6_at; Start 241; Stop 265
gctaaattcatactaatcaaagagt

SEQ ID NO: 17286 - DNA, 25 bp, Artificial
  probe
  misc_feature (1)..(25): SEQ ID NO: 6124; WAN0249C6_at; Start 183; Stop 207
gctttattatagataagagtagttg

SEQ ID NO: 17287 - DNA, 25 bp, Artificial
  probe
  misc_feature (1)..(25): SEQ ID NO: 6124; WAN0249C6_at; Start 278; Stop 302
tgagtattattaactaacgttcttc

SEQ ID NO: 17288 - DNA, 25 bp, Artificial
  probe
  misc_feature (1)..(25): SEQ ID NO: 6124; WAN0249C6_at; Start 120; Stop 144
agtccctacttacacaggcacgcta

SEQ ID NO: 17289 - DNA, 25 bp, Artificial
  probe
  misc_feature (1)..(25): SEQ ID NO: 6124; WAN0249C6_at; Start 17; Stop 41
tagtttgtcgcatcgtttgagtctg

SEQ ID NO: 17290 - DNA, 25 bp, Artificial
  probe
  misc_feature (1)..(25): SEQ ID NO: 6124; WAN0249C6_at; Start 101; Stop 125
ttcacagggaaatactctcagtccc

SEQ ID NO: 17291 - DNA, 25 bp, Artificial
  probe
  misc_feature (1)..(25): SEQ ID NO: 6124; WAN0249C6_at; Start 65; Stop 89
tagaaaattctcacacacgtcttgt

SEQ ID NO: 17292 - DNA, 25 bp, Artificial
  probe
  misc_feature (1)..(25): SEQ ID NO: 6124; WAN0249C6_at; Start 22; Stop 46
tgtcgcatcgtttgagtctggaaac

SEQ ID NO: 17293 - DNA, 25 bp, Artificial
  probe
  misc_feature (1)..(25): SEQ ID NO: 6124; WAN0249C6_at; Start 75; Stop 99
tcacacacgtcttgtgccagttgcc

SEQ ID NO: 17294 - DNA, 25 bp, Artificial
  probe
  misc_feature (1)..(25): SEQ ID NO: 6124; WAN0249C6_at; Start 199; Stop 223
gagtagttgaaatttttatcacatt

SEQ ID NO: 17295 - DNA, 25 bp, Artificial
  probe
  misc_feature (1)..(25): SEQ ID NO: 6124; WAN0249C6_at; Start 130; Stop 154
tacacaggcacgctaatcaagacgg

SEQ ID NO: 17296 - DNA, 25 bp, Artificial
  probe
  misc_feature (1)..(25): SEQ ID NO: 6124; WAN0249C6_at; Start 146; Stop 170
tcaagacggagtggattcaattttc

SEQ ID NO: 17297 - DNA, 25 bp, Artificial
  probe
  misc_feature (1)..(25): SEQ ID NO: 6124; WAN0249C6_at; Start 107; Stop 131
gggaaatactctcagtccctactta

SEQ ID NO: 17298 - DNA, 25 bp, Artificial
  probe
  misc_feature (1)..(25): SEQ ID NO: 6124; WAN0249C6_at; Start 126; Stop 150
tacttacacaggcacgctaatcaag

SEQ ID NO: 17299 - DNA, 25 bp, Artificial
  probe
  misc_feature (1)..(25): SEQ ID NO: 6124; WAN0249C6_at; Start 134; Stop 158
caggcacgctaatcaagacggagtg

SEQ ID NO: 17300 - DNA, 25 bp, Artificial
  probe
  misc_feature (1)..(25): SEQ ID NO: 6124; WAN0249C6_at; Start 47; Stop 71
gataaactccgtgtctgttagaaaa

SEQ ID NO: 17301 - DNA, 25 bp, Artificial
  probe
  misc_feature (1)..(25): SEQ ID NO: 6079; WAN0249C7_at; Start 105; Stop 129
tagatttttattatttcctcaatgt

SEQ ID NO: 17302 - DNA, 25 bp, Artificial
  probe
  misc_feature (1)..(25): SEQ ID NO: 6079; WAN0249C7_at; Start 82; Stop 106
aagtactttcagaacattacccata

SEQ ID NO: 17303 - DNA, 25 bp, Artificial
  probe
  misc_feature (1)..(25): SEQ ID NO: 6079; WAN0249C7_at; Start 201; Stop 225
gtttctaataattatactcgtggtg

SEQ ID NO: 17304 - DNA, 25 bp, Artificial
  probe
  misc_feature (1)..(25): SEQ ID NO: 6079; WAN0249C7_at; Start 20; Stop 44
tctacaattcgctattttttgaatc

SEQ ID NO: 17305 - DNA, 25 bp, Artificial
  probe
  misc_feature (1)..(25): SEQ ID NO: 6079; WAN0249C7_at; Start 11; Stop 35
taagcgttttctacaattcgctatt

SEQ ID NO: 17306 - DNA, 25 bp, Artificial
  probe
  misc_feature (1)..(25): SEQ ID NO: 6079; WAN0249C7_at; Start 203; Stop 227
ttctaataattatactcgtggtgtc

SEQ ID NO: 17307 - DNA, 25 bp, Artificial
  probe
  misc_feature (1)..(25): SEQ ID NO: 6079; WAN0249C7_at; Start 87; Stop 111
ctttcagaacattacccatagattt

SEQ ID NO: 17308 - DNA, 25 bp, Artificial
  probe
  misc_feature (1)..(25): SEQ ID NO: 6079; WAN0249C7_at; Start 29; Stop 53
cgctattttttgaatcaattttcaa

SEQ ID NO: 17309 - DNA, 25 bp, Artificial
  probe
  misc_feature (1)..(25): SEQ ID NO: 6079; WAN0249C7_at; Start 196; Stop 220
tccacgtttctaataattatactcg

SEQ ID NO: 17310 - DNA, 25 bp, Artificial
  probe
  misc_feature (1)..(25): SEQ ID NO: 6079; WAN0249C7_at; Start 8; Stop 32
tgttaagcgttttctacaattcgct

SEQ ID NO: 17311 - DNA, 25 bp, Artificial
  probe
  misc_feature (1)..(25): SEQ ID NO: 6079; WAN0249C7_at; Start 89; Stop 113
ttcagaacattacccatagattttt

SEQ ID NO: 17312 - DNA, 25 bp, Artificial
  probe
  misc_feature (1)..(25): SEQ ID NO: 6079; WAN0249C7_at; Start 84; Stop 108
gtactttcagaacattacccataga

SEQ ID NO: 17313 - DNA, 25 bp, Artificial
  probe
  misc_feature (1)..(25): SEQ ID NO: 6079; WAN0249C7_at; Start 83; Stop 107
agtactttcagaacattacccatag

SEQ ID NO: 17314 - DNA, 25 bp, Artificial
  probe
  misc_feature (1)..(25): SEQ ID NO: 6079; WAN0249C7_at; Start 54; Stop 78
aaatcattatatttctctcctaacc

SEQ ID NO: 17315 - DNA, 25 bp, Artificial
  probe
  misc_feature (1)..(25): SEQ ID NO: 6079; WAN0249C7_at; Start 1; Stop 25
caccatttgttaagcgttttctaca

SEQ ID NO: 17316 - DNA, 25 bp, Artificial
  probe
  misc_feature (1)..(25): SEQ ID NO: 6079; WAN0249C7_at; Start 85; Stop 109
tactttcagaacattacccatagat

SEQ ID NO: 17317 - DNA, 25 bp, Artificial
  probe
  misc_feature (1)..(25): SEQ ID NO: 6079; WAN0249C7_at; Start 7; Stop 31
ttgttaagcgttttctacaattcgc

SEQ ID NO: 17318 - DNA, 25 bp, Artificial
  probe
  misc_feature (1)..(25): SEQ ID NO: 6079; WAN0249C7_at; Start 101; Stop 125
cccatagatttttattatttcctca

SEQ ID NO: 17319 - DNA, 25 bp, Artificial
  probe
  misc_feature (1)..(25): SEQ ID NO: 6079; WAN0249C7_at; Start 58; Stop 82
cattatatttctctcctaacctaaa

SEQ ID NO: 17320 - DNA, 25 bp, Artificial
  probe
  misc_feature (1)..(25): SEQ ID NO: 6079; WAN0249C7_at; Start 88; Stop 112
tttcagaacattacccatagatttt

SEQ ID NO: 17321 - DNA, 25 bp, Artificial
  probe
  misc_feature (1)..(25): SEQ ID NO: 6079; WAN0249C7_at; Start 93; Stop 117
gaacattacccatagatttttatta

SEQ ID NO: 17322 - DNA, 25 bp, Artificial
  probe
  misc_feature (1)..(25): SEQ ID NO: 6079; WAN0249C7_at; Start 40; Stop 64
gaatcaattttcaaaaatcattata

SEQ ID NO: 17323 - DNA, 25 bp, Artificial
  probe
  misc_feature (1)..(25): SEQ ID NO: 6079; WAN0249C7_at; Start 204; Stop 228
tctaataattatactcgtggtgtca

SEQ ID NO: 17324 - DNA, 25 bp, Artificial
  probe
  misc_feature (1)..(25): SEQ ID NO: 6079; WAN0249C7_at; Start 199; Stop 223
acgtttctaataattatactcgtgg

SEQ ID NO: 17325 - DNA, 25 bp, Artificial
  probe
  misc_feature (1)..(25): SEQ ID NO: 6079; WAN0249C7_at; Start 120; Stop 144
tcctcaatgttttattacataagtt

SEQ ID NO: 17326 - DNA, 25 bp, Artificial
  probe
  misc_feature (1)..(25): SEQ ID NO: 6079; WAN0249C7_at; Start 22; Stop 46
tacaattcgctattttttgaatcaa

SEQ ID NO: 17327 - DNA, 25 bp, Artificial
  probe
  misc_feature (1)..(25): SEQ ID NO: 6079; WAN0249C7_at; Start 86; Stop 110
actttcagaacattacccatagatt

SEQ ID NO: 17328 - DNA, 25 bp, Artificial
  probe
  misc_feature (1)..(25): SEQ ID NO: 6079; WAN0249C7_at; Start 193; Stop 217
gattccacgtttctaataattatac

SEQ ID NO: 17329 - DNA, 25 bp, Artificial
  probe
  misc_feature (1)..(25): SEQ ID NO: 6079; WAN0249C7_at; Start 12; Stop 36
aagcgttttctacaattcgctattt

SEQ ID NO: 17330 - DNA, 25 bp, Artificial
  probe
  misc_feature (1)..(25): SEQ ID NO: 6079; WAN0249C7_at; Start 205; Stop 229
ctaataattatactcgtggtgtcag

SEQ ID NO: 17331 - DNA, 25 bp, Artificial
  probe
  misc_feature (1)..(25): SEQ ID NO: 6079; WAN0249C7_at; Start 81; Stop 105
aaagtactttcagaacattacccat

SEQ ID NO: 17332 - DNA, 25 bp, Artificial
  probe
  misc_feature (1)..(25): SEQ ID NO: 6079; WAN0249C7_at; Start 91; Stop 115
cagaacattacccatagatttttat

SEQ ID NO: 17333 - DNA, 25 bp, Artificial
  probe
  misc_feature (1)..(25): SEQ ID NO: 6079; WAN0249C7_at; Start 200; Stop 224
cgtttctaataattatactcgtggt

SEQ ID NO: 17334 - DNA, 25 bp, Artificial
  probe
  misc_feature (1)..(25): SEQ ID NO: 6079; WAN0249C7_at; Start 9; Stop 33
gttaagcgttttctacaattcgcta

SEQ ID NO: 17335 - DNA, 25 bp, Artificial
  probe
  misc_feature (1)..(25): SEQ ID NO: 6238; WAN0249C8_at; Start 31; Stop 55
tatttatgtgattaagtaagtattg

SEQ ID NO: 17336 - DNA, 25 bp, Artificial
  probe
  misc_feature (1)..(25): SEQ ID NO: 6238; WAN0249C8_at; Start 26; Stop 50
gtaattatttatgtgattaagtaag

SEQ ID NO: 17337 - DNA, 25 bp, Artificial
  probe
  misc_feature (1)..(25): SEQ ID NO: 6238; WAN0249C8_at; Start 39; Stop 63
tgattaagtaagtattgcagtaatt

SEQ ID NO: 17338 - DNA, 25 bp, Artificial
  probe
  misc_feature (1)..(25): SEQ ID NO: 6238; WAN0249C8_at; Start 24; Stop 48
aagtaattatttatgtgattaagta

SEQ ID NO: 17339 - DNA, 25 bp, Artificial
  probe
  misc_feature (1)..(25): SEQ ID NO: 6238; WAN0249C8_at; Start 38; Stop 62
gtgattaagtaagtattgcagtaat

SEQ ID NO: 17340 - DNA, 25 bp, Artificial
  probe
  misc_feature (1)..(25): SEQ ID NO: 6238; WAN0249C8_at; Start 23; Stop 47
taagtaattatttatgtgattaagt

SEQ ID NO: 17341 - DNA, 25 bp, Artificial
  probe
  misc_feature (1)..(25): SEQ ID NO: 6238; WAN0249C8_at; Start 35; Stop 59
tatgtgattaagtaagtattgcagt

SEQ ID NO: 17342 - DNA, 25 bp, Artificial
  probe
  misc_feature (1)..(25): SEQ ID NO: 6238; WAN0249C8_at; Start 34; Stop 58
ttatgtgattaagtaagtattgcag

SEQ ID NO: 17343 - DNA, 25 bp, Artificial
  probe
  misc_feature (1)..(25): SEQ ID NO: 6238; WAN0249C8_at; Start 40; Stop 64
gattaagtaagtattgcagtaatta

SEQ ID NO: 17344 - DNA, 25 bp, Artificial
  probe
  misc_feature (1)..(25): SEQ ID NO: 6238; WAN0249C8_at; Start 27; Stop 51
taattatttatgtgattaagtaagt

SEQ ID NO: 17345 - DNA, 25 bp, Artificial
  probe
  misc_feature (1)..(25): SEQ ID NO: 6238; WAN0249C8_at; Start 32; Stop 56
atttatgtgattaagtaagtattgc

SEQ ID NO: 17346 - DNA, 25 bp, Artificial
  probe
  misc_feature (1)..(25): SEQ ID NO: 6238; WAN0249C8_at; Start 41; Stop 65
attaagtaagtattgcagtaattaa

SEQ ID NO: 17347 - DNA, 25 bp, Artificial
  probe
  misc_feature (1)..(25): SEQ ID NO: 6238; WAN0249C8_at; Start 45; Stop 69
agtaagtattgcagtaattaaaaat

SEQ ID NO: 17348 - DNA, 25 bp, Artificial
  probe
  misc_feature (1)..(25): SEQ ID NO: 6238; WAN0249C8_at; Start 37; Stop 61
tgtgattaagtaagtattgcagtaa

SEQ ID NO: 17349 - DNA, 25 bp, Artificial
  probe
  misc_feature (1)..(25): SEQ ID NO: 6238; WAN0249C8_at; Start 36; Stop 60
atgtgattaagtaagtattgcagta

SEQ ID NO: 17350 - DNA, 25 bp, Artificial
  probe
  misc_feature (1)..(25): SEQ ID NO: 6238; WAN0249C8_at; Start 42; Stop 66
ttaagtaagtattgcagtaattaaa

SEQ ID NO: 17351 - DNA, 25 bp, Artificial
  probe
  misc_feature (1)..(25): SEQ ID NO: 6238; WAN0249C8_at; Start 25; Stop 49
agtaattatttatgtgattaagtaa

SEQ ID NO: 17352 - DNA, 25 bp, Artificial
  probe
  misc_feature (1)..(25): SEQ ID NO: 6238; WAN0249C8_at; Start 33; Stop 57
tttatgtgattaagtaagtattgca

SEQ ID NO: 17353 - DNA, 25 bp, Artificial
  probe
  misc_feature (1)..(25): SEQ ID NO: 6238; WAN0249C8_at; Start 28; Stop 52
aattatttatgtgattaagtaagta

SEQ ID NO: 17354 - DNA, 25 bp, Artificial
  probe
  misc_feature (1)..(25): SEQ ID NO: 6238; WAN0249C8_at; Start 43; Stop 67
taagtaagtattgcagtaattaaaa

SEQ ID NO: 17355 - DNA, 25 bp, Artificial
  probe
  misc_feature (1)..(25): SEQ ID NO: 6159; WAN0249C9_at; Start 27; Stop 51
agattatcaaacttaatcactgata

SEQ ID NO: 17356 - DNA, 25 bp, Artificial
  probe
  misc_feature (1)..(25): SEQ ID NO: 6159; WAN0249C9_at; Start 31; Stop 55
tatcaaacttaatcactgataattt

SEQ ID NO: 17357 - DNA, 25 bp, Artificial
  probe
  misc_feature (1)..(25): SEQ ID NO: 6159; WAN0249C9_at; Start 22; Stop 46
ctaaaagattatcaaacttaatcac

SEQ ID NO: 17358 - DNA, 25 bp, Artificial
  probe
  misc_feature (1)..(25): SEQ ID NO: 6159; WAN0249C9_at; Start 13; Stop 37
tctacactcctaaaagattatcaaa

SEQ ID NO: 17359 - DNA, 25 bp, Artificial
  probe
  misc_feature (1)..(25): SEQ ID NO: 6159; WAN0249C9_at; Start 16; Stop 40
acactcctaaaagattatcaaactt

SEQ ID NO: 17360 - DNA, 25 bp, Artificial
  probe
  misc_feature (1)..(25): SEQ ID NO: 6159; WAN0249C9_at; Start 11; Stop 35
tctctacactcctaaaagattatca

SEQ ID NO: 17361 - DNA, 25 bp, Artificial
  probe
  misc_feature (1)..(25): SEQ ID NO: 6159; WAN0249C9_at; Start 8; Stop 32
gcatctctacactcctaaaagatta

SEQ ID NO: 17362 - DNA, 25 bp, Artificial
  probe
  misc_feature (1)..(25): SEQ ID NO: 6159; WAN0249C9_at; Start 2; Stop 26
aaaccagcatctctacactcctaaa

SEQ ID NO: 17363 - DNA, 25 bp, Artificial
  probe
  misc_feature (1)..(25): SEQ ID NO: 6159; WAN0249C9_at; Start 39; Stop 63
ttaatcactgataattttaaacgat

SEQ ID NO: 17364 - DNA, 25 bp, Artificial
  probe
  misc_feature (1)..(25): SEQ ID NO: 6159; WAN0249C9_at; Start 4; Stop 28
accagcatctctacactcctaaaag

SEQ ID NO: 17365 - DNA, 25 bp, Artificial
  probe
  misc_feature (1)..(25): SEQ ID NO: 6159; WAN0249C9_at; Start 1; Stop 25
taaaccagcatctctacactcctaa

SEQ ID NO: 17366 - DNA, 25 bp, Artificial
  probe
  misc_feature (1)..(25): SEQ ID NO: 6159; WAN0249C9_at; Start 5; Stop 29
ccagcatctctacactcctaaaaga

SEQ ID NO: 17367 - DNA, 25 bp, Artificial
  probe
  misc_feature (1)..(25): SEQ ID NO: 6159; WAN0249C9_at; Start 37; Stop 61
acttaatcactgataattttaaacg

SEQ ID NO: 17368 - DNA, 25 bp, Artificial
  probe
  misc_feature (1)..(25): SEQ ID NO: 6159; WAN0249C9_at; Start 12; Stop 36
ctctacactcctaaaagattatcaa

SEQ ID NO: 17369 - DNA, 25 bp, Artificial
  probe
  misc_feature (1)..(25): SEQ ID NO: 6159; WAN0249C9_at; Start 38; Stop 62
cttaatcactgataattttaaacga

SEQ ID NO: 17370 - DNA, 25 bp, Artificial
  probe
  misc_feature (1)..(25): SEQ ID NO: 6159; WAN0249C9_at; Start 15; Stop 39
tacactcctaaaagattatcaaact

SEQ ID NO: 17371 - DNA, 25 bp, Artificial
  probe
  misc_feature (1)..(25): SEQ ID NO: 6159; WAN0249C9_at; Start 6; Stop 30
cagcatctctacactcctaaaagat

SEQ ID NO: 17372 - DNA, 25 bp, Artificial
  probe
  misc_feature (1)..(25): SEQ ID NO: 6159; WAN0249C9_at; Start 28; Stop 52
gattatcaaacttaatcactgataa

SEQ ID NO: 17373 - DNA, 25 bp, Artificial
  probe
  misc_feature (1)..(25): SEQ ID NO: 6159; WAN0249C9_at; Start 24; Stop 48
aaaagattatcaaacttaatcactg

SEQ ID NO: 17374 - DNA, 25 bp, Artificial
  probe
  misc_feature (1)..(25): SEQ ID NO: 6159; WAN0249C9_at; Start 34; Stop 58
caaacttaatcactgataattttaa

SEQ ID NO: 17375 - DNA, 25 bp, Artificial
  probe
  misc_feature (1)..(25): SEQ ID NO: 6159; WAN0249C9_at; Start 30; Stop 54
ttatcaaacttaatcactgataatt

SEQ ID NO: 17376 - DNA, 25 bp, Artificial
  probe
  misc_feature (1)..(25): SEQ ID NO: 6159; WAN0249C9_at; Start 21; Stop 45
cctaaaagattatcaaacttaatca

SEQ ID NO: 17377 - DNA, 25 bp, Artificial
  probe
  misc_feature (1)..(25): SEQ ID NO: 6159; WAN0249C9_at; Start 25; Stop 49
aaagattatcaaacttaatcactga

SEQ ID NO: 17378 - DNA, 25 bp, Artificial
  probe
  misc_feature (1)..(25): SEQ ID NO: 6159; WAN0249C9_at; Start 10; Stop 34
atctctacactcctaaaagattatc

SEQ ID NO: 17379 - DNA, 25 bp, Artificial
  probe
  misc_feature (1)..(25): SEQ ID NO: 6159; WAN0249C9_at; Start 9; Stop 33
catctctacactcctaaaagattat

SEQ ID NO: 17380 - DNA, 25 bp, Artificial
  probe
  misc_feature (1)..(25): SEQ ID NO: 6159; WAN0249C9_at; Start 14; Stop 38
ctacactcctaaaagattatcaaac

SEQ ID NO: 17381 - DNA, 25 bp, Artificial
  probe
  misc_feature (1)..(25): SEQ ID NO: 6159; WAN0249C9_at; Start 19; Stop 43
ctcctaaaagattatcaaacttaat

SEQ ID NO: 17382 - DNA, 25 bp, Artificial
  probe
  misc_feature (1)..(25): SEQ ID NO: 6159; WAN0249C9_at; Start 20; Stop 44
tcctaaaagattatcaaacttaatc

SEQ ID NO: 17383 - DNA, 25 bp, Artificial
  probe
  misc_feature (1)..(25): SEQ ID NO: 6159; WAN0249C9_at; Start 26; Stop 50
aagattatcaaacttaatcactgat

SEQ ID NO: 17384 - DNA, 25 bp, Artificial
  probe
  misc_feature (1)..(25): SEQ ID NO: 6159; WAN0249C9_at; Start 7; Stop 31
agcatctctacactcctaaaagatt

SEQ ID NO: 17385 - DNA, 25 bp, Artificial
  probe
  misc_feature (1)..(25): SEQ ID NO: 6159; WAN0249C9_at; Start 23; Stop 47
taaaagattatcaaacttaatcact

SEQ ID NO: 17386 - DNA, 25 bp, Artificial
  probe
  misc_feature (1)..(25): SEQ ID NO: 6159; WAN0249C9_at; Start 17; Stop 41
cactcctaaaagattatcaaactta

SEQ ID NO: 17387 - DNA, 25 bp, Artificial
  probe
  misc_feature (1)..(25): SEQ ID NO: 6159; WAN0249C9_at; Start 40; Stop 64
taatcactgataattttaaacgatt

SEQ ID NO: 17388 - DNA, 25 bp, Artificial
  probe
  misc_feature (1)..(25): SEQ ID NO: 6159; WAN0249C9_at; Start 3; Stop 27
aaccagcatctctacactcctaaaa

SEQ ID NO: 17389 - DNA, 25 bp, Artificial
  probe
  misc_feature (1)..(25): SEQ ID NO: 6002; WAN0249CA_at; Start 27; Stop 51
agctgagcggtttttgatgtctaat

SEQ ID NO: 17390 - DNA, 25 bp, Artificial
  probe
  misc_feature (1)..(25): SEQ ID NO: 6002; WAN0249CA_at; Start 7; Stop 31
agaatagactaaaaccgctcagctg

SEQ ID NO: 17391 - DNA, 25 bp, Artificial
  probe
  misc_feature (1)..(25): SEQ ID NO: 6002; WAN0249CA_at; Start 30; Stop 54
tgagcggtttttgatgtctaattac

SEQ ID NO: 17392 - DNA, 25 bp, Artificial
  probe
  misc_feature (1)..(25): SEQ ID NO: 6002; WAN0249CA_at; Start 5; Stop 29
aaagaatagactaaaaccgctcagc

SEQ ID NO: 17393 - DNA, 25 bp, Artificial
  probe
  misc_feature (1)..(25): SEQ ID NO: 6002; WAN0249CA_at; Start 4; Stop 28
gaaagaatagactaaaaccgctcag

SEQ ID NO: 17394 - DNA, 25 bp, Artificial
  probe
  misc_feature (1)..(25): SEQ ID NO: 6002; WAN0249CA_at; Start 3; Stop 27
ggaaagaatagactaaaaccgctca

SEQ ID NO: 17395 - DNA, 25 bp, Artificial
  probe
  misc_feature (1)..(25): SEQ ID NO: 6002; WAN0249CA_at; Start 26; Stop 50
cagctgagcggtttttgatgtctaa

SEQ ID NO: 17396 - DNA, 25 bp, Artificial
  probe
  misc_feature (1)..(25): SEQ ID NO: 6002; WAN0249CA_at; Start 29; Stop 53
ctgagcggtttttgatgtctaatta

SEQ ID NO: 17397 - DNA, 25 bp, Artificial
  probe
  misc_feature (1)..(25): SEQ ID NO: 6002; WAN0249CA_at; Start 28; Stop 52
gctgagcggtttttgatgtctaatt

SEQ ID NO: 17398 - DNA, 25 bp, Artificial
  probe
  misc_feature (1)..(25): SEQ ID NO: 6002; WAN0249CA_at; Start 6; Stop 30
aagaatagactaaaaccgctcagct

SEQ ID NO: 17399 - DNA, 25 bp, Artificial
  probe
  misc_feature (1)..(25): SEQ ID NO: 6074; WAN0249CB_at; Start 15; Stop 39
aaatatttacaaaatcaacctcgct

SEQ ID NO: 17400 - DNA, 25 bp, Artificial
  probe
  misc_feature (1)..(25): SEQ ID NO: 6074; WAN0249CB_at; Start 27; Stop 51
aatcaacctcgctctcttattttta

SEQ ID NO: 17401 - DNA, 25 bp, Artificial
  probe
  misc_feature (1)..(25): SEQ ID NO: 6074; WAN0249CB_at; Start 25; Stop 49
aaaatcaacctcgctctcttatttt

SEQ ID NO: 17402 - DNA, 25 bp, Artificial
  probe
  misc_feature (1)..(25): SEQ ID NO: 6074; WAN0249CB_at; Start 31; Stop 55
aacctcgctctcttatttttaggct

SEQ ID NO: 17403 - DNA, 25 bp, Artificial
  probe
  misc_feature (1)..(25): SEQ ID NO: 6074; WAN0249CB_at; Start 28; Stop 52
atcaacctcgctctcttatttttag

SEQ ID NO: 17404 - DNA, 25 bp, Artificial
  probe
  misc_feature (1)..(25): SEQ ID NO: 6074; WAN0249CB_at; Start 29; Stop 53
tcaacctcgctctcttatttttagg

SEQ ID NO: 17405 - DNA, 25 bp, Artificial
  probe
  misc_feature (1)..(25): SEQ ID NO: 6074; WAN0249CB_at; Start 32; Stop 56
acctcgctctcttatttttaggctc

SEQ ID NO: 17406 - DNA, 25 bp, Artificial
  probe
  misc_feature (1)..(25): SEQ ID NO: 6074; WAN0249CB_at; Start 30; Stop 54
caacctcgctctcttatttttaggc

SEQ ID NO: 17407 - DNA, 25 bp, Artificial
  probe
  misc_feature (1)..(25): SEQ ID NO: 6074; WAN0249CB_at; Start 26; Stop 50
aaatcaacctcgctctcttattttt

SEQ ID NO: 17408 - DNA, 25 bp, Artificial
  probe
  misc_feature (1)..(25): SEQ ID NO: 6072; WAN0249CC_at; Start 15; Stop 39
agataggtggggcaaaaacacaatt

SEQ ID NO: 17409 - DNA, 25 bp, Artificial
  probe
  misc_feature (1)..(25): SEQ ID NO: 6072; WAN0249CC_at; Start 62; Stop 86
ttcccatagtaaaacgcataatatc

SEQ ID NO: 17410 - DNA, 25 bp, Artificial
  probe
  misc_feature (1)..(25): SEQ ID NO: 6072; WAN0249CC_at; Start 6; Stop 30
caacatagcagataggtggggcaaa

SEQ ID NO: 17411 - DNA, 25 bp, Artificial
  probe
  misc_feature (1)..(25): SEQ ID NO: 6072; WAN0249CC_at; Start 87; Stop 111
aagttttcacacctgatattatgcg

SEQ ID NO: 17412 - DNA, 25 bp, Artificial
  probe
  misc_feature (1)..(25): SEQ ID NO: 6072; WAN0249CC_at; Start 61; Stop 85
cttcccatagtaaaacgcataatat

SEQ ID NO: 17413 - DNA, 25 bp, Artificial
  probe
  misc_feature (1)..(25): SEQ ID NO: 6072; WAN0249CC_at; Start 9; Stop 33
catagcagataggtggggcaaaaac

SEQ ID NO: 17414 - DNA, 25 bp, Artificial
  probe
  misc_feature (1)..(25): SEQ ID NO: 6072; WAN0249CC_at; Start 2; Stop 26
tttgcaacatagcagataggtgggg

SEQ ID NO: 17415 - DNA, 25 bp, Artificial
  probe
  misc_feature (1)..(25): SEQ ID NO: 6072; WAN0249CC_at; Start 4; Stop 28
tgcaacatagcagataggtggggca

SEQ ID NO: 17416 - DNA, 25 bp, Artificial
  probe
  misc_feature (1)..(25): SEQ ID NO: 6072; WAN0249CC_at; Start 14; Stop 38
cagataggtggggcaaaaacacaat

SEQ ID NO: 17417 - DNA, 25 bp, Artificial
  probe
  misc_feature (1)..(25): SEQ ID NO: 6072; WAN0249CC_at; Start 13; Stop 37
gcagataggtggggcaaaaacacaa

SEQ ID NO: 17418 - DNA, 25 bp, Artificial
  probe
  misc_feature (1)..(25): SEQ ID NO: 6072; WAN0249CC_at; Start 10; Stop 34
atagcagataggtggggcaaaaaca

SEQ ID NO: 17419 - DNA, 25 bp, Artificial
  probe
  misc_feature (1)..(25): SEQ ID NO: 6072; WAN0249CC_at; Start 1; Stop 25
atttgcaacatagcagataggtggg

SEQ ID NO: 17420 - DNA, 25 bp, Artificial
  probe
  misc_feature (1)..(25): SEQ ID NO: 6072; WAN0249CC_at; Start 60; Stop 84
tcttcccatagtaaaacgcataata

SEQ ID NO: 17421 - DNA, 25 bp, Artificial
  probe
  misc_feature (1)..(25): SEQ ID NO: 6072; WAN0249CC_at; Start 73; Stop 97
aaacgcataatatcaagttttcaca

SEQ ID NO: 17422 - DNA, 25 bp, Artificial
  probe
  misc_feature (1)..(25): SEQ ID NO: 6072; WAN0249CC_at; Start 8; Stop 32
acatagcagataggtggggcaaaaa

SEQ ID NO: 17423 - DNA, 25 bp, Artificial
  probe
  misc_feature (1)..(25): SEQ ID NO: 6072; WAN0249CC_at; Start 75; Stop 99
acgcataatatcaagttttcacacc

SEQ ID NO: 17424 - DNA, 25 bp, Artificial
  probe
  misc_feature (1)..(25): SEQ ID NO: 6072; WAN0249CC_at; Start 5; Stop 29
gcaacatagcagataggtggggcaa

SEQ ID NO: 17425 - DNA, 25 bp, Artificial
  probe
  misc_feature (1)..(25): SEQ ID NO: 6072; WAN0249CC_at; Start 7; Stop 31
aacatagcagataggtggggcaaaa

SEQ ID NO: 17426 - DNA, 25 bp, Artificial
  probe
  misc_feature (1)..(25): SEQ ID NO: 6072; WAN0249CC_at; Start 86; Stop 110
caagttttcacacctgatattatgc

SEQ ID NO: 17427 - DNA, 25 bp, Artificial
  probe
  misc_feature (1)..(25): SEQ ID NO: 6072; WAN0249CC_at; Start 3; Stop 27
ttgcaacatagcagataggtggggc

SEQ ID NO: 17428 - DNA, 25 bp, Artificial
  probe
  misc_feature (1)..(25): SEQ ID NO: 6072; WAN0249CC_at; Start 58; Stop 82
aatcttcccatagtaaaacgcataa

SEQ ID NO: 17429 - DNA, 25 bp, Artificial
  probe
  misc_feature (1)..(25): SEQ ID NO: 6072; WAN0249CC_at; Start 12; Stop 36
agcagataggtggggcaaaaacaca

SEQ ID NO: 17430 - DNA, 25 bp, Artificial
  probe
  misc_feature (1)..(25): SEQ ID NO: 6072; WAN0249CC_at; Start 59; Stop 83
atcttcccatagtaaaacgcataat

SEQ ID NO: 17431 - DNA, 25 bp, Artificial
  probe
  misc_feature (1)..(25): SEQ ID NO: 6072; WAN0249CC_at; Start 11; Stop 35
tagcagataggtggggcaaaaacac

SEQ ID NO: 17432 - DNA, 25 bp, Artificial
  probe
  misc_feature (1)..(25): SEQ ID NO: 6072; WAN0249CC_at; Start 74; Stop 98
aacgcataatatcaagttttcacac

SEQ ID NO: 17433 - DNA, 25 bp, Artificial
  probe
  misc_feature (1)..(25): SEQ ID NO: 6239; WAN0249CD_at; Start 21; Stop 45
gaggcgtcgtctaccttttattctc

SEQ ID NO: 17434 - DNA, 25 bp, Artificial
  probe
  misc_feature (1)..(25): SEQ ID NO: 6239; WAN0249CD_at; Start 7; Stop 31
ggccaatttttactgaggcgtcgtc

SEQ ID NO: 17435 - DNA, 25 bp, Artificial
  probe
  misc_feature (1)..(25): SEQ ID NO: 6239; WAN0249CD_at; Start 12; Stop 36
atttttactgaggcgtcgtctacct

SEQ ID NO: 17436 - DNA, 25 bp, Artificial
  probe
  misc_feature (1)..(25): SEQ ID NO: 6239; WAN0249CD_at; Start 5; Stop 29
cgggccaatttttactgaggcgtcg

SEQ ID NO: 17437 - DNA, 25 bp, Artificial
  probe
  misc_feature (1)..(25): SEQ ID NO: 6239; WAN0249CD_at; Start 16; Stop 40
ttactgaggcgtcgtctacctttta

SEQ ID NO: 17438 - DNA, 25 bp, Artificial
  probe
  misc_feature (1)..(25): SEQ ID NO: 6239; WAN0249CD_at; Start 10; Stop 34
caatttttactgaggcgtcgtctac

SEQ ID NO: 17439 - DNA, 25 bp, Artificial
  probe
  misc_feature (1)..(25): SEQ ID NO: 6239; WAN0249CD_at; Start 22; Stop 46
aggcgtcgtctaccttttattctct

SEQ ID NO: 17440 - DNA, 25 bp, Artificial
  probe
  misc_feature (1)..(25): SEQ ID NO: 6239; WAN0249CD_at; Start 19; Stop 43
ctgaggcgtcgtctaccttttattc

SEQ ID NO: 17441 - DNA, 25 bp, Artificial
  probe
  misc_feature (1)..(25): SEQ ID NO: 6239; WAN0249CD_at; Start 17; Stop 41
tactgaggcgtcgtctaccttttat

SEQ ID NO: 17442 - DNA, 25 bp, Artificial
  probe
  misc_feature (1)..(25): SEQ ID NO: 6239; WAN0249CD_at; Start 20; Stop 44
tgaggcgtcgtctaccttttattct

SEQ ID NO: 17443 - DNA, 25 bp, Artificial
  probe
  misc_feature (1)..(25): SEQ ID NO: 6239; WAN0249CD_at; Start 18; Stop 42
actgaggcgtcgtctaccttttatt

SEQ ID NO: 17444 - DNA, 25 bp, Artificial
  probe
  misc_feature (1)..(25): SEQ ID NO: 6239; WAN0249CD_at; Start 8; Stop 32
gccaatttttactgaggcgtcgtct

SEQ ID NO: 17445 - DNA, 25 bp, Artificial
  probe
  misc_feature (1)..(25): SEQ ID NO: 6239; WAN0249CD_at; Start 9; Stop 33
ccaatttttactgaggcgtcgtcta

SEQ ID NO: 17446 - DNA, 25 bp, Artificial
  probe
  misc_feature (1)..(25): SEQ ID NO: 6176; WAN0249CE_at; Start 34; Stop 58
tttggaatttaatcaatcacagttg

SEQ ID NO: 17447 - DNA, 25 bp, Artificial
  probe
  misc_feature (1)..(25): SEQ ID NO: 6176; WAN0249CE_at; Start 16; Stop 40
gcgcctttggaatatatttttggaa

SEQ ID NO: 17448 - DNA, 25 bp, Artificial
  probe
  misc_feature (1)..(25): SEQ ID NO: 6176; WAN0249CE_at; Start 475; Stop 499
aatagcttataacatttttagacgg

SEQ ID NO: 17449 - DNA, 25 bp, Artificial
  probe
  misc_feature (1)..(25): SEQ ID NO: 6176; WAN0249CE_at; Start 399; Stop 423
tagtaatctggacatcattaatccc

SEQ ID NO: 17450 - DNA, 25 bp, Artificial
  probe
  misc_feature (1)..(25): SEQ ID NO: 6176; WAN0249CE_at; Start 294; Stop 318
ttttattgataagtagggagtggct

SEQ ID NO: 17451 - DNA, 25 bp, Artificial
  probe
  misc_feature (1)..(25): SEQ ID NO: 6176; WAN0249CE_at; Start 387; Stop 411
tttgctggttagtagtaatctggac

SEQ ID NO: 17452 - DNA, 25 bp, Artificial
  probe
  misc_feature (1)..(25): SEQ ID NO: 6176; WAN0249CE_at; Start 422; Stop 446
ccttccttaacaaaattatgtgact

SEQ ID NO: 17453 - DNA, 25 bp, Artificial
  probe
  misc_feature (1)..(25): SEQ ID NO: 6176; WAN0249CE_at; Start 153; Stop 177
tttaaaaagcatcataaaggactcc

SEQ ID NO: 17454 - DNA, 25 bp, Artificial
  probe
  misc_feature (1)..(25): SEQ ID NO: 6176; WAN0249CE_at; Start 50; Stop 74
tcacagttgaatgtgaagggcaatc

SEQ ID NO: 17455 - DNA, 25 bp, Artificial
  probe
  misc_feature (1)..(25): SEQ ID NO: 6176; WAN0249CE_at; Start 535; Stop 559
tacctataatagatatgcttatgag

SEQ ID NO: 17456 - DNA, 25 bp, Artificial
  probe
  misc_feature (1)..(25): SEQ ID NO: 6176; WAN0249CE_at; Start 512; Stop 536
gaccgtctttcttaatattgtctta

SEQ ID NO: 17457 - DNA, 25 bp, Artificial
  probe
  misc_feature (1)..(25): SEQ ID NO: 6176; WAN0249CE_at; Start 235; Stop 259
agttaattgctttgaaatccatgga

SEQ ID NO: 17458 - DNA, 25 bp, Artificial
  probe
  misc_feature (1)..(25): SEQ ID NO: 6176; WAN0249CE_at; Start 354; Stop 378
catattagaaatatcatgttgacca

SEQ ID NO: 17459 - DNA, 25 bp, Artificial
  probe
  misc_feature (1)..(25): SEQ ID NO: 6176; WAN0249CE_at; Start 316; Stop 340
gctattattcaacttttaggttctg

SEQ ID NO: 17460 - DNA, 25 bp, Artificial
  probe
  misc_feature (1)..(25): SEQ ID NO: 6176; WAN0249CE_at; Start 161; Stop 185
gcatcataaaggactccaattaatt

SEQ ID NO: 17461 - DNA, 25 bp, Artificial
  probe
  misc_feature (1)..(25): SEQ ID NO: 6176; WAN0249CE_at; Start 85; Stop 109
gaatacaatcaagatatcattatgc

SEQ ID NO: 17462 - DNA, 25 bp, Artificial
  probe
  misc_feature (1)..(25): SEQ ID NO: 6176; WAN0249CE_at; Start 631; Stop 655
tattatacttttctcaggagaaagc

SEQ ID NO: 17463 - DNA, 25 bp, Artificial
  probe
  misc_feature (1)..(25): SEQ ID NO: 6176; WAN0249CE_at; Start 63; Stop 87
tgaagggcaatctgttttagaagaa

SEQ ID NO: 17464 - DNA, 25 bp, Artificial
  probe
  misc_feature (1)..(25): SEQ ID NO: 6176; WAN0249CE_at; Start 370; Stop 394
tgttgaccatttttcaatttgctgg

SEQ ID NO: 17465 - DNA, 25 bp, Artificial
  probe
  misc_feature (1)..(25): SEQ ID NO: 6176; WAN0249CE_at; Start 274; Stop 298
tctgttaatgcaacggataatttta

SEQ ID NO: 17466 - DNA, 25 bp, Artificial
  probe
  misc_feature (1)..(25): SEQ ID NO: 6176; WAN0249CE_at; Start 266; Stop 290
tatatacatctgttaatgcaacgga

SEQ ID NO: 17467 - DNA, 25 bp, Artificial
  probe
  misc_feature (1)..(25): SEQ ID NO: 6176; WAN0249CE_at; Start 332; Stop 356
taggttctgaaagtaagagattcat

SEQ ID NO: 17468 - DNA, 25 bp, Artificial
  probe
  misc_feature (1)..(25): SEQ ID NO: 6176; WAN0249CE_at; Start 1; Stop 25
tatagagaatttagagcgcctttgg

SEQ ID NO: 17469 - DNA, 25 bp, Artificial
  probe
  misc_feature (1)..(25): SEQ ID NO: 6176; WAN0249CE_at; Start 199; Stop 223
ctaatctaattttgtggttattgac

SEQ ID NO: 17470 - DNA, 25 bp, Artificial
  probe
  misc_feature (1)..(25): SEQ ID NO: 6176; WAN0249CE_at; Start 73; Stop 97
tctgttttagaagaatacaatcaag

SEQ ID NO: 17471 - DNA, 25 bp, Artificial
  probe
  misc_feature (1)..(25): SEQ ID NO: 6176; WAN0249CE_at; Start 443; Stop 467
gacttttgttactggattactgctg

SEQ ID NO: 17472 - DNA, 25 bp, Artificial
  probe
  misc_feature (1)..(25): SEQ ID NO: 6176; WAN0249CE_at; Start 579; Stop 603
tttagttcaaaatgtccagttagga

SEQ ID NO: 17473 - DNA, 25 bp, Artificial
  probe
  misc_feature (1)..(25): SEQ ID NO: 6176; WAN0249CE_at; Start 303; Stop 327
taagtagggagtggctattattcaa

SEQ ID NO: 17474 - DNA, 25 bp, Artificial
  probe
  misc_feature (1)..(25): SEQ ID NO: 6176; WAN0249CE_at; Start 408; Stop 432
ggacatcattaatcccttccttaac

SEQ ID NO: 17475 - DNA, 25 bp, Artificial
  probe
  misc_feature (1)..(25): SEQ ID NO: 6176; WAN0249CE_at; Start 253; Stop 277
ccatggattggtttatatacatctg

SEQ ID NO: 17476 - DNA, 25 bp, Artificial
  probe
  misc_feature (1)..(25): SEQ ID NO: 6176; WAN0249CE_at; Start 457; Stop 481
gattactgctgattttttaatagct

SEQ ID NO: 17477 - DNA, 25 bp, Artificial
  probe
  misc_feature (1)..(25): SEQ ID NO: 6176; WAN0249CE_at; Start 595; Stop 619
cagttaggacactttgaatgatttc

SEQ ID NO: 17478 - DNA, 25 bp, Artificial
  probe
  misc_feature (1)..(25): SEQ ID NO: 6176; WAN0249CE_at; Start 220; Stop 244
tgacaaataaagtctagttaattgc

SEQ ID NO: 17479 - DNA, 25 bp, Artificial
  probe
  misc_feature (1)..(25): SEQ ID NO: 6176; WAN0249CE_at; Start 101; Stop 125
tcattatgctattactttagttcag

SEQ ID NO: 17480 - DNA, 25 bp, Artificial
  probe
  misc_feature (1)..(25): SEQ ID NO: 6024; WAN0249CF_at; Start 163; Stop 187
tattttgggatagttggctcaacaa

SEQ ID NO: 17481 - DNA, 25 bp, Artificial
  probe
  misc_feature (1)..(25): SEQ ID NO: 6024; WAN0249CF_at; Start 139; Stop 163
tcgacactgtaattatgacagaagt

SEQ ID NO: 17482 - DNA, 25 bp, Artificial
  probe
  misc_feature (1)..(25): SEQ ID NO: 6024; WAN0249CF_at; Start 159; Stop 183
gaagtattttgggatagttggctca

SEQ ID NO: 17483 - DNA, 25 bp, Artificial
  probe
  misc_feature (1)..(25): SEQ ID NO: 6024; WAN0249CF_at; Start 23; Stop 47
taacttaagtttcatcgcatgtcag

SEQ ID NO: 17484 - DNA, 25 bp, Artificial
  probe
  misc_feature (1)..(25): SEQ ID NO: 6024; WAN0249CF_at; Start 95; Stop 119
caactgatctaatgattaatgtaag

SEQ ID NO: 17485 - DNA, 25 bp, Artificial
  probe
  misc_feature (1)..(25): SEQ ID NO: 6024; WAN0249CF_at; Start 301; Stop 325
gaactaagatgaggatcataatcat

SEQ ID NO: 17486 - DNA, 25 bp, Artificial
  probe
  misc_feature (1)..(25): SEQ ID NO: 6024; WAN0249CF_at; Start 200; Stop 224
tcaacttgtgaatttttaggattat

SEQ ID NO: 17487 - DNA, 25 bp, Artificial
  probe
  misc_feature (1)..(25): SEQ ID NO: 6024; WAN0249CF_at; Start 178; Stop 202
ggctcaacaaattgaaatcttttca

SEQ ID NO: 17488 - DNA, 25 bp, Artificial
  probe
  misc_feature (1)..(25): SEQ ID NO: 6024; WAN0249CF_at; Start 78; Stop 102
tgttagctcctaggtttcaactgat

SEQ ID NO: 17489 - DNA, 25 bp, Artificial
  probe
  misc_feature (1)..(25): SEQ ID NO: 6024; WAN0249CF_at; Start 63; Stop 87
ttagttagatattagtgttagctcc

SEQ ID NO: 17490 - DNA, 25 bp, Artificial
  probe
  misc_feature (1)..(25): SEQ ID NO: 6024; WAN0249CF_at; Start 148; Stop 172
taattatgacagaagtattttggga

SEQ ID NO: 17491 - DNA, 25 bp, Artificial
  probe
  misc_feature (1)..(25): SEQ ID NO: 6024; WAN0249CF_at; Start 2; Stop 26
gagaaactcttcattgccatataac

SEQ ID NO: 17492 - DNA, 25 bp, Artificial
  probe
  misc_feature (1)..(25): SEQ ID NO: 6024; WAN0249CF_at; Start 123; Stop 147
tcttaaagtatacatttcgacactg

SEQ ID NO: 17493 - DNA, 25 bp, Artificial
  probe
  misc_feature (1)..(25): SEQ ID NO: 6024; WAN0249CF_at; Start 218; Stop 242
ggattattttatttgactttatgag

SEQ ID NO: 17494 - DNA, 25 bp, Artificial
  probe
  misc_feature (1)..(25): SEQ ID NO: 6024; WAN0249CF_at; Start 47; Stop 71
gtaatctcataaggaattagttaga

SEQ ID NO: 17495 - DNA, 25 bp, Artificial
  probe
  misc_feature (1)..(25): SEQ ID NO: 6024; WAN0249CF_at; Start 39; Stop 63
gcatgtcagtaatctcataaggaat

SEQ ID NO: 17496 - DNA, 25 bp, Artificial
  probe
  misc_feature (1)..(25): SEQ ID NO: 6024; WAN0249CF_at; Start 12; Stop 36
tcattgccatataacttaagtttca

SEQ ID NO: 17497 - DNA, 25 bp, Artificial
  probe
  misc_feature (1)..(25): SEQ ID NO: 6024; WAN0249CF_at; Start 311; Stop 335
gaggatcataatcattttttgaaaa

SEQ ID NO: 17498 - DNA, 25 bp, Artificial
  probe
  misc_feature (1)..(25): SEQ ID NO: 6024; WAN0249CF_at; Start 170; Stop 194
ggatagttggctcaacaaattgaaa

SEQ ID NO: 17499 - DNA, 25 bp, Artificial
  probe
  misc_feature (1)..(25): SEQ ID NO: 6024; WAN0249CF_at; Start 264; Stop 288
tacaataacatattaaggttaaatc

SEQ ID NO: 17500 - DNA, 25 bp, Artificial
  probe
  misc_feature (1)..(25): SEQ ID NO: 6024; WAN0249CF_at; Start 68; Stop 92
tagatattagtgttagctcctaggt

SEQ ID NO: 17501 - DNA, 25 bp, Artificial
  probe
  misc_feature (1)..(25): SEQ ID NO: 6024; WAN0249CF_at; Start 83; Stop 107
gctcctaggtttcaactgatctaat

SEQ ID NO: 17502 - DNA, 25 bp, Artificial
  probe
  misc_feature (1)..(25): SEQ ID NO: 6024; WAN0249CF_at; Start 355; Stop 379
gaaaatattcataattaaggagtta

SEQ ID NO: 17503 - DNA, 25 bp, Artificial
  probe
  misc_feature (1)..(25): SEQ ID NO: 6024; WAN0249CF_at; Start 28; Stop 52
taagtttcatcgcatgtcagtaatc

SEQ ID NO: 17504 - DNA, 25 bp, Artificial
  probe
  misc_feature (1)..(25): SEQ ID NO: 6024; WAN0249CF_at; Start 86; Stop 110
cctaggtttcaactgatctaatgat

SEQ ID NO: 17505 - DNA, 25 bp, Artificial
  probe
  misc_feature (1)..(25): SEQ ID NO: 6024; WAN0249CF_at; Start 232; Stop 256
gactttatgagtattgtttacgttc

SEQ ID NO: 17506 - DNA, 25 bp, Artificial
  probe
  misc_feature (1)..(25): SEQ ID NO: 6024; WAN0249CF_at; Start 102; Stop 126
tctaatgattaatgtaagaattctt

SEQ ID NO: 17507 - DNA, 25 bp, Artificial
  probe
  misc_feature (1)..(25): SEQ ID NO: 6024; WAN0249CF_at; Start 119; Stop 143
gaattcttaaagtatacatttcgac

SEQ ID NO: 17508 - DNA, 25 bp, Artificial
  probe
  misc_feature (1)..(25): SEQ ID NO: 6024; WAN0249CF_at; Start 74; Stop 98
ttagtgttagctcctaggtttcaac

SEQ ID NO: 17509 - DNA, 25 bp, Artificial
  probe
  misc_feature (1)..(25): SEQ ID NO: 6024; WAN0249CF_at; Start 31; Stop 55
gtttcatcgcatgtcagtaatctca

SEQ ID NO: 17510 - DNA, 25 bp, Artificial
  probe
  misc_feature (1)..(25): SEQ ID NO: 6024; WAN0249CF_at; Start 250; Stop 274
tacgttcaatactttacaataacat

SEQ ID NO: 17511 - DNA, 25 bp, Artificial
  probe
  misc_feature (1)..(25): SEQ ID NO: 6024; WAN0249CF_at; Start 293; Stop 317
ttatgaatgaactaagatgaggatc

SEQ ID NO: 17512 - DNA, 25 bp, Artificial
  probe
  misc_feature (1)..(25): SEQ ID NO: 6024; WAN0249CF_at; Start 35; Stop 59
catcgcatgtcagtaatctcataag

SEQ ID NO: 17513 - DNA, 25 bp, Artificial
  probe
  misc_feature (1)..(25): SEQ ID NO: 6024; WAN0249CF_at; Start 135; Stop 159
catttcgacactgtaattatgacag

SEQ ID NO: 17514 - DNA, 25 bp, Artificial
  probe
  misc_feature (1)..(25): SEQ ID NO: 6157; WAN0249CG_at; Start 42; Stop 66
agctaattctattgattatgactaa

SEQ ID NO: 17515 - DNA, 25 bp, Artificial
  probe
  misc_feature (1)..(25): SEQ ID NO: 6157; WAN0249CG_at; Start 38; Stop 62
ctaaagctaattctattgattatga

SEQ ID NO: 17516 - DNA, 25 bp, Artificial
  probe
  misc_feature (1)..(25): SEQ ID NO: 6157; WAN0249CG_at; Start 52; Stop 76
attgattatgactaaattatgaata

SEQ ID NO: 17517 - DNA, 25 bp, Artificial
  probe
  misc_feature (1)..(25): SEQ ID NO: 6157; WAN0249CG_at; Start 35; Stop 59
tatctaaagctaattctattgatta

SEQ ID NO: 17518 - DNA, 25 bp, Artificial
  probe
  misc_feature (1)..(25): SEQ ID NO: 6157; WAN0249CG_at; Start 30; Stop 54
tagagtatctaaagctaattctatt

SEQ ID NO: 17519 - DNA, 25 bp, Artificial
  probe
  misc_feature (1)..(25): SEQ ID NO: 6157; WAN0249CG_at; Start 45; Stop 69
taattctattgattatgactaaatt

SEQ ID NO: 17520 - DNA, 25 bp, Artificial
  probe
  misc_feature (1)..(25): SEQ ID NO: 6157; WAN0249CG_at; Start 64; Stop 88
taaattatgaataaaataacgtaga

SEQ ID NO: 17521 - DNA, 25 bp, Artificial
  probe
  misc_feature (1)..(25): SEQ ID NO: 6157; WAN0249CG_at; Start 48; Stop 72
ttctattgattatgactaaattatg

SEQ ID NO: 17522 - DNA, 25 bp, Artificial
  probe
  misc_feature (1)..(25): SEQ ID NO: 6157; WAN0249CG_at; Start 27; Stop 51
ctttagagtatctaaagctaattct

SEQ ID NO: 17523 - DNA, 25 bp, Artificial
  probe
  misc_feature (1)..(25): SEQ ID NO: 6157; WAN0249CG_at; Start 50; Stop 74
ctattgattatgactaaattatgaa

SEQ ID NO: 17524 - DNA, 25 bp, Artificial
  probe
  misc_feature (1)..(25): SEQ ID NO: 6157; WAN0249CG_at; Start 34; Stop 58
gtatctaaagctaattctattgatt

SEQ ID NO: 17525 - DNA, 25 bp, Artificial
  probe
  misc_feature (1)..(25): SEQ ID NO: 6157; WAN0249CG_at; Start 67; Stop 91
attatgaataaaataacgtagaaag

SEQ ID NO: 17526 - DNA, 25 bp, Artificial
  probe
  misc_feature (1)..(25): SEQ ID NO: 6157; WAN0249CG_at; Start 41; Stop 65
aagctaattctattgattatgacta

SEQ ID NO: 17527 - DNA, 25 bp, Artificial
  probe
  misc_feature (1)..(25): SEQ ID NO: 6157; WAN0249CG_at; Start 11; Stop 35
aggtgtacacctaagtctttagagt

SEQ ID NO: 17528 - DNA, 25 bp, Artificial
  probe
  misc_feature (1)..(25): SEQ ID NO: 6157; WAN0249CG_at; Start 26; Stop 50
tctttagagtatctaaagctaattc

SEQ ID NO: 17529 - DNA, 25 bp, Artificial
  probe
  misc_feature (1)..(25): SEQ ID NO: 6157; WAN0249CG_at; Start 54; Stop 78
tgattatgactaaattatgaataaa

SEQ ID NO: 17530 - DNA, 25 bp, Artificial
  probe
  misc_feature (1)..(25): SEQ ID NO: 6157; WAN0249CG_at; Start 40; Stop 64
aaagctaattctattgattatgact

SEQ ID NO: 17531 - DNA, 25 bp, Artificial
  probe
  misc_feature (1)..(25): SEQ ID NO: 6157; WAN0249CG_at; Start 44; Stop 68
ctaattctattgattatgactaaat

SEQ ID NO: 17532 - DNA, 25 bp, Artificial
  probe
  misc_feature (1)..(25): SEQ ID NO: 6157; WAN0249CG_at; Start 49; Stop 73
tctattgattatgactaaattatga

SEQ ID NO: 17533 - DNA, 25 bp, Artificial
  probe
  misc_feature (1)..(25): SEQ ID NO: 6157; WAN0249CG_at; Start 28; Stop 52
tttagagtatctaaagctaattcta

SEQ ID NO: 17534 - DNA, 25 bp, Artificial
  probe
  misc_feature (1)..(25): SEQ ID NO: 6157; WAN0249CG_at; Start 60; Stop 84
tgactaaattatgaataaaataacg

SEQ ID NO: 17535 - DNA, 25 bp, Artificial
  probe
  misc_feature (1)..(25): SEQ ID NO: 6157; WAN0249CG_at; Start 31; Stop 55
agagtatctaaagctaattctattg

SEQ ID NO: 17536 - DNA, 25 bp, Artificial
  probe
  misc_feature (1)..(25): SEQ ID NO: 6157; WAN0249CG_at; Start 55; Stop 79
gattatgactaaattatgaataaaa

SEQ ID NO: 17537 - DNA, 25 bp, Artificial
  probe
  misc_feature (1)..(25): SEQ ID NO: 6157; WAN0249CG_at; Start 23; Stop 47
aagtctttagagtatctaaagctaa

SEQ ID NO: 17538 - DNA, 25 bp, Artificial
  probe
  misc_feature (1)..(25): SEQ ID NO: 6157; WAN0249CG_at; Start 43; Stop 67
gctaattctattgattatgactaaa

SEQ ID NO: 17539 - DNA, 25 bp, Artificial
  probe
  misc_feature (1)..(25): SEQ ID NO: 6157; WAN0249CG_at; Start 25; Stop 49
gtctttagagtatctaaagctaatt

SEQ ID NO: 17540 - DNA, 25 bp, Artificial
  probe
  misc_feature (1)..(25): SEQ ID NO: 6157; WAN0249CG_at; Start 51; Stop 75
tattgattatgactaaattatgaat

SEQ ID NO: 17541 - DNA, 25 bp, Artificial
  probe
  misc_feature (1)..(25): SEQ ID NO: 6157; WAN0249CG_at; Start 33; Stop 57
agtatctaaagctaattctattgat

SEQ ID NO: 17542 - DNA, 25 bp, Artificial
  probe
  misc_feature (1)..(25): SEQ ID NO: 6157; WAN0249CG_at; Start 39; Stop 63
taaagctaattctattgattatgac

SEQ ID NO: 17543 - DNA, 25 bp, Artificial
  probe
  misc_feature (1)..(25): SEQ ID NO: 6157; WAN0249CG_at; Start 29; Stop 53
ttagagtatctaaagctaattctat

SEQ ID NO: 17544 - DNA, 25 bp, Artificial
  probe
  misc_feature (1)..(25): SEQ ID NO: 6157; WAN0249CG_at; Start 24; Stop 48
agtctttagagtatctaaagctaat

SEQ ID NO: 17545 - DNA, 25 bp, Artificial
  probe
  misc_feature (1)..(25): SEQ ID NO: 6157; WAN0249CG_at; Start 32; Stop 56
gagtatctaaagctaattctattga

SEQ ID NO: 17546 - DNA, 25 bp, Artificial
  probe
  misc_feature (1)..(25): SEQ ID NO: 6157; WAN0249CG_at; Start 12; Stop 36
ggtgtacacctaagtctttagagta

SEQ ID NO: 17547 - DNA, 25 bp, Artificial
  probe
  misc_feature (1)..(25): SEQ ID NO: 6157; WAN0249CG_at; Start 37; Stop 61
tctaaagctaattctattgattatg

SEQ ID NO: 17548 - DNA, 25 bp, Artificial
  probe
  misc_feature (1)..(25): SEQ ID NO: 6141; WAN0249CH_at; Start 7; Stop 31
gaagatgtaaataaatcacagtcaa

SEQ ID NO: 17549 - DNA, 25 bp, Artificial
  probe
  misc_feature (1)..(25): SEQ ID NO: 6141; WAN0249CH_at; Start 9; Stop 33
agatgtaaataaatcacagtcaaaa

SEQ ID NO: 17550 - DNA, 25 bp, Artificial
  probe
  misc_feature (1)..(25): SEQ ID NO: 6141; WAN0249CH_at; Start 1; Stop 25
gtagaagaagatgtaaataaatcac

SEQ ID NO: 17551 - DNA, 25 bp, Artificial
  probe
  misc_feature (1)..(25): SEQ ID NO: 6141; WAN0249CH_at; Start 14; Stop 38
taaataaatcacagtcaaaaagccg

SEQ ID NO: 17552 - DNA, 25 bp, Artificial
  probe
  misc_feature (1)..(25): SEQ ID NO: 6141; WAN0249CH_at; Start 5; Stop 29
aagaagatgtaaataaatcacagtc

SEQ ID NO: 17553 - DNA, 25 bp, Artificial
  probe
  misc_feature (1)..(25): SEQ ID NO: 6141; WAN0249CH_at; Start 12; Stop 36
tgtaaataaatcacagtcaaaaagc

SEQ ID NO: 17554 - DNA, 25 bp, Artificial
  probe
  misc_feature (1)..(25): SEQ ID NO: 6141; WAN0249CH_at; Start 2; Stop 26
tagaagaagatgtaaataaatcaca

SEQ ID NO: 17555 - DNA, 25 bp, Artificial
  probe
  misc_feature (1)..(25): SEQ ID NO: 6141; WAN0249CH_at; Start 8; Stop 32
aagatgtaaataaatcacagtcaaa

SEQ ID NO: 17556 - DNA, 25 bp, Artificial
  probe
  misc_feature (1)..(25): SEQ ID NO: 6141; WAN0249CH_at; Start 10; Stop 34
gatgtaaataaatcacagtcaaaaa

SEQ ID NO: 17557 - DNA, 25 bp, Artificial
  probe
  misc_feature (1)..(25): SEQ ID NO: 6141; WAN0249CH_at; Start 15; Stop 39
aaataaatcacagtcaaaaagccgt

SEQ ID NO: 17558 - DNA, 25 bp, Artificial
  probe
  misc_feature (1)..(25): SEQ ID NO: 6141; WAN0249CH_at; Start 6; Stop 30
agaagatgtaaataaatcacagtca

SEQ ID NO: 17559 - DNA, 25 bp, Artificial
  probe
  misc_feature (1)..(25): SEQ ID NO: 6141; WAN0249CH_at; Start 11; Stop 35
atgtaaataaatcacagtcaaaaag

SEQ ID NO: 17560 - DNA, 25 bp, Artificial
  probe
  misc_feature (1)..(25): SEQ ID NO: 6141; WAN0249CH_at; Start 13; Stop 37
gtaaataaatcacagtcaaaaagcc

SEQ ID NO: 17561 - DNA, 25 bp, Artificial
  probe
  misc_feature (1)..(25): SEQ ID NO: 6141; WAN0249CH_at; Start 16; Stop 40
aataaatcacagtcaaaaagccgtt

SEQ ID NO: 17562 - DNA, 25 bp, Artificial
  probe
  misc_feature (1)..(25): SEQ ID NO: 6141; WAN0249CH_at; Start 17; Stop 41
ataaatcacagtcaaaaagccgttt

SEQ ID NO: 17563 - DNA, 25 bp, Artificial
  probe
  misc_feature (1)..(25): SEQ ID NO: 6141; WAN0249CH_at; Start 4; Stop 28
gaagaagatgtaaataaatcacagt

SEQ ID NO: 17564 - DNA, 25 bp, Artificial
  probe
  misc_feature (1)..(25): SEQ ID NO: 6141; WAN0249CH_at; Start 3; Stop 27
agaagaagatgtaaataaatcacag

SEQ ID NO: 17565 - DNA, 25 bp, Artificial
  probe
  misc_feature (1)..(25): SEQ ID NO: 6156; WAN0249CI_at; Start 55; Stop 79
ctatcattgtaaggaggaaatcatg

SEQ ID NO: 17566 - DNA, 25 bp, Artificial
  probe
  misc_feature (1)..(25): SEQ ID NO: 6156; WAN0249CI_at; Start 65; Stop 89
aaggaggaaatcatgtaccatataa

SEQ ID NO: 17567 - DNA, 25 bp, Artificial
  probe
  misc_feature (1)..(25): SEQ ID NO: 6156; WAN0249CI_at; Start 43; Stop 67
ggaggggttatactatcattgtaag

SEQ ID NO: 17568 - DNA, 25 bp, Artificial
  probe
  misc_feature (1)..(25): SEQ ID NO: 6156; WAN0249CI_at; Start 63; Stop 87
gtaaggaggaaatcatgtaccatat

SEQ ID NO: 17569 - DNA, 25 bp, Artificial
  probe
  misc_feature (1)..(25): SEQ ID NO: 6156; WAN0249CI_at; Start 59; Stop 83
cattgtaaggaggaaatcatgtacc

SEQ ID NO: 17570 - DNA, 25 bp, Artificial
  probe
  misc_feature (1)..(25): SEQ ID NO: 6156; WAN0249CI_at; Start 41; Stop 65
ggggaggggttatactatcattgta

SEQ ID NO: 17571 - DNA, 25 bp, Artificial
  probe
  misc_feature (1)..(25): SEQ ID NO: 6156; WAN0249CI_at; Start 23; Stop 47
cgcttgactctgacctaaggggagg

SEQ ID NO: 17572 - DNA, 25 bp, Artificial
  probe
  misc_feature (1)..(25): SEQ ID NO: 6156; WAN0249CI_at; Start 49; Stop 73
gttatactatcattgtaaggaggaa

SEQ ID NO: 17573 - DNA, 25 bp, Artificial
  probe
  misc_feature (1)..(25): SEQ ID NO: 6156; WAN0249CI_at; Start 61; Stop 85
ttgtaaggaggaaatcatgtaccat

SEQ ID NO: 17574 - DNA, 25 bp, Artificial
  probe
  misc_feature (1)..(25): SEQ ID NO: 6156; WAN0249CI_at; Start 37; Stop 61
ctaaggggaggggttatactatcat

SEQ ID NO: 17575 - DNA, 25 bp, Artificial
  probe
  misc_feature (1)..(25): SEQ ID NO: 6156; WAN0249CI_at; Start 24; Stop 48
gcttgactctgacctaaggggaggg

SEQ ID NO: 17576 - DNA, 25 bp, Artificial
  probe
  misc_feature (1)..(25): SEQ ID NO: 6156; WAN0249CI_at; Start 50; Stop 74
ttatactatcattgtaaggaggaaa

SEQ ID NO: 17577 - DNA, 25 bp, Artificial
  probe
  misc_feature (1)..(25): SEQ ID NO: 6156; WAN0249CI_at; Start 25; Stop 49
cttgactctgacctaaggggagggg

SEQ ID NO: 17578 - DNA, 25 bp, Artificial
  probe
  misc_feature (1)..(25): SEQ ID NO: 6156; WAN0249CI_at; Start 58; Stop 82
tcattgtaaggaggaaatcatgtac

SEQ ID NO: 17579 - DNA, 25 bp, Artificial
  probe
  misc_feature (1)..(25): SEQ ID NO: 6156; WAN0249CI_at; Start 42; Stop 66
gggaggggttatactatcattgtaa

SEQ ID NO: 17580 - DNA, 25 bp, Artificial
  probe
  misc_feature (1)..(25): SEQ ID NO: 6156; WAN0249CI_at; Start 39; Stop 63
aaggggaggggttatactatcattg

SEQ ID NO: 17581 - DNA, 25 bp, Artificial
  probe
  misc_feature (1)..(25): SEQ ID NO: 6156; WAN0249CI_at; Start 56; Stop 80
tatcattgtaaggaggaaatcatgt

SEQ ID NO: 17582 - DNA, 25 bp, Artificial
  probe
  misc_feature (1)..(25): SEQ ID NO: 6156; WAN0249CI_at; Start 52; Stop 76
atactatcattgtaaggaggaaatc

SEQ ID NO: 17583 - DNA, 25 bp, Artificial
  probe
  misc_feature (1)..(25): SEQ ID NO: 6156; WAN0249CI_at; Start 51; Stop 75
tatactatcattgtaaggaggaaat

SEQ ID NO: 17584 - DNA, 25 bp, Artificial
  probe
  misc_feature (1)..(25): SEQ ID NO: 6156; WAN0249CI_at; Start 67; Stop 91
ggaggaaatcatgtaccatataaaa

SEQ ID NO: 17585 - DNA, 25 bp, Artificial
  probe
  misc_feature (1)..(25): SEQ ID NO: 6156; WAN0249CI_at; Start 60; Stop 84
attgtaaggaggaaatcatgtacca

SEQ ID NO: 17586 - DNA, 25 bp, Artificial
  probe
  misc_feature (1)..(25): SEQ ID NO: 6156; WAN0249CI_at; Start 57; Stop 81
atcattgtaaggaggaaatcatgta

SEQ ID NO: 17587 - DNA, 25 bp, Artificial
  probe
  misc_feature (1)..(25): SEQ ID NO: 6156; WAN0249CI_at; Start 54; Stop 78
actatcattgtaaggaggaaatcat

SEQ ID NO: 17588 - DNA, 25 bp, Artificial
  probe
  misc_feature (1)..(25): SEQ ID NO: 6156; WAN0249CI_at; Start 45; Stop 69
aggggttatactatcattgtaagga

SEQ ID NO: 17589 - DNA, 25 bp, Artificial
  probe
  misc_feature (1)..(25): SEQ ID NO: 6156; WAN0249CI_at; Start 53; Stop 77
tactatcattgtaaggaggaaatca

SEQ ID NO: 17590 - DNA, 25 bp, Artificial
  probe
  misc_feature (1)..(25): SEQ ID NO: 6156; WAN0249CI_at; Start 46; Stop 70
ggggttatactatcattgtaaggag

SEQ ID NO: 17591 - DNA, 25 bp, Artificial
  probe
  misc_feature (1)..(25): SEQ ID NO: 6156; WAN0249CI_at; Start 62; Stop 86
tgtaaggaggaaatcatgtaccata

SEQ ID NO: 17592 - DNA, 25 bp, Artificial
  probe
  misc_feature (1)..(25): SEQ ID NO: 6156; WAN0249CI_at; Start 47; Stop 71
gggttatactatcattgtaaggagg

SEQ ID NO: 17593 - DNA, 25 bp, Artificial
  probe
  misc_feature (1)..(25): SEQ ID NO: 6156; WAN0249CI_at; Start 64; Stop 88
taaggaggaaatcatgtaccatata

SEQ ID NO: 17594 - DNA, 25 bp, Artificial
  probe
  misc_feature (1)..(25): SEQ ID NO: 6156; WAN0249CI_at; Start 44; Stop 68
gaggggttatactatcattgtaagg

SEQ ID NO: 17595 - DNA, 25 bp, Artificial
  probe
  misc_feature (1)..(25): SEQ ID NO: 6156; WAN0249CI_at; Start 40; Stop 64
aggggaggggttatactatcattgt

SEQ ID NO: 17596 - DNA, 25 bp, Artificial
  probe
  misc_feature (1)..(25): SEQ ID NO: 6156; WAN0249CI_at; Start 66; Stop 90
aggaggaaatcatgtaccatataaa

SEQ ID NO: 17597 - DNA, 25 bp, Artificial
  probe
  misc_feature (1)..(25): SEQ ID NO: 6156; WAN0249CI_at; Start 48; Stop 72
ggttatactatcattgtaaggagga

SEQ ID NO: 17598 - DNA, 25 bp, Artificial
  probe
  misc_feature (1)..(25): SEQ ID NO: 6217; WAN0249CJ_at; Start 31; Stop 55
gtccatcgagctttctaatactctt

SEQ ID NO: 17599 - DNA, 25 bp, Artificial
  probe
  misc_feature (1)..(25): SEQ ID NO: 6217; WAN0249CJ_at; Start 7; Stop 31
atctagtggaatgaatctggaatag

SEQ ID NO: 17600 - DNA, 25 bp, Artificial
  probe
  misc_feature (1)..(25): SEQ ID NO: 6217; WAN0249CJ_at; Start 24; Stop 48
tggaatagtccatcgagctttctaa

SEQ ID NO: 17601 - DNA, 25 bp, Artificial
  probe
  misc_feature (1)..(25): SEQ ID NO: 6217; WAN0249CJ_at; Start 26; Stop 50
gaatagtccatcgagctttctaata

SEQ ID NO: 17602 - DNA, 25 bp, Artificial
  probe
  misc_feature (1)..(25): SEQ ID NO: 6217; WAN0249CJ_at; Start 29; Stop 53
tagtccatcgagctttctaatactc

SEQ ID NO: 17603 - DNA, 25 bp, Artificial
  probe
  misc_feature (1)..(25): SEQ ID NO: 6217; WAN0249CJ_at; Start 5; Stop 29
aaatctagtggaatgaatctggaat

SEQ ID NO: 17604 - DNA, 25 bp, Artificial
  probe
  misc_feature (1)..(25): SEQ ID NO: 6217; WAN0249CJ_at; Start 8; Stop 32
tctagtggaatgaatctggaatagt

SEQ ID NO: 17605 - DNA, 25 bp, Artificial
  probe
  misc_feature (1)..(25): SEQ ID NO: 6217; WAN0249CJ_at; Start 27; Stop 51
aatagtccatcgagctttctaatac

SEQ ID NO: 17606 - DNA, 25 bp, Artificial
  probe
  misc_feature (1)..(25): SEQ ID NO: 6217; WAN0249CJ_at; Start 30; Stop 54
agtccatcgagctttctaatactct

SEQ ID NO: 17607 - DNA, 25 bp, Artificial
  probe
  misc_feature (1)..(25): SEQ ID NO: 6217; WAN0249CJ_at; Start 20; Stop 44
aatctggaatagtccatcgagcttt

SEQ ID NO: 17608 - DNA, 25 bp, Artificial
  probe
  misc_feature (1)..(25): SEQ ID NO: 6217; WAN0249CJ_at; Start 23; Stop 47
ctggaatagtccatcgagctttcta

SEQ ID NO: 17609 - DNA, 25 bp, Artificial
  probe
  misc_feature (1)..(25): SEQ ID NO: 6217; WAN0249CJ_at; Start 21; Stop 45
atctggaatagtccatcgagctttc

SEQ ID NO: 17610 - DNA, 25 bp, Artificial
  probe
  misc_feature (1)..(25): SEQ ID NO: 6217; WAN0249CJ_at; Start 3; Stop 27
cgaaatctagtggaatgaatctgga

SEQ ID NO: 17611 - DNA, 25 bp, Artificial
  probe
  misc_feature (1)..(25): SEQ ID NO: 6217; WAN0249CJ_at; Start 25; Stop 49
ggaatagtccatcgagctttctaat

SEQ ID NO: 17612 - DNA, 25 bp, Artificial
  probe
  misc_feature (1)..(25): SEQ ID NO: 6217; WAN0249CJ_at; Start 4; Stop 28
gaaatctagtggaatgaatctggaa

SEQ ID NO: 17613 - DNA, 25 bp, Artificial
  probe
  misc_feature (1)..(25): SEQ ID NO: 6217; WAN0249CJ_at; Start 22; Stop 46
tctggaatagtccatcgagctttct

SEQ ID NO: 17614 - DNA, 25 bp, Artificial
  probe
  misc_feature (1)..(25): SEQ ID NO: 6217; WAN0249CJ_at; Start 2; Stop 26
tcgaaatctagtggaatgaatctgg

SEQ ID NO: 17615 - DNA, 25 bp, Artificial
  probe
  misc_feature (1)..(25): SEQ ID NO: 6217; WAN0249CJ_at; Start 1; Stop 25
ttcgaaatctagtggaatgaatctg

SEQ ID NO: 17616 - DNA, 25 bp, Artificial
  probe
  misc_feature (1)..(25): SEQ ID NO: 6217; WAN0249CJ_at; Start 6; Stop 30
aatctagtggaatgaatctggaata

SEQ ID NO: 17617 - DNA, 25 bp, Artificial
  probe
  misc_feature (1)..(25): SEQ ID NO: 6217; WAN0249CJ_at; Start 28; Stop 52
atagtccatcgagctttctaatact

SEQ ID NO: 17618 - DNA, 25 bp, Artificial
  probe
  misc_feature (1)..(25): SEQ ID NO: 6115; WAN0249CK_at; Start 25; Stop 49
ttataacacgattctacagtgaaag

SEQ ID NO: 17619 - DNA, 25 bp, Artificial
  probe
  misc_feature (1)..(25): SEQ ID NO: 6115; WAN0249CK_at; Start 14; Stop 38
tgttttagattttataacacgattc

SEQ ID NO: 17620 - DNA, 25 bp, Artificial
  probe
  misc_feature (1)..(25): SEQ ID NO: 6115; WAN0249CK_at; Start 27; Stop 51
ataacacgattctacagtgaaagaa

SEQ ID NO: 17621 - DNA, 25 bp, Artificial
  probe
  misc_feature (1)..(25): SEQ ID NO: 6115; WAN0249CK_at; Start 1; Stop 25
gagagatctcctttgttttagattt

SEQ ID NO: 17622 - DNA, 25 bp, Artificial
  probe
  misc_feature (1)..(25): SEQ ID NO: 6115; WAN0249CK_at; Start 35; Stop 59
attctacagtgaaagaatgttcttg

SEQ ID NO: 17623 - DNA, 25 bp, Artificial
  probe
  misc_feature (1)..(25): SEQ ID NO: 6115; WAN0249CK_at; Start 3; Stop 27
gagatctcctttgttttagatttta

SEQ ID NO: 17624 - DNA, 25 bp, Artificial
  probe
  misc_feature (1)..(25): SEQ ID NO: 6115; WAN0249CK_at; Start 33; Stop 57
cgattctacagtgaaagaatgttct

SEQ ID NO: 17625 - DNA, 25 bp, Artificial
  probe
  misc_feature (1)..(25): SEQ ID NO: 6115; WAN0249CK_at; Start 31; Stop 55
cacgattctacagtgaaagaatgtt

SEQ ID NO: 17626 - DNA, 25 bp, Artificial
  probe
  misc_feature (1)..(25): SEQ ID NO: 6115; WAN0249CK_at; Start 19; Stop 43
tagattttataacacgattctacag

SEQ ID NO: 17627 - DNA, 25 bp, Artificial
  probe
  misc_feature (1)..(25): SEQ ID NO: 6115; WAN0249CK_at; Start 24; Stop 48
tttataacacgattctacagtgaaa

SEQ ID NO: 17628 - DNA, 25 bp, Artificial
  probe
  misc_feature (1)..(25): SEQ ID NO: 6115; WAN0249CK_at; Start 29; Stop 53
aacacgattctacagtgaaagaatg

SEQ ID NO: 17629 - DNA, 25 bp, Artificial
  probe
  misc_feature (1)..(25): SEQ ID NO: 6115; WAN0249CK_at; Start 23; Stop 47
ttttataacacgattctacagtgaa

SEQ ID NO: 17630 - DNA, 25 bp, Artificial
  probe
  misc_feature (1)..(25): SEQ ID NO: 6115; WAN0249CK_at; Start 34; Stop 58
gattctacagtgaaagaatgttctt

SEQ ID NO: 17631 - DNA, 25 bp, Artificial
  probe
  misc_feature (1)..(25): SEQ ID NO: 6115; WAN0249CK_at; Start 16; Stop 40
ttttagattttataacacgattcta

SEQ ID NO: 17632 - DNA, 25 bp, Artificial
  probe
  misc_feature (1)..(25): SEQ ID NO: 6115; WAN0249CK_at; Start 4; Stop 28
agatctcctttgttttagattttat

SEQ ID NO: 17633 - DNA, 25 bp, Artificial
  probe
  misc_feature (1)..(25): SEQ ID NO: 6115; WAN0249CK_at; Start 2; Stop 26
agagatctcctttgttttagatttt

SEQ ID NO: 17634 - DNA, 25 bp, Artificial
  probe
  misc_feature (1)..(25): SEQ ID NO: 6115; WAN0249CK_at; Start 26; Stop 50
tataacacgattctacagtgaaaga

SEQ ID NO: 17635 - DNA, 25 bp, Artificial
  probe
  misc_feature (1)..(25): SEQ ID NO: 6115; WAN0249CK_at; Start 32; Stop 56
acgattctacagtgaaagaatgttc

SEQ ID NO: 17636 - DNA, 25 bp, Artificial
  probe
  misc_feature (1)..(25): SEQ ID NO: 6115; WAN0249CK_at; Start 5; Stop 29
gatctcctttgttttagattttata

SEQ ID NO: 17637 - DNA, 25 bp, Artificial
  probe
  misc_feature (1)..(25): SEQ ID NO: 6115; WAN0249CK_at; Start 17; Stop 41
tttagattttataacacgattctac

SEQ ID NO: 17638 - DNA, 25 bp, Artificial
  probe
  misc_feature (1)..(25): SEQ ID NO: 6115; WAN0249CK_at; Start 28; Stop 52
taacacgattctacagtgaaagaat

SEQ ID NO: 17639 - DNA, 25 bp, Artificial
  probe
  misc_feature (1)..(25): SEQ ID NO: 6115; WAN0249CK_at; Start 20; Stop 44
agattttataacacgattctacagt

SEQ ID NO: 17640 - DNA, 25 bp, Artificial
  probe
  misc_feature (1)..(25): SEQ ID NO: 6115; WAN0249CK_at; Start 30; Stop 54
acacgattctacagtgaaagaatgt

SEQ ID NO: 17641 - DNA, 25 bp, Artificial
  probe
  misc_feature (1)..(25): SEQ ID NO: 6115; WAN0249CK_at; Start 21; Stop 45
gattttataacacgattctacagtg

SEQ ID NO: 17642 - DNA, 25 bp, Artificial
  probe
  misc_feature (1)..(25): SEQ ID NO: 6115; WAN0249CK_at; Start 22; Stop 46
attttataacacgattctacagtga

SEQ ID NO: 17643 - DNA, 25 bp, Artificial
  probe
  misc_feature (1)..(25): SEQ ID NO: 6144; WAN0249CL_at; Start 26; Stop 50
gacaaaaaccattatcctagttcat

SEQ ID NO: 17644 - DNA, 25 bp, Artificial
  probe
  misc_feature (1)..(25): SEQ ID NO: 6144; WAN0249CL_at; Start 41; Stop 65
cctagttcataatagacaactctta

SEQ ID NO: 17645 - DNA, 25 bp, Artificial
  probe
  misc_feature (1)..(25): SEQ ID NO: 6144; WAN0249CL_at; Start 14; Stop 38
ctctgaacgtaagacaaaaaccatt

SEQ ID NO: 17646 - DNA, 25 bp, Artificial
  probe
  misc_feature (1)..(25): SEQ ID NO: 6144; WAN0249CL_at; Start 60; Stop 84
ctcttagaccaatgactggatcgtt

SEQ ID NO: 17647 - DNA, 25 bp, Artificial
  probe
  misc_feature (1)..(25): SEQ ID NO: 6144; WAN0249CL_at; Start 45; Stop 69
gttcataatagacaactcttagacc

SEQ ID NO: 17648 - DNA, 25 bp, Artificial
  probe
  misc_feature (1)..(25): SEQ ID NO: 6144; WAN0249CL_at; Start 25; Stop 49
agacaaaaaccattatcctagttca

SEQ ID NO: 17649 - DNA, 25 bp, Artificial
  probe
  misc_feature (1)..(25): SEQ ID NO: 6144; WAN0249CL_at; Start 63; Stop 87
ttagaccaatgactggatcgtttaa

SEQ ID NO: 17650 - DNA, 25 bp, Artificial
  probe
  misc_feature (1)..(25): SEQ ID NO: 6144; WAN0249CL_at; Start 38; Stop 62
tatcctagttcataatagacaactc

SEQ ID NO: 17651 - DNA, 25 bp, Artificial
  probe
  misc_feature (1)..(25): SEQ ID NO: 6144; WAN0249CL_at; Start 39; Stop 63
atcctagttcataatagacaactct

SEQ ID NO: 17652 - DNA, 25 bp, Artificial
  probe
  misc_feature (1)..(25): SEQ ID NO: 6144; WAN0249CL_at; Start 62; Stop 86
cttagaccaatgactggatcgttta

SEQ ID NO: 17653 - DNA, 25 bp, Artificial
  probe
  misc_feature (1)..(25): SEQ ID NO: 6144; WAN0249CL_at; Start 17; Stop 41
tgaacgtaagacaaaaaccattatc

SEQ ID NO: 17654 - DNA, 25 bp, Artificial
  probe
  misc_feature (1)..(25): SEQ ID NO: 6144; WAN0249CL_at; Start 43; Stop 67
tagttcataatagacaactcttaga

SEQ ID NO: 17655 - DNA, 25 bp, Artificial
  probe
  misc_feature (1)..(25): SEQ ID NO: 6144; WAN0249CL_at; Start 35; Stop 59
cattatcctagttcataatagacaa

SEQ ID NO: 17656 - DNA, 25 bp, Artificial
  probe
  misc_feature (1)..(25): SEQ ID NO: 6144; WAN0249CL_at; Start 32; Stop 56
aaccattatcctagttcataataga

SEQ ID NO: 17657 - DNA, 25 bp, Artificial
  probe
  misc_feature (1)..(25): SEQ ID NO: 6144; WAN0249CL_at; Start 42; Stop 66
ctagttcataatagacaactcttag

SEQ ID NO: 17658 - DNA, 25 bp, Artificial
  probe
  misc_feature (1)..(25): SEQ ID NO: 6144; WAN0249CL_at; Start 12; Stop 36
atctctgaacgtaagacaaaaacca

SEQ ID NO: 17659 - DNA, 25 bp, Artificial
  probe
  misc_feature (1)..(25): SEQ ID NO: 6144; WAN0249CL_at; Start 46; Stop 70
ttcataatagacaactcttagacca

SEQ ID NO: 17660 - DNA, 25 bp, Artificial
  probe
  misc_feature (1)..(25): SEQ ID NO: 6144; WAN0249CL_at; Start 61; Stop 85
tcttagaccaatgactggatcgttt

SEQ ID NO: 17661 - DNA, 25 bp, Artificial
  probe
  misc_feature (1)..(25): SEQ ID NO: 6144; WAN0249CL_at; Start 13; Stop 37
tctctgaacgtaagacaaaaaccat

SEQ ID NO: 17662 - DNA, 25 bp, Artificial
  probe
  misc_feature (1)..(25): SEQ ID NO: 6144; WAN0249CL_at; Start 44; Stop 68
agttcataatagacaactcttagac

SEQ ID NO: 17663 - DNA, 25 bp, Artificial
  probe
  misc_feature (1)..(25): SEQ ID NO: 6144; WAN0249CL_at; Start 27; Stop 51
acaaaaaccattatcctagttcata

SEQ ID NO: 17664 - DNA, 25 bp, Artificial
  probe
  misc_feature (1)..(25): SEQ ID NO: 6144; WAN0249CL_at; Start 15; Stop 39
tctgaacgtaagacaaaaaccatta

SEQ ID NO: 17665 - DNA, 25 bp, Artificial
  probe
  misc_feature (1)..(25): SEQ ID NO: 6144; WAN0249CL_at; Start 31; Stop 55
aaaccattatcctagttcataatag

SEQ ID NO: 17666 - DNA, 25 bp, Artificial
  probe
  misc_feature (1)..(25): SEQ ID NO: 6144; WAN0249CL_at; Start 64; Stop 88
tagaccaatgactggatcgtttaaa

SEQ ID NO: 17667 - DNA, 25 bp, Artificial
  probe
  misc_feature (1)..(25): SEQ ID NO: 6144; WAN0249CL_at; Start 28; Stop 52
caaaaaccattatcctagttcataa

SEQ ID NO: 17668 - DNA, 25 bp, Artificial
  probe
  misc_feature (1)..(25): SEQ ID NO: 6144; WAN0249CL_at; Start 47; Stop 71
tcataatagacaactcttagaccaa

SEQ ID NO: 17669 - DNA, 25 bp, Artificial
  probe
  misc_feature (1)..(25): SEQ ID NO: 6144; WAN0249CL_at; Start 65; Stop 89
agaccaatgactggatcgtttaaag

SEQ ID NO: 17670 - DNA, 25 bp, Artificial
  probe
  misc_feature (1)..(25): SEQ ID NO: 6144; WAN0249CL_at; Start 59; Stop 83
actcttagaccaatgactggatcgt

SEQ ID NO: 17671 - DNA, 25 bp, Artificial
  probe
  misc_feature (1)..(25): SEQ ID NO: 6144; WAN0249CL_at; Start 21; Stop 45
cgtaagacaaaaaccattatcctag

SEQ ID NO: 17672 - DNA, 25 bp, Artificial
  probe
  misc_feature (1)..(25): SEQ ID NO: 6144; WAN0249CL_at; Start 40; Stop 64
tcctagttcataatagacaactctt

SEQ ID NO: 17673 - DNA, 25 bp, Artificial
  probe
  misc_feature (1)..(25): SEQ ID NO: 6144; WAN0249CL_at; Start 37; Stop 61
ttatcctagttcataatagacaact

SEQ ID NO: 17674 - DNA, 25 bp, Artificial
  probe
  misc_feature (1)..(25): SEQ ID NO: 6144; WAN0249CL_at; Start 34; Stop 58
ccattatcctagttcataatagaca

SEQ ID NO: 17675 - DNA, 25 bp, Artificial
  probe
  misc_feature (1)..(25): SEQ ID NO: 6144; WAN0249CL_at; Start 16; Stop 40
ctgaacgtaagacaaaaaccattat

SEQ ID NO: 17676 - DNA, 25 bp, Artificial
  probe
  misc_feature (1)..(25): SEQ ID NO: 6144; WAN0249CL_at; Start 33; Stop 57
accattatcctagttcataatagac

SEQ ID NO: 17677 - DNA, 25 bp, Artificial
  probe
  misc_feature (1)..(25): SEQ ID NO: 6163; WAN0249CM_at; Start 124; Stop 148
gccagtttccaaccaatttcgtgat

SEQ ID NO: 17678 - DNA, 25 bp, Artificial
  probe
  misc_feature (1)..(25): SEQ ID NO: 6163; WAN0249CM_at; Start 142; Stop 166
tcgtgatttactggtaatgaagaaa

SEQ ID NO: 17679 - DNA, 25 bp, Artificial
  probe
  misc_feature (1)..(25): SEQ ID NO: 6163; WAN0249CM_at; Start 152; Stop 176
ctggtaatgaagaaaaacaattgaa

SEQ ID NO: 17680 - DNA, 25 bp, Artificial
  probe
  misc_feature (1)..(25): SEQ ID NO: 6163; WAN0249CM_at; Start 123; Stop 147
agccagtttccaaccaatttcgtga

SEQ ID NO: 17681 - DNA, 25 bp, Artificial
  probe
  misc_feature (1)..(25): SEQ ID NO: 6163; WAN0249CM_at; Start 3; Stop 27
agatggcgaaatcggtattgaattt

SEQ ID NO: 17682 - DNA, 25 bp, Artificial
  probe
  misc_feature (1)..(25): SEQ ID NO: 6163; WAN0249CM_at; Start 10; Stop 34
gaaatcggtattgaatttatcagta

SEQ ID NO: 17683 - DNA, 25 bp, Artificial
  probe
  misc_feature (1)..(25): SEQ ID NO: 6163; WAN0249CM_at; Start 92; Stop 116
agaacctattgtgaggactttttat

SEQ ID NO: 17684 - DNA, 25 bp, Artificial
  probe
  misc_feature (1)..(25): SEQ ID NO: 6163; WAN0249CM_at; Start 150; Stop 174
tactggtaatgaagaaaaacaattg

SEQ ID NO: 17685 - DNA, 25 bp, Artificial
  probe
  misc_feature (1)..(25): SEQ ID NO: 6163; WAN0249CM_at; Start 136; Stop 160
ccaatttcgtgatttactggtaatg

SEQ ID NO: 17686 - DNA, 25 bp, Artificial
  probe
  misc_feature (1)..(25): SEQ ID NO: 6163; WAN0249CM_at; Start 146; Stop 170
gatttactggtaatgaagaaaaaca

SEQ ID NO: 17687 - DNA, 25 bp, Artificial
  probe
  misc_feature (1)..(25): SEQ ID NO: 6163; WAN0249CM_at; Start 131; Stop 155
tccaaccaatttcgtgatttactgg

SEQ ID NO: 17688 - DNA, 25 bp, Artificial
  probe
  misc_feature (1)..(25): SEQ ID NO: 6163; WAN0249CM_at; Start 15; Stop 39
cggtattgaatttatcagtagtgct

SEQ ID NO: 17689 - DNA, 25 bp, Artificial
  probe
  misc_feature (1)..(25): SEQ ID NO: 6163; WAN0249CM_at; Start 133; Stop 157
caaccaatttcgtgatttactggta

SEQ ID NO: 17690 - DNA, 25 bp, Artificial
  probe
  misc_feature (1)..(25): SEQ ID NO: 6163; WAN0249CM_at; Start 30; Stop 54
cagtagtgctgattataactctttt

SEQ ID NO: 17691 - DNA, 25 bp, Artificial
  probe
  misc_feature (1)..(25): SEQ ID NO: 6163; WAN0249CM_at; Start 91; Stop 115
tagaacctattgtgaggacttttta

SEQ ID NO: 17692 - DNA, 25 bp, Artificial
  probe
  misc_feature (1)..(25): SEQ ID NO: 6163; WAN0249CM_at; Start 114; Stop 138
tatagtttaagccagtttccaacca

SEQ ID NO: 17693 - DNA, 25 bp, Artificial
  probe
  misc_feature (1)..(25): SEQ ID NO: 6163; WAN0249CM_at; Start 45; Stop 69
taactcttttattatttacatgaag

SEQ ID NO: 17694 - DNA, 25 bp, Artificial
  probe
  misc_feature (1)..(25): SEQ ID NO: 6163; WAN0249CM_at; Start 143; Stop 167
cgtgatttactggtaatgaagaaaa

SEQ ID NO: 17695 - DNA, 25 bp, Artificial
  probe
  misc_feature (1)..(25): SEQ ID NO: 6163; WAN0249CM_at; Start 29; Stop 53
tcagtagtgctgattataactcttt

SEQ ID NO: 17696 - DNA, 25 bp, Artificial
  probe
  misc_feature (1)..(25): SEQ ID NO: 6163; WAN0249CM_at; Start 130; Stop 154
ttccaaccaatttcgtgatttactg

SEQ ID NO: 17697 - DNA, 25 bp, Artificial
  probe
  misc_feature (1)..(25): SEQ ID NO: 6163; WAN0249CM_at; Start 96; Stop 120
cctattgtgaggactttttatagtt

SEQ ID NO: 17698 - DNA, 25 bp, Artificial
  probe
  misc_feature (1)..(25): SEQ ID NO: 6163; WAN0249CM_at; Start 122; Stop 146
aagccagtttccaaccaatttcgtg

SEQ ID NO: 17699 - DNA, 25 bp, Artificial
  probe
  misc_feature (1)..(25): SEQ ID NO: 6163; WAN0249CM_at; Start 6; Stop 30
tggcgaaatcggtattgaatttatc

SEQ ID NO: 17700 - DNA, 25 bp, Artificial
  probe
  misc_feature (1)..(25): SEQ ID NO: 6163; WAN0249CM_at; Start 17; Stop 41
gtattgaatttatcagtagtgctga

SEQ ID NO: 17701 - DNA, 25 bp, Artificial
  probe
  misc_feature (1)..(25): SEQ ID NO: 6163; WAN0249CM_at; Start 27; Stop 51
tatcagtagtgctgattataactct

SEQ ID NO: 17702 - DNA, 25 bp, Artificial
  probe
  misc_feature (1)..(25): SEQ ID NO: 6163; WAN0249CM_at; Start 126; Stop 150
cagtttccaaccaatttcgtgattt

SEQ ID NO: 17703 - DNA, 25 bp, Artificial
  probe
  misc_feature (1)..(25): SEQ ID NO: 6163; WAN0249CM_at; Start 14; Stop 38
tcggtattgaatttatcagtagtgc

SEQ ID NO: 17704 - DNA, 25 bp, Artificial
  probe
  misc_feature (1)..(25): SEQ ID NO: 6163; WAN0249CM_at; Start 101; Stop 125
tgtgaggactttttatagtttaagc

SEQ ID NO: 17705 - DNA, 25 bp, Artificial
  probe
  misc_feature (1)..(25): SEQ ID NO: 6163; WAN0249CM_at; Start 1; Stop 25
taagatggcgaaatcggtattgaat

SEQ ID NO: 17706 - DNA, 25 bp, Artificial
  probe
  misc_feature (1)..(25): SEQ ID NO: 6163; WAN0249CM_at; Start 137; Stop 161
caatttcgtgatttactggtaatga

SEQ ID NO: 17707 - DNA, 25 bp, Artificial
  probe
  misc_feature (1)..(25): SEQ ID NO: 6163; WAN0249CM_at; Start 125; Stop 149
ccagtttccaaccaatttcgtgatt

SEQ ID NO: 17708 - DNA, 25 bp, Artificial
  probe
  misc_feature (1)..(25): SEQ ID NO: 6163; WAN0249CM_at; Start 32; Stop 56
gtagtgctgattataactcttttat

SEQ ID NO: 17709 - DNA, 25 bp, Artificial
  probe
  misc_feature (1)..(25): SEQ ID NO: 6163; WAN0249CM_at; Start 8; Stop 32
gcgaaatcggtattgaatttatcag

SEQ ID NO: 17710 - DNA, 25 bp, Artificial
  probe
  misc_feature (1)..(25): SEQ ID NO: 6163; WAN0249CM_at; Start 7; Stop 31
ggcgaaatcggtattgaatttatca

SEQ ID NO: 17711 - DNA, 25 bp, Artificial
  probe
  misc_feature (1)..(25): SEQ ID NO: 6053; WAN0249CN_at; Start 4; Stop 28
atatgaagactaggaatgccaaaac

SEQ ID NO: 17712 - DNA, 25 bp, Artificial
  probe
  misc_feature (1)..(25): SEQ ID NO: 6053; WAN0249CN_at; Start 2; Stop 26
tgatatgaagactaggaatgccaaa

SEQ ID NO: 17713 - DNA, 25 bp, Artificial
  probe
  misc_feature (1)..(25): SEQ ID NO: 6053; WAN0249CN_at; Start 3; Stop 27
gatatgaagactaggaatgccaaaa

SEQ ID NO: 17714 - DNA, 25 bp, Artificial
  probe
  misc_feature (1)..(25): SEQ ID NO: 6053; WAN0249CN_at; Start 1; Stop 25
atgatatgaagactaggaatgccaa

SEQ ID NO: 17715 - DNA, 25 bp, Artificial
  probe
  misc_feature (1)..(25): SEQ ID NO: 5996; WAN0249CO_at; Start 87; Stop 111
aacatcttgtgtggcacgtaaacca

SEQ ID NO: 17716 - DNA, 25 bp, Artificial
  probe
  misc_feature (1)..(25): SEQ ID NO: 5996; WAN0249CO_at; Start 3; Stop 27
ctcttcgtggatgttaagattaaac

SEQ ID NO: 17717 - DNA, 25 bp, Artificial
  probe
  misc_feature (1)..(25): SEQ ID NO: 5996; WAN0249CO_at; Start 101; Stop 125
cacgtaaaccatgatattctaagac

SEQ ID NO: 17718 - DNA, 25 bp, Artificial
  probe
  misc_feature (1)..(25): SEQ ID NO: 5996; WAN0249CO_at; Start 107; Stop 131
aaccatgatattctaagacataacc

SEQ ID NO: 17719 - DNA, 25 bp, Artificial
  probe
  misc_feature (1)..(25): SEQ ID NO: 5996; WAN0249CO_at; Start 140; Stop 164
taaagtcagattttcctgaattaat

SEQ ID NO: 17720 - DNA, 25 bp, Artificial
  probe
  misc_feature (1)..(25): SEQ ID NO: 5996; WAN0249CO_at; Start 65; Stop 89
gattttggtcataaaaagcatcaac

SEQ ID NO: 17721 - DNA, 25 bp, Artificial
  probe
  misc_feature (1)..(25): SEQ ID NO: 5996; WAN0249CO_at; Start 25; Stop 49
aactgttttcctacacgagcaataa

SEQ ID NO: 17722 - DNA, 25 bp, Artificial
  probe
  misc_feature (1)..(25): SEQ ID NO: 5996; WAN0249CO_at; Start 53; Stop 77
cattgattttctgattttggtcata

SEQ ID NO: 17723 - DNA, 25 bp, Artificial
  probe
  misc_feature (1)..(25): SEQ ID NO: 5996; WAN0249CO_at; Start 89; Stop 113
catcttgtgtggcacgtaaaccatg

SEQ ID NO: 17724 - DNA, 25 bp, Artificial
  probe
  misc_feature (1)..(25): SEQ ID NO: 5996; WAN0249CO_at; Start 85; Stop 109
tcaacatcttgtgtggcacgtaaac

SEQ ID NO: 17725 - DNA, 25 bp, Artificial
  probe
  misc_feature (1)..(25): SEQ ID NO: 5996; WAN0249CO_at; Start 34; Stop 58
cctacacgagcaataatttcattga

SEQ ID NO: 17726 - DNA, 25 bp, Artificial
  probe
  misc_feature (1)..(25): SEQ ID NO: 5996; WAN0249CO_at; Start 83; Stop 107
catcaacatcttgtgtggcacgtaa

SEQ ID NO: 17727 - DNA, 25 bp, Artificial
  probe
  misc_feature (1)..(25): SEQ ID NO: 5996; WAN0249CO_at; Start 31; Stop 55
tttcctacacgagcaataatttcat

SEQ ID NO: 17728 - DNA, 25 bp, Artificial
  probe
  misc_feature (1)..(25): SEQ ID NO: 5996; WAN0249CO_at; Start 62; Stop 86
tctgattttggtcataaaaagcatc

SEQ ID NO: 17729 - DNA, 25 bp, Artificial
  probe
  misc_feature (1)..(25): SEQ ID NO: 5996; WAN0249CO_at; Start 78; Stop 102
aaaagcatcaacatcttgtgtggca

SEQ ID NO: 17730 - DNA, 25 bp, Artificial
  probe
  misc_feature (1)..(25): SEQ ID NO: 5996; WAN0249CO_at; Start 99; Stop 123
ggcacgtaaaccatgatattctaag

SEQ ID NO: 17731 - DNA, 25 bp, Artificial
  probe
  misc_feature (1)..(25): SEQ ID NO: 5996; WAN0249CO_at; Start 38; Stop 62
cacgagcaataatttcattgatttt

SEQ ID NO: 17732 - DNA, 25 bp, Artificial
  probe
  misc_feature (1)..(25): SEQ ID NO: 5996; WAN0249CO_at; Start 23; Stop 47
taaactgttttcctacacgagcaat

SEQ ID NO: 17733 - DNA, 25 bp, Artificial
  probe
  misc_feature (1)..(25): SEQ ID NO: 5996; WAN0249CO_at; Start 96; Stop 120
tgtggcacgtaaaccatgatattct

SEQ ID NO: 17734 - DNA, 25 bp, Artificial
  probe
  misc_feature (1)..(25): SEQ ID NO: 5996; WAN0249CO_at; Start 133; Stop 157
taattgttaaagtcagattttcctg

SEQ ID NO: 17735 - DNA, 25 bp, Artificial
  probe
  misc_feature (1)..(25): SEQ ID NO: 5996; WAN0249CO_at; Start 80; Stop 104
aagcatcaacatcttgtgtggcacg

SEQ ID NO: 17736 - DNA, 25 bp, Artificial
  probe
  misc_feature (1)..(25): SEQ ID NO: 5996; WAN0249CO_at; Start 155; Stop 179
ctgaattaatttcttatttagggct

SEQ ID NO: 17737 - DNA, 25 bp, Artificial
  probe
  misc_feature (1)..(25): SEQ ID NO: 5996; WAN0249CO_at; Start 94; Stop 118
tgtgtggcacgtaaaccatgatatt

SEQ ID NO: 17738 - DNA, 25 bp, Artificial
  probe
  misc_feature (1)..(25): SEQ ID NO: 5996; WAN0249CO_at; Start 82; Stop 106
gcatcaacatcttgtgtggcacgta

SEQ ID NO: 17739 - DNA, 25 bp, Artificial
  probe
  misc_feature (1)..(25): SEQ ID NO: 5996; WAN0249CO_at; Start 68; Stop 92
tttggtcataaaaagcatcaacatc

SEQ ID NO: 17740 - DNA, 25 bp, Artificial
  probe
  misc_feature (1)..(25): SEQ ID NO: 5996; WAN0249CO_at; Start 92; Stop 116
cttgtgtggcacgtaaaccatgata

SEQ ID NO: 17741 - DNA, 25 bp, Artificial
  probe
  misc_feature (1)..(25): SEQ ID NO: 5996; WAN0249CO_at; Start 115; Stop 139
tattctaagacataaccataattgt

SEQ ID NO: 17742 - DNA, 25 bp, Artificial
  probe
  misc_feature (1)..(25): SEQ ID NO: 5996; WAN0249CO_at; Start 76; Stop 100
taaaaagcatcaacatcttgtgtgg

SEQ ID NO: 17743 - DNA, 25 bp, Artificial
  probe
  misc_feature (1)..(25): SEQ ID NO: 5996; WAN0249CO_at; Start 28; Stop 52
tgttttcctacacgagcaataattt

SEQ ID NO: 17744 - DNA, 25 bp, Artificial
  probe
  misc_feature (1)..(25): SEQ ID NO: 5996; WAN0249CO_at; Start 103; Stop 127
cgtaaaccatgatattctaagacat

SEQ ID NO: 17745 - DNA, 25 bp, Artificial
  probe
  misc_feature (1)..(25): SEQ ID NO: 5996; WAN0249CO_at; Start 71; Stop 95
ggtcataaaaagcatcaacatcttg

SEQ ID NO: 17746 - DNA, 25 bp, Artificial
  probe
  misc_feature (1)..(25): SEQ ID NO: 5996; WAN0249CO_at; Start 125; Stop 149
cataaccataattgttaaagtcaga

SEQ ID NO: 17747 - DNA, 25 bp, Artificial
  probe
  misc_feature (1)..(25): SEQ ID NO: 5996; WAN0249CO_at; Start 5; Stop 29
cttcgtggatgttaagattaaactg

SEQ ID NO: 17748 - DNA, 25 bp, Artificial
  probe
  misc_feature (1)..(25): SEQ ID NO: 5996; WAN0249CO_at; Start 20; Stop 44
gattaaactgttttcctacacgagc

SEQ ID NO: 17749 - DNA, 25 bp, Artificial
  probe
  misc_feature (1)..(25): SEQ ID NO: 6151; WAN0249CP_at; Start 7; Stop 31
tgaaacgtctcaaacagtgctagaa

SEQ ID NO: 17750 - DNA, 25 bp, Artificial
  probe
  misc_feature (1)..(25): SEQ ID NO: 6151; WAN0249CP_at; Start 58; Stop 82
gttccgattttatttcattccatca

SEQ ID NO: 17751 - DNA, 25 bp, Artificial
  probe
  misc_feature (1)..(25): SEQ ID NO: 6151; WAN0249CP_at; Start 97; Stop 121
cgggctaattgacaatcatcttgtt

SEQ ID NO: 17752 - DNA, 25 bp, Artificial
  probe
  misc_feature (1)..(25): SEQ ID NO: 6151; WAN0249CP_at; Start 41; Stop 65
aattctctaagtgatttgttccgat

SEQ ID NO: 17753 - DNA, 25 bp, Artificial
  probe
  misc_feature (1)..(25): SEQ ID NO: 6151; WAN0249CP_at; Start 76; Stop 100
tccatcataaaaataagacgacggg

SEQ ID NO: 17754 - DNA, 25 bp, Artificial
  probe
  misc_feature (1)..(25): SEQ ID NO: 6151; WAN0249CP_at; Start 1; Stop 25
gttcgctgaaacgtctcaaacagtg

SEQ ID NO: 17755 - DNA, 25 bp, Artificial
  probe
  misc_feature (1)..(25): SEQ ID NO: 6151; WAN0249CP_at; Start 40; Stop 64
gaattctctaagtgatttgttccga

SEQ ID NO: 17756 - DNA, 25 bp, Artificial
  probe
  misc_feature (1)..(25): SEQ ID NO: 6151; WAN0249CP_at; Start 45; Stop 69
ctctaagtgatttgttccgatttta

SEQ ID NO: 17757 - DNA, 25 bp, Artificial
  probe
  misc_feature (1)..(25): SEQ ID NO: 6151; WAN0249CP_at; Start 94; Stop 118
cgacgggctaattgacaatcatctt

SEQ ID NO: 17758 - DNA, 25 bp, Artificial
  probe
  misc_feature (1)..(25): SEQ ID NO: 6151; WAN0249CP_at; Start 80; Stop 104
tcataaaaataagacgacgggctaa

SEQ ID NO: 17759 - DNA, 25 bp, Artificial
  probe
  misc_feature (1)..(25): SEQ ID NO: 6151; WAN0249CP_at; Start 34; Stop 58
tgactggaattctctaagtgatttg

SEQ ID NO: 17760 - DNA, 25 bp, Artificial
  probe
  misc_feature (1)..(25): SEQ ID NO: 6151; WAN0249CP_at; Start 8; Stop 32
gaaacgtctcaaacagtgctagaaa

SEQ ID NO: 17761 - DNA, 25 bp, Artificial
  probe
  misc_feature (1)..(25): SEQ ID NO: 6151; WAN0249CP_at; Start 16; Stop 40
tcaaacagtgctagaaattgactgg

SEQ ID NO: 17762 - DNA, 25 bp, Artificial
  probe
  misc_feature (1)..(25): SEQ ID NO: 6151; WAN0249CP_at; Start 12; Stop 36
cgtctcaaacagtgctagaaattga

SEQ ID NO: 17763 - DNA, 25 bp, Artificial
  probe
  misc_feature (1)..(25): SEQ ID NO: 6151; WAN0249CP_at; Start 105; Stop 129
ttgacaatcatcttgtttgatactg

SEQ ID NO: 17764 - DNA, 25 bp, Artificial
  probe
  misc_feature (1)..(25): SEQ ID NO: 6151; WAN0249CP_at; Start 61; Stop 85
ccgattttatttcattccatcataa

SEQ ID NO: 17765 - DNA, 25 bp, Artificial
  probe
  misc_feature (1)..(25): SEQ ID NO: 6151; WAN0249CP_at; Start 24; Stop 48
tgctagaaattgactggaattctct

SEQ ID NO: 17766 - DNA, 25 bp, Artificial
  probe
  misc_feature (1)..(25): SEQ ID NO: 6151; WAN0249CP_at; Start 31; Stop 55
aattgactggaattctctaagtgat

SEQ ID NO: 17767 - DNA, 25 bp, Artificial
  probe
  misc_feature (1)..(25): SEQ ID NO: 6151; WAN0249CP_at; Start 21; Stop 45
cagtgctagaaattgactggaattc

SEQ ID NO: 17768 - DNA, 25 bp, Artificial
  probe
  misc_feature (1)..(25): SEQ ID NO: 6151; WAN0249CP_at; Start 3; Stop 27
tcgctgaaacgtctcaaacagtgct

SEQ ID NO: 17769 - DNA, 25 bp, Artificial
  probe
  misc_feature (1)..(25): SEQ ID NO: 6151; WAN0249CP_at; Start 4; Stop 28
cgctgaaacgtctcaaacagtgcta

SEQ ID NO: 17770 - DNA, 25 bp, Artificial
  probe
  misc_feature (1)..(25): SEQ ID NO: 6151; WAN0249CP_at; Start 2; Stop 26
ttcgctgaaacgtctcaaacagtgc

SEQ ID NO: 17771 - DNA, 25 bp, Artificial
  probe
  misc_feature (1)..(25): SEQ ID NO: 6151; WAN0249CP_at; Start 90; Stop 114
aagacgacgggctaattgacaatca

SEQ ID NO: 17772 - DNA, 25 bp, Artificial
  probe
  misc_feature (1)..(25): SEQ ID NO: 6151; WAN0249CP_at; Start 17; Stop 41
caaacagtgctagaaattgactgga

SEQ ID NO: 17773 - DNA, 25 bp, Artificial
  probe
  misc_feature (1)..(25): SEQ ID NO: 6151; WAN0249CP_at; Start 14; Stop 38
tctcaaacagtgctagaaattgact

SEQ ID NO: 17774 - DNA, 25 bp, Artificial
  probe
  misc_feature (1)..(25): SEQ ID NO: 6151; WAN0249CP_at; Start 92; Stop 116
gacgacgggctaattgacaatcatc

SEQ ID NO: 17775 - DNA, 25 bp, Artificial
  probe
  misc_feature (1)..(25): SEQ ID NO: 6151; WAN0249CP_at; Start 5; Stop 29
gctgaaacgtctcaaacagtgctag

SEQ ID NO: 17776 - DNA, 25 bp, Artificial
  probe
  misc_feature (1)..(25): SEQ ID NO: 6151; WAN0249CP_at; Start 81; Stop 105
cataaaaataagacgacgggctaat

SEQ ID NO: 17777 - DNA, 25 bp, Artificial
  probe
  misc_feature (1)..(25): SEQ ID NO: 6151; WAN0249CP_at; Start 100; Stop 124
gctaattgacaatcatcttgtttga

SEQ ID NO: 17778 - DNA, 25 bp, Artificial
  probe
  misc_feature (1)..(25): SEQ ID NO: 6151; WAN0249CP_at; Start 91; Stop 115
agacgacgggctaattgacaatcat

SEQ ID NO: 17779 - DNA, 25 bp, Artificial
  probe
  misc_feature (1)..(25): SEQ ID NO: 6151; WAN0249CP_at; Start 11; Stop 35
acgtctcaaacagtgctagaaattg

SEQ ID NO: 17780 - DNA, 25 bp, Artificial
  probe
  misc_feature (1)..(25): SEQ ID NO: 6151; WAN0249CP_at; Start 78; Stop 102
catcataaaaataagacgacgggct

SEQ ID NO: 17781 - DNA, 25 bp, Artificial
  probe
  misc_feature (1)..(25): SEQ ID NO: 6151; WAN0249CP_at; Start 29; Stop 53
gaaattgactggaattctctaagtg

SEQ ID NO: 17782 - DNA, 25 bp, Artificial
  probe
  misc_feature (1)..(25): SEQ ID NO: 6151; WAN0249CP_at; Start 95; Stop 119
gacgggctaattgacaatcatcttg

SEQ ID NO: 17783 - DNA, 25 bp, Artificial
  probe
  misc_feature (1)..(25): SEQ ID NO: 6204; WAN0249CQ_at; Start 8; Stop 32
tgaacggatacttagtgtagtagag

SEQ ID NO: 17784 - DNA, 25 bp, Artificial
  probe
  misc_feature (1)..(25): SEQ ID NO: 6204; WAN0249CQ_at; Start 11; Stop 35
acggatacttagtgtagtagaggaa

SEQ ID NO: 17785 - DNA, 25 bp, Artificial
  probe
  misc_feature (1)..(25): SEQ ID NO: 6204; WAN0249CQ_at; Start 14; Stop 38
gatacttagtgtagtagaggaagaa

SEQ ID NO: 17786 - DNA, 25 bp, Artificial
  probe
  misc_feature (1)..(25): SEQ ID NO: 6204; WAN0249CQ_at; Start 15; Stop 39
atacttagtgtagtagaggaagaat

SEQ ID NO: 17787 - DNA, 25 bp, Artificial
  probe
  misc_feature (1)..(25): SEQ ID NO: 6204; WAN0249CQ_at; Start 22; Stop 46
gtgtagtagaggaagaatttagtaa

SEQ ID NO: 17788 - DNA, 25 bp, Artificial
  probe
  misc_feature (1)..(25): SEQ ID NO: 6204; WAN0249CQ_at; Start 25; Stop 49
tagtagaggaagaatttagtaatta

SEQ ID NO: 17789 - DNA, 25 bp, Artificial
  probe
  misc_feature (1)..(25): SEQ ID NO: 6204; WAN0249CQ_at; Start 12; Stop 36
cggatacttagtgtagtagaggaag

SEQ ID NO: 17790 - DNA, 25 bp, Artificial
  probe
  misc_feature (1)..(25): SEQ ID NO: 6204; WAN0249CQ_at; Start 9; Stop 33
gaacggatacttagtgtagtagagg

SEQ ID NO: 17791 - DNA, 25 bp, Artificial
  probe
  misc_feature (1)..(25): SEQ ID NO: 6204; WAN0249CQ_at; Start 7; Stop 31
ttgaacggatacttagtgtagtaga

SEQ ID NO: 17792 - DNA, 25 bp, Artificial
  probe
  misc_feature (1)..(25): SEQ ID NO: 6204; WAN0249CQ_at; Start 23; Stop 47
tgtagtagaggaagaatttagtaat

SEQ ID NO: 17793 - DNA, 25 bp, Artificial
  probe
  misc_feature (1)..(25): SEQ ID NO: 6204; WAN0249CQ_at; Start 19; Stop 43
ttagtgtagtagaggaagaatttag

SEQ ID NO: 17794 - DNA, 25 bp, Artificial
  probe
  misc_feature (1)..(25): SEQ ID NO: 6204; WAN0249CQ_at; Start 18; Stop 42
cttagtgtagtagaggaagaattta

SEQ ID NO: 17795 - DNA, 25 bp, Artificial
  probe
  misc_feature (1)..(25): SEQ ID NO: 6204; WAN0249CQ_at; Start 16; Stop 40
tacttagtgtagtagaggaagaatt

SEQ ID NO: 17796 - DNA, 25 bp, Artificial
  probe
  misc_feature (1)..(25): SEQ ID NO: 6204; WAN0249CQ_at; Start 17; Stop 41
acttagtgtagtagaggaagaattt

SEQ ID NO: 17797 - DNA, 25 bp, Artificial
  probe
  misc_feature (1)..(25): SEQ ID NO: 6204; WAN0249CQ_at; Start 1; Stop 25
tggtgattgaacggatacttagtgt

SEQ ID NO: 17798 - DNA, 25 bp, Artificial
  probe
  misc_feature (1)..(25): SEQ ID NO: 6204; WAN0249CQ_at; Start 13; Stop 37
ggatacttagtgtagtagaggaaga

SEQ ID NO: 17799 - DNA, 25 bp, Artificial
  probe
  misc_feature (1)..(25): SEQ ID NO: 6204; WAN0249CQ_at; Start 20; Stop 44
tagtgtagtagaggaagaatttagt

SEQ ID NO: 17800 - DNA, 25 bp, Artificial
  probe
  misc_feature (1)..(25): SEQ ID NO: 6204; WAN0249CQ_at; Start 3; Stop 27
gtgattgaacggatacttagtgtag

SEQ ID NO: 17801 - DNA, 25 bp, Artificial
  probe
  misc_feature (1)..(25): SEQ ID NO: 6204; WAN0249CQ_at; Start 21; Stop 45
agtgtagtagaggaagaatttagta

SEQ ID NO: 17802 - DNA, 25 bp, Artificial
  probe
  misc_feature (1)..(25): SEQ ID NO: 6204; WAN0249CQ_at; Start 2; Stop 26
ggtgattgaacggatacttagtgta

SEQ ID NO: 17803 - DNA, 25 bp, Artificial
  probe
  misc_feature (1)..(25): SEQ ID NO: 6204; WAN0249CQ_at; Start 10; Stop 34
aacggatacttagtgtagtagagga

SEQ ID NO: 17804 - DNA, 25 bp, Artificial
  probe
  misc_feature (1)..(25): SEQ ID NO: 5991; WAN0249CR_at; Start 27; Stop 51
atgataatgtgcagaaggcatatgg

SEQ ID NO: 17805 - DNA, 25 bp, Artificial
  probe
  misc_feature (1)..(25): SEQ ID NO: 5991; WAN0249CR_at; Start 29; Stop 53
gataatgtgcagaaggcatatggaa

SEQ ID NO: 17806 - DNA, 25 bp, Artificial
  probe
  misc_feature (1)..(25): SEQ ID NO: 5991; WAN0249CR_at; Start 22; Stop 46
gttgtatgataatgtgcagaaggca

SEQ ID NO: 17807 - DNA, 25 bp, Artificial
  probe
  misc_feature (1)..(25): SEQ ID NO: 5991; WAN0249CR_at; Start 34; Stop 58
tgtgcagaaggcatatggaatagtt

SEQ ID NO: 17808 - DNA, 25 bp, Artificial
  probe
  misc_feature (1)..(25): SEQ ID NO: 5991; WAN0249CR_at; Start 20; Stop 44
aggttgtatgataatgtgcagaagg

SEQ ID NO: 17809 - DNA, 25 bp, Artificial
  probe
  misc_feature (1)..(25): SEQ ID NO: 5991; WAN0249CR_at; Start 23; Stop 47
ttgtatgataatgtgcagaaggcat

SEQ ID NO: 17810 - DNA, 25 bp, Artificial
  probe
  misc_feature (1)..(25): SEQ ID NO: 5991; WAN0249CR_at; Start 24; Stop 48
tgtatgataatgtgcagaaggcata

SEQ ID NO: 17811 - DNA, 25 bp, Artificial
  probe
  misc_feature (1)..(25): SEQ ID NO: 5991; WAN0249CR_at; Start 31; Stop 55
taatgtgcagaaggcatatggaata

SEQ ID NO: 17812 - DNA, 25 bp, Artificial
  probe
  misc_feature (1)..(25): SEQ ID NO: 5991; WAN0249CR_at; Start 35; Stop 59
gtgcagaaggcatatggaatagttg

SEQ ID NO: 17813 - DNA, 25 bp, Artificial
  probe
  misc_feature (1)..(25): SEQ ID NO: 5991; WAN0249CR_at; Start 30; Stop 54
ataatgtgcagaaggcatatggaat

SEQ ID NO: 17814 - DNA, 25 bp, Artificial
  probe
  misc_feature (1)..(25): SEQ ID NO: 5991; WAN0249CR_at; Start 17; Stop 41
tcaaggttgtatgataatgtgcaga

SEQ ID NO: 17815 - DNA, 25 bp, Artificial
  probe
  misc_feature (1)..(25): SEQ ID NO: 5991; WAN0249CR_at; Start 14; Stop 38
aattcaaggttgtatgataatgtgc

SEQ ID NO: 17816 - DNA, 25 bp, Artificial
  probe
  misc_feature (1)..(25): SEQ ID NO: 5991; WAN0249CR_at; Start 10; Stop 34
gggaaattcaaggttgtatgataat

SEQ ID NO: 17817 - DNA, 25 bp, Artificial
  probe
  misc_feature (1)..(25): SEQ ID NO: 5991; WAN0249CR_at; Start 1; Stop 25
aaatggatggggaaattcaaggttg

SEQ ID NO: 17818 - DNA, 25 bp, Artificial
  probe
  misc_feature (1)..(25): SEQ ID NO: 5991; WAN0249CR_at; Start 12; Stop 36
gaaattcaaggttgtatgataatgt

SEQ ID NO: 17819 - DNA, 25 bp, Artificial
  probe
  misc_feature (1)..(25): SEQ ID NO: 5991; WAN0249CR_at; Start 26; Stop 50
tatgataatgtgcagaaggcatatg

SEQ ID NO: 17820 - DNA, 25 bp, Artificial
  probe
  misc_feature (1)..(25): SEQ ID NO: 5991; WAN0249CR_at; Start 44; Stop 68
gcatatggaatagttgttttttaga

SEQ ID NO: 17821 - DNA, 25 bp, Artificial
  probe
  misc_feature (1)..(25): SEQ ID NO: 5991; WAN0249CR_at; Start 38; Stop 62
cagaaggcatatggaatagttgttt

SEQ ID NO: 17822 - DNA, 25 bp, Artificial
  probe
  misc_feature (1)..(25): SEQ ID NO: 5991; WAN0249CR_at; Start 25; Stop 49
gtatgataatgtgcagaaggcatat

SEQ ID NO: 17823 - DNA, 25 bp, Artificial
  probe
  misc_feature (1)..(25): SEQ ID NO: 5991; WAN0249CR_at; Start 16; Stop 40
ttcaaggttgtatgataatgtgcag

SEQ ID NO: 17824 - DNA, 25 bp, Artificial
  probe
  misc_feature (1)..(25): SEQ ID NO: 5991; WAN0249CR_at; Start 19; Stop 43
aaggttgtatgataatgtgcagaag

SEQ ID NO: 17825 - DNA, 25 bp, Artificial
  probe
  misc_feature (1)..(25): SEQ ID NO: 5991; WAN0249CR_at; Start 41; Stop 65
aaggcatatggaatagttgtttttt

SEQ ID NO: 17826 - DNA, 25 bp, Artificial
  probe
  misc_feature (1)..(25): SEQ ID NO: 5991; WAN0249CR_at; Start 21; Stop 45
ggttgtatgataatgtgcagaaggc

SEQ ID NO: 17827 - DNA, 25 bp, Artificial
  probe
  misc_feature (1)..(25): SEQ ID NO: 5991; WAN0249CR_at; Start 18; Stop 42
caaggttgtatgataatgtgcagaa

SEQ ID NO: 17828 - DNA, 25 bp, Artificial
  probe
  misc_feature (1)..(25): SEQ ID NO: 5991; WAN0249CR_at; Start 15; Stop 39
attcaaggttgtatgataatgtgca

SEQ ID NO: 17829 - DNA, 25 bp, Artificial
  probe
  misc_feature (1)..(25): SEQ ID NO: 5991; WAN0249CR_at; Start 45; Stop 69
catatggaatagttgttttttagat

SEQ ID NO: 17830 - DNA, 25 bp, Artificial
  probe
  misc_feature (1)..(25): SEQ ID NO: 5991; WAN0249CR_at; Start 43; Stop 67
ggcatatggaatagttgttttttag

SEQ ID NO: 17831 - DNA, 25 bp, Artificial
  probe
  misc_feature (1)..(25): SEQ ID NO: 5991; WAN0249CR_at; Start 36; Stop 60
tgcagaaggcatatggaatagttgt

SEQ ID NO: 17832 - DNA, 25 bp, Artificial
  probe
  misc_feature (1)..(25): SEQ ID NO: 5991; WAN0249CR_at; Start 28; Stop 52
tgataatgtgcagaaggcatatgga

SEQ ID NO: 17833 - DNA, 25 bp, Artificial
  probe
  misc_feature (1)..(25): SEQ ID NO: 5991; WAN0249CR_at; Start 33; Stop 57
atgtgcagaaggcatatggaatagt

SEQ ID NO: 17834 - DNA, 25 bp, Artificial
  probe
  misc_feature (1)..(25): SEQ ID NO: 5991; WAN0249CR_at; Start 37; Stop 61
gcagaaggcatatggaatagttgtt

SEQ ID NO: 17835 - DNA, 25 bp, Artificial
  probe
  misc_feature (1)..(25): SEQ ID NO: 5991; WAN0249CR_at; Start 40; Stop 64
gaaggcatatggaatagttgttttt

SEQ ID NO: 17836 - DNA, 25 bp, Artificial
  probe
  misc_feature (1)..(25): SEQ ID NO: 5991; WAN0249CR_at; Start 39; Stop 63
agaaggcatatggaatagttgtttt

SEQ ID NO: 17837 - DNA, 25 bp, Artificial
  probe
  misc_feature (1)..(25): SEQ ID NO: 5991; WAN0249CR_at; Start 11; Stop 35
ggaaattcaaggttgtatgataatg

SEQ ID NO: 17838 - DNA, 25 bp, Artificial
  probe
  misc_feature (1)..(25): SEQ ID NO: 5992; WAN0249CS_at; Start 220; Stop 244
ggattatggacaagtagcgcaggat

SEQ ID NO: 17839 - DNA, 25 bp, Artificial
  probe
  misc_feature (1)..(25): SEQ ID NO: 5992; WAN0249CS_at; Start 230; Stop 254
caagtagcgcaggattaggtgatgc

SEQ ID NO: 17840 - DNA, 25 bp, Artificial
  probe
  misc_feature (1)..(25): SEQ ID NO: 5992; WAN0249CS_at; Start 145; Stop 169
tgcagtaggcattgtctaggataaa

SEQ ID NO: 17841 - DNA, 25 bp, Artificial
  probe
  misc_feature (1)..(25): SEQ ID NO: 5992; WAN0249CS_at; Start 17; Stop 41
gattaacaagtgtcctagggattag

SEQ ID NO: 17842 - DNA, 25 bp, Artificial
  probe
  misc_feature (1)..(25): SEQ ID NO: 5992; WAN0249CS_at; Start 261; Stop 285
ctaagttggcttggtgttagcagta

SEQ ID NO: 17843 - DNA, 25 bp, Artificial
  probe
  misc_feature (1)..(25): SEQ ID NO: 5992; WAN0249CS_at; Start 58; Stop 82
gctagatatttttgagtaactagaa

SEQ ID NO: 17844 - DNA, 25 bp, Artificial
  probe
  misc_feature (1)..(25): SEQ ID NO: 5992; WAN0249CS_at; Start 27; Stop 51
tgtcctagggattagaaataactct

SEQ ID NO: 17845 - DNA, 25 bp, Artificial
  probe
  misc_feature (1)..(25): SEQ ID NO: 5992; WAN0249CS_at; Start 216; Stop 240
taaaggattatggacaagtagcgca

SEQ ID NO: 17846 - DNA, 25 bp, Artificial
  probe
  misc_feature (1)..(25): SEQ ID NO: 5992; WAN0249CS_at; Start 139; Stop 163
tactgttgcagtaggcattgtctag

SEQ ID NO: 17847 - DNA, 25 bp, Artificial
  probe
  misc_feature (1)..(25): SEQ ID NO: 5992; WAN0249CS_at; Start 117; Stop 141
gatggctgatgaatcttatttatac

SEQ ID NO: 17848 - DNA, 25 bp, Artificial
  probe
  misc_feature (1)..(25): SEQ ID NO: 5992; WAN0249CS_at; Start 247; Stop 271
ggtgatgcaatgtgctaagttggct

SEQ ID NO: 17849 - DNA, 25 bp, Artificial
  probe
  misc_feature (1)..(25): SEQ ID NO: 5992; WAN0249CS_at; Start 11; Stop 35
catttggattaacaagtgtcctagg

SEQ ID NO: 17850 - DNA, 25 bp, Artificial
  probe
  misc_feature (1)..(25): SEQ ID NO: 5992; WAN0249CS_at; Start 108; Stop 132
gccagaaaagatggctgatgaatct

SEQ ID NO: 17851 - DNA, 25 bp, Artificial
  probe
  misc_feature (1)..(25): SEQ ID NO: 5992; WAN0249CS_at; Start 224; Stop 248
tatggacaagtagcgcaggattagg

SEQ ID NO: 17852 - DNA, 25 bp, Artificial
  probe
  misc_feature (1)..(25): SEQ ID NO: 5992; WAN0249CS_at; Start 103; Stop 127
tgattgccagaaaagatggctgatg

SEQ ID NO: 17853 - DNA, 25 bp, Artificial
  probe
  misc_feature (1)..(25): SEQ ID NO: 5992; WAN0249CS_at; Start 266; Stop 290
ttggcttggtgttagcagtagtatt

SEQ ID NO: 17854 - DNA, 25 bp, Artificial
  probe
  misc_feature (1)..(25): SEQ ID NO: 5992; WAN0249CS_at; Start 204; Stop 228
tagtagaaacattaaaggattatgg

SEQ ID NO: 17855 - DNA, 25 bp, Artificial
  probe
  misc_feature (1)..(25): SEQ ID NO: 5992; WAN0249CS_at; Start 50; Stop 74
ctagtatagctagatatttttgagt

SEQ ID NO: 17856 - DNA, 25 bp, Artificial
  probe
  misc_feature (1)..(25): SEQ ID NO: 5992; WAN0249CS_at; Start 90; Stop 114
taggctacccatatgattgccagaa

SEQ ID NO: 17857 - DNA, 25 bp, Artificial
  probe
  misc_feature (1)..(25): SEQ ID NO: 5992; WAN0249CS_at; Start 172; Stop 196
agctatcttgatgggggaaattgga

SEQ ID NO: 17858 - DNA, 25 bp, Artificial
  probe
  misc_feature (1)..(25): SEQ ID NO: 5992; WAN0249CS_at; Start 93; Stop 117
gctacccatatgattgccagaaaag

SEQ ID NO: 17859 - DNA, 25 bp, Artificial
  probe
  misc_feature (1)..(25): SEQ ID NO: 5992; WAN0249CS_at; Start 87; Stop 111
cattaggctacccatatgattgcca

SEQ ID NO: 17860 - DNA, 25 bp, Artificial
  probe
  misc_feature (1)..(25): SEQ ID NO: 5992; WAN0249CS_at; Start 234; Stop 258
tagcgcaggattaggtgatgcaatg

SEQ ID NO: 17861 - DNA, 25 bp, Artificial
  probe
  misc_feature (1)..(25): SEQ ID NO: 5992; WAN0249CS_at; Start 239; Stop 263
caggattaggtgatgcaatgtgcta

SEQ ID NO: 17862 - DNA, 25 bp, Artificial
  probe
  misc_feature (1)..(25): SEQ ID NO: 5992; WAN0249CS_at; Start 161; Stop 185
taggataaataagctatcttgatgg

SEQ ID NO: 17863 - DNA, 25 bp, Artificial
  probe
  misc_feature (1)..(25): SEQ ID NO: 5992; WAN0249CS_at; Start 124; Stop 148
gatgaatcttatttatactgttgca

SEQ ID NO: 17864 - DNA, 25 bp, Artificial
  probe
  misc_feature (1)..(25): SEQ ID NO: 5992; WAN0249CS_at; Start 150; Stop 174
taggcattgtctaggataaataagc

SEQ ID NO: 17865 - DNA, 25 bp, Artificial
  probe
  misc_feature (1)..(25): SEQ ID NO: 5992; WAN0249CS_at; Start 80; Stop 104
gaaatatcattaggctacccatatg

SEQ ID NO: 17866 - DNA, 25 bp, Artificial
  probe
  misc_feature (1)..(25): SEQ ID NO: 5992; WAN0249CS_at; Start 154; Stop 178
cattgtctaggataaataagctatc

SEQ ID NO: 17867 - DNA, 25 bp, Artificial
  probe
  misc_feature (1)..(25): SEQ ID NO: 5992; WAN0249CS_at; Start 75; Stop 99
aactagaaatatcattaggctaccc

SEQ ID NO: 17868 - DNA, 25 bp, Artificial
  probe
  misc_feature (1)..(25): SEQ ID NO: 5992; WAN0249CS_at; Start 35; Stop 59
ggattagaaataactctagtatagc

SEQ ID NO: 17869 - DNA, 25 bp, Artificial
  probe
  misc_feature (1)..(25): SEQ ID NO: 5992; WAN0249CS_at; Start 70; Stop 94
tgagtaactagaaatatcattaggc

SEQ ID NO: 17870 - DNA, 25 bp, Artificial
  probe
  misc_feature (1)..(25): SEQ ID NO: 5992; WAN0249CS_at; Start 99; Stop 123
catatgattgccagaaaagatggct

SEQ ID NO: 17871 - DNA, 25 bp, Artificial
  probe
  misc_feature (1)..(25): SEQ ID NO: 5992; WAN0249CS_at; Start 7; Stop 31
gttacatttggattaacaagtgtcc

SEQ ID NO: 17872 - DNA, 25 bp, Artificial
  probe
  misc_feature (1)..(25): SEQ ID NO: 6065; WAN0249CT_at; Start 39; Stop 63
gtataggagtattatttatacaata

SEQ ID NO: 17873 - DNA, 25 bp, Artificial
  probe
  misc_feature (1)..(25): SEQ ID NO: 6065; WAN0249CT_at; Start 24; Stop 48
cttgacaaaggatgagtataggagt

SEQ ID NO: 17874 - DNA, 25 bp, Artificial
  probe
  misc_feature (1)..(25): SEQ ID NO: 6065; WAN0249CT_at; Start 12; Stop 36
tttcaatttaggcttgacaaaggat

SEQ ID NO: 17875 - DNA, 25 bp, Artificial
  probe
  misc_feature (1)..(25): SEQ ID NO: 6065; WAN0249CT_at; Start 55; Stop 79
tatacaataaaaaagaataaacata

SEQ ID NO: 17876 - DNA, 25 bp, Artificial
  probe
  misc_feature (1)..(25): SEQ ID NO: 6065; WAN0249CT_at; Start 26; Stop 50
tgacaaaggatgagtataggagtat

SEQ ID NO: 17877 - DNA, 25 bp, Artificial
  probe
  misc_feature (1)..(25): SEQ ID NO: 6065; WAN0249CT_at; Start 29; Stop 53
caaaggatgagtataggagtattat

SEQ ID NO: 17878 - DNA, 25 bp, Artificial
  probe
  misc_feature (1)..(25): SEQ ID NO: 6065; WAN0249CT_at; Start 19; Stop 43
ttaggcttgacaaaggatgagtata

SEQ ID NO: 17879 - DNA, 25 bp, Artificial
  probe
  misc_feature (1)..(25): SEQ ID NO: 6065; WAN0249CT_at; Start 68; Stop 92
agaataaacataaagaaggctttgt

SEQ ID NO: 17880 - DNA, 25 bp, Artificial
  probe
  misc_feature (1)..(25): SEQ ID NO: 6065; WAN0249CT_at; Start 25; Stop 49
ttgacaaaggatgagtataggagta

SEQ ID NO: 17881 - DNA, 25 bp, Artificial
  probe
  misc_feature (1)..(25): SEQ ID NO: 6065; WAN0249CT_at; Start 67; Stop 91
aagaataaacataaagaaggctttg

SEQ ID NO: 17882 - DNA, 25 bp, Artificial
  probe
  misc_feature (1)..(25): SEQ ID NO: 6065; WAN0249CT_at; Start 27; Stop 51
gacaaaggatgagtataggagtatt

SEQ ID NO: 17883 - DNA, 25 bp, Artificial
  probe
  misc_feature (1)..(25): SEQ ID NO: 6065; WAN0249CT_at; Start 36; Stop 60
tgagtataggagtattatttataca

SEQ ID NO: 17884 - DNA, 25 bp, Artificial
  probe
  misc_feature (1)..(25): SEQ ID NO: 6065; WAN0249CT_at; Start 28; Stop 52
acaaaggatgagtataggagtatta

SEQ ID NO: 17885 - DNA, 25 bp, Artificial
  probe
  misc_feature (1)..(25): SEQ ID NO: 6065; WAN0249CT_at; Start 21; Stop 45
aggcttgacaaaggatgagtatagg

SEQ ID NO: 17886 - DNA, 25 bp, Artificial
  probe
  misc_feature (1)..(25): SEQ ID NO: 6065; WAN0249CT_at; Start 23; Stop 47
gcttgacaaaggatgagtataggag

SEQ ID NO: 17887 - DNA, 25 bp, Artificial
  probe
  misc_feature (1)..(25): SEQ ID NO: 6065; WAN0249CT_at; Start 42; Stop 66
taggagtattatttatacaataaaa

SEQ ID NO: 17888 - DNA, 25 bp, Artificial
  probe
  misc_feature (1)..(25): SEQ ID NO: 6065; WAN0249CT_at; Start 18; Stop 42
tttaggcttgacaaaggatgagtat

SEQ ID NO: 17889 - DNA, 25 bp, Artificial
  probe
  misc_feature (1)..(25): SEQ ID NO: 6065; WAN0249CT_at; Start 13; Stop 37
ttcaatttaggcttgacaaaggatg

SEQ ID NO: 17890 - DNA, 25 bp, Artificial
  probe
  misc_feature (1)..(25): SEQ ID NO: 6065; WAN0249CT_at; Start 41; Stop 65
ataggagtattatttatacaataaa

SEQ ID NO: 17891 - DNA, 25 bp, Artificial
  probe
  misc_feature (1)..(25): SEQ ID NO: 6065; WAN0249CT_at; Start 38; Stop 62
agtataggagtattatttatacaat

SEQ ID NO: 17892 - DNA, 25 bp, Artificial
  probe
  misc_feature (1)..(25): SEQ ID NO: 6065; WAN0249CT_at; Start 11; Stop 35
ttttcaatttaggcttgacaaagga

SEQ ID NO: 17893 - DNA, 25 bp, Artificial
  probe
  misc_feature (1)..(25): SEQ ID NO: 6065; WAN0249CT_at; Start 22; Stop 46
ggcttgacaaaggatgagtatagga

SEQ ID NO: 17894 - DNA, 25 bp, Artificial
  probe
  misc_feature (1)..(25): SEQ ID NO: 6065; WAN0249CT_at; Start 37; Stop 61
gagtataggagtattatttatacaa

SEQ ID NO: 17895 - DNA, 25 bp, Artificial
  probe
  misc_feature (1)..(25): SEQ ID NO: 6065; WAN0249CT_at; Start 40; Stop 64
tataggagtattatttatacaataa

SEQ ID NO: 17896 - DNA, 25 bp, Artificial
  probe
  misc_feature (1)..(25): SEQ ID NO: 6065; WAN0249CT_at; Start 20; Stop 44
taggcttgacaaaggatgagtatag

SEQ ID NO: 17897 - DNA, 25 bp, Artificial
  probe
  misc_feature (1)..(25): SEQ ID NO: 6065; WAN0249CT_at; Start 30; Stop 54
aaaggatgagtataggagtattatt

SEQ ID NO: 17898 - DNA, 25 bp, Artificial
  probe
  misc_feature (1)..(25): SEQ ID NO: 6210; WAN0249CU_at; Start 21; Stop 45
ttggagagggagtttcttcacggga

SEQ ID NO: 17899 - DNA, 25 bp, Artificial
  probe
  misc_feature (1)..(25): SEQ ID NO: 6210; WAN0249CU_at; Start 30; Stop 54
gagtttcttcacgggaggtatctct

SEQ ID NO: 17900 - DNA, 25 bp, Artificial
  probe
  misc_feature (1)..(25): SEQ ID NO: 6210; WAN0249CU_at; Start 29; Stop 53
ggagtttcttcacgggaggtatctc

SEQ ID NO: 17901 - DNA, 25 bp, Artificial
  probe
  misc_feature (1)..(25): SEQ ID NO: 6210; WAN0249CU_at; Start 22; Stop 46
tggagagggagtttcttcacgggag

SEQ ID NO: 17902 - DNA, 25 bp, Artificial
  probe
  misc_feature (1)..(25): SEQ ID NO: 6203; WAN0249CV_at; Start 4; Stop 28
gtattacttcatcttctcatgaaat

SEQ ID NO: 17903 - DNA, 25 bp, Artificial
  probe
  misc_feature (1)..(25): SEQ ID NO: 6203; WAN0249CV_at; Start 7; Stop 31
ttacttcatcttctcatgaaattga

SEQ ID NO: 17904 - DNA, 25 bp, Artificial
  probe
  misc_feature (1)..(25): SEQ ID NO: 6203; WAN0249CV_at; Start 6; Stop 30
attacttcatcttctcatgaaattg

SEQ ID NO: 17905 - DNA, 25 bp, Artificial
  probe
  misc_feature (1)..(25): SEQ ID NO: 6203; WAN0249CV_at; Start 30; Stop 54
gagtttttgcccagctcctcttgat

SEQ ID NO: 17906 - DNA, 25 bp, Artificial
  probe
  misc_feature (1)..(25): SEQ ID NO: 6203; WAN0249CV_at; Start 10; Stop 34
cttcatcttctcatgaaattgagtt

SEQ ID NO: 17907 - DNA, 25 bp, Artificial
  probe
  misc_feature (1)..(25): SEQ ID NO: 6203; WAN0249CV_at; Start 11; Stop 35
ttcatcttctcatgaaattgagttt

SEQ ID NO: 17908 - DNA, 25 bp, Artificial
  probe
  misc_feature (1)..(25): SEQ ID NO: 6203; WAN0249CV_at; Start 5; Stop 29
tattacttcatcttctcatgaaatt

SEQ ID NO: 17909 - DNA, 25 bp, Artificial
  probe
  misc_feature (1)..(25): SEQ ID NO: 6203; WAN0249CV_at; Start 1; Stop 25
tgagtattacttcatcttctcatga

SEQ ID NO: 17910 - DNA, 25 bp, Artificial
  probe
  misc_feature (1)..(25): SEQ ID NO: 6203; WAN0249CV_at; Start 8; Stop 32
tacttcatcttctcatgaaattgag

SEQ ID NO: 17911 - DNA, 25 bp, Artificial
  probe
  misc_feature (1)..(25): SEQ ID NO: 6203; WAN0249CV_at; Start 2; Stop 26
gagtattacttcatcttctcatgaa

SEQ ID NO: 17912 - DNA, 25 bp, Artificial
  probe
  misc_feature (1)..(25): SEQ ID NO: 6203; WAN0249CV_at; Start 32; Stop 56
gtttttgcccagctcctcttgatta

SEQ ID NO: 17913 - DNA, 25 bp, Artificial
  probe
  misc_feature (1)..(25): SEQ ID NO: 6203; WAN0249CV_at; Start 9; Stop 33
acttcatcttctcatgaaattgagt

SEQ ID NO: 17914 - DNA, 25 bp, Artificial
  probe
  misc_feature (1)..(25): SEQ ID NO: 6203; WAN0249CV_at; Start 31; Stop 55
agtttttgcccagctcctcttgatt

SEQ ID NO: 17915 - DNA, 25 bp, Artificial
  probe
  misc_feature (1)..(25): SEQ ID NO: 6203; WAN0249CV_at; Start 3; Stop 27
agtattacttcatcttctcatgaaa

SEQ ID NO: 17916 - DNA, 25 bp, Artificial
  probe
  misc_feature (1)..(25): SEQ ID NO: 6203; WAN0249CV_at; Start 12; Stop 36
tcatcttctcatgaaattgagtttt

SEQ ID NO: 17917 - DNA, 25 bp, Artificial
  probe
  misc_feature (1)..(25): SEQ ID NO: 6203; WAN0249CV_at; Start 33; Stop 57
tttttgcccagctcctcttgattat

SEQ ID NO: 17918 - DNA, 25 bp, Artificial
  probe
  misc_feature (1)..(25): SEQ ID NO: 6048; WAN0249CW_at; Start 22; Stop 46
gtgcaaaggtctattaactattaga

SEQ ID NO: 17919 - DNA, 25 bp, Artificial
  probe
  misc_feature (1)..(25): SEQ ID NO: 6048; WAN0249CW_at; Start 39; Stop 63
ctattagaatagtttaatgtgagtc

SEQ ID NO: 17920 - DNA, 25 bp, Artificial
  probe
  misc_feature (1)..(25): SEQ ID NO: 6048; WAN0249CW_at; Start 2; Stop 26
tgaatgttttgagacgatatgtgca

SEQ ID NO: 17921 - DNA, 25 bp, Artificial
  probe
  misc_feature (1)..(25): SEQ ID NO: 6048; WAN0249CW_at; Start 45; Stop 69
gaatagtttaatgtgagtcaaaaga

SEQ ID NO: 17922 - DNA, 25 bp, Artificial
  probe
  misc_feature (1)..(25): SEQ ID NO: 6048; WAN0249CW_at; Start 17; Stop 41
gatatgtgcaaaggtctattaacta

SEQ ID NO: 17923 - DNA, 25 bp, Artificial
  probe
  misc_feature (1)..(25): SEQ ID NO: 6048; WAN0249CW_at; Start 23; Stop 47
tgcaaaggtctattaactattagaa

SEQ ID NO: 17924 - DNA, 25 bp, Artificial
  probe
  misc_feature (1)..(25): SEQ ID NO: 6048; WAN0249CW_at; Start 43; Stop 67
tagaatagtttaatgtgagtcaaaa

SEQ ID NO: 17925 - DNA, 25 bp, Artificial
  probe
  misc_feature (1)..(25): SEQ ID NO: 6048; WAN0249CW_at; Start 26; Stop 50
aaaggtctattaactattagaatag

SEQ ID NO: 17926 - DNA, 25 bp, Artificial
  probe
  misc_feature (1)..(25): SEQ ID NO: 6048; WAN0249CW_at; Start 50; Stop 74
gtttaatgtgagtcaaaagaagttg

SEQ ID NO: 17927 - DNA, 25 bp, Artificial
  probe
  misc_feature (1)..(25): SEQ ID NO: 6048; WAN0249CW_at; Start 9; Stop 33
tttgagacgatatgtgcaaaggtct

SEQ ID NO: 17928 - DNA, 25 bp, Artificial
  probe
  misc_feature (1)..(25): SEQ ID NO: 6048; WAN0249CW_at; Start 5; Stop 29
atgttttgagacgatatgtgcaaag

SEQ ID NO: 17929 - DNA, 25 bp, Artificial
  probe
  misc_feature (1)..(25): SEQ ID NO: 6048; WAN0249CW_at; Start 19; Stop 43
tatgtgcaaaggtctattaactatt

SEQ ID NO: 17930 - DNA, 25 bp, Artificial
  probe
  misc_feature (1)..(25): SEQ ID NO: 6048; WAN0249CW_at; Start 54; Stop 78
aatgtgagtcaaaagaagttgtaaa

SEQ ID NO: 17931 - DNA, 25 bp, Artificial
  probe
  misc_feature (1)..(25): SEQ ID NO: 6048; WAN0249CW_at; Start 8; Stop 32
ttttgagacgatatgtgcaaaggtc

SEQ ID NO: 17932 - DNA, 25 bp, Artificial
  probe
  misc_feature (1)..(25): SEQ ID NO: 6048; WAN0249CW_at; Start 21; Stop 45
tgtgcaaaggtctattaactattag

SEQ ID NO: 17933 - DNA, 25 bp, Artificial
  probe
  misc_feature (1)..(25): SEQ ID NO: 6048; WAN0249CW_at; Start 16; Stop 40
cgatatgtgcaaaggtctattaact

SEQ ID NO: 17934 - DNA, 25 bp, Artificial
  probe
  misc_feature (1)..(25): SEQ ID NO: 6048; WAN0249CW_at; Start 7; Stop 31
gttttgagacgatatgtgcaaaggt

SEQ ID NO: 17935 - DNA, 25 bp, Artificial
  probe
  misc_feature (1)..(25): SEQ ID NO: 6048; WAN0249CW_at; Start 13; Stop 37
agacgatatgtgcaaaggtctatta

SEQ ID NO: 17936 - DNA, 25 bp, Artificial
  probe
  misc_feature (1)..(25): SEQ ID NO: 6048; WAN0249CW_at; Start 48; Stop 72
tagtttaatgtgagtcaaaagaagt

SEQ ID NO: 17937 - DNA, 25 bp, Artificial
  probe
  misc_feature (1)..(25): SEQ ID NO: 6048; WAN0249CW_at; Start 56; Stop 80
tgtgagtcaaaagaagttgtaaaaa

SEQ ID NO: 17938 - DNA, 25 bp, Artificial
  probe
  misc_feature (1)..(25): SEQ ID NO: 6048; WAN0249CW_at; Start 4; Stop 28
aatgttttgagacgatatgtgcaaa

SEQ ID NO: 17939 - DNA, 25 bp, Artificial
  probe
  misc_feature (1)..(25): SEQ ID NO: 6048; WAN0249CW_at; Start 53; Stop 77
taatgtgagtcaaaagaagttgtaa

SEQ ID NO: 17940 - DNA, 25 bp, Artificial
  probe
  misc_feature (1)..(25): SEQ ID NO: 6048; WAN0249CW_at; Start 51; Stop 75
tttaatgtgagtcaaaagaagttgt

SEQ ID NO: 17941 - DNA, 25 bp, Artificial
  probe
  misc_feature (1)..(25): SEQ ID NO: 6048; WAN0249CW_at; Start 15; Stop 39
acgatatgtgcaaaggtctattaac

SEQ ID NO: 17942 - DNA, 25 bp, Artificial
  probe
  misc_feature (1)..(25): SEQ ID NO: 6048; WAN0249CW_at; Start 10; Stop 34
ttgagacgatatgtgcaaaggtcta

SEQ ID NO: 17943 - DNA, 25 bp, Artificial
  probe
  misc_feature (1)..(25): SEQ ID NO: 6048; WAN0249CW_at; Start 12; Stop 36
gagacgatatgtgcaaaggtctatt

SEQ ID NO: 17944 - DNA, 25 bp, Artificial
  probe
  misc_feature (1)..(25): SEQ ID NO: 6048; WAN0249CW_at; Start 14; Stop 38
gacgatatgtgcaaaggtctattaa

SEQ ID NO: 17945 - DNA, 25 bp, Artificial
  probe
  misc_feature (1)..(25): SEQ ID NO: 6048; WAN0249CW_at; Start 44; Stop 68
agaatagtttaatgtgagtcaaaag

SEQ ID NO: 17946 - DNA, 25 bp, Artificial
  probe
  misc_feature (1)..(25): SEQ ID NO: 6048; WAN0249CW_at; Start 6; Stop 30
tgttttgagacgatatgtgcaaagg

SEQ ID NO: 17947 - DNA, 25 bp, Artificial
  probe
  misc_feature (1)..(25): SEQ ID NO: 6048; WAN0249CW_at; Start 40; Stop 64
tattagaatagtttaatgtgagtca

SEQ ID NO: 17948 - DNA, 25 bp, Artificial
  probe
  misc_feature (1)..(25): SEQ ID NO: 6048; WAN0249CW_at; Start 11; Stop 35
tgagacgatatgtgcaaaggtctat

SEQ ID NO: 17949 - DNA, 25 bp, Artificial
  probe
  misc_feature (1)..(25): SEQ ID NO: 6048; WAN0249CW_at; Start 24; Stop 48
gcaaaggtctattaactattagaat

SEQ ID NO: 17950 - DNA, 25 bp, Artificial
  probe
  misc_feature (1)..(25): SEQ ID NO: 6048; WAN0249CW_at; Start 3; Stop 27
gaatgttttgagacgatatgtgcaa

SEQ ID NO: 17951 - DNA, 25 bp, Artificial
  probe
  misc_feature (1)..(25): SEQ ID NO: 6048; WAN0249CW_at; Start 1; Stop 25
atgaatgttttgagacgatatgtgc

SEQ ID NO: 17952 - DNA, 25 bp, Artificial
  probe
  misc_feature (1)..(25): SEQ ID NO: 6013; WAN0249CX_at; Start 102; Stop 126
gaagctgattagagatataatgaag

SEQ ID NO: 17953 - DNA, 25 bp, Artificial
  probe
  misc_feature (1)..(25): SEQ ID NO: 6013; WAN0249CX_at; Start 54; Stop 78
ctttggtaacagaactgcgtgagct

SEQ ID NO: 17954 - DNA, 25 bp, Artificial
  probe
  misc_feature (1)..(25): SEQ ID NO: 6013; WAN0249CX_at; Start 57; Stop 81
tggtaacagaactgcgtgagctgga

SEQ ID NO: 17955 - DNA, 25 bp, Artificial
  probe
  misc_feature (1)..(25): SEQ ID NO: 6013; WAN0249CX_at; Start 19; Stop 43
agttataagtattgctagtttgctt

SEQ ID NO: 17956 - DNA, 25 bp, Artificial
  probe
  misc_feature (1)..(25): SEQ ID NO: 6013; WAN0249CX_at; Start 58; Stop 82
ggtaacagaactgcgtgagctggat

SEQ ID NO: 17957 - DNA, 25 bp, Artificial
  probe
  misc_feature (1)..(25): SEQ ID NO: 6013; WAN0249CX_at; Start 89; Stop 113
gaattttgacaaagaagctgattag

SEQ ID NO: 17958 - DNA, 25 bp, Artificial
  probe
  misc_feature (1)..(25): SEQ ID NO: 6013; WAN0249CX_at; Start 52; Stop 76
gtctttggtaacagaactgcgtgag

SEQ ID NO: 17959 - DNA, 25 bp, Artificial
  probe
  misc_feature (1)..(25): SEQ ID NO: 6013; WAN0249CX_at; Start 46; Stop 70
tgaacggtctttggtaacagaactg

SEQ ID NO: 17960 - DNA, 25 bp, Artificial
  probe
  misc_feature (1)..(25): SEQ ID NO: 6013; WAN0249CX_at; Start 50; Stop 74
cggtctttggtaacagaactgcgtg

SEQ ID NO: 17961 - DNA, 25 bp, Artificial
  probe
  misc_feature (1)..(25): SEQ ID NO: 6013; WAN0249CX_at; Start 17; Stop 41
taagttataagtattgctagtttgc

SEQ ID NO: 17962 - DNA, 25 bp, Artificial
  probe
  misc_feature (1)..(25): SEQ ID NO: 6013; WAN0249CX_at; Start 75; Stop 99
agctggatgggtgagaattttgaca

SEQ ID NO: 17963 - DNA, 25 bp, Artificial
  probe
  misc_feature (1)..(25): SEQ ID NO: 6013; WAN0249CX_at; Start 51; Stop 75
ggtctttggtaacagaactgcgtga

SEQ ID NO: 17964 - DNA, 25 bp, Artificial
  probe
  misc_feature (1)..(25): SEQ ID NO: 6013; WAN0249CX_at; Start 96; Stop 120
gacaaagaagctgattagagatata

SEQ ID NO: 17965 - DNA, 25 bp, Artificial
  probe
  misc_feature (1)..(25): SEQ ID NO: 6013; WAN0249CX_at; Start 92; Stop 116
ttttgacaaagaagctgattagaga

SEQ ID NO: 17966 - DNA, 25 bp, Artificial
  probe
  misc_feature (1)..(25): SEQ ID NO: 6013; WAN0249CX_at; Start 119; Stop 143
taatgaagaaaaatcgagcaaggaa

SEQ ID NO: 17967 - DNA, 25 bp, Artificial
  probe
  misc_feature (1)..(25): SEQ ID NO: 6013; WAN0249CX_at; Start 79; Stop 103
ggatgggtgagaattttgacaaaga

SEQ ID NO: 17968 - DNA, 25 bp, Artificial
  probe
  misc_feature (1)..(25): SEQ ID NO: 6013; WAN0249CX_at; Start 63; Stop 87
cagaactgcgtgagctggatgggtg

SEQ ID NO: 17969 - DNA, 25 bp, Artificial
  probe
  misc_feature (1)..(25): SEQ ID NO: 6013; WAN0249CX_at; Start 55; Stop 79
tttggtaacagaactgcgtgagctg

SEQ ID NO: 17970 - DNA, 25 bp, Artificial
  probe
  misc_feature (1)..(25): SEQ ID NO: 6013; WAN0249CX_at; Start 76; Stop 100
gctggatgggtgagaattttgacaa

SEQ ID NO: 17971 - DNA, 25 bp, Artificial
  probe
  misc_feature (1)..(25): SEQ ID NO: 6013; WAN0249CX_at; Start 117; Stop 141
tataatgaagaaaaatcgagcaagg

SEQ ID NO: 17972 - DNA, 25 bp, Artificial
  probe
  misc_feature (1)..(25): SEQ ID NO: 6013; WAN0249CX_at; Start 60; Stop 84
taacagaactgcgtgagctggatgg

SEQ ID NO: 17973 - DNA, 25 bp, Artificial
  probe
  misc_feature (1)..(25): SEQ ID NO: 6013; WAN0249CX_at; Start 53; Stop 77
tctttggtaacagaactgcgtgagc

SEQ ID NO: 17974 - DNA, 25 bp, Artificial
  probe
  misc_feature (1)..(25): SEQ ID NO: 6013; WAN0249CX_at; Start 77; Stop 101
ctggatgggtgagaattttgacaaa

SEQ ID NO: 17975 - DNA, 25 bp, Artificial
  probe
  misc_feature (1)..(25): SEQ ID NO: 6013; WAN0249CX_at; Start 86; Stop 110
tgagaattttgacaaagaagctgat

SEQ ID NO: 17976 - DNA, 25 bp, Artificial
  probe
  misc_feature (1)..(25): SEQ ID NO: 6013; WAN0249CX_at; Start 98; Stop 122
caaagaagctgattagagatataat

SEQ ID NO: 17977 - DNA, 25 bp, Artificial
  probe
  misc_feature (1)..(25): SEQ ID NO: 6013; WAN0249CX_at; Start 47; Stop 71
gaacggtctttggtaacagaactgc

SEQ ID NO: 17978 - DNA, 25 bp, Artificial
  probe
  misc_feature (1)..(25): SEQ ID NO: 6013; WAN0249CX_at; Start 84; Stop 108
ggtgagaattttgacaaagaagctg

SEQ ID NO: 17979 - DNA, 25 bp, Artificial
  probe
  misc_feature (1)..(25): SEQ ID NO: 6013; WAN0249CX_at; Start 94; Stop 118
ttgacaaagaagctgattagagata

SEQ ID NO: 17980 - DNA, 25 bp, Artificial
  probe
  misc_feature (1)..(25): SEQ ID NO: 6013; WAN0249CX_at; Start 91; Stop 115
attttgacaaagaagctgattagag

SEQ ID NO: 17981 - DNA, 25 bp, Artificial
  probe
  misc_feature (1)..(25): SEQ ID NO: 6013; WAN0249CX_at; Start 82; Stop 106
tgggtgagaattttgacaaagaagc

SEQ ID NO: 17982 - DNA, 25 bp, Artificial
  probe
  misc_feature (1)..(25): SEQ ID NO: 6013; WAN0249CX_at; Start 122; Stop 146
tgaagaaaaatcgagcaaggaaaaa

SEQ ID NO: 17983 - DNA, 25 bp, Artificial
  probe
  misc_feature (1)..(25): SEQ ID NO: 6013; WAN0249CX_at; Start 49; Stop 73
acggtctttggtaacagaactgcgt

SEQ ID NO: 17984 - DNA, 25 bp, Artificial
  probe
  misc_feature (1)..(25): SEQ ID NO: 6013; WAN0249CX_at; Start 48; Stop 72
aacggtctttggtaacagaactgcg

SEQ ID NO: 17985 - DNA, 25 bp, Artificial
  probe
  misc_feature (1)..(25): SEQ ID NO: 6013; WAN0249CX_at; Start 80; Stop 104
gatgggtgagaattttgacaaagaa

SEQ ID NO: 17986 - DNA, 25 bp, Artificial
  probe
  misc_feature (1)..(25): SEQ ID NO: 3261; WAN0249CY_at; Start 93; Stop 117
tttaactctctaatttttagcacaa

SEQ ID NO: 17987 - DNA, 25 bp, Artificial
  probe
  misc_feature (1)..(25): SEQ ID NO: 3261; WAN0249CY_at; Start 124; Stop 148
gagtttaacagtaacacacaaatac

SEQ ID NO: 17988 - DNA, 25 bp, Artificial
  probe
  misc_feature (1)..(25): SEQ ID NO: 3261; WAN0249CY_at; Start 44; Stop 68
atataataccgatttttatagaaat

SEQ ID NO: 17989 - DNA, 25 bp, Artificial
  probe
  misc_feature (1)..(25): SEQ ID NO: 3261; WAN0249CY_at; Start 121; Stop 145
tgtgagtttaacagtaacacacaaa

SEQ ID NO: 17990 - DNA, 25 bp, Artificial
  probe
  misc_feature (1)..(25): SEQ ID NO: 3261; WAN0249CY_at; Start 119; Stop 143
tgtgtgagtttaacagtaacacaca

SEQ ID NO: 17991 - DNA, 25 bp, Artificial
  probe
  misc_feature (1)..(25): SEQ ID NO: 3261; WAN0249CY_at; Start 102; Stop 126
ctaatttttagcacaaatgtgtgag

SEQ ID NO: 17992 - DNA, 25 bp, Artificial
  probe
  misc_feature (1)..(25): SEQ ID NO: 3261; WAN0249CY_at; Start 97; Stop 121
actctctaatttttagcacaaatgt

SEQ ID NO: 17993 - DNA, 25 bp, Artificial
  probe
  misc_feature (1)..(25): SEQ ID NO: 3261; WAN0249CY_at; Start 111; Stop 135
agcacaaatgtgtgagtttaacagt

SEQ ID NO: 17994 - DNA, 25 bp, Artificial
  probe
  misc_feature (1)..(25): SEQ ID NO: 3261; WAN0249CY_at; Start 96; Stop 120
aactctctaatttttagcacaaatg

SEQ ID NO: 17995 - DNA, 25 bp, Artificial
  probe
  misc_feature (1)..(25): SEQ ID NO: 3261; WAN0249CY_at; Start 105; Stop 129
atttttagcacaaatgtgtgagttt

SEQ ID NO: 17996 - DNA, 25 bp, Artificial
  probe
  misc_feature (1)..(25): SEQ ID NO: 3261; WAN0249CY_at; Start 109; Stop 133
ttagcacaaatgtgtgagtttaaca

SEQ ID NO: 17997 - DNA, 25 bp, Artificial
  probe
  misc_feature (1)..(25): SEQ ID NO: 3261; WAN0249CY_at; Start 94; Stop 118
ttaactctctaatttttagcacaaa

SEQ ID NO: 17998 - DNA, 25 bp, Artificial
  probe
  misc_feature (1)..(25): SEQ ID NO: 3261; WAN0249CY_at; Start 123; Stop 147
tgagtttaacagtaacacacaaata

SEQ ID NO: 17999 - DNA, 25 bp, Artificial
  probe
  misc_feature (1)..(25): SEQ ID NO: 3261; WAN0249CY_at; Start 92; Stop 116
ttttaactctctaatttttagcaca

SEQ ID NO: 18000 - DNA, 25 bp, Artificial
  probe
  misc_feature (1)..(25): SEQ ID NO: 3261; WAN0249CY_at; Start 117; Stop 141
aatgtgtgagtttaacagtaacaca

SEQ ID NO: 18001 - DNA, 25 bp, Artificial
  probe
  misc_feature (1)..(25): SEQ ID NO: 3261; WAN0249CY_at; Start 104; Stop 128
aatttttagcacaaatgtgtgagtt

SEQ ID NO: 18002 - DNA, 25 bp, Artificial
  probe
  misc_feature (1)..(25): SEQ ID NO: 3261; WAN0249CY_at; Start 108; Stop 132
tttagcacaaatgtgtgagtttaac

SEQ ID NO: 18003 - DNA, 25 bp, Artificial
  probe
  misc_feature (1)..(25): SEQ ID NO: 3261; WAN0249CY_at; Start 112; Stop 136
gcacaaatgtgtgagtttaacagta

SEQ ID NO: 18004 - DNA, 25 bp, Artificial
  probe
  misc_feature (1)..(25): SEQ ID NO: 3261; WAN0249CY_at; Start 113; Stop 137
cacaaatgtgtgagtttaacagtaa

SEQ ID NO: 18005 - DNA, 25 bp, Artificial
  probe
  misc_feature (1)..(25): SEQ ID NO: 3261; WAN0249CY_at; Start 115; Stop 139
caaatgtgtgagtttaacagtaaca

SEQ ID NO: 18006 - DNA, 25 bp, Artificial
  probe
  misc_feature (1)..(25): SEQ ID NO: 3261; WAN0249CY_at; Start 95; Stop 119
taactctctaatttttagcacaaat

SEQ ID NO: 18007 - DNA, 25 bp, Artificial
  probe
  misc_feature (1)..(25): SEQ ID NO: 3261; WAN0249CY_at; Start 120; Stop 144
gtgtgagtttaacagtaacacacaa

SEQ ID NO: 18008 - DNA, 25 bp, Artificial
  probe
  misc_feature (1)..(25): SEQ ID NO: 3261; WAN0249CY_at; Start 118; Stop 142
atgtgtgagtttaacagtaacacac

SEQ ID NO: 18009 - DNA, 25 bp, Artificial
  probe
  misc_feature (1)..(25): SEQ ID NO: 3261; WAN0249CY_at; Start 122; Stop 146
gtgagtttaacagtaacacacaaat

SEQ ID NO: 18010 - DNA, 25 bp, Artificial
  probe
  misc_feature (1)..(25): SEQ ID NO: 3261; WAN0249CY_at; Start 110; Stop 134
tagcacaaatgtgtgagtttaacag

SEQ ID NO: 18011 - DNA, 25 bp, Artificial
  probe
  misc_feature (1)..(25): SEQ ID NO: 3261; WAN0249CY_at; Start 114; Stop 138
acaaatgtgtgagtttaacagtaac

SEQ ID NO: 18012 - DNA, 25 bp, Artificial
  probe
  misc_feature (1)..(25): SEQ ID NO: 3261; WAN0249CY_at; Start 107; Stop 131
ttttagcacaaatgtgtgagtttaa

SEQ ID NO: 18013 - DNA, 25 bp, Artificial
  probe
  misc_feature (1)..(25): SEQ ID NO: 3261; WAN0249CY_at; Start 103; Stop 127
taatttttagcacaaatgtgtgagt

SEQ ID NO: 18014 - DNA, 25 bp, Artificial
  probe
  misc_feature (1)..(25): SEQ ID NO: 3261; WAN0249CY_at; Start 99; Stop 123
tctctaatttttagcacaaatgtgt

SEQ ID NO: 18015 - DNA, 25 bp, Artificial
  probe
  misc_feature (1)..(25): SEQ ID NO: 3261; WAN0249CY_at; Start 101; Stop 125
tctaatttttagcacaaatgtgtga

SEQ ID NO: 18016 - DNA, 25 bp, Artificial
  probe
  misc_feature (1)..(25): SEQ ID NO: 3261; WAN0249CY_at; Start 98; Stop 122
ctctctaatttttagcacaaatgtg

SEQ ID NO: 18017 - DNA, 25 bp, Artificial
  probe
  misc_feature (1)..(25): SEQ ID NO: 3261; WAN0249CY_at; Start 100; Stop 124
ctctaatttttagcacaaatgtgtg

SEQ ID NO: 18018 - DNA, 25 bp, Artificial
  probe
  misc_feature (1)..(25): SEQ ID NO: 3261; WAN0249CY_at; Start 116; Stop 140
aaatgtgtgagtttaacagtaacac

SEQ ID NO: 18019 - DNA, 25 bp, Artificial
  probe
  misc_feature (1)..(25): SEQ ID NO: 3261; WAN0249CY_at; Start 106; Stop 130
tttttagcacaaatgtgtgagttta

SEQ ID NO: 18020 - DNA, 25 bp, Artificial
  probe
  misc_feature (1)..(25): SEQ ID NO: 468; WAN0249CZ_at; Start 29; Stop 53
cacatttgtgctaaaaattagagag

SEQ ID NO: 18021 - DNA, 25 bp, Artificial
  probe
  misc_feature (1)..(25): SEQ ID NO: 468; WAN0249CZ_at; Start 23; Stop 47
aactcacacatttgtgctaaaaatt

SEQ ID NO: 18022 - DNA, 25 bp, Artificial
  probe
  misc_feature (1)..(25): SEQ ID NO: 468; WAN0249CZ_at; Start 21; Stop 45
taaactcacacatttgtgctaaaaa

SEQ ID NO: 18023 - DNA, 25 bp, Artificial
  probe
  misc_feature (1)..(25): SEQ ID NO: 468; WAN0249CZ_at; Start 33; Stop 57
tttgtgctaaaaattagagagttaa

SEQ ID NO: 18024 - DNA, 25 bp, Artificial
  probe
  misc_feature (1)..(25): SEQ ID NO: 468; WAN0249CZ_at; Start 6; Stop 30
tttgtgtgttactgttaaactcaca

SEQ ID NO: 18025 - DNA, 25 bp, Artificial
  probe
  misc_feature (1)..(25): SEQ ID NO: 468; WAN0249CZ_at; Start 11; Stop 35
gtgttactgttaaactcacacattt

SEQ ID NO: 18026 - DNA, 25 bp, Artificial
  probe
  misc_feature (1)..(25): SEQ ID NO: 468; WAN0249CZ_at; Start 24; Stop 48
actcacacatttgtgctaaaaatta

SEQ ID NO: 18027 - DNA, 25 bp, Artificial
  probe
  misc_feature (1)..(25): SEQ ID NO: 468; WAN0249CZ_at; Start 32; Stop 56
atttgtgctaaaaattagagagtta

SEQ ID NO: 18028 - DNA, 25 bp, Artificial
  probe
  misc_feature (1)..(25): SEQ ID NO: 468; WAN0249CZ_at; Start 18; Stop 42
tgttaaactcacacatttgtgctaa

SEQ ID NO: 18029 - DNA, 25 bp, Artificial
  probe
  misc_feature (1)..(25): SEQ ID NO: 468; WAN0249CZ_at; Start 17; Stop 41
ctgttaaactcacacatttgtgcta

SEQ ID NO: 18030 - DNA, 25 bp, Artificial
  probe
  misc_feature (1)..(25): SEQ ID NO: 468; WAN0249CZ_at; Start 35; Stop 59
tgtgctaaaaattagagagttaaaa

SEQ ID NO: 18031 - DNA, 25 bp, Artificial
  probe
  misc_feature (1)..(25): SEQ ID NO: 468; WAN0249CZ_at; Start 20; Stop 44
ttaaactcacacatttgtgctaaaa

SEQ ID NO: 18032 - DNA, 25 bp, Artificial
  probe
  misc_feature (1)..(25): SEQ ID NO: 468; WAN0249CZ_at; Start 22; Stop 46
aaactcacacatttgtgctaaaaat

SEQ ID NO: 18033 - DNA, 25 bp, Artificial
  probe
  misc_feature (1)..(25): SEQ ID NO: 468; WAN0249CZ_at; Start 3; Stop 27
gtatttgtgtgttactgttaaactc

SEQ ID NO: 18034 - DNA, 25 bp, Artificial
  probe
  misc_feature (1)..(25): SEQ ID NO: 468; WAN0249CZ_at; Start 25; Stop 49
ctcacacatttgtgctaaaaattag

SEQ ID NO: 18035 - DNA, 25 bp, Artificial
  probe
  misc_feature (1)..(25): SEQ ID NO: 468; WAN0249CZ_at; Start 12; Stop 36
tgttactgttaaactcacacatttg

SEQ ID NO: 18036 - DNA, 25 bp, Artificial
  probe
  misc_feature (1)..(25): SEQ ID NO: 468; WAN0249CZ_at; Start 30; Stop 54
acatttgtgctaaaaattagagagt

SEQ ID NO: 18037 - DNA, 25 bp, Artificial
  probe
  misc_feature (1)..(25): SEQ ID NO: 468; WAN0249CZ_at; Start 9; Stop 33
gtgtgttactgttaaactcacacat

SEQ ID NO: 18038 - DNA, 25 bp, Artificial
  probe
  misc_feature (1)..(25): SEQ ID NO: 468; WAN0249CZ_at; Start 28; Stop 52
acacatttgtgctaaaaattagaga

SEQ ID NO: 18039 - DNA, 25 bp, Artificial
  probe
  misc_feature (1)..(25): SEQ ID NO: 468; WAN0249CZ_at; Start 13; Stop 37
gttactgttaaactcacacatttgt

SEQ ID NO: 18040 - DNA, 25 bp, Artificial
  probe
  misc_feature (1)..(25): SEQ ID NO: 468; WAN0249CZ_at; Start 26; Stop 50
tcacacatttgtgctaaaaattaga

SEQ ID NO: 18041 - DNA, 25 bp, Artificial
  probe
  misc_feature (1)..(25): SEQ ID NO: 468; WAN0249CZ_at; Start 34; Stop 58
ttgtgctaaaaattagagagttaaa

SEQ ID NO: 18042 - DNA, 25 bp, Artificial
  probe
  misc_feature (1)..(25): SEQ ID NO: 468; WAN0249CZ_at; Start 31; Stop 55
catttgtgctaaaaattagagagtt

SEQ ID NO: 18043 - DNA, 25 bp, Artificial
  probe
  misc_feature (1)..(25): SEQ ID NO: 468; WAN0249CZ_at; Start 27; Stop 51
cacacatttgtgctaaaaattagag

SEQ ID NO: 18044 - DNA, 25 bp, Artificial
  probe
  misc_feature (1)..(25): SEQ ID NO: 468; WAN0249CZ_at; Start 10; Stop 34
tgtgttactgttaaactcacacatt

SEQ ID NO: 18045 - DNA, 25 bp, Artificial
  probe
  misc_feature (1)..(25): SEQ ID NO: 468; WAN0249CZ_at; Start 19; Stop 43
gttaaactcacacatttgtgctaaa

SEQ ID NO: 18046 - DNA, 25 bp, Artificial
  probe
  misc_feature (1)..(25): SEQ ID NO: 468; WAN0249CZ_at; Start 14; Stop 38
ttactgttaaactcacacatttgtg

SEQ ID NO: 18047 - DNA, 25 bp, Artificial
  probe
  misc_feature (1)..(25): SEQ ID NO: 468; WAN0249CZ_at; Start 5; Stop 29
atttgtgtgttactgttaaactcac

SEQ ID NO: 18048 - DNA, 25 bp, Artificial
  probe
  misc_feature (1)..(25): SEQ ID NO: 468; WAN0249CZ_at; Start 4; Stop 28
tatttgtgtgttactgttaaactca

SEQ ID NO: 18049 - DNA, 25 bp, Artificial
  probe
  misc_feature (1)..(25): SEQ ID NO: 468; WAN0249CZ_at; Start 16; Stop 40
actgttaaactcacacatttgtgct

SEQ ID NO: 18050 - DNA, 25 bp, Artificial
  probe
  misc_feature (1)..(25): SEQ ID NO: 468; WAN0249CZ_at; Start 8; Stop 32
tgtgtgttactgttaaactcacaca

SEQ ID NO: 18051 - DNA, 25 bp, Artificial
  probe
  misc_feature (1)..(25): SEQ ID NO: 468; WAN0249CZ_at; Start 74; Stop 98
agcttgaaaatttctataaaaatcg

SEQ ID NO: 18052 - DNA, 25 bp, Artificial
  probe
  misc_feature (1)..(25): SEQ ID NO: 468; WAN0249CZ_at; Start 15; Stop 39
tactgttaaactcacacatttgtgc

SEQ ID NO: 18053 - DNA, 25 bp, Artificial
  probe
  misc_feature (1)..(25): SEQ ID NO: 468; WAN0249CZ_at; Start 7; Stop 31
ttgtgtgttactgttaaactcacac

SEQ ID NO: 18054 - DNA, 25 bp, Artificial
  probe
  misc_feature (1)..(25): SEQ ID NO: 162; WAN0249D2_at; Start 152; Stop 176
caaatgaaaaaagctttttacatag

SEQ ID NO: 18055 - DNA, 25 bp, Artificial
  probe
  misc_feature (1)..(25): SEQ ID NO: 162; WAN0249D2_at; Start 2; Stop 26
aatgatagactgattcagtttatcg

SEQ ID NO: 18056 - DNA, 25 bp, Artificial
  probe
  misc_feature (1)..(25): SEQ ID NO: 162; WAN0249D2_at; Start 46; Stop 70
gcacatttgtgcttatataaacaaa

SEQ ID NO: 18057 - DNA, 25 bp, Artificial
  probe
  misc_feature (1)..(25): SEQ ID NO: 162; WAN0249D2_at; Start 33; Stop 57
tttttagttgattgcacatttgtgc

SEQ ID NO: 18058 - DNA, 25 bp, Artificial
  probe
  misc_feature (1)..(25): SEQ ID NO: 162; WAN0249D2_at; Start 162; Stop 186
aagctttttacatagtgaaatgagg

SEQ ID NO: 18059 - DNA, 25 bp, Artificial
  probe
  misc_feature (1)..(25): SEQ ID NO: 162; WAN0249D2_at; Start 167; Stop 191
ttttacatagtgaaatgaggaggaa

SEQ ID NO: 18060 - DNA, 25 bp, Artificial
  probe
  misc_feature (1)..(25): SEQ ID NO: 162; WAN0249D2_at; Start 168; Stop 192
tttacatagtgaaatgaggaggaat

SEQ ID NO: 18061 - DNA, 25 bp, Artificial
  probe
  misc_feature (1)..(25): SEQ ID NO: 162; WAN0249D2_at; Start 164; Stop 188
gctttttacatagtgaaatgaggag

SEQ ID NO: 18062 - DNA, 25 bp, Artificial
  probe
  misc_feature (1)..(25): SEQ ID NO: 162; WAN0249D2_at; Start 34; Stop 58
ttttagttgattgcacatttgtgct

SEQ ID NO: 18063 - DNA, 25 bp, Artificial
  probe
  misc_feature (1)..(25): SEQ ID NO: 162; WAN0249D2_at; Start 169; Stop 193
ttacatagtgaaatgaggaggaatt

SEQ ID NO: 18064 - DNA, 25 bp, Artificial
  probe
  misc_feature (1)..(25): SEQ ID NO: 162; WAN0249D2_at; Start 80; Stop 104
tctgttgtttttggattgacaactt

SEQ ID NO: 18065 - DNA, 25 bp, Artificial
  probe
  misc_feature (1)..(25): SEQ ID NO: 162; WAN0249D2_at; Start 90; Stop 114
ttggattgacaactttattatgtag

SEQ ID NO: 18066 - DNA, 25 bp, Artificial
  probe
  misc_feature (1)..(25): SEQ ID NO: 162; WAN0249D2_at; Start 53; Stop 77
tgtgcttatataaacaaaaatagtt

SEQ ID NO: 18067 - DNA, 25 bp, Artificial
  probe
  misc_feature (1)..(25): SEQ ID NO: 162; WAN0249D2_at; Start 5; Stop 29
gatagactgattcagtttatcgttt

SEQ ID NO: 18068 - DNA, 25 bp, Artificial
  probe
  misc_feature (1)..(25): SEQ ID NO: 162; WAN0249D2_at; Start 156; Stop 180
tgaaaaaagctttttacatagtgaa

SEQ ID NO: 18069 - DNA, 25 bp, Artificial
  probe
  misc_feature (1)..(25): SEQ ID NO: 162; WAN0249D2_at; Start 170; Stop 194
tacatagtgaaatgaggaggaattt

SEQ ID NO: 18070 - DNA, 25 bp, Artificial
  probe
  misc_feature (1)..(25): SEQ ID NO: 162; WAN0249D2_at; Start 161; Stop 185
aaagctttttacatagtgaaatgag

SEQ ID NO: 18071 - DNA, 25 bp, Artificial
  probe
  misc_feature (1)..(25): SEQ ID NO: 162; WAN0249D2_at; Start 165; Stop 189
ctttttacatagtgaaatgaggagg

SEQ ID NO: 18072 - DNA, 25 bp, Artificial
  probe
  misc_feature (1)..(25): SEQ ID NO: 162; WAN0249D2_at; Start 45; Stop 69
tgcacatttgtgcttatataaacaa

SEQ ID NO: 18073 - DNA, 25 bp, Artificial
  probe
  misc_feature (1)..(25): SEQ ID NO: 162; WAN0249D2_at; Start 78; Stop 102
tatctgttgtttttggattgacaac

SEQ ID NO: 18074 - DNA, 25 bp, Artificial
  probe
  misc_feature (1)..(25): SEQ ID NO: 162; WAN0249D2_at; Start 8; Stop 32
agactgattcagtttatcgtttttc

SEQ ID NO: 18075 - DNA, 25 bp, Artificial
  probe
  misc_feature (1)..(25): SEQ ID NO: 162; WAN0249D2_at; Start 9; Stop 33
gactgattcagtttatcgtttttct

SEQ ID NO: 18076 - DNA, 25 bp, Artificial
  probe
  misc_feature (1)..(25): SEQ ID NO: 162; WAN0249D2_at; Start 116; Stop 140
tgtattctatagttacaaaagaaaa

SEQ ID NO: 18077 - DNA, 25 bp, Artificial
  probe
  misc_feature (1)..(25): SEQ ID NO: 162; WAN0249D2_at; Start 166; Stop 190
tttttacatagtgaaatgaggagga

SEQ ID NO: 18078 - DNA, 25 bp, Artificial
  probe
  misc_feature (1)..(25): SEQ ID NO: 162; WAN0249D2_at; Start 108; Stop 132
tatgtagttgtattctatagttaca

SEQ ID NO: 18079 - DNA, 25 bp, Artificial
  probe
  misc_feature (1)..(25): SEQ ID NO: 162; WAN0249D2_at; Start 26; Stop 50
gtttttctttttagttgattgcaca

SEQ ID NO: 18080 - DNA, 25 bp, Artificial
  probe
  misc_feature (1)..(25): SEQ ID NO: 162; WAN0249D2_at; Start 37; Stop 61
tagttgattgcacatttgtgcttat

SEQ ID NO: 18081 - DNA, 25 bp, Artificial
  probe
  misc_feature (1)..(25): SEQ ID NO: 162; WAN0249D2_at; Start 91; Stop 115
tggattgacaactttattatgtagt

SEQ ID NO: 18082 - DNA, 25 bp, Artificial
  probe
  misc_feature (1)..(25): SEQ ID NO: 162; WAN0249D2_at; Start 32; Stop 56
ctttttagttgattgcacatttgtg

SEQ ID NO: 18083 - DNA, 25 bp, Artificial
  probe
  misc_feature (1)..(25): SEQ ID NO: 162; WAN0249D2_at; Start 112; Stop 136
tagttgtattctatagttacaaaag

SEQ ID NO: 18084 - DNA, 25 bp, Artificial
  probe
  misc_feature (1)..(25): SEQ ID NO: 162; WAN0249D2_at; Start 159; Stop 183
aaaaagctttttacatagtgaaatg

SEQ ID NO: 18085 - DNA, 25 bp, Artificial
  probe
  misc_feature (1)..(25): SEQ ID NO: 162; WAN0249D2_at; Start 163; Stop 187
agctttttacatagtgaaatgagga

SEQ ID NO: 18086 - DNA, 25 bp, Artificial
  probe
  misc_feature (1)..(25): SEQ ID NO: 162; WAN0249D2_at; Start 93; Stop 117
gattgacaactttattatgtagttg

SEQ ID NO: 18087 - DNA, 25 bp, Artificial
  probe
  misc_feature (1)..(25): SEQ ID NO: 162; WAN0249D2_at; Start 85; Stop 109
tgtttttggattgacaactttatta

SEQ ID NO: 18088 - DNA, 25 bp, Artificial
  probe
  misc_feature (1)..(25): SEQ ID NO: 174; WAN0249D3_at; Start 1; Stop 25
aaattcctcctcatttcactatgta

SEQ ID NO: 18089 - DNA, 25 bp, Artificial
  probe
  misc_feature (1)..(25): SEQ ID NO: 174; WAN0249D3_at; Start 86; Stop 110
taataaagttgtcaatccaaaaaca

SEQ ID NO: 18090 - DNA, 25 bp, Artificial
  probe
  misc_feature (1)..(25): SEQ ID NO: 174; WAN0249D3_at; Start 9; Stop 33
cctcatttcactatgtaaaaagctt

SEQ ID NO: 18091 - DNA, 25 bp, Artificial
  probe
  misc_feature (1)..(25): SEQ ID NO: 174; WAN0249D3_at; Start 138; Stop 162
gcacaaatgtgcaatcaactaaaaa

SEQ ID NO: 18092 - DNA, 25 bp, Artificial
  probe
  misc_feature (1)..(25): SEQ ID NO: 174; WAN0249D3_at; Start 169; Stop 193
cgataaactgaatcagtctatcatt

SEQ ID NO: 18093 - DNA, 25 bp, Artificial
  probe
  misc_feature (1)..(25): SEQ ID NO: 174; WAN0249D3_at; Start 95; Stop 119
tgtcaatccaaaaacaacagataaa

SEQ ID NO: 18094 - DNA, 25 bp, Artificial
  probe
  misc_feature (1)..(25): SEQ ID NO: 174; WAN0249D3_at; Start 15; Stop 39
ttcactatgtaaaaagcttttttca

SEQ ID NO: 18095 - DNA, 25 bp, Artificial
  probe
  misc_feature (1)..(25): SEQ ID NO: 174; WAN0249D3_at; Start 127; Stop 151
tgtttatataagcacaaatgtgcaa

SEQ ID NO: 18096 - DNA, 25 bp, Artificial
  probe
  misc_feature (1)..(25): SEQ ID NO: 174; WAN0249D3_at; Start 91; Stop 115
aagttgtcaatccaaaaacaacaga

SEQ ID NO: 18097 - DNA, 25 bp, Artificial
  probe
  misc_feature (1)..(25): SEQ ID NO: 174; WAN0249D3_at; Start 82; Stop 106
tacataataaagttgtcaatccaaa

SEQ ID NO: 18098 - DNA, 25 bp, Artificial
  probe
  misc_feature (1)..(25): SEQ ID NO: 174; WAN0249D3_at; Start 93; Stop 117
gttgtcaatccaaaaacaacagata

SEQ ID NO: 18099 - DNA, 25 bp, Artificial
  probe
  misc_feature (1)..(25): SEQ ID NO: 174; WAN0249D3_at; Start 126; Stop 150
ttgtttatataagcacaaatgtgca

SEQ ID NO: 18100 - DNA, 25 bp, Artificial
  probe
  misc_feature (1)..(25): SEQ ID NO: 174; WAN0249D3_at; Start 97; Stop 121
tcaatccaaaaacaacagataaact

SEQ ID NO: 18101 - DNA, 25 bp, Artificial
  probe
  misc_feature (1)..(25): SEQ ID NO: 174; WAN0249D3_at; Start 133; Stop 157
tataagcacaaatgtgcaatcaact

SEQ ID NO: 18102 - DNA, 25 bp, Artificial
  probe
  misc_feature (1)..(25): SEQ ID NO: 174; WAN0249D3_at; Start 6; Stop 30
cctcctcatttcactatgtaaaaag

SEQ ID NO: 18103 - DNA, 25 bp, Artificial
  probe
  misc_feature (1)..(25): SEQ ID NO: 174; WAN0249D3_at; Start 163; Stop 187
gaaaaacgataaactgaatcagtct

SEQ ID NO: 18104 - DNA, 25 bp, Artificial
  probe
  misc_feature (1)..(25): SEQ ID NO: 174; WAN0249D3_at; Start 100; Stop 124
atccaaaaacaacagataaactatt

SEQ ID NO: 18105 - DNA, 25 bp, Artificial
  probe
  misc_feature (1)..(25): SEQ ID NO: 174; WAN0249D3_at; Start 64; Stop 88
gtaactatagaatacaactacataa

SEQ ID NO: 18106 - DNA, 25 bp, Artificial
  probe
  misc_feature (1)..(25): SEQ ID NO: 174; WAN0249D3_at; Start 84; Stop 108
cataataaagttgtcaatccaaaaa

SEQ ID NO: 18107 - DNA, 25 bp, Artificial
  probe
  misc_feature (1)..(25): SEQ ID NO: 174; WAN0249D3_at; Start 11; Stop 35
tcatttcactatgtaaaaagctttt

SEQ ID NO: 18108 - DNA, 25 bp, Artificial
  probe
  misc_feature (1)..(25): SEQ ID NO: 174; WAN0249D3_at; Start 135; Stop 159
taagcacaaatgtgcaatcaactaa

SEQ ID NO: 18109 - DNA, 25 bp, Artificial
  probe
  misc_feature (1)..(25): SEQ ID NO: 174; WAN0249D3_at; Start 69; Stop 93
tatagaatacaactacataataaag

SEQ ID NO: 18110 - DNA, 25 bp, Artificial
  probe
  misc_feature (1)..(25): SEQ ID NO: 174; WAN0249D3_at; Start 58; Stop 82
tcttttgtaactatagaatacaact

SEQ ID NO: 18111 - DNA, 25 bp, Artificial
  probe
  misc_feature (1)..(25): SEQ ID NO: 174; WAN0249D3_at; Start 118; Stop 142
aactatttttgtttatataagcaca

SEQ ID NO: 18112 - DNA, 25 bp, Artificial
  probe
  misc_feature (1)..(25): SEQ ID NO: 174; WAN0249D3_at; Start 147; Stop 171
tgcaatcaactaaaaagaaaaacga

SEQ ID NO: 18113 - DNA, 25 bp, Artificial
  probe
  misc_feature (1)..(25): SEQ ID NO: 174; WAN0249D3_at; Start 90; Stop 114
aaagttgtcaatccaaaaacaacag

SEQ ID NO: 18114 - DNA, 25 bp, Artificial
  probe
  misc_feature (1)..(25): SEQ ID NO: 174; WAN0249D3_at; Start 141; Stop 165
caaatgtgcaatcaactaaaaagaa

SEQ ID NO: 18115 - DNA, 25 bp, Artificial
  probe
  misc_feature (1)..(25): SEQ ID NO: 174; WAN0249D3_at; Start 2; Stop 26
aattcctcctcatttcactatgtaa

SEQ ID NO: 18116 - DNA, 25 bp, Artificial
  probe
  misc_feature (1)..(25): SEQ ID NO: 174; WAN0249D3_at; Start 167; Stop 191
aacgataaactgaatcagtctatca

SEQ ID NO: 18117 - DNA, 25 bp, Artificial
  probe
  misc_feature (1)..(25): SEQ ID NO: 174; WAN0249D3_at; Start 145; Stop 169
tgtgcaatcaactaaaaagaaaaac

SEQ ID NO: 18118 - DNA, 25 bp, Artificial
  probe
  misc_feature (1)..(25): SEQ ID NO: 174; WAN0249D3_at; Start 80; Stop 104
actacataataaagttgtcaatcca

SEQ ID NO: 18119 - DNA, 25 bp, Artificial
  probe
  misc_feature (1)..(25): SEQ ID NO: 174; WAN0249D3_at; Start 12; Stop 36
catttcactatgtaaaaagcttttt

SEQ ID NO: 18120 - DNA, 25 bp, Artificial
  probe
  misc_feature (1)..(25): SEQ ID NO: 174; WAN0249D3_at; Start 8; Stop 32
tcctcatttcactatgtaaaaagct

SEQ ID NO: 18121 - DNA, 25 bp, Artificial
  probe
  misc_feature (1)..(25): SEQ ID NO: 174; WAN0249D3_at; Start 139; Stop 163
cacaaatgtgcaatcaactaaaaag

SEQ ID NO: 18122 - DNA, 25 bp, Artificial
  probe
  misc_feature (1)..(25): SEQ ID NO: 291; WAN0249D4_at; Start 49; Stop 73
tagacttatgaagaggaggaactct

SEQ ID NO: 18123 - DNA, 25 bp, Artificial
  probe
  misc_feature (1)..(25): SEQ ID NO: 291; WAN0249D4_at; Start 47; Stop 71
gatagacttatgaagaggaggaact

SEQ ID NO: 18124 - DNA, 25 bp, Artificial
  probe
  misc_feature (1)..(25): SEQ ID NO: 291; WAN0249D4_at; Start 40; Stop 64
gtgataggatagacttatgaagagg

SEQ ID NO: 18125 - DNA, 25 bp, Artificial
  probe
  misc_feature (1)..(25): SEQ ID NO: 291; WAN0249D4_at; Start 28; Stop 52
tctttcgtttttgtgataggataga

SEQ ID NO: 18126 - DNA, 25 bp, Artificial
  probe
  misc_feature (1)..(25): SEQ ID NO: 291; WAN0249D4_at; Start 33; Stop 57
cgtttttgtgataggatagacttat

SEQ ID NO: 18127 - DNA, 25 bp, Artificial
  probe
  misc_feature (1)..(25): SEQ ID NO: 291; WAN0249D4_at; Start 42; Stop 66
gataggatagacttatgaagaggag

SEQ ID NO: 18128 - DNA, 25 bp, Artificial
  probe
  misc_feature (1)..(25): SEQ ID NO: 291; WAN0249D4_at; Start 45; Stop 69
aggatagacttatgaagaggaggaa

SEQ ID NO: 18129 - DNA, 25 bp, Artificial
  probe
  misc_feature (1)..(25): SEQ ID NO: 291; WAN0249D4_at; Start 46; Stop 70
ggatagacttatgaagaggaggaac

SEQ ID NO: 18130 - DNA, 25 bp, Artificial
  probe
  misc_feature (1)..(25): SEQ ID NO: 291; WAN0249D4_at; Start 27; Stop 51
ttctttcgtttttgtgataggatag

SEQ ID NO: 18131 - DNA, 25 bp, Artificial
  probe
  misc_feature (1)..(25): SEQ ID NO: 291; WAN0249D4_at; Start 32; Stop 56
tcgtttttgtgataggatagactta

SEQ ID NO: 18132 - DNA, 25 bp, Artificial
  probe
  misc_feature (1)..(25): SEQ ID NO: 291; WAN0249D4_at; Start 50; Stop 74
agacttatgaagaggaggaactctt

SEQ ID NO: 18133 - DNA, 25 bp, Artificial
  probe
  misc_feature (1)..(25): SEQ ID NO: 291; WAN0249D4_at; Start 39; Stop 63
tgtgataggatagacttatgaagag

SEQ ID NO: 18134 - DNA, 25 bp, Artificial
  probe
  misc_feature (1)..(25): SEQ ID NO: 291; WAN0249D4_at; Start 35; Stop 59
tttttgtgataggatagacttatga

SEQ ID NO: 18135 - DNA, 25 bp, Artificial
  probe
  misc_feature (1)..(25): SEQ ID NO: 291; WAN0249D4_at; Start 37; Stop 61
tttgtgataggatagacttatgaag

SEQ ID NO: 18136 - DNA, 25 bp, Artificial
  probe
  misc_feature (1)..(25): SEQ ID NO: 291; WAN0249D4_at; Start 29; Stop 53
ctttcgtttttgtgataggatagac

SEQ ID NO: 18137 - DNA, 25 bp, Artificial
  probe
  misc_feature (1)..(25): SEQ ID NO: 291; WAN0249D4_at; Start 44; Stop 68
taggatagacttatgaagaggagga

SEQ ID NO: 18138 - DNA, 25 bp, Artificial
  probe
  misc_feature (1)..(25): SEQ ID NO: 291; WAN0249D4_at; Start 26; Stop 50
tttctttcgtttttgtgataggata

SEQ ID NO: 18139 - DNA, 25 bp, Artificial
  probe
  misc_feature (1)..(25): SEQ ID NO: 291; WAN0249D4_at; Start 34; Stop 58
gtttttgtgataggatagacttatg

SEQ ID NO: 18140 - DNA, 25 bp, Artificial
  probe
  misc_feature (1)..(25): SEQ ID NO: 291; WAN0249D4_at; Start 38; Stop 62
ttgtgataggatagacttatgaaga

SEQ ID NO: 18141 - DNA, 25 bp, Artificial
  probe
  misc_feature (1)..(25): SEQ ID NO: 291; WAN0249D4_at; Start 48; Stop 72
atagacttatgaagaggaggaactc

SEQ ID NO: 18142 - DNA, 25 bp, Artificial
  probe
  misc_feature (1)..(25): SEQ ID NO: 291; WAN0249D4_at; Start 31; Stop 55
ttcgtttttgtgataggatagactt

SEQ ID NO: 18143 - DNA, 25 bp, Artificial
  probe
  misc_feature (1)..(25): SEQ ID NO: 291; WAN0249D4_at; Start 41; Stop 65
tgataggatagacttatgaagagga

SEQ ID NO: 18144 - DNA, 25 bp, Artificial
  probe
  misc_feature (1)..(25): SEQ ID NO: 291; WAN0249D4_at; Start 36; Stop 60
ttttgtgataggatagacttatgaa

SEQ ID NO: 18145 - DNA, 25 bp, Artificial
  probe
  misc_feature (1)..(25): SEQ ID NO: 291; WAN0249D4_at; Start 43; Stop 67
ataggatagacttatgaagaggagg

SEQ ID NO: 18146 - DNA, 25 bp, Artificial
  probe
  misc_feature (1)..(25): SEQ ID NO: 291; WAN0249D4_at; Start 30; Stop 54
tttcgtttttgtgataggatagact

SEQ ID NO: 18147 - DNA, 25 bp, Artificial
  probe
  misc_feature (1)..(25): SEQ ID NO: 224; WAN0249D5_at; Start 6; Stop 30
ttcctcctcttcataagtctatcct

SEQ ID NO: 18148 - DNA, 25 bp, Artificial
  probe
  misc_feature (1)..(25): SEQ ID NO: 224; WAN0249D5_at; Start 10; Stop 34
tcctcttcataagtctatcctatca

SEQ ID NO: 18149 - DNA, 25 bp, Artificial
  probe
  misc_feature (1)..(25): SEQ ID NO: 224; WAN0249D5_at; Start 11; Stop 35
cctcttcataagtctatcctatcac

SEQ ID NO: 18150 - DNA, 25 bp, Artificial
  probe
  misc_feature (1)..(25): SEQ ID NO: 224; WAN0249D5_at; Start 12; Stop 36
ctcttcataagtctatcctatcaca

SEQ ID NO: 18151 - DNA, 25 bp, Artificial
  probe
  misc_feature (1)..(25): SEQ ID NO: 224; WAN0249D5_at; Start 5; Stop 29
gttcctcctcttcataagtctatcc

SEQ ID NO: 18152 - DNA, 25 bp, Artificial
  probe
  misc_feature (1)..(25): SEQ ID NO: 224; WAN0249D5_at; Start 1; Stop 25
aagagttcctcctcttcataagtct

SEQ ID NO: 18153 - DNA, 25 bp, Artificial
  probe
  misc_feature (1)..(25): SEQ ID NO: 224; WAN0249D5_at; Start 15; Stop 39
ttcataagtctatcctatcacaaaa

SEQ ID NO: 18154 - DNA, 25 bp, Artificial
  probe
  misc_feature (1)..(25): SEQ ID NO: 224; WAN0249D5_at; Start 14; Stop 38
cttcataagtctatcctatcacaaa

SEQ ID NO: 18155 - DNA, 25 bp, Artificial
  probe
  misc_feature (1)..(25): SEQ ID NO: 224; WAN0249D5_at; Start 22; Stop 46
gtctatcctatcacaaaaacgaaag

SEQ ID NO: 18156 - DNA, 25 bp, Artificial
  probe
  misc_feature (1)..(25): SEQ ID NO: 224; WAN0249D5_at; Start 24; Stop 48
ctatcctatcacaaaaacgaaagaa

SEQ ID NO: 18157 - DNA, 25 bp, Artificial
  probe
  misc_feature (1)..(25): SEQ ID NO: 224; WAN0249D5_at; Start 2; Stop 26
agagttcctcctcttcataagtcta

SEQ ID NO: 18158 - DNA, 25 bp, Artificial
  probe
  misc_feature (1)..(25): SEQ ID NO: 224; WAN0249D5_at; Start 13; Stop 37
tcttcataagtctatcctatcacaa

SEQ ID NO: 18159 - DNA, 25 bp, Artificial
  probe
  misc_feature (1)..(25): SEQ ID NO: 224; WAN0249D5_at; Start 7; Stop 31
tcctcctcttcataagtctatccta

SEQ ID NO: 18160 - DNA, 25 bp, Artificial
  probe
  misc_feature (1)..(25): SEQ ID NO: 224; WAN0249D5_at; Start 16; Stop 40
tcataagtctatcctatcacaaaaa

SEQ ID NO: 18161 - DNA, 25 bp, Artificial
  probe
  misc_feature (1)..(25): SEQ ID NO: 224; WAN0249D5_at; Start 4; Stop 28
agttcctcctcttcataagtctatc

SEQ ID NO: 18162 - DNA, 25 bp, Artificial
  probe
  misc_feature (1)..(25): SEQ ID NO: 224; WAN0249D5_at; Start 9; Stop 33
ctcctcttcataagtctatcctatc

SEQ ID NO: 18163 - DNA, 25 bp, Artificial
  probe
  misc_feature (1)..(25): SEQ ID NO: 224; WAN0249D5_at; Start 19; Stop 43
taagtctatcctatcacaaaaacga

SEQ ID NO: 18164 - DNA, 25 bp, Artificial
  probe
  misc_feature (1)..(25): SEQ ID NO: 224; WAN0249D5_at; Start 17; Stop 41
cataagtctatcctatcacaaaaac

SEQ ID NO: 18165 - DNA, 25 bp, Artificial
  probe
  misc_feature (1)..(25): SEQ ID NO: 224; WAN0249D5_at; Start 18; Stop 42
ataagtctatcctatcacaaaaacg

SEQ ID NO: 18166 - DNA, 25 bp, Artificial
  probe
  misc_feature (1)..(25): SEQ ID NO: 224; WAN0249D5_at; Start 3; Stop 27
gagttcctcctcttcataagtctat

SEQ ID NO: 18167 - DNA, 25 bp, Artificial
  probe
  misc_feature (1)..(25): SEQ ID NO: 224; WAN0249D5_at; Start 21; Stop 45
agtctatcctatcacaaaaacgaaa

SEQ ID NO: 18168 - DNA, 25 bp, Artificial
  probe
  misc_feature (1)..(25): SEQ ID NO: 224; WAN0249D5_at; Start 25; Stop 49
tatcctatcacaaaaacgaaagaaa

SEQ ID NO: 18169 - DNA, 25 bp, Artificial
  probe
  misc_feature (1)..(25): SEQ ID NO: 224; WAN0249D5_at; Start 23; Stop 47
tctatcctatcacaaaaacgaaaga

SEQ ID NO: 18170 - DNA, 25 bp, Artificial
  probe
  misc_feature (1)..(25): SEQ ID NO: 224; WAN0249D5_at; Start 20; Stop 44
aagtctatcctatcacaaaaacgaa

SEQ ID NO: 18171 - DNA, 25 bp, Artificial
  probe
  misc_feature (1)..(25): SEQ ID NO: 224; WAN0249D5_at; Start 8; Stop 32
cctcctcttcataagtctatcctat

SEQ ID NO: 18172 - DNA, 25 bp, Artificial
  probe
  misc_feature (1)..(25): SEQ ID NO: 7730; WAN0249D6_at; Start 103; Stop 127
tctattttaccttgctctagaattt

SEQ ID NO: 18173 - DNA, 25 bp, Artificial
  probe
  misc_feature (1)..(25): SEQ ID NO: 7730; WAN0249D6_at; Start 124; Stop 148
atttttaaactgctatacttatcac

SEQ ID NO: 18174 - DNA, 25 bp, Artificial
  probe
  misc_feature (1)..(25): SEQ ID NO: 7730; WAN0249D6_at; Start 39; Stop 63
aagcatctataatacatacttaact

SEQ ID NO: 18175 - DNA, 25 bp, Artificial
  probe
  misc_feature (1)..(25): SEQ ID NO: 7730; WAN0249D6_at; Start 46; Stop 70
tataatacatacttaacttttcaaa

SEQ ID NO: 18176 - DNA, 25 bp, Artificial
  probe
  misc_feature (1)..(25): SEQ ID NO: 7730; WAN0249D6_at; Start 36; Stop 60
aacaagcatctataatacatactta

SEQ ID NO: 18177 - DNA, 25 bp, Artificial
  probe
  misc_feature (1)..(25): SEQ ID NO: 7730; WAN0249D6_at; Start 41; Stop 65
gcatctataatacatacttaacttt

SEQ ID NO: 18178 - DNA, 25 bp, Artificial
  probe
  misc_feature (1)..(25): SEQ ID NO: 7730; WAN0249D6_at; Start 132; Stop 156
actgctatacttatcacaaaaaaac

SEQ ID NO: 18179 - DNA, 25 bp, Artificial
  probe
  misc_feature (1)..(25): SEQ ID NO: 7730; WAN0249D6_at; Start 35; Stop 59
taacaagcatctataatacatactt

SEQ ID NO: 18180 - DNA, 25 bp, Artificial
  probe
  misc_feature (1)..(25): SEQ ID NO: 7730; WAN0249D6_at; Start 126; Stop 150
ttttaaactgctatacttatcacaa

SEQ ID NO: 18181 - DNA, 25 bp, Artificial
  probe
  misc_feature (1)..(25): SEQ ID NO: 7730; WAN0249D6_at; Start 112; Stop 136
ccttgctctagaatttttaaactgc

SEQ ID NO: 18182 - DNA, 25 bp, Artificial
  probe
  misc_feature (1)..(25): SEQ ID NO: 7730; WAN0249D6_at; Start 120; Stop 144
tagaatttttaaactgctatactta

SEQ ID NO: 18183 - DNA, 25 bp, Artificial
  probe
  misc_feature (1)..(25): SEQ ID NO: 7730; WAN0249D6_at; Start 98; Stop 122
ccttttctattttaccttgctctag

SEQ ID NO: 18184 - DNA, 25 bp, Artificial
  probe
  misc_feature (1)..(25): SEQ ID NO: 7730; WAN0249D6_at; Start 113; Stop 137
cttgctctagaatttttaaactgct

SEQ ID NO: 18185 - DNA, 25 bp, Artificial
  probe
  misc_feature (1)..(25): SEQ ID NO: 7730; WAN0249D6_at; Start 128; Stop 152
ttaaactgctatacttatcacaaaa

SEQ ID NO: 18186 - DNA, 25 bp, Artificial
  probe
  misc_feature (1)..(25): SEQ ID NO: 7730; WAN0249D6_at; Start 129; Stop 153
taaactgctatacttatcacaaaaa

SEQ ID NO: 18187 - DNA, 25 bp, Artificial
  probe
  misc_feature (1)..(25): SEQ ID NO: 7730; WAN0249D6_at; Start 130; Stop 154
aaactgctatacttatcacaaaaaa

SEQ ID NO: 18188 - DNA, 25 bp, Artificial
  probe
  misc_feature (1)..(25): SEQ ID NO: 7730; WAN0249D6_at; Start 99; Stop 123
cttttctattttaccttgctctaga

SEQ ID NO: 18189 - DNA, 25 bp, Artificial
  probe
  misc_feature (1)..(25): SEQ ID NO: 7730; WAN0249D6_at; Start 38; Stop 62
caagcatctataatacatacttaac

SEQ ID NO: 18190 - DNA, 25 bp, Artificial
  probe
  misc_feature (1)..(25): SEQ ID NO: 7730; WAN0249D6_at; Start 125; Stop 149
tttttaaactgctatacttatcaca

SEQ ID NO: 18191 - DNA, 25 bp, Artificial
  probe
  misc_feature (1)..(25): SEQ ID NO: 7730; WAN0249D6_at; Start 100; Stop 124
ttttctattttaccttgctctagaa

SEQ ID NO: 18192 - DNA, 25 bp, Artificial
  probe
  misc_feature (1)..(25): SEQ ID NO: 7730; WAN0249D6_at; Start 111; Stop 135
accttgctctagaatttttaaactg

SEQ ID NO: 18193 - DNA, 25 bp, Artificial
  probe
  misc_feature (1)..(25): SEQ ID NO: 7730; WAN0249D6_at; Start 114; Stop 138
ttgctctagaatttttaaactgcta

SEQ ID NO: 18194 - DNA, 25 bp, Artificial
  probe
  misc_feature (1)..(25): SEQ ID NO: 7730; WAN0249D6_at; Start 104; Stop 128
ctattttaccttgctctagaatttt

SEQ ID NO: 18195 - DNA, 25 bp, Artificial
  probe
  misc_feature (1)..(25): SEQ ID NO: 7730; WAN0249D6_at; Start 115; Stop 139
tgctctagaatttttaaactgctat

SEQ ID NO: 18196 - DNA, 25 bp, Artificial
  probe
  misc_feature (1)..(25): SEQ ID NO: 7730; WAN0249D6_at; Start 116; Stop 140
gctctagaatttttaaactgctata

SEQ ID NO: 18197 - DNA, 25 bp, Artificial
  probe
  misc_feature (1)..(25): SEQ ID NO: 7730; WAN0249D6_at; Start 127; Stop 151
tttaaactgctatacttatcacaaa

SEQ ID NO: 18198 - DNA, 25 bp, Artificial
  probe
  misc_feature (1)..(25): SEQ ID NO: 7730; WAN0249D6_at; Start 118; Stop 142
tctagaatttttaaactgctatact

SEQ ID NO: 18199 - DNA, 25 bp, Artificial
  probe
  misc_feature (1)..(25): SEQ ID NO: 7730; WAN0249D6_at; Start 123; Stop 147
aatttttaaactgctatacttatca

SEQ ID NO: 18200 - DNA, 25 bp, Artificial
  probe
  misc_feature (1)..(25): SEQ ID NO: 7730; WAN0249D6_at; Start 122; Stop 146
gaatttttaaactgctatacttatc

SEQ ID NO: 18201 - DNA, 25 bp, Artificial
  probe
  misc_feature (1)..(25): SEQ ID NO: 7730; WAN0249D6_at; Start 44; Stop 68
tctataatacatacttaacttttca

SEQ ID NO: 18202 - DNA, 25 bp, Artificial
  probe
  misc_feature (1)..(25): SEQ ID NO: 7730; WAN0249D6_at; Start 117; Stop 141
ctctagaatttttaaactgctatac

SEQ ID NO: 18203 - DNA, 25 bp, Artificial
  probe
  misc_feature (1)..(25): SEQ ID NO: 7730; WAN0249D6_at; Start 119; Stop 143
ctagaatttttaaactgctatactt

SEQ ID NO: 18204 - DNA, 25 bp, Artificial
  probe
  misc_feature (1)..(25): SEQ ID NO: 7730; WAN0249D6_at; Start 134; Stop 158
tgctatacttatcacaaaaaaacct

SEQ ID NO: 18205 - DNA, 25 bp, Artificial
  probe
  misc_feature (1)..(25): SEQ ID NO: 7730; WAN0249D6_at; Start 101; Stop 125
tttctattttaccttgctctagaat

SEQ ID NO: 18206 - DNA, 25 bp, Artificial
  probe
  misc_feature (1)..(25): SEQ ID NO: 7731; WAN0249D7_at; Start 36; Stop 60
aacaagcatctatataaggttatca

SEQ ID NO: 18207 - DNA, 25 bp, Artificial
  probe
  misc_feature (1)..(25): SEQ ID NO: 7731; WAN0249D7_at; Start 35; Stop 59
taacaagcatctatataaggttatc

SEQ ID NO: 18208 - DNA, 25 bp, Artificial
  probe
  misc_feature (1)..(25): SEQ ID NO: 7731; WAN0249D7_at; Start 37; Stop 61
acaagcatctatataaggttatcaa

SEQ ID NO: 18209 - DNA, 25 bp, Artificial
  probe
  misc_feature (1)..(25): SEQ ID NO: 7731; WAN0249D7_at; Start 48; Stop 72
tataaggttatcaaagaagacttcc

SEQ ID NO: 18210 - DNA, 25 bp, Artificial
  probe
  misc_feature (1)..(25): SEQ ID NO: 7731; WAN0249D7_at; Start 43; Stop 67
atctatataaggttatcaaagaaga

SEQ ID NO: 18211 - DNA, 25 bp, Artificial
  probe
  misc_feature (1)..(25): SEQ ID NO: 7731; WAN0249D7_at; Start 45; Stop 69
ctatataaggttatcaaagaagact

SEQ ID NO: 18212 - DNA, 25 bp, Artificial
  probe
  misc_feature (1)..(25): SEQ ID NO: 7731; WAN0249D7_at; Start 39; Stop 63
aagcatctatataaggttatcaaag

SEQ ID NO: 18213 - DNA, 25 bp, Artificial
  probe
  misc_feature (1)..(25): SEQ ID NO: 7731; WAN0249D7_at; Start 42; Stop 66
catctatataaggttatcaaagaag

SEQ ID NO: 18214 - DNA, 25 bp, Artificial
  probe
  misc_feature (1)..(25): SEQ ID NO: 7731; WAN0249D7_at; Start 40; Stop 64
agcatctatataaggttatcaaaga

SEQ ID NO: 18215 - DNA, 25 bp, Artificial
  probe
  misc_feature (1)..(25): SEQ ID NO: 7731; WAN0249D7_at; Start 38; Stop 62
caagcatctatataaggttatcaaa

SEQ ID NO: 18216 - DNA, 25 bp, Artificial
  probe
  misc_feature (1)..(25): SEQ ID NO: 7731; WAN0249D7_at; Start 47; Stop 71
atataaggttatcaaagaagacttc

SEQ ID NO: 18217 - DNA, 25 bp, Artificial
  probe
  misc_feature (1)..(25): SEQ ID NO: 7731; WAN0249D7_at; Start 44; Stop 68
tctatataaggttatcaaagaagac

SEQ ID NO: 18218 - DNA, 25 bp, Artificial
  probe
  misc_feature (1)..(25): SEQ ID NO: 7731; WAN0249D7_at; Start 46; Stop 70
tatataaggttatcaaagaagactt

SEQ ID NO: 18219 - DNA, 25 bp, Artificial
  probe
  misc_feature (1)..(25): SEQ ID NO: 7731; WAN0249D7_at; Start 41; Stop 65
gcatctatataaggttatcaaagaa

SEQ ID NO: 18220 - DNA, 25 bp, Artificial
  probe
  misc_feature (1)..(25): SEQ ID NO: 7064; WAN0249D8_at; Start 49; Stop 73
aattctagagcaaggtaaaatagaa

SEQ ID NO: 18221 - DNA, 25 bp, Artificial
  probe
  misc_feature (1)..(25): SEQ ID NO: 7064; WAN0249D8_at; Start 111; Stop 135
aagttaagtatgtattatagatgct

SEQ ID NO: 18222 - DNA, 25 bp, Artificial
  probe
  misc_feature (1)..(25): SEQ ID NO: 7064; WAN0249D8_at; Start 39; Stop 63
gcagtttaaaaattctagagcaagg

SEQ ID NO: 18223 - DNA, 25 bp, Artificial
  probe
  misc_feature (1)..(25): SEQ ID NO: 7064; WAN0249D8_at; Start 24; Stop 48
tttgtgataagtatagcagtttaaa

SEQ ID NO: 18224 - DNA, 25 bp, Artificial
  probe
  misc_feature (1)..(25): SEQ ID NO: 7064; WAN0249D8_at; Start 26; Stop 50
tgtgataagtatagcagtttaaaaa

SEQ ID NO: 18225 - DNA, 25 bp, Artificial
  probe
  misc_feature (1)..(25): SEQ ID NO: 7064; WAN0249D8_at; Start 47; Stop 71
aaaattctagagcaaggtaaaatag

SEQ ID NO: 18226 - DNA, 25 bp, Artificial
  probe
  misc_feature (1)..(25): SEQ ID NO: 7064; WAN0249D8_at; Start 23; Stop 47
ttttgtgataagtatagcagtttaa

SEQ ID NO: 18227 - DNA, 25 bp, Artificial
  probe
  misc_feature (1)..(25): SEQ ID NO: 7064; WAN0249D8_at; Start 53; Stop 77
ctagagcaaggtaaaatagaaaagg

SEQ ID NO: 18228 - DNA, 25 bp, Artificial
  probe
  misc_feature (1)..(25): SEQ ID NO: 7064; WAN0249D8_at; Start 51; Stop 75
ttctagagcaaggtaaaatagaaaa

SEQ ID NO: 18229 - DNA, 25 bp, Artificial
  probe
  misc_feature (1)..(25): SEQ ID NO: 7064; WAN0249D8_at; Start 38; Stop 62
agcagtttaaaaattctagagcaag

SEQ ID NO: 18230 - DNA, 25 bp, Artificial
  probe
  misc_feature (1)..(25): SEQ ID NO: 7064; WAN0249D8_at; Start 116; Stop 140
aagtatgtattatagatgcttgtta

SEQ ID NO: 18231 - DNA, 25 bp, Artificial
  probe
  misc_feature (1)..(25): SEQ ID NO: 7064; WAN0249D8_at; Start 110; Stop 134
aaagttaagtatgtattatagatgc

SEQ ID NO: 18232 - DNA, 25 bp, Artificial
  probe
  misc_feature (1)..(25): SEQ ID NO: 7064; WAN0249D8_at; Start 31; Stop 55
taagtatagcagtttaaaaattcta

SEQ ID NO: 18233 - DNA, 25 bp, Artificial
  probe
  misc_feature (1)..(25): SEQ ID NO: 7064; WAN0249D8_at; Start 34; Stop 58
gtatagcagtttaaaaattctagag

SEQ ID NO: 18234 - DNA, 25 bp, Artificial
  probe
  misc_feature (1)..(25): SEQ ID NO: 7064; WAN0249D8_at; Start 50; Stop 74
attctagagcaaggtaaaatagaaa

SEQ ID NO: 18235 - DNA, 25 bp, Artificial
  probe
  misc_feature (1)..(25): SEQ ID NO: 7064; WAN0249D8_at; Start 115; Stop 139
taagtatgtattatagatgcttgtt

SEQ ID NO: 18236 - DNA, 25 bp, Artificial
  probe
  misc_feature (1)..(25): SEQ ID NO: 7064; WAN0249D8_at; Start 40; Stop 64
cagtttaaaaattctagagcaaggt

SEQ ID NO: 18237 - DNA, 25 bp, Artificial
  probe
  misc_feature (1)..(25): SEQ ID NO: 7064; WAN0249D8_at; Start 52; Stop 76
tctagagcaaggtaaaatagaaaag

SEQ ID NO: 18238 - DNA, 25 bp, Artificial
  probe
  misc_feature (1)..(25): SEQ ID NO: 7064; WAN0249D8_at; Start 28; Stop 52
tgataagtatagcagtttaaaaatt

SEQ ID NO: 18239 - DNA, 25 bp, Artificial
  probe
  misc_feature (1)..(25): SEQ ID NO: 7064; WAN0249D8_at; Start 32; Stop 56
aagtatagcagtttaaaaattctag

SEQ ID NO: 18240 - DNA, 25 bp, Artificial
  probe
  misc_feature (1)..(25): SEQ ID NO: 7064; WAN0249D8_at; Start 48; Stop 72
aaattctagagcaaggtaaaataga

SEQ ID NO: 18241 - DNA, 25 bp, Artificial
  probe
  misc_feature (1)..(25): SEQ ID NO: 7064; WAN0249D8_at; Start 33; Stop 57
agtatagcagtttaaaaattctaga

SEQ ID NO: 18242 - DNA, 25 bp, Artificial
  probe
  misc_feature (1)..(25): SEQ ID NO: 7064; WAN0249D8_at; Start 29; Stop 53
gataagtatagcagtttaaaaattc

SEQ ID NO: 18243 - DNA, 25 bp, Artificial
  probe
  misc_feature (1)..(25): SEQ ID NO: 7064; WAN0249D8_at; Start 27; Stop 51
gtgataagtatagcagtttaaaaat

SEQ ID NO: 18244 - DNA, 25 bp, Artificial
  probe
  misc_feature (1)..(25): SEQ ID NO: 7064; WAN0249D8_at; Start 25; Stop 49
ttgtgataagtatagcagtttaaaa

SEQ ID NO: 18245 - DNA, 25 bp, Artificial
  probe
  misc_feature (1)..(25): SEQ ID NO: 7064; WAN0249D8_at; Start 35; Stop 59
tatagcagtttaaaaattctagagc

SEQ ID NO: 18246 - DNA, 25 bp, Artificial
  probe
  misc_feature (1)..(25): SEQ ID NO: 7064; WAN0249D8_at; Start 114; Stop 138
ttaagtatgtattatagatgcttgt

SEQ ID NO: 18247 - DNA, 25 bp, Artificial
  probe
  misc_feature (1)..(25): SEQ ID NO: 7064; WAN0249D8_at; Start 18; Stop 42
ggtttttttgtgataagtatagcag

SEQ ID NO: 18248 - DNA, 25 bp, Artificial
  probe
  misc_feature (1)..(25): SEQ ID NO: 7064; WAN0249D8_at; Start 36; Stop 60
atagcagtttaaaaattctagagca

SEQ ID NO: 18249 - DNA, 25 bp, Artificial
  probe
  misc_feature (1)..(25): SEQ ID NO: 7064; WAN0249D8_at; Start 113; Stop 137
gttaagtatgtattatagatgcttg

SEQ ID NO: 18250 - DNA, 25 bp, Artificial
  probe
  misc_feature (1)..(25): SEQ ID NO: 7064; WAN0249D8_at; Start 37; Stop 61
tagcagtttaaaaattctagagcaa

SEQ ID NO: 18251 - DNA, 25 bp, Artificial
  probe
  misc_feature (1)..(25): SEQ ID NO: 7064; WAN0249D8_at; Start 22; Stop 46
tttttgtgataagtatagcagttta

SEQ ID NO: 18252 - DNA, 25 bp, Artificial
  probe
  misc_feature (1)..(25): SEQ ID NO: 7064; WAN0249D8_at; Start 30; Stop 54
ataagtatagcagtttaaaaattct

SEQ ID NO: 18253 - DNA, 25 bp, Artificial
  probe
  misc_feature (1)..(25): SEQ ID NO: 7064; WAN0249D8_at; Start 21; Stop 45
ttttttgtgataagtatagcagttt

SEQ ID NO: 18254 - DNA, 25 bp, Artificial
  probe
  misc_feature (1)..(25): SEQ ID NO: 7202; WAN0249D9_at; Start 10; Stop 34
ttctttgataaccttatatagatgc

SEQ ID NO: 18255 - DNA, 25 bp, Artificial
  probe
  misc_feature (1)..(25): SEQ ID NO: 7202; WAN0249D9_at; Start 4; Stop 28
gaagtcttctttgataaccttatat

SEQ ID NO: 18256 - DNA, 25 bp, Artificial
  probe
  misc_feature (1)..(25): SEQ ID NO: 7202; WAN0249D9_at; Start 5; Stop 29
aagtcttctttgataaccttatata

SEQ ID NO: 18257 - DNA, 25 bp, Artificial
  probe
  misc_feature (1)..(25): SEQ ID NO: 7202; WAN0249D9_at; Start 8; Stop 32
tcttctttgataaccttatatagat

SEQ ID NO: 18258 - DNA, 25 bp, Artificial
  probe
  misc_feature (1)..(25): SEQ ID NO: 7202; WAN0249D9_at; Start 11; Stop 35
tctttgataaccttatatagatgct

SEQ ID NO: 18259 - DNA, 25 bp, Artificial
  probe
  misc_feature (1)..(25): SEQ ID NO: 7202; WAN0249D9_at; Start 7; Stop 31
gtcttctttgataaccttatataga

SEQ ID NO: 18260 - DNA, 25 bp, Artificial
  probe
  misc_feature (1)..(25): SEQ ID NO: 7202; WAN0249D9_at; Start 9; Stop 33
cttctttgataaccttatatagatg

SEQ ID NO: 18261 - DNA, 25 bp, Artificial
  probe
  misc_feature (1)..(25): SEQ ID NO: 7202; WAN0249D9_at; Start 3; Stop 27
ggaagtcttctttgataaccttata

SEQ ID NO: 18262 - DNA, 25 bp, Artificial
  probe
  misc_feature (1)..(25): SEQ ID NO: 7202; WAN0249D9_at; Start 6; Stop 30
agtcttctttgataaccttatatag

SEQ ID NO: 18263 - DNA, 25 bp, Artificial
  probe
  misc_feature (1)..(25): SEQ ID NO: 7202; WAN0249D9_at; Start 12; Stop 36
ctttgataaccttatatagatgctt

SEQ ID NO: 18264 - DNA, 25 bp, Artificial
  probe
  misc_feature (1)..(25): SEQ ID NO: 4794; WAN0249DA_at; Start 3; Stop 27
agttttccacatcaaaaacagccga

SEQ ID NO: 18265 - DNA, 25 bp, Artificial
  probe
  misc_feature (1)..(25): SEQ ID NO: 4794; WAN0249DA_at; Start 60; Stop 84
gatattcttatcaaatccctagctc

SEQ ID NO: 18266 - DNA, 25 bp, Artificial
  probe
  misc_feature (1)..(25): SEQ ID NO: 4794; WAN0249DA_at; Start 67; Stop 91
ttatcaaatccctagctcatggcaa

SEQ ID NO: 18267 - DNA, 25 bp, Artificial
  probe
  misc_feature (1)..(25): SEQ ID NO: 4794; WAN0249DA_at; Start 2; Stop 26
tagttttccacatcaaaaacagccg

SEQ ID NO: 18268 - DNA, 25 bp, Artificial
  probe
  misc_feature (1)..(25): SEQ ID NO: 4794; WAN0249DA_at; Start 73; Stop 97
aatccctagctcatggcaagcaagt

SEQ ID NO: 18269 - DNA, 25 bp, Artificial
  probe
  misc_feature (1)..(25): SEQ ID NO: 4794; WAN0249DA_at; Start 78; Stop 102
ctagctcatggcaagcaagtctaga

SEQ ID NO: 18270 - DNA, 25 bp, Artificial
  probe
  misc_feature (1)..(25): SEQ ID NO: 4794; WAN0249DA_at; Start 64; Stop 88
ttcttatcaaatccctagctcatgg

SEQ ID NO: 18271 - DNA, 25 bp, Artificial
  probe
  misc_feature (1)..(25): SEQ ID NO: 4794; WAN0249DA_at; Start 77; Stop 101
cctagctcatggcaagcaagtctag

SEQ ID NO: 18272 - DNA, 25 bp, Artificial
  probe
  misc_feature (1)..(25): SEQ ID NO: 4794; WAN0249DA_at; Start 7; Stop 31
ttccacatcaaaaacagccgaaagg

SEQ ID NO: 18273 - DNA, 25 bp, Artificial
  probe
  misc_feature (1)..(25): SEQ ID NO: 4794; WAN0249DA_at; Start 39; Stop 63
tcggctgttttttcttatcttgata

SEQ ID NO: 18274 - DNA, 25 bp, Artificial
  probe
  misc_feature (1)..(25): SEQ ID NO: 4794; WAN0249DA_at; Start 4; Stop 28
gttttccacatcaaaaacagccgaa

SEQ ID NO: 18275 - DNA, 25 bp, Artificial
  probe
  misc_feature (1)..(25): SEQ ID NO: 4794; WAN0249DA_at; Start 72; Stop 96
aaatccctagctcatggcaagcaag

SEQ ID NO: 18276 - DNA, 25 bp, Artificial
  probe
  misc_feature (1)..(25): SEQ ID NO: 4794; WAN0249DA_at; Start 75; Stop 99
tccctagctcatggcaagcaagtct

SEQ ID NO: 18277 - DNA, 25 bp, Artificial
  probe
  misc_feature (1)..(25): SEQ ID NO: 4794; WAN0249DA_at; Start 8; Stop 32
tccacatcaaaaacagccgaaagga

SEQ ID NO: 18278 - DNA, 25 bp, Artificial
  probe
  misc_feature (1)..(25): SEQ ID NO: 4794; WAN0249DA_at; Start 81; Stop 105
gctcatggcaagcaagtctagactg

SEQ ID NO: 18279 - DNA, 25 bp, Artificial
  probe
  misc_feature (1)..(25): SEQ ID NO: 4794; WAN0249DA_at; Start 9; Stop 33
ccacatcaaaaacagccgaaaggag

SEQ ID NO: 18280 - DNA, 25 bp, Artificial
  probe
  misc_feature (1)..(25): SEQ ID NO: 4794; WAN0249DA_at; Start 68; Stop 92
tatcaaatccctagctcatggcaag

SEQ ID NO: 18281 - DNA, 25 bp, Artificial
  probe
  misc_feature (1)..(25): SEQ ID NO: 4794; WAN0249DA_at; Start 62; Stop 86
tattcttatcaaatccctagctcat

SEQ ID NO: 18282 - DNA, 25 bp, Artificial
  probe
  misc_feature (1)..(25): SEQ ID NO: 4794; WAN0249DA_at; Start 79; Stop 103
tagctcatggcaagcaagtctagac

SEQ ID NO: 18283 - DNA, 25 bp, Artificial
  probe
  misc_feature (1)..(25): SEQ ID NO: 4794; WAN0249DA_at; Start 36; Stop 60
ccctcggctgttttttcttatcttg

SEQ ID NO: 18284 - DNA, 25 bp, Artificial
  probe
  misc_feature (1)..(25): SEQ ID NO: 4794; WAN0249DA_at; Start 6; Stop 30
tttccacatcaaaaacagccgaaag

SEQ ID NO: 18285 - DNA, 25 bp, Artificial
  probe
  misc_feature (1)..(25): SEQ ID NO: 4794; WAN0249DA_at; Start 40; Stop 64
cggctgttttttcttatcttgatat

SEQ ID NO: 18286 - DNA, 25 bp, Artificial
  probe
  misc_feature (1)..(25): SEQ ID NO: 4794; WAN0249DA_at; Start 10; Stop 34
cacatcaaaaacagccgaaaggagt

SEQ ID NO: 18287 - DNA, 25 bp, Artificial
  probe
  misc_feature (1)..(25): SEQ ID NO: 4794; WAN0249DA_at; Start 66; Stop 90
cttatcaaatccctagctcatggca

SEQ ID NO: 18288 - DNA, 25 bp, Artificial
  probe
  misc_feature (1)..(25): SEQ ID NO: 4794; WAN0249DA_at; Start 74; Stop 98
atccctagctcatggcaagcaagtc

SEQ ID NO: 18289 - DNA, 25 bp, Artificial
  probe
  misc_feature (1)..(25): SEQ ID NO: 4794; WAN0249DA_at; Start 82; Stop 106
ctcatggcaagcaagtctagactga

SEQ ID NO: 18290 - DNA, 25 bp, Artificial
  probe
  misc_feature (1)..(25): SEQ ID NO: 4794; WAN0249DA_at; Start 37; Stop 61
cctcggctgttttttcttatcttga

SEQ ID NO: 18291 - DNA, 25 bp, Artificial
  probe
  misc_feature (1)..(25): SEQ ID NO: 4794; WAN0249DA_at; Start 71; Stop 95
caaatccctagctcatggcaagcaa

SEQ ID NO: 18292 - DNA, 25 bp, Artificial
  probe
  misc_feature (1)..(25): SEQ ID NO: 4794; WAN0249DA_at; Start 5; Stop 29
ttttccacatcaaaaacagccgaaa

SEQ ID NO: 18293 - DNA, 25 bp, Artificial
  probe
  misc_feature (1)..(25): SEQ ID NO: 4794; WAN0249DA_at; Start 59; Stop 83
tgatattcttatcaaatccctagct

SEQ ID NO: 18294 - DNA, 25 bp, Artificial
  probe
  misc_feature (1)..(25): SEQ ID NO: 4794; WAN0249DA_at; Start 69; Stop 93
atcaaatccctagctcatggcaagc

SEQ ID NO: 18295 - DNA, 25 bp, Artificial
  probe
  misc_feature (1)..(25): SEQ ID NO: 4794; WAN0249DA_at; Start 42; Stop 66
gctgttttttcttatcttgatattc

SEQ ID NO: 18296 - DNA, 25 bp, Artificial
  probe
  misc_feature (1)..(25): SEQ ID NO: 4794; WAN0249DA_at; Start 80; Stop 104
agctcatggcaagcaagtctagact

SEQ ID NO: 18297 - DNA, 25 bp, Artificial
  probe
  misc_feature (1)..(25): SEQ ID NO: 4794; WAN0249DA_at; Start 70; Stop 94
tcaaatccctagctcatggcaagca

SEQ ID NO: 18298 - DNA, 25 bp, Artificial
  probe
  misc_feature (1)..(25): SEQ ID NO: 4597; WAN0249DB_at; Start 14; Stop 38
gcttgccatgagctagggatttgat

SEQ ID NO: 18299 - DNA, 25 bp, Artificial
  probe
  misc_feature (1)..(25): SEQ ID NO: 4597; WAN0249DB_at; Start 31; Stop 55
gatttgataagaatatcaagataag

SEQ ID NO: 18300 - DNA, 25 bp, Artificial
  probe
  misc_feature (1)..(25): SEQ ID NO: 4597; WAN0249DB_at; Start 36; Stop 60
gataagaatatcaagataagaaaaa

SEQ ID NO: 18301 - DNA, 25 bp, Artificial
  probe
  misc_feature (1)..(25): SEQ ID NO: 4597; WAN0249DB_at; Start 38; Stop 62
taagaatatcaagataagaaaaaac

SEQ ID NO: 18302 - DNA, 25 bp, Artificial
  probe
  misc_feature (1)..(25): SEQ ID NO: 4597; WAN0249DB_at; Start 16; Stop 40
ttgccatgagctagggatttgataa

SEQ ID NO: 18303 - DNA, 25 bp, Artificial
  probe
  misc_feature (1)..(25): SEQ ID NO: 4597; WAN0249DB_at; Start 1; Stop 25
tcagtctagacttgcttgccatgag

SEQ ID NO: 18304 - DNA, 25 bp, Artificial
  probe
  misc_feature (1)..(25): SEQ ID NO: 4597; WAN0249DB_at; Start 73; Stop 97
actcctttcggctgtttttgatgtg

SEQ ID NO: 18305 - DNA, 25 bp, Artificial
  probe
  misc_feature (1)..(25): SEQ ID NO: 4597; WAN0249DB_at; Start 2; Stop 26
cagtctagacttgcttgccatgagc

SEQ ID NO: 18306 - DNA, 25 bp, Artificial
  probe
  misc_feature (1)..(25): SEQ ID NO: 4597; WAN0249DB_at; Start 4; Stop 28
gtctagacttgcttgccatgagcta

SEQ ID NO: 18307 - DNA, 25 bp, Artificial
  probe
  misc_feature (1)..(25): SEQ ID NO: 4597; WAN0249DB_at; Start 79; Stop 103
ttcggctgtttttgatgtggaaaac

SEQ ID NO: 18308 - DNA, 25 bp, Artificial
  probe
  misc_feature (1)..(25): SEQ ID NO: 4597; WAN0249DB_at; Start 3; Stop 27
agtctagacttgcttgccatgagct

SEQ ID NO: 18309 - DNA, 25 bp, Artificial
  probe
  misc_feature (1)..(25): SEQ ID NO: 4597; WAN0249DB_at; Start 75; Stop 99
tcctttcggctgtttttgatgtgga

SEQ ID NO: 18310 - DNA, 25 bp, Artificial
  probe
  misc_feature (1)..(25): SEQ ID NO: 4597; WAN0249DB_at; Start 81; Stop 105
cggctgtttttgatgtggaaaacta

SEQ ID NO: 18311 - DNA, 25 bp, Artificial
  probe
  misc_feature (1)..(25): SEQ ID NO: 4597; WAN0249DB_at; Start 33; Stop 57
tttgataagaatatcaagataagaa

SEQ ID NO: 18312 - DNA, 25 bp, Artificial
  probe
  misc_feature (1)..(25): SEQ ID NO: 4597; WAN0249DB_at; Start 12; Stop 36
ttgcttgccatgagctagggatttg

SEQ ID NO: 18313 - DNA, 25 bp, Artificial
  probe
  misc_feature (1)..(25): SEQ ID NO: 4597; WAN0249DB_at; Start 82; Stop 106
ggctgtttttgatgtggaaaactaa

SEQ ID NO: 18314 - DNA, 25 bp, Artificial
  probe
  misc_feature (1)..(25): SEQ ID NO: 4597; WAN0249DB_at; Start 11; Stop 35
cttgcttgccatgagctagggattt

SEQ ID NO: 18315 - DNA, 25 bp, Artificial
  probe
  misc_feature (1)..(25): SEQ ID NO: 4597; WAN0249DB_at; Start 74; Stop 98
ctcctttcggctgtttttgatgtgg

SEQ ID NO: 18316 - DNA, 25 bp, Artificial
  probe
  misc_feature (1)..(25): SEQ ID NO: 4597; WAN0249DB_at; Start 6; Stop 30
ctagacttgcttgccatgagctagg

SEQ ID NO: 18317 - DNA, 25 bp, Artificial
  probe
  misc_feature (1)..(25): SEQ ID NO: 4597; WAN0249DB_at; Start 5; Stop 29
tctagacttgcttgccatgagctag

SEQ ID NO: 18318 - DNA, 25 bp, Artificial
  probe
  misc_feature (1)..(25): SEQ ID NO: 4597; WAN0249DB_at; Start 10; Stop 34
acttgcttgccatgagctagggatt

SEQ ID NO: 18319 - DNA, 25 bp, Artificial
  probe
  misc_feature (1)..(25): SEQ ID NO: 4597; WAN0249DB_at; Start 9; Stop 33
gacttgcttgccatgagctagggat

SEQ ID NO: 18320 - DNA, 25 bp, Artificial
  probe
  misc_feature (1)..(25): SEQ ID NO: 4597; WAN0249DB_at; Start 76; Stop 100
cctttcggctgtttttgatgtggaa

SEQ ID NO: 18321 - DNA, 25 bp, Artificial
  probe
  misc_feature (1)..(25): SEQ ID NO: 4597; WAN0249DB_at; Start 19; Stop 43
ccatgagctagggatttgataagaa

SEQ ID NO: 18322 - DNA, 25 bp, Artificial
  probe
  misc_feature (1)..(25): SEQ ID NO: 4597; WAN0249DB_at; Start 39; Stop 63
aagaatatcaagataagaaaaaaca

SEQ ID NO: 18323 - DNA, 25 bp, Artificial
  probe
  misc_feature (1)..(25): SEQ ID NO: 4597; WAN0249DB_at; Start 35; Stop 59
tgataagaatatcaagataagaaaa

SEQ ID NO: 18324 - DNA, 25 bp, Artificial
  probe
  misc_feature (1)..(25): SEQ ID NO: 4597; WAN0249DB_at; Start 77; Stop 101
ctttcggctgtttttgatgtggaaa

SEQ ID NO: 18325 - DNA, 25 bp, Artificial
  probe
  misc_feature (1)..(25): SEQ ID NO: 4597; WAN0249DB_at; Start 80; Stop 104
tcggctgtttttgatgtggaaaact

SEQ ID NO: 18326 - DNA, 25 bp, Artificial
  probe
  misc_feature (1)..(25): SEQ ID NO: 4597; WAN0249DB_at; Start 8; Stop 32
agacttgcttgccatgagctaggga

SEQ ID NO: 18327 - DNA, 25 bp, Artificial
  probe
  misc_feature (1)..(25): SEQ ID NO: 4597; WAN0249DB_at; Start 15; Stop 39
cttgccatgagctagggatttgata

SEQ ID NO: 18328 - DNA, 25 bp, Artificial
  probe
  misc_feature (1)..(25): SEQ ID NO: 4597; WAN0249DB_at; Start 20; Stop 44
catgagctagggatttgataagaat

SEQ ID NO: 18329 - DNA, 25 bp, Artificial
  probe
  misc_feature (1)..(25): SEQ ID NO: 4597; WAN0249DB_at; Start 13; Stop 37
tgcttgccatgagctagggatttga

SEQ ID NO: 18330 - DNA, 25 bp, Artificial
  probe
  misc_feature (1)..(25): SEQ ID NO: 4597; WAN0249DB_at; Start 78; Stop 102
tttcggctgtttttgatgtggaaaa

SEQ ID NO: 18331 - DNA, 25 bp, Artificial
  probe
  misc_feature (1)..(25): SEQ ID NO: 4597; WAN0249DB_at; Start 17; Stop 41
tgccatgagctagggatttgataag

SEQ ID NO: 18332 - DNA, 25 bp, Artificial
  probe
  misc_feature (1)..(25): SEQ ID NO: 73; WAN0249DC_at; Start 125; Stop 149
taagagcacaagactccatcatcat

SEQ ID NO: 18333 - DNA, 25 bp, Artificial
  probe
  misc_feature (1)..(25): SEQ ID NO: 73; WAN0249DC_at; Start 146; Stop 170
tcataacactcaacaaaattgatga

SEQ ID NO: 18334 - DNA, 25 bp, Artificial
  probe
  misc_feature (1)..(25): SEQ ID NO: 73; WAN0249DC_at; Start 92; Stop 116
gaccgaaatcctagcggtagaccag

SEQ ID NO: 18335 - DNA, 25 bp, Artificial
  probe
  misc_feature (1)..(25): SEQ ID NO: 73; WAN0249DC_at; Start 63; Stop 87
tcccaacttatgatgagtgttcccg

SEQ ID NO: 18336 - DNA, 25 bp, Artificial
  probe
  misc_feature (1)..(25): SEQ ID NO: 73; WAN0249DC_at; Start 111; Stop 135
gaccagagctagactaagagcacaa

SEQ ID NO: 18337 - DNA, 25 bp, Artificial
  probe
  misc_feature (1)..(25): SEQ ID NO: 73; WAN0249DC_at; Start 77; Stop 101
gagtgttcccgctaggaccgaaatc

SEQ ID NO: 18338 - DNA, 25 bp, Artificial
  probe
  misc_feature (1)..(25): SEQ ID NO: 73; WAN0249DC_at; Start 109; Stop 133
tagaccagagctagactaagagcac

SEQ ID NO: 18339 - DNA, 25 bp, Artificial
  probe
  misc_feature (1)..(25): SEQ ID NO: 73; WAN0249DC_at; Start 69; Stop 93
cttatgatgagtgttcccgctagga

SEQ ID NO: 18340 - DNA, 25 bp, Artificial
  probe
  misc_feature (1)..(25): SEQ ID NO: 73; WAN0249DC_at; Start 72; Stop 96
atgatgagtgttcccgctaggaccg

SEQ ID NO: 18341 - DNA, 25 bp, Artificial
  probe
  misc_feature (1)..(25): SEQ ID NO: 73; WAN0249DC_at; Start 96; Stop 120
gaaatcctagcggtagaccagagct

SEQ ID NO: 18342 - DNA, 25 bp, Artificial
  probe
  misc_feature (1)..(25): SEQ ID NO: 73; WAN0249DC_at; Start 51; Stop 75
aagcgtctactatcccaacttatga

SEQ ID NO: 18343 - DNA, 25 bp, Artificial
  probe
  misc_feature (1)..(25): SEQ ID NO: 73; WAN0249DC_at; Start 38; Stop 62
caatttcgtaaacaagcgtctacta

SEQ ID NO: 18344 - DNA, 25 bp, Artificial
  probe
  misc_feature (1)..(25): SEQ ID NO: 73; WAN0249DC_at; Start 9; Stop 33
tgcttacgaagttgttcttaagaaa

SEQ ID NO: 18345 - DNA, 25 bp, Artificial
  probe
  misc_feature (1)..(25): SEQ ID NO: 73; WAN0249DC_at; Start 107; Stop 131
ggtagaccagagctagactaagagc

SEQ ID NO: 18346 - DNA, 25 bp, Artificial
  probe
  misc_feature (1)..(25): SEQ ID NO: 73; WAN0249DC_at; Start 98; Stop 122
aatcctagcggtagaccagagctag

SEQ ID NO: 18347 - DNA, 25 bp, Artificial
  probe
  misc_feature (1)..(25): SEQ ID NO: 73; WAN0249DC_at; Start 2; Stop 26
aaacgcctgcttacgaagttgttct

SEQ ID NO: 18348 - DNA, 25 bp, Artificial
  probe
  misc_feature (1)..(25): SEQ ID NO: 73; WAN0249DC_at; Start 61; Stop 85
tatcccaacttatgatgagtgttcc

SEQ ID NO: 18349 - DNA, 25 bp, Artificial
  probe
  misc_feature (1)..(25): SEQ ID NO: 73; WAN0249DC_at; Start 66; Stop 90
caacttatgatgagtgttcccgcta

SEQ ID NO: 18350 - DNA, 25 bp, Artificial
  probe
  misc_feature (1)..(25): SEQ ID NO: 73; WAN0249DC_at; Start 5; Stop 29
cgcctgcttacgaagttgttcttaa

SEQ ID NO: 18351 - DNA, 25 bp, Artificial
  probe
  misc_feature (1)..(25): SEQ ID NO: 73; WAN0249DC_at; Start 136; Stop 160
gactccatcatcataacactcaaca

SEQ ID NO: 18352 - DNA, 25 bp, Artificial
  probe
  misc_feature (1)..(25): SEQ ID NO: 73; WAN0249DC_at; Start 120; Stop 144
tagactaagagcacaagactccatc

SEQ ID NO: 18353 - DNA, 25 bp, Artificial
  probe
  misc_feature (1)..(25): SEQ ID NO: 73; WAN0249DC_at; Start 105; Stop 129
gcggtagaccagagctagactaaga

SEQ ID NO: 18354 - DNA, 25 bp, Artificial
  probe
  misc_feature (1)..(25): SEQ ID NO: 73; WAN0249DC_at; Start 89; Stop 113
taggaccgaaatcctagcggtagac

SEQ ID NO: 18355 - DNA, 25 bp, Artificial
  probe
  misc_feature (1)..(25): SEQ ID NO: 73; WAN0249DC_at; Start 130; Stop 154
gcacaagactccatcatcataacac

SEQ ID NO: 18356 - DNA, 25 bp, Artificial
  probe
  misc_feature (1)..(25): SEQ ID NO: 73; WAN0249DC_at; Start 71; Stop 95
tatgatgagtgttcccgctaggacc

SEQ ID NO: 18357 - DNA, 25 bp, Artificial
  probe
  misc_feature (1)..(25): SEQ ID NO: 73; WAN0249DC_at; Start 101; Stop 125
cctagcggtagaccagagctagact

SEQ ID NO: 18358 - DNA, 25 bp, Artificial
  probe
  misc_feature (1)..(25): SEQ ID NO: 73; WAN0249DC_at; Start 41; Stop 65
tttcgtaaacaagcgtctactatcc

SEQ ID NO: 18359 - DNA, 25 bp, Artificial
  probe
  misc_feature (1)..(25): SEQ ID NO: 73; WAN0249DC_at; Start 76; Stop 100
tgagtgttcccgctaggaccgaaat

SEQ ID NO: 18360 - DNA, 25 bp, Artificial
  probe
  misc_feature (1)..(25): SEQ ID NO: 73; WAN0249DC_at; Start 118; Stop 142
gctagactaagagcacaagactcca

SEQ ID NO: 18361 - DNA, 25 bp, Artificial
  probe
  misc_feature (1)..(25): SEQ ID NO: 73; WAN0249DC_at; Start 46; Stop 70
taaacaagcgtctactatcccaact

SEQ ID NO: 18362 - DNA, 25 bp, Artificial
  probe
  misc_feature (1)..(25): SEQ ID NO: 73; WAN0249DC_at; Start 55; Stop 79
gtctactatcccaacttatgatgag

SEQ ID NO: 18363 - DNA, 25 bp, Artificial
  probe
  misc_feature (1)..(25): SEQ ID NO: 73; WAN0249DC_at; Start 80; Stop 104
tgttcccgctaggaccgaaatccta

SEQ ID NO: 18364 - DNA, 25 bp, Artificial
  probe
  misc_feature (1)..(25): SEQ ID NO: 73; WAN0249DC_at; Start 114; Stop 138
cagagctagactaagagcacaagac

SEQ ID NO: 18365 - DNA, 25 bp, Artificial
  probe
  misc_feature (1)..(25): SEQ ID NO: 73; WAN0249DC_at; Start 122; Stop 146
gactaagagcacaagactccatcat

SEQ ID NO: 18366 - DNA, 25 bp, Artificial
  probe
  misc_feature (1)..(25): SEQ ID NO: 276; WAN0249DD_at; Start 56; Stop 80
tctggtctaccgctaggatttcggt

SEQ ID NO: 18367 - DNA, 25 bp, Artificial
  probe
  misc_feature (1)..(25): SEQ ID NO: 276; WAN0249DD_at; Start 48; Stop 72
agtctagctctggtctaccgctagg

SEQ ID NO: 18368 - DNA, 25 bp, Artificial
  probe
  misc_feature (1)..(25): SEQ ID NO: 276; WAN0249DD_at; Start 69; Stop 93
taggatttcggtcctagcgggaaca

SEQ ID NO: 18369 - DNA, 25 bp, Artificial
  probe
  misc_feature (1)..(25): SEQ ID NO: 276; WAN0249DD_at; Start 20; Stop 44
tgttatgatgatggagtcttgtgct

SEQ ID NO: 18370 - DNA, 25 bp, Artificial
  probe
  misc_feature (1)..(25): SEQ ID NO: 276; WAN0249DD_at; Start 98; Stop 122
tcataagttgggatagtagacgctt

SEQ ID NO: 18371 - DNA, 25 bp, Artificial
  probe
  misc_feature (1)..(25): SEQ ID NO: 276; WAN0249DD_at; Start 111; Stop 135
tagtagacgcttgtttacgaaattg

SEQ ID NO: 18372 - DNA, 25 bp, Artificial
  probe
  misc_feature (1)..(25): SEQ ID NO: 276; WAN0249DD_at; Start 36; Stop 60
tcttgtgctcttagtctagctctgg

SEQ ID NO: 18373 - DNA, 25 bp, Artificial
  probe
  misc_feature (1)..(25): SEQ ID NO: 276; WAN0249DD_at; Start 73; Stop 97
atttcggtcctagcgggaacactca

SEQ ID NO: 18374 - DNA, 25 bp, Artificial
  probe
  misc_feature (1)..(25): SEQ ID NO: 276; WAN0249DD_at; Start 25; Stop 49
tgatgatggagtcttgtgctcttag

SEQ ID NO: 18375 - DNA, 25 bp, Artificial
  probe
  misc_feature (1)..(25): SEQ ID NO: 276; WAN0249DD_at; Start 145; Stop 169
taagaacaacttcgtaagcaggcgt

SEQ ID NO: 18376 - DNA, 25 bp, Artificial
  probe
  misc_feature (1)..(25): SEQ ID NO: 276; WAN0249DD_at; Start 144; Stop 168
ttaagaacaacttcgtaagcaggcg

SEQ ID NO: 18377 - DNA, 25 bp, Artificial
  probe
  misc_feature (1)..(25): SEQ ID NO: 276; WAN0249DD_at; Start 58; Stop 82
tggtctaccgctaggatttcggtcc

SEQ ID NO: 18378 - DNA, 25 bp, Artificial
  probe
  misc_feature (1)..(25): SEQ ID NO: 276; WAN0249DD_at; Start 41; Stop 65
tgctcttagtctagctctggtctac

SEQ ID NO: 18379 - DNA, 25 bp, Artificial
  probe
  misc_feature (1)..(25): SEQ ID NO: 276; WAN0249DD_at; Start 77; Stop 101
cggtcctagcgggaacactcatcat

SEQ ID NO: 18380 - DNA, 25 bp, Artificial
  probe
  misc_feature (1)..(25): SEQ ID NO: 276; WAN0249DD_at; Start 33; Stop 57
gagtcttgtgctcttagtctagctc

SEQ ID NO: 18381 - DNA, 25 bp, Artificial
  probe
  misc_feature (1)..(25): SEQ ID NO: 276; WAN0249DD_at; Start 3; Stop 27
tcatcaattttgttgagtgttatga

SEQ ID NO: 18382 - DNA, 25 bp, Artificial
  probe
  misc_feature (1)..(25): SEQ ID NO: 276; WAN0249DD_at; Start 31; Stop 55
tggagtcttgtgctcttagtctagc

SEQ ID NO: 18383 - DNA, 25 bp, Artificial
  probe
  misc_feature (1)..(25): SEQ ID NO: 276; WAN0249DD_at; Start 80; Stop 104
tcctagcgggaacactcatcataag

SEQ ID NO: 18384 - DNA, 25 bp, Artificial
  probe
  misc_feature (1)..(25): SEQ ID NO: 276; WAN0249DD_at; Start 86; Stop 110
cgggaacactcatcataagttggga

SEQ ID NO: 18385 - DNA, 25 bp, Artificial
  probe
  misc_feature (1)..(25): SEQ ID NO: 276; WAN0249DD_at; Start 39; Stop 63
tgtgctcttagtctagctctggtct

SEQ ID NO: 18386 - DNA, 25 bp, Artificial
  probe
  misc_feature (1)..(25): SEQ ID NO: 276; WAN0249DD_at; Start 16; Stop 40
tgagtgttatgatgatggagtcttg

SEQ ID NO: 18387 - DNA, 25 bp, Artificial
  probe
  misc_feature (1)..(25): SEQ ID NO: 276; WAN0249DD_at; Start 147; Stop 171
agaacaacttcgtaagcaggcgttt

SEQ ID NO: 18388 - DNA, 25 bp, Artificial
  probe
  misc_feature (1)..(25): SEQ ID NO: 276; WAN0249DD_at; Start 95; Stop 119
tcatcataagttgggatagtagacg

SEQ ID NO: 18389 - DNA, 25 bp, Artificial
  probe
  misc_feature (1)..(25): SEQ ID NO: 276; WAN0249DD_at; Start 105; Stop 129
ttgggatagtagacgcttgtttacg

SEQ ID NO: 18390 - DNA, 25 bp, Artificial
  probe
  misc_feature (1)..(25): SEQ ID NO: 276; WAN0249DD_at; Start 92; Stop 116
cactcatcataagttgggatagtag

SEQ ID NO: 18391 - DNA, 25 bp, Artificial
  probe
  misc_feature (1)..(25): SEQ ID NO: 276; WAN0249DD_at; Start 108; Stop 132
ggatagtagacgcttgtttacgaaa

SEQ ID NO: 18392 - DNA, 25 bp, Artificial
  probe
  misc_feature (1)..(25): SEQ ID NO: 276; WAN0249DD_at; Start 72; Stop 96
gatttcggtcctagcgggaacactc

SEQ ID NO: 18393 - DNA, 25 bp, Artificial
  probe
  misc_feature (1)..(25): SEQ ID NO: 276; WAN0249DD_at; Start 78; Stop 102
ggtcctagcgggaacactcatcata

SEQ ID NO: 18394 - DNA, 25 bp, Artificial
  probe
  misc_feature (1)..(25): SEQ ID NO: 276; WAN0249DD_at; Start 83; Stop 107
tagcgggaacactcatcataagttg

SEQ ID NO: 18395 - DNA, 25 bp, Artificial
  probe
  misc_feature (1)..(25): SEQ ID NO: 276; WAN0249DD_at; Start 52; Stop 76
tagctctggtctaccgctaggattt

SEQ ID NO: 18396 - DNA, 25 bp, Artificial
  probe
  misc_feature (1)..(25): SEQ ID NO: 276; WAN0249DD_at; Start 44; Stop 68
tcttagtctagctctggtctaccgc

SEQ ID NO: 18397 - DNA, 25 bp, Artificial
  probe
  misc_feature (1)..(25): SEQ ID NO: 276; WAN0249DD_at; Start 101; Stop 125
taagttgggatagtagacgcttgtt

SEQ ID NO: 18398 - DNA, 25 bp, Artificial
  probe
  misc_feature (1)..(25): SEQ ID NO: 276; WAN0249DD_at; Start 60; Stop 84
gtctaccgctaggatttcggtccta

SEQ ID NO: 18399 - DNA, 25 bp, Artificial
  probe
  misc_feature (1)..(25): SEQ ID NO: 276; WAN0249DD_at; Start 89; Stop 113
gaacactcatcataagttgggatag

SEQ ID NO: 18400 - DNA, 25 bp, Artificial
  probe
  misc_feature (1)..(25): SEQ ID NO: 3649; WAN0249DE_at; Start 22; Stop 46
ttctcttatgtaaagctttctttac

SEQ ID NO: 18401 - DNA, 25 bp, Artificial
  probe
  misc_feature (1)..(25): SEQ ID NO: 3649; WAN0249DE_at; Start 24; Stop 48
ctcttatgtaaagctttctttacat

SEQ ID NO: 18402 - DNA, 25 bp, Artificial
  probe
  misc_feature (1)..(25): SEQ ID NO: 3649; WAN0249DE_at; Start 33; Stop 57
aaagctttctttacatagatgtcaa

SEQ ID NO: 18403 - DNA, 25 bp, Artificial
  probe
  misc_feature (1)..(25): SEQ ID NO: 3649; WAN0249DE_at; Start 23; Stop 47
tctcttatgtaaagctttctttaca

SEQ ID NO: 18404 - DNA, 25 bp, Artificial
  probe
  misc_feature (1)..(25): SEQ ID NO: 3649; WAN0249DE_at; Start 17; Stop 41
atcttttctcttatgtaaagctttc

SEQ ID NO: 18405 - DNA, 25 bp, Artificial
  probe
  misc_feature (1)..(25): SEQ ID NO: 3649; WAN0249DE_at; Start 10; Stop 34
ctaacacatcttttctcttatgtaa

SEQ ID NO: 18406 - DNA, 25 bp, Artificial
  probe
  misc_feature (1)..(25): SEQ ID NO: 3649; WAN0249DE_at; Start 30; Stop 54
tgtaaagctttctttacatagatgt

SEQ ID NO: 18407 - DNA, 25 bp, Artificial
  probe
  misc_feature (1)..(25): SEQ ID NO: 3649; WAN0249DE_at; Start 16; Stop 40
catcttttctcttatgtaaagcttt

SEQ ID NO: 18408 - DNA, 25 bp, Artificial
  probe
  misc_feature (1)..(25): SEQ ID NO: 3649; WAN0249DE_at; Start 12; Stop 36
aacacatcttttctcttatgtaaag

SEQ ID NO: 18409 - DNA, 25 bp, Artificial
  probe
  misc_feature (1)..(25): SEQ ID NO: 3649; WAN0249DE_at; Start 27; Stop 51
ttatgtaaagctttctttacataga

SEQ ID NO: 18410 - DNA, 25 bp, Artificial
  probe
  misc_feature (1)..(25): SEQ ID NO: 3649; WAN0249DE_at; Start 9; Stop 33
actaacacatcttttctcttatgta

SEQ ID NO: 18411 - DNA, 25 bp, Artificial
  probe
  misc_feature (1)..(25): SEQ ID NO: 3649; WAN0249DE_at; Start 5; Stop 29
ctacactaacacatcttttctctta

SEQ ID NO: 18412 - DNA, 25 bp, Artificial
  probe
  misc_feature (1)..(25): SEQ ID NO: 3649; WAN0249DE_at; Start 13; Stop 37
acacatcttttctcttatgtaaagc

SEQ ID NO: 18413 - DNA, 25 bp, Artificial
  probe
  misc_feature (1)..(25): SEQ ID NO: 3649; WAN0249DE_at; Start 21; Stop 45
tttctcttatgtaaagctttcttta

SEQ ID NO: 18414 - DNA, 25 bp, Artificial
  probe
  misc_feature (1)..(25): SEQ ID NO: 3649; WAN0249DE_at; Start 3; Stop 27
ttctacactaacacatcttttctct

SEQ ID NO: 18415 - DNA, 25 bp, Artificial
  probe
  misc_feature (1)..(25): SEQ ID NO: 3649; WAN0249DE_at; Start 8; Stop 32
cactaacacatcttttctcttatgt

SEQ ID NO: 18416 - DNA, 25 bp, Artificial
  probe
  misc_feature (1)..(25): SEQ ID NO: 3649; WAN0249DE_at; Start 28; Stop 52
tatgtaaagctttctttacatagat

SEQ ID NO: 18417 - DNA, 25 bp, Artificial
  probe
  misc_feature (1)..(25): SEQ ID NO: 3649; WAN0249DE_at; Start 18; Stop 42
tcttttctcttatgtaaagctttct

SEQ ID NO: 18418 - DNA, 25 bp, Artificial
  probe
  misc_feature (1)..(25): SEQ ID NO: 3649; WAN0249DE_at; Start 15; Stop 39
acatcttttctcttatgtaaagctt

SEQ ID NO: 18419 - DNA, 25 bp, Artificial
  probe
  misc_feature (1)..(25): SEQ ID NO: 3649; WAN0249DE_at; Start 31; Stop 55
gtaaagctttctttacatagatgtc

SEQ ID NO: 18420 - DNA, 25 bp, Artificial
  probe
  misc_feature (1)..(25): SEQ ID NO: 3649; WAN0249DE_at; Start 32; Stop 56
taaagctttctttacatagatgtca

SEQ ID NO: 18421 - DNA, 25 bp, Artificial
  probe
  misc_feature (1)..(25): SEQ ID NO: 3649; WAN0249DE_at; Start 1; Stop 25
gattctacactaacacatcttttct

SEQ ID NO: 18422 - DNA, 25 bp, Artificial
  probe
  misc_feature (1)..(25): SEQ ID NO: 3649; WAN0249DE_at; Start 14; Stop 38
cacatcttttctcttatgtaaagct

SEQ ID NO: 18423 - DNA, 25 bp, Artificial
  probe
  misc_feature (1)..(25): SEQ ID NO: 3649; WAN0249DE_at; Start 29; Stop 53
atgtaaagctttctttacatagatg

SEQ ID NO: 18424 - DNA, 25 bp, Artificial
  probe
  misc_feature (1)..(25): SEQ ID NO: 3649; WAN0249DE_at; Start 2; Stop 26
attctacactaacacatcttttctc

SEQ ID NO: 18425 - DNA, 25 bp, Artificial
  probe
  misc_feature (1)..(25): SEQ ID NO: 3649; WAN0249DE_at; Start 26; Stop 50
cttatgtaaagctttctttacatag

SEQ ID NO: 18426 - DNA, 25 bp, Artificial
  probe
  misc_feature (1)..(25): SEQ ID NO: 3649; WAN0249DE_at; Start 19; Stop 43
cttttctcttatgtaaagctttctt

SEQ ID NO: 18427 - DNA, 25 bp, Artificial
  probe
  misc_feature (1)..(25): SEQ ID NO: 3649; WAN0249DE_at; Start 7; Stop 31
acactaacacatcttttctcttatg

SEQ ID NO: 18428 - DNA, 25 bp, Artificial
  probe
  misc_feature (1)..(25): SEQ ID NO: 3649; WAN0249DE_at; Start 11; Stop 35
taacacatcttttctcttatgtaaa

SEQ ID NO: 18429 - DNA, 25 bp, Artificial
  probe
  misc_feature (1)..(25): SEQ ID NO: 3649; WAN0249DE_at; Start 4; Stop 28
tctacactaacacatcttttctctt

SEQ ID NO: 18430 - DNA, 25 bp, Artificial
  probe
  misc_feature (1)..(25): SEQ ID NO: 3649; WAN0249DE_at; Start 6; Stop 30
tacactaacacatcttttctcttat

SEQ ID NO: 18431 - DNA, 25 bp, Artificial
  probe
  misc_feature (1)..(25): SEQ ID NO: 5025; WAN0249DF_at; Start 31; Stop 55
agagaaaagatgtgttagtgtagaa

SEQ ID NO: 18432 - DNA, 25 bp, Artificial
  probe
  misc_feature (1)..(25): SEQ ID NO: 5025; WAN0249DF_at; Start 13; Stop 37
taaagaaagctttacataagagaaa

SEQ ID NO: 18433 - DNA, 25 bp, Artificial
  probe
  misc_feature (1)..(25): SEQ ID NO: 5025; WAN0249DF_at; Start 16; Stop 40
agaaagctttacataagagaaaaga

SEQ ID NO: 18434 - DNA, 25 bp, Artificial
  probe
  misc_feature (1)..(25): SEQ ID NO: 5025; WAN0249DF_at; Start 30; Stop 54
aagagaaaagatgtgttagtgtaga

SEQ ID NO: 18435 - DNA, 25 bp, Artificial
  probe
  misc_feature (1)..(25): SEQ ID NO: 5025; WAN0249DF_at; Start 33; Stop 57
agaaaagatgtgttagtgtagaatc

SEQ ID NO: 18436 - DNA, 25 bp, Artificial
  probe
  misc_feature (1)..(25): SEQ ID NO: 5025; WAN0249DF_at; Start 32; Stop 56
gagaaaagatgtgttagtgtagaat

SEQ ID NO: 18437 - DNA, 25 bp, Artificial
  probe
  misc_feature (1)..(25): SEQ ID NO: 5025; WAN0249DF_at; Start 3; Stop 27
gacatctatgtaaagaaagctttac

SEQ ID NO: 18438 - DNA, 25 bp, Artificial
  probe
  misc_feature (1)..(25): SEQ ID NO: 5025; WAN0249DF_at; Start 5; Stop 29
catctatgtaaagaaagctttacat

SEQ ID NO: 18439 - DNA, 25 bp, Artificial
  probe
  misc_feature (1)..(25): SEQ ID NO: 5025; WAN0249DF_at; Start 8; Stop 32
ctatgtaaagaaagctttacataag

SEQ ID NO: 18440 - DNA, 25 bp, Artificial
  probe
  misc_feature (1)..(25): SEQ ID NO: 5025; WAN0249DF_at; Start 9; Stop 33
tatgtaaagaaagctttacataaga

SEQ ID NO: 18441 - DNA, 25 bp, Artificial
  probe
  misc_feature (1)..(25): SEQ ID NO: 5025; WAN0249DF_at; Start 11; Stop 35
tgtaaagaaagctttacataagaga

SEQ ID NO: 18442 - DNA, 25 bp, Artificial
  probe
  misc_feature (1)..(25): SEQ ID NO: 5025; WAN0249DF_at; Start 7; Stop 31
tctatgtaaagaaagctttacataa

SEQ ID NO: 18443 - DNA, 25 bp, Artificial
  probe
  misc_feature (1)..(25): SEQ ID NO: 5025; WAN0249DF_at; Start 18; Stop 42
aaagctttacataagagaaaagatg

SEQ ID NO: 18444 - DNA, 25 bp, Artificial
  probe
  misc_feature (1)..(25): SEQ ID NO: 5025; WAN0249DF_at; Start 2; Stop 26
tgacatctatgtaaagaaagcttta

SEQ ID NO: 18445 - DNA, 25 bp, Artificial
  probe
  misc_feature (1)..(25): SEQ ID NO: 5025; WAN0249DF_at; Start 15; Stop 39
aagaaagctttacataagagaaaag

SEQ ID NO: 18446 - DNA, 25 bp, Artificial
  probe
  misc_feature (1)..(25): SEQ ID NO: 5025; WAN0249DF_at; Start 6; Stop 30
atctatgtaaagaaagctttacata

SEQ ID NO: 18447 - DNA, 25 bp, Artificial
  probe
  misc_feature (1)..(25): SEQ ID NO: 5025; WAN0249DF_at; Start 4; Stop 28
acatctatgtaaagaaagctttaca

SEQ ID NO: 18448 - DNA, 25 bp, Artificial
  probe
  misc_feature (1)..(25): SEQ ID NO: 5025; WAN0249DF_at; Start 10; Stop 34
atgtaaagaaagctttacataagag

SEQ ID NO: 18449 - DNA, 25 bp, Artificial
  probe
  misc_feature (1)..(25): SEQ ID NO: 5025; WAN0249DF_at; Start 19; Stop 43
aagctttacataagagaaaagatgt

SEQ ID NO: 18450 - DNA, 25 bp, Artificial
  probe
  misc_feature (1)..(25): SEQ ID NO: 5025; WAN0249DF_at; Start 17; Stop 41
gaaagctttacataagagaaaagat

SEQ ID NO: 18451 - DNA, 25 bp, Artificial
  probe
  misc_feature (1)..(25): SEQ ID NO: 5025; WAN0249DF_at; Start 12; Stop 36
gtaaagaaagctttacataagagaa

SEQ ID NO: 18452 - DNA, 25 bp, Artificial
  probe
  misc_feature (1)..(25): SEQ ID NO: 5025; WAN0249DF_at; Start 1; Stop 25
ttgacatctatgtaaagaaagcttt

SEQ ID NO: 18453 - DNA, 25 bp, Artificial
  probe
  misc_feature (1)..(25): SEQ ID NO: 3171; WAN0249DG_at; Start 133; Stop 157
tattttgtgaataagatgtgaaaaa

SEQ ID NO: 18454 - DNA, 25 bp, Artificial
  probe
  misc_feature (1)..(25): SEQ ID NO: 3171; WAN0249DG_at; Start 84; Stop 108
gtggataactcttttgaaattgtga

SEQ ID NO: 18455 - DNA, 25 bp, Artificial
  probe
  misc_feature (1)..(25): SEQ ID NO: 3171; WAN0249DG_at; Start 22; Stop 46
ttactgaaagtataaactgactagc

SEQ ID NO: 18456 - DNA, 25 bp, Artificial
  probe
  misc_feature (1)..(25): SEQ ID NO: 3171; WAN0249DG_at; Start 74; Stop 98
tacacaaactgtggataactctttt

SEQ ID NO: 18457 - DNA, 25 bp, Artificial
  probe
  misc_feature (1)..(25): SEQ ID NO: 3171; WAN0249DG_at; Start 83; Stop 107
tgtggataactcttttgaaattgtg

SEQ ID NO: 18458 - DNA, 25 bp, Artificial
  probe
  misc_feature (1)..(25): SEQ ID NO: 3171; WAN0249DG_at; Start 43; Stop 67
tagcttaattataacttaaacacaa

SEQ ID NO: 18459 - DNA, 25 bp, Artificial
  probe
  misc_feature (1)..(25): SEQ ID NO: 3171; WAN0249DG_at; Start 36; Stop 60
aactgactagcttaattataactta

SEQ ID NO: 18460 - DNA, 25 bp, Artificial
  probe
  misc_feature (1)..(25): SEQ ID NO: 3171; WAN0249DG_at; Start 71; Stop 95
ttttacacaaactgtggataactct

SEQ ID NO: 18461 - DNA, 25 bp, Artificial
  probe
  misc_feature (1)..(25): SEQ ID NO: 3171; WAN0249DG_at; Start 86; Stop 110
ggataactcttttgaaattgtgatt

SEQ ID NO: 18462 - DNA, 25 bp, Artificial
  probe
  misc_feature (1)..(25): SEQ ID NO: 3171; WAN0249DG_at; Start 1; Stop 25
atttgcctccatatgtttgaattac

SEQ ID NO: 18463 - DNA, 25 bp, Artificial
  probe
  misc_feature (1)..(25): SEQ ID NO: 3171; WAN0249DG_at; Start 27; Stop 51
gaaagtataaactgactagcttaat

SEQ ID NO: 18464 - DNA, 25 bp, Artificial
  probe
  misc_feature (1)..(25): SEQ ID NO: 3171; WAN0249DG_at; Start 5; Stop 29
gcctccatatgtttgaattactgaa

SEQ ID NO: 18465 - DNA, 25 bp, Artificial
  probe
  misc_feature (1)..(25): SEQ ID NO: 3171; WAN0249DG_at; Start 3; Stop 27
ttgcctccatatgtttgaattactg

SEQ ID NO: 18466 - DNA, 25 bp, Artificial
  probe
  misc_feature (1)..(25): SEQ ID NO: 3171; WAN0249DG_at; Start 40; Stop 64
gactagcttaattataacttaaaca

SEQ ID NO: 18467 - DNA, 25 bp, Artificial
  probe
  misc_feature (1)..(25): SEQ ID NO: 3171; WAN0249DG_at; Start 18; Stop 42
tgaattactgaaagtataaactgac

SEQ ID NO: 18468 - DNA, 25 bp, Artificial
  probe
  misc_feature (1)..(25): SEQ ID NO: 3171; WAN0249DG_at; Start 70; Stop 94
gttttacacaaactgtggataactc

SEQ ID NO: 18469 - DNA, 25 bp, Artificial
  probe
  misc_feature (1)..(25): SEQ ID NO: 3171; WAN0249DG_at; Start 7; Stop 31
ctccatatgtttgaattactgaaag

SEQ ID NO: 18470 - DNA, 25 bp, Artificial
  probe
  misc_feature (1)..(25): SEQ ID NO: 3171; WAN0249DG_at; Start 9; Stop 33
ccatatgtttgaattactgaaagta

SEQ ID NO: 18471 - DNA, 25 bp, Artificial
  probe
  misc_feature (1)..(25): SEQ ID NO: 3171; WAN0249DG_at; Start 79; Stop 103
aaactgtggataactcttttgaaat

SEQ ID NO: 18472 - DNA, 25 bp, Artificial
  probe
  misc_feature (1)..(25): SEQ ID NO: 3171; WAN0249DG_at; Start 78; Stop 102
caaactgtggataactcttttgaaa

SEQ ID NO: 18473 - DNA, 25 bp, Artificial
  probe
  misc_feature (1)..(25): SEQ ID NO: 3171; WAN0249DG_at; Start 34; Stop 58
taaactgactagcttaattataact

SEQ ID NO: 18474 - DNA, 25 bp, Artificial
  probe
  misc_feature (1)..(25): SEQ ID NO: 3171; WAN0249DG_at; Start 144; Stop 168
taagatgtgaaaaaatagagaatat

SEQ ID NO: 18475 - DNA, 25 bp, Artificial
  probe
  misc_feature (1)..(25): SEQ ID NO: 3171; WAN0249DG_at; Start 149; Stop 173
tgtgaaaaaatagagaatatgttag

SEQ ID NO: 18476 - DNA, 25 bp, Artificial
  probe
  misc_feature (1)..(25): SEQ ID NO: 3171; WAN0249DG_at; Start 25; Stop 49
ctgaaagtataaactgactagctta

SEQ ID NO: 18477 - DNA, 25 bp, Artificial
  probe
  misc_feature (1)..(25): SEQ ID NO: 3171; WAN0249DG_at; Start 4; Stop 28
tgcctccatatgtttgaattactga

SEQ ID NO: 18478 - DNA, 25 bp, Artificial
  probe
  misc_feature (1)..(25): SEQ ID NO: 3171; WAN0249DG_at; Start 6; Stop 30
cctccatatgtttgaattactgaaa

SEQ ID NO: 18479 - DNA, 25 bp, Artificial
  probe
  misc_feature (1)..(25): SEQ ID NO: 3171; WAN0249DG_at; Start 99; Stop 123
gaaattgtgattttcttaattgaaa

SEQ ID NO: 18480 - DNA, 25 bp, Artificial
  probe
  misc_feature (1)..(25): SEQ ID NO: 3171; WAN0249DG_at; Start 158; Stop 182
atagagaatatgttagaatagagtc

SEQ ID NO: 18481 - DNA, 25 bp, Artificial
  probe
  misc_feature (1)..(25): SEQ ID NO: 3171; WAN0249DG_at; Start 23; Stop 47
tactgaaagtataaactgactagct

SEQ ID NO: 18482 - DNA, 25 bp, Artificial
  probe
  misc_feature (1)..(25): SEQ ID NO: 3171; WAN0249DG_at; Start 81; Stop 105
actgtggataactcttttgaaattg

SEQ ID NO: 18483 - DNA, 25 bp, Artificial
  probe
  misc_feature (1)..(25): SEQ ID NO: 3171; WAN0249DG_at; Start 76; Stop 100
cacaaactgtggataactcttttga

SEQ ID NO: 18484 - DNA, 25 bp, Artificial
  probe
  misc_feature (1)..(25): SEQ ID NO: 3171; WAN0249DG_at; Start 72; Stop 96
tttacacaaactgtggataactctt

SEQ ID NO: 18485 - DNA, 25 bp, Artificial
  probe
  misc_feature (1)..(25): SEQ ID NO: 3171; WAN0249DG_at; Start 89; Stop 113
taactcttttgaaattgtgattttc

SEQ ID NO: 18486 - DNA, 25 bp, Artificial
  probe
  misc_feature (1)..(25): SEQ ID NO: 3171; WAN0249DG_at; Start 19; Stop 43
gaattactgaaagtataaactgact

SEQ ID NO: 18487 - DNA, 25 bp, Artificial
  probe
  misc_feature (1)..(25): SEQ ID NO: 3585; WAN0249DH_at; Start 10; Stop 34
ctaacatattctctattttttcaca

SEQ ID NO: 18488 - DNA, 25 bp, Artificial
  probe
  misc_feature (1)..(25): SEQ ID NO: 3585; WAN0249DH_at; Start 83; Stop 107
tcaaaagagttatccacagtttgtg

SEQ ID NO: 18489 - DNA, 25 bp, Artificial
  probe
  misc_feature (1)..(25): SEQ ID NO: 3585; WAN0249DH_at; Start 23; Stop 47
tattttttcacatcttattcacaaa

SEQ ID NO: 18490 - DNA, 25 bp, Artificial
  probe
  misc_feature (1)..(25): SEQ ID NO: 3585; WAN0249DH_at; Start 157; Stop 181
agtaattcaaacatatggaggcaaa

SEQ ID NO: 18491 - DNA, 25 bp, Artificial
  probe
  misc_feature (1)..(25): SEQ ID NO: 3585; WAN0249DH_at; Start 150; Stop 174
tactttcagtaattcaaacatatgg

SEQ ID NO: 18492 - DNA, 25 bp, Artificial
  probe
  misc_feature (1)..(25): SEQ ID NO: 3585; WAN0249DH_at; Start 79; Stop 103
aatttcaaaagagttatccacagtt

SEQ ID NO: 18493 - DNA, 25 bp, Artificial
  probe
  misc_feature (1)..(25): SEQ ID NO: 3585; WAN0249DH_at; Start 155; Stop 179
tcagtaattcaaacatatggaggca

SEQ ID NO: 18494 - DNA, 25 bp, Artificial
  probe
  misc_feature (1)..(25): SEQ ID NO: 3585; WAN0249DH_at; Start 125; Stop 149
agttataattaagctagtcagttta

SEQ ID NO: 18495 - DNA, 25 bp, Artificial
  probe
  misc_feature (1)..(25): SEQ ID NO: 3585; WAN0249DH_at; Start 84; Stop 108
caaaagagttatccacagtttgtgt

SEQ ID NO: 18496 - DNA, 25 bp, Artificial
  probe
  misc_feature (1)..(25): SEQ ID NO: 3585; WAN0249DH_at; Start 119; Stop 143
tgtttaagttataattaagctagtc

SEQ ID NO: 18497 - DNA, 25 bp, Artificial
  probe
  misc_feature (1)..(25): SEQ ID NO: 3585; WAN0249DH_at; Start 153; Stop 177
tttcagtaattcaaacatatggagg

SEQ ID NO: 18498 - DNA, 25 bp, Artificial
  probe
  misc_feature (1)..(25): SEQ ID NO: 3585; WAN0249DH_at; Start 21; Stop 45
tctattttttcacatcttattcaca

SEQ ID NO: 18499 - DNA, 25 bp, Artificial
  probe
  misc_feature (1)..(25): SEQ ID NO: 3585; WAN0249DH_at; Start 158; Stop 182
gtaattcaaacatatggaggcaaat

SEQ ID NO: 18500 - DNA, 25 bp, Artificial
  probe
  misc_feature (1)..(25): SEQ ID NO: 3585; WAN0249DH_at; Start 78; Stop 102
caatttcaaaagagttatccacagt

SEQ ID NO: 18501 - DNA, 25 bp, Artificial
  probe
  misc_feature (1)..(25): SEQ ID NO: 3585; WAN0249DH_at; Start 1; Stop 25
gactctattctaacatattctctat

SEQ ID NO: 18502 - DNA, 25 bp, Artificial
  probe
  misc_feature (1)..(25): SEQ ID NO: 3585; WAN0249DH_at; Start 81; Stop 105
tttcaaaagagttatccacagtttg

SEQ ID NO: 18503 - DNA, 25 bp, Artificial
  probe
  misc_feature (1)..(25): SEQ ID NO: 3585; WAN0249DH_at; Start 152; Stop 176
ctttcagtaattcaaacatatggag

SEQ ID NO: 18504 - DNA, 25 bp, Artificial
  probe
  misc_feature (1)..(25): SEQ ID NO: 3585; WAN0249DH_at; Start 58; Stop 82
gatttcaattaagaaaatcacaatt

SEQ ID NO: 18505 - DNA, 25 bp, Artificial
  probe
  misc_feature (1)..(25): SEQ ID NO: 3585; WAN0249DH_at; Start 85; Stop 109
aaaagagttatccacagtttgtgta

SEQ ID NO: 18506 - DNA, 25 bp, Artificial
  probe
  misc_feature (1)..(25): SEQ ID NO: 3585; WAN0249DH_at; Start 87; Stop 111
aagagttatccacagtttgtgtaaa

SEQ ID NO: 18507 - DNA, 25 bp, Artificial
  probe
  misc_feature (1)..(25): SEQ ID NO: 3585; WAN0249DH_at; Start 77; Stop 101
acaatttcaaaagagttatccacag

SEQ ID NO: 18508 - DNA, 25 bp, Artificial
  probe
  misc_feature (1)..(25): SEQ ID NO: 3585; WAN0249DH_at; Start 56; Stop 80
tagatttcaattaagaaaatcacaa

SEQ ID NO: 18509 - DNA, 25 bp, Artificial
  probe
  misc_feature (1)..(25): SEQ ID NO: 3585; WAN0249DH_at; Start 156; Stop 180
cagtaattcaaacatatggaggcaa

SEQ ID NO: 18510 - DNA, 25 bp, Artificial
  probe
  misc_feature (1)..(25): SEQ ID NO: 3585; WAN0249DH_at; Start 97; Stop 121
cacagtttgtgtaaaacttttgtgt

SEQ ID NO: 18511 - DNA, 25 bp, Artificial
  probe
  misc_feature (1)..(25): SEQ ID NO: 3585; WAN0249DH_at; Start 41; Stop 65
tcacaaaataaaaaatagatttcaa

SEQ ID NO: 18512 - DNA, 25 bp, Artificial
  probe
  misc_feature (1)..(25): SEQ ID NO: 3585; WAN0249DH_at; Start 123; Stop 147
taagttataattaagctagtcagtt

SEQ ID NO: 18513 - DNA, 25 bp, Artificial
  probe
  misc_feature (1)..(25): SEQ ID NO: 3585; WAN0249DH_at; Start 137; Stop 161
gctagtcagtttatactttcagtaa

SEQ ID NO: 18514 - DNA, 25 bp, Artificial
  probe
  misc_feature (1)..(25): SEQ ID NO: 3585; WAN0249DH_at; Start 96; Stop 120
ccacagtttgtgtaaaacttttgtg

SEQ ID NO: 18515 - DNA, 25 bp, Artificial
  probe
  misc_feature (1)..(25): SEQ ID NO: 3585; WAN0249DH_at; Start 135; Stop 159
aagctagtcagtttatactttcagt

SEQ ID NO: 18516 - DNA, 25 bp, Artificial
  probe
  misc_feature (1)..(25): SEQ ID NO: 3585; WAN0249DH_at; Start 86; Stop 110
aaagagttatccacagtttgtgtaa

SEQ ID NO: 18517 - DNA, 25 bp, Artificial
  probe
  misc_feature (1)..(25): SEQ ID NO: 3585; WAN0249DH_at; Start 134; Stop 158
taagctagtcagtttatactttcag

SEQ ID NO: 18518 - DNA, 25 bp, Artificial
  probe
  misc_feature (1)..(25): SEQ ID NO: 3585; WAN0249DH_at; Start 141; Stop 165
gtcagtttatactttcagtaattca

SEQ ID NO: 18519 - DNA, 25 bp, Artificial
  probe
  misc_feature (1)..(25): SEQ ID NO: 3585; WAN0249DH_at; Start 89; Stop 113
gagttatccacagtttgtgtaaaac

SEQ ID NO: 18520 - DNA, 25 bp, Artificial
  probe
  misc_feature (1)..(25): SEQ ID NO: 3585; WAN0249DH_at; Start 154; Stop 178
ttcagtaattcaaacatatggaggc

SEQ ID NO: 18521 - DNA, 25 bp, Artificial
  probe
  misc_feature (1)..(25): SEQ ID NO: 563; WAN0249DI_at; Start 2; Stop 26
tataatagcaaagctgggaattttc

SEQ ID NO: 18522 - DNA, 25 bp, Artificial
  probe
  misc_feature (1)..(25): SEQ ID NO: 563; WAN0249DI_at; Start 8; Stop 32
agcaaagctgggaattttcccggct

SEQ ID NO: 18523 - DNA, 25 bp, Artificial
  probe
  misc_feature (1)..(25): SEQ ID NO: 563; WAN0249DI_at; Start 5; Stop 29
aatagcaaagctgggaattttcccg

SEQ ID NO: 18524 - DNA, 25 bp, Artificial
  probe
  misc_feature (1)..(25): SEQ ID NO: 563; WAN0249DI_at; Start 7; Stop 31
tagcaaagctgggaattttcccggc

SEQ ID NO: 18525 - DNA, 25 bp, Artificial
  probe
  misc_feature (1)..(25): SEQ ID NO: 563; WAN0249DI_at; Start 3; Stop 27
ataatagcaaagctgggaattttcc

SEQ ID NO: 18526 - DNA, 25 bp, Artificial
  probe
  misc_feature (1)..(25): SEQ ID NO: 563; WAN0249DI_at; Start 1; Stop 25
atataatagcaaagctgggaatttt

SEQ ID NO: 18527 - DNA, 25 bp, Artificial
  probe
  misc_feature (1)..(25): SEQ ID NO: 563; WAN0249DI_at; Start 6; Stop 30
atagcaaagctgggaattttcccgg

SEQ ID NO: 18528 - DNA, 25 bp, Artificial
  probe
  misc_feature (1)..(25): SEQ ID NO: 563; WAN0249DI_at; Start 4; Stop 28
taatagcaaagctgggaattttccc

SEQ ID NO: 18529 - DNA, 25 bp, Artificial
  probe
  misc_feature (1)..(25): SEQ ID NO: 3448; WAN0249DJ_at; Start 42; Stop 66
agccgggaaaattcccagctttgct

SEQ ID NO: 18530 - DNA, 25 bp, Artificial
  probe
  misc_feature (1)..(25): SEQ ID NO: 3448; WAN0249DJ_at; Start 48; Stop 72
gaaaattcccagctttgctattata

SEQ ID NO: 18531 - DNA, 25 bp, Artificial
  probe
  misc_feature (1)..(25): SEQ ID NO: 3448; WAN0249DJ_at; Start 45; Stop 69
cgggaaaattcccagctttgctatt

SEQ ID NO: 18532 - DNA, 25 bp, Artificial
  probe
  misc_feature (1)..(25): SEQ ID NO: 3448; WAN0249DJ_at; Start 47; Stop 71
ggaaaattcccagctttgctattat

SEQ ID NO: 18533 - DNA, 25 bp, Artificial
  probe
  misc_feature (1)..(25): SEQ ID NO: 3448; WAN0249DJ_at; Start 49; Stop 73
aaaattcccagctttgctattatat

SEQ ID NO: 18534 - DNA, 25 bp, Artificial
  probe
  misc_feature (1)..(25): SEQ ID NO: 3448; WAN0249DJ_at; Start 2; Stop 26
tgtcatttttttctcccaaagtgta

SEQ ID NO: 18535 - DNA, 25 bp, Artificial
  probe
  misc_feature (1)..(25): SEQ ID NO: 3448; WAN0249DJ_at; Start 1; Stop 25
ctgtcatttttttctcccaaagtgt

SEQ ID NO: 18536 - DNA, 25 bp, Artificial
  probe
  misc_feature (1)..(25): SEQ ID NO: 3448; WAN0249DJ_at; Start 46; Stop 70
gggaaaattcccagctttgctatta

SEQ ID NO: 18537 - DNA, 25 bp, Artificial
  probe
  misc_feature (1)..(25): SEQ ID NO: 3448; WAN0249DJ_at; Start 43; Stop 67
gccgggaaaattcccagctttgcta

SEQ ID NO: 18538 - DNA, 25 bp, Artificial
  probe
  misc_feature (1)..(25): SEQ ID NO: 3448; WAN0249DJ_at; Start 44; Stop 68
ccgggaaaattcccagctttgctat

SEQ ID NO: 18539 - DNA, 25 bp, Artificial
  probe
  misc_feature (1)..(25): SEQ ID NO: 5020; WAN0249DK_at; Start 27; Stop 51
atggttatatctgctacagatagaa

SEQ ID NO: 18540 - DNA, 25 bp, Artificial
  probe
  misc_feature (1)..(25): SEQ ID NO: 5020; WAN0249DK_at; Start 6; Stop 30
aattagcaagaaattgatataatgg

SEQ ID NO: 18541 - DNA, 25 bp, Artificial
  probe
  misc_feature (1)..(25): SEQ ID NO: 5020; WAN0249DK_at; Start 17; Stop 41
aattgatataatggttatatctgct

SEQ ID NO: 18542 - DNA, 25 bp, Artificial
  probe
  misc_feature (1)..(25): SEQ ID NO: 5020; WAN0249DK_at; Start 22; Stop 46
atataatggttatatctgctacaga

SEQ ID NO: 18543 - DNA, 25 bp, Artificial
  probe
  misc_feature (1)..(25): SEQ ID NO: 5020; WAN0249DK_at; Start 20; Stop 44
tgatataatggttatatctgctaca

SEQ ID NO: 18544 - DNA, 25 bp, Artificial
  probe
  misc_feature (1)..(25): SEQ ID NO: 5020; WAN0249DK_at; Start 3; Stop 27
gacaattagcaagaaattgatataa

SEQ ID NO: 18545 - DNA, 25 bp, Artificial
  probe
  misc_feature (1)..(25): SEQ ID NO: 5020; WAN0249DK_at; Start 10; Stop 34
agcaagaaattgatataatggttat

SEQ ID NO: 18546 - DNA, 25 bp, Artificial
  probe
  misc_feature (1)..(25): SEQ ID NO: 5020; WAN0249DK_at; Start 11; Stop 35
gcaagaaattgatataatggttata

SEQ ID NO: 18547 - DNA, 25 bp, Artificial
  probe
  misc_feature (1)..(25): SEQ ID NO: 5020; WAN0249DK_at; Start 26; Stop 50
aatggttatatctgctacagataga

SEQ ID NO: 18548 - DNA, 25 bp, Artificial
  probe
  misc_feature (1)..(25): SEQ ID NO: 5020; WAN0249DK_at; Start 5; Stop 29
caattagcaagaaattgatataatg

SEQ ID NO: 18549 - DNA, 25 bp, Artificial
  probe
  misc_feature (1)..(25): SEQ ID NO: 5020; WAN0249DK_at; Start 2; Stop 26
tgacaattagcaagaaattgatata

SEQ ID NO: 18550 - DNA, 25 bp, Artificial
  probe
  misc_feature (1)..(25): SEQ ID NO: 5020; WAN0249DK_at; Start 12; Stop 36
caagaaattgatataatggttatat

SEQ ID NO: 18551 - DNA, 25 bp, Artificial
  probe
  misc_feature (1)..(25): SEQ ID NO: 5020; WAN0249DK_at; Start 1; Stop 25
ttgacaattagcaagaaattgatat

SEQ ID NO: 18552 - DNA, 25 bp, Artificial
  probe
  misc_feature (1)..(25): SEQ ID NO: 5020; WAN0249DK_at; Start 24; Stop 48
ataatggttatatctgctacagata

SEQ ID NO: 18553 - DNA, 25 bp, Artificial
  probe
  misc_feature (1)..(25): SEQ ID NO: 5020; WAN0249DK_at; Start 16; Stop 40
aaattgatataatggttatatctgc

SEQ ID NO: 18554 - DNA, 25 bp, Artificial
  probe
  misc_feature (1)..(25): SEQ ID NO: 5020; WAN0249DK_at; Start 23; Stop 47
tataatggttatatctgctacagat

SEQ ID NO: 18555 - DNA, 25 bp, Artificial
  probe
  misc_feature (1)..(25): SEQ ID NO: 5020; WAN0249DK_at; Start 25; Stop 49
taatggttatatctgctacagatag

SEQ ID NO: 18556 - DNA, 25 bp, Artificial
  probe
  misc_feature (1)..(25): SEQ ID NO: 5020; WAN0249DK_at; Start 4; Stop 28
acaattagcaagaaattgatataat

SEQ ID NO: 18557 - DNA, 25 bp, Artificial
  probe
  misc_feature (1)..(25): SEQ ID NO: 5020; WAN0249DK_at; Start 18; Stop 42
attgatataatggttatatctgcta

SEQ ID NO: 18558 - DNA, 25 bp, Artificial
  probe
  misc_feature (1)..(25): SEQ ID NO: 5020; WAN0249DK_at; Start 19; Stop 43
ttgatataatggttatatctgctac

SEQ ID NO: 18559 - DNA, 25 bp, Artificial
  probe
  misc_feature (1)..(25): SEQ ID NO: 5020; WAN0249DK_at; Start 7; Stop 31
attagcaagaaattgatataatggt

SEQ ID NO: 18560 - DNA, 25 bp, Artificial
  probe
  misc_feature (1)..(25): SEQ ID NO: 5020; WAN0249DK_at; Start 21; Stop 45
gatataatggttatatctgctacag

SEQ ID NO: 18561 - DNA, 25 bp, Artificial
  probe
  misc_feature (1)..(25): SEQ ID NO: 5020; WAN0249DK_at; Start 8; Stop 32
ttagcaagaaattgatataatggtt

SEQ ID NO: 18562 - DNA, 25 bp, Artificial
  probe
  misc_feature (1)..(25): SEQ ID NO: 5020; WAN0249DK_at; Start 13; Stop 37
aagaaattgatataatggttatatc

SEQ ID NO: 18563 - DNA, 25 bp, Artificial
  probe
  misc_feature (1)..(25): SEQ ID NO: 5020; WAN0249DK_at; Start 9; Stop 33
tagcaagaaattgatataatggtta

SEQ ID NO: 18564 - DNA, 25 bp, Artificial
  probe
  misc_feature (1)..(25): SEQ ID NO: 5020; WAN0249DK_at; Start 15; Stop 39
gaaattgatataatggttatatctg

SEQ ID NO: 18565 - DNA, 25 bp, Artificial
  probe
  misc_feature (1)..(25): SEQ ID NO: 4845; WAN0249DL_at; Start 12; Stop 36
gcagatataaccattatatcaattt

SEQ ID NO: 18566 - DNA, 25 bp, Artificial
  probe
  misc_feature (1)..(25): SEQ ID NO: 4845; WAN0249DL_at; Start 17; Stop 41
tataaccattatatcaatttcttgc

SEQ ID NO: 18567 - DNA, 25 bp, Artificial
  probe
  misc_feature (1)..(25): SEQ ID NO: 4845; WAN0249DL_at; Start 9; Stop 33
gtagcagatataaccattatatcaa

SEQ ID NO: 18568 - DNA, 25 bp, Artificial
  probe
  misc_feature (1)..(25): SEQ ID NO: 4845; WAN0249DL_at; Start 14; Stop 38
agatataaccattatatcaatttct

SEQ ID NO: 18569 - DNA, 25 bp, Artificial
  probe
  misc_feature (1)..(25): SEQ ID NO: 4845; WAN0249DL_at; Start 7; Stop 31
ctgtagcagatataaccattatatc

SEQ ID NO: 18570 - DNA, 25 bp, Artificial
  probe
  misc_feature (1)..(25): SEQ ID NO: 4845; WAN0249DL_at; Start 1; Stop 25
ttctatctgtagcagatataaccat

SEQ ID NO: 18571 - DNA, 25 bp, Artificial
  probe
  misc_feature (1)..(25): SEQ ID NO: 4845; WAN0249DL_at; Start 18; Stop 42
ataaccattatatcaatttcttgct

SEQ ID NO: 18572 - DNA, 25 bp, Artificial
  probe
  misc_feature (1)..(25): SEQ ID NO: 4845; WAN0249DL_at; Start 19; Stop 43
taaccattatatcaatttcttgcta

SEQ ID NO: 18573 - DNA, 25 bp, Artificial
  probe
  misc_feature (1)..(25): SEQ ID NO: 4845; WAN0249DL_at; Start 20; Stop 44
aaccattatatcaatttcttgctaa

SEQ ID NO: 18574 - DNA, 25 bp, Artificial
  probe
  misc_feature (1)..(25): SEQ ID NO: 4845; WAN0249DL_at; Start 26; Stop 50
tatatcaatttcttgctaattgtca

SEQ ID NO: 18575 - DNA, 25 bp, Artificial
  probe
  misc_feature (1)..(25): SEQ ID NO: 4845; WAN0249DL_at; Start 6; Stop 30
tctgtagcagatataaccattatat

SEQ ID NO: 18576 - DNA, 25 bp, Artificial
  probe
  misc_feature (1)..(25): SEQ ID NO: 4845; WAN0249DL_at; Start 21; Stop 45
accattatatcaatttcttgctaat

SEQ ID NO: 18577 - DNA, 25 bp, Artificial
  probe
  misc_feature (1)..(25): SEQ ID NO: 4845; WAN0249DL_at; Start 27; Stop 51
atatcaatttcttgctaattgtcaa

SEQ ID NO: 18578 - DNA, 25 bp, Artificial
  probe
  misc_feature (1)..(25): SEQ ID NO: 4845; WAN0249DL_at; Start 13; Stop 37
cagatataaccattatatcaatttc

SEQ ID NO: 18579 - DNA, 25 bp, Artificial
  probe
  misc_feature (1)..(25): SEQ ID NO: 4845; WAN0249DL_at; Start 16; Stop 40
atataaccattatatcaatttcttg

SEQ ID NO: 18580 - DNA, 25 bp, Artificial
  probe
  misc_feature (1)..(25): SEQ ID NO: 4845; WAN0249DL_at; Start 3; Stop 27
ctatctgtagcagatataaccatta

SEQ ID NO: 18581 - DNA, 25 bp, Artificial
  probe
  misc_feature (1)..(25): SEQ ID NO: 4845; WAN0249DL_at; Start 10; Stop 34
tagcagatataaccattatatcaat

SEQ ID NO: 18582 - DNA, 25 bp, Artificial
  probe
  misc_feature (1)..(25): SEQ ID NO: 4845; WAN0249DL_at; Start 4; Stop 28
tatctgtagcagatataaccattat

SEQ ID NO: 18583 - DNA, 25 bp, Artificial
  probe
  misc_feature (1)..(25): SEQ ID NO: 4845; WAN0249DL_at; Start 23; Stop 47
cattatatcaatttcttgctaattg

SEQ ID NO: 18584 - DNA, 25 bp, Artificial
  probe
  misc_feature (1)..(25): SEQ ID NO: 4845; WAN0249DL_at; Start 25; Stop 49
ttatatcaatttcttgctaattgtc

SEQ ID NO: 18585 - DNA, 25 bp, Artificial
  probe
  misc_feature (1)..(25): SEQ ID NO: 4845; WAN0249DL_at; Start 24; Stop 48
attatatcaatttcttgctaattgt

SEQ ID NO: 18586 - DNA, 25 bp, Artificial
  probe
  misc_feature (1)..(25): SEQ ID NO: 4845; WAN0249DL_at; Start 15; Stop 39
gatataaccattatatcaatttctt

SEQ ID NO: 18587 - DNA, 25 bp, Artificial
  probe
  misc_feature (1)..(25): SEQ ID NO: 4845; WAN0249DL_at; Start 5; Stop 29
atctgtagcagatataaccattata

SEQ ID NO: 18588 - DNA, 25 bp, Artificial
  probe
  misc_feature (1)..(25): SEQ ID NO: 4845; WAN0249DL_at; Start 2; Stop 26
tctatctgtagcagatataaccatt

SEQ ID NO: 18589 - DNA, 25 bp, Artificial
  probe
  misc_feature (1)..(25): SEQ ID NO: 4845; WAN0249DL_at; Start 11; Stop 35
agcagatataaccattatatcaatt

SEQ ID NO: 18590 - DNA, 25 bp, Artificial
  probe
  misc_feature (1)..(25): SEQ ID NO: 4845; WAN0249DL_at; Start 8; Stop 32
tgtagcagatataaccattatatca

SEQ ID NO: 18591 - DNA, 25 bp, Artificial
  probe
  misc_feature (1)..(25): SEQ ID NO: 4845; WAN0249DL_at; Start 22; Stop 46
ccattatatcaatttcttgctaatt

SEQ ID NO: 18592 - DNA, 25 bp, Artificial
  probe
  misc_feature (1)..(25): SEQ ID NO: 3140; WAN0249DM_at; Start 30; Stop 54
tttgtagcggatttttgcaagtgtg

SEQ ID NO: 18593 - DNA, 25 bp, Artificial
  probe
  misc_feature (1)..(25): SEQ ID NO: 3140; WAN0249DM_at; Start 31; Stop 55
ttgtagcggatttttgcaagtgtga

SEQ ID NO: 18594 - DNA, 25 bp, Artificial
  probe
  misc_feature (1)..(25): SEQ ID NO: 3140; WAN0249DM_at; Start 38; Stop 62
ggatttttgcaagtgtgaaaaacgc

SEQ ID NO: 18595 - DNA, 25 bp, Artificial
  probe
  misc_feature (1)..(25): SEQ ID NO: 3140; WAN0249DM_at; Start 32; Stop 56
tgtagcggatttttgcaagtgtgaa

SEQ ID NO: 18596 - DNA, 25 bp, Artificial
  probe
  misc_feature (1)..(25): SEQ ID NO: 3140; WAN0249DM_at; Start 28; Stop 52
catttgtagcggatttttgcaagtg

SEQ ID NO: 18597 - DNA, 25 bp, Artificial
  probe
  misc_feature (1)..(25): SEQ ID NO: 3140; WAN0249DM_at; Start 23; Stop 47
tataacatttgtagcggatttttgc

SEQ ID NO: 18598 - DNA, 25 bp, Artificial
  probe
  misc_feature (1)..(25): SEQ ID NO: 3140; WAN0249DM_at; Start 29; Stop 53
atttgtagcggatttttgcaagtgt

SEQ ID NO: 18599 - DNA, 25 bp, Artificial
  probe
  misc_feature (1)..(25): SEQ ID NO: 3140; WAN0249DM_at; Start 22; Stop 46
gtataacatttgtagcggatttttg

SEQ ID NO: 18600 - DNA, 25 bp, Artificial
  probe
  misc_feature (1)..(25): SEQ ID NO: 3140; WAN0249DM_at; Start 37; Stop 61
cggatttttgcaagtgtgaaaaacg

SEQ ID NO: 18601 - DNA, 25 bp, Artificial
  probe
  misc_feature (1)..(25): SEQ ID NO: 3140; WAN0249DM_at; Start 19; Stop 43
tcagtataacatttgtagcggattt

SEQ ID NO: 18602 - DNA, 25 bp, Artificial
  probe
  misc_feature (1)..(25): SEQ ID NO: 3140; WAN0249DM_at; Start 36; Stop 60
gcggatttttgcaagtgtgaaaaac

SEQ ID NO: 18603 - DNA, 25 bp, Artificial
  probe
  misc_feature (1)..(25): SEQ ID NO: 3140; WAN0249DM_at; Start 35; Stop 59
agcggatttttgcaagtgtgaaaaa

SEQ ID NO: 18604 - DNA, 25 bp, Artificial
  probe
  misc_feature (1)..(25): SEQ ID NO: 3140; WAN0249DM_at; Start 34; Stop 58
tagcggatttttgcaagtgtgaaaa

SEQ ID NO: 18605 - DNA, 25 bp, Artificial
  probe
  misc_feature (1)..(25): SEQ ID NO: 3140; WAN0249DM_at; Start 27; Stop 51
acatttgtagcggatttttgcaagt

SEQ ID NO: 18606 - DNA, 25 bp, Artificial
  probe
  misc_feature (1)..(25): SEQ ID NO: 3140; WAN0249DM_at; Start 21; Stop 45
agtataacatttgtagcggattttt

SEQ ID NO: 18607 - DNA, 25 bp, Artificial
  probe
  misc_feature (1)..(25): SEQ ID NO: 3140; WAN0249DM_at; Start 26; Stop 50
aacatttgtagcggatttttgcaag

SEQ ID NO: 18608 - DNA, 25 bp, Artificial
  probe
  misc_feature (1)..(25): SEQ ID NO: 3140; WAN0249DM_at; Start 39; Stop 63
gatttttgcaagtgtgaaaaacgct

SEQ ID NO: 18609 - DNA, 25 bp, Artificial
  probe
  misc_feature (1)..(25): SEQ ID NO: 3140; WAN0249DM_at; Start 33; Stop 57
gtagcggatttttgcaagtgtgaaa

SEQ ID NO: 18610 - DNA, 25 bp, Artificial
  probe
  misc_feature (1)..(25): SEQ ID NO: 3140; WAN0249DM_at; Start 20; Stop 44
cagtataacatttgtagcggatttt

SEQ ID NO: 18611 - DNA, 25 bp, Artificial
  probe
  misc_feature (1)..(25): SEQ ID NO: 3140; WAN0249DM_at; Start 25; Stop 49
taacatttgtagcggatttttgcaa

SEQ ID NO: 18612 - DNA, 25 bp, Artificial
  probe
  misc_feature (1)..(25): SEQ ID NO: 3140; WAN0249DM_at; Start 24; Stop 48
ataacatttgtagcggatttttgca

SEQ ID NO: 18613 - DNA, 25 bp, Artificial
  probe
  misc_feature (1)..(25): SEQ ID NO: 452; WAN0249DN_at; Start 16; Stop 40
tgcaaaaatccgctacaaatgttat

SEQ ID NO: 18614 - DNA, 25 bp, Artificial
  probe
  misc_feature (1)..(25): SEQ ID NO: 452; WAN0249DN_at; Start 18; Stop 42
caaaaatccgctacaaatgttatac

SEQ ID NO: 18615 - DNA, 25 bp, Artificial
  probe
  misc_feature (1)..(25): SEQ ID NO: 452; WAN0249DN_at; Start 20; Stop 44
aaaatccgctacaaatgttatactg

SEQ ID NO: 18616 - DNA, 25 bp, Artificial
  probe
  misc_feature (1)..(25): SEQ ID NO: 452; WAN0249DN_at; Start 12; Stop 36
cacttgcaaaaatccgctacaaatg

SEQ ID NO: 18617 - DNA, 25 bp, Artificial
  probe
  misc_feature (1)..(25): SEQ ID NO: 452; WAN0249DN_at; Start 1; Stop 25
agcgtttttcacacttgcaaaaatc

SEQ ID NO: 18618 - DNA, 25 bp, Artificial
  probe
  misc_feature (1)..(25): SEQ ID NO: 452; WAN0249DN_at; Start 7; Stop 31
tttcacacttgcaaaaatccgctac

SEQ ID NO: 18619 - DNA, 25 bp, Artificial
  probe
  misc_feature (1)..(25): SEQ ID NO: 452; WAN0249DN_at; Start 4; Stop 28
gtttttcacacttgcaaaaatccgc

SEQ ID NO: 18620 - DNA, 25 bp, Artificial
  probe
  misc_feature (1)..(25): SEQ ID NO: 452; WAN0249DN_at; Start 6; Stop 30
ttttcacacttgcaaaaatccgcta

SEQ ID NO: 18621 - DNA, 25 bp, Artificial
  probe
  misc_feature (1)..(25): SEQ ID NO: 452; WAN0249DN_at; Start 11; Stop 35
acacttgcaaaaatccgctacaaat

SEQ ID NO: 18622 - DNA, 25 bp, Artificial
  probe
  misc_feature (1)..(25): SEQ ID NO: 452; WAN0249DN_at; Start 5; Stop 29
tttttcacacttgcaaaaatccgct

SEQ ID NO: 18623 - DNA, 25 bp, Artificial
  probe
  misc_feature (1)..(25): SEQ ID NO: 452; WAN0249DN_at; Start 14; Stop 38
cttgcaaaaatccgctacaaatgtt

SEQ ID NO: 18624 - DNA, 25 bp, Artificial
  probe
  misc_feature (1)..(25): SEQ ID NO: 452; WAN0249DN_at; Start 19; Stop 43
aaaaatccgctacaaatgttatact

SEQ ID NO: 18625 - DNA, 25 bp, Artificial
  probe
  misc_feature (1)..(25): SEQ ID NO: 452; WAN0249DN_at; Start 17; Stop 41
gcaaaaatccgctacaaatgttata

SEQ ID NO: 18626 - DNA, 25 bp, Artificial
  probe
  misc_feature (1)..(25): SEQ ID NO: 452; WAN0249DN_at; Start 13; Stop 37
acttgcaaaaatccgctacaaatgt

SEQ ID NO: 18627 - DNA, 25 bp, Artificial
  probe
  misc_feature (1)..(25): SEQ ID NO: 452; WAN0249DN_at; Start 8; Stop 32
ttcacacttgcaaaaatccgctaca

SEQ ID NO: 18628 - DNA, 25 bp, Artificial
  probe
  misc_feature (1)..(25): SEQ ID NO: 452; WAN0249DN_at; Start 2; Stop 26
gcgtttttcacacttgcaaaaatcc

SEQ ID NO: 18629 - DNA, 25 bp, Artificial
  probe
  misc_feature (1)..(25): SEQ ID NO: 452; WAN0249DN_at; Start 10; Stop 34
cacacttgcaaaaatccgctacaaa

SEQ ID NO: 18630 - DNA, 25 bp, Artificial
  probe
  misc_feature (1)..(25): SEQ ID NO: 452; WAN0249DN_at; Start 9; Stop 33
tcacacttgcaaaaatccgctacaa

SEQ ID NO: 18631 - DNA, 25 bp, Artificial
  probe
  misc_feature (1)..(25): SEQ ID NO: 452; WAN0249DN_at; Start 21; Stop 45
aaatccgctacaaatgttatactga

SEQ ID NO: 18632 - DNA, 25 bp, Artificial
  probe
  misc_feature (1)..(25): SEQ ID NO: 452; WAN0249DN_at; Start 15; Stop 39
ttgcaaaaatccgctacaaatgtta

SEQ ID NO: 18633 - DNA, 25 bp, Artificial
  probe
  misc_feature (1)..(25): SEQ ID NO: 452; WAN0249DN_at; Start 3; Stop 27
cgtttttcacacttgcaaaaatccg

SEQ ID NO: 18634 - DNA, 25 bp, Artificial
  probe
  misc_feature (1)..(25): SEQ ID NO: 3167; WAN0249DO_at; Start 83; Stop 107
tattatatcaaaattttagacaata

SEQ ID NO: 18635 - DNA, 25 bp, Artificial
  probe
  misc_feature (1)..(25): SEQ ID NO: 3167; WAN0249DO_at; Start 17; Stop 41
caaattagactatatgtctaaaaat

SEQ ID NO: 18636 - DNA, 25 bp, Artificial
  probe
  misc_feature (1)..(25): SEQ ID NO: 3167; WAN0249DO_at; Start 90; Stop 114
tcaaaattttagacaatatgtttaa

SEQ ID NO: 18637 - DNA, 25 bp, Artificial
  probe
  misc_feature (1)..(25): SEQ ID NO: 3167; WAN0249DO_at; Start 13; Stop 37
taaacaaattagactatatgtctaa

SEQ ID NO: 18638 - DNA, 25 bp, Artificial
  probe
  misc_feature (1)..(25): SEQ ID NO: 3167; WAN0249DO_at; Start 81; Stop 105
tctattatatcaaaattttagacaa

SEQ ID NO: 18639 - DNA, 25 bp, Artificial
  probe
  misc_feature (1)..(25): SEQ ID NO: 3167; WAN0249DO_at; Start 99; Stop 123
tagacaatatgtttaaaaaaggaga

SEQ ID NO: 18640 - DNA, 25 bp, Artificial
  probe
  misc_feature (1)..(25): SEQ ID NO: 3167; WAN0249DO_at; Start 25; Stop 49
actatatgtctaaaaatagattttt

SEQ ID NO: 18641 - DNA, 25 bp, Artificial
  probe
  misc_feature (1)..(25): SEQ ID NO: 3167; WAN0249DO_at; Start 80; Stop 104
atctattatatcaaaattttagaca

SEQ ID NO: 18642 - DNA, 25 bp, Artificial
  probe
  misc_feature (1)..(25): SEQ ID NO: 3167; WAN0249DO_at; Start 15; Stop 39
aacaaattagactatatgtctaaaa

SEQ ID NO: 18643 - DNA, 25 bp, Artificial
  probe
  misc_feature (1)..(25): SEQ ID NO: 3167; WAN0249DO_at; Start 85; Stop 109
ttatatcaaaattttagacaatatg

SEQ ID NO: 18644 - DNA, 25 bp, Artificial
  probe
  misc_feature (1)..(25): SEQ ID NO: 3167; WAN0249DO_at; Start 19; Stop 43
aattagactatatgtctaaaaatag

SEQ ID NO: 18645 - DNA, 25 bp, Artificial
  probe
  misc_feature (1)..(25): SEQ ID NO: 3167; WAN0249DO_at; Start 20; Stop 44
attagactatatgtctaaaaataga

SEQ ID NO: 18646 - DNA, 25 bp, Artificial
  probe
  misc_feature (1)..(25): SEQ ID NO: 3167; WAN0249DO_at; Start 16; Stop 40
acaaattagactatatgtctaaaaa

SEQ ID NO: 18647 - DNA, 25 bp, Artificial
  probe
  misc_feature (1)..(25): SEQ ID NO: 3167; WAN0249DO_at; Start 12; Stop 36
gtaaacaaattagactatatgtcta

SEQ ID NO: 18648 - DNA, 25 bp, Artificial
  probe
  misc_feature (1)..(25): SEQ ID NO: 3167; WAN0249DO_at; Start 88; Stop 112
tatcaaaattttagacaatatgttt

SEQ ID NO: 18649 - DNA, 25 bp, Artificial
  probe
  misc_feature (1)..(25): SEQ ID NO: 3167; WAN0249DO_at; Start 6; Stop 30
ctccttgtaaacaaattagactata

SEQ ID NO: 18650 - DNA, 25 bp, Artificial
  probe
  misc_feature (1)..(25): SEQ ID NO: 3167; WAN0249DO_at; Start 87; Stop 111
atatcaaaattttagacaatatgtt

SEQ ID NO: 18651 - DNA, 25 bp, Artificial
  probe
  misc_feature (1)..(25): SEQ ID NO: 3167; WAN0249DO_at; Start 9; Stop 33
cttgtaaacaaattagactatatgt

SEQ ID NO: 18652 - DNA, 25 bp, Artificial
  probe
  misc_feature (1)..(25): SEQ ID NO: 3167; WAN0249DO_at; Start 14; Stop 38
aaacaaattagactatatgtctaaa

SEQ ID NO: 18653 - DNA, 25 bp, Artificial
  probe
  misc_feature (1)..(25): SEQ ID NO: 3167; WAN0249DO_at; Start 4; Stop 28
tcctccttgtaaacaaattagacta

SEQ ID NO: 18654 - DNA, 25 bp, Artificial
  probe
  misc_feature (1)..(25): SEQ ID NO: 3167; WAN0249DO_at; Start 79; Stop 103
aatctattatatcaaaattttagac

SEQ ID NO: 18655 - DNA, 25 bp, Artificial
  probe
  misc_feature (1)..(25): SEQ ID NO: 3167; WAN0249DO_at; Start 89; Stop 113
atcaaaattttagacaatatgttta

SEQ ID NO: 18656 - DNA, 25 bp, Artificial
  probe
  misc_feature (1)..(25): SEQ ID NO: 3167; WAN0249DO_at; Start 82; Stop 106
ctattatatcaaaattttagacaat

SEQ ID NO: 18657 - DNA, 25 bp, Artificial
  probe
  misc_feature (1)..(25): SEQ ID NO: 3167; WAN0249DO_at; Start 21; Stop 45
ttagactatatgtctaaaaatagat

SEQ ID NO: 18658 - DNA, 25 bp, Artificial
  probe
  misc_feature (1)..(25): SEQ ID NO: 3167; WAN0249DO_at; Start 24; Stop 48
gactatatgtctaaaaatagatttt

SEQ ID NO: 18659 - DNA, 25 bp, Artificial
  probe
  misc_feature (1)..(25): SEQ ID NO: 3167; WAN0249DO_at; Start 5; Stop 29
cctccttgtaaacaaattagactat

SEQ ID NO: 18660 - DNA, 25 bp, Artificial
  probe
  misc_feature (1)..(25): SEQ ID NO: 3167; WAN0249DO_at; Start 8; Stop 32
ccttgtaaacaaattagactatatg

SEQ ID NO: 18661 - DNA, 25 bp, Artificial
  probe
  misc_feature (1)..(25): SEQ ID NO: 3167; WAN0249DO_at; Start 10; Stop 34
ttgtaaacaaattagactatatgtc

SEQ ID NO: 18662 - DNA, 25 bp, Artificial
  probe
  misc_feature (1)..(25): SEQ ID NO: 3167; WAN0249DO_at; Start 26; Stop 50
ctatatgtctaaaaatagatttttt

SEQ ID NO: 18663 - DNA, 25 bp, Artificial
  probe
  misc_feature (1)..(25): SEQ ID NO: 3167; WAN0249DO_at; Start 11; Stop 35
tgtaaacaaattagactatatgtct

SEQ ID NO: 18664 - DNA, 25 bp, Artificial
  probe
  misc_feature (1)..(25): SEQ ID NO: 3167; WAN0249DO_at; Start 23; Stop 47
agactatatgtctaaaaatagattt

SEQ ID NO: 18665 - DNA, 25 bp, Artificial
  probe
  misc_feature (1)..(25): SEQ ID NO: 3167; WAN0249DO_at; Start 86; Stop 110
tatatcaaaattttagacaatatgt

SEQ ID NO: 18666 - DNA, 25 bp, Artificial
  probe
  misc_feature (1)..(25): SEQ ID NO: 3167; WAN0249DO_at; Start 7; Stop 31
tccttgtaaacaaattagactatat

SEQ ID NO: 18667 - DNA, 25 bp, Artificial
  probe
  misc_feature (1)..(25): SEQ ID NO: 3167; WAN0249DO_at; Start 22; Stop 46
tagactatatgtctaaaaatagatt

SEQ ID NO: 18668 - DNA, 25 bp, Artificial
  probe
  misc_feature (1)..(25): SEQ ID NO: 3572; WAN0249DP_at; Start 135; Stop 159
tctatttttagacatatagtctaat

SEQ ID NO: 18669 - DNA, 25 bp, Artificial
  probe
  misc_feature (1)..(25): SEQ ID NO: 3572; WAN0249DP_at; Start 148; Stop 172
atatagtctaatttgtttacaagga

SEQ ID NO: 18670 - DNA, 25 bp, Artificial
  probe
  misc_feature (1)..(25): SEQ ID NO: 3572; WAN0249DP_at; Start 139; Stop 163
tttttagacatatagtctaatttgt

SEQ ID NO: 18671 - DNA, 25 bp, Artificial
  probe
  misc_feature (1)..(25): SEQ ID NO: 3572; WAN0249DP_at; Start 151; Stop 175
tagtctaatttgtttacaaggagga

SEQ ID NO: 18672 - DNA, 25 bp, Artificial
  probe
  misc_feature (1)..(25): SEQ ID NO: 3572; WAN0249DP_at; Start 56; Stop 80
tctccttttttaaacatattgtcta

SEQ ID NO: 18673 - DNA, 25 bp, Artificial
  probe
  misc_feature (1)..(25): SEQ ID NO: 3572; WAN0249DP_at; Start 114; Stop 138
tctaaattacaagataaaaaatcta

SEQ ID NO: 18674 - DNA, 25 bp, Artificial
  probe
  misc_feature (1)..(25): SEQ ID NO: 3572; WAN0249DP_at; Start 147; Stop 171
catatagtctaatttgtttacaagg

SEQ ID NO: 18675 - DNA, 25 bp, Artificial
  probe
  misc_feature (1)..(25): SEQ ID NO: 3572; WAN0249DP_at; Start 67; Stop 91
aaacatattgtctaaaattttgata

SEQ ID NO: 18676 - DNA, 25 bp, Artificial
  probe
  misc_feature (1)..(25): SEQ ID NO: 3572; WAN0249DP_at; Start 100; Stop 124
tatacattaaaaaatctaaattaca

SEQ ID NO: 18677 - DNA, 25 bp, Artificial
  probe
  misc_feature (1)..(25): SEQ ID NO: 3572; WAN0249DP_at; Start 143; Stop 167
tagacatatagtctaatttgtttac

SEQ ID NO: 18678 - DNA, 25 bp, Artificial
  probe
  misc_feature (1)..(25): SEQ ID NO: 3572; WAN0249DP_at; Start 75; Stop 99
tgtctaaaattttgatataatagat

SEQ ID NO: 18679 - DNA, 25 bp, Artificial
  probe
  misc_feature (1)..(25): SEQ ID NO: 3572; WAN0249DP_at; Start 132; Stop 156
aaatctatttttagacatatagtct

SEQ ID NO: 18680 - DNA, 25 bp, Artificial
  probe
  misc_feature (1)..(25): SEQ ID NO: 3572; WAN0249DP_at; Start 144; Stop 168
agacatatagtctaatttgtttaca

SEQ ID NO: 18681 - DNA, 25 bp, Artificial
  probe
  misc_feature (1)..(25): SEQ ID NO: 3572; WAN0249DP_at; Start 70; Stop 94
catattgtctaaaattttgatataa

SEQ ID NO: 18682 - DNA, 25 bp, Artificial
  probe
  misc_feature (1)..(25): SEQ ID NO: 3572; WAN0249DP_at; Start 134; Stop 158
atctatttttagacatatagtctaa

SEQ ID NO: 18683 - DNA, 25 bp, Artificial
  probe
  misc_feature (1)..(25): SEQ ID NO: 3572; WAN0249DP_at; Start 66; Stop 90
taaacatattgtctaaaattttgat

SEQ ID NO: 18684 - DNA, 25 bp, Artificial
  probe
  misc_feature (1)..(25): SEQ ID NO: 3572; WAN0249DP_at; Start 149; Stop 173
tatagtctaatttgtttacaaggag

SEQ ID NO: 18685 - DNA, 25 bp, Artificial
  probe
  misc_feature (1)..(25): SEQ ID NO: 3572; WAN0249DP_at; Start 65; Stop 89
ttaaacatattgtctaaaattttga

SEQ ID NO: 18686 - DNA, 25 bp, Artificial
  probe
  misc_feature (1)..(25): SEQ ID NO: 3572; WAN0249DP_at; Start 145; Stop 169
gacatatagtctaatttgtttacaa

SEQ ID NO: 18687 - DNA, 25 bp, Artificial
  probe
  misc_feature (1)..(25): SEQ ID NO: 3572; WAN0249DP_at; Start 104; Stop 128
cattaaaaaatctaaattacaagat

SEQ ID NO: 18688 - DNA, 25 bp, Artificial
  probe
  misc_feature (1)..(25): SEQ ID NO: 3572; WAN0249DP_at; Start 150; Stop 174
atagtctaatttgtttacaaggagg

SEQ ID NO: 18689 - DNA, 25 bp, Artificial
  probe
  misc_feature (1)..(25): SEQ ID NO: 3572; WAN0249DP_at; Start 74; Stop 98
ttgtctaaaattttgatataataga

SEQ ID NO: 18690 - DNA, 25 bp, Artificial
  probe
  misc_feature (1)..(25): SEQ ID NO: 3572; WAN0249DP_at; Start 92; Stop 116
taatagattatacattaaaaaatct

SEQ ID NO: 18691 - DNA, 25 bp, Artificial
  probe
  misc_feature (1)..(25): SEQ ID NO: 3572; WAN0249DP_at; Start 113; Stop 137
atctaaattacaagataaaaaatct

SEQ ID NO: 18692 - DNA, 25 bp, Artificial
  probe
  misc_feature (1)..(25): SEQ ID NO: 3572; WAN0249DP_at; Start 136; Stop 160
ctatttttagacatatagtctaatt

SEQ ID NO: 18693 - DNA, 25 bp, Artificial
  probe
  misc_feature (1)..(25): SEQ ID NO: 3572; WAN0249DP_at; Start 131; Stop 155
aaaatctatttttagacatatagtc

SEQ ID NO: 18694 - DNA, 25 bp, Artificial
  probe
  misc_feature (1)..(25): SEQ ID NO: 3572; WAN0249DP_at; Start 133; Stop 157
aatctatttttagacatatagtcta

SEQ ID NO: 18695 - DNA, 25 bp, Artificial
  probe
  misc_feature (1)..(25): SEQ ID NO: 3572; WAN0249DP_at; Start 29; Stop 53
attgctttccattctttaaacttag

SEQ ID NO: 18696 - DNA, 25 bp, Artificial
  probe
  misc_feature (1)..(25): SEQ ID NO: 3572; WAN0249DP_at; Start 69; Stop 93
acatattgtctaaaattttgatata

SEQ ID NO: 18697 - DNA, 25 bp, Artificial
  probe
  misc_feature (1)..(25): SEQ ID NO: 3572; WAN0249DP_at; Start 146; Stop 170
acatatagtctaatttgtttacaag

SEQ ID NO: 18698 - DNA, 25 bp, Artificial
  probe
  misc_feature (1)..(25): SEQ ID NO: 3572; WAN0249DP_at; Start 130; Stop 154
aaaaatctatttttagacatatagt

SEQ ID NO: 18699 - DNA, 25 bp, Artificial
  probe
  misc_feature (1)..(25): SEQ ID NO: 3572; WAN0249DP_at; Start 68; Stop 92
aacatattgtctaaaattttgatat

SEQ ID NO: 18700 - DNA, 25 bp, Artificial
  probe
  misc_feature (1)..(25): SEQ ID NO: 3572; WAN0249DP_at; Start 115; Stop 139
ctaaattacaagataaaaaatctat

SEQ ID NO: 18701 - DNA, 25 bp, Artificial
  probe
  misc_feature (1)..(25): SEQ ID NO: 4339; WAN0249DQ_at; Start 12; Stop 36
gaatgatagaaaactcagttggtta

SEQ ID NO: 18702 - DNA, 25 bp, Artificial
  probe
  misc_feature (1)..(25): SEQ ID NO: 4339; WAN0249DQ_at; Start 4; Stop 28
acctcgtagaatgatagaaaactca

SEQ ID NO: 18703 - DNA, 25 bp, Artificial
  probe
  misc_feature (1)..(25): SEQ ID NO: 4339; WAN0249DQ_at; Start 2; Stop 26
ttacctcgtagaatgatagaaaact

SEQ ID NO: 18704 - DNA, 25 bp, Artificial
  probe
  misc_feature (1)..(25): SEQ ID NO: 4339; WAN0249DQ_at; Start 23; Stop 47
aactcagttggttaacccaactgag

SEQ ID NO: 18705 - DNA, 25 bp, Artificial
  probe
  misc_feature (1)..(25): SEQ ID NO: 4339; WAN0249DQ_at; Start 13; Stop 37
aatgatagaaaactcagttggttaa

SEQ ID NO: 18706 - DNA, 25 bp, Artificial
  probe
  misc_feature (1)..(25): SEQ ID NO: 4339; WAN0249DQ_at; Start 1; Stop 25
gttacctcgtagaatgatagaaaac

SEQ ID NO: 18707 - DNA, 25 bp, Artificial
  probe
  misc_feature (1)..(25): SEQ ID NO: 4339; WAN0249DQ_at; Start 6; Stop 30
ctcgtagaatgatagaaaactcagt

SEQ ID NO: 18708 - DNA, 25 bp, Artificial
  probe
  misc_feature (1)..(25): SEQ ID NO: 4339; WAN0249DQ_at; Start 24; Stop 48
actcagttggttaacccaactgagt

SEQ ID NO: 18709 - DNA, 25 bp, Artificial
  probe
  misc_feature (1)..(25): SEQ ID NO: 4339; WAN0249DQ_at; Start 7; Stop 31
tcgtagaatgatagaaaactcagtt

SEQ ID NO: 18710 - DNA, 25 bp, Artificial
  probe
  misc_feature (1)..(25): SEQ ID NO: 4339; WAN0249DQ_at; Start 3; Stop 27
tacctcgtagaatgatagaaaactc

SEQ ID NO: 18711 - DNA, 25 bp, Artificial
  probe
  misc_feature (1)..(25): SEQ ID NO: 4339; WAN0249DQ_at; Start 9; Stop 33
gtagaatgatagaaaactcagttgg

SEQ ID NO: 18712 - DNA, 25 bp, Artificial
  probe
  misc_feature (1)..(25): SEQ ID NO: 4339; WAN0249DQ_at; Start 8; Stop 32
cgtagaatgatagaaaactcagttg

SEQ ID NO: 18713 - DNA, 25 bp, Artificial
  probe
  misc_feature (1)..(25): SEQ ID NO: 4339; WAN0249DQ_at; Start 10; Stop 34
tagaatgatagaaaactcagttggt

SEQ ID NO: 18714 - DNA, 25 bp, Artificial
  probe
  misc_feature (1)..(25): SEQ ID NO: 4339; WAN0249DQ_at; Start 11; Stop 35
agaatgatagaaaactcagttggtt

SEQ ID NO: 18715 - DNA, 25 bp, Artificial
  probe
  misc_feature (1)..(25): SEQ ID NO: 4339; WAN0249DQ_at; Start 14; Stop 38
atgatagaaaactcagttggttaac

SEQ ID NO: 18716 - DNA, 25 bp, Artificial
  probe
  misc_feature (1)..(25): SEQ ID NO: 4339; WAN0249DQ_at; Start 25; Stop 49
ctcagttggttaacccaactgagtt

SEQ ID NO: 18717 - DNA, 25 bp, Artificial
  probe
  misc_feature (1)..(25): SEQ ID NO: 4339; WAN0249DQ_at; Start 5; Stop 29
cctcgtagaatgatagaaaactcag

SEQ ID NO: 18718 - DNA, 25 bp, Artificial
  probe
  misc_feature (1)..(25): SEQ ID NO: 522; WAN0249DR_at; Start 36; Stop 60
agttttctatcattctacgaggtaa

SEQ ID NO: 18719 - DNA, 25 bp, Artificial
  probe
  misc_feature (1)..(25): SEQ ID NO: 522; WAN0249DR_at; Start 13; Stop 37
aactcagttgggttaaccaactgag

SEQ ID NO: 18720 - DNA, 25 bp, Artificial
  probe
  misc_feature (1)..(25): SEQ ID NO: 522; WAN0249DR_at; Start 23; Stop 47
ggttaaccaactgagttttctatca

SEQ ID NO: 18721 - DNA, 25 bp, Artificial
  probe
  misc_feature (1)..(25): SEQ ID NO: 522; WAN0249DR_at; Start 37; Stop 61
gttttctatcattctacgaggtaac

SEQ ID NO: 18722 - DNA, 25 bp, Artificial
  probe
  misc_feature (1)..(25): SEQ ID NO: 522; WAN0249DR_at; Start 30; Stop 54
caactgagttttctatcattctacg

SEQ ID NO: 18723 - DNA, 25 bp, Artificial
  probe
  misc_feature (1)..(25): SEQ ID NO: 522; WAN0249DR_at; Start 26; Stop 50
taaccaactgagttttctatcattc

SEQ ID NO: 18724 - DNA, 25 bp, Artificial
  probe
  misc_feature (1)..(25): SEQ ID NO: 522; WAN0249DR_at; Start 33; Stop 57
ctgagttttctatcattctacgagg

SEQ ID NO: 18725 - DNA, 25 bp, Artificial
  probe
  misc_feature (1)..(25): SEQ ID NO: 522; WAN0249DR_at; Start 25; Stop 49
ttaaccaactgagttttctatcatt

SEQ ID NO: 18726 - DNA, 25 bp, Artificial
  probe
  misc_feature (1)..(25): SEQ ID NO: 522; WAN0249DR_at; Start 35; Stop 59
gagttttctatcattctacgaggta

SEQ ID NO: 18727 - DNA, 25 bp, Artificial
  probe
  misc_feature (1)..(25): SEQ ID NO: 522; WAN0249DR_at; Start 34; Stop 58
tgagttttctatcattctacgaggt

SEQ ID NO: 18728 - DNA, 25 bp, Artificial
  probe
  misc_feature (1)..(25): SEQ ID NO: 522; WAN0249DR_at; Start 14; Stop 38
actcagttgggttaaccaactgagt

SEQ ID NO: 18729 - DNA, 25 bp, Artificial
  probe
  misc_feature (1)..(25): SEQ ID NO: 522; WAN0249DR_at; Start 29; Stop 53
ccaactgagttttctatcattctac

SEQ ID NO: 18730 - DNA, 25 bp, Artificial
  probe
  misc_feature (1)..(25): SEQ ID NO: 522; WAN0249DR_at; Start 24; Stop 48
gttaaccaactgagttttctatcat

SEQ ID NO: 18731 - DNA, 25 bp, Artificial
  probe
  misc_feature (1)..(25): SEQ ID NO: 522; WAN0249DR_at; Start 28; Stop 52
accaactgagttttctatcattcta

SEQ ID NO: 18732 - DNA, 25 bp, Artificial
  probe
  misc_feature (1)..(25): SEQ ID NO: 522; WAN0249DR_at; Start 31; Stop 55
aactgagttttctatcattctacga

SEQ ID NO: 18733 - DNA, 25 bp, Artificial
  probe
  misc_feature (1)..(25): SEQ ID NO: 522; WAN0249DR_at; Start 27; Stop 51
aaccaactgagttttctatcattct

SEQ ID NO: 18734 - DNA, 25 bp, Artificial
  probe
  misc_feature (1)..(25): SEQ ID NO: 522; WAN0249DR_at; Start 32; Stop 56
actgagttttctatcattctacgag

SEQ ID NO: 18735 - DNA, 25 bp, Artificial
  probe
  misc_feature (1)..(25): SEQ ID NO: 522; WAN0249DR_at; Start 15; Stop 39
ctcagttgggttaaccaactgagtt

SEQ ID NO: 18736 - DNA, 25 bp, Artificial
  probe
  misc_feature (1)..(25): SEQ ID NO: 4743; WAN0249DS_at; Start 179; Stop 203
gaaaggactatatcgaaggagaaca

SEQ ID NO: 18737 - DNA, 25 bp, Artificial
  probe
  misc_feature (1)..(25): SEQ ID NO: 4743; WAN0249DS_at; Start 36; Stop 60
ctagaaaatacagaaatattcaaat

SEQ ID NO: 18738 - DNA, 25 bp, Artificial
  probe
  misc_feature (1)..(25): SEQ ID NO: 4743; WAN0249DS_at; Start 175; Stop 199
aattgaaaggactatatcgaaggag

SEQ ID NO: 18739 - DNA, 25 bp, Artificial
  probe
  misc_feature (1)..(25): SEQ ID NO: 4743; WAN0249DS_at; Start 165; Stop 189
aaaatgctataattgaaaggactat

SEQ ID NO: 18740 - DNA, 25 bp, Artificial
  probe
  misc_feature (1)..(25): SEQ ID NO: 4743; WAN0249DS_at; Start 181; Stop 205
aaggactatatcgaaggagaacaaa

SEQ ID NO: 18741 - DNA, 25 bp, Artificial
  probe
  misc_feature (1)..(25): SEQ ID NO: 4743; WAN0249DS_at; Start 180; Stop 204
aaaggactatatcgaaggagaacaa

SEQ ID NO: 18742 - DNA, 25 bp, Artificial
  probe
  misc_feature (1)..(25): SEQ ID NO: 4743; WAN0249DS_at; Start 109; Stop 133
aaatctgtaaaaagcaaggctgatt

SEQ ID NO: 18743 - DNA, 25 bp, Artificial
  probe
  misc_feature (1)..(25): SEQ ID NO: 4743; WAN0249DS_at; Start 174; Stop 198
taattgaaaggactatatcgaagga

SEQ ID NO: 18744 - DNA, 25 bp, Artificial
  probe
  misc_feature (1)..(25): SEQ ID NO: 4743; WAN0249DS_at; Start 25; Stop 49
tatttattctactagaaaatacaga

SEQ ID NO: 18745 - DNA, 25 bp, Artificial
  probe
  misc_feature (1)..(25): SEQ ID NO: 4743; WAN0249DS_at; Start 172; Stop 196
tataattgaaaggactatatcgaag

SEQ ID NO: 18746 - DNA, 25 bp, Artificial
  probe
  misc_feature (1)..(25): SEQ ID NO: 4743; WAN0249DS_at; Start 139; Stop 163
tgataaattacggttatttcattaa

SEQ ID NO: 18747 - DNA, 25 bp, Artificial
  probe
  misc_feature (1)..(25): SEQ ID NO: 4743; WAN0249DS_at; Start 32; Stop 56
tctactagaaaatacagaaatattc

SEQ ID NO: 18748 - DNA, 25 bp, Artificial
  probe
  misc_feature (1)..(25): SEQ ID NO: 4743; WAN0249DS_at; Start 86; Stop 110
tatatttacagtatcctttacacaa

SEQ ID NO: 18749 - DNA, 25 bp, Artificial
  probe
  misc_feature (1)..(25): SEQ ID NO: 4743; WAN0249DS_at; Start 127; Stop 151
gctgatttattttgataaattacgg

SEQ ID NO: 18750 - DNA, 25 bp, Artificial
  probe
  misc_feature (1)..(25): SEQ ID NO: 4743; WAN0249DS_at; Start 113; Stop 137
ctgtaaaaagcaaggctgatttatt

SEQ ID NO: 18751 - DNA, 25 bp, Artificial
  probe
  misc_feature (1)..(25): SEQ ID NO: 4743; WAN0249DS_at; Start 110; Stop 134
aatctgtaaaaagcaaggctgattt

SEQ ID NO: 18752 - DNA, 25 bp, Artificial
  probe
  misc_feature (1)..(25): SEQ ID NO: 4743; WAN0249DS_at; Start 105; Stop 129
acacaaatctgtaaaaagcaaggct

SEQ ID NO: 18753 - DNA, 25 bp, Artificial
  probe
  misc_feature (1)..(25): SEQ ID NO: 4743; WAN0249DS_at; Start 112; Stop 136
tctgtaaaaagcaaggctgatttat

SEQ ID NO: 18754 - DNA, 25 bp, Artificial
  probe
  misc_feature (1)..(25): SEQ ID NO: 4743; WAN0249DS_at; Start 10; Stop 34
cctatatgtgtaatatatttattct

SEQ ID NO: 18755 - DNA, 25 bp, Artificial
  probe
  misc_feature (1)..(25): SEQ ID NO: 4743; WAN0249DS_at; Start 106; Stop 130
cacaaatctgtaaaaagcaaggctg

SEQ ID NO: 18756 - DNA, 25 bp, Artificial
  probe
  misc_feature (1)..(25): SEQ ID NO: 4743; WAN0249DS_at; Start 77; Stop 101
tgtgtaaattatatttacagtatcc

SEQ ID NO: 18757 - DNA, 25 bp, Artificial
  probe
  misc_feature (1)..(25): SEQ ID NO: 4743; WAN0249DS_at; Start 178; Stop 202
tgaaaggactatatcgaaggagaac

SEQ ID NO: 18758 - DNA, 25 bp, Artificial
  probe
  misc_feature (1)..(25): SEQ ID NO: 4743; WAN0249DS_at; Start 163; Stop 187
aaaaaatgctataattgaaaggact

SEQ ID NO: 18759 - DNA, 25 bp, Artificial
  probe
  misc_feature (1)..(25): SEQ ID NO: 4743; WAN0249DS_at; Start 104; Stop 128
tacacaaatctgtaaaaagcaaggc

SEQ ID NO: 18760 - DNA, 25 bp, Artificial
  probe
  misc_feature (1)..(25): SEQ ID NO: 4743; WAN0249DS_at; Start 119; Stop 143
aaagcaaggctgatttattttgata

SEQ ID NO: 18761 - DNA, 25 bp, Artificial
  probe
  misc_feature (1)..(25): SEQ ID NO: 4743; WAN0249DS_at; Start 91; Stop 115
ttacagtatcctttacacaaatctg

SEQ ID NO: 18762 - DNA, 25 bp, Artificial
  probe
  misc_feature (1)..(25): SEQ ID NO: 4743; WAN0249DS_at; Start 121; Stop 145
agcaaggctgatttattttgataaa

SEQ ID NO: 18763 - DNA, 25 bp, Artificial
  probe
  misc_feature (1)..(25): SEQ ID NO: 4743; WAN0249DS_at; Start 92; Stop 116
tacagtatcctttacacaaatctgt

SEQ ID NO: 18764 - DNA, 25 bp, Artificial
  probe
  misc_feature (1)..(25): SEQ ID NO: 4743; WAN0249DS_at; Start 177; Stop 201
ttgaaaggactatatcgaaggagaa

SEQ ID NO: 18765 - DNA, 25 bp, Artificial
  probe
  misc_feature (1)..(25): SEQ ID NO: 4743; WAN0249DS_at; Start 108; Stop 132
caaatctgtaaaaagcaaggctgat

SEQ ID NO: 18766 - DNA, 25 bp, Artificial
  probe
  misc_feature (1)..(25): SEQ ID NO: 4743; WAN0249DS_at; Start 116; Stop 140
taaaaagcaaggctgatttattttg

SEQ ID NO: 18767 - DNA, 25 bp, Artificial
  probe
  misc_feature (1)..(25): SEQ ID NO: 4743; WAN0249DS_at; Start 94; Stop 118
cagtatcctttacacaaatctgtaa

SEQ ID NO: 18768 - DNA, 25 bp, Artificial
  probe
  misc_feature (1)..(25): SEQ ID NO: 4743; WAN0249DS_at; Start 88; Stop 112
tatttacagtatcctttacacaaat

SEQ ID NO: 18769 - DNA, 25 bp, Artificial
  probe
  misc_feature (1)..(25): SEQ ID NO: 4743; WAN0249DS_at; Start 107; Stop 131
acaaatctgtaaaaagcaaggctga

SEQ ID NO: 18770 - DNA, 25 bp, Artificial
  probe
  misc_feature (1)..(25): SEQ ID NO: 5923; WAN0249DT_at; Start 113; Stop 137
taaatataatttacacaaaattgac

SEQ ID NO: 18771 - DNA, 25 bp, Artificial
  probe
  misc_feature (1)..(25): SEQ ID NO: 5923; WAN0249DT_at; Start 66; Stop 90
caaaataaatcagccttgcttttta

SEQ ID NO: 18772 - DNA, 25 bp, Artificial
  probe
  misc_feature (1)..(25): SEQ ID NO: 5923; WAN0249DT_at; Start 8; Stop 32
tccttcgatatagtcctttcaatta

SEQ ID NO: 18773 - DNA, 25 bp, Artificial
  probe
  misc_feature (1)..(25): SEQ ID NO: 5923; WAN0249DT_at; Start 91; Stop 115
cagatttgtgtaaaggatactgtaa

SEQ ID NO: 18774 - DNA, 25 bp, Artificial
  probe
  misc_feature (1)..(25): SEQ ID NO: 5923; WAN0249DT_at; Start 75; Stop 99
tcagccttgctttttacagatttgt

SEQ ID NO: 18775 - DNA, 25 bp, Artificial
  probe
  misc_feature (1)..(25): SEQ ID NO: 5923; WAN0249DT_at; Start 83; Stop 107
gctttttacagatttgtgtaaagga

SEQ ID NO: 18776 - DNA, 25 bp, Artificial
  probe
  misc_feature (1)..(25): SEQ ID NO: 5923; WAN0249DT_at; Start 6; Stop 30
tctccttcgatatagtcctttcaat

SEQ ID NO: 18777 - DNA, 25 bp, Artificial
  probe
  misc_feature (1)..(25): SEQ ID NO: 5923; WAN0249DT_at; Start 4; Stop 28
gttctccttcgatatagtcctttca

SEQ ID NO: 18778 - DNA, 25 bp, Artificial
  probe
  misc_feature (1)..(25): SEQ ID NO: 5923; WAN0249DT_at; Start 61; Stop 85
tttatcaaaataaatcagccttgct

SEQ ID NO: 18779 - DNA, 25 bp, Artificial
  probe
  misc_feature (1)..(25): SEQ ID NO: 5923; WAN0249DT_at; Start 79; Stop 103
ccttgctttttacagatttgtgtaa

SEQ ID NO: 18780 - DNA, 25 bp, Artificial
  probe
  misc_feature (1)..(25): SEQ ID NO: 5923; WAN0249DT_at; Start 9; Stop 33
ccttcgatatagtcctttcaattat

SEQ ID NO: 18781 - DNA, 25 bp, Artificial
  probe
  misc_feature (1)..(25): SEQ ID NO: 5923; WAN0249DT_at; Start 16; Stop 40
tatagtcctttcaattatagcattt

SEQ ID NO: 18782 - DNA, 25 bp, Artificial
  probe
  misc_feature (1)..(25): SEQ ID NO: 5923; WAN0249DT_at; Start 3; Stop 27
tgttctccttcgatatagtcctttc

SEQ ID NO: 18783 - DNA, 25 bp, Artificial
  probe
  misc_feature (1)..(25): SEQ ID NO: 5923; WAN0249DT_at; Start 88; Stop 112
ttacagatttgtgtaaaggatactg

SEQ ID NO: 18784 - DNA, 25 bp, Artificial
  probe
  misc_feature (1)..(25): SEQ ID NO: 5923; WAN0249DT_at; Start 76; Stop 100
cagccttgctttttacagatttgtg

SEQ ID NO: 18785 - DNA, 25 bp, Artificial
  probe
  misc_feature (1)..(25): SEQ ID NO: 5923; WAN0249DT_at; Start 63; Stop 87
tatcaaaataaatcagccttgcttt

SEQ ID NO: 18786 - DNA, 25 bp, Artificial
  probe
  misc_feature (1)..(25): SEQ ID NO: 5923; WAN0249DT_at; Start 62; Stop 86
ttatcaaaataaatcagccttgctt

SEQ ID NO: 18787 - DNA, 25 bp, Artificial
  probe
  misc_feature (1)..(25): SEQ ID NO: 5923; WAN0249DT_at; Start 1; Stop 25
tttgttctccttcgatatagtcctt

SEQ ID NO: 18788 - DNA, 25 bp, Artificial
  probe
  misc_feature (1)..(25): SEQ ID NO: 5923; WAN0249DT_at; Start 74; Stop 98
atcagccttgctttttacagatttg

SEQ ID NO: 18789 - DNA, 25 bp, Artificial
  probe
  misc_feature (1)..(25): SEQ ID NO: 5923; WAN0249DT_at; Start 126; Stop 150
cacaaaattgacaaataaaaatttg

SEQ ID NO: 18790 - DNA, 25 bp, Artificial
  probe
  misc_feature (1)..(25): SEQ ID NO: 5923; WAN0249DT_at; Start 69; Stop 93
aataaatcagccttgctttttacag

SEQ ID NO: 18791 - DNA, 25 bp, Artificial
  probe
  misc_feature (1)..(25): SEQ ID NO: 5923; WAN0249DT_at; Start 97; Stop 121
tgtgtaaaggatactgtaaatataa

SEQ ID NO: 18792 - DNA, 25 bp, Artificial
  probe
  misc_feature (1)..(25): SEQ ID NO: 5923; WAN0249DT_at; Start 165; Stop 189
ttctagtagaataaatatattacac

SEQ ID NO: 18793 - DNA, 25 bp, Artificial
  probe
  misc_feature (1)..(25): SEQ ID NO: 5923; WAN0249DT_at; Start 5; Stop 29
ttctccttcgatatagtcctttcaa

SEQ ID NO: 18794 - DNA, 25 bp, Artificial
  probe
  misc_feature (1)..(25): SEQ ID NO: 5923; WAN0249DT_at; Start 178; Stop 202
aatatattacacatataggagaaaa

SEQ ID NO: 18795 - DNA, 25 bp, Artificial
  probe
  misc_feature (1)..(25): SEQ ID NO: 5923; WAN0249DT_at; Start 105; Stop 129
ggatactgtaaatataatttacaca

SEQ ID NO: 18796 - DNA, 25 bp, Artificial
  probe
  misc_feature (1)..(25): SEQ ID NO: 5923; WAN0249DT_at; Start 93; Stop 117
gatttgtgtaaaggatactgtaaat

SEQ ID NO: 18797 - DNA, 25 bp, Artificial
  probe
  misc_feature (1)..(25): SEQ ID NO: 5923; WAN0249DT_at; Start 72; Stop 96
aaatcagccttgctttttacagatt

SEQ ID NO: 18798 - DNA, 25 bp, Artificial
  probe
  misc_feature (1)..(25): SEQ ID NO: 5923; WAN0249DT_at; Start 150; Stop 174
gaatatttctgtattttctagtaga

SEQ ID NO: 18799 - DNA, 25 bp, Artificial
  probe
  misc_feature (1)..(25): SEQ ID NO: 5923; WAN0249DT_at; Start 43; Stop 67
ttaatgaaataaccgtaatttatca

SEQ ID NO: 18800 - DNA, 25 bp, Artificial
  probe
  misc_feature (1)..(25): SEQ ID NO: 5923; WAN0249DT_at; Start 18; Stop 42
tagtcctttcaattatagcattttt

SEQ ID NO: 18801 - DNA, 25 bp, Artificial
  probe
  misc_feature (1)..(25): SEQ ID NO: 5923; WAN0249DT_at; Start 71; Stop 95
taaatcagccttgctttttacagat

SEQ ID NO: 18802 - DNA, 25 bp, Artificial
  probe
  misc_feature (1)..(25): SEQ ID NO: 5923; WAN0249DT_at; Start 176; Stop 200
taaatatattacacatataggagaa

SEQ ID NO: 18803 - DNA, 25 bp, Artificial
  probe
  misc_feature (1)..(25): SEQ ID NO: 5923; WAN0249DT_at; Start 78; Stop 102
gccttgctttttacagatttgtgta

SEQ ID NO: 18804 - DNA, 25 bp, Artificial
  probe
  misc_feature (1)..(25): SEQ ID NO: 4352; WAN0249DU_at; Start 112; Stop 136
aagagtcaagctcaaaaagaaagaa

SEQ ID NO: 18805 - DNA, 25 bp, Artificial
  probe
  misc_feature (1)..(25): SEQ ID NO: 4352; WAN0249DU_at; Start 106; Stop 130
tataaaaagagtcaagctcaaaaag

SEQ ID NO: 18806 - DNA, 25 bp, Artificial
  probe
  misc_feature (1)..(25): SEQ ID NO: 4352; WAN0249DU_at; Start 84; Stop 108
tagaatggtatgatagatacaatat

SEQ ID NO: 18807 - DNA, 25 bp, Artificial
  probe
  misc_feature (1)..(25): SEQ ID NO: 4352; WAN0249DU_at; Start 27; Stop 51
ctatctcgaagaaaagatagttttt

SEQ ID NO: 18808 - DNA, 25 bp, Artificial
  probe
  misc_feature (1)..(25): SEQ ID NO: 4352; WAN0249DU_at; Start 92; Stop 116
tatgatagatacaatataaaaagag

SEQ ID NO: 18809 - DNA, 25 bp, Artificial
  probe
  misc_feature (1)..(25): SEQ ID NO: 4352; WAN0249DU_at; Start 94; Stop 118
tgatagatacaatataaaaagagtc

SEQ ID NO: 18810 - DNA, 25 bp, Artificial
  probe
  misc_feature (1)..(25): SEQ ID NO: 4352; WAN0249DU_at; Start 72; Stop 96
gacaaatttttatagaatggtatga

SEQ ID NO: 18811 - DNA, 25 bp, Artificial
  probe
  misc_feature (1)..(25): SEQ ID NO: 4352; WAN0249DU_at; Start 24; Stop 48
tttctatctcgaagaaaagatagtt

SEQ ID NO: 18812 - DNA, 25 bp, Artificial
  probe
  misc_feature (1)..(25): SEQ ID NO: 4352; WAN0249DU_at; Start 95; Stop 119
gatagatacaatataaaaagagtca

SEQ ID NO: 18813 - DNA, 25 bp, Artificial
  probe
  misc_feature (1)..(25): SEQ ID NO: 4352; WAN0249DU_at; Start 26; Stop 50
tctatctcgaagaaaagatagtttt

SEQ ID NO: 18814 - DNA, 25 bp, Artificial
  probe
  misc_feature (1)..(25): SEQ ID NO: 4352; WAN0249DU_at; Start 90; Stop 114
ggtatgatagatacaatataaaaag

SEQ ID NO: 18815 - DNA, 25 bp, Artificial
  probe
  misc_feature (1)..(25): SEQ ID NO: 4352; WAN0249DU_at; Start 111; Stop 135
aaagagtcaagctcaaaaagaaaga

SEQ ID NO: 18816 - DNA, 25 bp, Artificial
  probe
  misc_feature (1)..(25): SEQ ID NO: 4352; WAN0249DU_at; Start 74; Stop 98
caaatttttatagaatggtatgata

SEQ ID NO: 18817 - DNA, 25 bp, Artificial
  probe
  misc_feature (1)..(25): SEQ ID NO: 4352; WAN0249DU_at; Start 25; Stop 49
ttctatctcgaagaaaagatagttt

SEQ ID NO: 18818 - DNA, 25 bp, Artificial
  probe
  misc_feature (1)..(25): SEQ ID NO: 4352; WAN0249DU_at; Start 103; Stop 127
caatataaaaagagtcaagctcaaa

SEQ ID NO: 18819 - DNA, 25 bp, Artificial
  probe
  misc_feature (1)..(25): SEQ ID NO: 4352; WAN0249DU_at; Start 98; Stop 122
agatacaatataaaaagagtcaagc

SEQ ID NO: 18820 - DNA, 25 bp, Artificial
  probe
  misc_feature (1)..(25): SEQ ID NO: 4352; WAN0249DU_at; Start 80; Stop 104
tttatagaatggtatgatagataca

SEQ ID NO: 18821 - DNA, 25 bp, Artificial
  probe
  misc_feature (1)..(25): SEQ ID NO: 4352; WAN0249DU_at; Start 60; Stop 84
cctgtaacatttgacaaatttttat

SEQ ID NO: 18822 - DNA, 25 bp, Artificial
  probe
  misc_feature (1)..(25): SEQ ID NO: 4352; WAN0249DU_at; Start 110; Stop 134
aaaagagtcaagctcaaaaagaaag

SEQ ID NO: 18823 - DNA, 25 bp, Artificial
  probe
  misc_feature (1)..(25): SEQ ID NO: 4352; WAN0249DU_at; Start 79; Stop 103
ttttatagaatggtatgatagatac

SEQ ID NO: 18824 - DNA, 25 bp, Artificial
  probe
  misc_feature (1)..(25): SEQ ID NO: 4352; WAN0249DU_at; Start 102; Stop 126
acaatataaaaagagtcaagctcaa

SEQ ID NO: 18825 - DNA, 25 bp, Artificial
  probe
  misc_feature (1)..(25): SEQ ID NO: 4352; WAN0249DU_at; Start 67; Stop 91
catttgacaaatttttatagaatgg

SEQ ID NO: 18826 - DNA, 25 bp, Artificial
  probe
  misc_feature (1)..(25): SEQ ID NO: 4352; WAN0249DU_at; Start 114; Stop 138
gagtcaagctcaaaaagaaagaaaa

SEQ ID NO: 18827 - DNA, 25 bp, Artificial
  probe
  misc_feature (1)..(25): SEQ ID NO: 4352; WAN0249DU_at; Start 97; Stop 121
tagatacaatataaaaagagtcaag

SEQ ID NO: 18828 - DNA, 25 bp, Artificial
  probe
  misc_feature (1)..(25): SEQ ID NO: 4352; WAN0249DU_at; Start 115; Stop 139
agtcaagctcaaaaagaaagaaaag

SEQ ID NO: 18829 - DNA, 25 bp, Artificial
  probe
  misc_feature (1)..(25): SEQ ID NO: 4352; WAN0249DU_at; Start 99; Stop 123
gatacaatataaaaagagtcaagct

SEQ ID NO: 18830 - DNA, 25 bp, Artificial
  probe
  misc_feature (1)..(25): SEQ ID NO: 4352; WAN0249DU_at; Start 104; Stop 128
aatataaaaagagtcaagctcaaaa

SEQ ID NO: 18831 - DNA, 25 bp, Artificial
  probe
  misc_feature (1)..(25): SEQ ID NO: 4352; WAN0249DU_at; Start 113; Stop 137
agagtcaagctcaaaaagaaagaaa

SEQ ID NO: 18832 - DNA, 25 bp, Artificial
  probe
  misc_feature (1)..(25): SEQ ID NO: 4352; WAN0249DU_at; Start 108; Stop 132
taaaaagagtcaagctcaaaaagaa

SEQ ID NO: 18833 - DNA, 25 bp, Artificial
  probe
  misc_feature (1)..(25): SEQ ID NO: 4352; WAN0249DU_at; Start 101; Stop 125
tacaatataaaaagagtcaagctca

SEQ ID NO: 18834 - DNA, 25 bp, Artificial
  probe
  misc_feature (1)..(25): SEQ ID NO: 4352; WAN0249DU_at; Start 100; Stop 124
atacaatataaaaagagtcaagctc

SEQ ID NO: 18835 - DNA, 25 bp, Artificial
  probe
  misc_feature (1)..(25): SEQ ID NO: 4352; WAN0249DU_at; Start 86; Stop 110
gaatggtatgatagatacaatataa

SEQ ID NO: 18836 - DNA, 25 bp, Artificial
  probe
  misc_feature (1)..(25): SEQ ID NO: 4352; WAN0249DU_at; Start 52; Stop 76
tatttacccctgtaacatttgacaa

SEQ ID NO: 18837 - DNA, 25 bp, Artificial
  probe
  misc_feature (1)..(25): SEQ ID NO: 4352; WAN0249DU_at; Start 82; Stop 106
tatagaatggtatgatagatacaat

SEQ ID NO: 18838 - DNA, 25 bp, Artificial
  probe
  misc_feature (1)..(25): SEQ ID NO: 4630; WAN0249DV_at; Start 59; Stop 83
taccattctataaaaatttgtcaaa

SEQ ID NO: 18839 - DNA, 25 bp, Artificial
  probe
  misc_feature (1)..(25): SEQ ID NO: 4630; WAN0249DV_at; Start 102; Stop 126
aaaactatcttttcttcgagataga

SEQ ID NO: 18840 - DNA, 25 bp, Artificial
  probe
  misc_feature (1)..(25): SEQ ID NO: 4630; WAN0249DV_at; Start 45; Stop 69
tattgtatctatcataccattctat

SEQ ID NO: 18841 - DNA, 25 bp, Artificial
  probe
  misc_feature (1)..(25): SEQ ID NO: 4630; WAN0249DV_at; Start 50; Stop 74
tatctatcataccattctataaaaa

SEQ ID NO: 18842 - DNA, 25 bp, Artificial
  probe
  misc_feature (1)..(25): SEQ ID NO: 4630; WAN0249DV_at; Start 34; Stop 58
gactctttttatattgtatctatca

SEQ ID NO: 18843 - DNA, 25 bp, Artificial
  probe
  misc_feature (1)..(25): SEQ ID NO: 4630; WAN0249DV_at; Start 38; Stop 62
ctttttatattgtatctatcatacc

SEQ ID NO: 18844 - DNA, 25 bp, Artificial
  probe
  misc_feature (1)..(25): SEQ ID NO: 4630; WAN0249DV_at; Start 15; Stop 39
tttctttctttttgagcttgactct

SEQ ID NO: 18845 - DNA, 25 bp, Artificial
  probe
  misc_feature (1)..(25): SEQ ID NO: 4630; WAN0249DV_at; Start 21; Stop 45
tctttttgagcttgactctttttat

SEQ ID NO: 18846 - DNA, 25 bp, Artificial
  probe
  misc_feature (1)..(25): SEQ ID NO: 4630; WAN0249DV_at; Start 101; Stop 125
aaaaactatcttttcttcgagatag

SEQ ID NO: 18847 - DNA, 25 bp, Artificial
  probe
  misc_feature (1)..(25): SEQ ID NO: 4630; WAN0249DV_at; Start 49; Stop 73
gtatctatcataccattctataaaa

SEQ ID NO: 18848 - DNA, 25 bp, Artificial
  probe
  misc_feature (1)..(25): SEQ ID NO: 4630; WAN0249DV_at; Start 22; Stop 46
ctttttgagcttgactctttttata

SEQ ID NO: 18849 - DNA, 25 bp, Artificial
  probe
  misc_feature (1)..(25): SEQ ID NO: 4630; WAN0249DV_at; Start 18; Stop 42
ctttctttttgagcttgactctttt

SEQ ID NO: 18850 - DNA, 25 bp, Artificial
  probe
  misc_feature (1)..(25): SEQ ID NO: 4630; WAN0249DV_at; Start 28; Stop 52
gagcttgactctttttatattgtat

SEQ ID NO: 18851 - DNA, 25 bp, Artificial
  probe
  misc_feature (1)..(25): SEQ ID NO: 4630; WAN0249DV_at; Start 14; Stop 38
ttttctttctttttgagcttgactc

SEQ ID NO: 18852 - DNA, 25 bp, Artificial
  probe
  misc_feature (1)..(25): SEQ ID NO: 4630; WAN0249DV_at; Start 77; Stop 101
tgtcaaatgttacaggggtaaataa

SEQ ID NO: 18853 - DNA, 25 bp, Artificial
  probe
  misc_feature (1)..(25): SEQ ID NO: 4630; WAN0249DV_at; Start 30; Stop 54
gcttgactctttttatattgtatct

SEQ ID NO: 18854 - DNA, 25 bp, Artificial
  probe
  misc_feature (1)..(25): SEQ ID NO: 4630; WAN0249DV_at; Start 54; Stop 78
tatcataccattctataaaaatttg

SEQ ID NO: 18855 - DNA, 25 bp, Artificial
  probe
  misc_feature (1)..(25): SEQ ID NO: 4630; WAN0249DV_at; Start 104; Stop 128
aactatcttttcttcgagatagaaa

SEQ ID NO: 18856 - DNA, 25 bp, Artificial
  probe
  misc_feature (1)..(25): SEQ ID NO: 4630; WAN0249DV_at; Start 56; Stop 80
tcataccattctataaaaatttgtc

SEQ ID NO: 18857 - DNA, 25 bp, Artificial
  probe
  misc_feature (1)..(25): SEQ ID NO: 4630; WAN0249DV_at; Start 103; Stop 127
aaactatcttttcttcgagatagaa

SEQ ID NO: 18858 - DNA, 25 bp, Artificial
  probe
  misc_feature (1)..(25): SEQ ID NO: 4630; WAN0249DV_at; Start 12; Stop 36
tcttttctttctttttgagcttgac

SEQ ID NO: 18859 - DNA, 25 bp, Artificial
  probe
  misc_feature (1)..(25): SEQ ID NO: 4630; WAN0249DV_at; Start 61; Stop 85
ccattctataaaaatttgtcaaatg

SEQ ID NO: 18860 - DNA, 25 bp, Artificial
  probe
  misc_feature (1)..(25): SEQ ID NO: 4630; WAN0249DV_at; Start 65; Stop 89
tctataaaaatttgtcaaatgttac

SEQ ID NO: 18861 - DNA, 25 bp, Artificial
  probe
  misc_feature (1)..(25): SEQ ID NO: 4630; WAN0249DV_at; Start 27; Stop 51
tgagcttgactctttttatattgta

SEQ ID NO: 18862 - DNA, 25 bp, Artificial
  probe
  misc_feature (1)..(25): SEQ ID NO: 4630; WAN0249DV_at; Start 13; Stop 37
cttttctttctttttgagcttgact

SEQ ID NO: 18863 - DNA, 25 bp, Artificial
  probe
  misc_feature (1)..(25): SEQ ID NO: 4630; WAN0249DV_at; Start 42; Stop 66
ttatattgtatctatcataccattc

SEQ ID NO: 18864 - DNA, 25 bp, Artificial
  probe
  misc_feature (1)..(25): SEQ ID NO: 4630; WAN0249DV_at; Start 68; Stop 92
ataaaaatttgtcaaatgttacagg

SEQ ID NO: 18865 - DNA, 25 bp, Artificial
  probe
  misc_feature (1)..(25): SEQ ID NO: 4630; WAN0249DV_at; Start 17; Stop 41
tctttctttttgagcttgactcttt

SEQ ID NO: 18866 - DNA, 25 bp, Artificial
  probe
  misc_feature (1)..(25): SEQ ID NO: 4630; WAN0249DV_at; Start 29; Stop 53
agcttgactctttttatattgtatc

SEQ ID NO: 18867 - DNA, 25 bp, Artificial
  probe
  misc_feature (1)..(25): SEQ ID NO: 4630; WAN0249DV_at; Start 48; Stop 72
tgtatctatcataccattctataaa

SEQ ID NO: 18868 - DNA, 25 bp, Artificial
  probe
  misc_feature (1)..(25): SEQ ID NO: 4630; WAN0249DV_at; Start 20; Stop 44
ttctttttgagcttgactcttttta

SEQ ID NO: 18869 - DNA, 25 bp, Artificial
  probe
  misc_feature (1)..(25): SEQ ID NO: 4630; WAN0249DV_at; Start 16; Stop 40
ttctttctttttgagcttgactctt

SEQ ID NO: 18870 - DNA, 25 bp, Artificial
  probe
  misc_feature (1)..(25): SEQ ID NO: 4630; WAN0249DV_at; Start 43; Stop 67
tatattgtatctatcataccattct

SEQ ID NO: 18871 - DNA, 25 bp, Artificial
  probe
  misc_feature (1)..(25): SEQ ID NO: 4630; WAN0249DV_at; Start 10; Stop 34
cctcttttctttctttttgagcttg

SEQ ID NO: 18872 - DNA, 25 bp, Artificial
  probe
  misc_feature (1)..(25): SEQ ID NO: 71; WAN0249DW_at; Start 12; Stop 36
aagaactccagtgaaaacaggagtt

SEQ ID NO: 18873 - DNA, 25 bp, Artificial
  probe
  misc_feature (1)..(25): SEQ ID NO: 71; WAN0249DW_at; Start 4; Stop 28
acaatgaaaagaactccagtgaaaa

SEQ ID NO: 18874 - DNA, 25 bp, Artificial
  probe
  misc_feature (1)..(25): SEQ ID NO: 71; WAN0249DW_at; Start 18; Stop 42
tccagtgaaaacaggagttctttta

SEQ ID NO: 18875 - DNA, 25 bp, Artificial
  probe
  misc_feature (1)..(25): SEQ ID NO: 71; WAN0249DW_at; Start 10; Stop 34
aaaagaactccagtgaaaacaggag

SEQ ID NO: 18876 - DNA, 25 bp, Artificial
  probe
  misc_feature (1)..(25): SEQ ID NO: 71; WAN0249DW_at; Start 3; Stop 27
aacaatgaaaagaactccagtgaaa

SEQ ID NO: 18877 - DNA, 25 bp, Artificial
  probe
  misc_feature (1)..(25): SEQ ID NO: 71; WAN0249DW_at; Start 14; Stop 38
gaactccagtgaaaacaggagttct

SEQ ID NO: 18878 - DNA, 25 bp, Artificial
  probe
  misc_feature (1)..(25): SEQ ID NO: 71; WAN0249DW_at; Start 20; Stop 44
cagtgaaaacaggagttcttttaca

SEQ ID NO: 18879 - DNA, 25 bp, Artificial
  probe
  misc_feature (1)..(25): SEQ ID NO: 71; WAN0249DW_at; Start 9; Stop 33
gaaaagaactccagtgaaaacagga

SEQ ID NO: 18880 - DNA, 25 bp, Artificial
  probe
  misc_feature (1)..(25): SEQ ID NO: 71; WAN0249DW_at; Start 5; Stop 29
caatgaaaagaactccagtgaaaac

SEQ ID NO: 18881 - DNA, 25 bp, Artificial
  probe
  misc_feature (1)..(25): SEQ ID NO: 71; WAN0249DW_at; Start 7; Stop 31
atgaaaagaactccagtgaaaacag

SEQ ID NO: 18882 - DNA, 25 bp, Artificial
  probe
  misc_feature (1)..(25): SEQ ID NO: 71; WAN0249DW_at; Start 16; Stop 40
actccagtgaaaacaggagttcttt

SEQ ID NO: 18883 - DNA, 25 bp, Artificial
  probe
  misc_feature (1)..(25): SEQ ID NO: 71; WAN0249DW_at; Start 26; Stop 50
aaacaggagttcttttacaatgttg

SEQ ID NO: 18884 - DNA, 25 bp, Artificial
  probe
  misc_feature (1)..(25): SEQ ID NO: 71; WAN0249DW_at; Start 8; Stop 32
tgaaaagaactccagtgaaaacagg

SEQ ID NO: 18885 - DNA, 25 bp, Artificial
  probe
  misc_feature (1)..(25): SEQ ID NO: 71; WAN0249DW_at; Start 2; Stop 26
aaacaatgaaaagaactccagtgaa

SEQ ID NO: 18886 - DNA, 25 bp, Artificial
  probe
  misc_feature (1)..(25): SEQ ID NO: 71; WAN0249DW_at; Start 6; Stop 30
aatgaaaagaactccagtgaaaaca

SEQ ID NO: 18887 - DNA, 25 bp, Artificial
  probe
  misc_feature (1)..(25): SEQ ID NO: 71; WAN0249DW_at; Start 23; Stop 47
tgaaaacaggagttcttttacaatg

SEQ ID NO: 18888 - DNA, 25 bp, Artificial
  probe
  misc_feature (1)..(25): SEQ ID NO: 71; WAN0249DW_at; Start 11; Stop 35
aaagaactccagtgaaaacaggagt

SEQ ID NO: 18889 - DNA, 25 bp, Artificial
  probe
  misc_feature (1)..(25): SEQ ID NO: 71; WAN0249DW_at; Start 13; Stop 37
agaactccagtgaaaacaggagttc

SEQ ID NO: 18890 - DNA, 25 bp, Artificial
  probe
  misc_feature (1)..(25): SEQ ID NO: 71; WAN0249DW_at; Start 15; Stop 39
aactccagtgaaaacaggagttctt

SEQ ID NO: 18891 - DNA, 25 bp, Artificial
  probe
  misc_feature (1)..(25): SEQ ID NO: 71; WAN0249DW_at; Start 17; Stop 41
ctccagtgaaaacaggagttctttt

SEQ ID NO: 18892 - DNA, 25 bp, Artificial
  probe
  misc_feature (1)..(25): SEQ ID NO: 71; WAN0249DW_at; Start 1; Stop 25
aaaacaatgaaaagaactccagtga

SEQ ID NO: 18893 - DNA, 25 bp, Artificial
  probe
  misc_feature (1)..(25): SEQ ID NO: 3193; WAN0249DX_at; Start 25; Stop 49
ttcactggagttcttttcattgttt

SEQ ID NO: 18894 - DNA, 25 bp, Artificial
  probe
  misc_feature (1)..(25): SEQ ID NO: 3193; WAN0249DX_at; Start 24; Stop 48
tttcactggagttcttttcattgtt

SEQ ID NO: 18895 - DNA, 25 bp, Artificial
  probe
  misc_feature (1)..(25): SEQ ID NO: 3193; WAN0249DX_at; Start 18; Stop 42
tcctgttttcactggagttcttttc

SEQ ID NO: 18896 - DNA, 25 bp, Artificial
  probe
  misc_feature (1)..(25): SEQ ID NO: 3193; WAN0249DX_at; Start 22; Stop 46
gttttcactggagttcttttcattg

SEQ ID NO: 18897 - DNA, 25 bp, Artificial
  probe
  misc_feature (1)..(25): SEQ ID NO: 3193; WAN0249DX_at; Start 14; Stop 38
gaactcctgttttcactggagttct

SEQ ID NO: 18898 - DNA, 25 bp, Artificial
  probe
  misc_feature (1)..(25): SEQ ID NO: 3193; WAN0249DX_at; Start 15; Stop 39
aactcctgttttcactggagttctt

SEQ ID NO: 18899 - DNA, 25 bp, Artificial
  probe
  misc_feature (1)..(25): SEQ ID NO: 3193; WAN0249DX_at; Start 10; Stop 34
aaaagaactcctgttttcactggag

SEQ ID NO: 18900 - DNA, 25 bp, Artificial
  probe
  misc_feature (1)..(25): SEQ ID NO: 3193; WAN0249DX_at; Start 16; Stop 40
actcctgttttcactggagttcttt

SEQ ID NO: 18901 - DNA, 25 bp, Artificial
  probe
  misc_feature (1)..(25): SEQ ID NO: 3193; WAN0249DX_at; Start 9; Stop 33
taaaagaactcctgttttcactgga

SEQ ID NO: 18902 - DNA, 25 bp, Artificial
  probe
  misc_feature (1)..(25): SEQ ID NO: 3193; WAN0249DX_at; Start 26; Stop 50
tcactggagttcttttcattgtttt

SEQ ID NO: 18903 - DNA, 25 bp, Artificial
  probe
  misc_feature (1)..(25): SEQ ID NO: 3193; WAN0249DX_at; Start 17; Stop 41
ctcctgttttcactggagttctttt

SEQ ID NO: 18904 - DNA, 25 bp, Artificial
  probe
  misc_feature (1)..(25): SEQ ID NO: 3193; WAN0249DX_at; Start 23; Stop 47
ttttcactggagttcttttcattgt

SEQ ID NO: 18905 - DNA, 25 bp, Artificial
  probe
  misc_feature (1)..(25): SEQ ID NO: 3193; WAN0249DX_at; Start 12; Stop 36
aagaactcctgttttcactggagtt

SEQ ID NO: 18906 - DNA, 25 bp, Artificial
  probe
  misc_feature (1)..(25): SEQ ID NO: 3193; WAN0249DX_at; Start 21; Stop 45
tgttttcactggagttcttttcatt

SEQ ID NO: 18907 - DNA, 25 bp, Artificial
  probe
  misc_feature (1)..(25): SEQ ID NO: 3193; WAN0249DX_at; Start 20; Stop 44
ctgttttcactggagttcttttcat

SEQ ID NO: 18908 - DNA, 25 bp, Artificial
  probe
  misc_feature (1)..(25): SEQ ID NO: 3193; WAN0249DX_at; Start 13; Stop 37
agaactcctgttttcactggagttc

SEQ ID NO: 18909 - DNA, 25 bp, Artificial
  probe
  misc_feature (1)..(25): SEQ ID NO: 3193; WAN0249DX_at; Start 11; Stop 35
aaagaactcctgttttcactggagt

SEQ ID NO: 18910 - DNA, 25 bp, Artificial
  probe
  misc_feature (1)..(25): SEQ ID NO: 3193; WAN0249DX_at; Start 7; Stop 31
tgtaaaagaactcctgttttcactg

SEQ ID NO: 18911 - DNA, 25 bp, Artificial
  probe
  misc_feature (1)..(25): SEQ ID NO: 3193; WAN0249DX_at; Start 4; Stop 28
cattgtaaaagaactcctgttttca

SEQ ID NO: 18912 - DNA, 25 bp, Artificial
  probe
  misc_feature (1)..(25): SEQ ID NO: 3193; WAN0249DX_at; Start 19; Stop 43
cctgttttcactggagttcttttca

SEQ ID NO: 18913 - DNA, 25 bp, Artificial
  probe
  misc_feature (1)..(25): SEQ ID NO: 3193; WAN0249DX_at; Start 1; Stop 25
caacattgtaaaagaactcctgttt

SEQ ID NO: 18914 - DNA, 25 bp, Artificial
  probe
  misc_feature (1)..(25): SEQ ID NO: 297; WAN0249DY_at; Start 37; Stop 61
ctaaaaatagtgagagagacagcga

SEQ ID NO: 18915 - DNA, 25 bp, Artificial
  probe
  misc_feature (1)..(25): SEQ ID NO: 297; WAN0249DY_at; Start 28; Stop 52
catattttcctaaaaatagtgagag

SEQ ID NO: 18916 - DNA, 25 bp, Artificial
  probe
  misc_feature (1)..(25): SEQ ID NO: 297; WAN0249DY_at; Start 90; Stop 114
tgttacagggaacaagaaaatttca

SEQ ID NO: 18917 - DNA, 25 bp, Artificial
  probe
  misc_feature (1)..(25): SEQ ID NO: 297; WAN0249DY_at; Start 35; Stop 59
tcctaaaaatagtgagagagacagc

SEQ ID NO: 18918 - DNA, 25 bp, Artificial
  probe
  misc_feature (1)..(25): SEQ ID NO: 297; WAN0249DY_at; Start 102; Stop 126
caagaaaatttcaggttttcgtgat

SEQ ID NO: 18919 - DNA, 25 bp, Artificial
  probe
  misc_feature (1)..(25): SEQ ID NO: 297; WAN0249DY_at; Start 49; Stop 73
agagagacagcgagaaatgtaagcg

SEQ ID NO: 18920 - DNA, 25 bp, Artificial
  probe
  misc_feature (1)..(25): SEQ ID NO: 297; WAN0249DY_at; Start 46; Stop 70
gtgagagagacagcgagaaatgtaa

SEQ ID NO: 18921 - DNA, 25 bp, Artificial
  probe
  misc_feature (1)..(25): SEQ ID NO: 297; WAN0249DY_at; Start 7; Stop 31
cctcaatctttggtattataccata

SEQ ID NO: 18922 - DNA, 25 bp, Artificial
  probe
  misc_feature (1)..(25): SEQ ID NO: 297; WAN0249DY_at; Start 131; Stop 155
tagaagtctgtatataaggaggtaa

SEQ ID NO: 18923 - DNA, 25 bp, Artificial
  probe
  misc_feature (1)..(25): SEQ ID NO: 297; WAN0249DY_at; Start 40; Stop 64
aaaatagtgagagagacagcgagaa

SEQ ID NO: 18924 - DNA, 25 bp, Artificial
  probe
  misc_feature (1)..(25): SEQ ID NO: 297; WAN0249DY_at; Start 41; Stop 65
aaatagtgagagagacagcgagaaa

SEQ ID NO: 18925 - DNA, 25 bp, Artificial
  probe
  misc_feature (1)..(25): SEQ ID NO: 297; WAN0249DY_at; Start 45; Stop 69
agtgagagagacagcgagaaatgta

SEQ ID NO: 18926 - DNA, 25 bp, Artificial
  probe
  misc_feature (1)..(25): SEQ ID NO: 297; WAN0249DY_at; Start 56; Stop 80
cagcgagaaatgtaagcgattttta

SEQ ID NO: 18927 - DNA, 25 bp, Artificial
  probe
  misc_feature (1)..(25): SEQ ID NO: 297; WAN0249DY_at; Start 129; Stop 153
aatagaagtctgtatataaggaggt

SEQ ID NO: 18928 - DNA, 25 bp, Artificial
  probe
  misc_feature (1)..(25): SEQ ID NO: 297; WAN0249DY_at; Start 54; Stop 78
gacagcgagaaatgtaagcgatttt

SEQ ID NO: 18929 - DNA, 25 bp, Artificial
  probe
  misc_feature (1)..(25): SEQ ID NO: 297; WAN0249DY_at; Start 65; Stop 89
atgtaagcgatttttatttcaaaag

SEQ ID NO: 18930 - DNA, 25 bp, Artificial
  probe
  misc_feature (1)..(25): SEQ ID NO: 297; WAN0249DY_at; Start 83; Stop 107
tcaaaagtgttacagggaacaagaa

SEQ ID NO: 18931 - DNA, 25 bp, Artificial
  probe
  misc_feature (1)..(25): SEQ ID NO: 297; WAN0249DY_at; Start 112; Stop 136
tcaggttttcgtgatataatagaag

SEQ ID NO: 18932 - DNA, 25 bp, Artificial
  probe
  misc_feature (1)..(25): SEQ ID NO: 297; WAN0249DY_at; Start 82; Stop 106
ttcaaaagtgttacagggaacaaga

SEQ ID NO: 18933 - DNA, 25 bp, Artificial
  probe
  misc_feature (1)..(25): SEQ ID NO: 297; WAN0249DY_at; Start 42; Stop 66
aatagtgagagagacagcgagaaat

SEQ ID NO: 18934 - DNA, 25 bp, Artificial
  probe
  misc_feature (1)..(25): SEQ ID NO: 297; WAN0249DY_at; Start 36; Stop 60
cctaaaaatagtgagagagacagcg

SEQ ID NO: 18935 - DNA, 25 bp, Artificial
  probe
  misc_feature (1)..(25): SEQ ID NO: 297; WAN0249DY_at; Start 50; Stop 74
gagagacagcgagaaatgtaagcga

SEQ ID NO: 18936 - DNA, 25 bp, Artificial
  probe
  misc_feature (1)..(25): SEQ ID NO: 297; WAN0249DY_at; Start 48; Stop 72
gagagagacagcgagaaatgtaagc

SEQ ID NO: 18937 - DNA, 25 bp, Artificial
  probe
  misc_feature (1)..(25): SEQ ID NO: 297; WAN0249DY_at; Start 43; Stop 67
atagtgagagagacagcgagaaatg

SEQ ID NO: 18938 - DNA, 25 bp, Artificial
  probe
  misc_feature (1)..(25): SEQ ID NO: 297; WAN0249DY_at; Start 58; Stop 82
gcgagaaatgtaagcgatttttatt

SEQ ID NO: 18939 - DNA, 25 bp, Artificial
  probe
  misc_feature (1)..(25): SEQ ID NO: 297; WAN0249DY_at; Start 38; Stop 62
taaaaatagtgagagagacagcgag

SEQ ID NO: 18940 - DNA, 25 bp, Artificial
  probe
  misc_feature (1)..(25): SEQ ID NO: 297; WAN0249DY_at; Start 39; Stop 63
aaaaatagtgagagagacagcgaga

SEQ ID NO: 18941 - DNA, 25 bp, Artificial
  probe
  misc_feature (1)..(25): SEQ ID NO: 297; WAN0249DY_at; Start 79; Stop 103
tatttcaaaagtgttacagggaaca

SEQ ID NO: 18942 - DNA, 25 bp, Artificial
  probe
  misc_feature (1)..(25): SEQ ID NO: 297; WAN0249DY_at; Start 128; Stop 152
taatagaagtctgtatataaggagg

SEQ ID NO: 18943 - DNA, 25 bp, Artificial
  probe
  misc_feature (1)..(25): SEQ ID NO: 297; WAN0249DY_at; Start 52; Stop 76
gagacagcgagaaatgtaagcgatt

SEQ ID NO: 18944 - DNA, 25 bp, Artificial
  probe
  misc_feature (1)..(25): SEQ ID NO: 297; WAN0249DY_at; Start 105; Stop 129
gaaaatttcaggttttcgtgatata

SEQ ID NO: 18945 - DNA, 25 bp, Artificial
  probe
  misc_feature (1)..(25): SEQ ID NO: 297; WAN0249DY_at; Start 5; Stop 29
cacctcaatctttggtattatacca

SEQ ID NO: 18946 - DNA, 25 bp, Artificial
  probe
  misc_feature (1)..(25): SEQ ID NO: 297; WAN0249DY_at; Start 134; Stop 158
aagtctgtatataaggaggtaaatc

SEQ ID NO: 18947 - DNA, 25 bp, Artificial
  probe
  misc_feature (1)..(25): SEQ ID NO: 297; WAN0249DY_at; Start 51; Stop 75
agagacagcgagaaatgtaagcgat

SEQ ID NO: 18948 - DNA, 25 bp, Artificial
  probe
  misc_feature (1)..(25): SEQ ID NO: 3656; WAN0249DZ_at; Start 1; Stop 25
gatttacctccttatatacagactt

SEQ ID NO: 18949 - DNA, 25 bp, Artificial
  probe
  misc_feature (1)..(25): SEQ ID NO: 3656; WAN0249DZ_at; Start 85; Stop 109
tcgcttacatttctcgctgtctctc

SEQ ID NO: 18950 - DNA, 25 bp, Artificial
  probe
  misc_feature (1)..(25): SEQ ID NO: 3656; WAN0249DZ_at; Start 83; Stop 107
aatcgcttacatttctcgctgtctc

SEQ ID NO: 18951 - DNA, 25 bp, Artificial
  probe
  misc_feature (1)..(25): SEQ ID NO: 3656; WAN0249DZ_at; Start 56; Stop 80
tgttccctgtaacacttttgaaata

SEQ ID NO: 18952 - DNA, 25 bp, Artificial
  probe
  misc_feature (1)..(25): SEQ ID NO: 3656; WAN0249DZ_at; Start 5; Stop 29
tacctccttatatacagacttctat

SEQ ID NO: 18953 - DNA, 25 bp, Artificial
  probe
  misc_feature (1)..(25): SEQ ID NO: 3656; WAN0249DZ_at; Start 23; Stop 47
cttctattatatcacgaaaacctga

SEQ ID NO: 18954 - DNA, 25 bp, Artificial
  probe
  misc_feature (1)..(25): SEQ ID NO: 3656; WAN0249DZ_at; Start 131; Stop 155
ggtataataccaaagattgaggtga

SEQ ID NO: 18955 - DNA, 25 bp, Artificial
  probe
  misc_feature (1)..(25): SEQ ID NO: 3656; WAN0249DZ_at; Start 98; Stop 122
tcgctgtctctctcactatttttag

SEQ ID NO: 18956 - DNA, 25 bp, Artificial
  probe
  misc_feature (1)..(25): SEQ ID NO: 3656; WAN0249DZ_at; Start 79; Stop 103
taaaaatcgcttacatttctcgctg

SEQ ID NO: 18957 - DNA, 25 bp, Artificial
  probe
  misc_feature (1)..(25): SEQ ID NO: 3656; WAN0249DZ_at; Start 128; Stop 152
tatggtataataccaaagattgagg

SEQ ID NO: 18958 - DNA, 25 bp, Artificial
  probe
  misc_feature (1)..(25): SEQ ID NO: 3656; WAN0249DZ_at; Start 33; Stop 57
atcacgaaaacctgaaattttcttg

SEQ ID NO: 18959 - DNA, 25 bp, Artificial
  probe
  misc_feature (1)..(25): SEQ ID NO: 3656; WAN0249DZ_at; Start 25; Stop 49
tctattatatcacgaaaacctgaaa

SEQ ID NO: 18960 - DNA, 25 bp, Artificial
  probe
  misc_feature (1)..(25): SEQ ID NO: 3656; WAN0249DZ_at; Start 82; Stop 106
aaatcgcttacatttctcgctgtct

SEQ ID NO: 18961 - DNA, 25 bp, Artificial
  probe
  misc_feature (1)..(25): SEQ ID NO: 3656; WAN0249DZ_at; Start 27; Stop 51
tattatatcacgaaaacctgaaatt

SEQ ID NO: 18962 - DNA, 25 bp, Artificial
  probe
  misc_feature (1)..(25): SEQ ID NO: 3656; WAN0249DZ_at; Start 90; Stop 114
tacatttctcgctgtctctctcact

SEQ ID NO: 18963 - DNA, 25 bp, Artificial
  probe
  misc_feature (1)..(25): SEQ ID NO: 3656; WAN0249DZ_at; Start 30; Stop 54
tatatcacgaaaacctgaaattttc

SEQ ID NO: 18964 - DNA, 25 bp, Artificial
  probe
  misc_feature (1)..(25): SEQ ID NO: 3656; WAN0249DZ_at; Start 81; Stop 105
aaaatcgcttacatttctcgctgtc

SEQ ID NO: 18965 - DNA, 25 bp, Artificial
  probe
  misc_feature (1)..(25): SEQ ID NO: 3656; WAN0249DZ_at; Start 92; Stop 116
catttctcgctgtctctctcactat

SEQ ID NO: 18966 - DNA, 25 bp, Artificial
  probe
  misc_feature (1)..(25): SEQ ID NO: 3656; WAN0249DZ_at; Start 104; Stop 128
tctctctcactatttttaggaaaat

SEQ ID NO: 18967 - DNA, 25 bp, Artificial
  probe
  misc_feature (1)..(25): SEQ ID NO: 3656; WAN0249DZ_at; Start 7; Stop 31
cctccttatatacagacttctatta

SEQ ID NO: 18968 - DNA, 25 bp, Artificial
  probe
  misc_feature (1)..(25): SEQ ID NO: 3656; WAN0249DZ_at; Start 77; Stop 101
aataaaaatcgcttacatttctcgc

SEQ ID NO: 18969 - DNA, 25 bp, Artificial
  probe
  misc_feature (1)..(25): SEQ ID NO: 3656; WAN0249DZ_at; Start 130; Stop 154
tggtataataccaaagattgaggtg

SEQ ID NO: 18970 - DNA, 25 bp, Artificial
  probe
  misc_feature (1)..(25): SEQ ID NO: 3656; WAN0249DZ_at; Start 108; Stop 132
tctcactatttttaggaaaatatgg

SEQ ID NO: 18971 - DNA, 25 bp, Artificial
  probe
  misc_feature (1)..(25): SEQ ID NO: 3656; WAN0249DZ_at; Start 53; Stop 77
tcttgttccctgtaacacttttgaa

SEQ ID NO: 18972 - DNA, 25 bp, Artificial
  probe
  misc_feature (1)..(25): SEQ ID NO: 3656; WAN0249DZ_at; Start 134; Stop 158
ataataccaaagattgaggtgaatt

SEQ ID NO: 18973 - DNA, 25 bp, Artificial
  probe
  misc_feature (1)..(25): SEQ ID NO: 3656; WAN0249DZ_at; Start 70; Stop 94
cttttgaaataaaaatcgcttacat

SEQ ID NO: 18974 - DNA, 25 bp, Artificial
  probe
  misc_feature (1)..(25): SEQ ID NO: 3656; WAN0249DZ_at; Start 3; Stop 27
tttacctccttatatacagacttct

SEQ ID NO: 18975 - DNA, 25 bp, Artificial
  probe
  misc_feature (1)..(25): SEQ ID NO: 3656; WAN0249DZ_at; Start 111; Stop 135
cactatttttaggaaaatatggtat

SEQ ID NO: 18976 - DNA, 25 bp, Artificial
  probe
  misc_feature (1)..(25): SEQ ID NO: 3656; WAN0249DZ_at; Start 87; Stop 111
gcttacatttctcgctgtctctctc

SEQ ID NO: 18977 - DNA, 25 bp, Artificial
  probe
  misc_feature (1)..(25): SEQ ID NO: 3656; WAN0249DZ_at; Start 80; Stop 104
aaaaatcgcttacatttctcgctgt

SEQ ID NO: 18978 - DNA, 25 bp, Artificial
  probe
  misc_feature (1)..(25): SEQ ID NO: 3656; WAN0249DZ_at; Start 132; Stop 156
gtataataccaaagattgaggtgaa

SEQ ID NO: 18979 - DNA, 25 bp, Artificial
  probe
  misc_feature (1)..(25): SEQ ID NO: 3656; WAN0249DZ_at; Start 94; Stop 118
tttctcgctgtctctctcactattt

SEQ ID NO: 18980 - DNA, 25 bp, Artificial
  probe
  misc_feature (1)..(25): SEQ ID NO: 3656; WAN0249DZ_at; Start 45; Stop 69
tgaaattttcttgttccctgtaaca

SEQ ID NO: 18981 - DNA, 25 bp, Artificial
  probe
  misc_feature (1)..(25): SEQ ID NO: 3656; WAN0249DZ_at; Start 133; Stop 157
tataataccaaagattgaggtgaat

SEQ ID NO: 18982 - DNA, 25 bp, Artificial
  probe
  misc_feature (1)..(25): SEQ ID NO: 4514; WAN0249E2_at; Start 24; Stop 48
gttactgtaacagtttttgatataa

SEQ ID NO: 18983 - DNA, 25 bp, Artificial
  probe
  misc_feature (1)..(25): SEQ ID NO: 4514; WAN0249E2_at; Start 2; Stop 26
agctttcaggaattgataaaaagtt

SEQ ID NO: 18984 - DNA, 25 bp, Artificial
  probe
  misc_feature (1)..(25): SEQ ID NO: 4514; WAN0249E2_at; Start 11; Stop 35
gaattgataaaaagttactgtaaca

SEQ ID NO: 18985 - DNA, 25 bp, Artificial
  probe
  misc_feature (1)..(25): SEQ ID NO: 4514; WAN0249E2_at; Start 7; Stop 31
tcaggaattgataaaaagttactgt

SEQ ID NO: 18986 - DNA, 25 bp, Artificial
  probe
  misc_feature (1)..(25): SEQ ID NO: 4514; WAN0249E2_at; Start 3; Stop 27
gctttcaggaattgataaaaagtta

SEQ ID NO: 18987 - DNA, 25 bp, Artificial
  probe
  misc_feature (1)..(25): SEQ ID NO: 4514; WAN0249E2_at; Start 29; Stop 53
tgtaacagtttttgatataaaggta

SEQ ID NO: 18988 - DNA, 25 bp, Artificial
  probe
  misc_feature (1)..(25): SEQ ID NO: 4514; WAN0249E2_at; Start 13; Stop 37
attgataaaaagttactgtaacagt

SEQ ID NO: 18989 - DNA, 25 bp, Artificial
  probe
  misc_feature (1)..(25): SEQ ID NO: 4514; WAN0249E2_at; Start 25; Stop 49
ttactgtaacagtttttgatataaa

SEQ ID NO: 18990 - DNA, 25 bp, Artificial
  probe
  misc_feature (1)..(25): SEQ ID NO: 4514; WAN0249E2_at; Start 34; Stop 58
cagtttttgatataaaggtagggat

SEQ ID NO: 18991 - DNA, 25 bp, Artificial
  probe
  misc_feature (1)..(25): SEQ ID NO: 4514; WAN0249E2_at; Start 28; Stop 52
ctgtaacagtttttgatataaaggt

SEQ ID NO: 18992 - DNA, 25 bp, Artificial
  probe
  misc_feature (1)..(25): SEQ ID NO: 4514; WAN0249E2_at; Start 8; Stop 32
caggaattgataaaaagttactgta

SEQ ID NO: 18993 - DNA, 25 bp, Artificial
  probe
  misc_feature (1)..(25): SEQ ID NO: 4514; WAN0249E2_at; Start 6; Stop 30
ttcaggaattgataaaaagttactg

SEQ ID NO: 18994 - DNA, 25 bp, Artificial
  probe
  misc_feature (1)..(25): SEQ ID NO: 4514; WAN0249E2_at; Start 27; Stop 51
actgtaacagtttttgatataaagg

SEQ ID NO: 18995 - DNA, 25 bp, Artificial
  probe
  misc_feature (1)..(25): SEQ ID NO: 4514; WAN0249E2_at; Start 12; Stop 36
aattgataaaaagttactgtaacag

SEQ ID NO: 18996 - DNA, 25 bp, Artificial
  probe
  misc_feature (1)..(25): SEQ ID NO: 4514; WAN0249E2_at; Start 1; Stop 25
tagctttcaggaattgataaaaagt

SEQ ID NO: 18997 - DNA, 25 bp, Artificial
  probe
  misc_feature (1)..(25): SEQ ID NO: 4514; WAN0249E2_at; Start 23; Stop 47
agttactgtaacagtttttgatata

SEQ ID NO: 18998 - DNA, 25 bp, Artificial
  probe
  misc_feature (1)..(25): SEQ ID NO: 4514; WAN0249E2_at; Start 22; Stop 46
aagttactgtaacagtttttgatat

SEQ ID NO: 18999 - DNA, 25 bp, Artificial
  probe
  misc_feature (1)..(25): SEQ ID NO: 4514; WAN0249E2_at; Start 26; Stop 50
tactgtaacagtttttgatataaag

SEQ ID NO: 19000 - DNA, 25 bp, Artificial
  probe
  misc_feature (1)..(25): SEQ ID NO: 580; WAN0249E3_at; Start 8; Stop 32
cctttatatcaaaaactgttacagt

SEQ ID NO: 19001 - DNA, 25 bp, Artificial
  probe
  misc_feature (1)..(25): SEQ ID NO: 580; WAN0249E3_at; Start 11; Stop 35
ttatatcaaaaactgttacagtaac

SEQ ID NO: 19002 - DNA, 25 bp, Artificial
  probe
  misc_feature (1)..(25): SEQ ID NO: 580; WAN0249E3_at; Start 13; Stop 37
atatcaaaaactgttacagtaactt

SEQ ID NO: 19003 - DNA, 25 bp, Artificial
  probe
  misc_feature (1)..(25): SEQ ID NO: 580; WAN0249E3_at; Start 12; Stop 36
tatatcaaaaactgttacagtaact

SEQ ID NO: 19004 - DNA, 25 bp, Artificial
  probe
  misc_feature (1)..(25): SEQ ID NO: 580; WAN0249E3_at; Start 27; Stop 51
tacagtaactttttatcaattcctg

SEQ ID NO: 19005 - DNA, 25 bp, Artificial
  probe
  misc_feature (1)..(25): SEQ ID NO: 580; WAN0249E3_at; Start 29; Stop 53
cagtaactttttatcaattcctgaa

SEQ ID NO: 19006 - DNA, 25 bp, Artificial
  probe
  misc_feature (1)..(25): SEQ ID NO: 580; WAN0249E3_at; Start 32; Stop 56
taactttttatcaattcctgaaagc

SEQ ID NO: 19007 - DNA, 25 bp, Artificial
  probe
  misc_feature (1)..(25): SEQ ID NO: 580; WAN0249E3_at; Start 9; Stop 33
ctttatatcaaaaactgttacagta

SEQ ID NO: 19008 - DNA, 25 bp, Artificial
  probe
  misc_feature (1)..(25): SEQ ID NO: 580; WAN0249E3_at; Start 33; Stop 57
aactttttatcaattcctgaaagct

SEQ ID NO: 19009 - DNA, 25 bp, Artificial
  probe
  misc_feature (1)..(25): SEQ ID NO: 580; WAN0249E3_at; Start 23; Stop 47
ctgttacagtaactttttatcaatt

SEQ ID NO: 19010 - DNA, 25 bp, Artificial
  probe
  misc_feature (1)..(25): SEQ ID NO: 580; WAN0249E3_at; Start 10; Stop 34
tttatatcaaaaactgttacagtaa

SEQ ID NO: 19011 - DNA, 25 bp, Artificial
  probe
  misc_feature (1)..(25): SEQ ID NO: 580; WAN0249E3_at; Start 22; Stop 46
actgttacagtaactttttatcaat

SEQ ID NO: 19012 - DNA, 25 bp, Artificial
  probe
  misc_feature (1)..(25): SEQ ID NO: 580; WAN0249E3_at; Start 28; Stop 52
acagtaactttttatcaattcctga

SEQ ID NO: 19013 - DNA, 25 bp, Artificial
  probe
  misc_feature (1)..(25): SEQ ID NO: 580; WAN0249E3_at; Start 24; Stop 48
tgttacagtaactttttatcaattc

SEQ ID NO: 19014 - DNA, 25 bp, Artificial
  probe
  misc_feature (1)..(25): SEQ ID NO: 580; WAN0249E3_at; Start 34; Stop 58
actttttatcaattcctgaaagcta

SEQ ID NO: 19015 - DNA, 25 bp, Artificial
  probe
  misc_feature (1)..(25): SEQ ID NO: 3548; WAN0249E4_at; Start 52; Stop 76
gtatactagtattgtctttaaaaga

SEQ ID NO: 19016 - DNA, 25 bp, Artificial
  probe
  misc_feature (1)..(25): SEQ ID NO: 3548; WAN0249E4_at; Start 7; Stop 31
catataaatgtaacaaaggcgtaat

SEQ ID NO: 19017 - DNA, 25 bp, Artificial
  probe
  misc_feature (1)..(25): SEQ ID NO: 3548; WAN0249E4_at; Start 13; Stop 37
aatgtaacaaaggcgtaatatttat

SEQ ID NO: 19018 - DNA, 25 bp, Artificial
  probe
  misc_feature (1)..(25): SEQ ID NO: 3548; WAN0249E4_at; Start 10; Stop 34
ataaatgtaacaaaggcgtaatatt

SEQ ID NO: 19019 - DNA, 25 bp, Artificial
  probe
  misc_feature (1)..(25): SEQ ID NO: 3548; WAN0249E4_at; Start 14; Stop 38
atgtaacaaaggcgtaatatttatt

SEQ ID NO: 19020 - DNA, 25 bp, Artificial
  probe
  misc_feature (1)..(25): SEQ ID NO: 3548; WAN0249E4_at; Start 20; Stop 44
caaaggcgtaatatttattaggcct

SEQ ID NO: 19021 - DNA, 25 bp, Artificial
  probe
  misc_feature (1)..(25): SEQ ID NO: 3548; WAN0249E4_at; Start 50; Stop 74
tggtatactagtattgtctttaaaa

SEQ ID NO: 19022 - DNA, 25 bp, Artificial
  probe
  misc_feature (1)..(25): SEQ ID NO: 3548; WAN0249E4_at; Start 8; Stop 32
atataaatgtaacaaaggcgtaata

SEQ ID NO: 19023 - DNA, 25 bp, Artificial
  probe
  misc_feature (1)..(25): SEQ ID NO: 3548; WAN0249E4_at; Start 4; Stop 28
cgacatataaatgtaacaaaggcgt

SEQ ID NO: 19024 - DNA, 25 bp, Artificial
  probe
  misc_feature (1)..(25): SEQ ID NO: 3548; WAN0249E4_at; Start 1; Stop 25
gaacgacatataaatgtaacaaagg

SEQ ID NO: 19025 - DNA, 25 bp, Artificial
  probe
  misc_feature (1)..(25): SEQ ID NO: 3548; WAN0249E4_at; Start 9; Stop 33
tataaatgtaacaaaggcgtaatat

SEQ ID NO: 19026 - DNA, 25 bp, Artificial
  probe
  misc_feature (1)..(25): SEQ ID NO: 3548; WAN0249E4_at; Start 62; Stop 86
attgtctttaaaagaaggagtatct

SEQ ID NO: 19027 - DNA, 25 bp, Artificial
  probe
  misc_feature (1)..(25): SEQ ID NO: 3548; WAN0249E4_at; Start 6; Stop 30
acatataaatgtaacaaaggcgtaa

SEQ ID NO: 19028 - DNA, 25 bp, Artificial
  probe
  misc_feature (1)..(25): SEQ ID NO: 3548; WAN0249E4_at; Start 63; Stop 87
ttgtctttaaaagaaggagtatcta

SEQ ID NO: 19029 - DNA, 25 bp, Artificial
  probe
  misc_feature (1)..(25): SEQ ID NO: 3548; WAN0249E4_at; Start 47; Stop 71
ttttggtatactagtattgtcttta

SEQ ID NO: 19030 - DNA, 25 bp, Artificial
  probe
  misc_feature (1)..(25): SEQ ID NO: 3548; WAN0249E4_at; Start 61; Stop 85
tattgtctttaaaagaaggagtatc

SEQ ID NO: 19031 - DNA, 25 bp, Artificial
  probe
  misc_feature (1)..(25): SEQ ID NO: 3548; WAN0249E4_at; Start 64; Stop 88
tgtctttaaaagaaggagtatctac

SEQ ID NO: 19032 - DNA, 25 bp, Artificial
  probe
  misc_feature (1)..(25): SEQ ID NO: 3548; WAN0249E4_at; Start 5; Stop 29
gacatataaatgtaacaaaggcgta

SEQ ID NO: 19033 - DNA, 25 bp, Artificial
  probe
  misc_feature (1)..(25): SEQ ID NO: 3548; WAN0249E4_at; Start 54; Stop 78
atactagtattgtctttaaaagaag

SEQ ID NO: 19034 - DNA, 25 bp, Artificial
  probe
  misc_feature (1)..(25): SEQ ID NO: 3548; WAN0249E4_at; Start 49; Stop 73
ttggtatactagtattgtctttaaa

SEQ ID NO: 19035 - DNA, 25 bp, Artificial
  probe
  misc_feature (1)..(25): SEQ ID NO: 3548; WAN0249E4_at; Start 57; Stop 81
ctagtattgtctttaaaagaaggag

SEQ ID NO: 19036 - DNA, 25 bp, Artificial
  probe
  misc_feature (1)..(25): SEQ ID NO: 3548; WAN0249E4_at; Start 3; Stop 27
acgacatataaatgtaacaaaggcg

SEQ ID NO: 19037 - DNA, 25 bp, Artificial
  probe
  misc_feature (1)..(25): SEQ ID NO: 3548; WAN0249E4_at; Start 15; Stop 39
tgtaacaaaggcgtaatatttatta

SEQ ID NO: 19038 - DNA, 25 bp, Artificial
  probe
  misc_feature (1)..(25): SEQ ID NO: 3548; WAN0249E4_at; Start 2; Stop 26
aacgacatataaatgtaacaaaggc

SEQ ID NO: 19039 - DNA, 25 bp, Artificial
  probe
  misc_feature (1)..(25): SEQ ID NO: 3548; WAN0249E4_at; Start 48; Stop 72
tttggtatactagtattgtctttaa

SEQ ID NO: 19040 - DNA, 25 bp, Artificial
  probe
  misc_feature (1)..(25): SEQ ID NO: 3548; WAN0249E4_at; Start 53; Stop 77
tatactagtattgtctttaaaagaa

SEQ ID NO: 19041 - DNA, 25 bp, Artificial
  probe
  misc_feature (1)..(25): SEQ ID NO: 3135; WAN0249E5_at; Start 21; Stop 45
tttaaagacaatactagtataccaa

SEQ ID NO: 19042 - DNA, 25 bp, Artificial
  probe
  misc_feature (1)..(25): SEQ ID NO: 3135; WAN0249E5_at; Start 9; Stop 33
gatactccttcttttaaagacaata

SEQ ID NO: 19043 - DNA, 25 bp, Artificial
  probe
  misc_feature (1)..(25): SEQ ID NO: 3135; WAN0249E5_at; Start 61; Stop 85
atattacgcctttgttacatttata

SEQ ID NO: 19044 - DNA, 25 bp, Artificial
  probe
  misc_feature (1)..(25): SEQ ID NO: 3135; WAN0249E5_at; Start 18; Stop 42
tcttttaaagacaatactagtatac

SEQ ID NO: 19045 - DNA, 25 bp, Artificial
  probe
  misc_feature (1)..(25): SEQ ID NO: 3135; WAN0249E5_at; Start 16; Stop 40
cttcttttaaagacaatactagtat

SEQ ID NO: 19046 - DNA, 25 bp, Artificial
  probe
  misc_feature (1)..(25): SEQ ID NO: 3135; WAN0249E5_at; Start 68; Stop 92
gcctttgttacatttatatgtcgtt

SEQ ID NO: 19047 - DNA, 25 bp, Artificial
  probe
  misc_feature (1)..(25): SEQ ID NO: 3135; WAN0249E5_at; Start 22; Stop 46
ttaaagacaatactagtataccaaa

SEQ ID NO: 19048 - DNA, 25 bp, Artificial
  probe
  misc_feature (1)..(25): SEQ ID NO: 3135; WAN0249E5_at; Start 66; Stop 90
acgcctttgttacatttatatgtcg

SEQ ID NO: 19049 - DNA, 25 bp, Artificial
  probe
  misc_feature (1)..(25): SEQ ID NO: 3135; WAN0249E5_at; Start 56; Stop 80
aataaatattacgcctttgttacat

SEQ ID NO: 19050 - DNA, 25 bp, Artificial
  probe
  misc_feature (1)..(25): SEQ ID NO: 3135; WAN0249E5_at; Start 69; Stop 93
cctttgttacatttatatgtcgttc

SEQ ID NO: 19051 - DNA, 25 bp, Artificial
  probe
  misc_feature (1)..(25): SEQ ID NO: 3135; WAN0249E5_at; Start 17; Stop 41
ttcttttaaagacaatactagtata

SEQ ID NO: 19052 - DNA, 25 bp, Artificial
  probe
  misc_feature (1)..(25): SEQ ID NO: 3135; WAN0249E5_at; Start 8; Stop 32
agatactccttcttttaaagacaat

SEQ ID NO: 19053 - DNA, 25 bp, Artificial
  probe
  misc_feature (1)..(25): SEQ ID NO: 3135; WAN0249E5_at; Start 62; Stop 86
tattacgcctttgttacatttatat

SEQ ID NO: 19054 - DNA, 25 bp, Artificial
  probe
  misc_feature (1)..(25): SEQ ID NO: 3135; WAN0249E5_at; Start 6; Stop 30
gtagatactccttcttttaaagaca

SEQ ID NO: 19055 - DNA, 25 bp, Artificial
  probe
  misc_feature (1)..(25): SEQ ID NO: 3135; WAN0249E5_at; Start 57; Stop 81
ataaatattacgcctttgttacatt

SEQ ID NO: 19056 - DNA, 25 bp, Artificial
  probe
  misc_feature (1)..(25): SEQ ID NO: 3135; WAN0249E5_at; Start 55; Stop 79
taataaatattacgcctttgttaca

SEQ ID NO: 19057 - DNA, 25 bp, Artificial
  probe
  misc_feature (1)..(25): SEQ ID NO: 3135; WAN0249E5_at; Start 64; Stop 88
ttacgcctttgttacatttatatgt

SEQ ID NO: 19058 - DNA, 25 bp, Artificial
  probe
  misc_feature (1)..(25): SEQ ID NO: 3135; WAN0249E5_at; Start 20; Stop 44
ttttaaagacaatactagtatacca

SEQ ID NO: 19059 - DNA, 25 bp, Artificial
  probe
  misc_feature (1)..(25): SEQ ID NO: 3135; WAN0249E5_at; Start 50; Stop 74
aggcctaataaatattacgcctttg

SEQ ID NO: 19060 - DNA, 25 bp, Artificial
  probe
  misc_feature (1)..(25): SEQ ID NO: 3135; WAN0249E5_at; Start 7; Stop 31
tagatactccttcttttaaagacaa

SEQ ID NO: 19061 - DNA, 25 bp, Artificial
  probe
  misc_feature (1)..(25): SEQ ID NO: 3135; WAN0249E5_at; Start 65; Stop 89
tacgcctttgttacatttatatgtc

SEQ ID NO: 19062 - DNA, 25 bp, Artificial
  probe
  misc_feature (1)..(25): SEQ ID NO: 3135; WAN0249E5_at; Start 60; Stop 84
aatattacgcctttgttacatttat

SEQ ID NO: 19063 - DNA, 25 bp, Artificial
  probe
  misc_feature (1)..(25): SEQ ID NO: 3135; WAN0249E5_at; Start 13; Stop 37
ctccttcttttaaagacaatactag

SEQ ID NO: 19064 - DNA, 25 bp, Artificial
  probe
  misc_feature (1)..(25): SEQ ID NO: 3135; WAN0249E5_at; Start 63; Stop 87
attacgcctttgttacatttatatg

SEQ ID NO: 19065 - DNA, 25 bp, Artificial
  probe
  misc_feature (1)..(25): SEQ ID NO: 3135; WAN0249E5_at; Start 67; Stop 91
cgcctttgttacatttatatgtcgt

SEQ ID NO: 19066 - DNA, 25 bp, Artificial
  probe
  misc_feature (1)..(25): SEQ ID NO: 3135; WAN0249E5_at; Start 23; Stop 47
taaagacaatactagtataccaaaa

SEQ ID NO: 19067 - DNA, 25 bp, Artificial
  probe
  misc_feature (1)..(25): SEQ ID NO: 86; WAN0249E6_at; Start 33; Stop 57
tgtcgtgtgaacgataatactcatt

SEQ ID NO: 19068 - DNA, 25 bp, Artificial
  probe
  misc_feature (1)..(25): SEQ ID NO: 86; WAN0249E6_at; Start 26; Stop 50
tgaaaattgtcgtgtgaacgataat

SEQ ID NO: 19069 - DNA, 25 bp, Artificial
  probe
  misc_feature (1)..(25): SEQ ID NO: 86; WAN0249E6_at; Start 24; Stop 48
aatgaaaattgtcgtgtgaacgata

SEQ ID NO: 19070 - DNA, 25 bp, Artificial
  probe
  misc_feature (1)..(25): SEQ ID NO: 86; WAN0249E6_at; Start 29; Stop 53
aaattgtcgtgtgaacgataatact

SEQ ID NO: 19071 - DNA, 25 bp, Artificial
  probe
  misc_feature (1)..(25): SEQ ID NO: 86; WAN0249E6_at; Start 30; Stop 54
aattgtcgtgtgaacgataatactc

SEQ ID NO: 19072 - DNA, 25 bp, Artificial
  probe
  misc_feature (1)..(25): SEQ ID NO: 86; WAN0249E6_at; Start 32; Stop 56
ttgtcgtgtgaacgataatactcat

SEQ ID NO: 19073 - DNA, 25 bp, Artificial
  probe
  misc_feature (1)..(25): SEQ ID NO: 86; WAN0249E6_at; Start 27; Stop 51
gaaaattgtcgtgtgaacgataata

SEQ ID NO: 19074 - DNA, 25 bp, Artificial
  probe
  misc_feature (1)..(25): SEQ ID NO: 86; WAN0249E6_at; Start 31; Stop 55
attgtcgtgtgaacgataatactca

SEQ ID NO: 19075 - DNA, 25 bp, Artificial
  probe
  misc_feature (1)..(25): SEQ ID NO: 86; WAN0249E6_at; Start 25; Stop 49
atgaaaattgtcgtgtgaacgataa

SEQ ID NO: 19076 - DNA, 25 bp, Artificial
  probe
  misc_feature (1)..(25): SEQ ID NO: 86; WAN0249E6_at; Start 28; Stop 52
aaaattgtcgtgtgaacgataatac

SEQ ID NO: 19077 - DNA, 25 bp, Artificial
  probe
  misc_feature (1)..(25): SEQ ID NO: 86; WAN0249E6_at; Start 34; Stop 58
gtcgtgtgaacgataatactcattc

SEQ ID NO: 19078 - DNA, 25 bp, Artificial
  probe
  misc_feature (1)..(25): SEQ ID NO: 3565; WAN0249E7_at; Start 5; Stop 29
gagtattatcgttcacacgacaatt

SEQ ID NO: 19079 - DNA, 25 bp, Artificial
  probe
  misc_feature (1)..(25): SEQ ID NO: 3565; WAN0249E7_at; Start 2; Stop 26
aatgagtattatcgttcacacgaca

SEQ ID NO: 19080 - DNA, 25 bp, Artificial
  probe
  misc_feature (1)..(25): SEQ ID NO: 3565; WAN0249E7_at; Start 6; Stop 30
agtattatcgttcacacgacaattt

SEQ ID NO: 19081 - DNA, 25 bp, Artificial
  probe
  misc_feature (1)..(25): SEQ ID NO: 3565; WAN0249E7_at; Start 4; Stop 28
tgagtattatcgttcacacgacaat

SEQ ID NO: 19082 - DNA, 25 bp, Artificial
  probe
  misc_feature (1)..(25): SEQ ID NO: 3565; WAN0249E7_at; Start 11; Stop 35
tatcgttcacacgacaattttcatt

SEQ ID NO: 19083 - DNA, 25 bp, Artificial
  probe
  misc_feature (1)..(25): SEQ ID NO: 3565; WAN0249E7_at; Start 1; Stop 25
gaatgagtattatcgttcacacgac

SEQ ID NO: 19084 - DNA, 25 bp, Artificial
  probe
  misc_feature (1)..(25): SEQ ID NO: 3565; WAN0249E7_at; Start 8; Stop 32
tattatcgttcacacgacaattttc

SEQ ID NO: 19085 - DNA, 25 bp, Artificial
  probe
  misc_feature (1)..(25): SEQ ID NO: 3565; WAN0249E7_at; Start 10; Stop 34
ttatcgttcacacgacaattttcat

SEQ ID NO: 19086 - DNA, 25 bp, Artificial
  probe
  misc_feature (1)..(25): SEQ ID NO: 3565; WAN0249E7_at; Start 7; Stop 31
gtattatcgttcacacgacaatttt

SEQ ID NO: 19087 - DNA, 25 bp, Artificial
  probe
  misc_feature (1)..(25): SEQ ID NO: 3565; WAN0249E7_at; Start 9; Stop 33
attatcgttcacacgacaattttca

SEQ ID NO: 19088 - DNA, 25 bp, Artificial
  probe
  misc_feature (1)..(25): SEQ ID NO: 3565; WAN0249E7_at; Start 3; Stop 27
atgagtattatcgttcacacgacaa

SEQ ID NO: 19089 - DNA, 25 bp, Artificial
  probe
  misc_feature (1)..(25): SEQ ID NO: 4449; WAN0249E8_at; Start 130; Stop 154
ttaggagactatacttcaaattcat

SEQ ID NO: 19090 - DNA, 25 bp, Artificial
  probe
  misc_feature (1)..(25): SEQ ID NO: 4449; WAN0249E8_at; Start 111; Stop 135
taataagggctaagtgcatttagga

SEQ ID NO: 19091 - DNA, 25 bp, Artificial
  probe
  misc_feature (1)..(25): SEQ ID NO: 4449; WAN0249E8_at; Start 103; Stop 127
aagccctataataagggctaagtgc

SEQ ID NO: 19092 - DNA, 25 bp, Artificial
  probe
  misc_feature (1)..(25): SEQ ID NO: 4449; WAN0249E8_at; Start 118; Stop 142
ggctaagtgcatttaggagactata

SEQ ID NO: 19093 - DNA, 25 bp, Artificial
  probe
  misc_feature (1)..(25): SEQ ID NO: 4449; WAN0249E8_at; Start 69; Stop 93
cccagtctcactcgattagaataat

SEQ ID NO: 19094 - DNA, 25 bp, Artificial
  probe
  misc_feature (1)..(25): SEQ ID NO: 4449; WAN0249E8_at; Start 121; Stop 145
taagtgcatttaggagactatactt

SEQ ID NO: 19095 - DNA, 25 bp, Artificial
  probe
  misc_feature (1)..(25): SEQ ID NO: 4449; WAN0249E8_at; Start 109; Stop 133
tataataagggctaagtgcatttag

SEQ ID NO: 19096 - DNA, 25 bp, Artificial
  probe
  misc_feature (1)..(25): SEQ ID NO: 4449; WAN0249E8_at; Start 77; Stop 101
cactcgattagaataattaaaacaa

SEQ ID NO: 19097 - DNA, 25 bp, Artificial
  probe
  misc_feature (1)..(25): SEQ ID NO: 4449; WAN0249E8_at; Start 110; Stop 134
ataataagggctaagtgcatttagg

SEQ ID NO: 19098 - DNA, 25 bp, Artificial
  probe
  misc_feature (1)..(25): SEQ ID NO: 4449; WAN0249E8_at; Start 68; Stop 92
ccccagtctcactcgattagaataa

SEQ ID NO: 19099 - DNA, 25 bp, Artificial
  probe
  misc_feature (1)..(25): SEQ ID NO: 4449; WAN0249E8_at; Start 120; Stop 144
ctaagtgcatttaggagactatact

SEQ ID NO: 19100 - DNA, 25 bp, Artificial
  probe
  misc_feature (1)..(25): SEQ ID NO: 4449; WAN0249E8_at; Start 102; Stop 126
aaagccctataataagggctaagtg

SEQ ID NO: 19101 - DNA, 25 bp, Artificial
  probe
  misc_feature (1)..(25): SEQ ID NO: 4449; WAN0249E8_at; Start 125; Stop 149
tgcatttaggagactatacttcaaa

SEQ ID NO: 19102 - DNA, 25 bp, Artificial
  probe
  misc_feature (1)..(25): SEQ ID NO: 4449; WAN0249E8_at; Start 119; Stop 143
gctaagtgcatttaggagactatac

SEQ ID NO: 19103 - DNA, 25 bp, Artificial
  probe
  misc_feature (1)..(25): SEQ ID NO: 4449; WAN0249E8_at; Start 123; Stop 147
agtgcatttaggagactatacttca

SEQ ID NO: 19104 - DNA, 25 bp, Artificial
  probe
  misc_feature (1)..(25): SEQ ID NO: 4449; WAN0249E8_at; Start 105; Stop 129
gccctataataagggctaagtgcat

SEQ ID NO: 19105 - DNA, 25 bp, Artificial
  probe
  misc_feature (1)..(25): SEQ ID NO: 4449; WAN0249E8_at; Start 122; Stop 146
aagtgcatttaggagactatacttc

SEQ ID NO: 19106 - DNA, 25 bp, Artificial
  probe
  misc_feature (1)..(25): SEQ ID NO: 4449; WAN0249E8_at; Start 117; Stop 141
gggctaagtgcatttaggagactat

SEQ ID NO: 19107 - DNA, 25 bp, Artificial
  probe
  misc_feature (1)..(25): SEQ ID NO: 4449; WAN0249E8_at; Start 73; Stop 97
gtctcactcgattagaataattaaa

SEQ ID NO: 19108 - DNA, 25 bp, Artificial
  probe
  misc_feature (1)..(25): SEQ ID NO: 4449; WAN0249E8_at; Start 112; Stop 136
aataagggctaagtgcatttaggag

SEQ ID NO: 19109 - DNA, 25 bp, Artificial
  probe
  misc_feature (1)..(25): SEQ ID NO: 4449; WAN0249E8_at; Start 115; Stop 139
aagggctaagtgcatttaggagact

SEQ ID NO: 19110 - DNA, 25 bp, Artificial
  probe
  misc_feature (1)..(25): SEQ ID NO: 4449; WAN0249E8_at; Start 20; Stop 44
tgcttccttttttgtatagggctta

SEQ ID NO: 19111 - DNA, 25 bp, Artificial
  probe
  misc_feature (1)..(25): SEQ ID NO: 4449; WAN0249E8_at; Start 71; Stop 95
cagtctcactcgattagaataatta

SEQ ID NO: 19112 - DNA, 25 bp, Artificial
  probe
  misc_feature (1)..(25): SEQ ID NO: 4449; WAN0249E8_at; Start 72; Stop 96
agtctcactcgattagaataattaa

SEQ ID NO: 19113 - DNA, 25 bp, Artificial
  probe
  misc_feature (1)..(25): SEQ ID NO: 4449; WAN0249E8_at; Start 113; Stop 137
ataagggctaagtgcatttaggaga

SEQ ID NO: 19114 - DNA, 25 bp, Artificial
  probe
  misc_feature (1)..(25): SEQ ID NO: 4449; WAN0249E8_at; Start 75; Stop 99
ctcactcgattagaataattaaaac

SEQ ID NO: 19115 - DNA, 25 bp, Artificial
  probe
  misc_feature (1)..(25): SEQ ID NO: 4449; WAN0249E8_at; Start 127; Stop 151
catttaggagactatacttcaaatt

SEQ ID NO: 19116 - DNA, 25 bp, Artificial
  probe
  misc_feature (1)..(25): SEQ ID NO: 4449; WAN0249E8_at; Start 116; Stop 140
agggctaagtgcatttaggagacta

SEQ ID NO: 19117 - DNA, 25 bp, Artificial
  probe
  misc_feature (1)..(25): SEQ ID NO: 4449; WAN0249E8_at; Start 114; Stop 138
taagggctaagtgcatttaggagac

SEQ ID NO: 19118 - DNA, 25 bp, Artificial
  probe
  misc_feature (1)..(25): SEQ ID NO: 4449; WAN0249E8_at; Start 70; Stop 94
ccagtctcactcgattagaataatt

SEQ ID NO: 19119 - DNA, 25 bp, Artificial
  probe
  misc_feature (1)..(25): SEQ ID NO: 4449; WAN0249E8_at; Start 124; Stop 148
gtgcatttaggagactatacttcaa

SEQ ID NO: 19120 - DNA, 25 bp, Artificial
  probe
  misc_feature (1)..(25): SEQ ID NO: 4449; WAN0249E8_at; Start 104; Stop 128
agccctataataagggctaagtgca

SEQ ID NO: 19121 - DNA, 25 bp, Artificial
  probe
  misc_feature (1)..(25): SEQ ID NO: 4449; WAN0249E8_at; Start 126; Stop 150
gcatttaggagactatacttcaaat

SEQ ID NO: 19122 - DNA, 25 bp, Artificial
  probe
  misc_feature (1)..(25): SEQ ID NO: 4449; WAN0249E8_at; Start 129; Stop 153
tttaggagactatacttcaaattca

SEQ ID NO: 19123 - DNA, 25 bp, Artificial
  probe
  misc_feature (1)..(25): SEQ ID NO: 1283; WAN0249E9_at; Start 7; Stop 31
ttgaagtatagtctcctaaatgcac

SEQ ID NO: 19124 - DNA, 25 bp, Artificial
  probe
  misc_feature (1)..(25): SEQ ID NO: 1283; WAN0249E9_at; Start 59; Stop 83
ttaattattctaatcgagtgagact

SEQ ID NO: 19125 - DNA, 25 bp, Artificial
  probe
  misc_feature (1)..(25): SEQ ID NO: 1283; WAN0249E9_at; Start 23; Stop 47
taaatgcacttagcccttattatag

SEQ ID NO: 19126 - DNA, 25 bp, Artificial
  probe
  misc_feature (1)..(25): SEQ ID NO: 1283; WAN0249E9_at; Start 4; Stop 28
aatttgaagtatagtctcctaaatg

SEQ ID NO: 19127 - DNA, 25 bp, Artificial
  probe
  misc_feature (1)..(25): SEQ ID NO: 1283; WAN0249E9_at; Start 18; Stop 42
tctcctaaatgcacttagcccttat

SEQ ID NO: 19128 - DNA, 25 bp, Artificial
  probe
  misc_feature (1)..(25): SEQ ID NO: 1283; WAN0249E9_at; Start 21; Stop 45
cctaaatgcacttagcccttattat

SEQ ID NO: 19129 - DNA, 25 bp, Artificial
  probe
  misc_feature (1)..(25): SEQ ID NO: 1283; WAN0249E9_at; Start 13; Stop 37
tatagtctcctaaatgcacttagcc

SEQ ID NO: 19130 - DNA, 25 bp, Artificial
  probe
  misc_feature (1)..(25): SEQ ID NO: 1283; WAN0249E9_at; Start 29; Stop 53
cacttagcccttattatagggcttt

SEQ ID NO: 19131 - DNA, 25 bp, Artificial
  probe
  misc_feature (1)..(25): SEQ ID NO: 1283; WAN0249E9_at; Start 58; Stop 82
tttaattattctaatcgagtgagac

SEQ ID NO: 19132 - DNA, 25 bp, Artificial
  probe
  misc_feature (1)..(25): SEQ ID NO: 1283; WAN0249E9_at; Start 6; Stop 30
tttgaagtatagtctcctaaatgca

SEQ ID NO: 19133 - DNA, 25 bp, Artificial
  probe
  misc_feature (1)..(25): SEQ ID NO: 1283; WAN0249E9_at; Start 15; Stop 39
tagtctcctaaatgcacttagccct

SEQ ID NO: 19134 - DNA, 25 bp, Artificial
  probe
  misc_feature (1)..(25): SEQ ID NO: 1283; WAN0249E9_at; Start 63; Stop 87
ttattctaatcgagtgagactgggg

SEQ ID NO: 19135 - DNA, 25 bp, Artificial
  probe
  misc_feature (1)..(25): SEQ ID NO: 1283; WAN0249E9_at; Start 111; Stop 135
taagccctatacaaaaaaggaagca

SEQ ID NO: 19136 - DNA, 25 bp, Artificial
  probe
  misc_feature (1)..(25): SEQ ID NO: 1283; WAN0249E9_at; Start 9; Stop 33
gaagtatagtctcctaaatgcactt

SEQ ID NO: 19137 - DNA, 25 bp, Artificial
  probe
  misc_feature (1)..(25): SEQ ID NO: 1283; WAN0249E9_at; Start 17; Stop 41
gtctcctaaatgcacttagccctta

SEQ ID NO: 19138 - DNA, 25 bp, Artificial
  probe
  misc_feature (1)..(25): SEQ ID NO: 1283; WAN0249E9_at; Start 62; Stop 86
attattctaatcgagtgagactggg

SEQ ID NO: 19139 - DNA, 25 bp, Artificial
  probe
  misc_feature (1)..(25): SEQ ID NO: 1283; WAN0249E9_at; Start 12; Stop 36
gtatagtctcctaaatgcacttagc

SEQ ID NO: 19140 - DNA, 25 bp, Artificial
  probe
  misc_feature (1)..(25): SEQ ID NO: 1283; WAN0249E9_at; Start 16; Stop 40
agtctcctaaatgcacttagccctt

SEQ ID NO: 19141 - DNA, 25 bp, Artificial
  probe
  misc_feature (1)..(25): SEQ ID NO: 1283; WAN0249E9_at; Start 19; Stop 43
ctcctaaatgcacttagcccttatt

SEQ ID NO: 19142 - DNA, 25 bp, Artificial
  probe
  misc_feature (1)..(25): SEQ ID NO: 1283; WAN0249E9_at; Start 1; Stop 25
atgaatttgaagtatagtctcctaa

SEQ ID NO: 19143 - DNA, 25 bp, Artificial
  probe
  misc_feature (1)..(25): SEQ ID NO: 1283; WAN0249E9_at; Start 2; Stop 26
tgaatttgaagtatagtctcctaaa

SEQ ID NO: 19144 - DNA, 25 bp, Artificial
  probe
  misc_feature (1)..(25): SEQ ID NO: 1283; WAN0249E9_at; Start 14; Stop 38
atagtctcctaaatgcacttagccc

SEQ ID NO: 19145 - DNA, 25 bp, Artificial
  probe
  misc_feature (1)..(25): SEQ ID NO: 1283; WAN0249E9_at; Start 11; Stop 35
agtatagtctcctaaatgcacttag

SEQ ID NO: 19146 - DNA, 25 bp, Artificial
  probe
  misc_feature (1)..(25): SEQ ID NO: 1283; WAN0249E9_at; Start 5; Stop 29
atttgaagtatagtctcctaaatgc

SEQ ID NO: 19147 - DNA, 25 bp, Artificial
  probe
  misc_feature (1)..(25): SEQ ID NO: 1283; WAN0249E9_at; Start 10; Stop 34
aagtatagtctcctaaatgcactta

SEQ ID NO: 19148 - DNA, 25 bp, Artificial
  probe
  misc_feature (1)..(25): SEQ ID NO: 1283; WAN0249E9_at; Start 27; Stop 51
tgcacttagcccttattatagggct

SEQ ID NO: 19149 - DNA, 25 bp, Artificial
  probe
  misc_feature (1)..(25): SEQ ID NO: 1283; WAN0249E9_at; Start 26; Stop 50
atgcacttagcccttattatagggc

SEQ ID NO: 19150 - DNA, 25 bp, Artificial
  probe
  misc_feature (1)..(25): SEQ ID NO: 1283; WAN0249E9_at; Start 61; Stop 85
aattattctaatcgagtgagactgg

SEQ ID NO: 19151 - DNA, 25 bp, Artificial
  probe
  misc_feature (1)..(25): SEQ ID NO: 1283; WAN0249E9_at; Start 8; Stop 32
tgaagtatagtctcctaaatgcact

SEQ ID NO: 19152 - DNA, 25 bp, Artificial
  probe
  misc_feature (1)..(25): SEQ ID NO: 1283; WAN0249E9_at; Start 3; Stop 27
gaatttgaagtatagtctcctaaat

SEQ ID NO: 19153 - DNA, 25 bp, Artificial
  probe
  misc_feature (1)..(25): SEQ ID NO: 1283; WAN0249E9_at; Start 56; Stop 80
gttttaattattctaatcgagtgag

SEQ ID NO: 19154 - DNA, 25 bp, Artificial
  probe
  misc_feature (1)..(25): SEQ ID NO: 1283; WAN0249E9_at; Start 60; Stop 84
taattattctaatcgagtgagactg

SEQ ID NO: 19155 - DNA, 25 bp, Artificial
  probe
  misc_feature (1)..(25): SEQ ID NO: 1283; WAN0249E9_at; Start 28; Stop 52
gcacttagcccttattatagggctt

SEQ ID NO: 19156 - DNA, 25 bp, Artificial
  probe
  misc_feature (1)..(25): SEQ ID NO: 1283; WAN0249E9_at; Start 20; Stop 44
tcctaaatgcacttagcccttatta

SEQ ID NO: 19157 - DNA, 25 bp, Artificial
  probe
  misc_feature (1)..(25): SEQ ID NO: 3661; WAN0249EA_at; Start 102; Stop 126
agagtttaaacctccactccctcag

SEQ ID NO: 19158 - DNA, 25 bp, Artificial
  probe
  misc_feature (1)..(25): SEQ ID NO: 3661; WAN0249EA_at; Start 120; Stop 144
ccctcagtatttactgattcagtaa

SEQ ID NO: 19159 - DNA, 25 bp, Artificial
  probe
  misc_feature (1)..(25): SEQ ID NO: 3661; WAN0249EA_at; Start 96; Stop 120
aatgtcagagtttaaacctccactc

SEQ ID NO: 19160 - DNA, 25 bp, Artificial
  probe
  misc_feature (1)..(25): SEQ ID NO: 3661; WAN0249EA_at; Start 80; Stop 104
agatccaactcttacaaatgtcaga

SEQ ID NO: 19161 - DNA, 25 bp, Artificial
  probe
  misc_feature (1)..(25): SEQ ID NO: 3661; WAN0249EA_at; Start 83; Stop 107
tccaactcttacaaatgtcagagtt

SEQ ID NO: 19162 - DNA, 25 bp, Artificial
  probe
  misc_feature (1)..(25): SEQ ID NO: 3661; WAN0249EA_at; Start 79; Stop 103
gagatccaactcttacaaatgtcag

SEQ ID NO: 19163 - DNA, 25 bp, Artificial
  probe
  misc_feature (1)..(25): SEQ ID NO: 3661; WAN0249EA_at; Start 116; Stop 140
cactccctcagtatttactgattca

SEQ ID NO: 19164 - DNA, 25 bp, Artificial
  probe
  misc_feature (1)..(25): SEQ ID NO: 3661; WAN0249EA_at; Start 91; Stop 115
ttacaaatgtcagagtttaaacctc

SEQ ID NO: 19165 - DNA, 25 bp, Artificial
  probe
  misc_feature (1)..(25): SEQ ID NO: 3661; WAN0249EA_at; Start 85; Stop 109
caactcttacaaatgtcagagttta

SEQ ID NO: 19166 - DNA, 25 bp, Artificial
  probe
  misc_feature (1)..(25): SEQ ID NO: 3661; WAN0249EA_at; Start 113; Stop 137
ctccactccctcagtatttactgat

SEQ ID NO: 19167 - DNA, 25 bp, Artificial
  probe
  misc_feature (1)..(25): SEQ ID NO: 3661; WAN0249EA_at; Start 87; Stop 111
actcttacaaatgtcagagtttaaa

SEQ ID NO: 19168 - DNA, 25 bp, Artificial
  probe
  misc_feature (1)..(25): SEQ ID NO: 3661; WAN0249EA_at; Start 90; Stop 114
cttacaaatgtcagagtttaaacct

SEQ ID NO: 19169 - DNA, 25 bp, Artificial
  probe
  misc_feature (1)..(25): SEQ ID NO: 3661; WAN0249EA_at; Start 77; Stop 101
gggagatccaactcttacaaatgtc

SEQ ID NO: 19170 - DNA, 25 bp, Artificial
  probe
  misc_feature (1)..(25): SEQ ID NO: 3661; WAN0249EA_at; Start 92; Stop 116
tacaaatgtcagagtttaaacctcc

SEQ ID NO: 19171 - DNA, 25 bp, Artificial
  probe
  misc_feature (1)..(25): SEQ ID NO: 3661; WAN0249EA_at; Start 117; Stop 141
actccctcagtatttactgattcag

SEQ ID NO: 19172 - DNA, 25 bp, Artificial
  probe
  misc_feature (1)..(25): SEQ ID NO: 3661; WAN0249EA_at; Start 81; Stop 105
gatccaactcttacaaatgtcagag

SEQ ID NO: 19173 - DNA, 25 bp, Artificial
  probe
  misc_feature (1)..(25): SEQ ID NO: 3661; WAN0249EA_at; Start 94; Stop 118
caaatgtcagagtttaaacctccac

SEQ ID NO: 19174 - DNA, 25 bp, Artificial
  probe
  misc_feature (1)..(25): SEQ ID NO: 3661; WAN0249EA_at; Start 88; Stop 112
ctcttacaaatgtcagagtttaaac

SEQ ID NO: 19175 - DNA, 25 bp, Artificial
  probe
  misc_feature (1)..(25): SEQ ID NO: 3661; WAN0249EA_at; Start 108; Stop 132
taaacctccactccctcagtattta

SEQ ID NO: 19176 - DNA, 25 bp, Artificial
  probe
  misc_feature (1)..(25): SEQ ID NO: 3661; WAN0249EA_at; Start 95; Stop 119
aaatgtcagagtttaaacctccact

SEQ ID NO: 19177 - DNA, 25 bp, Artificial
  probe
  misc_feature (1)..(25): SEQ ID NO: 3661; WAN0249EA_at; Start 118; Stop 142
ctccctcagtatttactgattcagt

SEQ ID NO: 19178 - DNA, 25 bp, Artificial
  probe
  misc_feature (1)..(25): SEQ ID NO: 3661; WAN0249EA_at; Start 98; Stop 122
tgtcagagtttaaacctccactccc

SEQ ID NO: 19179 - DNA, 25 bp, Artificial
  probe
  misc_feature (1)..(25): SEQ ID NO: 3661; WAN0249EA_at; Start 86; Stop 110
aactcttacaaatgtcagagtttaa

SEQ ID NO: 19180 - DNA, 25 bp, Artificial
  probe
  misc_feature (1)..(25): SEQ ID NO: 3661; WAN0249EA_at; Start 84; Stop 108
ccaactcttacaaatgtcagagttt

SEQ ID NO: 19181 - DNA, 25 bp, Artificial
  probe
  misc_feature (1)..(25): SEQ ID NO: 3661; WAN0249EA_at; Start 78; Stop 102
ggagatccaactcttacaaatgtca

SEQ ID NO: 19182 - DNA, 25 bp, Artificial
  probe
  misc_feature (1)..(25): SEQ ID NO: 3661; WAN0249EA_at; Start 97; Stop 121
atgtcagagtttaaacctccactcc

SEQ ID NO: 19183 - DNA, 25 bp, Artificial
  probe
  misc_feature (1)..(25): SEQ ID NO: 3661; WAN0249EA_at; Start 93; Stop 117
acaaatgtcagagtttaaacctcca

SEQ ID NO: 19184 - DNA, 25 bp, Artificial
  probe
  misc_feature (1)..(25): SEQ ID NO: 3661; WAN0249EA_at; Start 119; Stop 143
tccctcagtatttactgattcagta

SEQ ID NO: 19185 - DNA, 25 bp, Artificial
  probe
  misc_feature (1)..(25): SEQ ID NO: 3661; WAN0249EA_at; Start 114; Stop 138
tccactccctcagtatttactgatt

SEQ ID NO: 19186 - DNA, 25 bp, Artificial
  probe
  misc_feature (1)..(25): SEQ ID NO: 3661; WAN0249EA_at; Start 89; Stop 113
tcttacaaatgtcagagtttaaacc

SEQ ID NO: 19187 - DNA, 25 bp, Artificial
  probe
  misc_feature (1)..(25): SEQ ID NO: 3661; WAN0249EA_at; Start 115; Stop 139
ccactccctcagtatttactgattc

SEQ ID NO: 19188 - DNA, 25 bp, Artificial
  probe
  misc_feature (1)..(25): SEQ ID NO: 3661; WAN0249EA_at; Start 64; Stop 88
caaaatagaagaggggagatccaac

SEQ ID NO: 19189 - DNA, 25 bp, Artificial
  probe
  misc_feature (1)..(25): SEQ ID NO: 3661; WAN0249EA_at; Start 82; Stop 106
atccaactcttacaaatgtcagagt

SEQ ID NO: 19190 - DNA, 25 bp, Artificial
  probe
  misc_feature (1)..(25): SEQ ID NO: 3661; WAN0249EA_at; Start 62; Stop 86
aacaaaatagaagaggggagatcca

SEQ ID NO: 19191 - DNA, 25 bp, Artificial
  probe
  misc_feature (1)..(25): SEQ ID NO: 245; WAN0249EB_at; Start 42; Stop 66
taaactctgacatttgtaagagttg

SEQ ID NO: 19192 - DNA, 25 bp, Artificial
  probe
  misc_feature (1)..(25): SEQ ID NO: 245; WAN0249EB_at; Start 46; Stop 70
ctctgacatttgtaagagttggatc

SEQ ID NO: 19193 - DNA, 25 bp, Artificial
  probe
  misc_feature (1)..(25): SEQ ID NO: 245; WAN0249EB_at; Start 29; Stop 53
gggagtggaggtttaaactctgaca

SEQ ID NO: 19194 - DNA, 25 bp, Artificial
  probe
  misc_feature (1)..(25): SEQ ID NO: 245; WAN0249EB_at; Start 49; Stop 73
tgacatttgtaagagttggatctcc

SEQ ID NO: 19195 - DNA, 25 bp, Artificial
  probe
  misc_feature (1)..(25): SEQ ID NO: 245; WAN0249EB_at; Start 39; Stop 63
gtttaaactctgacatttgtaagag

SEQ ID NO: 19196 - DNA, 25 bp, Artificial
  probe
  misc_feature (1)..(25): SEQ ID NO: 245; WAN0249EB_at; Start 33; Stop 57
gtggaggtttaaactctgacatttg

SEQ ID NO: 19197 - DNA, 25 bp, Artificial
  probe
  misc_feature (1)..(25): SEQ ID NO: 245; WAN0249EB_at; Start 38; Stop 62
ggtttaaactctgacatttgtaaga

SEQ ID NO: 19198 - DNA, 25 bp, Artificial
  probe
  misc_feature (1)..(25): SEQ ID NO: 245; WAN0249EB_at; Start 59; Stop 83
aagagttggatctcccctcttctat

SEQ ID NO: 19199 - DNA, 25 bp, Artificial
  probe
  misc_feature (1)..(25): SEQ ID NO: 245; WAN0249EB_at; Start 31; Stop 55
gagtggaggtttaaactctgacatt

SEQ ID NO: 19200 - DNA, 25 bp, Artificial
  probe
  misc_feature (1)..(25): SEQ ID NO: 245; WAN0249EB_at; Start 8; Stop 32
tactgaatcagtaaatactgaggga

SEQ ID NO: 19201 - DNA, 25 bp, Artificial
  probe
  misc_feature (1)..(25): SEQ ID NO: 245; WAN0249EB_at; Start 52; Stop 76
catttgtaagagttggatctcccct

SEQ ID NO: 19202 - DNA, 25 bp, Artificial
  probe
  misc_feature (1)..(25): SEQ ID NO: 245; WAN0249EB_at; Start 7; Stop 31
ttactgaatcagtaaatactgaggg

SEQ ID NO: 19203 - DNA, 25 bp, Artificial
  probe
  misc_feature (1)..(25): SEQ ID NO: 245; WAN0249EB_at; Start 57; Stop 81
gtaagagttggatctcccctcttct

SEQ ID NO: 19204 - DNA, 25 bp, Artificial
  probe
  misc_feature (1)..(25): SEQ ID NO: 245; WAN0249EB_at; Start 47; Stop 71
tctgacatttgtaagagttggatct

SEQ ID NO: 19205 - DNA, 25 bp, Artificial
  probe
  misc_feature (1)..(25): SEQ ID NO: 245; WAN0249EB_at; Start 35; Stop 59
ggaggtttaaactctgacatttgta

SEQ ID NO: 19206 - DNA, 25 bp, Artificial
  probe
  misc_feature (1)..(25): SEQ ID NO: 245; WAN0249EB_at; Start 51; Stop 75
acatttgtaagagttggatctcccc

SEQ ID NO: 19207 - DNA, 25 bp, Artificial
  probe
  misc_feature (1)..(25): SEQ ID NO: 245; WAN0249EB_at; Start 25; Stop 49
ctgagggagtggaggtttaaactct

SEQ ID NO: 19208 - DNA, 25 bp, Artificial
  probe
  misc_feature (1)..(25): SEQ ID NO: 245; WAN0249EB_at; Start 50; Stop 74
gacatttgtaagagttggatctccc

SEQ ID NO: 19209 - DNA, 25 bp, Artificial
  probe
  misc_feature (1)..(25): SEQ ID NO: 245; WAN0249EB_at; Start 53; Stop 77
atttgtaagagttggatctcccctc

SEQ ID NO: 19210 - DNA, 25 bp, Artificial
  probe
  misc_feature (1)..(25): SEQ ID NO: 245; WAN0249EB_at; Start 36; Stop 60
gaggtttaaactctgacatttgtaa

SEQ ID NO: 19211 - DNA, 25 bp, Artificial
  probe
  misc_feature (1)..(25): SEQ ID NO: 245; WAN0249EB_at; Start 12; Stop 36
gaatcagtaaatactgagggagtgg

SEQ ID NO: 19212 - DNA, 25 bp, Artificial
  probe
  misc_feature (1)..(25): SEQ ID NO: 245; WAN0249EB_at; Start 55; Stop 79
ttgtaagagttggatctcccctctt

SEQ ID NO: 19213 - DNA, 25 bp, Artificial
  probe
  misc_feature (1)..(25): SEQ ID NO: 245; WAN0249EB_at; Start 54; Stop 78
tttgtaagagttggatctcccctct

SEQ ID NO: 19214 - DNA, 25 bp, Artificial
  probe
  misc_feature (1)..(25): SEQ ID NO: 245; WAN0249EB_at; Start 56; Stop 80
tgtaagagttggatctcccctcttc

SEQ ID NO: 19215 - DNA, 25 bp, Artificial
  probe
  misc_feature (1)..(25): SEQ ID NO: 245; WAN0249EB_at; Start 60; Stop 84
agagttggatctcccctcttctatt

SEQ ID NO: 19216 - DNA, 25 bp, Artificial
  probe
  misc_feature (1)..(25): SEQ ID NO: 245; WAN0249EB_at; Start 30; Stop 54
ggagtggaggtttaaactctgacat

SEQ ID NO: 19217 - DNA, 25 bp, Artificial
  probe
  misc_feature (1)..(25): SEQ ID NO: 245; WAN0249EB_at; Start 10; Stop 34
ctgaatcagtaaatactgagggagt

SEQ ID NO: 19218 - DNA, 25 bp, Artificial
  probe
  misc_feature (1)..(25): SEQ ID NO: 245; WAN0249EB_at; Start 37; Stop 61
aggtttaaactctgacatttgtaag

SEQ ID NO: 19219 - DNA, 25 bp, Artificial
  probe
  misc_feature (1)..(25): SEQ ID NO: 245; WAN0249EB_at; Start 65; Stop 89
tggatctcccctcttctattttgtt

SEQ ID NO: 19220 - DNA, 25 bp, Artificial
  probe
  misc_feature (1)..(25): SEQ ID NO: 245; WAN0249EB_at; Start 48; Stop 72
ctgacatttgtaagagttggatctc

SEQ ID NO: 19221 - DNA, 25 bp, Artificial
  probe
  misc_feature (1)..(25): SEQ ID NO: 245; WAN0249EB_at; Start 14; Stop 38
atcagtaaatactgagggagtggag

SEQ ID NO: 19222 - DNA, 25 bp, Artificial
  probe
  misc_feature (1)..(25): SEQ ID NO: 245; WAN0249EB_at; Start 19; Stop 43
taaatactgagggagtggaggttta

SEQ ID NO: 19223 - DNA, 25 bp, Artificial
  probe
  misc_feature (1)..(25): SEQ ID NO: 245; WAN0249EB_at; Start 63; Stop 87
gttggatctcccctcttctattttg

SEQ ID NO: 19224 - DNA, 25 bp, Artificial
  probe
  misc_feature (1)..(25): SEQ ID NO: 245; WAN0249EB_at; Start 58; Stop 82
taagagttggatctcccctcttcta

SEQ ID NO: 19225 - DNA, 25 bp, Artificial
  probe
  misc_feature (1)..(25): SEQ ID NO: 4745; WAN0249EC_at; Start 8; Stop 32
atgatttagaaaaattactagctat

SEQ ID NO: 19226 - DNA, 25 bp, Artificial
  probe
  misc_feature (1)..(25): SEQ ID NO: 4745; WAN0249EC_at; Start 14; Stop 38
tagaaaaattactagctatttacta

SEQ ID NO: 19227 - DNA, 25 bp, Artificial
  probe
  misc_feature (1)..(25): SEQ ID NO: 4745; WAN0249EC_at; Start 32; Stop 56
tttactatcatctttccataaaaga

SEQ ID NO: 19228 - DNA, 25 bp, Artificial
  probe
  misc_feature (1)..(25): SEQ ID NO: 4745; WAN0249EC_at; Start 37; Stop 61
tatcatctttccataaaagagtaaa

SEQ ID NO: 19229 - DNA, 25 bp, Artificial
  probe
  misc_feature (1)..(25): SEQ ID NO: 4745; WAN0249EC_at; Start 15; Stop 39
agaaaaattactagctatttactat

SEQ ID NO: 19230 - DNA, 25 bp, Artificial
  probe
  misc_feature (1)..(25): SEQ ID NO: 4745; WAN0249EC_at; Start 39; Stop 63
tcatctttccataaaagagtaaatt

SEQ ID NO: 19231 - DNA, 25 bp, Artificial
  probe
  misc_feature (1)..(25): SEQ ID NO: 4745; WAN0249EC_at; Start 41; Stop 65
atctttccataaaagagtaaattag

SEQ ID NO: 19232 - DNA, 25 bp, Artificial
  probe
  misc_feature (1)..(25): SEQ ID NO: 4745; WAN0249EC_at; Start 35; Stop 59
actatcatctttccataaaagagta

SEQ ID NO: 19233 - DNA, 25 bp, Artificial
  probe
  misc_feature (1)..(25): SEQ ID NO: 4745; WAN0249EC_at; Start 31; Stop 55
atttactatcatctttccataaaag

SEQ ID NO: 19234 - DNA, 25 bp, Artificial
  probe
  misc_feature (1)..(25): SEQ ID NO: 4745; WAN0249EC_at; Start 40; Stop 64
catctttccataaaagagtaaatta

SEQ ID NO: 19235 - DNA, 25 bp, Artificial
  probe
  misc_feature (1)..(25): SEQ ID NO: 4745; WAN0249EC_at; Start 16; Stop 40
gaaaaattactagctatttactatc

SEQ ID NO: 19236 - DNA, 25 bp, Artificial
  probe
  misc_feature (1)..(25): SEQ ID NO: 4745; WAN0249EC_at; Start 29; Stop 53
ctatttactatcatctttccataaa

SEQ ID NO: 19237 - DNA, 25 bp, Artificial
  probe
  misc_feature (1)..(25): SEQ ID NO: 4745; WAN0249EC_at; Start 30; Stop 54
tatttactatcatctttccataaaa

SEQ ID NO: 19238 - DNA, 25 bp, Artificial
  probe
  misc_feature (1)..(25): SEQ ID NO: 4745; WAN0249EC_at; Start 9; Stop 33
tgatttagaaaaattactagctatt

SEQ ID NO: 19239 - DNA, 25 bp, Artificial
  probe
  misc_feature (1)..(25): SEQ ID NO: 4745; WAN0249EC_at; Start 18; Stop 42
aaaattactagctatttactatcat

SEQ ID NO: 19240 - DNA, 25 bp, Artificial
  probe
  misc_feature (1)..(25): SEQ ID NO: 4745; WAN0249EC_at; Start 33; Stop 57
ttactatcatctttccataaaagag

SEQ ID NO: 19241 - DNA, 25 bp, Artificial
  probe
  misc_feature (1)..(25): SEQ ID NO: 4745; WAN0249EC_at; Start 34; Stop 58
tactatcatctttccataaaagagt

SEQ ID NO: 19242 - DNA, 25 bp, Artificial
  probe
  misc_feature (1)..(25): SEQ ID NO: 4745; WAN0249EC_at; Start 36; Stop 60
ctatcatctttccataaaagagtaa

SEQ ID NO: 19243 - DNA, 25 bp, Artificial
  probe
  misc_feature (1)..(25): SEQ ID NO: 4745; WAN0249EC_at; Start 17; Stop 41
aaaaattactagctatttactatca

SEQ ID NO: 19244 - DNA, 25 bp, Artificial
  probe
  misc_feature (1)..(25): SEQ ID NO: 4745; WAN0249EC_at; Start 38; Stop 62
atcatctttccataaaagagtaaat

SEQ ID NO: 19245 - DNA, 25 bp, Artificial
  probe
  misc_feature (1)..(25): SEQ ID NO: 3760; WAN0249ED_at; Start 26; Stop 50
aatttactcttttatggaaagatga

SEQ ID NO: 19246 - DNA, 25 bp, Artificial
  probe
  misc_feature (1)..(25): SEQ ID NO: 3760; WAN0249ED_at; Start 32; Stop 56
ctcttttatggaaagatgatagtaa

SEQ ID NO: 19247 - DNA, 25 bp, Artificial
  probe
  misc_feature (1)..(25): SEQ ID NO: 3760; WAN0249ED_at; Start 30; Stop 54
tactcttttatggaaagatgatagt

SEQ ID NO: 19248 - DNA, 25 bp, Artificial
  probe
  misc_feature (1)..(25): SEQ ID NO: 3760; WAN0249ED_at; Start 47; Stop 71
atgatagtaaatagctagtaatttt

SEQ ID NO: 19249 - DNA, 25 bp, Artificial
  probe
  misc_feature (1)..(25): SEQ ID NO: 3760; WAN0249ED_at; Start 44; Stop 68
aagatgatagtaaatagctagtaat

SEQ ID NO: 19250 - DNA, 25 bp, Artificial
  probe
  misc_feature (1)..(25): SEQ ID NO: 3760; WAN0249ED_at; Start 27; Stop 51
atttactcttttatggaaagatgat

SEQ ID NO: 19251 - DNA, 25 bp, Artificial
  probe
  misc_feature (1)..(25): SEQ ID NO: 3760; WAN0249ED_at; Start 46; Stop 70
gatgatagtaaatagctagtaattt

SEQ ID NO: 19252 - DNA, 25 bp, Artificial
  probe
  misc_feature (1)..(25): SEQ ID NO: 3760; WAN0249ED_at; Start 33; Stop 57
tcttttatggaaagatgatagtaaa

SEQ ID NO: 19253 - DNA, 25 bp, Artificial
  probe
  misc_feature (1)..(25): SEQ ID NO: 3760; WAN0249ED_at; Start 31; Stop 55
actcttttatggaaagatgatagta

SEQ ID NO: 19254 - DNA, 25 bp, Artificial
  probe
  misc_feature (1)..(25): SEQ ID NO: 3760; WAN0249ED_at; Start 24; Stop 48
ctaatttactcttttatggaaagat

SEQ ID NO: 19255 - DNA, 25 bp, Artificial
  probe
  misc_feature (1)..(25): SEQ ID NO: 3760; WAN0249ED_at; Start 29; Stop 53
ttactcttttatggaaagatgatag

SEQ ID NO: 19256 - DNA, 25 bp, Artificial
  probe
  misc_feature (1)..(25): SEQ ID NO: 3760; WAN0249ED_at; Start 45; Stop 69
agatgatagtaaatagctagtaatt

SEQ ID NO: 19257 - DNA, 25 bp, Artificial
  probe
  misc_feature (1)..(25): SEQ ID NO: 3760; WAN0249ED_at; Start 59; Stop 83
agctagtaatttttctaaatcattt

SEQ ID NO: 19258 - DNA, 25 bp, Artificial
  probe
  misc_feature (1)..(25): SEQ ID NO: 3760; WAN0249ED_at; Start 25; Stop 49
taatttactcttttatggaaagatg

SEQ ID NO: 19259 - DNA, 25 bp, Artificial
  probe
  misc_feature (1)..(25): SEQ ID NO: 3760; WAN0249ED_at; Start 58; Stop 82
tagctagtaatttttctaaatcatt

SEQ ID NO: 19260 - DNA, 25 bp, Artificial
  probe
  misc_feature (1)..(25): SEQ ID NO: 3760; WAN0249ED_at; Start 28; Stop 52
tttactcttttatggaaagatgata

SEQ ID NO: 19261 - DNA, 25 bp, Artificial
  probe
  misc_feature (1)..(25): SEQ ID NO: 6487; WAN0249EE_at; Start 41; Stop 65
atccataccatttgtaaaatataga

SEQ ID NO: 19262 - DNA, 25 bp, Artificial
  probe
  misc_feature (1)..(25): SEQ ID NO: 6487; WAN0249EE_at; Start 48; Stop 72
ccatttgtaaaatatagaaatccta

SEQ ID NO: 19263 - DNA, 25 bp, Artificial
  probe
  misc_feature (1)..(25): SEQ ID NO: 6487; WAN0249EE_at; Start 39; Stop 63
ctatccataccatttgtaaaatata

SEQ ID NO: 19264 - DNA, 25 bp, Artificial
  probe
  misc_feature (1)..(25): SEQ ID NO: 6487; WAN0249EE_at; Start 45; Stop 69
ataccatttgtaaaatatagaaatc

SEQ ID NO: 19265 - DNA, 25 bp, Artificial
  probe
  misc_feature (1)..(25): SEQ ID NO: 6487; WAN0249EE_at; Start 43; Stop 67
ccataccatttgtaaaatatagaaa

SEQ ID NO: 19266 - DNA, 25 bp, Artificial
  probe
  misc_feature (1)..(25): SEQ ID NO: 6487; WAN0249EE_at; Start 65; Stop 89
aaatcctatcgaagcgataggattt

SEQ ID NO: 19267 - DNA, 25 bp, Artificial
  probe
  misc_feature (1)..(25): SEQ ID NO: 6487; WAN0249EE_at; Start 40; Stop 64
tatccataccatttgtaaaatatag

SEQ ID NO: 19268 - DNA, 25 bp, Artificial
  probe
  misc_feature (1)..(25): SEQ ID NO: 6487; WAN0249EE_at; Start 44; Stop 68
cataccatttgtaaaatatagaaat

SEQ ID NO: 19269 - DNA, 25 bp, Artificial
  probe
  misc_feature (1)..(25): SEQ ID NO: 6487; WAN0249EE_at; Start 47; Stop 71
accatttgtaaaatatagaaatcct

SEQ ID NO: 19270 - DNA, 25 bp, Artificial
  probe
  misc_feature (1)..(25): SEQ ID NO: 6487; WAN0249EE_at; Start 69; Stop 93
cctatcgaagcgataggatttctat

SEQ ID NO: 19271 - DNA, 25 bp, Artificial
  probe
  misc_feature (1)..(25): SEQ ID NO: 6487; WAN0249EE_at; Start 61; Stop 85
atagaaatcctatcgaagcgatagg

SEQ ID NO: 19272 - DNA, 25 bp, Artificial
  probe
  misc_feature (1)..(25): SEQ ID NO: 6487; WAN0249EE_at; Start 49; Stop 73
catttgtaaaatatagaaatcctat

SEQ ID NO: 19273 - DNA, 25 bp, Artificial
  probe
  misc_feature (1)..(25): SEQ ID NO: 6487; WAN0249EE_at; Start 42; Stop 66
tccataccatttgtaaaatatagaa

SEQ ID NO: 19274 - DNA, 25 bp, Artificial
  probe
  misc_feature (1)..(25): SEQ ID NO: 6487; WAN0249EE_at; Start 46; Stop 70
taccatttgtaaaatatagaaatcc

SEQ ID NO: 19275 - DNA, 25 bp, Artificial
  probe
  misc_feature (1)..(25): SEQ ID NO: 6486; WAN0249EF_s_at; Start 199; Stop 223
tcgctaaagtagttgtgagaatgtc

SEQ ID NO: 19276 - DNA, 25 bp, Artificial
  probe
  misc_feature (1)..(25): SEQ ID NO: 6486; WAN0249EF_s_at; Start 137; Stop 161
tcaggtttcgtttgaattgcttcat

SEQ ID NO: 19277 - DNA, 25 bp, Artificial
  probe
  misc_feature (1)..(25): SEQ ID NO: 6486; WAN0249EF_s_at; Start 211; Stop 235
ttgtgagaatgtcaacgaaacgctg

SEQ ID NO: 19278 - DNA, 25 bp, Artificial
  probe
  misc_feature (1)..(25): SEQ ID NO: 6486; WAN0249EF_s_at; Start 29; Stop 53
tagtataacgctatccataccattt

SEQ ID NO: 19279 - DNA, 25 bp, Artificial
  probe
  misc_feature (1)..(25): SEQ ID NO: 6486; WAN0249EF_s_at; Start 194; Stop 218
tttgctcgctaaagtagttgtgaga

SEQ ID NO: 19280 - DNA, 25 bp, Artificial
  probe
  misc_feature (1)..(25): SEQ ID NO: 6486; WAN0249EF_s_at; Start 159; Stop 183
cattttctagtatattttggtacgc

SEQ ID NO: 19281 - DNA, 25 bp, Artificial
  probe
  misc_feature (1)..(25): SEQ ID NO: 6486; WAN0249EF_s_at; Start 135; Stop 159
tatcaggtttcgtttgaattgcttc

SEQ ID NO: 19282 - DNA, 25 bp, Artificial
  probe
  misc_feature (1)..(25): SEQ ID NO: 6486; WAN0249EF_s_at; Start 200; Stop 224
cgctaaagtagttgtgagaatgtca

SEQ ID NO: 19283 - DNA, 25 bp, Artificial
  probe
  misc_feature (1)..(25): SEQ ID NO: 6486; WAN0249EF_s_at; Start 2; Stop 26
tgaatacctctttgtataagatatc

SEQ ID NO: 19284 - DNA, 25 bp, Artificial
  probe
  misc_feature (1)..(25): SEQ ID NO: 6486; WAN0249EF_s_at; Start 212; Stop 236
tgtgagaatgtcaacgaaacgctgt

SEQ ID NO: 19285 - DNA, 25 bp, Artificial
  probe
  misc_feature (1)..(25): SEQ ID NO: 6486; WAN0249EF_s_at; Start 103; Stop 127
taattctagtaaataggtgtgaagg

SEQ ID NO: 19286 - DNA, 25 bp, Artificial
  probe
  misc_feature (1)..(25): SEQ ID NO: 6486; WAN0249EF_s_at; Start 191; Stop 215
tattttgctcgctaaagtagttgtg

SEQ ID NO: 19287 - DNA, 25 bp, Artificial
  probe
  misc_feature (1)..(25): SEQ ID NO: 6486; WAN0249EF_s_at; Start 16; Stop 40
tataagatatctttagtataacgct

SEQ ID NO: 19288 - DNA, 25 bp, Artificial
  probe
  misc_feature (1)..(25): SEQ ID NO: 6486; WAN0249EF_s_at; Start 122; Stop 146
tgaaggaaaacgatatcaggtttcg

SEQ ID NO: 19289 - DNA, 25 bp, Artificial
  probe
  misc_feature (1)..(25): SEQ ID NO: 6486; WAN0249EF_s_at; Start 107; Stop 131
tctagtaaataggtgtgaaggaaaa

SEQ ID NO: 19290 - DNA, 25 bp, Artificial
  probe
  misc_feature (1)..(25): SEQ ID NO: 6486; WAN0249EF_s_at; Start 66; Stop 90
gatcaaagtcattaattttcaagtg

SEQ ID NO: 19291 - DNA, 25 bp, Artificial
  probe
  misc_feature (1)..(25): SEQ ID NO: 6486; WAN0249EF_s_at; Start 112; Stop 136
taaataggtgtgaaggaaaacgata

SEQ ID NO: 19292 - DNA, 25 bp, Artificial
  probe
  misc_feature (1)..(25): SEQ ID NO: 6486; WAN0249EF_s_at; Start 144; Stop 168
tcgtttgaattgcttcattttctag

SEQ ID NO: 19293 - DNA, 25 bp, Artificial
  probe
  misc_feature (1)..(25): SEQ ID NO: 6486; WAN0249EF_s_at; Start 25; Stop 49
tctttagtataacgctatccatacc

SEQ ID NO: 19294 - DNA, 25 bp, Artificial
  probe
  misc_feature (1)..(25): SEQ ID NO: 6486; WAN0249EF_s_at; Start 186; Stop 210
ctttttattttgctcgctaaagtag

SEQ ID NO: 19295 - DNA, 25 bp, Artificial
  probe
  misc_feature (1)..(25): SEQ ID NO: 6486; WAN0249EF_s_at; Start 54; Stop 78
ctatatatcatagatcaaagtcatt

SEQ ID NO: 19296 - DNA, 25 bp, Artificial
  probe
  misc_feature (1)..(25): SEQ ID NO: 6486; WAN0249EF_s_at; Start 21; Stop 45
gatatctttagtataacgctatcca

SEQ ID NO: 19297 - DNA, 25 bp, Artificial
  probe
  misc_feature (1)..(25): SEQ ID NO: 6486; WAN0249EF_s_at; Start 224; Stop 248
aacgaaacgctgtattattcattgt

SEQ ID NO: 19298 - DNA, 25 bp, Artificial
  probe
  misc_feature (1)..(25): SEQ ID NO: 6486; WAN0249EF_s_at; Start 116; Stop 140
taggtgtgaaggaaaacgatatcag

SEQ ID NO: 19299 - DNA, 25 bp, Artificial
  probe
  misc_feature (1)..(25): SEQ ID NO: 6486; WAN0249EF_s_at; Start 77; Stop 101
ttaattttcaagtgattgcgttcag

SEQ ID NO: 19300 - DNA, 25 bp, Artificial
  probe
  misc_feature (1)..(25): SEQ ID NO: 6486; WAN0249EF_s_at; Start 217; Stop 241
gaatgtcaacgaaacgctgtattat

SEQ ID NO: 19301 - DNA, 25 bp, Artificial
  probe
  misc_feature (1)..(25): SEQ ID NO: 6486; WAN0249EF_s_at; Start 7; Stop 31
acctctttgtataagatatctttag

SEQ ID NO: 19302 - DNA, 25 bp, Artificial
  probe
  misc_feature (1)..(25): SEQ ID NO: 6486; WAN0249EF_s_at; Start 221; Stop 245
gtcaacgaaacgctgtattattcat

SEQ ID NO: 19303 - DNA, 25 bp, Artificial
  probe
  misc_feature (1)..(25): SEQ ID NO: 6486; WAN0249EF_s_at; Start 132; Stop 156
cgatatcaggtttcgtttgaattgc

SEQ ID NO: 19304 - DNA, 25 bp, Artificial
  probe
  misc_feature (1)..(25): SEQ ID NO: 6486; WAN0249EF_s_at; Start 118; Stop 142
ggtgtgaaggaaaacgatatcaggt

SEQ ID NO: 19305 - DNA, 25 bp, Artificial
  probe
  misc_feature (1)..(25): SEQ ID NO: 6486; WAN0249EF_s_at; Start 215; Stop 239
gagaatgtcaacgaaacgctgtatt

SEQ ID NO: 19306 - DNA, 25 bp, Artificial
  probe
  misc_feature (1)..(25): SEQ ID NO: 6486; WAN0249EF_s_at; Start 75; Stop 99
cattaattttcaagtgattgcgttc

SEQ ID NO: 19307 - DNA, 25 bp, Artificial
  probe
  misc_feature (1)..(25): SEQ ID NO: 6486; WAN0249EF_s_at; Start 214; Stop 238
tgagaatgtcaacgaaacgctgtat

SEQ ID NO: 19308 - DNA, 25 bp, Artificial
  probe
  misc_feature (1)..(25): SEQ ID NO: 6486; WAN0249EF_s_at; Start 203; Stop 227
taaagtagttgtgagaatgtcaacg

SEQ ID NO: 19309 - DNA, 25 bp, Artificial
  probe
  misc_feature (1)..(25): SEQ ID NO: 6273; WAN0249EG_at; Start 222; Stop 246
tatattttacaaatggtatggatag

SEQ ID NO: 19310 - DNA, 25 bp, Artificial
  probe
  misc_feature (1)..(25): SEQ ID NO: 6273; WAN0249EG_at; Start 214; Stop 238
aggatttctatattttacaaatggt

SEQ ID NO: 19311 - DNA, 25 bp, Artificial
  probe
  misc_feature (1)..(25): SEQ ID NO: 6273; WAN0249EG_at; Start 220; Stop 244
tctatattttacaaatggtatggat

SEQ ID NO: 19312 - DNA, 25 bp, Artificial
  probe
  misc_feature (1)..(25): SEQ ID NO: 6273; WAN0249EG_at; Start 215; Stop 239
ggatttctatattttacaaatggta

SEQ ID NO: 19313 - DNA, 25 bp, Artificial
  probe
  misc_feature (1)..(25): SEQ ID NO: 6273; WAN0249EG_at; Start 219; Stop 243
ttctatattttacaaatggtatgga

SEQ ID NO: 19314 - DNA, 25 bp, Artificial
  probe
  misc_feature (1)..(25): SEQ ID NO: 6273; WAN0249EG_at; Start 218; Stop 242
tttctatattttacaaatggtatgg

SEQ ID NO: 19315 - DNA, 25 bp, Artificial
  probe
  misc_feature (1)..(25): SEQ ID NO: 6273; WAN0249EG_at; Start 196; Stop 220
aaatcctatcgcttcgataggattt

SEQ ID NO: 19316 - DNA, 25 bp, Artificial
  probe
  misc_feature (1)..(25): SEQ ID NO: 6273; WAN0249EG_at; Start 200; Stop 224
cctatcgcttcgataggatttctat

SEQ ID NO: 19317 - DNA, 25 bp, Artificial
  probe
  misc_feature (1)..(25): SEQ ID NO: 6273; WAN0249EG_at; Start 217; Stop 241
atttctatattttacaaatggtatg

SEQ ID NO: 19318 - DNA, 25 bp, Artificial
  probe
  misc_feature (1)..(25): SEQ ID NO: 6273; WAN0249EG_at; Start 192; Stop 216
atagaaatcctatcgcttcgatagg

SEQ ID NO: 19319 - DNA, 25 bp, Artificial
  probe
  misc_feature (1)..(25): SEQ ID NO: 6273; WAN0249EG_at; Start 212; Stop 236
ataggatttctatattttacaaatg

SEQ ID NO: 19320 - DNA, 25 bp, Artificial
  probe
  misc_feature (1)..(25): SEQ ID NO: 6273; WAN0249EG_at; Start 213; Stop 237
taggatttctatattttacaaatgg

SEQ ID NO: 19321 - DNA, 25 bp, Artificial
  probe
  misc_feature (1)..(25): SEQ ID NO: 6273; WAN0249EG_at; Start 221; Stop 245
ctatattttacaaatggtatggata

SEQ ID NO: 19322 - DNA, 25 bp, Artificial
  probe
  misc_feature (1)..(25): SEQ ID NO: 6273; WAN0249EG_at; Start 216; Stop 240
gatttctatattttacaaatggtat

SEQ ID NO: 19323 - DNA, 25 bp, Artificial
  probe
  misc_feature (1)..(25): SEQ ID NO: 6272; WAN0249EH_s_at; Start 2; Stop 26
caatgaataatacagcgtttcgttg

SEQ ID NO: 19324 - DNA, 25 bp, Artificial
  probe
  misc_feature (1)..(25): SEQ ID NO: 6272; WAN0249EH_s_at; Start 164; Stop 188
gaaaattaatgactttgatctatga

SEQ ID NO: 19325 - DNA, 25 bp, Artificial
  probe
  misc_feature (1)..(25): SEQ ID NO: 6272; WAN0249EH_s_at; Start 111; Stop 135
gatatcgttttccttcacacctatt

SEQ ID NO: 19326 - DNA, 25 bp, Artificial
  probe
  misc_feature (1)..(25): SEQ ID NO: 6272; WAN0249EH_s_at; Start 71; Stop 95
ccaaaatatactagaaaatgaagca

SEQ ID NO: 19327 - DNA, 25 bp, Artificial
  probe
  misc_feature (1)..(25): SEQ ID NO: 6272; WAN0249EH_s_at; Start 171; Stop 195
aatgactttgatctatgatatatag

SEQ ID NO: 19328 - DNA, 25 bp, Artificial
  probe
  misc_feature (1)..(25): SEQ ID NO: 6272; WAN0249EH_s_at; Start 16; Stop 40
gcgtttcgttgacattctcacaact

SEQ ID NO: 19329 - DNA, 25 bp, Artificial
  probe
  misc_feature (1)..(25): SEQ ID NO: 6272; WAN0249EH_s_at; Start 66; Stop 90
gcgtaccaaaatatactagaaaatg

SEQ ID NO: 19330 - DNA, 25 bp, Artificial
  probe
  misc_feature (1)..(25): SEQ ID NO: 6272; WAN0249EH_s_at; Start 106; Stop 130
aacctgatatcgttttccttcacac

SEQ ID NO: 19331 - DNA, 25 bp, Artificial
  probe
  misc_feature (1)..(25): SEQ ID NO: 6272; WAN0249EH_s_at; Start 196; Stop 220
aaatggtatggatagcgttatacta

SEQ ID NO: 19332 - DNA, 25 bp, Artificial
  probe
  misc_feature (1)..(25): SEQ ID NO: 6272; WAN0249EH_s_at; Start 9; Stop 33
taatacagcgtttcgttgacattct

SEQ ID NO: 19333 - DNA, 25 bp, Artificial
  probe
  misc_feature (1)..(25): SEQ ID NO: 6272; WAN0249EH_s_at; Start 205; Stop 229
ggatagcgttatactaaagatatct

SEQ ID NO: 19334 - DNA, 25 bp, Artificial
  probe
  misc_feature (1)..(25): SEQ ID NO: 6272; WAN0249EH_s_at; Start 200; Stop 224
ggtatggatagcgttatactaaaga

SEQ ID NO: 19335 - DNA, 25 bp, Artificial
  probe
  misc_feature (1)..(25): SEQ ID NO: 6272; WAN0249EH_s_at; Start 40; Stop 64
tactttagcgagcaaaataaaaaga

SEQ ID NO: 19336 - DNA, 25 bp, Artificial
  probe
  misc_feature (1)..(25): SEQ ID NO: 6272; WAN0249EH_s_at; Start 14; Stop 38
cagcgtttcgttgacattctcacaa

SEQ ID NO: 19337 - DNA, 25 bp, Artificial
  probe
  misc_feature (1)..(25): SEQ ID NO: 6272; WAN0249EH_s_at; Start 159; Stop 183
cacttgaaaattaatgactttgatc

SEQ ID NO: 19338 - DNA, 25 bp, Artificial
  probe
  misc_feature (1)..(25): SEQ ID NO: 6272; WAN0249EH_s_at; Start 28; Stop 52
cattctcacaactactttagcgagc

SEQ ID NO: 19339 - DNA, 25 bp, Artificial
  probe
  misc_feature (1)..(25): SEQ ID NO: 6272; WAN0249EH_s_at; Start 6; Stop 30
gaataatacagcgtttcgttgacat

SEQ ID NO: 19340 - DNA, 25 bp, Artificial
  probe
  misc_feature (1)..(25): SEQ ID NO: 6272; WAN0249EH_s_at; Start 26; Stop 50
gacattctcacaactactttagcga

SEQ ID NO: 19341 - DNA, 25 bp, Artificial
  probe
  misc_feature (1)..(25): SEQ ID NO: 6272; WAN0249EH_s_at; Start 122; Stop 146
ccttcacacctatttactagaatta

SEQ ID NO: 19342 - DNA, 25 bp, Artificial
  probe
  misc_feature (1)..(25): SEQ ID NO: 6272; WAN0249EH_s_at; Start 31; Stop 55
tctcacaactactttagcgagcaaa

SEQ ID NO: 19343 - DNA, 25 bp, Artificial
  probe
  misc_feature (1)..(25): SEQ ID NO: 6272; WAN0249EH_s_at; Start 84; Stop 108
gaaaatgaagcaattcaaacgaaac

SEQ ID NO: 19344 - DNA, 25 bp, Artificial
  probe
  misc_feature (1)..(25): SEQ ID NO: 6272; WAN0249EH_s_at; Start 118; Stop 142
ttttccttcacacctatttactaga

SEQ ID NO: 19345 - DNA, 25 bp, Artificial
  probe
  misc_feature (1)..(25): SEQ ID NO: 6272; WAN0249EH_s_at; Start 218; Stop 242
ctaaagatatcttatacaaagaggt

SEQ ID NO: 19346 - DNA, 25 bp, Artificial
  probe
  misc_feature (1)..(25): SEQ ID NO: 6272; WAN0249EH_s_at; Start 77; Stop 101
tatactagaaaatgaagcaattcaa

SEQ ID NO: 19347 - DNA, 25 bp, Artificial
  probe
  misc_feature (1)..(25): SEQ ID NO: 6272; WAN0249EH_s_at; Start 153; Stop 177
cgcaatcacttgaaaattaatgact

SEQ ID NO: 19348 - DNA, 25 bp, Artificial
  probe
  misc_feature (1)..(25): SEQ ID NO: 6272; WAN0249EH_s_at; Start 150; Stop 174
gaacgcaatcacttgaaaattaatg

SEQ ID NO: 19349 - DNA, 25 bp, Artificial
  probe
  misc_feature (1)..(25): SEQ ID NO: 6272; WAN0249EH_s_at; Start 33; Stop 57
tcacaactactttagcgagcaaaat

SEQ ID NO: 19350 - DNA, 25 bp, Artificial
  probe
  misc_feature (1)..(25): SEQ ID NO: 6272; WAN0249EH_s_at; Start 25; Stop 49
tgacattctcacaactactttagcg

SEQ ID NO: 19351 - DNA, 25 bp, Artificial
  probe
  misc_feature (1)..(25): SEQ ID NO: 6272; WAN0249EH_s_at; Start 223; Stop 247
gatatcttatacaaagaggtattca

SEQ ID NO: 19352 - DNA, 25 bp, Artificial
  probe
  misc_feature (1)..(25): SEQ ID NO: 6272; WAN0249EH_s_at; Start 103; Stop 127
cgaaacctgatatcgttttccttca

SEQ ID NO: 19353 - DNA, 25 bp, Artificial
  probe
  misc_feature (1)..(25): SEQ ID NO: 6272; WAN0249EH_s_at; Start 89; Stop 113
tgaagcaattcaaacgaaacctgat

SEQ ID NO: 19354 - DNA, 25 bp, Artificial
  probe
  misc_feature (1)..(25): SEQ ID NO: 6272; WAN0249EH_s_at; Start 93; Stop 117
gcaattcaaacgaaacctgatatcg

SEQ ID NO: 19355 - DNA, 25 bp, Artificial
  probe
  misc_feature (1)..(25): SEQ ID NO: 6272; WAN0249EH_s_at; Start 12; Stop 36
tacagcgtttcgttgacattctcac

SEQ ID NO: 19356 - DNA, 25 bp, Artificial
  probe
  misc_feature (1)..(25): SEQ ID NO: 6272; WAN0249EH_s_at; Start 35; Stop 59
acaactactttagcgagcaaaataa

SEQ ID NO: 19357 - DNA, 25 bp, Artificial
  probe
  misc_feature (1)..(25): SEQ ID NO: 3655; WAN0249EI_at; Start 22; Stop 46
catctaaagtgctagtttttacgaa

SEQ ID NO: 19358 - DNA, 25 bp, Artificial
  probe
  misc_feature (1)..(25): SEQ ID NO: 3655; WAN0249EI_at; Start 24; Stop 48
tctaaagtgctagtttttacgaata

SEQ ID NO: 19359 - DNA, 25 bp, Artificial
  probe
  misc_feature (1)..(25): SEQ ID NO: 3655; WAN0249EI_at; Start 3; Stop 27
tttaattgtactaaaaaatcatcta

SEQ ID NO: 19360 - DNA, 25 bp, Artificial
  probe
  misc_feature (1)..(25): SEQ ID NO: 3655; WAN0249EI_at; Start 21; Stop 45
tcatctaaagtgctagtttttacga

SEQ ID NO: 19361 - DNA, 25 bp, Artificial
  probe
  misc_feature (1)..(25): SEQ ID NO: 3655; WAN0249EI_at; Start 10; Stop 34
gtactaaaaaatcatctaaagtgct

SEQ ID NO: 19362 - DNA, 25 bp, Artificial
  probe
  misc_feature (1)..(25): SEQ ID NO: 3655; WAN0249EI_at; Start 23; Stop 47
atctaaagtgctagtttttacgaat

SEQ ID NO: 19363 - DNA, 25 bp, Artificial
  probe
  misc_feature (1)..(25): SEQ ID NO: 3655; WAN0249EI_at; Start 1; Stop 25
gatttaattgtactaaaaaatcatc

SEQ ID NO: 19364 - DNA, 25 bp, Artificial
  probe
  misc_feature (1)..(25): SEQ ID NO: 3655; WAN0249EI_at; Start 11; Stop 35
tactaaaaaatcatctaaagtgcta

SEQ ID NO: 19365 - DNA, 25 bp, Artificial
  probe
  misc_feature (1)..(25): SEQ ID NO: 3655; WAN0249EI_at; Start 5; Stop 29
taattgtactaaaaaatcatctaaa

SEQ ID NO: 19366 - DNA, 25 bp, Artificial
  probe
  misc_feature (1)..(25): SEQ ID NO: 3655; WAN0249EI_at; Start 18; Stop 42
aaatcatctaaagtgctagttttta

SEQ ID NO: 19367 - DNA, 25 bp, Artificial
  probe
  misc_feature (1)..(25): SEQ ID NO: 3655; WAN0249EI_at; Start 2; Stop 26
atttaattgtactaaaaaatcatct

SEQ ID NO: 19368 - DNA, 25 bp, Artificial
  probe
  misc_feature (1)..(25): SEQ ID NO: 3655; WAN0249EI_at; Start 4; Stop 28
ttaattgtactaaaaaatcatctaa

SEQ ID NO: 19369 - DNA, 25 bp, Artificial
  probe
  misc_feature (1)..(25): SEQ ID NO: 3655; WAN0249EI_at; Start 15; Stop 39
aaaaaatcatctaaagtgctagttt

SEQ ID NO: 19370 - DNA, 25 bp, Artificial
  probe
  misc_feature (1)..(25): SEQ ID NO: 3655; WAN0249EI_at; Start 12; Stop 36
actaaaaaatcatctaaagtgctag

SEQ ID NO: 19371 - DNA, 25 bp, Artificial
  probe
  misc_feature (1)..(25): SEQ ID NO: 3655; WAN0249EI_at; Start 13; Stop 37
ctaaaaaatcatctaaagtgctagt

SEQ ID NO: 19372 - DNA, 25 bp, Artificial
  probe
  misc_feature (1)..(25): SEQ ID NO: 3655; WAN0249EI_at; Start 6; Stop 30
aattgtactaaaaaatcatctaaag

SEQ ID NO: 19373 - DNA, 25 bp, Artificial
  probe
  misc_feature (1)..(25): SEQ ID NO: 3655; WAN0249EI_at; Start 16; Stop 40
aaaaatcatctaaagtgctagtttt

SEQ ID NO: 19374 - DNA, 25 bp, Artificial
  probe
  misc_feature (1)..(25): SEQ ID NO: 3655; WAN0249EI_at; Start 17; Stop 41
aaaatcatctaaagtgctagttttt

SEQ ID NO: 19375 - DNA, 25 bp, Artificial
  probe
  misc_feature (1)..(25): SEQ ID NO: 3655; WAN0249EI_at; Start 14; Stop 38
taaaaaatcatctaaagtgctagtt

SEQ ID NO: 19376 - DNA, 25 bp, Artificial
  probe
  misc_feature (1)..(25): SEQ ID NO: 3655; WAN0249EI_at; Start 20; Stop 44
atcatctaaagtgctagtttttacg

SEQ ID NO: 19377 - DNA, 25 bp, Artificial
  probe
  misc_feature (1)..(25): SEQ ID NO: 3655; WAN0249EI_at; Start 7; Stop 31
attgtactaaaaaatcatctaaagt

SEQ ID NO: 19378 - DNA, 25 bp, Artificial
  probe
  misc_feature (1)..(25): SEQ ID NO: 3655; WAN0249EI_at; Start 8; Stop 32
ttgtactaaaaaatcatctaaagtg

SEQ ID NO: 19379 - DNA, 25 bp, Artificial
  probe
  misc_feature (1)..(25): SEQ ID NO: 3655; WAN0249EI_at; Start 9; Stop 33
tgtactaaaaaatcatctaaagtgc

SEQ ID NO: 19380 - DNA, 25 bp, Artificial
  probe
  misc_feature (1)..(25): SEQ ID NO: 3655; WAN0249EI_at; Start 19; Stop 43
aatcatctaaagtgctagtttttac

SEQ ID NO: 19381 - DNA, 25 bp, Artificial
  probe
  misc_feature (1)..(25): SEQ ID NO: 397; WAN0249EJ_at; Start 26; Stop 50
ctttagatgattttttagtacaatt

SEQ ID NO: 19382 - DNA, 25 bp, Artificial
  probe
  misc_feature (1)..(25): SEQ ID NO: 397; WAN0249EJ_at; Start 11; Stop 35
tcgtaaaaactagcactttagatga

SEQ ID NO: 19383 - DNA, 25 bp, Artificial
  probe
  misc_feature (1)..(25): SEQ ID NO: 397; WAN0249EJ_at; Start 27; Stop 51
tttagatgattttttagtacaatta

SEQ ID NO: 19384 - DNA, 25 bp, Artificial
  probe
  misc_feature (1)..(25): SEQ ID NO: 397; WAN0249EJ_at; Start 10; Stop 34
ttcgtaaaaactagcactttagatg

SEQ ID NO: 19385 - DNA, 25 bp, Artificial
  probe
  misc_feature (1)..(25): SEQ ID NO: 397; WAN0249EJ_at; Start 29; Stop 53
tagatgattttttagtacaattaaa

SEQ ID NO: 19386 - DNA, 25 bp, Artificial
  probe
  misc_feature (1)..(25): SEQ ID NO: 397; WAN0249EJ_at; Start 15; Stop 39
aaaaactagcactttagatgatttt

SEQ ID NO: 19387 - DNA, 25 bp, Artificial
  probe
  misc_feature (1)..(25): SEQ ID NO: 397; WAN0249EJ_at; Start 24; Stop 48
cactttagatgattttttagtacaa

SEQ ID NO: 19388 - DNA, 25 bp, Artificial
  probe
  misc_feature (1)..(25): SEQ ID NO: 397; WAN0249EJ_at; Start 21; Stop 45
tagcactttagatgattttttagta

SEQ ID NO: 19389 - DNA, 25 bp, Artificial
  probe
  misc_feature (1)..(25): SEQ ID NO: 397; WAN0249EJ_at; Start 22; Stop 46
agcactttagatgattttttagtac

SEQ ID NO: 19390 - DNA, 25 bp, Artificial
  probe
  misc_feature (1)..(25): SEQ ID NO: 397; WAN0249EJ_at; Start 12; Stop 36
cgtaaaaactagcactttagatgat

SEQ ID NO: 19391 - DNA, 25 bp, Artificial
  probe
  misc_feature (1)..(25): SEQ ID NO: 397; WAN0249EJ_at; Start 9; Stop 33
attcgtaaaaactagcactttagat

SEQ ID NO: 19392 - DNA, 25 bp, Artificial
  probe
  misc_feature (1)..(25): SEQ ID NO: 397; WAN0249EJ_at; Start 30; Stop 54
agatgattttttagtacaattaaat

SEQ ID NO: 19393 - DNA, 25 bp, Artificial
  probe
  misc_feature (1)..(25): SEQ ID NO: 397; WAN0249EJ_at; Start 28; Stop 52
ttagatgattttttagtacaattaa

SEQ ID NO: 19394 - DNA, 25 bp, Artificial
  probe
  misc_feature (1)..(25): SEQ ID NO: 397; WAN0249EJ_at; Start 31; Stop 55
gatgattttttagtacaattaaatc

SEQ ID NO: 19395 - DNA, 25 bp, Artificial
  probe
  misc_feature (1)..(25): SEQ ID NO: 397; WAN0249EJ_at; Start 25; Stop 49
actttagatgattttttagtacaat

SEQ ID NO: 19396 - DNA, 25 bp, Artificial
  probe
  misc_feature (1)..(25): SEQ ID NO: 397; WAN0249EJ_at; Start 20; Stop 44
ctagcactttagatgattttttagt

SEQ ID NO: 19397 - DNA, 25 bp, Artificial
  probe
  misc_feature (1)..(25): SEQ ID NO: 397; WAN0249EJ_at; Start 17; Stop 41
aaactagcactttagatgatttttt

SEQ ID NO: 19398 - DNA, 25 bp, Artificial
  probe
  misc_feature (1)..(25): SEQ ID NO: 397; WAN0249EJ_at; Start 14; Stop 38
taaaaactagcactttagatgattt

SEQ ID NO: 19399 - DNA, 25 bp, Artificial
  probe
  misc_feature (1)..(25): SEQ ID NO: 397; WAN0249EJ_at; Start 8; Stop 32
tattcgtaaaaactagcactttaga

SEQ ID NO: 19400 - DNA, 25 bp, Artificial
  probe
  misc_feature (1)..(25): SEQ ID NO: 397; WAN0249EJ_at; Start 18; Stop 42
aactagcactttagatgatttttta

SEQ ID NO: 19401 - DNA, 25 bp, Artificial
  probe
  misc_feature (1)..(25): SEQ ID NO: 397; WAN0249EJ_at; Start 13; Stop 37
gtaaaaactagcactttagatgatt

SEQ ID NO: 19402 - DNA, 25 bp, Artificial
  probe
  misc_feature (1)..(25): SEQ ID NO: 397; WAN0249EJ_at; Start 16; Stop 40
aaaactagcactttagatgattttt

SEQ ID NO: 19403 - DNA, 25 bp, Artificial
  probe
  misc_feature (1)..(25): SEQ ID NO: 397; WAN0249EJ_at; Start 19; Stop 43
actagcactttagatgattttttag

SEQ ID NO: 19404 - DNA, 25 bp, Artificial
  probe
  misc_feature (1)..(25): SEQ ID NO: 397; WAN0249EJ_at; Start 23; Stop 47
gcactttagatgattttttagtaca

SEQ ID NO: 19405 - DNA, 25 bp, Artificial
  probe
  misc_feature (1)..(25): SEQ ID NO: 3718; WAN0249EK_at; Start 7; Stop 31
aatttgcaaaaatagaatgaaagcg

SEQ ID NO: 19406 - DNA, 25 bp, Artificial
  probe
  misc_feature (1)..(25): SEQ ID NO: 3718; WAN0249EK_at; Start 18; Stop 42
atagaatgaaagcgttataataaaa

SEQ ID NO: 19407 - DNA, 25 bp, Artificial
  probe
  misc_feature (1)..(25): SEQ ID NO: 3718; WAN0249EK_at; Start 10; Stop 34
ttgcaaaaatagaatgaaagcgtta

SEQ ID NO: 19408 - DNA, 25 bp, Artificial
  probe
  misc_feature (1)..(25): SEQ ID NO: 3718; WAN0249EK_at; Start 15; Stop 39
aaaatagaatgaaagcgttataata

SEQ ID NO: 19409 - DNA, 25 bp, Artificial
  probe
  misc_feature (1)..(25): SEQ ID NO: 3718; WAN0249EK_at; Start 17; Stop 41
aatagaatgaaagcgttataataaa

SEQ ID NO: 19410 - DNA, 25 bp, Artificial
  probe
  misc_feature (1)..(25): SEQ ID NO: 3718; WAN0249EK_at; Start 22; Stop 46
aatgaaagcgttataataaaatcat

SEQ ID NO: 19411 - DNA, 25 bp, Artificial
  probe
  misc_feature (1)..(25): SEQ ID NO: 3718; WAN0249EK_at; Start 11; Stop 35
tgcaaaaatagaatgaaagcgttat

SEQ ID NO: 19412 - DNA, 25 bp, Artificial
  probe
  misc_feature (1)..(25): SEQ ID NO: 3718; WAN0249EK_at; Start 2; Stop 26
gaaaaaatttgcaaaaatagaatga

SEQ ID NO: 19413 - DNA, 25 bp, Artificial
  probe
  misc_feature (1)..(25): SEQ ID NO: 3718; WAN0249EK_at; Start 9; Stop 33
tttgcaaaaatagaatgaaagcgtt

SEQ ID NO: 19414 - DNA, 25 bp, Artificial
  probe
  misc_feature (1)..(25): SEQ ID NO: 3718; WAN0249EK_at; Start 16; Stop 40
aaatagaatgaaagcgttataataa

SEQ ID NO: 19415 - DNA, 25 bp, Artificial
  probe
  misc_feature (1)..(25): SEQ ID NO: 3718; WAN0249EK_at; Start 19; Stop 43
tagaatgaaagcgttataataaaat

SEQ ID NO: 19416 - DNA, 25 bp, Artificial
  probe
  misc_feature (1)..(25): SEQ ID NO: 3718; WAN0249EK_at; Start 29; Stop 53
gcgttataataaaatcataaaaaca

SEQ ID NO: 19417 - DNA, 25 bp, Artificial
  probe
  misc_feature (1)..(25): SEQ ID NO: 3718; WAN0249EK_at; Start 21; Stop 45
gaatgaaagcgttataataaaatca

SEQ ID NO: 19418 - DNA, 25 bp, Artificial
  probe
  misc_feature (1)..(25): SEQ ID NO: 3718; WAN0249EK_at; Start 55; Stop 79
aaatgtttagaaagaaggtactcat

SEQ ID NO: 19419 - DNA, 25 bp, Artificial
  probe
  misc_feature (1)..(25): SEQ ID NO: 3718; WAN0249EK_at; Start 5; Stop 29
aaaatttgcaaaaatagaatgaaag

SEQ ID NO: 19420 - DNA, 25 bp, Artificial
  probe
  misc_feature (1)..(25): SEQ ID NO: 3718; WAN0249EK_at; Start 6; Stop 30
aaatttgcaaaaatagaatgaaagc

SEQ ID NO: 19421 - DNA, 25 bp, Artificial
  probe
  misc_feature (1)..(25): SEQ ID NO: 3718; WAN0249EK_at; Start 12; Stop 36
gcaaaaatagaatgaaagcgttata

SEQ ID NO: 19422 - DNA, 25 bp, Artificial
  probe
  misc_feature (1)..(25): SEQ ID NO: 3718; WAN0249EK_at; Start 20; Stop 44
agaatgaaagcgttataataaaatc

SEQ ID NO: 19423 - DNA, 25 bp, Artificial
  probe
  misc_feature (1)..(25): SEQ ID NO: 3718; WAN0249EK_at; Start 14; Stop 38
aaaaatagaatgaaagcgttataat

SEQ ID NO: 19424 - DNA, 25 bp, Artificial
  probe
  misc_feature (1)..(25): SEQ ID NO: 3718; WAN0249EK_at; Start 25; Stop 49
gaaagcgttataataaaatcataaa

SEQ ID NO: 19425 - DNA, 25 bp, Artificial
  probe
  misc_feature (1)..(25): SEQ ID NO: 3718; WAN0249EK_at; Start 8; Stop 32
atttgcaaaaatagaatgaaagcgt

SEQ ID NO: 19426 - DNA, 25 bp, Artificial
  probe
  misc_feature (1)..(25): SEQ ID NO: 3718; WAN0249EK_at; Start 13; Stop 37
caaaaatagaatgaaagcgttataa

SEQ ID NO: 19427 - DNA, 25 bp, Artificial
  probe
  misc_feature (1)..(25): SEQ ID NO: 3718; WAN0249EK_at; Start 23; Stop 47
atgaaagcgttataataaaatcata

SEQ ID NO: 19428 - DNA, 25 bp, Artificial
  probe
  misc_feature (1)..(25): SEQ ID NO: 3718; WAN0249EK_at; Start 24; Stop 48
tgaaagcgttataataaaatcataa

SEQ ID NO: 19429 - DNA, 25 bp, Artificial
  probe
  misc_feature (1)..(25): SEQ ID NO: 1608; WAN0249EL_at; Start 50; Stop 74
gctttcattctatttttgcaaattt

SEQ ID NO: 19430 - DNA, 25 bp, Artificial
  probe
  misc_feature (1)..(25): SEQ ID NO: 1608; WAN0249EL_at; Start 38; Stop 62
ttttattataacgctttcattctat

SEQ ID NO: 19431 - DNA, 25 bp, Artificial
  probe
  misc_feature (1)..(25): SEQ ID NO: 1608; WAN0249EL_at; Start 33; Stop 57
tatgattttattataacgctttcat

SEQ ID NO: 19432 - DNA, 25 bp, Artificial
  probe
  misc_feature (1)..(25): SEQ ID NO: 1608; WAN0249EL_at; Start 43; Stop 67
ttataacgctttcattctatttttg

SEQ ID NO: 19433 - DNA, 25 bp, Artificial
  probe
  misc_feature (1)..(25): SEQ ID NO: 1608; WAN0249EL_at; Start 45; Stop 69
ataacgctttcattctatttttgca

SEQ ID NO: 19434 - DNA, 25 bp, Artificial
  probe
  misc_feature (1)..(25): SEQ ID NO: 1608; WAN0249EL_at; Start 37; Stop 61
attttattataacgctttcattcta

SEQ ID NO: 19435 - DNA, 25 bp, Artificial
  probe
  misc_feature (1)..(25): SEQ ID NO: 1608; WAN0249EL_at; Start 49; Stop 73
cgctttcattctatttttgcaaatt

SEQ ID NO: 19436 - DNA, 25 bp, Artificial
  probe
  misc_feature (1)..(25): SEQ ID NO: 1608; WAN0249EL_at; Start 47; Stop 71
aacgctttcattctatttttgcaaa

SEQ ID NO: 19437 - DNA, 25 bp, Artificial
  probe
  misc_feature (1)..(25): SEQ ID NO: 1608; WAN0249EL_at; Start 48; Stop 72
acgctttcattctatttttgcaaat

SEQ ID NO: 19438 - DNA, 25 bp, Artificial
  probe
  misc_feature (1)..(25): SEQ ID NO: 1608; WAN0249EL_at; Start 40; Stop 64
ttattataacgctttcattctattt

SEQ ID NO: 19439 - DNA, 25 bp, Artificial
  probe
  misc_feature (1)..(25): SEQ ID NO: 1608; WAN0249EL_at; Start 41; Stop 65
tattataacgctttcattctatttt

SEQ ID NO: 19440 - DNA, 25 bp, Artificial
  probe
  misc_feature (1)..(25): SEQ ID NO: 1608; WAN0249EL_at; Start 44; Stop 68
tataacgctttcattctatttttgc

SEQ ID NO: 19441 - DNA, 25 bp, Artificial
  probe
  misc_feature (1)..(25): SEQ ID NO: 1608; WAN0249EL_at; Start 46; Stop 70
taacgctttcattctatttttgcaa

SEQ ID NO: 19442 - DNA, 25 bp, Artificial
  probe
  misc_feature (1)..(25): SEQ ID NO: 1608; WAN0249EL_at; Start 34; Stop 58
atgattttattataacgctttcatt

SEQ ID NO: 19443 - DNA, 25 bp, Artificial
  probe
  misc_feature (1)..(25): SEQ ID NO: 1608; WAN0249EL_at; Start 31; Stop 55
tttatgattttattataacgctttc

SEQ ID NO: 19444 - DNA, 25 bp, Artificial
  probe
  misc_feature (1)..(25): SEQ ID NO: 1608; WAN0249EL_at; Start 35; Stop 59
tgattttattataacgctttcattc

SEQ ID NO: 19445 - DNA, 25 bp, Artificial
  probe
  misc_feature (1)..(25): SEQ ID NO: 1608; WAN0249EL_at; Start 42; Stop 66
attataacgctttcattctattttt

SEQ ID NO: 19446 - DNA, 25 bp, Artificial
  probe
  misc_feature (1)..(25): SEQ ID NO: 1608; WAN0249EL_at; Start 32; Stop 56
ttatgattttattataacgctttca

SEQ ID NO: 19447 - DNA, 25 bp, Artificial
  probe
  misc_feature (1)..(25): SEQ ID NO: 1608; WAN0249EL_at; Start 27; Stop 51
tgtttttatgattttattataacgc

SEQ ID NO: 19448 - DNA, 25 bp, Artificial
  probe
  misc_feature (1)..(25): SEQ ID NO: 1608; WAN0249EL_at; Start 1; Stop 25
atgagtaccttctttctaaacattt

SEQ ID NO: 19449 - DNA, 25 bp, Artificial
  probe
  misc_feature (1)..(25): SEQ ID NO: 1608; WAN0249EL_at; Start 54; Stop 78
tcattctatttttgcaaattttttc

SEQ ID NO: 19450 - DNA, 25 bp, Artificial
  probe
  misc_feature (1)..(25): SEQ ID NO: 1608; WAN0249EL_at; Start 39; Stop 63
tttattataacgctttcattctatt

SEQ ID NO: 19451 - DNA, 25 bp, Artificial
  probe
  misc_feature (1)..(25): SEQ ID NO: 1608; WAN0249EL_at; Start 36; Stop 60
gattttattataacgctttcattct

SEQ ID NO: 19452 - DNA, 25 bp, Artificial
  probe
  misc_feature (1)..(25): SEQ ID NO: 5901; WAN0249EM_at; Start 86; Stop 110
agtcgctttttgaggggtattatgg

SEQ ID NO: 19453 - DNA, 25 bp, Artificial
  probe
  misc_feature (1)..(25): SEQ ID NO: 5901; WAN0249EM_at; Start 6; Stop 30
atatgtgtaaaggtaggtttactga

SEQ ID NO: 19454 - DNA, 25 bp, Artificial
  probe
  misc_feature (1)..(25): SEQ ID NO: 5901; WAN0249EM_at; Start 85; Stop 109
aagtcgctttttgaggggtattatg

SEQ ID NO: 19455 - DNA, 25 bp, Artificial
  probe
  misc_feature (1)..(25): SEQ ID NO: 5901; WAN0249EM_at; Start 106; Stop 130
tatggtataatgggtgccaagaggt

SEQ ID NO: 19456 - DNA, 25 bp, Artificial
  probe
  misc_feature (1)..(25): SEQ ID NO: 5901; WAN0249EM_at; Start 100; Stop 124
gggtattatggtataatgggtgcca

SEQ ID NO: 19457 - DNA, 25 bp, Artificial
  probe
  misc_feature (1)..(25): SEQ ID NO: 5901; WAN0249EM_at; Start 2; Stop 26
ttcaatatgtgtaaaggtaggttta

SEQ ID NO: 19458 - DNA, 25 bp, Artificial
  probe
  misc_feature (1)..(25): SEQ ID NO: 5901; WAN0249EM_at; Start 104; Stop 128
attatggtataatgggtgccaagag

SEQ ID NO: 19459 - DNA, 25 bp, Artificial
  probe
  misc_feature (1)..(25): SEQ ID NO: 5901; WAN0249EM_at; Start 102; Stop 126
gtattatggtataatgggtgccaag

SEQ ID NO: 19460 - DNA, 25 bp, Artificial
  probe
  misc_feature (1)..(25): SEQ ID NO: 5901; WAN0249EM_at; Start 111; Stop 135
tataatgggtgccaagaggttttga

SEQ ID NO: 19461 - DNA, 25 bp, Artificial
  probe
  misc_feature (1)..(25): SEQ ID NO: 5901; WAN0249EM_at; Start 3; Stop 27
tcaatatgtgtaaaggtaggtttac

SEQ ID NO: 19462 - DNA, 25 bp, Artificial
  probe
  misc_feature (1)..(25): SEQ ID NO: 5901; WAN0249EM_at; Start 42; Stop 66
cctttttcttataattgatagaatt

SEQ ID NO: 19463 - DNA, 25 bp, Artificial
  probe
  misc_feature (1)..(25): SEQ ID NO: 5901; WAN0249EM_at; Start 8; Stop 32
atgtgtaaaggtaggtttactgaat

SEQ ID NO: 19464 - DNA, 25 bp, Artificial
  probe
  misc_feature (1)..(25): SEQ ID NO: 5901; WAN0249EM_at; Start 88; Stop 112
tcgctttttgaggggtattatggta

SEQ ID NO: 19465 - DNA, 25 bp, Artificial
  probe
  misc_feature (1)..(25): SEQ ID NO: 5901; WAN0249EM_at; Start 39; Stop 63
ctacctttttcttataattgataga

SEQ ID NO: 19466 - DNA, 25 bp, Artificial
  probe
  misc_feature (1)..(25): SEQ ID NO: 5901; WAN0249EM_at; Start 47; Stop 71
ttcttataattgatagaattactga

SEQ ID NO: 19467 - DNA, 25 bp, Artificial
  probe
  misc_feature (1)..(25): SEQ ID NO: 5901; WAN0249EM_at; Start 105; Stop 129
ttatggtataatgggtgccaagagg

SEQ ID NO: 19468 - DNA, 25 bp, Artificial
  probe
  misc_feature (1)..(25): SEQ ID NO: 5901; WAN0249EM_at; Start 7; Stop 31
tatgtgtaaaggtaggtttactgaa

SEQ ID NO: 19469 - DNA, 25 bp, Artificial
  probe
  misc_feature (1)..(25): SEQ ID NO: 5901; WAN0249EM_at; Start 103; Stop 127
tattatggtataatgggtgccaaga

SEQ ID NO: 19470 - DNA, 25 bp, Artificial
  probe
  misc_feature (1)..(25): SEQ ID NO: 5901; WAN0249EM_at; Start 108; Stop 132
tggtataatgggtgccaagaggttt

SEQ ID NO: 19471 - DNA, 25 bp, Artificial
  probe
  misc_feature (1)..(25): SEQ ID NO: 5901; WAN0249EM_at; Start 90; Stop 114
gctttttgaggggtattatggtata

SEQ ID NO: 19472 - DNA, 25 bp, Artificial
  probe
  misc_feature (1)..(25): SEQ ID NO: 5901; WAN0249EM_at; Start 49; Stop 73
cttataattgatagaattactgatt

SEQ ID NO: 19473 - DNA, 25 bp, Artificial
  probe
  misc_feature (1)..(25): SEQ ID NO: 5901; WAN0249EM_at; Start 40; Stop 64
tacctttttcttataattgatagaa

SEQ ID NO: 19474 - DNA, 25 bp, Artificial
  probe
  misc_feature (1)..(25): SEQ ID NO: 5901; WAN0249EM_at; Start 89; Stop 113
cgctttttgaggggtattatggtat

SEQ ID NO: 19475 - DNA, 25 bp, Artificial
  probe
  misc_feature (1)..(25): SEQ ID NO: 5901; WAN0249EM_at; Start 4; Stop 28
caatatgtgtaaaggtaggtttact

SEQ ID NO: 19476 - DNA, 25 bp, Artificial
  probe
  misc_feature (1)..(25): SEQ ID NO: 5901; WAN0249EM_at; Start 48; Stop 72
tcttataattgatagaattactgat

SEQ ID NO: 19477 - DNA, 25 bp, Artificial
  probe
  misc_feature (1)..(25): SEQ ID NO: 5901; WAN0249EM_at; Start 38; Stop 62
actacctttttcttataattgatag

SEQ ID NO: 19478 - DNA, 25 bp, Artificial
  probe
  misc_feature (1)..(25): SEQ ID NO: 5901; WAN0249EM_at; Start 107; Stop 131
atggtataatgggtgccaagaggtt

SEQ ID NO: 19479 - DNA, 25 bp, Artificial
  probe
  misc_feature (1)..(25): SEQ ID NO: 5901; WAN0249EM_at; Start 41; Stop 65
acctttttcttataattgatagaat

SEQ ID NO: 19480 - DNA, 25 bp, Artificial
  probe
  misc_feature (1)..(25): SEQ ID NO: 5901; WAN0249EM_at; Start 51; Stop 75
tataattgatagaattactgattac

SEQ ID NO: 19481 - DNA, 25 bp, Artificial
  probe
  misc_feature (1)..(25): SEQ ID NO: 5901; WAN0249EM_at; Start 53; Stop 77
taattgatagaattactgattacac

SEQ ID NO: 19482 - DNA, 25 bp, Artificial
  probe
  misc_feature (1)..(25): SEQ ID NO: 5901; WAN0249EM_at; Start 5; Stop 29
aatatgtgtaaaggtaggtttactg

SEQ ID NO: 19483 - DNA, 25 bp, Artificial
  probe
  misc_feature (1)..(25): SEQ ID NO: 5901; WAN0249EM_at; Start 68; Stop 92
ctgattacacttttaaaaagtcgct

SEQ ID NO: 19484 - DNA, 25 bp, Artificial
  probe
  misc_feature (1)..(25): SEQ ID NO: 5901; WAN0249EM_at; Start 101; Stop 125
ggtattatggtataatgggtgccaa

SEQ ID NO: 19485 - DNA, 25 bp, Artificial
  probe
  misc_feature (1)..(25): SEQ ID NO: 5901; WAN0249EM_at; Start 54; Stop 78
aattgatagaattactgattacact

SEQ ID NO: 19486 - DNA, 25 bp, Artificial
  probe
  misc_feature (1)..(25): SEQ ID NO: 4578; WAN0249EN_at; Start 12; Stop 36
tggcacccattataccataataccc

SEQ ID NO: 19487 - DNA, 25 bp, Artificial
  probe
  misc_feature (1)..(25): SEQ ID NO: 4578; WAN0249EN_at; Start 59; Stop 83
gtgtaatcagtaattctatcaatta

SEQ ID NO: 19488 - DNA, 25 bp, Artificial
  probe
  misc_feature (1)..(25): SEQ ID NO: 4578; WAN0249EN_at; Start 57; Stop 81
aagtgtaatcagtaattctatcaat

SEQ ID NO: 19489 - DNA, 25 bp, Artificial
  probe
  misc_feature (1)..(25): SEQ ID NO: 4578; WAN0249EN_at; Start 8; Stop 32
ctcttggcacccattataccataat

SEQ ID NO: 19490 - DNA, 25 bp, Artificial
  probe
  misc_feature (1)..(25): SEQ ID NO: 4578; WAN0249EN_at; Start 19; Stop 43
cattataccataatacccctcaaaa

SEQ ID NO: 19491 - DNA, 25 bp, Artificial
  probe
  misc_feature (1)..(25): SEQ ID NO: 4578; WAN0249EN_at; Start 54; Stop 78
taaaagtgtaatcagtaattctatc

SEQ ID NO: 19492 - DNA, 25 bp, Artificial
  probe
  misc_feature (1)..(25): SEQ ID NO: 4578; WAN0249EN_at; Start 10; Stop 34
cttggcacccattataccataatac

SEQ ID NO: 19493 - DNA, 25 bp, Artificial
  probe
  misc_feature (1)..(25): SEQ ID NO: 4578; WAN0249EN_at; Start 18; Stop 42
ccattataccataatacccctcaaa

SEQ ID NO: 19494 - DNA, 25 bp, Artificial
  probe
  misc_feature (1)..(25): SEQ ID NO: 4578; WAN0249EN_at; Start 4; Stop 28
aaacctcttggcacccattatacca

SEQ ID NO: 19495 - DNA, 25 bp, Artificial
  probe
  misc_feature (1)..(25): SEQ ID NO: 4578; WAN0249EN_at; Start 110; Stop 134
taaacctacctttacacatattgaa

SEQ ID NO: 19496 - DNA, 25 bp, Artificial
  probe
  misc_feature (1)..(25): SEQ ID NO: 4578; WAN0249EN_at; Start 9; Stop 33
tcttggcacccattataccataata

SEQ ID NO: 19497 - DNA, 25 bp, Artificial
  probe
  misc_feature (1)..(25): SEQ ID NO: 4578; WAN0249EN_at; Start 105; Stop 129
ttcagtaaacctacctttacacata

SEQ ID NO: 19498 - DNA, 25 bp, Artificial
  probe
  misc_feature (1)..(25): SEQ ID NO: 4578; WAN0249EN_at; Start 23; Stop 47
ataccataatacccctcaaaaagcg

SEQ ID NO: 19499 - DNA, 25 bp, Artificial
  probe
  misc_feature (1)..(25): SEQ ID NO: 4578; WAN0249EN_at; Start 1; Stop 25
tcaaaacctcttggcacccattata

SEQ ID NO: 19500 - DNA, 25 bp, Artificial
  probe
  misc_feature (1)..(25): SEQ ID NO: 4578; WAN0249EN_at; Start 26; Stop 50
ccataatacccctcaaaaagcgact

SEQ ID NO: 19501 - DNA, 25 bp, Artificial
  probe
  misc_feature (1)..(25): SEQ ID NO: 4578; WAN0249EN_at; Start 55; Stop 79
aaaagtgtaatcagtaattctatca

SEQ ID NO: 19502 - DNA, 25 bp, Artificial
  probe
  misc_feature (1)..(25): SEQ ID NO: 4578; WAN0249EN_at; Start 56; Stop 80
aaagtgtaatcagtaattctatcaa

SEQ ID NO: 19503 - DNA, 25 bp, Artificial
  probe
  misc_feature (1)..(25): SEQ ID NO: 4578; WAN0249EN_at; Start 5; Stop 29
aacctcttggcacccattataccat

SEQ ID NO: 19504 - DNA, 25 bp, Artificial
  probe
  misc_feature (1)..(25): SEQ ID NO: 4578; WAN0249EN_at; Start 65; Stop 89
tcagtaattctatcaattataagaa

SEQ ID NO: 19505 - DNA, 25 bp, Artificial
  probe
  misc_feature (1)..(25): SEQ ID NO: 4578; WAN0249EN_at; Start 22; Stop 46
tataccataatacccctcaaaaagc

SEQ ID NO: 19506 - DNA, 25 bp, Artificial
  probe
  misc_feature (1)..(25): SEQ ID NO: 4578; WAN0249EN_at; Start 44; Stop 68
agcgactttttaaaagtgtaatcag

SEQ ID NO: 19507 - DNA, 25 bp, Artificial
  probe
  misc_feature (1)..(25): SEQ ID NO: 4578; WAN0249EN_at; Start 11; Stop 35
ttggcacccattataccataatacc

SEQ ID NO: 19508 - DNA, 25 bp, Artificial
  probe
  misc_feature (1)..(25): SEQ ID NO: 4578; WAN0249EN_at; Start 108; Stop 132
agtaaacctacctttacacatattg

SEQ ID NO: 19509 - DNA, 25 bp, Artificial
  probe
  misc_feature (1)..(25): SEQ ID NO: 4578; WAN0249EN_at; Start 107; Stop 131
cagtaaacctacctttacacatatt

SEQ ID NO: 19510 - DNA, 25 bp, Artificial
  probe
  misc_feature (1)..(25): SEQ ID NO: 4578; WAN0249EN_at; Start 106; Stop 130
tcagtaaacctacctttacacatat

SEQ ID NO: 19511 - DNA, 25 bp, Artificial
  probe
  misc_feature (1)..(25): SEQ ID NO: 4578; WAN0249EN_at; Start 66; Stop 90
cagtaattctatcaattataagaaa

SEQ ID NO: 19512 - DNA, 25 bp, Artificial
  probe
  misc_feature (1)..(25): SEQ ID NO: 4578; WAN0249EN_at; Start 13; Stop 37
ggcacccattataccataatacccc

SEQ ID NO: 19513 - DNA, 25 bp, Artificial
  probe
  misc_feature (1)..(25): SEQ ID NO: 4578; WAN0249EN_at; Start 73; Stop 97
tctatcaattataagaaaaaggtag

SEQ ID NO: 19514 - DNA, 25 bp, Artificial
  probe
  misc_feature (1)..(25): SEQ ID NO: 4578; WAN0249EN_at; Start 7; Stop 31
cctcttggcacccattataccataa

SEQ ID NO: 19515 - DNA, 25 bp, Artificial
  probe
  misc_feature (1)..(25): SEQ ID NO: 4578; WAN0249EN_at; Start 109; Stop 133
gtaaacctacctttacacatattga

SEQ ID NO: 19516 - DNA, 25 bp, Artificial
  probe
  misc_feature (1)..(25): SEQ ID NO: 4578; WAN0249EN_at; Start 63; Stop 87
aatcagtaattctatcaattataag

SEQ ID NO: 19517 - DNA, 25 bp, Artificial
  probe
  misc_feature (1)..(25): SEQ ID NO: 4578; WAN0249EN_at; Start 27; Stop 51
cataatacccctcaaaaagcgactt

SEQ ID NO: 19518 - DNA, 25 bp, Artificial
  probe
  misc_feature (1)..(25): SEQ ID NO: 4578; WAN0249EN_at; Start 74; Stop 98
ctatcaattataagaaaaaggtagt

SEQ ID NO: 19519 - DNA, 25 bp, Artificial
  probe
  misc_feature (1)..(25): SEQ ID NO: 4578; WAN0249EN_at; Start 58; Stop 82
agtgtaatcagtaattctatcaatt

SEQ ID NO: 19520 - DNA, 25 bp, Artificial
  probe
  misc_feature (1)..(25): SEQ ID NO: 68; WAN0249EO_at; Start 12; Stop 36
gttggtgaagattatcctttaccag

SEQ ID NO: 19521 - DNA, 25 bp, Artificial
  probe
  misc_feature (1)..(25): SEQ ID NO: 68; WAN0249EO_at; Start 17; Stop 41
tgaagattatcctttaccagcgccc

SEQ ID NO: 19522 - DNA, 25 bp, Artificial
  probe
  misc_feature (1)..(25): SEQ ID NO: 68; WAN0249EO_at; Start 2; Stop 26
aaaatagggagttggtgaagattat

SEQ ID NO: 19523 - DNA, 25 bp, Artificial
  probe
  misc_feature (1)..(25): SEQ ID NO: 68; WAN0249EO_at; Start 13; Stop 37
ttggtgaagattatcctttaccagc

SEQ ID NO: 19524 - DNA, 25 bp, Artificial
  probe
  misc_feature (1)..(25): SEQ ID NO: 68; WAN0249EO_at; Start 4; Stop 28
aatagggagttggtgaagattatcc

SEQ ID NO: 19525 - DNA, 25 bp, Artificial
  probe
  misc_feature (1)..(25): SEQ ID NO: 68; WAN0249EO_at; Start 18; Stop 42
gaagattatcctttaccagcgccct

SEQ ID NO: 19526 - DNA, 25 bp, Artificial
  probe
  misc_feature (1)..(25): SEQ ID NO: 68; WAN0249EO_at; Start 20; Stop 44
agattatcctttaccagcgcccttt

SEQ ID NO: 19527 - DNA, 25 bp, Artificial
  probe
  misc_feature (1)..(25): SEQ ID NO: 68; WAN0249EO_at; Start 7; Stop 31
agggagttggtgaagattatccttt

SEQ ID NO: 19528 - DNA, 25 bp, Artificial
  probe
  misc_feature (1)..(25): SEQ ID NO: 68; WAN0249EO_at; Start 19; Stop 43
aagattatcctttaccagcgccctt

SEQ ID NO: 19529 - DNA, 25 bp, Artificial
  probe
  misc_feature (1)..(25): SEQ ID NO: 68; WAN0249EO_at; Start 14; Stop 38
tggtgaagattatcctttaccagcg

SEQ ID NO: 19530 - DNA, 25 bp, Artificial
  probe
  misc_feature (1)..(25): SEQ ID NO: 68; WAN0249EO_at; Start 15; Stop 39
ggtgaagattatcctttaccagcgc

SEQ ID NO: 19531 - DNA, 25 bp, Artificial
  probe
  misc_feature (1)..(25): SEQ ID NO: 68; WAN0249EO_at; Start 11; Stop 35
agttggtgaagattatcctttacca

SEQ ID NO: 19532 - DNA, 25 bp, Artificial
  probe
  misc_feature (1)..(25): SEQ ID NO: 68; WAN0249EO_at; Start 9; Stop 33
ggagttggtgaagattatcctttac

SEQ ID NO: 19533 - DNA, 25 bp, Artificial
  probe
  misc_feature (1)..(25): SEQ ID NO: 68; WAN0249EO_at; Start 5; Stop 29
atagggagttggtgaagattatcct

SEQ ID NO: 19534 - DNA, 25 bp, Artificial
  probe
  misc_feature (1)..(25): SEQ ID NO: 68; WAN0249EO_at; Start 3; Stop 27
aaatagggagttggtgaagattatc

SEQ ID NO: 19535 - DNA, 25 bp, Artificial
  probe
  misc_feature (1)..(25): SEQ ID NO: 68; WAN0249EO_at; Start 6; Stop 30
tagggagttggtgaagattatcctt

SEQ ID NO: 19536 - DNA, 25 bp, Artificial
  probe
  misc_feature (1)..(25): SEQ ID NO: 68; WAN0249EO_at; Start 8; Stop 32
gggagttggtgaagattatccttta

SEQ ID NO: 19537 - DNA, 25 bp, Artificial
  probe
  misc_feature (1)..(25): SEQ ID NO: 68; WAN0249EO_at; Start 10; Stop 34
gagttggtgaagattatcctttacc

SEQ ID NO: 19538 - DNA, 25 bp, Artificial
  probe
  misc_feature (1)..(25): SEQ ID NO: 68; WAN0249EO_at; Start 16; Stop 40
gtgaagattatcctttaccagcgcc

SEQ ID NO: 19539 - DNA, 25 bp, Artificial
  probe
  misc_feature (1)..(25): SEQ ID NO: 5925; WAN0249EP_at; Start 24; Stop 48
taaaggataatcttcaccaactccc

SEQ ID NO: 19540 - DNA, 25 bp, Artificial
  probe
  misc_feature (1)..(25): SEQ ID NO: 5925; WAN0249EP_at; Start 22; Stop 46
ggtaaaggataatcttcaccaactc

SEQ ID NO: 19541 - DNA, 25 bp, Artificial
  probe
  misc_feature (1)..(25): SEQ ID NO: 5925; WAN0249EP_at; Start 20; Stop 44
ctggtaaaggataatcttcaccaac

SEQ ID NO: 19542 - DNA, 25 bp, Artificial
  probe
  misc_feature (1)..(25): SEQ ID NO: 5925; WAN0249EP_at; Start 29; Stop 53
gataatcttcaccaactccctattt

SEQ ID NO: 19543 - DNA, 25 bp, Artificial
  probe
  misc_feature (1)..(25): SEQ ID NO: 5925; WAN0249EP_at; Start 18; Stop 42
cgctggtaaaggataatcttcacca

SEQ ID NO: 19544 - DNA, 25 bp, Artificial
  probe
  misc_feature (1)..(25): SEQ ID NO: 5925; WAN0249EP_at; Start 26; Stop 50
aaggataatcttcaccaactcccta

SEQ ID NO: 19545 - DNA, 25 bp, Artificial
  probe
  misc_feature (1)..(25): SEQ ID NO: 5925; WAN0249EP_at; Start 13; Stop 37
aagggcgctggtaaaggataatctt

SEQ ID NO: 19546 - DNA, 25 bp, Artificial
  probe
  misc_feature (1)..(25): SEQ ID NO: 5925; WAN0249EP_at; Start 12; Stop 36
aaagggcgctggtaaaggataatct

SEQ ID NO: 19547 - DNA, 25 bp, Artificial
  probe
  misc_feature (1)..(25): SEQ ID NO: 5925; WAN0249EP_at; Start 17; Stop 41
gcgctggtaaaggataatcttcacc

SEQ ID NO: 19548 - DNA, 25 bp, Artificial
  probe
  misc_feature (1)..(25): SEQ ID NO: 5925; WAN0249EP_at; Start 23; Stop 47
gtaaaggataatcttcaccaactcc

SEQ ID NO: 19549 - DNA, 25 bp, Artificial
  probe
  misc_feature (1)..(25): SEQ ID NO: 5925; WAN0249EP_at; Start 16; Stop 40
ggcgctggtaaaggataatcttcac

SEQ ID NO: 19550 - DNA, 25 bp, Artificial
  probe
  misc_feature (1)..(25): SEQ ID NO: 5925; WAN0249EP_at; Start 21; Stop 45
tggtaaaggataatcttcaccaact

SEQ ID NO: 19551 - DNA, 25 bp, Artificial
  probe
  misc_feature (1)..(25): SEQ ID NO: 5925; WAN0249EP_at; Start 27; Stop 51
aggataatcttcaccaactccctat

SEQ ID NO: 19552 - DNA, 25 bp, Artificial
  probe
  misc_feature (1)..(25): SEQ ID NO: 5925; WAN0249EP_at; Start 30; Stop 54
ataatcttcaccaactccctatttt

SEQ ID NO: 19553 - DNA, 25 bp, Artificial
  probe
  misc_feature (1)..(25): SEQ ID NO: 5925; WAN0249EP_at; Start 14; Stop 38
agggcgctggtaaaggataatcttc

SEQ ID NO: 19554 - DNA, 25 bp, Artificial
  probe
  misc_feature (1)..(25): SEQ ID NO: 5925; WAN0249EP_at; Start 25; Stop 49
aaaggataatcttcaccaactccct

SEQ ID NO: 19555 - DNA, 25 bp, Artificial
  probe
  misc_feature (1)..(25): SEQ ID NO: 5925; WAN0249EP_at; Start 28; Stop 52
ggataatcttcaccaactccctatt

SEQ ID NO: 19556 - DNA, 25 bp, Artificial
  probe
  misc_feature (1)..(25): SEQ ID NO: 5925; WAN0249EP_at; Start 15; Stop 39
gggcgctggtaaaggataatcttca

SEQ ID NO: 19557 - DNA, 25 bp, Artificial
  probe
  misc_feature (1)..(25): SEQ ID NO: 5925; WAN0249EP_at; Start 19; Stop 43
gctggtaaaggataatcttcaccaa

SEQ ID NO: 19558 - DNA, 25 bp, Artificial
  probe
  misc_feature (1)..(25): SEQ ID NO: 4816; WAN0249EQ_at; Start 30; Stop 54
ctccgtcgtatttgtcttagagcgt

SEQ ID NO: 19559 - DNA, 25 bp, Artificial
  probe
  misc_feature (1)..(25): SEQ ID NO: 4816; WAN0249EQ_at; Start 3; Stop 27
caacacaaaattcatatgtttatta

SEQ ID NO: 19560 - DNA, 25 bp, Artificial
  probe
  misc_feature (1)..(25): SEQ ID NO: 4816; WAN0249EQ_at; Start 31; Stop 55
tccgtcgtatttgtcttagagcgta

SEQ ID NO: 19561 - DNA, 25 bp, Artificial
  probe
  misc_feature (1)..(25): SEQ ID NO: 4816; WAN0249EQ_at; Start 1; Stop 25
ttcaacacaaaattcatatgtttat

SEQ ID NO: 19562 - DNA, 25 bp, Artificial
  probe
  misc_feature (1)..(25): SEQ ID NO: 4816; WAN0249EQ_at; Start 2; Stop 26
tcaacacaaaattcatatgtttatt

SEQ ID NO: 19563 - DNA, 25 bp, Artificial
  probe
  misc_feature (1)..(25): SEQ ID NO: 4816; WAN0249EQ_at; Start 4; Stop 28
aacacaaaattcatatgtttattac

SEQ ID NO: 19564 - DNA, 25 bp, Artificial
  probe
  misc_feature (1)..(25): SEQ ID NO: 4466; WAN0249ER_at; Start 28; Stop 52
gtaataaacatatgaattttgtgtt

SEQ ID NO: 19565 - DNA, 25 bp, Artificial
  probe
  misc_feature (1)..(25): SEQ ID NO: 4466; WAN0249ER_at; Start 30; Stop 54
aataaacatatgaattttgtgttga

SEQ ID NO: 19566 - DNA, 25 bp, Artificial
  probe
  misc_feature (1)..(25): SEQ ID NO: 4466; WAN0249ER_at; Start 2; Stop 26
acgctctaagacaaatacgacggag

SEQ ID NO: 19567 - DNA, 25 bp, Artificial
  probe
  misc_feature (1)..(25): SEQ ID NO: 4466; WAN0249ER_at; Start 31; Stop 55
ataaacatatgaattttgtgttgaa

SEQ ID NO: 19568 - DNA, 25 bp, Artificial
  probe
  misc_feature (1)..(25): SEQ ID NO: 4466; WAN0249ER_at; Start 29; Stop 53
taataaacatatgaattttgtgttg

SEQ ID NO: 19569 - DNA, 25 bp, Artificial
  probe
  misc_feature (1)..(25): SEQ ID NO: 4466; WAN0249ER_at; Start 1; Stop 25
tacgctctaagacaaatacgacgga

SEQ ID NO: 19570 - DNA, 25 bp, Artificial
  probe
  misc_feature (1)..(25): SEQ ID NO: 329; WAN0249ES_at; Start 51; Stop 75
ttctttgtgtagataaaagaaagga

SEQ ID NO: 19571 - DNA, 25 bp, Artificial
  probe
  misc_feature (1)..(25): SEQ ID NO: 329; WAN0249ES_at; Start 49; Stop 73
tattctttgtgtagataaaagaaag

SEQ ID NO: 19572 - DNA, 25 bp, Artificial
  probe
  misc_feature (1)..(25): SEQ ID NO: 329; WAN0249ES_at; Start 22; Stop 46
gttcatatagggttaacataagtgt

SEQ ID NO: 19573 - DNA, 25 bp, Artificial
  probe
  misc_feature (1)..(25): SEQ ID NO: 329; WAN0249ES_at; Start 36; Stop 60
aacataagtgtgttattctttgtgt

SEQ ID NO: 19574 - DNA, 25 bp, Artificial
  probe
  misc_feature (1)..(25): SEQ ID NO: 329; WAN0249ES_at; Start 41; Stop 65
aagtgtgttattctttgtgtagata

SEQ ID NO: 19575 - DNA, 25 bp, Artificial
  probe
  misc_feature (1)..(25): SEQ ID NO: 329; WAN0249ES_at; Start 39; Stop 63
ataagtgtgttattctttgtgtaga

SEQ ID NO: 19576 - DNA, 25 bp, Artificial
  probe
  misc_feature (1)..(25): SEQ ID NO: 329; WAN0249ES_at; Start 19; Stop 43
aaagttcatatagggttaacataag

SEQ ID NO: 19577 - DNA, 25 bp, Artificial
  probe
  misc_feature (1)..(25): SEQ ID NO: 329; WAN0249ES_at; Start 21; Stop 45
agttcatatagggttaacataagtg

SEQ ID NO: 19578 - DNA, 25 bp, Artificial
  probe
  misc_feature (1)..(25): SEQ ID NO: 329; WAN0249ES_at; Start 17; Stop 41
ttaaagttcatatagggttaacata

SEQ ID NO: 19579 - DNA, 25 bp, Artificial
  probe
  misc_feature (1)..(25): SEQ ID NO: 329; WAN0249ES_at; Start 15; Stop 39
tattaaagttcatatagggttaaca

SEQ ID NO: 19580 - DNA, 25 bp, Artificial
  probe
  misc_feature (1)..(25): SEQ ID NO: 329; WAN0249ES_at; Start 29; Stop 53
tagggttaacataagtgtgttattc

SEQ ID NO: 19581 - DNA, 25 bp, Artificial
  probe
  misc_feature (1)..(25): SEQ ID NO: 329; WAN0249ES_at; Start 34; Stop 58
ttaacataagtgtgttattctttgt

SEQ ID NO: 19582 - DNA, 25 bp, Artificial
  probe
  misc_feature (1)..(25): SEQ ID NO: 329; WAN0249ES_at; Start 35; Stop 59
taacataagtgtgttattctttgtg

SEQ ID NO: 19583 - DNA, 25 bp, Artificial
  probe
  misc_feature (1)..(25): SEQ ID NO: 329; WAN0249ES_at; Start 40; Stop 64
taagtgtgttattctttgtgtagat

SEQ ID NO: 19584 - DNA, 25 bp, Artificial
  probe
  misc_feature (1)..(25): SEQ ID NO: 329; WAN0249ES_at; Start 52; Stop 76
tctttgtgtagataaaagaaaggat

SEQ ID NO: 19585 - DNA, 25 bp, Artificial
  probe
  misc_feature (1)..(25): SEQ ID NO: 329; WAN0249ES_at; Start 44; Stop 68
tgtgttattctttgtgtagataaaa

SEQ ID NO: 19586 - DNA, 25 bp, Artificial
  probe
  misc_feature (1)..(25): SEQ ID NO: 329; WAN0249ES_at; Start 38; Stop 62
cataagtgtgttattctttgtgtag

SEQ ID NO: 19587 - DNA, 25 bp, Artificial
  probe
  misc_feature (1)..(25): SEQ ID NO: 329; WAN0249ES_at; Start 24; Stop 48
tcatatagggttaacataagtgtgt

SEQ ID NO: 19588 - DNA, 25 bp, Artificial
  probe
  misc_feature (1)..(25): SEQ ID NO: 329; WAN0249ES_at; Start 47; Stop 71
gttattctttgtgtagataaaagaa

SEQ ID NO: 19589 - DNA, 25 bp, Artificial
  probe
  misc_feature (1)..(25): SEQ ID NO: 329; WAN0249ES_at; Start 30; Stop 54
agggttaacataagtgtgttattct

SEQ ID NO: 19590 - DNA, 25 bp, Artificial
  probe
  misc_feature (1)..(25): SEQ ID NO: 329; WAN0249ES_at; Start 16; Stop 40
attaaagttcatatagggttaacat

SEQ ID NO: 19591 - DNA, 25 bp, Artificial
  probe
  misc_feature (1)..(25): SEQ ID NO: 329; WAN0249ES_at; Start 45; Stop 69
gtgttattctttgtgtagataaaag

SEQ ID NO: 19592 - DNA, 25 bp, Artificial
  probe
  misc_feature (1)..(25): SEQ ID NO: 329; WAN0249ES_at; Start 33; Stop 57
gttaacataagtgtgttattctttg

SEQ ID NO: 19593 - DNA, 25 bp, Artificial
  probe
  misc_feature (1)..(25): SEQ ID NO: 329; WAN0249ES_at; Start 37; Stop 61
acataagtgtgttattctttgtgta

SEQ ID NO: 19594 - DNA, 25 bp, Artificial
  probe
  misc_feature (1)..(25): SEQ ID NO: 329; WAN0249ES_at; Start 27; Stop 51
tatagggttaacataagtgtgttat

SEQ ID NO: 19595 - DNA, 25 bp, Artificial
  probe
  misc_feature (1)..(25): SEQ ID NO: 329; WAN0249ES_at; Start 43; Stop 67
gtgtgttattctttgtgtagataaa

SEQ ID NO: 19596 - DNA, 25 bp, Artificial
  probe
  misc_feature (1)..(25): SEQ ID NO: 329; WAN0249ES_at; Start 42; Stop 66
agtgtgttattctttgtgtagataa

SEQ ID NO: 19597 - DNA, 25 bp, Artificial
  probe
  misc_feature (1)..(25): SEQ ID NO: 329; WAN0249ES_at; Start 50; Stop 74
attctttgtgtagataaaagaaagg

SEQ ID NO: 19598 - DNA, 25 bp, Artificial
  probe
  misc_feature (1)..(25): SEQ ID NO: 329; WAN0249ES_at; Start 46; Stop 70
tgttattctttgtgtagataaaaga

SEQ ID NO: 19599 - DNA, 25 bp, Artificial
  probe
  misc_feature (1)..(25): SEQ ID NO: 329; WAN0249ES_at; Start 25; Stop 49
catatagggttaacataagtgtgtt

SEQ ID NO: 19600 - DNA, 25 bp, Artificial
  probe
  misc_feature (1)..(25): SEQ ID NO: 329; WAN0249ES_at; Start 18; Stop 42
taaagttcatatagggttaacataa

SEQ ID NO: 19601 - DNA, 25 bp, Artificial
  probe
  misc_feature (1)..(25): SEQ ID NO: 329; WAN0249ES_at; Start 53; Stop 77
ctttgtgtagataaaagaaaggata

SEQ ID NO: 19602 - DNA, 25 bp, Artificial
  probe
  misc_feature (1)..(25): SEQ ID NO: 329; WAN0249ES_at; Start 23; Stop 47
ttcatatagggttaacataagtgtg

SEQ ID NO: 19603 - DNA, 25 bp, Artificial
  probe
  misc_feature (1)..(25): SEQ ID NO: 329; WAN0249ES_at; Start 26; Stop 50
atatagggttaacataagtgtgtta

SEQ ID NO: 19604 - DNA, 25 bp, Artificial
  probe
  misc_feature (1)..(25): SEQ ID NO: 3139; WAN0249ET_at; Start 32; Stop 56
ataacacacttatgttaaccctata

SEQ ID NO: 19605 - DNA, 25 bp, Artificial
  probe
  misc_feature (1)..(25): SEQ ID NO: 3139; WAN0249ET_at; Start 15; Stop 39
ttttatctacacaaagaataacaca

SEQ ID NO: 19606 - DNA, 25 bp, Artificial
  probe
  misc_feature (1)..(25): SEQ ID NO: 3139; WAN0249ET_at; Start 16; Stop 40
tttatctacacaaagaataacacac

SEQ ID NO: 19607 - DNA, 25 bp, Artificial
  probe
  misc_feature (1)..(25): SEQ ID NO: 3139; WAN0249ET_at; Start 14; Stop 38
cttttatctacacaaagaataacac

SEQ ID NO: 19608 - DNA, 25 bp, Artificial
  probe
  misc_feature (1)..(25): SEQ ID NO: 3139; WAN0249ET_at; Start 40; Stop 64
cttatgttaaccctatatgaacttt

SEQ ID NO: 19609 - DNA, 25 bp, Artificial
  probe
  misc_feature (1)..(25): SEQ ID NO: 3139; WAN0249ET_at; Start 36; Stop 60
cacacttatgttaaccctatatgaa

SEQ ID NO: 19610 - DNA, 25 bp, Artificial
  probe
  misc_feature (1)..(25): SEQ ID NO: 3139; WAN0249ET_at; Start 26; Stop 50
caaagaataacacacttatgttaac

SEQ ID NO: 19611 - DNA, 25 bp, Artificial
  probe
  misc_feature (1)..(25): SEQ ID NO: 3139; WAN0249ET_at; Start 34; Stop 58
aacacacttatgttaaccctatatg

SEQ ID NO: 19612 - DNA, 25 bp, Artificial
  probe
  misc_feature (1)..(25): SEQ ID NO: 3139; WAN0249ET_at; Start 37; Stop 61
acacttatgttaaccctatatgaac

SEQ ID NO: 19613 - DNA, 25 bp, Artificial
  probe
  misc_feature (1)..(25): SEQ ID NO: 3139; WAN0249ET_at; Start 18; Stop 42
tatctacacaaagaataacacactt

SEQ ID NO: 19614 - DNA, 25 bp, Artificial
  probe
  misc_feature (1)..(25): SEQ ID NO: 3139; WAN0249ET_at; Start 13; Stop 37
tcttttatctacacaaagaataaca

SEQ ID NO: 19615 - DNA, 25 bp, Artificial
  probe
  misc_feature (1)..(25): SEQ ID NO: 3139; WAN0249ET_at; Start 21; Stop 45
ctacacaaagaataacacacttatg

SEQ ID NO: 19616 - DNA, 25 bp, Artificial
  probe
  misc_feature (1)..(25): SEQ ID NO: 3139; WAN0249ET_at; Start 38; Stop 62
cacttatgttaaccctatatgaact

SEQ ID NO: 19617 - DNA, 25 bp, Artificial
  probe
  misc_feature (1)..(25): SEQ ID NO: 3139; WAN0249ET_at; Start 25; Stop 49
acaaagaataacacacttatgttaa

SEQ ID NO: 19618 - DNA, 25 bp, Artificial
  probe
  misc_feature (1)..(25): SEQ ID NO: 3139; WAN0249ET_at; Start 23; Stop 47
acacaaagaataacacacttatgtt

SEQ ID NO: 19619 - DNA, 25 bp, Artificial
  probe
  misc_feature (1)..(25): SEQ ID NO: 3139; WAN0249ET_at; Start 24; Stop 48
cacaaagaataacacacttatgtta

SEQ ID NO: 19620 - DNA, 25 bp, Artificial
  probe
  misc_feature (1)..(25): SEQ ID NO: 3139; WAN0249ET_at; Start 35; Stop 59
acacacttatgttaaccctatatga

SEQ ID NO: 19621 - DNA, 25 bp, Artificial
  probe
  misc_feature (1)..(25): SEQ ID NO: 3139; WAN0249ET_at; Start 44; Stop 68
tgttaaccctatatgaactttaata

SEQ ID NO: 19622 - DNA, 25 bp, Artificial
  probe
  misc_feature (1)..(25): SEQ ID NO: 3139; WAN0249ET_at; Start 10; Stop 34
ctttcttttatctacacaaagaata

SEQ ID NO: 19623 - DNA, 25 bp, Artificial
  probe
  misc_feature (1)..(25): SEQ ID NO: 3139; WAN0249ET_at; Start 20; Stop 44
tctacacaaagaataacacacttat

SEQ ID NO: 19624 - DNA, 25 bp, Artificial
  probe
  misc_feature (1)..(25): SEQ ID NO: 3139; WAN0249ET_at; Start 29; Stop 53
agaataacacacttatgttaaccct

SEQ ID NO: 19625 - DNA, 25 bp, Artificial
  probe
  misc_feature (1)..(25): SEQ ID NO: 3139; WAN0249ET_at; Start 22; Stop 46
tacacaaagaataacacacttatgt

SEQ ID NO: 19626 - DNA, 25 bp, Artificial
  probe
  misc_feature (1)..(25): SEQ ID NO: 3139; WAN0249ET_at; Start 33; Stop 57
taacacacttatgttaaccctatat

SEQ ID NO: 19627 - DNA, 25 bp, Artificial
  probe
  misc_feature (1)..(25): SEQ ID NO: 3139; WAN0249ET_at; Start 19; Stop 43
atctacacaaagaataacacactta

SEQ ID NO: 19628 - DNA, 25 bp, Artificial
  probe
  misc_feature (1)..(25): SEQ ID NO: 3139; WAN0249ET_at; Start 41; Stop 65
ttatgttaaccctatatgaacttta

SEQ ID NO: 19629 - DNA, 25 bp, Artificial
  probe
  misc_feature (1)..(25): SEQ ID NO: 3139; WAN0249ET_at; Start 17; Stop 41
ttatctacacaaagaataacacact

SEQ ID NO: 19630 - DNA, 25 bp, Artificial
  probe
  misc_feature (1)..(25): SEQ ID NO: 3139; WAN0249ET_at; Start 30; Stop 54
gaataacacacttatgttaacccta

SEQ ID NO: 19631 - DNA, 25 bp, Artificial
  probe
  misc_feature (1)..(25): SEQ ID NO: 3139; WAN0249ET_at; Start 39; Stop 63
acttatgttaaccctatatgaactt

SEQ ID NO: 19632 - DNA, 25 bp, Artificial
  probe
  misc_feature (1)..(25): SEQ ID NO: 3139; WAN0249ET_at; Start 42; Stop 66
tatgttaaccctatatgaactttaa

SEQ ID NO: 19633 - DNA, 25 bp, Artificial
  probe
  misc_feature (1)..(25): SEQ ID NO: 3139; WAN0249ET_at; Start 31; Stop 55
aataacacacttatgttaaccctat

SEQ ID NO: 19634 - DNA, 25 bp, Artificial
  probe
  misc_feature (1)..(25): SEQ ID NO: 3139; WAN0249ET_at; Start 43; Stop 67
atgttaaccctatatgaactttaat

SEQ ID NO: 19635 - DNA, 25 bp, Artificial
  probe
  misc_feature (1)..(25): SEQ ID NO: 3139; WAN0249ET_at; Start 9; Stop 33
cctttcttttatctacacaaagaat

SEQ ID NO: 19636 - DNA, 25 bp, Artificial
  probe
  misc_feature (1)..(25): SEQ ID NO: 3139; WAN0249ET_at; Start 12; Stop 36
ttcttttatctacacaaagaataac

SEQ ID NO: 19637 - DNA, 25 bp, Artificial
  probe
  misc_feature (1)..(25): SEQ ID NO: 3139; WAN0249ET_at; Start 11; Stop 35
tttcttttatctacacaaagaataa

SEQ ID NO: 19638 - DNA, 25 bp, Artificial
  probe
  misc_feature (1)..(25): SEQ ID NO: 543; WAN0249EU_at; Start 10; Stop 34
tcgatttatatacagttcatattga

SEQ ID NO: 19639 - DNA, 25 bp, Artificial
  probe
  misc_feature (1)..(25): SEQ ID NO: 543; WAN0249EU_at; Start 13; Stop 37
atttatatacagttcatattgaagt

SEQ ID NO: 19640 - DNA, 25 bp, Artificial
  probe
  misc_feature (1)..(25): SEQ ID NO: 543; WAN0249EU_at; Start 8; Stop 32
attcgatttatatacagttcatatt

SEQ ID NO: 19641 - DNA, 25 bp, Artificial
  probe
  misc_feature (1)..(25): SEQ ID NO: 543; WAN0249EU_at; Start 2; Stop 26
tacaaaattcgatttatatacagtt

SEQ ID NO: 19642 - DNA, 25 bp, Artificial
  probe
  misc_feature (1)..(25): SEQ ID NO: 543; WAN0249EU_at; Start 7; Stop 31
aattcgatttatatacagttcatat

SEQ ID NO: 19643 - DNA, 25 bp, Artificial
  probe
  misc_feature (1)..(25): SEQ ID NO: 543; WAN0249EU_at; Start 5; Stop 29
aaaattcgatttatatacagttcat

SEQ ID NO: 19644 - DNA, 25 bp, Artificial
  probe
  misc_feature (1)..(25): SEQ ID NO: 543; WAN0249EU_at; Start 3; Stop 27
acaaaattcgatttatatacagttc

SEQ ID NO: 19645 - DNA, 25 bp, Artificial
  probe
  misc_feature (1)..(25): SEQ ID NO: 543; WAN0249EU_at; Start 11; Stop 35
cgatttatatacagttcatattgaa

SEQ ID NO: 19646 - DNA, 25 bp, Artificial
  probe
  misc_feature (1)..(25): SEQ ID NO: 543; WAN0249EU_at; Start 6; Stop 30
aaattcgatttatatacagttcata

SEQ ID NO: 19647 - DNA, 25 bp, Artificial
  probe
  misc_feature (1)..(25): SEQ ID NO: 543; WAN0249EU_at; Start 1; Stop 25
atacaaaattcgatttatatacagt

SEQ ID NO: 19648 - DNA, 25 bp, Artificial
  probe
  misc_feature (1)..(25): SEQ ID NO: 543; WAN0249EU_at; Start 4; Stop 28
caaaattcgatttatatacagttca

SEQ ID NO: 19649 - DNA, 25 bp, Artificial
  probe
  misc_feature (1)..(25): SEQ ID NO: 543; WAN0249EU_at; Start 9; Stop 33
ttcgatttatatacagttcatattg

SEQ ID NO: 19650 - DNA, 25 bp, Artificial
  probe
  misc_feature (1)..(25): SEQ ID NO: 543; WAN0249EU_at; Start 12; Stop 36
gatttatatacagttcatattgaag

SEQ ID NO: 19651 - DNA, 25 bp, Artificial
  probe
  misc_feature (1)..(25): SEQ ID NO: 4351; WAN0249EV_at; Start 46; Stop 70
caatatgaactgtatataaatcgaa

SEQ ID NO: 19652 - DNA, 25 bp, Artificial
  probe
  misc_feature (1)..(25): SEQ ID NO: 4351; WAN0249EV_at; Start 52; Stop 76
gaactgtatataaatcgaattttgt

SEQ ID NO: 19653 - DNA, 25 bp, Artificial
  probe
  misc_feature (1)..(25): SEQ ID NO: 4351; WAN0249EV_at; Start 42; Stop 66
acttcaatatgaactgtatataaat

SEQ ID NO: 19654 - DNA, 25 bp, Artificial
  probe
  misc_feature (1)..(25): SEQ ID NO: 4351; WAN0249EV_at; Start 51; Stop 75
tgaactgtatataaatcgaattttg

SEQ ID NO: 19655 - DNA, 25 bp, Artificial
  probe
  misc_feature (1)..(25): SEQ ID NO: 4351; WAN0249EV_at; Start 45; Stop 69
tcaatatgaactgtatataaatcga

SEQ ID NO: 19656 - DNA, 25 bp, Artificial
  probe
  misc_feature (1)..(25): SEQ ID NO: 4351; WAN0249EV_at; Start 53; Stop 77
aactgtatataaatcgaattttgta

SEQ ID NO: 19657 - DNA, 25 bp, Artificial
  probe
  misc_feature (1)..(25): SEQ ID NO: 4351; WAN0249EV_at; Start 50; Stop 74
atgaactgtatataaatcgaatttt

SEQ ID NO: 19658 - DNA, 25 bp, Artificial
  probe
  misc_feature (1)..(25): SEQ ID NO: 4351; WAN0249EV_at; Start 44; Stop 68
ttcaatatgaactgtatataaatcg

SEQ ID NO: 19659 - DNA, 25 bp, Artificial
  probe
  misc_feature (1)..(25): SEQ ID NO: 4351; WAN0249EV_at; Start 54; Stop 78
actgtatataaatcgaattttgtat

SEQ ID NO: 19660 - DNA, 25 bp, Artificial
  probe
  misc_feature (1)..(25): SEQ ID NO: 4351; WAN0249EV_at; Start 43; Stop 67
cttcaatatgaactgtatataaatc

SEQ ID NO: 19661 - DNA, 25 bp, Artificial
  probe
  misc_feature (1)..(25): SEQ ID NO: 4351; WAN0249EV_at; Start 48; Stop 72
atatgaactgtatataaatcgaatt

SEQ ID NO: 19662 - DNA, 25 bp, Artificial
  probe
  misc_feature (1)..(25): SEQ ID NO: 4351; WAN0249EV_at; Start 47; Stop 71
aatatgaactgtatataaatcgaat

SEQ ID NO: 19663 - DNA, 25 bp, Artificial
  probe
  misc_feature (1)..(25): SEQ ID NO: 4351; WAN0249EV_at; Start 49; Stop 73
tatgaactgtatataaatcgaattt

SEQ ID NO: 19664 - DNA, 25 bp, Artificial
  probe
  misc_feature (1)..(25): SEQ ID NO: 353; WAN0249EW_at; Start 109; Stop 133
taaaaaataactctgtaatctctag

SEQ ID NO: 19665 - DNA, 25 bp, Artificial
  probe
  misc_feature (1)..(25): SEQ ID NO: 353; WAN0249EW_at; Start 62; Stop 86
taccatatcctttcagtagataata

SEQ ID NO: 19666 - DNA, 25 bp, Artificial
  probe
  misc_feature (1)..(25): SEQ ID NO: 353; WAN0249EW_at; Start 60; Stop 84
aataccatatcctttcagtagataa

SEQ ID NO: 19667 - DNA, 25 bp, Artificial
  probe
  misc_feature (1)..(25): SEQ ID NO: 353; WAN0249EW_at; Start 16; Stop 40
ttaatactgacttcctgtaagaact

SEQ ID NO: 19668 - DNA, 25 bp, Artificial
  probe
  misc_feature (1)..(25): SEQ ID NO: 353; WAN0249EW_at; Start 84; Stop 108
atatacccttgtaggaagtttagat

SEQ ID NO: 19669 - DNA, 25 bp, Artificial
  probe
  misc_feature (1)..(25): SEQ ID NO: 353; WAN0249EW_at; Start 125; Stop 149
aatctctagccggatttatagcgct

SEQ ID NO: 19670 - DNA, 25 bp, Artificial
  probe
  misc_feature (1)..(25): SEQ ID NO: 353; WAN0249EW_at; Start 126; Stop 150
atctctagccggatttatagcgcta

SEQ ID NO: 19671 - DNA, 25 bp, Artificial
  probe
  misc_feature (1)..(25): SEQ ID NO: 353; WAN0249EW_at; Start 116; Stop 140
taactctgtaatctctagccggatt

SEQ ID NO: 19672 - DNA, 25 bp, Artificial
  probe
  misc_feature (1)..(25): SEQ ID NO: 353; WAN0249EW_at; Start 67; Stop 91
tatcctttcagtagataatataccc

SEQ ID NO: 19673 - DNA, 25 bp, Artificial
  probe
  misc_feature (1)..(25): SEQ ID NO: 353; WAN0249EW_at; Start 76; Stop 100
agtagataatatacccttgtaggaa

SEQ ID NO: 19674 - DNA, 25 bp, Artificial
  probe
  misc_feature (1)..(25): SEQ ID NO: 353; WAN0249EW_at; Start 7; Stop 31
tataactagttaatactgacttcct

SEQ ID NO: 19675 - DNA, 25 bp, Artificial
  probe
  misc_feature (1)..(25): SEQ ID NO: 353; WAN0249EW_at; Start 111; Stop 135
aaaaataactctgtaatctctagcc

SEQ ID NO: 19676 - DNA, 25 bp, Artificial
  probe
  misc_feature (1)..(25): SEQ ID NO: 353; WAN0249EW_at; Start 9; Stop 33
taactagttaatactgacttcctgt

SEQ ID NO: 19677 - DNA, 25 bp, Artificial
  probe
  misc_feature (1)..(25): SEQ ID NO: 353; WAN0249EW_at; Start 44; Stop 68
taaagtattccctacaaataccata

SEQ ID NO: 19678 - DNA, 25 bp, Artificial
  probe
  misc_feature (1)..(25): SEQ ID NO: 353; WAN0249EW_at; Start 112; Stop 136
aaaataactctgtaatctctagccg

SEQ ID NO: 19679 - DNA, 25 bp, Artificial
  probe
  misc_feature (1)..(25): SEQ ID NO: 353; WAN0249EW_at; Start 114; Stop 138
aataactctgtaatctctagccgga

SEQ ID NO: 19680 - DNA, 25 bp, Artificial
  probe
  misc_feature (1)..(25): SEQ ID NO: 353; WAN0249EW_at; Start 120; Stop 144
tctgtaatctctagccggatttata

SEQ ID NO: 19681 - DNA, 25 bp, Artificial
  probe
  misc_feature (1)..(25): SEQ ID NO: 353; WAN0249EW_at; Start 71; Stop 95
ctttcagtagataatatacccttgt

SEQ ID NO: 19682 - DNA, 25 bp, Artificial
  probe
  misc_feature (1)..(25): SEQ ID NO: 353; WAN0249EW_at; Start 15; Stop 39
gttaatactgacttcctgtaagaac

SEQ ID NO: 19683 - DNA, 25 bp, Artificial
  probe
  misc_feature (1)..(25): SEQ ID NO: 353; WAN0249EW_at; Start 115; Stop 139
ataactctgtaatctctagccggat

SEQ ID NO: 19684 - DNA, 25 bp, Artificial
  probe
  misc_feature (1)..(25): SEQ ID NO: 353; WAN0249EW_at; Start 2; Stop 26
cctaatataactagttaatactgac

SEQ ID NO: 19685 - DNA, 25 bp, Artificial
  probe
  misc_feature (1)..(25): SEQ ID NO: 353; WAN0249EW_at; Start 121; Stop 145
ctgtaatctctagccggatttatag

SEQ ID NO: 19686 - DNA, 25 bp, Artificial
  probe
  misc_feature (1)..(25): SEQ ID NO: 353; WAN0249EW_at; Start 113; Stop 137
aaataactctgtaatctctagccgg

SEQ ID NO: 19687 - DNA, 25 bp, Artificial
  probe
  misc_feature (1)..(25): SEQ ID NO: 353; WAN0249EW_at; Start 10; Stop 34
aactagttaatactgacttcctgta

SEQ ID NO: 19688 - DNA, 25 bp, Artificial
  probe
  misc_feature (1)..(25): SEQ ID NO: 353; WAN0249EW_at; Start 56; Stop 80
tacaaataccatatcctttcagtag

SEQ ID NO: 19689 - DNA, 25 bp, Artificial
  probe
  misc_feature (1)..(25): SEQ ID NO: 353; WAN0249EW_at; Start 77; Stop 101
gtagataatatacccttgtaggaag

SEQ ID NO: 19690 - DNA, 25 bp, Artificial
  probe
  misc_feature (1)..(25): SEQ ID NO: 353; WAN0249EW_at; Start 58; Stop 82
caaataccatatcctttcagtagat

SEQ ID NO: 19691 - DNA, 25 bp, Artificial
  probe
  misc_feature (1)..(25): SEQ ID NO: 353; WAN0249EW_at; Start 13; Stop 37
tagttaatactgacttcctgtaaga

SEQ ID NO: 19692 - DNA, 25 bp, Artificial
  probe
  misc_feature (1)..(25): SEQ ID NO: 353; WAN0249EW_at; Start 118; Stop 142
actctgtaatctctagccggattta

SEQ ID NO: 19693 - DNA, 25 bp, Artificial
  probe
  misc_feature (1)..(25): SEQ ID NO: 353; WAN0249EW_at; Start 74; Stop 98
tcagtagataatatacccttgtagg

SEQ ID NO: 19694 - DNA, 25 bp, Artificial
  probe
  misc_feature (1)..(25): SEQ ID NO: 353; WAN0249EW_at; Start 49; Stop 73
tattccctacaaataccatatcctt

SEQ ID NO: 19695 - DNA, 25 bp, Artificial
  probe
  misc_feature (1)..(25): SEQ ID NO: 353; WAN0249EW_at; Start 79; Stop 103
agataatatacccttgtaggaagtt

SEQ ID NO: 19696 - DNA, 25 bp, Artificial
  probe
  misc_feature (1)..(25): SEQ ID NO: 353; WAN0249EW_at; Start 70; Stop 94
cctttcagtagataatatacccttg

SEQ ID NO: 19697 - DNA, 25 bp, Artificial
  probe
  misc_feature (1)..(25): SEQ ID NO: 353; WAN0249EW_at; Start 75; Stop 99
cagtagataatatacccttgtagga

SEQ ID NO: 19698 - DNA, 25 bp, Artificial
  probe
  misc_feature (1)..(25): SEQ ID NO: 4509; WAN0249EX_at; Start 58; Stop 82
aagggtatattatctactgaaagga

SEQ ID NO: 19699 - DNA, 25 bp, Artificial
  probe
  misc_feature (1)..(25): SEQ ID NO: 4509; WAN0249EX_at; Start 63; Stop 87
tatattatctactgaaaggatatgg

SEQ ID NO: 19700 - DNA, 25 bp, Artificial
  probe
  misc_feature (1)..(25): SEQ ID NO: 4509; WAN0249EX_at; Start 76; Stop 100
gaaaggatatggtatttgtagggaa

SEQ ID NO: 19701 - DNA, 25 bp, Artificial
  probe
  misc_feature (1)..(25): SEQ ID NO: 4509; WAN0249EX_at; Start 83; Stop 107
tatggtatttgtagggaatacttta

SEQ ID NO: 19702 - DNA, 25 bp, Artificial
  probe
  misc_feature (1)..(25): SEQ ID NO: 4509; WAN0249EX_at; Start 60; Stop 84
gggtatattatctactgaaaggata

SEQ ID NO: 19703 - DNA, 25 bp, Artificial
  probe
  misc_feature (1)..(25): SEQ ID NO: 4509; WAN0249EX_at; Start 117; Stop 141
tacaggaagtcagtattaactagtt

SEQ ID NO: 19704 - DNA, 25 bp, Artificial
  probe
  misc_feature (1)..(25): SEQ ID NO: 4509; WAN0249EX_at; Start 119; Stop 143
caggaagtcagtattaactagttat

SEQ ID NO: 19705 - DNA, 25 bp, Artificial
  probe
  misc_feature (1)..(25): SEQ ID NO: 4509; WAN0249EX_at; Start 11; Stop 35
aatccggctagagattacagagtta

SEQ ID NO: 19706 - DNA, 25 bp, Artificial
  probe
  misc_feature (1)..(25): SEQ ID NO: 4509; WAN0249EX_at; Start 1; Stop 25
tagcgctataaatccggctagagat

SEQ ID NO: 19707 - DNA, 25 bp, Artificial
  probe
  misc_feature (1)..(25): SEQ ID NO: 4509; WAN0249EX_at; Start 70; Stop 94
tctactgaaaggatatggtatttgt

SEQ ID NO: 19708 - DNA, 25 bp, Artificial
  probe
  misc_feature (1)..(25): SEQ ID NO: 4509; WAN0249EX_at; Start 65; Stop 89
tattatctactgaaaggatatggta

SEQ ID NO: 19709 - DNA, 25 bp, Artificial
  probe
  misc_feature (1)..(25): SEQ ID NO: 4509; WAN0249EX_at; Start 57; Stop 81
caagggtatattatctactgaaagg

SEQ ID NO: 19710 - DNA, 25 bp, Artificial
  probe
  misc_feature (1)..(25): SEQ ID NO: 4509; WAN0249EX_at; Start 80; Stop 104
ggatatggtatttgtagggaatact

SEQ ID NO: 19711 - DNA, 25 bp, Artificial
  probe
  misc_feature (1)..(25): SEQ ID NO: 4509; WAN0249EX_at; Start 14; Stop 38
ccggctagagattacagagttattt

SEQ ID NO: 19712 - DNA, 25 bp, Artificial
  probe
  misc_feature (1)..(25): SEQ ID NO: 4509; WAN0249EX_at; Start 53; Stop 77
cctacaagggtatattatctactga

SEQ ID NO: 19713 - DNA, 25 bp, Artificial
  probe
  misc_feature (1)..(25): SEQ ID NO: 4509; WAN0249EX_at; Start 2; Stop 26
agcgctataaatccggctagagatt

SEQ ID NO: 19714 - DNA, 25 bp, Artificial
  probe
  misc_feature (1)..(25): SEQ ID NO: 4509; WAN0249EX_at; Start 7; Stop 31
tataaatccggctagagattacaga

SEQ ID NO: 19715 - DNA, 25 bp, Artificial
  probe
  misc_feature (1)..(25): SEQ ID NO: 4509; WAN0249EX_at; Start 52; Stop 76
tcctacaagggtatattatctactg

SEQ ID NO: 19716 - DNA, 25 bp, Artificial
  probe
  misc_feature (1)..(25): SEQ ID NO: 4509; WAN0249EX_at; Start 6; Stop 30
ctataaatccggctagagattacag

SEQ ID NO: 19717 - DNA, 25 bp, Artificial
  probe
  misc_feature (1)..(25): SEQ ID NO: 4509; WAN0249EX_at; Start 43; Stop 67
atctaaacttcctacaagggtatat

SEQ ID NO: 19718 - DNA, 25 bp, Artificial
  probe
  misc_feature (1)..(25): SEQ ID NO: 4509; WAN0249EX_at; Start 9; Stop 33
taaatccggctagagattacagagt

SEQ ID NO: 19719 - DNA, 25 bp, Artificial
  probe
  misc_feature (1)..(25): SEQ ID NO: 4509; WAN0249EX_at; Start 10; Stop 34
aaatccggctagagattacagagtt

SEQ ID NO: 19720 - DNA, 25 bp, Artificial
  probe
  misc_feature (1)..(25): SEQ ID NO: 4509; WAN0249EX_at; Start 72; Stop 96
tactgaaaggatatggtatttgtag

SEQ ID NO: 19721 - DNA, 25 bp, Artificial
  probe
  misc_feature (1)..(25): SEQ ID NO: 4509; WAN0249EX_at; Start 17; Stop 41
gctagagattacagagttatttttt

SEQ ID NO: 19722 - DNA, 25 bp, Artificial
  probe
  misc_feature (1)..(25): SEQ ID NO: 4509; WAN0249EX_at; Start 15; Stop 39
cggctagagattacagagttatttt

SEQ ID NO: 19723 - DNA, 25 bp, Artificial
  probe
  misc_feature (1)..(25): SEQ ID NO: 4509; WAN0249EX_at; Start 121; Stop 145
ggaagtcagtattaactagttatat

SEQ ID NO: 19724 - DNA, 25 bp, Artificial
  probe
  misc_feature (1)..(25): SEQ ID NO: 4509; WAN0249EX_at; Start 112; Stop 136
gttcttacaggaagtcagtattaac

SEQ ID NO: 19725 - DNA, 25 bp, Artificial
  probe
  misc_feature (1)..(25): SEQ ID NO: 4509; WAN0249EX_at; Start 115; Stop 139
cttacaggaagtcagtattaactag

SEQ ID NO: 19726 - DNA, 25 bp, Artificial
  probe
  misc_feature (1)..(25): SEQ ID NO: 4509; WAN0249EX_at; Start 48; Stop 72
aacttcctacaagggtatattatct

SEQ ID NO: 19727 - DNA, 25 bp, Artificial
  probe
  misc_feature (1)..(25): SEQ ID NO: 4509; WAN0249EX_at; Start 50; Stop 74
cttcctacaagggtatattatctac

SEQ ID NO: 19728 - DNA, 25 bp, Artificial
  probe
  misc_feature (1)..(25): SEQ ID NO: 4509; WAN0249EX_at; Start 111; Stop 135
agttcttacaggaagtcagtattaa

SEQ ID NO: 19729 - DNA, 25 bp, Artificial
  probe
  misc_feature (1)..(25): SEQ ID NO: 4509; WAN0249EX_at; Start 13; Stop 37
tccggctagagattacagagttatt

SEQ ID NO: 19730 - DNA, 25 bp, Artificial
  probe
  misc_feature (1)..(25): SEQ ID NO: 4509; WAN0249EX_at; Start 126; Stop 150
tcagtattaactagttatattaggt

SEQ ID NO: 19731 - DNA, 25 bp, Artificial
  probe
  misc_feature (1)..(25): SEQ ID NO: 4509; WAN0249EX_at; Start 114; Stop 138
tcttacaggaagtcagtattaacta

SEQ ID NO: 19732 - DNA, 25 bp, Artificial
  probe
  misc_feature (1)..(25): SEQ ID NO: 380; WAN0249EY_at; Start 86; Stop 110
catctatgatgacatcgtataggcg

SEQ ID NO: 19733 - DNA, 25 bp, Artificial
  probe
  misc_feature (1)..(25): SEQ ID NO: 380; WAN0249EY_at; Start 7; Stop 31
ctatacgatgtcatcatagatgact

SEQ ID NO: 19734 - DNA, 25 bp, Artificial
  probe
  misc_feature (1)..(25): SEQ ID NO: 380; WAN0249EY_at; Start 10; Stop 34
tacgatgtcatcatagatgactata

SEQ ID NO: 19735 - DNA, 25 bp, Artificial
  probe
  misc_feature (1)..(25): SEQ ID NO: 380; WAN0249EY_at; Start 8; Stop 32
tatacgatgtcatcatagatgacta

SEQ ID NO: 19736 - DNA, 25 bp, Artificial
  probe
  misc_feature (1)..(25): SEQ ID NO: 380; WAN0249EY_at; Start 9; Stop 33
atacgatgtcatcatagatgactat

SEQ ID NO: 19737 - DNA, 25 bp, Artificial
  probe
  misc_feature (1)..(25): SEQ ID NO: 380; WAN0249EY_at; Start 80; Stop 104
tatagtcatctatgatgacatcgta

SEQ ID NO: 19738 - DNA, 25 bp, Artificial
  probe
  misc_feature (1)..(25): SEQ ID NO: 380; WAN0249EY_at; Start 2; Stop 26
ctcgcctatacgatgtcatcataga

SEQ ID NO: 19739 - DNA, 25 bp, Artificial
  probe
  misc_feature (1)..(25): SEQ ID NO: 380; WAN0249EY_at; Start 85; Stop 109
tcatctatgatgacatcgtataggc

SEQ ID NO: 19740 - DNA, 25 bp, Artificial
  probe
  misc_feature (1)..(25): SEQ ID NO: 380; WAN0249EY_at; Start 11; Stop 35
acgatgtcatcatagatgactatat

SEQ ID NO: 19741 - DNA, 25 bp, Artificial
  probe
  misc_feature (1)..(25): SEQ ID NO: 380; WAN0249EY_at; Start 6; Stop 30
cctatacgatgtcatcatagatgac

SEQ ID NO: 19742 - DNA, 25 bp, Artificial
  probe
  misc_feature (1)..(25): SEQ ID NO: 380; WAN0249EY_at; Start 87; Stop 111
atctatgatgacatcgtataggcga

SEQ ID NO: 19743 - DNA, 25 bp, Artificial
  probe
  misc_feature (1)..(25): SEQ ID NO: 380; WAN0249EY_at; Start 84; Stop 108
gtcatctatgatgacatcgtatagg

SEQ ID NO: 19744 - DNA, 25 bp, Artificial
  probe
  misc_feature (1)..(25): SEQ ID NO: 380; WAN0249EY_at; Start 79; Stop 103
atatagtcatctatgatgacatcgt

SEQ ID NO: 19745 - DNA, 25 bp, Artificial
  probe
  misc_feature (1)..(25): SEQ ID NO: 380; WAN0249EY_at; Start 88; Stop 112
tctatgatgacatcgtataggcgag

SEQ ID NO: 19746 - DNA, 25 bp, Artificial
  probe
  misc_feature (1)..(25): SEQ ID NO: 380; WAN0249EY_at; Start 5; Stop 29
gcctatacgatgtcatcatagatga

SEQ ID NO: 19747 - DNA, 25 bp, Artificial
  probe
  misc_feature (1)..(25): SEQ ID NO: 380; WAN0249EY_at; Start 3; Stop 27
tcgcctatacgatgtcatcatagat

SEQ ID NO: 19748 - DNA, 25 bp, Artificial
  probe
  misc_feature (1)..(25): SEQ ID NO: 380; WAN0249EY_at; Start 4; Stop 28
cgcctatacgatgtcatcatagatg

SEQ ID NO: 19749 - DNA, 25 bp, Artificial
  probe
  misc_feature (1)..(25): SEQ ID NO: 380; WAN0249EY_at; Start 81; Stop 105
atagtcatctatgatgacatcgtat

SEQ ID NO: 19750 - DNA, 25 bp, Artificial
  probe
  misc_feature (1)..(25): SEQ ID NO: 380; WAN0249EY_at; Start 82; Stop 106
tagtcatctatgatgacatcgtata

SEQ ID NO: 19751 - DNA, 25 bp, Artificial
  probe
  misc_feature (1)..(25): SEQ ID NO: 380; WAN0249EY_at; Start 1; Stop 25
actcgcctatacgatgtcatcatag

SEQ ID NO: 19752 - DNA, 25 bp, Artificial
  probe
  misc_feature (1)..(25): SEQ ID NO: 380; WAN0249EY_at; Start 83; Stop 107
agtcatctatgatgacatcgtatag

SEQ ID NO: 19753 - DNA, 25 bp, Artificial
  probe
  misc_feature (1)..(25): SEQ ID NO: 380; WAN0249EY_at; Start 89; Stop 113
ctatgatgacatcgtataggcgagt

SEQ ID NO: 19754 - DNA, 25 bp, Artificial
  probe
  misc_feature (1)..(25): SEQ ID NO: 4671; WAN0249EZ_at; Start 41; Stop 65
gatttatgctatgcttaaggtagaa

SEQ ID NO: 19755 - DNA, 25 bp, Artificial
  probe
  misc_feature (1)..(25): SEQ ID NO: 4671; WAN0249EZ_at; Start 19; Stop 43
cagattattttagcatttgtcagat

SEQ ID NO: 19756 - DNA, 25 bp, Artificial
  probe
  misc_feature (1)..(25): SEQ ID NO: 4671; WAN0249EZ_at; Start 44; Stop 68
ttatgctatgcttaaggtagaaaat

SEQ ID NO: 19757 - DNA, 25 bp, Artificial
  probe
  misc_feature (1)..(25): SEQ ID NO: 4671; WAN0249EZ_at; Start 38; Stop 62
tcagatttatgctatgcttaaggta

SEQ ID NO: 19758 - DNA, 25 bp, Artificial
  probe
  misc_feature (1)..(25): SEQ ID NO: 4671; WAN0249EZ_at; Start 11; Stop 35
aagagaaacagattattttagcatt

SEQ ID NO: 19759 - DNA, 25 bp, Artificial
  probe
  misc_feature (1)..(25): SEQ ID NO: 4671; WAN0249EZ_at; Start 12; Stop 36
agagaaacagattattttagcattt

SEQ ID NO: 19760 - DNA, 25 bp, Artificial
  probe
  misc_feature (1)..(25): SEQ ID NO: 4671; WAN0249EZ_at; Start 45; Stop 69
tatgctatgcttaaggtagaaaatg

SEQ ID NO: 19761 - DNA, 25 bp, Artificial
  probe
  misc_feature (1)..(25): SEQ ID NO: 4671; WAN0249EZ_at; Start 39; Stop 63
cagatttatgctatgcttaaggtag

SEQ ID NO: 19762 - DNA, 25 bp, Artificial
  probe
  misc_feature (1)..(25): SEQ ID NO: 4671; WAN0249EZ_at; Start 42; Stop 66
atttatgctatgcttaaggtagaaa

SEQ ID NO: 19763 - DNA, 25 bp, Artificial
  probe
  misc_feature (1)..(25): SEQ ID NO: 4671; WAN0249EZ_at; Start 21; Stop 45
gattattttagcatttgtcagattt

SEQ ID NO: 19764 - DNA, 25 bp, Artificial
  probe
  misc_feature (1)..(25): SEQ ID NO: 4671; WAN0249EZ_at; Start 16; Stop 40
aaacagattattttagcatttgtca

SEQ ID NO: 19765 - DNA, 25 bp, Artificial
  probe
  misc_feature (1)..(25): SEQ ID NO: 4671; WAN0249EZ_at; Start 35; Stop 59
ttgtcagatttatgctatgcttaag

SEQ ID NO: 19766 - DNA, 25 bp, Artificial
  probe
  misc_feature (1)..(25): SEQ ID NO: 4671; WAN0249EZ_at; Start 50; Stop 74
tatgcttaaggtagaaaatgaaagg

SEQ ID NO: 19767 - DNA, 25 bp, Artificial
  probe
  misc_feature (1)..(25): SEQ ID NO: 4671; WAN0249EZ_at; Start 47; Stop 71
tgctatgcttaaggtagaaaatgaa

SEQ ID NO: 19768 - DNA, 25 bp, Artificial
  probe
  misc_feature (1)..(25): SEQ ID NO: 4671; WAN0249EZ_at; Start 15; Stop 39
gaaacagattattttagcatttgtc

SEQ ID NO: 19769 - DNA, 25 bp, Artificial
  probe
  misc_feature (1)..(25): SEQ ID NO: 4671; WAN0249EZ_at; Start 10; Stop 34
aaagagaaacagattattttagcat

SEQ ID NO: 19770 - DNA, 25 bp, Artificial
  probe
  misc_feature (1)..(25): SEQ ID NO: 4671; WAN0249EZ_at; Start 18; Stop 42
acagattattttagcatttgtcaga

SEQ ID NO: 19771 - DNA, 25 bp, Artificial
  probe
  misc_feature (1)..(25): SEQ ID NO: 4671; WAN0249EZ_at; Start 51; Stop 75
atgcttaaggtagaaaatgaaaggg

SEQ ID NO: 19772 - DNA, 25 bp, Artificial
  probe
  misc_feature (1)..(25): SEQ ID NO: 4671; WAN0249EZ_at; Start 1; Stop 25
tgaaaataaaaagagaaacagatta

SEQ ID NO: 19773 - DNA, 25 bp, Artificial
  probe
  misc_feature (1)..(25): SEQ ID NO: 4671; WAN0249EZ_at; Start 49; Stop 73
ctatgcttaaggtagaaaatgaaag

SEQ ID NO: 19774 - DNA, 25 bp, Artificial
  probe
  misc_feature (1)..(25): SEQ ID NO: 4671; WAN0249EZ_at; Start 48; Stop 72
gctatgcttaaggtagaaaatgaaa

SEQ ID NO: 19775 - DNA, 25 bp, Artificial
  probe
  misc_feature (1)..(25): SEQ ID NO: 4671; WAN0249EZ_at; Start 36; Stop 60
tgtcagatttatgctatgcttaagg

SEQ ID NO: 19776 - DNA, 25 bp, Artificial
  probe
  misc_feature (1)..(25): SEQ ID NO: 4671; WAN0249EZ_at; Start 32; Stop 56
catttgtcagatttatgctatgctt

SEQ ID NO: 19777 - DNA, 25 bp, Artificial
  probe
  misc_feature (1)..(25): SEQ ID NO: 4671; WAN0249EZ_at; Start 46; Stop 70
atgctatgcttaaggtagaaaatga

SEQ ID NO: 19778 - DNA, 25 bp, Artificial
  probe
  misc_feature (1)..(25): SEQ ID NO: 4671; WAN0249EZ_at; Start 17; Stop 41
aacagattattttagcatttgtcag

SEQ ID NO: 19779 - DNA, 25 bp, Artificial
  probe
  misc_feature (1)..(25): SEQ ID NO: 4671; WAN0249EZ_at; Start 31; Stop 55
gcatttgtcagatttatgctatgct

SEQ ID NO: 19780 - DNA, 25 bp, Artificial
  probe
  misc_feature (1)..(25): SEQ ID NO: 4671; WAN0249EZ_at; Start 25; Stop 49
attttagcatttgtcagatttatgc

SEQ ID NO: 19781 - DNA, 25 bp, Artificial
  probe
  misc_feature (1)..(25): SEQ ID NO: 4671; WAN0249EZ_at; Start 24; Stop 48
tattttagcatttgtcagatttatg

SEQ ID NO: 19782 - DNA, 25 bp, Artificial
  probe
  misc_feature (1)..(25): SEQ ID NO: 4671; WAN0249EZ_at; Start 40; Stop 64
agatttatgctatgcttaaggtaga

SEQ ID NO: 19783 - DNA, 25 bp, Artificial
  probe
  misc_feature (1)..(25): SEQ ID NO: 4671; WAN0249EZ_at; Start 34; Stop 58
tttgtcagatttatgctatgcttaa

SEQ ID NO: 19784 - DNA, 25 bp, Artificial
  probe
  misc_feature (1)..(25): SEQ ID NO: 4671; WAN0249EZ_at; Start 37; Stop 61
gtcagatttatgctatgcttaaggt

SEQ ID NO: 19785 - DNA, 25 bp, Artificial
  probe
  misc_feature (1)..(25): SEQ ID NO: 4671; WAN0249EZ_at; Start 33; Stop 57
atttgtcagatttatgctatgctta

SEQ ID NO: 19786 - DNA, 25 bp, Artificial
  probe
  misc_feature (1)..(25): SEQ ID NO: 4671; WAN0249EZ_at; Start 30; Stop 54
agcatttgtcagatttatgctatgc

SEQ ID NO: 19787 - DNA, 25 bp, Artificial
  probe
  misc_feature (1)..(25): SEQ ID NO: 4671; WAN0249EZ_at; Start 43; Stop 67
tttatgctatgcttaaggtagaaaa

SEQ ID NO: 19788 - DNA, 25 bp, Artificial
  probe
  misc_feature (1)..(25): SEQ ID NO: 5801; WAN0249F2_at; Start 34; Stop 58
gcataaatctgacaaatgctaaaat

SEQ ID NO: 19789 - DNA, 25 bp, Artificial
  probe
  misc_feature (1)..(25): SEQ ID NO: 5801; WAN0249F2_at; Start 13; Stop 37
tcattttctaccttaagcatagcat

SEQ ID NO: 19790 - DNA, 25 bp, Artificial
  probe
  misc_feature (1)..(25): SEQ ID NO: 5801; WAN0249F2_at; Start 17; Stop 41
tttctaccttaagcatagcataaat

SEQ ID NO: 19791 - DNA, 25 bp, Artificial
  probe
  misc_feature (1)..(25): SEQ ID NO: 5801; WAN0249F2_at; Start 25; Stop 49
ttaagcatagcataaatctgacaaa

SEQ ID NO: 19792 - DNA, 25 bp, Artificial
  probe
  misc_feature (1)..(25): SEQ ID NO: 5801; WAN0249F2_at; Start 38; Stop 62
aaatctgacaaatgctaaaataatc

SEQ ID NO: 19793 - DNA, 25 bp, Artificial
  probe
  misc_feature (1)..(25): SEQ ID NO: 5801; WAN0249F2_at; Start 20; Stop 44
ctaccttaagcatagcataaatctg

SEQ ID NO: 19794 - DNA, 25 bp, Artificial
  probe
  misc_feature (1)..(25): SEQ ID NO: 5801; WAN0249F2_at; Start 15; Stop 39
attttctaccttaagcatagcataa

SEQ ID NO: 19795 - DNA, 25 bp, Artificial
  probe
  misc_feature (1)..(25): SEQ ID NO: 5801; WAN0249F2_at; Start 37; Stop 61
taaatctgacaaatgctaaaataat

SEQ ID NO: 19796 - DNA, 25 bp, Artificial
  probe
  misc_feature (1)..(25): SEQ ID NO: 5801; WAN0249F2_at; Start 39; Stop 63
aatctgacaaatgctaaaataatct

SEQ ID NO: 19797 - DNA, 25 bp, Artificial
  probe
  misc_feature (1)..(25): SEQ ID NO: 5801; WAN0249F2_at; Start 32; Stop 56
tagcataaatctgacaaatgctaaa

SEQ ID NO: 19798 - DNA, 25 bp, Artificial
  probe
  misc_feature (1)..(25): SEQ ID NO: 5801; WAN0249F2_at; Start 12; Stop 36
ttcattttctaccttaagcatagca

SEQ ID NO: 19799 - DNA, 25 bp, Artificial
  probe
  misc_feature (1)..(25): SEQ ID NO: 5801; WAN0249F2_at; Start 35; Stop 59
cataaatctgacaaatgctaaaata

SEQ ID NO: 19800 - DNA, 25 bp, Artificial
  probe
  misc_feature (1)..(25): SEQ ID NO: 5801; WAN0249F2_at; Start 21; Stop 45
taccttaagcatagcataaatctga

SEQ ID NO: 19801 - DNA, 25 bp, Artificial
  probe
  misc_feature (1)..(25): SEQ ID NO: 5801; WAN0249F2_at; Start 18; Stop 42
ttctaccttaagcatagcataaatc

SEQ ID NO: 19802 - DNA, 25 bp, Artificial
  probe
  misc_feature (1)..(25): SEQ ID NO: 5801; WAN0249F2_at; Start 28; Stop 52
agcatagcataaatctgacaaatgc

SEQ ID NO: 19803 - DNA, 25 bp, Artificial
  probe
  misc_feature (1)..(25): SEQ ID NO: 5801; WAN0249F2_at; Start 42; Stop 66
ctgacaaatgctaaaataatctgtt

SEQ ID NO: 19804 - DNA, 25 bp, Artificial
  probe
  misc_feature (1)..(25): SEQ ID NO: 5801; WAN0249F2_at; Start 41; Stop 65
tctgacaaatgctaaaataatctgt

SEQ ID NO: 19805 - DNA, 25 bp, Artificial
  probe
  misc_feature (1)..(25): SEQ ID NO: 5801; WAN0249F2_at; Start 27; Stop 51
aagcatagcataaatctgacaaatg

SEQ ID NO: 19806 - DNA, 25 bp, Artificial
  probe
  misc_feature (1)..(25): SEQ ID NO: 5801; WAN0249F2_at; Start 24; Stop 48
cttaagcatagcataaatctgacaa

SEQ ID NO: 19807 - DNA, 25 bp, Artificial
  probe
  misc_feature (1)..(25): SEQ ID NO: 5801; WAN0249F2_at; Start 16; Stop 40
ttttctaccttaagcatagcataaa

SEQ ID NO: 19808 - DNA, 25 bp, Artificial
  probe
  misc_feature (1)..(25): SEQ ID NO: 5801; WAN0249F2_at; Start 48; Stop 72
aatgctaaaataatctgtttctctt

SEQ ID NO: 19809 - DNA, 25 bp, Artificial
  probe
  misc_feature (1)..(25): SEQ ID NO: 5801; WAN0249F2_at; Start 50; Stop 74
tgctaaaataatctgtttctctttt

SEQ ID NO: 19810 - DNA, 25 bp, Artificial
  probe
  misc_feature (1)..(25): SEQ ID NO: 5801; WAN0249F2_at; Start 30; Stop 54
catagcataaatctgacaaatgcta

SEQ ID NO: 19811 - DNA, 25 bp, Artificial
  probe
  misc_feature (1)..(25): SEQ ID NO: 5801; WAN0249F2_at; Start 44; Stop 68
gacaaatgctaaaataatctgtttc

SEQ ID NO: 19812 - DNA, 25 bp, Artificial
  probe
  misc_feature (1)..(25): SEQ ID NO: 5801; WAN0249F2_at; Start 23; Stop 47
ccttaagcatagcataaatctgaca

SEQ ID NO: 19813 - DNA, 25 bp, Artificial
  probe
  misc_feature (1)..(25): SEQ ID NO: 5801; WAN0249F2_at; Start 45; Stop 69
acaaatgctaaaataatctgtttct

SEQ ID NO: 19814 - DNA, 25 bp, Artificial
  probe
  misc_feature (1)..(25): SEQ ID NO: 5801; WAN0249F2_at; Start 40; Stop 64
atctgacaaatgctaaaataatctg

SEQ ID NO: 19815 - DNA, 25 bp, Artificial
  probe
  misc_feature (1)..(25): SEQ ID NO: 5801; WAN0249F2_at; Start 19; Stop 43
tctaccttaagcatagcataaatct

SEQ ID NO: 19816 - DNA, 25 bp, Artificial
  probe
  misc_feature (1)..(25): SEQ ID NO: 5801; WAN0249F2_at; Start 47; Stop 71
aaatgctaaaataatctgtttctct

SEQ ID NO: 19817 - DNA, 25 bp, Artificial
  probe
  misc_feature (1)..(25): SEQ ID NO: 5801; WAN0249F2_at; Start 29; Stop 53
gcatagcataaatctgacaaatgct

SEQ ID NO: 19818 - DNA, 25 bp, Artificial
  probe
  misc_feature (1)..(25): SEQ ID NO: 5801; WAN0249F2_at; Start 14; Stop 38
cattttctaccttaagcatagcata

SEQ ID NO: 19819 - DNA, 25 bp, Artificial
  probe
  misc_feature (1)..(25): SEQ ID NO: 5801; WAN0249F2_at; Start 43; Stop 67
tgacaaatgctaaaataatctgttt

SEQ ID NO: 19820 - DNA, 25 bp, Artificial
  probe
  misc_feature (1)..(25): SEQ ID NO: 5801; WAN0249F2_at; Start 22; Stop 46
accttaagcatagcataaatctgac

SEQ ID NO: 19821 - DNA, 25 bp, Artificial
  probe
  misc_feature (1)..(25): SEQ ID NO: 5801; WAN0249F2_at; Start 26; Stop 50
taagcatagcataaatctgacaaat

SEQ ID NO: 19822 - DNA, 25 bp, Artificial
  probe
  misc_feature (1)..(25): SEQ ID NO: 239; WAN0249F3_at; Start 28; Stop 52
gtgaaattcacacaatctcctcaca

SEQ ID NO: 19823 - DNA, 25 bp, Artificial
  probe
  misc_feature (1)..(25): SEQ ID NO: 239; WAN0249F3_at; Start 27; Stop 51
tgtgaaattcacacaatctcctcac

SEQ ID NO: 19824 - DNA, 25 bp, Artificial
  probe
  misc_feature (1)..(25): SEQ ID NO: 239; WAN0249F3_at; Start 23; Stop 47
tttttgtgaaattcacacaatctcc

SEQ ID NO: 19825 - DNA, 25 bp, Artificial
  probe
  misc_feature (1)..(25): SEQ ID NO: 239; WAN0249F3_at; Start 15; Stop 39
ccaggtcttttttgtgaaattcaca

SEQ ID NO: 19826 - DNA, 25 bp, Artificial
  probe
  misc_feature (1)..(25): SEQ ID NO: 239; WAN0249F3_at; Start 14; Stop 38
tccaggtcttttttgtgaaattcac

SEQ ID NO: 19827 - DNA, 25 bp, Artificial
  probe
  misc_feature (1)..(25): SEQ ID NO: 239; WAN0249F3_at; Start 16; Stop 40
caggtcttttttgtgaaattcacac

SEQ ID NO: 19828 - DNA, 25 bp, Artificial
  probe
  misc_feature (1)..(25): SEQ ID NO: 239; WAN0249F3_at; Start 13; Stop 37
atccaggtcttttttgtgaaattca

SEQ ID NO: 19829 - DNA, 25 bp, Artificial
  probe
  misc_feature (1)..(25): SEQ ID NO: 239; WAN0249F3_at; Start 37; Stop 61
acacaatctcctcacatttttttaa

SEQ ID NO: 19830 - DNA, 25 bp, Artificial
  probe
  misc_feature (1)..(25): SEQ ID NO: 239; WAN0249F3_at; Start 31; Stop 55
aaattcacacaatctcctcacattt

SEQ ID NO: 19831 - DNA, 25 bp, Artificial
  probe
  misc_feature (1)..(25): SEQ ID NO: 239; WAN0249F3_at; Start 74; Stop 98
gttgataaacaagaaagcgctttat

SEQ ID NO: 19832 - DNA, 25 bp, Artificial
  probe
  misc_feature (1)..(25): SEQ ID NO: 239; WAN0249F3_at; Start 7; Stop 31
tggttaatccaggtcttttttgtga

SEQ ID NO: 19833 - DNA, 25 bp, Artificial
  probe
  misc_feature (1)..(25): SEQ ID NO: 239; WAN0249F3_at; Start 25; Stop 49
tttgtgaaattcacacaatctcctc

SEQ ID NO: 19834 - DNA, 25 bp, Artificial
  probe
  misc_feature (1)..(25): SEQ ID NO: 239; WAN0249F3_at; Start 22; Stop 46
ttttttgtgaaattcacacaatctc

SEQ ID NO: 19835 - DNA, 25 bp, Artificial
  probe
  misc_feature (1)..(25): SEQ ID NO: 239; WAN0249F3_at; Start 20; Stop 44
tcttttttgtgaaattcacacaatc

SEQ ID NO: 19836 - DNA, 25 bp, Artificial
  probe
  misc_feature (1)..(25): SEQ ID NO: 239; WAN0249F3_at; Start 24; Stop 48
ttttgtgaaattcacacaatctcct

SEQ ID NO: 19837 - DNA, 25 bp, Artificial
  probe
  misc_feature (1)..(25): SEQ ID NO: 239; WAN0249F3_at; Start 18; Stop 42
ggtcttttttgtgaaattcacacaa

SEQ ID NO: 19838 - DNA, 25 bp, Artificial
  probe
  misc_feature (1)..(25): SEQ ID NO: 239; WAN0249F3_at; Start 36; Stop 60
cacacaatctcctcacattttttta

SEQ ID NO: 19839 - DNA, 25 bp, Artificial
  probe
  misc_feature (1)..(25): SEQ ID NO: 239; WAN0249F3_at; Start 38; Stop 62
cacaatctcctcacatttttttaaa

SEQ ID NO: 19840 - DNA, 25 bp, Artificial
  probe
  misc_feature (1)..(25): SEQ ID NO: 239; WAN0249F3_at; Start 32; Stop 56
aattcacacaatctcctcacatttt

SEQ ID NO: 19841 - DNA, 25 bp, Artificial
  probe
  misc_feature (1)..(25): SEQ ID NO: 239; WAN0249F3_at; Start 71; Stop 95
aaagttgataaacaagaaagcgctt

SEQ ID NO: 19842 - DNA, 25 bp, Artificial
  probe
  misc_feature (1)..(25): SEQ ID NO: 239; WAN0249F3_at; Start 29; Stop 53
tgaaattcacacaatctcctcacat

SEQ ID NO: 19843 - DNA, 25 bp, Artificial
  probe
  misc_feature (1)..(25): SEQ ID NO: 239; WAN0249F3_at; Start 19; Stop 43
gtcttttttgtgaaattcacacaat

SEQ ID NO: 19844 - DNA, 25 bp, Artificial
  probe
  misc_feature (1)..(25): SEQ ID NO: 239; WAN0249F3_at; Start 70; Stop 94
aaaagttgataaacaagaaagcgct

SEQ ID NO: 19845 - DNA, 25 bp, Artificial
  probe
  misc_feature (1)..(25): SEQ ID NO: 239; WAN0249F3_at; Start 35; Stop 59
tcacacaatctcctcacattttttt

SEQ ID NO: 19846 - DNA, 25 bp, Artificial
  probe
  misc_feature (1)..(25): SEQ ID NO: 239; WAN0249F3_at; Start 73; Stop 97
agttgataaacaagaaagcgcttta

SEQ ID NO: 19847 - DNA, 25 bp, Artificial
  probe
  misc_feature (1)..(25): SEQ ID NO: 239; WAN0249F3_at; Start 26; Stop 50
ttgtgaaattcacacaatctcctca

SEQ ID NO: 19848 - DNA, 25 bp, Artificial
  probe
  misc_feature (1)..(25): SEQ ID NO: 239; WAN0249F3_at; Start 21; Stop 45
cttttttgtgaaattcacacaatct

SEQ ID NO: 19849 - DNA, 25 bp, Artificial
  probe
  misc_feature (1)..(25): SEQ ID NO: 239; WAN0249F3_at; Start 33; Stop 57
attcacacaatctcctcacattttt

SEQ ID NO: 19850 - DNA, 25 bp, Artificial
  probe
  misc_feature (1)..(25): SEQ ID NO: 239; WAN0249F3_at; Start 30; Stop 54
gaaattcacacaatctcctcacatt

SEQ ID NO: 19851 - DNA, 25 bp, Artificial
  probe
  misc_feature (1)..(25): SEQ ID NO: 239; WAN0249F3_at; Start 72; Stop 96
aagttgataaacaagaaagcgcttt

SEQ ID NO: 19852 - DNA, 25 bp, Artificial
  probe
  misc_feature (1)..(25): SEQ ID NO: 239; WAN0249F3_at; Start 75; Stop 99
ttgataaacaagaaagcgctttatt

SEQ ID NO: 19853 - DNA, 25 bp, Artificial
  probe
  misc_feature (1)..(25): SEQ ID NO: 239; WAN0249F3_at; Start 34; Stop 58
ttcacacaatctcctcacatttttt

SEQ ID NO: 19854 - DNA, 25 bp, Artificial
  probe
  misc_feature (1)..(25): SEQ ID NO: 239; WAN0249F3_at; Start 17; Stop 41
aggtcttttttgtgaaattcacaca

SEQ ID NO: 19855 - DNA, 25 bp, Artificial
  probe
  misc_feature (1)..(25): SEQ ID NO: 253; WAN0249F4_at; Start 43; Stop 67
aaaaatgtgaggagattgtgtgaat

SEQ ID NO: 19856 - DNA, 25 bp, Artificial
  probe
  misc_feature (1)..(25): SEQ ID NO: 253; WAN0249F4_at; Start 42; Stop 66
aaaaaatgtgaggagattgtgtgaa

SEQ ID NO: 19857 - DNA, 25 bp, Artificial
  probe
  misc_feature (1)..(25): SEQ ID NO: 253; WAN0249F4_at; Start 49; Stop 73
gtgaggagattgtgtgaatttcaca

SEQ ID NO: 19858 - DNA, 25 bp, Artificial
  probe
  misc_feature (1)..(25): SEQ ID NO: 253; WAN0249F4_at; Start 50; Stop 74
tgaggagattgtgtgaatttcacaa

SEQ ID NO: 19859 - DNA, 25 bp, Artificial
  probe
  misc_feature (1)..(25): SEQ ID NO: 253; WAN0249F4_at; Start 41; Stop 65
aaaaaaatgtgaggagattgtgtga

SEQ ID NO: 19860 - DNA, 25 bp, Artificial
  probe
  misc_feature (1)..(25): SEQ ID NO: 253; WAN0249F4_at; Start 46; Stop 70
aatgtgaggagattgtgtgaatttc

SEQ ID NO: 19861 - DNA, 25 bp, Artificial
  probe
  misc_feature (1)..(25): SEQ ID NO: 253; WAN0249F4_at; Start 5; Stop 29
aagcgctttcttgtttatcaacttt

SEQ ID NO: 19862 - DNA, 25 bp, Artificial
  probe
  misc_feature (1)..(25): SEQ ID NO: 253; WAN0249F4_at; Start 44; Stop 68
aaaatgtgaggagattgtgtgaatt

SEQ ID NO: 19863 - DNA, 25 bp, Artificial
  probe
  misc_feature (1)..(25): SEQ ID NO: 253; WAN0249F4_at; Start 69; Stop 93
tcacaaaaaagacctggattaacca

SEQ ID NO: 19864 - DNA, 25 bp, Artificial
  probe
  misc_feature (1)..(25): SEQ ID NO: 253; WAN0249F4_at; Start 47; Stop 71
atgtgaggagattgtgtgaatttca

SEQ ID NO: 19865 - DNA, 25 bp, Artificial
  probe
  misc_feature (1)..(25): SEQ ID NO: 253; WAN0249F4_at; Start 54; Stop 78
gagattgtgtgaatttcacaaaaaa

SEQ ID NO: 19866 - DNA, 25 bp, Artificial
  probe
  misc_feature (1)..(25): SEQ ID NO: 253; WAN0249F4_at; Start 51; Stop 75
gaggagattgtgtgaatttcacaaa

SEQ ID NO: 19867 - DNA, 25 bp, Artificial
  probe
  misc_feature (1)..(25): SEQ ID NO: 253; WAN0249F4_at; Start 3; Stop 27
taaagcgctttcttgtttatcaact

SEQ ID NO: 19868 - DNA, 25 bp, Artificial
  probe
  misc_feature (1)..(25): SEQ ID NO: 253; WAN0249F4_at; Start 52; Stop 76
aggagattgtgtgaatttcacaaaa

SEQ ID NO: 19869 - DNA, 25 bp, Artificial
  probe
  misc_feature (1)..(25): SEQ ID NO: 253; WAN0249F4_at; Start 4; Stop 28
aaagcgctttcttgtttatcaactt

SEQ ID NO: 19870 - DNA, 25 bp, Artificial
  probe
  misc_feature (1)..(25): SEQ ID NO: 253; WAN0249F4_at; Start 39; Stop 63
ttaaaaaaatgtgaggagattgtgt

SEQ ID NO: 19871 - DNA, 25 bp, Artificial
  probe
  misc_feature (1)..(25): SEQ ID NO: 253; WAN0249F4_at; Start 53; Stop 77
ggagattgtgtgaatttcacaaaaa

SEQ ID NO: 19872 - DNA, 25 bp, Artificial
  probe
  misc_feature (1)..(25): SEQ ID NO: 253; WAN0249F4_at; Start 55; Stop 79
agattgtgtgaatttcacaaaaaag

SEQ ID NO: 19873 - DNA, 25 bp, Artificial
  probe
  misc_feature (1)..(25): SEQ ID NO: 253; WAN0249F4_at; Start 48; Stop 72
tgtgaggagattgtgtgaatttcac

SEQ ID NO: 19874 - DNA, 25 bp, Artificial
  probe
  misc_feature (1)..(25): SEQ ID NO: 253; WAN0249F4_at; Start 6; Stop 30
agcgctttcttgtttatcaactttt

SEQ ID NO: 19875 - DNA, 25 bp, Artificial
  probe
  misc_feature (1)..(25): SEQ ID NO: 253; WAN0249F4_at; Start 40; Stop 64
taaaaaaatgtgaggagattgtgtg

SEQ ID NO: 19876 - DNA, 25 bp, Artificial
  probe
  misc_feature (1)..(25): SEQ ID NO: 253; WAN0249F4_at; Start 45; Stop 69
aaatgtgaggagattgtgtgaattt

SEQ ID NO: 19877 - DNA, 25 bp, Artificial
  probe
  misc_feature (1)..(25): SEQ ID NO: 253; WAN0249F4_at; Start 38; Stop 62
tttaaaaaaatgtgaggagattgtg

SEQ ID NO: 19878 - DNA, 25 bp, Artificial
  probe
  misc_feature (1)..(25): SEQ ID NO: 505; WAN0249F5_at; Start 12; Stop 36
tattatgcttacaaattacttgagc

SEQ ID NO: 19879 - DNA, 25 bp, Artificial
  probe
  misc_feature (1)..(25): SEQ ID NO: 505; WAN0249F5_at; Start 7; Stop 31
gcaagtattatgcttacaaattact

SEQ ID NO: 19880 - DNA, 25 bp, Artificial
  probe
  misc_feature (1)..(25): SEQ ID NO: 505; WAN0249F5_at; Start 5; Stop 29
tcgcaagtattatgcttacaaatta

SEQ ID NO: 19881 - DNA, 25 bp, Artificial
  probe
  misc_feature (1)..(25): SEQ ID NO: 505; WAN0249F5_at; Start 18; Stop 42
gcttacaaattacttgagcaattaa

SEQ ID NO: 19882 - DNA, 25 bp, Artificial
  probe
  misc_feature (1)..(25): SEQ ID NO: 505; WAN0249F5_at; Start 86; Stop 110
tttagttaattgctcaagtaatttg

SEQ ID NO: 19883 - DNA, 25 bp, Artificial
  probe
  misc_feature (1)..(25): SEQ ID NO: 505; WAN0249F5_at; Start 81; Stop 105
tatattttagttaattgctcaagta

SEQ ID NO: 19884 - DNA, 25 bp, Artificial
  probe
  misc_feature (1)..(25): SEQ ID NO: 505; WAN0249F5_at; Start 6; Stop 30
cgcaagtattatgcttacaaattac

SEQ ID NO: 19885 - DNA, 25 bp, Artificial
  probe
  misc_feature (1)..(25): SEQ ID NO: 505; WAN0249F5_at; Start 98; Stop 122
ctcaagtaatttgtaagcataatac

SEQ ID NO: 19886 - DNA, 25 bp, Artificial
  probe
  misc_feature (1)..(25): SEQ ID NO: 505; WAN0249F5_at; Start 13; Stop 37
attatgcttacaaattacttgagca

SEQ ID NO: 19887 - DNA, 25 bp, Artificial
  probe
  misc_feature (1)..(25): SEQ ID NO: 505; WAN0249F5_at; Start 2; Stop 26
gtttcgcaagtattatgcttacaaa

SEQ ID NO: 19888 - DNA, 25 bp, Artificial
  probe
  misc_feature (1)..(25): SEQ ID NO: 505; WAN0249F5_at; Start 83; Stop 107
tattttagttaattgctcaagtaat

SEQ ID NO: 19889 - DNA, 25 bp, Artificial
  probe
  misc_feature (1)..(25): SEQ ID NO: 505; WAN0249F5_at; Start 104; Stop 128
taatttgtaagcataatacttgcga

SEQ ID NO: 19890 - DNA, 25 bp, Artificial
  probe
  misc_feature (1)..(25): SEQ ID NO: 505; WAN0249F5_at; Start 14; Stop 38
ttatgcttacaaattacttgagcaa

SEQ ID NO: 19891 - DNA, 25 bp, Artificial
  probe
  misc_feature (1)..(25): SEQ ID NO: 505; WAN0249F5_at; Start 91; Stop 115
ttaattgctcaagtaatttgtaagc

SEQ ID NO: 19892 - DNA, 25 bp, Artificial
  probe
  misc_feature (1)..(25): SEQ ID NO: 505; WAN0249F5_at; Start 11; Stop 35
gtattatgcttacaaattacttgag

SEQ ID NO: 19893 - DNA, 25 bp, Artificial
  probe
  misc_feature (1)..(25): SEQ ID NO: 505; WAN0249F5_at; Start 97; Stop 121
gctcaagtaatttgtaagcataata

SEQ ID NO: 19894 - DNA, 25 bp, Artificial
  probe
  misc_feature (1)..(25): SEQ ID NO: 505; WAN0249F5_at; Start 93; Stop 117
aattgctcaagtaatttgtaagcat

SEQ ID NO: 19895 - DNA, 25 bp, Artificial
  probe
  misc_feature (1)..(25): SEQ ID NO: 505; WAN0249F5_at; Start 77; Stop 101
ggtttatattttagttaattgctca

SEQ ID NO: 19896 - DNA, 25 bp, Artificial
  probe
  misc_feature (1)..(25): SEQ ID NO: 505; WAN0249F5_at; Start 96; Stop 120
tgctcaagtaatttgtaagcataat

SEQ ID NO: 19897 - DNA, 25 bp, Artificial
  probe
  misc_feature (1)..(25): SEQ ID NO: 505; WAN0249F5_at; Start 23; Stop 47
caaattacttgagcaattaactaaa

SEQ ID NO: 19898 - DNA, 25 bp, Artificial
  probe
  misc_feature (1)..(25): SEQ ID NO: 505; WAN0249F5_at; Start 107; Stop 131
tttgtaagcataatacttgcgaaac

SEQ ID NO: 19899 - DNA, 25 bp, Artificial
  probe
  misc_feature (1)..(25): SEQ ID NO: 505; WAN0249F5_at; Start 15; Stop 39
tatgcttacaaattacttgagcaat

SEQ ID NO: 19900 - DNA, 25 bp, Artificial
  probe
  misc_feature (1)..(25): SEQ ID NO: 505; WAN0249F5_at; Start 17; Stop 41
tgcttacaaattacttgagcaatta

SEQ ID NO: 19901 - DNA, 25 bp, Artificial
  probe
  misc_feature (1)..(25): SEQ ID NO: 505; WAN0249F5_at; Start 103; Stop 127
gtaatttgtaagcataatacttgcg

SEQ ID NO: 19902 - DNA, 25 bp, Artificial
  probe
  misc_feature (1)..(25): SEQ ID NO: 505; WAN0249F5_at; Start 19; Stop 43
cttacaaattacttgagcaattaac

SEQ ID NO: 19903 - DNA, 25 bp, Artificial
  probe
  misc_feature (1)..(25): SEQ ID NO: 505; WAN0249F5_at; Start 1; Stop 25
agtttcgcaagtattatgcttacaa

SEQ ID NO: 19904 - DNA, 25 bp, Artificial
  probe
  misc_feature (1)..(25): SEQ ID NO: 505; WAN0249F5_at; Start 28; Stop 52
tacttgagcaattaactaaaatata

SEQ ID NO: 19905 - DNA, 25 bp, Artificial
  probe
  misc_feature (1)..(25): SEQ ID NO: 505; WAN0249F5_at; Start 92; Stop 116
taattgctcaagtaatttgtaagca

SEQ ID NO: 19906 - DNA, 25 bp, Artificial
  probe
  misc_feature (1)..(25): SEQ ID NO: 505; WAN0249F5_at; Start 108; Stop 132
ttgtaagcataatacttgcgaaact

SEQ ID NO: 19907 - DNA, 25 bp, Artificial
  probe
  misc_feature (1)..(25): SEQ ID NO: 505; WAN0249F5_at; Start 88; Stop 112
tagttaattgctcaagtaatttgta

SEQ ID NO: 19908 - DNA, 25 bp, Artificial
  probe
  misc_feature (1)..(25): SEQ ID NO: 505; WAN0249F5_at; Start 32; Stop 56
tgagcaattaactaaaatataaacc

SEQ ID NO: 19909 - DNA, 25 bp, Artificial
  probe
  misc_feature (1)..(25): SEQ ID NO: 505; WAN0249F5_at; Start 105; Stop 129
aatttgtaagcataatacttgcgaa

SEQ ID NO: 19910 - DNA, 25 bp, Artificial
  probe
  misc_feature (1)..(25): SEQ ID NO: 505; WAN0249F5_at; Start 21; Stop 45
tacaaattacttgagcaattaacta

SEQ ID NO: 19911 - DNA, 25 bp, Artificial
  probe
  misc_feature (1)..(25): SEQ ID NO: 505; WAN0249F5_at; Start 3; Stop 27
tttcgcaagtattatgcttacaaat

SEQ ID NO: 19912 - DNA, 25 bp, Artificial
  probe
  misc_feature (1)..(25): SEQ ID NO: 4759; WAN0249F6_at; Start 50; Stop 74
atgctgagacgacgatcctgggaac

SEQ ID NO: 19913 - DNA, 25 bp, Artificial
  probe
  misc_feature (1)..(25): SEQ ID NO: 4759; WAN0249F6_at; Start 56; Stop 80
agacgacgatcctgggaacttttca

SEQ ID NO: 19914 - DNA, 25 bp, Artificial
  probe
  misc_feature (1)..(25): SEQ ID NO: 4759; WAN0249F6_at; Start 33; Stop 57
aatttcacgtatttttgatgctgag

SEQ ID NO: 19915 - DNA, 25 bp, Artificial
  probe
  misc_feature (1)..(25): SEQ ID NO: 4759; WAN0249F6_at; Start 61; Stop 85
acgatcctgggaacttttcagatat

SEQ ID NO: 19916 - DNA, 25 bp, Artificial
  probe
  misc_feature (1)..(25): SEQ ID NO: 4759; WAN0249F6_at; Start 38; Stop 62
cacgtatttttgatgctgagacgac

SEQ ID NO: 19917 - DNA, 25 bp, Artificial
  probe
  misc_feature (1)..(25): SEQ ID NO: 4759; WAN0249F6_at; Start 64; Stop 88
atcctgggaacttttcagatatttt

SEQ ID NO: 19918 - DNA, 25 bp, Artificial
  probe
  misc_feature (1)..(25): SEQ ID NO: 4759; WAN0249F6_at; Start 36; Stop 60
ttcacgtatttttgatgctgagacg

SEQ ID NO: 19919 - DNA, 25 bp, Artificial
  probe
  misc_feature (1)..(25): SEQ ID NO: 4759; WAN0249F6_at; Start 55; Stop 79
gagacgacgatcctgggaacttttc

SEQ ID NO: 19920 - DNA, 25 bp, Artificial
  probe
  misc_feature (1)..(25): SEQ ID NO: 4759; WAN0249F6_at; Start 40; Stop 64
cgtatttttgatgctgagacgacga

SEQ ID NO: 19921 - DNA, 25 bp, Artificial
  probe
  misc_feature (1)..(25): SEQ ID NO: 4759; WAN0249F6_at; Start 42; Stop 66
tatttttgatgctgagacgacgatc

SEQ ID NO: 19922 - DNA, 25 bp, Artificial
  probe
  misc_feature (1)..(25): SEQ ID NO: 4759; WAN0249F6_at; Start 8; Stop 32
ccctgaaatttattttaattatgca

SEQ ID NO: 19923 - DNA, 25 bp, Artificial
  probe
  misc_feature (1)..(25): SEQ ID NO: 4759; WAN0249F6_at; Start 62; Stop 86
cgatcctgggaacttttcagatatt

SEQ ID NO: 19924 - DNA, 25 bp, Artificial
  probe
  misc_feature (1)..(25): SEQ ID NO: 4759; WAN0249F6_at; Start 63; Stop 87
gatcctgggaacttttcagatattt

SEQ ID NO: 19925 - DNA, 25 bp, Artificial
  probe
  misc_feature (1)..(25): SEQ ID NO: 4759; WAN0249F6_at; Start 52; Stop 76
gctgagacgacgatcctgggaactt

SEQ ID NO: 19926 - DNA, 25 bp, Artificial
  probe
  misc_feature (1)..(25): SEQ ID NO: 4759; WAN0249F6_at; Start 39; Stop 63
acgtatttttgatgctgagacgacg

SEQ ID NO: 19927 - DNA, 25 bp, Artificial
  probe
  misc_feature (1)..(25): SEQ ID NO: 4759; WAN0249F6_at; Start 48; Stop 72
tgatgctgagacgacgatcctggga

SEQ ID NO: 19928 - DNA, 25 bp, Artificial
  probe
  misc_feature (1)..(25): SEQ ID NO: 4759; WAN0249F6_at; Start 46; Stop 70
tttgatgctgagacgacgatcctgg

SEQ ID NO: 19929 - DNA, 25 bp, Artificial
  probe
  misc_feature (1)..(25): SEQ ID NO: 4759; WAN0249F6_at; Start 41; Stop 65
gtatttttgatgctgagacgacgat

SEQ ID NO: 19930 - DNA, 25 bp, Artificial
  probe
  misc_feature (1)..(25): SEQ ID NO: 4759; WAN0249F6_at; Start 60; Stop 84
gacgatcctgggaacttttcagata

SEQ ID NO: 19931 - DNA, 25 bp, Artificial
  probe
  misc_feature (1)..(25): SEQ ID NO: 4759; WAN0249F6_at; Start 45; Stop 69
ttttgatgctgagacgacgatcctg

SEQ ID NO: 19932 - DNA, 25 bp, Artificial
  probe
  misc_feature (1)..(25): SEQ ID NO: 4759; WAN0249F6_at; Start 29; Stop 53
tgcaaatttcacgtatttttgatgc

SEQ ID NO: 19933 - DNA, 25 bp, Artificial
  probe
  misc_feature (1)..(25): SEQ ID NO: 4759; WAN0249F6_at; Start 18; Stop 42
tattttaattatgcaaatttcacgt

SEQ ID NO: 19934 - DNA, 25 bp, Artificial
  probe
  misc_feature (1)..(25): SEQ ID NO: 4759; WAN0249F6_at; Start 43; Stop 67
atttttgatgctgagacgacgatcc

SEQ ID NO: 19935 - DNA, 25 bp, Artificial
  probe
  misc_feature (1)..(25): SEQ ID NO: 4759; WAN0249F6_at; Start 57; Stop 81
gacgacgatcctgggaacttttcag

SEQ ID NO: 19936 - DNA, 25 bp, Artificial
  probe
  misc_feature (1)..(25): SEQ ID NO: 4759; WAN0249F6_at; Start 44; Stop 68
tttttgatgctgagacgacgatcct

SEQ ID NO: 19937 - DNA, 25 bp, Artificial
  probe
  misc_feature (1)..(25): SEQ ID NO: 4759; WAN0249F6_at; Start 37; Stop 61
tcacgtatttttgatgctgagacga

SEQ ID NO: 19938 - DNA, 25 bp, Artificial
  probe
  misc_feature (1)..(25): SEQ ID NO: 4759; WAN0249F6_at; Start 53; Stop 77
ctgagacgacgatcctgggaacttt

SEQ ID NO: 19939 - DNA, 25 bp, Artificial
  probe
  misc_feature (1)..(25): SEQ ID NO: 4759; WAN0249F6_at; Start 51; Stop 75
tgctgagacgacgatcctgggaact

SEQ ID NO: 19940 - DNA, 25 bp, Artificial
  probe
  misc_feature (1)..(25): SEQ ID NO: 4759; WAN0249F6_at; Start 54; Stop 78
tgagacgacgatcctgggaactttt

SEQ ID NO: 19941 - DNA, 25 bp, Artificial
  probe
  misc_feature (1)..(25): SEQ ID NO: 4759; WAN0249F6_at; Start 59; Stop 83
cgacgatcctgggaacttttcagat

SEQ ID NO: 19942 - DNA, 25 bp, Artificial
  probe
  misc_feature (1)..(25): SEQ ID NO: 4759; WAN0249F6_at; Start 30; Stop 54
gcaaatttcacgtatttttgatgct

SEQ ID NO: 19943 - DNA, 25 bp, Artificial
  probe
  misc_feature (1)..(25): SEQ ID NO: 4759; WAN0249F6_at; Start 32; Stop 56
aaatttcacgtatttttgatgctga

SEQ ID NO: 19944 - DNA, 25 bp, Artificial
  probe
  misc_feature (1)..(25): SEQ ID NO: 4759; WAN0249F6_at; Start 35; Stop 59
tttcacgtatttttgatgctgagac

SEQ ID NO: 19945 - DNA, 25 bp, Artificial
  probe
  misc_feature (1)..(25): SEQ ID NO: 4759; WAN0249F6_at; Start 49; Stop 73
gatgctgagacgacgatcctgggaa

SEQ ID NO: 19946 - DNA, 25 bp, Artificial
  probe
  misc_feature (1)..(25): SEQ ID NO: 4451; WAN0249F7_at; Start 43; Stop 67
ccaggatcgtcgtctcagcatcaaa

SEQ ID NO: 19947 - DNA, 25 bp, Artificial
  probe
  misc_feature (1)..(25): SEQ ID NO: 4451; WAN0249F7_at; Start 30; Stop 54
atctgaaaagttcccaggatcgtcg

SEQ ID NO: 19948 - DNA, 25 bp, Artificial
  probe
  misc_feature (1)..(25): SEQ ID NO: 4451; WAN0249F7_at; Start 64; Stop 88
caaaaatacgtgaaatttgcataat

SEQ ID NO: 19949 - DNA, 25 bp, Artificial
  probe
  misc_feature (1)..(25): SEQ ID NO: 4451; WAN0249F7_at; Start 81; Stop 105
tgcataattaaaataaatttcaggg

SEQ ID NO: 19950 - DNA, 25 bp, Artificial
  probe
  misc_feature (1)..(25): SEQ ID NO: 4451; WAN0249F7_at; Start 54; Stop 78
gtctcagcatcaaaaatacgtgaaa

SEQ ID NO: 19951 - DNA, 25 bp, Artificial
  probe
  misc_feature (1)..(25): SEQ ID NO: 4451; WAN0249F7_at; Start 47; Stop 71
gatcgtcgtctcagcatcaaaaata

SEQ ID NO: 19952 - DNA, 25 bp, Artificial
  probe
  misc_feature (1)..(25): SEQ ID NO: 4451; WAN0249F7_at; Start 26; Stop 50
aaatatctgaaaagttcccaggatc

SEQ ID NO: 19953 - DNA, 25 bp, Artificial
  probe
  misc_feature (1)..(25): SEQ ID NO: 4451; WAN0249F7_at; Start 34; Stop 58
gaaaagttcccaggatcgtcgtctc

SEQ ID NO: 19954 - DNA, 25 bp, Artificial
  probe
  misc_feature (1)..(25): SEQ ID NO: 4451; WAN0249F7_at; Start 1; Stop 25
taatgatagatttagatagtcaaaa

SEQ ID NO: 19955 - DNA, 25 bp, Artificial
  probe
  misc_feature (1)..(25): SEQ ID NO: 4451; WAN0249F7_at; Start 35; Stop 59
aaaagttcccaggatcgtcgtctca

SEQ ID NO: 19956 - DNA, 25 bp, Artificial
  probe
  misc_feature (1)..(25): SEQ ID NO: 4451; WAN0249F7_at; Start 38; Stop 62
agttcccaggatcgtcgtctcagca

SEQ ID NO: 19957 - DNA, 25 bp, Artificial
  probe
  misc_feature (1)..(25): SEQ ID NO: 4451; WAN0249F7_at; Start 41; Stop 65
tcccaggatcgtcgtctcagcatca

SEQ ID NO: 19958 - DNA, 25 bp, Artificial
  probe
  misc_feature (1)..(25): SEQ ID NO: 4451; WAN0249F7_at; Start 37; Stop 61
aagttcccaggatcgtcgtctcagc

SEQ ID NO: 19959 - DNA, 25 bp, Artificial
  probe
  misc_feature (1)..(25): SEQ ID NO: 4451; WAN0249F7_at; Start 50; Stop 74
cgtcgtctcagcatcaaaaatacgt

SEQ ID NO: 19960 - DNA, 25 bp, Artificial
  probe
  misc_feature (1)..(25): SEQ ID NO: 4451; WAN0249F7_at; Start 39; Stop 63
gttcccaggatcgtcgtctcagcat

SEQ ID NO: 19961 - DNA, 25 bp, Artificial
  probe
  misc_feature (1)..(25): SEQ ID NO: 4451; WAN0249F7_at; Start 33; Stop 57
tgaaaagttcccaggatcgtcgtct

SEQ ID NO: 19962 - DNA, 25 bp, Artificial
  probe
  misc_feature (1)..(25): SEQ ID NO: 4451; WAN0249F7_at; Start 51; Stop 75
gtcgtctcagcatcaaaaatacgtg

SEQ ID NO: 19963 - DNA, 25 bp, Artificial
  probe
  misc_feature (1)..(25): SEQ ID NO: 4451; WAN0249F7_at; Start 57; Stop 81
tcagcatcaaaaatacgtgaaattt

SEQ ID NO: 19964 - DNA, 25 bp, Artificial
  probe
  misc_feature (1)..(25): SEQ ID NO: 4451; WAN0249F7_at; Start 44; Stop 68
caggatcgtcgtctcagcatcaaaa

SEQ ID NO: 19965 - DNA, 25 bp, Artificial
  probe
  misc_feature (1)..(25): SEQ ID NO: 4451; WAN0249F7_at; Start 46; Stop 70
ggatcgtcgtctcagcatcaaaaat

SEQ ID NO: 19966 - DNA, 25 bp, Artificial
  probe
  misc_feature (1)..(25): SEQ ID NO: 4451; WAN0249F7_at; Start 55; Stop 79
tctcagcatcaaaaatacgtgaaat

SEQ ID NO: 19967 - DNA, 25 bp, Artificial
  probe
  misc_feature (1)..(25): SEQ ID NO: 4451; WAN0249F7_at; Start 36; Stop 60
aaagttcccaggatcgtcgtctcag

SEQ ID NO: 19968 - DNA, 25 bp, Artificial
  probe
  misc_feature (1)..(25): SEQ ID NO: 4451; WAN0249F7_at; Start 52; Stop 76
tcgtctcagcatcaaaaatacgtga

SEQ ID NO: 19969 - DNA, 25 bp, Artificial
  probe
  misc_feature (1)..(25): SEQ ID NO: 4451; WAN0249F7_at; Start 27; Stop 51
aatatctgaaaagttcccaggatcg

SEQ ID NO: 19970 - DNA, 25 bp, Artificial
  probe
  misc_feature (1)..(25): SEQ ID NO: 4451; WAN0249F7_at; Start 45; Stop 69
aggatcgtcgtctcagcatcaaaaa

SEQ ID NO: 19971 - DNA, 25 bp, Artificial
  probe
  misc_feature (1)..(25): SEQ ID NO: 4451; WAN0249F7_at; Start 70; Stop 94
tacgtgaaatttgcataattaaaat

SEQ ID NO: 19972 - DNA, 25 bp, Artificial
  probe
  misc_feature (1)..(25): SEQ ID NO: 4451; WAN0249F7_at; Start 61; Stop 85
catcaaaaatacgtgaaatttgcat

SEQ ID NO: 19973 - DNA, 25 bp, Artificial
  probe
  misc_feature (1)..(25): SEQ ID NO: 4451; WAN0249F7_at; Start 49; Stop 73
tcgtcgtctcagcatcaaaaatacg

SEQ ID NO: 19974 - DNA, 25 bp, Artificial
  probe
  misc_feature (1)..(25): SEQ ID NO: 4451; WAN0249F7_at; Start 32; Stop 56
ctgaaaagttcccaggatcgtcgtc

SEQ ID NO: 19975 - DNA, 25 bp, Artificial
  probe
  misc_feature (1)..(25): SEQ ID NO: 4451; WAN0249F7_at; Start 53; Stop 77
cgtctcagcatcaaaaatacgtgaa

SEQ ID NO: 19976 - DNA, 25 bp, Artificial
  probe
  misc_feature (1)..(25): SEQ ID NO: 4451; WAN0249F7_at; Start 40; Stop 64
ttcccaggatcgtcgtctcagcatc

SEQ ID NO: 19977 - DNA, 25 bp, Artificial
  probe
  misc_feature (1)..(25): SEQ ID NO: 4451; WAN0249F7_at; Start 29; Stop 53
tatctgaaaagttcccaggatcgtc

SEQ ID NO: 19978 - DNA, 25 bp, Artificial
  probe
  misc_feature (1)..(25): SEQ ID NO: 4451; WAN0249F7_at; Start 60; Stop 84
gcatcaaaaatacgtgaaatttgca

SEQ ID NO: 19979 - DNA, 25 bp, Artificial
  probe
  misc_feature (1)..(25): SEQ ID NO: 4451; WAN0249F7_at; Start 25; Stop 49
aaaatatctgaaaagttcccaggat

SEQ ID NO: 19980 - DNA, 25 bp, Artificial
  probe
  misc_feature (1)..(25): SEQ ID NO: 362; WAN0249F8_at; Start 70; Stop 94
acctcacttttgttttctgctattt

SEQ ID NO: 19981 - DNA, 25 bp, Artificial
  probe
  misc_feature (1)..(25): SEQ ID NO: 362; WAN0249F8_at; Start 84; Stop 108
ttctgctattttatgctaaaatatt

SEQ ID NO: 19982 - DNA, 25 bp, Artificial
  probe
  misc_feature (1)..(25): SEQ ID NO: 362; WAN0249F8_at; Start 39; Stop 63
aggcaatagtttttgttttttcatg

SEQ ID NO: 19983 - DNA, 25 bp, Artificial
  probe
  misc_feature (1)..(25): SEQ ID NO: 362; WAN0249F8_at; Start 23; Stop 47
aaattaggaataataaaggcaatag

SEQ ID NO: 19984 - DNA, 25 bp, Artificial
  probe
  misc_feature (1)..(25): SEQ ID NO: 362; WAN0249F8_at; Start 41; Stop 65
gcaatagtttttgttttttcatgta

SEQ ID NO: 19985 - DNA, 25 bp, Artificial
  probe
  misc_feature (1)..(25): SEQ ID NO: 362; WAN0249F8_at; Start 25; Stop 49
attaggaataataaaggcaatagtt

SEQ ID NO: 19986 - DNA, 25 bp, Artificial
  probe
  misc_feature (1)..(25): SEQ ID NO: 362; WAN0249F8_at; Start 69; Stop 93
aacctcacttttgttttctgctatt

SEQ ID NO: 19987 - DNA, 25 bp, Artificial
  probe
  misc_feature (1)..(25): SEQ ID NO: 362; WAN0249F8_at; Start 68; Stop 92
aaacctcacttttgttttctgctat

SEQ ID NO: 19988 - DNA, 25 bp, Artificial
  probe
  misc_feature (1)..(25): SEQ ID NO: 362; WAN0249F8_at; Start 86; Stop 110
ctgctattttatgctaaaatattaa

SEQ ID NO: 19989 - DNA, 25 bp, Artificial
  probe
  misc_feature (1)..(25): SEQ ID NO: 362; WAN0249F8_at; Start 85; Stop 109
tctgctattttatgctaaaatatta

SEQ ID NO: 19990 - DNA, 25 bp, Artificial
  probe
  misc_feature (1)..(25): SEQ ID NO: 362; WAN0249F8_at; Start 74; Stop 98
cacttttgttttctgctattttatg

SEQ ID NO: 19991 - DNA, 25 bp, Artificial
  probe
  misc_feature (1)..(25): SEQ ID NO: 362; WAN0249F8_at; Start 9; Stop 33
cataattcctcctaaaattaggaat

SEQ ID NO: 19992 - DNA, 25 bp, Artificial
  probe
  misc_feature (1)..(25): SEQ ID NO: 362; WAN0249F8_at; Start 71; Stop 95
cctcacttttgttttctgctatttt

SEQ ID NO: 19993 - DNA, 25 bp, Artificial
  probe
  misc_feature (1)..(25): SEQ ID NO: 362; WAN0249F8_at; Start 5; Stop 29
taatcataattcctcctaaaattag

SEQ ID NO: 19994 - DNA, 25 bp, Artificial
  probe
  misc_feature (1)..(25): SEQ ID NO: 362; WAN0249F8_at; Start 4; Stop 28
ataatcataattcctcctaaaatta

SEQ ID NO: 19995 - DNA, 25 bp, Artificial
  probe
  misc_feature (1)..(25): SEQ ID NO: 362; WAN0249F8_at; Start 76; Stop 100
cttttgttttctgctattttatgct

SEQ ID NO: 19996 - DNA, 25 bp, Artificial
  probe
  misc_feature (1)..(25): SEQ ID NO: 362; WAN0249F8_at; Start 87; Stop 111
tgctattttatgctaaaatattaaa

SEQ ID NO: 19997 - DNA, 25 bp, Artificial
  probe
  misc_feature (1)..(25): SEQ ID NO: 362; WAN0249F8_at; Start 72; Stop 96
ctcacttttgttttctgctatttta

SEQ ID NO: 19998 - DNA, 25 bp, Artificial
  probe
  misc_feature (1)..(25): SEQ ID NO: 362; WAN0249F8_at; Start 7; Stop 31
atcataattcctcctaaaattagga

SEQ ID NO: 19999 - DNA, 25 bp, Artificial
  probe
  misc_feature (1)..(25): SEQ ID NO: 362; WAN0249F8_at; Start 73; Stop 97
tcacttttgttttctgctattttat

SEQ ID NO: 20000 - DNA, 25 bp, Artificial
  probe
  misc_feature (1)..(25): SEQ ID NO: 362; WAN0249F8_at; Start 88; Stop 112
gctattttatgctaaaatattaaaa

SEQ ID NO: 20001 - DNA, 25 bp, Artificial
  probe
  misc_feature (1)..(25): SEQ ID NO: 362; WAN0249F8_at; Start 2; Stop 26
cgataatcataattcctcctaaaat

SEQ ID NO: 20002 - DNA, 25 bp, Artificial
  probe
  misc_feature (1)..(25): SEQ ID NO: 362; WAN0249F8_at; Start 75; Stop 99
acttttgttttctgctattttatgc

SEQ ID NO: 20003 - DNA, 25 bp, Artificial
  probe
  misc_feature (1)..(25): SEQ ID NO: 362; WAN0249F8_at; Start 24; Stop 48
aattaggaataataaaggcaatagt

SEQ ID NO: 20004 - DNA, 25 bp, Artificial
  probe
  misc_feature (1)..(25): SEQ ID NO: 362; WAN0249F8_at; Start 6; Stop 30
aatcataattcctcctaaaattagg

SEQ ID NO: 20005 - DNA, 25 bp, Artificial
  probe
  misc_feature (1)..(25): SEQ ID NO: 362; WAN0249F8_at; Start 1; Stop 25
acgataatcataattcctcctaaaa

SEQ ID NO: 20006 - DNA, 25 bp, Artificial
  probe
  misc_feature (1)..(25): SEQ ID NO: 362; WAN0249F8_at; Start 3; Stop 27
gataatcataattcctcctaaaatt

SEQ ID NO: 20007 - DNA, 25 bp, Artificial
  probe
  misc_feature (1)..(25): SEQ ID NO: 362; WAN0249F8_at; Start 8; Stop 32
tcataattcctcctaaaattaggaa

SEQ ID NO: 20008 - DNA, 25 bp, Artificial
  probe
  misc_feature (1)..(25): SEQ ID NO: 3797; WAN0249F9_at; Start 110; Stop 134
ctattgcctttattattcctaattt

SEQ ID NO: 20009 - DNA, 25 bp, Artificial
  probe
  misc_feature (1)..(25): SEQ ID NO: 3797; WAN0249F9_at; Start 56; Stop 80
tagcataaaatagcagaaaacaaaa

SEQ ID NO: 20010 - DNA, 25 bp, Artificial
  probe
  misc_feature (1)..(25): SEQ ID NO: 3797; WAN0249F9_at; Start 55; Stop 79
ttagcataaaatagcagaaaacaaa

SEQ ID NO: 20011 - DNA, 25 bp, Artificial
  probe
  misc_feature (1)..(25): SEQ ID NO: 3797; WAN0249F9_at; Start 131; Stop 155
attttaggaggaattatgattatcg

SEQ ID NO: 20012 - DNA, 25 bp, Artificial
  probe
  misc_feature (1)..(25): SEQ ID NO: 3797; WAN0249F9_at; Start 128; Stop 152
ctaattttaggaggaattatgatta

SEQ ID NO: 20013 - DNA, 25 bp, Artificial
  probe
  misc_feature (1)..(25): SEQ ID NO: 3797; WAN0249F9_at; Start 124; Stop 148
attcctaattttaggaggaattatg

SEQ ID NO: 20014 - DNA, 25 bp, Artificial
  probe
  misc_feature (1)..(25): SEQ ID NO: 3797; WAN0249F9_at; Start 52; Stop 76
attttagcataaaatagcagaaaac

SEQ ID NO: 20015 - DNA, 25 bp, Artificial
  probe
  misc_feature (1)..(25): SEQ ID NO: 3797; WAN0249F9_at; Start 45; Stop 69
ttttaatattttagcataaaatagc

SEQ ID NO: 20016 - DNA, 25 bp, Artificial
  probe
  misc_feature (1)..(25): SEQ ID NO: 3797; WAN0249F9_at; Start 64; Stop 88
aatagcagaaaacaaaagtgaggtt

SEQ ID NO: 20017 - DNA, 25 bp, Artificial
  probe
  misc_feature (1)..(25): SEQ ID NO: 3797; WAN0249F9_at; Start 130; Stop 154
aattttaggaggaattatgattatc

SEQ ID NO: 20018 - DNA, 25 bp, Artificial
  probe
  misc_feature (1)..(25): SEQ ID NO: 3797; WAN0249F9_at; Start 109; Stop 133
actattgcctttattattcctaatt

SEQ ID NO: 20019 - DNA, 25 bp, Artificial
  probe
  misc_feature (1)..(25): SEQ ID NO: 3797; WAN0249F9_at; Start 108; Stop 132
aactattgcctttattattcctaat

SEQ ID NO: 20020 - DNA, 25 bp, Artificial
  probe
  misc_feature (1)..(25): SEQ ID NO: 3797; WAN0249F9_at; Start 50; Stop 74
atattttagcataaaatagcagaaa

SEQ ID NO: 20021 - DNA, 25 bp, Artificial
  probe
  misc_feature (1)..(25): SEQ ID NO: 3797; WAN0249F9_at; Start 129; Stop 153
taattttaggaggaattatgattat

SEQ ID NO: 20022 - DNA, 25 bp, Artificial
  probe
  misc_feature (1)..(25): SEQ ID NO: 3797; WAN0249F9_at; Start 46; Stop 70
tttaatattttagcataaaatagca

SEQ ID NO: 20023 - DNA, 25 bp, Artificial
  probe
  misc_feature (1)..(25): SEQ ID NO: 3797; WAN0249F9_at; Start 48; Stop 72
taatattttagcataaaatagcaga

SEQ ID NO: 20024 - DNA, 25 bp, Artificial
  probe
  misc_feature (1)..(25): SEQ ID NO: 3797; WAN0249F9_at; Start 54; Stop 78
tttagcataaaatagcagaaaacaa

SEQ ID NO: 20025 - DNA, 25 bp, Artificial
  probe
  misc_feature (1)..(25): SEQ ID NO: 3797; WAN0249F9_at; Start 63; Stop 87
aaatagcagaaaacaaaagtgaggt

SEQ ID NO: 20026 - DNA, 25 bp, Artificial
  probe
  misc_feature (1)..(25): SEQ ID NO: 3797; WAN0249F9_at; Start 62; Stop 86
aaaatagcagaaaacaaaagtgagg

SEQ ID NO: 20027 - DNA, 25 bp, Artificial
  probe
  misc_feature (1)..(25): SEQ ID NO: 3797; WAN0249F9_at; Start 61; Stop 85
taaaatagcagaaaacaaaagtgag

SEQ ID NO: 20028 - DNA, 25 bp, Artificial
  probe
  misc_feature (1)..(25): SEQ ID NO: 3797; WAN0249F9_at; Start 126; Stop 150
tcctaattttaggaggaattatgat

SEQ ID NO: 20029 - DNA, 25 bp, Artificial
  probe
  misc_feature (1)..(25): SEQ ID NO: 3797; WAN0249F9_at; Start 57; Stop 81
agcataaaatagcagaaaacaaaag

SEQ ID NO: 20030 - DNA, 25 bp, Artificial
  probe
  misc_feature (1)..(25): SEQ ID NO: 3797; WAN0249F9_at; Start 51; Stop 75
tattttagcataaaatagcagaaaa

SEQ ID NO: 20031 - DNA, 25 bp, Artificial
  probe
  misc_feature (1)..(25): SEQ ID NO: 3797; WAN0249F9_at; Start 125; Stop 149
ttcctaattttaggaggaattatga

SEQ ID NO: 20032 - DNA, 25 bp, Artificial
  probe
  misc_feature (1)..(25): SEQ ID NO: 3797; WAN0249F9_at; Start 127; Stop 151
cctaattttaggaggaattatgatt

SEQ ID NO: 20033 - DNA, 25 bp, Artificial
  probe
  misc_feature (1)..(25): SEQ ID NO: 3797; WAN0249F9_at; Start 60; Stop 84
ataaaatagcagaaaacaaaagtga

SEQ ID NO: 20034 - DNA, 25 bp, Artificial
  probe
  misc_feature (1)..(25): SEQ ID NO: 3797; WAN0249F9_at; Start 47; Stop 71
ttaatattttagcataaaatagcag

SEQ ID NO: 20035 - DNA, 25 bp, Artificial
  probe
  misc_feature (1)..(25): SEQ ID NO: 3797; WAN0249F9_at; Start 65; Stop 89
atagcagaaaacaaaagtgaggttt

SEQ ID NO: 20036 - DNA, 25 bp, Artificial
  probe
  misc_feature (1)..(25): SEQ ID NO: 3797; WAN0249F9_at; Start 53; Stop 77
ttttagcataaaatagcagaaaaca

SEQ ID NO: 20037 - DNA, 25 bp, Artificial
  probe
  misc_feature (1)..(25): SEQ ID NO: 3797; WAN0249F9_at; Start 49; Stop 73
aatattttagcataaaatagcagaa

SEQ ID NO: 20038 - DNA, 25 bp, Artificial
  probe
  misc_feature (1)..(25): SEQ ID NO: 3797; WAN0249F9_at; Start 59; Stop 83
cataaaatagcagaaaacaaaagtg

SEQ ID NO: 20039 - DNA, 25 bp, Artificial
  probe
  misc_feature (1)..(25): SEQ ID NO: 3797; WAN0249F9_at; Start 132; Stop 156
ttttaggaggaattatgattatcgt

SEQ ID NO: 20040 - DNA, 25 bp, Artificial
  probe
  misc_feature (1)..(25): SEQ ID NO: 3797; WAN0249F9_at; Start 58; Stop 82
gcataaaatagcagaaaacaaaagt

SEQ ID NO: 20041 - DNA, 25 bp, Artificial
  probe
  misc_feature (1)..(25): SEQ ID NO: 4353; WAN0249FA_at; Start 11; Stop 35
tcctgttaaattgtcaggccagaac

SEQ ID NO: 20042 - DNA, 25 bp, Artificial
  probe
  misc_feature (1)..(25): SEQ ID NO: 4353; WAN0249FA_at; Start 51; Stop 75
ggttcagatacttatttagttcaag

SEQ ID NO: 20043 - DNA, 25 bp, Artificial
  probe
  misc_feature (1)..(25): SEQ ID NO: 4353; WAN0249FA_at; Start 66; Stop 90
ttagttcaagagctgaactgaacac

SEQ ID NO: 20044 - DNA, 25 bp, Artificial
  probe
  misc_feature (1)..(25): SEQ ID NO: 4353; WAN0249FA_at; Start 64; Stop 88
atttagttcaagagctgaactgaac

SEQ ID NO: 20045 - DNA, 25 bp, Artificial
  probe
  misc_feature (1)..(25): SEQ ID NO: 4353; WAN0249FA_at; Start 5; Stop 29
attttctcctgttaaattgtcaggc

SEQ ID NO: 20046 - DNA, 25 bp, Artificial
  probe
  misc_feature (1)..(25): SEQ ID NO: 4353; WAN0249FA_at; Start 18; Stop 42
aaattgtcaggccagaacggccagt

SEQ ID NO: 20047 - DNA, 25 bp, Artificial
  probe
  misc_feature (1)..(25): SEQ ID NO: 4353; WAN0249FA_at; Start 24; Stop 48
tcaggccagaacggccagttttcac

SEQ ID NO: 20048 - DNA, 25 bp, Artificial
  probe
  misc_feature (1)..(25): SEQ ID NO: 4353; WAN0249FA_at; Start 13; Stop 37
ctgttaaattgtcaggccagaacgg

SEQ ID NO: 20049 - DNA, 25 bp, Artificial
  probe
  misc_feature (1)..(25): SEQ ID NO: 4353; WAN0249FA_at; Start 22; Stop 46
tgtcaggccagaacggccagttttc

SEQ ID NO: 20050 - DNA, 25 bp, Artificial
  probe
  misc_feature (1)..(25): SEQ ID NO: 4353; WAN0249FA_at; Start 12; Stop 36
cctgttaaattgtcaggccagaacg

SEQ ID NO: 20051 - DNA, 25 bp, Artificial
  probe
  misc_feature (1)..(25): SEQ ID NO: 4353; WAN0249FA_at; Start 17; Stop 41
taaattgtcaggccagaacggccag

SEQ ID NO: 20052 - DNA, 25 bp, Artificial
  probe
  misc_feature (1)..(25): SEQ ID NO: 4353; WAN0249FA_at; Start 67; Stop 91
tagttcaagagctgaactgaacacg

SEQ ID NO: 20053 - DNA, 25 bp, Artificial
  probe
  misc_feature (1)..(25): SEQ ID NO: 4353; WAN0249FA_at; Start 9; Stop 33
tctcctgttaaattgtcaggccaga

SEQ ID NO: 20054 - DNA, 25 bp, Artificial
  probe
  misc_feature (1)..(25): SEQ ID NO: 4353; WAN0249FA_at; Start 65; Stop 89
tttagttcaagagctgaactgaaca

SEQ ID NO: 20055 - DNA, 25 bp, Artificial
  probe
  misc_feature (1)..(25): SEQ ID NO: 4353; WAN0249FA_at; Start 26; Stop 50
aggccagaacggccagttttcacgg

SEQ ID NO: 20056 - DNA, 25 bp, Artificial
  probe
  misc_feature (1)..(25): SEQ ID NO: 4353; WAN0249FA_at; Start 10; Stop 34
ctcctgttaaattgtcaggccagaa

SEQ ID NO: 20057 - DNA, 25 bp, Artificial
  probe
  misc_feature (1)..(25): SEQ ID NO: 4353; WAN0249FA_at; Start 20; Stop 44
attgtcaggccagaacggccagttt

SEQ ID NO: 20058 - DNA, 25 bp, Artificial
  probe
  misc_feature (1)..(25): SEQ ID NO: 4353; WAN0249FA_at; Start 35; Stop 59
cggccagttttcacggggttcagat

SEQ ID NO: 20059 - DNA, 25 bp, Artificial
  probe
  misc_feature (1)..(25): SEQ ID NO: 4353; WAN0249FA_at; Start 6; Stop 30
ttttctcctgttaaattgtcaggcc

SEQ ID NO: 20060 - DNA, 25 bp, Artificial
  probe
  misc_feature (1)..(25): SEQ ID NO: 4353; WAN0249FA_at; Start 4; Stop 28
tattttctcctgttaaattgtcagg

SEQ ID NO: 20061 - DNA, 25 bp, Artificial
  probe
  misc_feature (1)..(25): SEQ ID NO: 4353; WAN0249FA_at; Start 25; Stop 49
caggccagaacggccagttttcacg

SEQ ID NO: 20062 - DNA, 25 bp, Artificial
  probe
  misc_feature (1)..(25): SEQ ID NO: 4353; WAN0249FA_at; Start 21; Stop 45
ttgtcaggccagaacggccagtttt

SEQ ID NO: 20063 - DNA, 25 bp, Artificial
  probe
  misc_feature (1)..(25): SEQ ID NO: 4353; WAN0249FA_at; Start 19; Stop 43
aattgtcaggccagaacggccagtt

SEQ ID NO: 20064 - DNA, 25 bp, Artificial
  probe
  misc_feature (1)..(25): SEQ ID NO: 4353; WAN0249FA_at; Start 36; Stop 60
ggccagttttcacggggttcagata

SEQ ID NO: 20065 - DNA, 25 bp, Artificial
  probe
  misc_feature (1)..(25): SEQ ID NO: 4353; WAN0249FA_at; Start 7; Stop 31
tttctcctgttaaattgtcaggcca

SEQ ID NO: 20066 - DNA, 25 bp, Artificial
  probe
  misc_feature (1)..(25): SEQ ID NO: 4353; WAN0249FA_at; Start 46; Stop 70
cacggggttcagatacttatttagt

SEQ ID NO: 20067 - DNA, 25 bp, Artificial
  probe
  misc_feature (1)..(25): SEQ ID NO: 4353; WAN0249FA_at; Start 50; Stop 74
gggttcagatacttatttagttcaa

SEQ ID NO: 20068 - DNA, 25 bp, Artificial
  probe
  misc_feature (1)..(25): SEQ ID NO: 4353; WAN0249FA_at; Start 63; Stop 87
tatttagttcaagagctgaactgaa

SEQ ID NO: 20069 - DNA, 25 bp, Artificial
  probe
  misc_feature (1)..(25): SEQ ID NO: 4353; WAN0249FA_at; Start 45; Stop 69
tcacggggttcagatacttatttag

SEQ ID NO: 20070 - DNA, 25 bp, Artificial
  probe
  misc_feature (1)..(25): SEQ ID NO: 4353; WAN0249FA_at; Start 8; Stop 32
ttctcctgttaaattgtcaggccag

SEQ ID NO: 20071 - DNA, 25 bp, Artificial
  probe
  misc_feature (1)..(25): SEQ ID NO: 4353; WAN0249FA_at; Start 16; Stop 40
ttaaattgtcaggccagaacggcca

SEQ ID NO: 20072 - DNA, 25 bp, Artificial
  probe
  misc_feature (1)..(25): SEQ ID NO: 4353; WAN0249FA_at; Start 23; Stop 47
gtcaggccagaacggccagttttca

SEQ ID NO: 20073 - DNA, 25 bp, Artificial
  probe
  misc_feature (1)..(25): SEQ ID NO: 4353; WAN0249FA_at; Start 14; Stop 38
tgttaaattgtcaggccagaacggc

SEQ ID NO: 20074 - DNA, 25 bp, Artificial
  probe
  misc_feature (1)..(25): SEQ ID NO: 4353; WAN0249FA_at; Start 15; Stop 39
gttaaattgtcaggccagaacggcc

SEQ ID NO: 20075 - DNA, 25 bp, Artificial
  probe
  misc_feature (1)..(25): SEQ ID NO: 4496; WAN0249FB_at; Start 8; Stop 32
tgttcagttcagctcttgaactaaa

SEQ ID NO: 20076 - DNA, 25 bp, Artificial
  probe
  misc_feature (1)..(25): SEQ ID NO: 4496; WAN0249FB_at; Start 24; Stop 48
tgaactaaataagtatctgaacccc

SEQ ID NO: 20077 - DNA, 25 bp, Artificial
  probe
  misc_feature (1)..(25): SEQ ID NO: 4496; WAN0249FB_at; Start 63; Stop 87
ttctggcctgacaatttaacaggag

SEQ ID NO: 20078 - DNA, 25 bp, Artificial
  probe
  misc_feature (1)..(25): SEQ ID NO: 4496; WAN0249FB_at; Start 18; Stop 42
agctcttgaactaaataagtatctg

SEQ ID NO: 20079 - DNA, 25 bp, Artificial
  probe
  misc_feature (1)..(25): SEQ ID NO: 4496; WAN0249FB_at; Start 28; Stop 52
ctaaataagtatctgaaccccgtga

SEQ ID NO: 20080 - DNA, 25 bp, Artificial
  probe
  misc_feature (1)..(25): SEQ ID NO: 4496; WAN0249FB_at; Start 27; Stop 51
actaaataagtatctgaaccccgtg

SEQ ID NO: 20081 - DNA, 25 bp, Artificial
  probe
  misc_feature (1)..(25): SEQ ID NO: 4496; WAN0249FB_at; Start 62; Stop 86
gttctggcctgacaatttaacagga

SEQ ID NO: 20082 - DNA, 25 bp, Artificial
  probe
  misc_feature (1)..(25): SEQ ID NO: 4496; WAN0249FB_at; Start 55; Stop 79
actggccgttctggcctgacaattt

SEQ ID NO: 20083 - DNA, 25 bp, Artificial
  probe
  misc_feature (1)..(25): SEQ ID NO: 4496; WAN0249FB_at; Start 51; Stop 75
gaaaactggccgttctggcctgaca

SEQ ID NO: 20084 - DNA, 25 bp, Artificial
  probe
  misc_feature (1)..(25): SEQ ID NO: 4496; WAN0249FB_at; Start 22; Stop 46
cttgaactaaataagtatctgaacc

SEQ ID NO: 20085 - DNA, 25 bp, Artificial
  probe
  misc_feature (1)..(25): SEQ ID NO: 4496; WAN0249FB_at; Start 38; Stop 62
atctgaaccccgtgaaaactggccg

SEQ ID NO: 20086 - DNA, 25 bp, Artificial
  probe
  misc_feature (1)..(25): SEQ ID NO: 4496; WAN0249FB_at; Start 21; Stop 45
tcttgaactaaataagtatctgaac

SEQ ID NO: 20087 - DNA, 25 bp, Artificial
  probe
  misc_feature (1)..(25): SEQ ID NO: 4496; WAN0249FB_at; Start 19; Stop 43
gctcttgaactaaataagtatctga

SEQ ID NO: 20088 - DNA, 25 bp, Artificial
  probe
  misc_feature (1)..(25): SEQ ID NO: 4496; WAN0249FB_at; Start 52; Stop 76
aaaactggccgttctggcctgacaa

SEQ ID NO: 20089 - DNA, 25 bp, Artificial
  probe
  misc_feature (1)..(25): SEQ ID NO: 4496; WAN0249FB_at; Start 65; Stop 89
ctggcctgacaatttaacaggagaa

SEQ ID NO: 20090 - DNA, 25 bp, Artificial
  probe
  misc_feature (1)..(25): SEQ ID NO: 4496; WAN0249FB_at; Start 16; Stop 40
tcagctcttgaactaaataagtatc

SEQ ID NO: 20091 - DNA, 25 bp, Artificial
  probe
  misc_feature (1)..(25): SEQ ID NO: 4496; WAN0249FB_at; Start 9; Stop 33
gttcagttcagctcttgaactaaat

SEQ ID NO: 20092 - DNA, 25 bp, Artificial
  probe
  misc_feature (1)..(25): SEQ ID NO: 4496; WAN0249FB_at; Start 14; Stop 38
gttcagctcttgaactaaataagta

SEQ ID NO: 20093 - DNA, 25 bp, Artificial
  probe
  misc_feature (1)..(25): SEQ ID NO: 4496; WAN0249FB_at; Start 12; Stop 36
cagttcagctcttgaactaaataag

SEQ ID NO: 20094 - DNA, 25 bp, Artificial
  probe
  misc_feature (1)..(25): SEQ ID NO: 4496; WAN0249FB_at; Start 6; Stop 30
cgtgttcagttcagctcttgaacta

SEQ ID NO: 20095 - DNA, 25 bp, Artificial
  probe
  misc_feature (1)..(25): SEQ ID NO: 4496; WAN0249FB_at; Start 61; Stop 85
cgttctggcctgacaatttaacagg

SEQ ID NO: 20096 - DNA, 25 bp, Artificial
  probe
  misc_feature (1)..(25): SEQ ID NO: 4496; WAN0249FB_at; Start 59; Stop 83
gccgttctggcctgacaatttaaca

SEQ ID NO: 20097 - DNA, 25 bp, Artificial
  probe
  misc_feature (1)..(25): SEQ ID NO: 4496; WAN0249FB_at; Start 7; Stop 31
gtgttcagttcagctcttgaactaa

SEQ ID NO: 20098 - DNA, 25 bp, Artificial
  probe
  misc_feature (1)..(25): SEQ ID NO: 4496; WAN0249FB_at; Start 17; Stop 41
cagctcttgaactaaataagtatct

SEQ ID NO: 20099 - DNA, 25 bp, Artificial
  probe
  misc_feature (1)..(25): SEQ ID NO: 4496; WAN0249FB_at; Start 64; Stop 88
tctggcctgacaatttaacaggaga

SEQ ID NO: 20100 - DNA, 25 bp, Artificial
  probe
  misc_feature (1)..(25): SEQ ID NO: 4496; WAN0249FB_at; Start 29; Stop 53
taaataagtatctgaaccccgtgaa

SEQ ID NO: 20101 - DNA, 25 bp, Artificial
  probe
  misc_feature (1)..(25): SEQ ID NO: 4496; WAN0249FB_at; Start 68; Stop 92
gcctgacaatttaacaggagaaaat

SEQ ID NO: 20102 - DNA, 25 bp, Artificial
  probe
  misc_feature (1)..(25): SEQ ID NO: 4496; WAN0249FB_at; Start 53; Stop 77
aaactggccgttctggcctgacaat

SEQ ID NO: 20103 - DNA, 25 bp, Artificial
  probe
  misc_feature (1)..(25): SEQ ID NO: 4496; WAN0249FB_at; Start 54; Stop 78
aactggccgttctggcctgacaatt

SEQ ID NO: 20104 - DNA, 25 bp, Artificial
  probe
  misc_feature (1)..(25): SEQ ID NO: 4496; WAN0249FB_at; Start 58; Stop 82
ggccgttctggcctgacaatttaac

SEQ ID NO: 20105 - DNA, 25 bp, Artificial
  probe
  misc_feature (1)..(25): SEQ ID NO: 4496; WAN0249FB_at; Start 50; Stop 74
tgaaaactggccgttctggcctgac

SEQ ID NO: 20106 - DNA, 25 bp, Artificial
  probe
  misc_feature (1)..(25): SEQ ID NO: 4496; WAN0249FB_at; Start 67; Stop 91
ggcctgacaatttaacaggagaaaa

SEQ ID NO: 20107 - DNA, 25 bp, Artificial
  probe
  misc_feature (1)..(25): SEQ ID NO: 4496; WAN0249FB_at; Start 66; Stop 90
tggcctgacaatttaacaggagaaa

SEQ ID NO: 20108 - DNA, 25 bp, Artificial
  probe
  misc_feature (1)..(25): SEQ ID NO: 4496; WAN0249FB_at; Start 60; Stop 84
ccgttctggcctgacaatttaacag

SEQ ID NO: 20109 - DNA, 25 bp, Artificial
  probe
  misc_feature (1)..(25): SEQ ID NO: 235; WAN0249FC_at; Start 98; Stop 122
caagtaagcgttcacatattgaaaa

SEQ ID NO: 20110 - DNA, 25 bp, Artificial
  probe
  misc_feature (1)..(25): SEQ ID NO: 235; WAN0249FC_at; Start 28; Stop 52
tatattatagcacaaattggaggaa

SEQ ID NO: 20111 - DNA, 25 bp, Artificial
  probe
  misc_feature (1)..(25): SEQ ID NO: 235; WAN0249FC_at; Start 77; Stop 101
ggttaacatttgaacattattcaag

SEQ ID NO: 20112 - DNA, 25 bp, Artificial
  probe
  misc_feature (1)..(25): SEQ ID NO: 235; WAN0249FC_at; Start 90; Stop 114
acattattcaagtaagcgttcacat

SEQ ID NO: 20113 - DNA, 25 bp, Artificial
  probe
  misc_feature (1)..(25): SEQ ID NO: 235; WAN0249FC_at; Start 33; Stop 57
tatagcacaaattggaggaatttga

SEQ ID NO: 20114 - DNA, 25 bp, Artificial
  probe
  misc_feature (1)..(25): SEQ ID NO: 235; WAN0249FC_at; Start 30; Stop 54
tattatagcacaaattggaggaatt

SEQ ID NO: 20115 - DNA, 25 bp, Artificial
  probe
  misc_feature (1)..(25): SEQ ID NO: 235; WAN0249FC_at; Start 83; Stop 107
catttgaacattattcaagtaagcg

SEQ ID NO: 20116 - DNA, 25 bp, Artificial
  probe
  misc_feature (1)..(25): SEQ ID NO: 235; WAN0249FC_at; Start 95; Stop 119
attcaagtaagcgttcacatattga

SEQ ID NO: 20117 - DNA, 25 bp, Artificial
  probe
  misc_feature (1)..(25): SEQ ID NO: 235; WAN0249FC_at; Start 15; Stop 39
ttatcatttcaactatattatagca

SEQ ID NO: 20118 - DNA, 25 bp, Artificial
  probe
  misc_feature (1)..(25): SEQ ID NO: 235; WAN0249FC_at; Start 1; Stop 25
aagctcctcctaatttatcatttca

SEQ ID NO: 20119 - DNA, 25 bp, Artificial
  probe
  misc_feature (1)..(25): SEQ ID NO: 235; WAN0249FC_at; Start 46; Stop 70
ggaggaatttgaattatttttatga

SEQ ID NO: 20120 - DNA, 25 bp, Artificial
  probe
  misc_feature (1)..(25): SEQ ID NO: 235; WAN0249FC_at; Start 69; Stop 93
gaatattgggttaacatttgaacat

SEQ ID NO: 20121 - DNA, 25 bp, Artificial
  probe
  misc_feature (1)..(25): SEQ ID NO: 235; WAN0249FC_at; Start 68; Stop 92
tgaatattgggttaacatttgaaca

SEQ ID NO: 20122 - DNA, 25 bp, Artificial
  probe
  misc_feature (1)..(25): SEQ ID NO: 235; WAN0249FC_at; Start 6; Stop 30
cctcctaatttatcatttcaactat

SEQ ID NO: 20123 - DNA, 25 bp, Artificial
  probe
  misc_feature (1)..(25): SEQ ID NO: 235; WAN0249FC_at; Start 105; Stop 129
gcgttcacatattgaaaaaataaaa

SEQ ID NO: 20124 - DNA, 25 bp, Artificial
  probe
  misc_feature (1)..(25): SEQ ID NO: 235; WAN0249FC_at; Start 75; Stop 99
tgggttaacatttgaacattattca

SEQ ID NO: 20125 - DNA, 25 bp, Artificial
  probe
  misc_feature (1)..(25): SEQ ID NO: 235; WAN0249FC_at; Start 60; Stop 84
tatttttatgaatattgggttaaca

SEQ ID NO: 20126 - DNA, 25 bp, Artificial
  probe
  misc_feature (1)..(25): SEQ ID NO: 235; WAN0249FC_at; Start 38; Stop 62
cacaaattggaggaatttgaattat

SEQ ID NO: 20127 - DNA, 25 bp, Artificial
  probe
  misc_feature (1)..(25): SEQ ID NO: 235; WAN0249FC_at; Start 97; Stop 121
tcaagtaagcgttcacatattgaaa

SEQ ID NO: 20128 - DNA, 25 bp, Artificial
  probe
  misc_feature (1)..(25): SEQ ID NO: 235; WAN0249FC_at; Start 86; Stop 110
ttgaacattattcaagtaagcgttc

SEQ ID NO: 20129 - DNA, 25 bp, Artificial
  probe
  misc_feature (1)..(25): SEQ ID NO: 235; WAN0249FC_at; Start 35; Stop 59
tagcacaaattggaggaatttgaat

SEQ ID NO: 20130 - DNA, 25 bp, Artificial
  probe
  misc_feature (1)..(25): SEQ ID NO: 235; WAN0249FC_at; Start 101; Stop 125
gtaagcgttcacatattgaaaaaat

SEQ ID NO: 20131 - DNA, 25 bp, Artificial
  probe
  misc_feature (1)..(25): SEQ ID NO: 235; WAN0249FC_at; Start 3; Stop 27
gctcctcctaatttatcatttcaac

SEQ ID NO: 20132 - DNA, 25 bp, Artificial
  probe
  misc_feature (1)..(25): SEQ ID NO: 235; WAN0249FC_at; Start 93; Stop 117
ttattcaagtaagcgttcacatatt

SEQ ID NO: 20133 - DNA, 25 bp, Artificial
  probe
  misc_feature (1)..(25): SEQ ID NO: 235; WAN0249FC_at; Start 99; Stop 123
aagtaagcgttcacatattgaaaaa

SEQ ID NO: 20134 - DNA, 25 bp, Artificial
  probe
  misc_feature (1)..(25): SEQ ID NO: 235; WAN0249FC_at; Start 100; Stop 124
agtaagcgttcacatattgaaaaaa

SEQ ID NO: 20135 - DNA, 25 bp, Artificial
  probe
  misc_feature (1)..(25): SEQ ID NO: 235; WAN0249FC_at; Start 72; Stop 96
tattgggttaacatttgaacattat

SEQ ID NO: 20136 - DNA, 25 bp, Artificial
  probe
  misc_feature (1)..(25): SEQ ID NO: 235; WAN0249FC_at; Start 74; Stop 98
ttgggttaacatttgaacattattc

SEQ ID NO: 20137 - DNA, 25 bp, Artificial
  probe
  misc_feature (1)..(25): SEQ ID NO: 235; WAN0249FC_at; Start 37; Stop 61
gcacaaattggaggaatttgaatta

SEQ ID NO: 20138 - DNA, 25 bp, Artificial
  probe
  misc_feature (1)..(25): SEQ ID NO: 235; WAN0249FC_at; Start 91; Stop 115
cattattcaagtaagcgttcacata

SEQ ID NO: 20139 - DNA, 25 bp, Artificial
  probe
  misc_feature (1)..(25): SEQ ID NO: 235; WAN0249FC_at; Start 102; Stop 126
taagcgttcacatattgaaaaaata

SEQ ID NO: 20140 - DNA, 25 bp, Artificial
  probe
  misc_feature (1)..(25): SEQ ID NO: 235; WAN0249FC_at; Start 27; Stop 51
ctatattatagcacaaattggagga

SEQ ID NO: 20141 - DNA, 25 bp, Artificial
  probe
  misc_feature (1)..(25): SEQ ID NO: 235; WAN0249FC_at; Start 89; Stop 113
aacattattcaagtaagcgttcaca

SEQ ID NO: 20142 - DNA, 25 bp, Artificial
  probe
  misc_feature (1)..(25): SEQ ID NO: 235; WAN0249FC_at; Start 88; Stop 112
gaacattattcaagtaagcgttcac

SEQ ID NO: 20143 - DNA, 25 bp, Artificial
  probe
  misc_feature (1)..(25): SEQ ID NO: 4363; WAN0249FD_at; Start 43; Stop 67
caaatgttaacccaatattcataaa

SEQ ID NO: 20144 - DNA, 25 bp, Artificial
  probe
  misc_feature (1)..(25): SEQ ID NO: 4363; WAN0249FD_at; Start 9; Stop 33
ttttcaatatgtgaacgcttacttg

SEQ ID NO: 20145 - DNA, 25 bp, Artificial
  probe
  misc_feature (1)..(25): SEQ ID NO: 4363; WAN0249FD_at; Start 53; Stop 77
cccaatattcataaaaataattcaa

SEQ ID NO: 20146 - DNA, 25 bp, Artificial
  probe
  misc_feature (1)..(25): SEQ ID NO: 4363; WAN0249FD_at; Start 22; Stop 46
aacgcttacttgaataatgttcaaa

SEQ ID NO: 20147 - DNA, 25 bp, Artificial
  probe
  misc_feature (1)..(25): SEQ ID NO: 4363; WAN0249FD_at; Start 74; Stop 98
tcaaattcctccaatttgtgctata

SEQ ID NO: 20148 - DNA, 25 bp, Artificial
  probe
  misc_feature (1)..(25): SEQ ID NO: 4363; WAN0249FD_at; Start 17; Stop 41
atgtgaacgcttacttgaataatgt

SEQ ID NO: 20149 - DNA, 25 bp, Artificial
  probe
  misc_feature (1)..(25): SEQ ID NO: 4363; WAN0249FD_at; Start 40; Stop 64
gttcaaatgttaacccaatattcat

SEQ ID NO: 20150 - DNA, 25 bp, Artificial
  probe
  misc_feature (1)..(25): SEQ ID NO: 4363; WAN0249FD_at; Start 81; Stop 105
cctccaatttgtgctataatatagt

SEQ ID NO: 20151 - DNA, 25 bp, Artificial
  probe
  misc_feature (1)..(25): SEQ ID NO: 4363; WAN0249FD_at; Start 80; Stop 104
tcctccaatttgtgctataatatag

SEQ ID NO: 20152 - DNA, 25 bp, Artificial
  probe
  misc_feature (1)..(25): SEQ ID NO: 4363; WAN0249FD_at; Start 14; Stop 38
aatatgtgaacgcttacttgaataa

SEQ ID NO: 20153 - DNA, 25 bp, Artificial
  probe
  misc_feature (1)..(25): SEQ ID NO: 4363; WAN0249FD_at; Start 90; Stop 114
tgtgctataatatagttgaaatgat

SEQ ID NO: 20154 - DNA, 25 bp, Artificial
  probe
  misc_feature (1)..(25): SEQ ID NO: 4363; WAN0249FD_at; Start 32; Stop 56
tgaataatgttcaaatgttaaccca

SEQ ID NO: 20155 - DNA, 25 bp, Artificial
  probe
  misc_feature (1)..(25): SEQ ID NO: 4363; WAN0249FD_at; Start 85; Stop 109
caatttgtgctataatatagttgaa

SEQ ID NO: 20156 - DNA, 25 bp, Artificial
  probe
  misc_feature (1)..(25): SEQ ID NO: 4363; WAN0249FD_at; Start 77; Stop 101
aattcctccaatttgtgctataata

SEQ ID NO: 20157 - DNA, 25 bp, Artificial
  probe
  misc_feature (1)..(25): SEQ ID NO: 4363; WAN0249FD_at; Start 12; Stop 36
tcaatatgtgaacgcttacttgaat

SEQ ID NO: 20158 - DNA, 25 bp, Artificial
  probe
  misc_feature (1)..(25): SEQ ID NO: 4363; WAN0249FD_at; Start 16; Stop 40
tatgtgaacgcttacttgaataatg

SEQ ID NO: 20159 - DNA, 25 bp, Artificial
  probe
  misc_feature (1)..(25): SEQ ID NO: 4363; WAN0249FD_at; Start 24; Stop 48
cgcttacttgaataatgttcaaatg

SEQ ID NO: 20160 - DNA, 25 bp, Artificial
  probe
  misc_feature (1)..(25): SEQ ID NO: 4363; WAN0249FD_at; Start 47; Stop 71
tgttaacccaatattcataaaaata

SEQ ID NO: 20161 - DNA, 25 bp, Artificial
  probe
  misc_feature (1)..(25): SEQ ID NO: 4363; WAN0249FD_at; Start 6; Stop 30
attttttcaatatgtgaacgcttac

SEQ ID NO: 20162 - DNA, 25 bp, Artificial
  probe
  misc_feature (1)..(25): SEQ ID NO: 4363; WAN0249FD_at; Start 18; Stop 42
tgtgaacgcttacttgaataatgtt

SEQ ID NO: 20163 - DNA, 25 bp, Artificial
  probe
  misc_feature (1)..(25): SEQ ID NO: 4363; WAN0249FD_at; Start 83; Stop 107
tccaatttgtgctataatatagttg

SEQ ID NO: 20164 - DNA, 25 bp, Artificial
  probe
  misc_feature (1)..(25): SEQ ID NO: 4363; WAN0249FD_at; Start 70; Stop 94
taattcaaattcctccaatttgtgc

SEQ ID NO: 20165 - DNA, 25 bp, Artificial
  probe
  misc_feature (1)..(25): SEQ ID NO: 4363; WAN0249FD_at; Start 75; Stop 99
caaattcctccaatttgtgctataa

SEQ ID NO: 20166 - DNA, 25 bp, Artificial
  probe
  misc_feature (1)..(25): SEQ ID NO: 4363; WAN0249FD_at; Start 7; Stop 31
ttttttcaatatgtgaacgcttact

SEQ ID NO: 20167 - DNA, 25 bp, Artificial
  probe
  misc_feature (1)..(25): SEQ ID NO: 4363; WAN0249FD_at; Start 33; Stop 57
gaataatgttcaaatgttaacccaa

SEQ ID NO: 20168 - DNA, 25 bp, Artificial
  probe
  misc_feature (1)..(25): SEQ ID NO: 4363; WAN0249FD_at; Start 21; Stop 45
gaacgcttacttgaataatgttcaa

SEQ ID NO: 20169 - DNA, 25 bp, Artificial
  probe
  misc_feature (1)..(25): SEQ ID NO: 4363; WAN0249FD_at; Start 10; Stop 34
tttcaatatgtgaacgcttacttga

SEQ ID NO: 20170 - DNA, 25 bp, Artificial
  probe
  misc_feature (1)..(25): SEQ ID NO: 4363; WAN0249FD_at; Start 19; Stop 43
gtgaacgcttacttgaataatgttc

SEQ ID NO: 20171 - DNA, 25 bp, Artificial
  probe
  misc_feature (1)..(25): SEQ ID NO: 4363; WAN0249FD_at; Start 104; Stop 128
gttgaaatgataaattaggaggagc

SEQ ID NO: 20172 - DNA, 25 bp, Artificial
  probe
  misc_feature (1)..(25): SEQ ID NO: 4363; WAN0249FD_at; Start 106; Stop 130
tgaaatgataaattaggaggagctt

SEQ ID NO: 20173 - DNA, 25 bp, Artificial
  probe
  misc_feature (1)..(25): SEQ ID NO: 4363; WAN0249FD_at; Start 105; Stop 129
ttgaaatgataaattaggaggagct

SEQ ID NO: 20174 - DNA, 25 bp, Artificial
  probe
  misc_feature (1)..(25): SEQ ID NO: 4363; WAN0249FD_at; Start 36; Stop 60
taatgttcaaatgttaacccaatat

SEQ ID NO: 20175 - DNA, 25 bp, Artificial
  probe
  misc_feature (1)..(25): SEQ ID NO: 4363; WAN0249FD_at; Start 2; Stop 26
ttttattttttcaatatgtgaacgc

SEQ ID NO: 20176 - DNA, 25 bp, Artificial
  probe
  misc_feature (1)..(25): SEQ ID NO: 4363; WAN0249FD_at; Start 39; Stop 63
tgttcaaatgttaacccaatattca

SEQ ID NO: 20177 - DNA, 25 bp, Artificial
  probe
  misc_feature (1)..(25): SEQ ID NO: 128; WAN0249FE_at; Start 89; Stop 113
agtgttttgatatgaggaggacaag

SEQ ID NO: 20178 - DNA, 25 bp, Artificial
  probe
  misc_feature (1)..(25): SEQ ID NO: 128; WAN0249FE_at; Start 63; Stop 87
gataattggtgaattgaaaaatatt

SEQ ID NO: 20179 - DNA, 25 bp, Artificial
  probe
  misc_feature (1)..(25): SEQ ID NO: 128; WAN0249FE_at; Start 36; Stop 60
cttcttagcttttgtgcaggaaggg

SEQ ID NO: 20180 - DNA, 25 bp, Artificial
  probe
  misc_feature (1)..(25): SEQ ID NO: 128; WAN0249FE_at; Start 40; Stop 64
ttagcttttgtgcaggaagggggga

SEQ ID NO: 20181 - DNA, 25 bp, Artificial
  probe
  misc_feature (1)..(25): SEQ ID NO: 128; WAN0249FE_at; Start 43; Stop 67
gcttttgtgcaggaaggggggataa

SEQ ID NO: 20182 - DNA, 25 bp, Artificial
  probe
  misc_feature (1)..(25): SEQ ID NO: 128; WAN0249FE_at; Start 87; Stop 111
ttagtgttttgatatgaggaggaca

SEQ ID NO: 20183 - DNA, 25 bp, Artificial
  probe
  misc_feature (1)..(25): SEQ ID NO: 128; WAN0249FE_at; Start 8; Stop 32
gagagtttgtaaatttgcctccctc

SEQ ID NO: 20184 - DNA, 25 bp, Artificial
  probe
  misc_feature (1)..(25): SEQ ID NO: 128; WAN0249FE_at; Start 84; Stop 108
tatttagtgttttgatatgaggagg

SEQ ID NO: 20185 - DNA, 25 bp, Artificial
  probe
  misc_feature (1)..(25): SEQ ID NO: 128; WAN0249FE_at; Start 83; Stop 107
atatttagtgttttgatatgaggag

SEQ ID NO: 20186 - DNA, 25 bp, Artificial
  probe
  misc_feature (1)..(25): SEQ ID NO: 128; WAN0249FE_at; Start 41; Stop 65
tagcttttgtgcaggaaggggggat

SEQ ID NO: 20187 - DNA, 25 bp, Artificial
  probe
  misc_feature (1)..(25): SEQ ID NO: 128; WAN0249FE_at; Start 3; Stop 27
agattgagagtttgtaaatttgcct

SEQ ID NO: 20188 - DNA, 25 bp, Artificial
  probe
  misc_feature (1)..(25): SEQ ID NO: 128; WAN0249FE_at; Start 37; Stop 61
ttcttagcttttgtgcaggaagggg

SEQ ID NO: 20189 - DNA, 25 bp, Artificial
  probe
  misc_feature (1)..(25): SEQ ID NO: 128; WAN0249FE_at; Start 85; Stop 109
atttagtgttttgatatgaggagga

SEQ ID NO: 20190 - DNA, 25 bp, Artificial
  probe
  misc_feature (1)..(25): SEQ ID NO: 128; WAN0249FE_at; Start 42; Stop 66
agcttttgtgcaggaaggggggata

SEQ ID NO: 20191 - DNA, 25 bp, Artificial
  probe
  misc_feature (1)..(25): SEQ ID NO: 128; WAN0249FE_at; Start 6; Stop 30
ttgagagtttgtaaatttgcctccc

SEQ ID NO: 20192 - DNA, 25 bp, Artificial
  probe
  misc_feature (1)..(25): SEQ ID NO: 128; WAN0249FE_at; Start 90; Stop 114
gtgttttgatatgaggaggacaagg

SEQ ID NO: 20193 - DNA, 25 bp, Artificial
  probe
  misc_feature (1)..(25): SEQ ID NO: 128; WAN0249FE_at; Start 46; Stop 70
tttgtgcaggaaggggggataattg

SEQ ID NO: 20194 - DNA, 25 bp, Artificial
  probe
  misc_feature (1)..(25): SEQ ID NO: 128; WAN0249FE_at; Start 33; Stop 57
ccccttcttagcttttgtgcaggaa

SEQ ID NO: 20195 - DNA, 25 bp, Artificial
  probe
  misc_feature (1)..(25): SEQ ID NO: 128; WAN0249FE_at; Start 35; Stop 59
ccttcttagcttttgtgcaggaagg

SEQ ID NO: 20196 - DNA, 25 bp, Artificial
  probe
  misc_feature (1)..(25): SEQ ID NO: 128; WAN0249FE_at; Start 44; Stop 68
cttttgtgcaggaaggggggataat

SEQ ID NO: 20197 - DNA, 25 bp, Artificial
  probe
  misc_feature (1)..(25): SEQ ID NO: 128; WAN0249FE_at; Start 39; Stop 63
cttagcttttgtgcaggaagggggg

SEQ ID NO: 20198 - DNA, 25 bp, Artificial
  probe
  misc_feature (1)..(25): SEQ ID NO: 128; WAN0249FE_at; Start 86; Stop 110
tttagtgttttgatatgaggaggac

SEQ ID NO: 20199 - DNA, 25 bp, Artificial
  probe
  misc_feature (1)..(25): SEQ ID NO: 128; WAN0249FE_at; Start 38; Stop 62
tcttagcttttgtgcaggaaggggg

SEQ ID NO: 20200 - DNA, 25 bp, Artificial
  probe
  misc_feature (1)..(25): SEQ ID NO: 128; WAN0249FE_at; Start 62; Stop 86
ggataattggtgaattgaaaaatat

SEQ ID NO: 20201 - DNA, 25 bp, Artificial
  probe
  misc_feature (1)..(25): SEQ ID NO: 128; WAN0249FE_at; Start 65; Stop 89
taattggtgaattgaaaaatattta

SEQ ID NO: 20202 - DNA, 25 bp, Artificial
  probe
  misc_feature (1)..(25): SEQ ID NO: 128; WAN0249FE_at; Start 2; Stop 26
aagattgagagtttgtaaatttgcc

SEQ ID NO: 20203 - DNA, 25 bp, Artificial
  probe
  misc_feature (1)..(25): SEQ ID NO: 128; WAN0249FE_at; Start 5; Stop 29
attgagagtttgtaaatttgcctcc

SEQ ID NO: 20204 - DNA, 25 bp, Artificial
  probe
  misc_feature (1)..(25): SEQ ID NO: 128; WAN0249FE_at; Start 7; Stop 31
tgagagtttgtaaatttgcctccct

SEQ ID NO: 20205 - DNA, 25 bp, Artificial
  probe
  misc_feature (1)..(25): SEQ ID NO: 128; WAN0249FE_at; Start 4; Stop 28
gattgagagtttgtaaatttgcctc

SEQ ID NO: 20206 - DNA, 25 bp, Artificial
  probe
  misc_feature (1)..(25): SEQ ID NO: 128; WAN0249FE_at; Start 34; Stop 58
cccttcttagcttttgtgcaggaag

SEQ ID NO: 20207 - DNA, 25 bp, Artificial
  probe
  misc_feature (1)..(25): SEQ ID NO: 128; WAN0249FE_at; Start 61; Stop 85
gggataattggtgaattgaaaaata

SEQ ID NO: 20208 - DNA, 25 bp, Artificial
  probe
  misc_feature (1)..(25): SEQ ID NO: 128; WAN0249FE_at; Start 88; Stop 112
tagtgttttgatatgaggaggacaa

SEQ ID NO: 20209 - DNA, 25 bp, Artificial
  probe
  misc_feature (1)..(25): SEQ ID NO: 128; WAN0249FE_at; Start 82; Stop 106
aatatttagtgttttgatatgagga

SEQ ID NO: 20210 - DNA, 25 bp, Artificial
  probe
  misc_feature (1)..(25): SEQ ID NO: 128; WAN0249FE_at; Start 81; Stop 105
aaatatttagtgttttgatatgagg

SEQ ID NO: 20211 - DNA, 25 bp, Artificial
  probe
  misc_feature (1)..(25): SEQ ID NO: 3249; WAN0249FF_at; Start 12; Stop 36
tcatatcaaaacactaaatattttt

SEQ ID NO: 20212 - DNA, 25 bp, Artificial
  probe
  misc_feature (1)..(25): SEQ ID NO: 3249; WAN0249FF_at; Start 15; Stop 39
tatcaaaacactaaatatttttcaa

SEQ ID NO: 20213 - DNA, 25 bp, Artificial
  probe
  misc_feature (1)..(25): SEQ ID NO: 3249; WAN0249FF_at; Start 5; Stop 29
gtcctcctcatatcaaaacactaaa

SEQ ID NO: 20214 - DNA, 25 bp, Artificial
  probe
  misc_feature (1)..(25): SEQ ID NO: 3249; WAN0249FF_at; Start 10; Stop 34
cctcatatcaaaacactaaatattt

SEQ ID NO: 20215 - DNA, 25 bp, Artificial
  probe
  misc_feature (1)..(25): SEQ ID NO: 3249; WAN0249FF_at; Start 57; Stop 81
cttcctgcacaaaagctaagaaggg

SEQ ID NO: 20216 - DNA, 25 bp, Artificial
  probe
  misc_feature (1)..(25): SEQ ID NO: 3249; WAN0249FF_at; Start 61; Stop 85
ctgcacaaaagctaagaagggggag

SEQ ID NO: 20217 - DNA, 25 bp, Artificial
  probe
  misc_feature (1)..(25): SEQ ID NO: 3249; WAN0249FF_at; Start 8; Stop 32
ctcctcatatcaaaacactaaatat

SEQ ID NO: 20218 - DNA, 25 bp, Artificial
  probe
  misc_feature (1)..(25): SEQ ID NO: 3249; WAN0249FF_at; Start 11; Stop 35
ctcatatcaaaacactaaatatttt

SEQ ID NO: 20219 - DNA, 25 bp, Artificial
  probe
  misc_feature (1)..(25): SEQ ID NO: 3249; WAN0249FF_at; Start 9; Stop 33
tcctcatatcaaaacactaaatatt

SEQ ID NO: 20220 - DNA, 25 bp, Artificial
  probe
  misc_feature (1)..(25): SEQ ID NO: 3249; WAN0249FF_at; Start 84; Stop 108
agggaggcaaatttacaaactctca

SEQ ID NO: 20221 - DNA, 25 bp, Artificial
  probe
  misc_feature (1)..(25): SEQ ID NO: 3249; WAN0249FF_at; Start 3; Stop 27
ttgtcctcctcatatcaaaacacta

SEQ ID NO: 20222 - DNA, 25 bp, Artificial
  probe
  misc_feature (1)..(25): SEQ ID NO: 3249; WAN0249FF_at; Start 85; Stop 109
gggaggcaaatttacaaactctcaa

SEQ ID NO: 20223 - DNA, 25 bp, Artificial
  probe
  misc_feature (1)..(25): SEQ ID NO: 3249; WAN0249FF_at; Start 83; Stop 107
gagggaggcaaatttacaaactctc

SEQ ID NO: 20224 - DNA, 25 bp, Artificial
  probe
  misc_feature (1)..(25): SEQ ID NO: 3249; WAN0249FF_at; Start 89; Stop 113
ggcaaatttacaaactctcaatctt

SEQ ID NO: 20225 - DNA, 25 bp, Artificial
  probe
  misc_feature (1)..(25): SEQ ID NO: 3249; WAN0249FF_at; Start 62; Stop 86
tgcacaaaagctaagaagggggagg

SEQ ID NO: 20226 - DNA, 25 bp, Artificial
  probe
  misc_feature (1)..(25): SEQ ID NO: 3249; WAN0249FF_at; Start 59; Stop 83
tcctgcacaaaagctaagaaggggg

SEQ ID NO: 20227 - DNA, 25 bp, Artificial
  probe
  misc_feature (1)..(25): SEQ ID NO: 3249; WAN0249FF_at; Start 56; Stop 80
ccttcctgcacaaaagctaagaagg

SEQ ID NO: 20228 - DNA, 25 bp, Artificial
  probe
  misc_feature (1)..(25): SEQ ID NO: 3249; WAN0249FF_at; Start 39; Stop 63
attcaccaattatccccccttcctg

SEQ ID NO: 20229 - DNA, 25 bp, Artificial
  probe
  misc_feature (1)..(25): SEQ ID NO: 3249; WAN0249FF_at; Start 2; Stop 26
cttgtcctcctcatatcaaaacact

SEQ ID NO: 20230 - DNA, 25 bp, Artificial
  probe
  misc_feature (1)..(25): SEQ ID NO: 3249; WAN0249FF_at; Start 13; Stop 37
catatcaaaacactaaatatttttc

SEQ ID NO: 20231 - DNA, 25 bp, Artificial
  probe
  misc_feature (1)..(25): SEQ ID NO: 3249; WAN0249FF_at; Start 30; Stop 54
tatttttcaattcaccaattatccc

SEQ ID NO: 20232 - DNA, 25 bp, Artificial
  probe
  misc_feature (1)..(25): SEQ ID NO: 3249; WAN0249FF_at; Start 7; Stop 31
cctcctcatatcaaaacactaaata

SEQ ID NO: 20233 - DNA, 25 bp, Artificial
  probe
  misc_feature (1)..(25): SEQ ID NO: 3249; WAN0249FF_at; Start 87; Stop 111
gaggcaaatttacaaactctcaatc

SEQ ID NO: 20234 - DNA, 25 bp, Artificial
  probe
  misc_feature (1)..(25): SEQ ID NO: 3249; WAN0249FF_at; Start 4; Stop 28
tgtcctcctcatatcaaaacactaa

SEQ ID NO: 20235 - DNA, 25 bp, Artificial
  probe
  misc_feature (1)..(25): SEQ ID NO: 3249; WAN0249FF_at; Start 88; Stop 112
aggcaaatttacaaactctcaatct

SEQ ID NO: 20236 - DNA, 25 bp, Artificial
  probe
  misc_feature (1)..(25): SEQ ID NO: 3249; WAN0249FF_at; Start 86; Stop 110
ggaggcaaatttacaaactctcaat

SEQ ID NO: 20237 - DNA, 25 bp, Artificial
  probe
  misc_feature (1)..(25): SEQ ID NO: 3249; WAN0249FF_at; Start 58; Stop 82
ttcctgcacaaaagctaagaagggg

SEQ ID NO: 20238 - DNA, 25 bp, Artificial
  probe
  misc_feature (1)..(25): SEQ ID NO: 3249; WAN0249FF_at; Start 36; Stop 60
tcaattcaccaattatccccccttc

SEQ ID NO: 20239 - DNA, 25 bp, Artificial
  probe
  misc_feature (1)..(25): SEQ ID NO: 3249; WAN0249FF_at; Start 54; Stop 78
ccccttcctgcacaaaagctaagaa

SEQ ID NO: 20240 - DNA, 25 bp, Artificial
  probe
  misc_feature (1)..(25): SEQ ID NO: 3249; WAN0249FF_at; Start 90; Stop 114
gcaaatttacaaactctcaatcttt

SEQ ID NO: 20241 - DNA, 25 bp, Artificial
  probe
  misc_feature (1)..(25): SEQ ID NO: 3249; WAN0249FF_at; Start 55; Stop 79
cccttcctgcacaaaagctaagaag

SEQ ID NO: 20242 - DNA, 25 bp, Artificial
  probe
  misc_feature (1)..(25): SEQ ID NO: 3249; WAN0249FF_at; Start 40; Stop 64
ttcaccaattatccccccttcctgc

SEQ ID NO: 20243 - DNA, 25 bp, Artificial
  probe
  misc_feature (1)..(25): SEQ ID NO: 3249; WAN0249FF_at; Start 60; Stop 84
cctgcacaaaagctaagaaggggga

SEQ ID NO: 20244 - DNA, 25 bp, Artificial
  probe
  misc_feature (1)..(25): SEQ ID NO: 3249; WAN0249FF_at; Start 6; Stop 30
tcctcctcatatcaaaacactaaat

SEQ ID NO: 20245 - DNA, 25 bp, Artificial
  probe
  misc_feature (1)..(25): SEQ ID NO: 4481; WAN0249FG_at; Start 24; Stop 48
gggatatcacctccattttggaaga

SEQ ID NO: 20246 - DNA, 25 bp, Artificial
  probe
  misc_feature (1)..(25): SEQ ID NO: 4481; WAN0249FG_at; Start 8; Stop 32
tgtggaggtggtatttgggatatca

SEQ ID NO: 20247 - DNA, 25 bp, Artificial
  probe
  misc_feature (1)..(25): SEQ ID NO: 4481; WAN0249FG_at; Start 4; Stop 28
aaagtgtggaggtggtatttgggat

SEQ ID NO: 20248 - DNA, 25 bp, Artificial
  probe
  misc_feature (1)..(25): SEQ ID NO: 4481; WAN0249FG_at; Start 3; Stop 27
gaaagtgtggaggtggtatttggga

SEQ ID NO: 20249 - DNA, 25 bp, Artificial
  probe
  misc_feature (1)..(25): SEQ ID NO: 4481; WAN0249FG_at; Start 19; Stop 43
tatttgggatatcacctccattttg

SEQ ID NO: 20250 - DNA, 25 bp, Artificial
  probe
  misc_feature (1)..(25): SEQ ID NO: 4481; WAN0249FG_at; Start 1; Stop 25
tagaaagtgtggaggtggtatttgg

SEQ ID NO: 20251 - DNA, 25 bp, Artificial
  probe
  misc_feature (1)..(25): SEQ ID NO: 4481; WAN0249FG_at; Start 13; Stop 37
aggtggtatttgggatatcacctcc

SEQ ID NO: 20252 - DNA, 25 bp, Artificial
  probe
  misc_feature (1)..(25): SEQ ID NO: 4481; WAN0249FG_at; Start 29; Stop 53
atcacctccattttggaagagaggt

SEQ ID NO: 20253 - DNA, 25 bp, Artificial
  probe
  misc_feature (1)..(25): SEQ ID NO: 4481; WAN0249FG_at; Start 6; Stop 30
agtgtggaggtggtatttgggatat

SEQ ID NO: 20254 - DNA, 25 bp, Artificial
  probe
  misc_feature (1)..(25): SEQ ID NO: 4481; WAN0249FG_at; Start 23; Stop 47
tgggatatcacctccattttggaag

SEQ ID NO: 20255 - DNA, 25 bp, Artificial
  probe
  misc_feature (1)..(25): SEQ ID NO: 4481; WAN0249FG_at; Start 31; Stop 55
cacctccattttggaagagaggtaa

SEQ ID NO: 20256 - DNA, 25 bp, Artificial
  probe
  misc_feature (1)..(25): SEQ ID NO: 4481; WAN0249FG_at; Start 10; Stop 34
tggaggtggtatttgggatatcacc

SEQ ID NO: 20257 - DNA, 25 bp, Artificial
  probe
  misc_feature (1)..(25): SEQ ID NO: 4481; WAN0249FG_at; Start 12; Stop 36
gaggtggtatttgggatatcacctc

SEQ ID NO: 20258 - DNA, 25 bp, Artificial
  probe
  misc_feature (1)..(25): SEQ ID NO: 4481; WAN0249FG_at; Start 22; Stop 46
ttgggatatcacctccattttggaa

SEQ ID NO: 20259 - DNA, 25 bp, Artificial
  probe
  misc_feature (1)..(25): SEQ ID NO: 4481; WAN0249FG_at; Start 17; Stop 41
ggtatttgggatatcacctccattt

SEQ ID NO: 20260 - DNA, 25 bp, Artificial
  probe
  misc_feature (1)..(25): SEQ ID NO: 4481; WAN0249FG_at; Start 16; Stop 40
tggtatttgggatatcacctccatt

SEQ ID NO: 20261 - DNA, 25 bp, Artificial
  probe
  misc_feature (1)..(25): SEQ ID NO: 4481; WAN0249FG_at; Start 27; Stop 51
atatcacctccattttggaagagag

SEQ ID NO: 20262 - DNA, 25 bp, Artificial
  probe
  misc_feature (1)..(25): SEQ ID NO: 4481; WAN0249FG_at; Start 21; Stop 45
tttgggatatcacctccattttgga

SEQ ID NO: 20263 - DNA, 25 bp, Artificial
  probe
  misc_feature (1)..(25): SEQ ID NO: 4481; WAN0249FG_at; Start 11; Stop 35
ggaggtggtatttgggatatcacct

SEQ ID NO: 20264 - DNA, 25 bp, Artificial
  probe
  misc_feature (1)..(25): SEQ ID NO: 4481; WAN0249FG_at; Start 2; Stop 26
agaaagtgtggaggtggtatttggg

SEQ ID NO: 20265 - DNA, 25 bp, Artificial
  probe
  misc_feature (1)..(25): SEQ ID NO: 4481; WAN0249FG_at; Start 33; Stop 57
cctccattttggaagagaggtaaag

SEQ ID NO: 20266 - DNA, 25 bp, Artificial
  probe
  misc_feature (1)..(25): SEQ ID NO: 4481; WAN0249FG_at; Start 20; Stop 44
atttgggatatcacctccattttgg

SEQ ID NO: 20267 - DNA, 25 bp, Artificial
  probe
  misc_feature (1)..(25): SEQ ID NO: 4481; WAN0249FG_at; Start 30; Stop 54
tcacctccattttggaagagaggta

SEQ ID NO: 20268 - DNA, 25 bp, Artificial
  probe
  misc_feature (1)..(25): SEQ ID NO: 4481; WAN0249FG_at; Start 26; Stop 50
gatatcacctccattttggaagaga

SEQ ID NO: 20269 - DNA, 25 bp, Artificial
  probe
  misc_feature (1)..(25): SEQ ID NO: 4481; WAN0249FG_at; Start 18; Stop 42
gtatttgggatatcacctccatttt

SEQ ID NO: 20270 - DNA, 25 bp, Artificial
  probe
  misc_feature (1)..(25): SEQ ID NO: 4481; WAN0249FG_at; Start 14; Stop 38
ggtggtatttgggatatcacctcca

SEQ ID NO: 20271 - DNA, 25 bp, Artificial
  probe
  misc_feature (1)..(25): SEQ ID NO: 4481; WAN0249FG_at; Start 15; Stop 39
gtggtatttgggatatcacctccat

SEQ ID NO: 20272 - DNA, 25 bp, Artificial
  probe
  misc_feature (1)..(25): SEQ ID NO: 4481; WAN0249FG_at; Start 34; Stop 58
ctccattttggaagagaggtaaaga

SEQ ID NO: 20273 - DNA, 25 bp, Artificial
  probe
  misc_feature (1)..(25): SEQ ID NO: 4481; WAN0249FG_at; Start 7; Stop 31
gtgtggaggtggtatttgggatatc

SEQ ID NO: 20274 - DNA, 25 bp, Artificial
  probe
  misc_feature (1)..(25): SEQ ID NO: 4481; WAN0249FG_at; Start 9; Stop 33
gtggaggtggtatttgggatatcac

SEQ ID NO: 20275 - DNA, 25 bp, Artificial
  probe
  misc_feature (1)..(25): SEQ ID NO: 4481; WAN0249FG_at; Start 25; Stop 49
ggatatcacctccattttggaagag

SEQ ID NO: 20276 - DNA, 25 bp, Artificial
  probe
  misc_feature (1)..(25): SEQ ID NO: 4481; WAN0249FG_at; Start 5; Stop 29
aagtgtggaggtggtatttgggata

SEQ ID NO: 20277 - DNA, 25 bp, Artificial
  probe
  misc_feature (1)..(25): SEQ ID NO: 4481; WAN0249FG_at; Start 28; Stop 52
tatcacctccattttggaagagagg

SEQ ID NO: 20278 - DNA, 25 bp, Artificial
  probe
  misc_feature (1)..(25): SEQ ID NO: 4661; WAN0249FH_at; Start 29; Stop 53
atatcccaaataccacctccacact

SEQ ID NO: 20279 - DNA, 25 bp, Artificial
  probe
  misc_feature (1)..(25): SEQ ID NO: 4661; WAN0249FH_at; Start 16; Stop 40
caaaatggaggtgatatcccaaata

SEQ ID NO: 20280 - DNA, 25 bp, Artificial
  probe
  misc_feature (1)..(25): SEQ ID NO: 4661; WAN0249FH_at; Start 6; Stop 30
acctctcttccaaaatggaggtgat

SEQ ID NO: 20281 - DNA, 25 bp, Artificial
  probe
  misc_feature (1)..(25): SEQ ID NO: 4661; WAN0249FH_at; Start 11; Stop 35
tcttccaaaatggaggtgatatccc

SEQ ID NO: 20282 - DNA, 25 bp, Artificial
  probe
  misc_feature (1)..(25): SEQ ID NO: 4661; WAN0249FH_at; Start 10; Stop 34
ctcttccaaaatggaggtgatatcc

SEQ ID NO: 20283 - DNA, 25 bp, Artificial
  probe
  misc_feature (1)..(25): SEQ ID NO: 4661; WAN0249FH_at; Start 26; Stop 50
gtgatatcccaaataccacctccac

SEQ ID NO: 20284 - DNA, 25 bp, Artificial
  probe
  misc_feature (1)..(25): SEQ ID NO: 4661; WAN0249FH_at; Start 17; Stop 41
aaaatggaggtgatatcccaaatac

SEQ ID NO: 20285 - DNA, 25 bp, Artificial
  probe
  misc_feature (1)..(25): SEQ ID NO: 4661; WAN0249FH_at; Start 34; Stop 58
ccaaataccacctccacactttcta

SEQ ID NO: 20286 - DNA, 25 bp, Artificial
  probe
  misc_feature (1)..(25): SEQ ID NO: 4661; WAN0249FH_at; Start 14; Stop 38
tccaaaatggaggtgatatcccaaa

SEQ ID NO: 20287 - DNA, 25 bp, Artificial
  probe
  misc_feature (1)..(25): SEQ ID NO: 4661; WAN0249FH_at; Start 5; Stop 29
tacctctcttccaaaatggaggtga

SEQ ID NO: 20288 - DNA, 25 bp, Artificial
  probe
  misc_feature (1)..(25): SEQ ID NO: 4661; WAN0249FH_at; Start 9; Stop 33
tctcttccaaaatggaggtgatatc

SEQ ID NO: 20289 - DNA, 25 bp, Artificial
  probe
  misc_feature (1)..(25): SEQ ID NO: 4661; WAN0249FH_at; Start 25; Stop 49
ggtgatatcccaaataccacctcca

SEQ ID NO: 20290 - DNA, 25 bp, Artificial
  probe
  misc_feature (1)..(25): SEQ ID NO: 4661; WAN0249FH_at; Start 30; Stop 54
tatcccaaataccacctccacactt

SEQ ID NO: 20291 - DNA, 25 bp, Artificial
  probe
  misc_feature (1)..(25): SEQ ID NO: 4661; WAN0249FH_at; Start 15; Stop 39
ccaaaatggaggtgatatcccaaat

SEQ ID NO: 20292 - DNA, 25 bp, Artificial
  probe
  misc_feature (1)..(25): SEQ ID NO: 4661; WAN0249FH_at; Start 13; Stop 37
ttccaaaatggaggtgatatcccaa

SEQ ID NO: 20293 - DNA, 25 bp, Artificial
  probe
  misc_feature (1)..(25): SEQ ID NO: 4661; WAN0249FH_at; Start 18; Stop 42
aaatggaggtgatatcccaaatacc

SEQ ID NO: 20294 - DNA, 25 bp, Artificial
  probe
  misc_feature (1)..(25): SEQ ID NO: 4661; WAN0249FH_at; Start 31; Stop 55
atcccaaataccacctccacacttt

SEQ ID NO: 20295 - DNA, 25 bp, Artificial
  probe
  misc_feature (1)..(25): SEQ ID NO: 4661; WAN0249FH_at; Start 28; Stop 52
gatatcccaaataccacctccacac

SEQ ID NO: 20296 - DNA, 25 bp, Artificial
  probe
  misc_feature (1)..(25): SEQ ID NO: 4661; WAN0249FH_at; Start 21; Stop 45
tggaggtgatatcccaaataccacc

SEQ ID NO: 20297 - DNA, 25 bp, Artificial
  probe
  misc_feature (1)..(25): SEQ ID NO: 4661; WAN0249FH_at; Start 32; Stop 56
tcccaaataccacctccacactttc

SEQ ID NO: 20298 - DNA, 25 bp, Artificial
  probe
  misc_feature (1)..(25): SEQ ID NO: 4661; WAN0249FH_at; Start 20; Stop 44
atggaggtgatatcccaaataccac

SEQ ID NO: 20299 - DNA, 25 bp, Artificial
  probe
  misc_feature (1)..(25): SEQ ID NO: 4661; WAN0249FH_at; Start 23; Stop 47
gaggtgatatcccaaataccacctc

SEQ ID NO: 20300 - DNA, 25 bp, Artificial
  probe
  misc_feature (1)..(25): SEQ ID NO: 4661; WAN0249FH_at; Start 24; Stop 48
aggtgatatcccaaataccacctcc

SEQ ID NO: 20301 - DNA, 25 bp, Artificial
  probe
  misc_feature (1)..(25): SEQ ID NO: 4661; WAN0249FH_at; Start 2; Stop 26
ctttacctctcttccaaaatggagg

SEQ ID NO: 20302 - DNA, 25 bp, Artificial
  probe
  misc_feature (1)..(25): SEQ ID NO: 4661; WAN0249FH_at; Start 1; Stop 25
tctttacctctcttccaaaatggag

SEQ ID NO: 20303 - DNA, 25 bp, Artificial
  probe
  misc_feature (1)..(25): SEQ ID NO: 4661; WAN0249FH_at; Start 19; Stop 43
aatggaggtgatatcccaaatacca

SEQ ID NO: 20304 - DNA, 25 bp, Artificial
  probe
  misc_feature (1)..(25): SEQ ID NO: 4661; WAN0249FH_at; Start 22; Stop 46
ggaggtgatatcccaaataccacct

SEQ ID NO: 20305 - DNA, 25 bp, Artificial
  probe
  misc_feature (1)..(25): SEQ ID NO: 4661; WAN0249FH_at; Start 7; Stop 31
cctctcttccaaaatggaggtgata

SEQ ID NO: 20306 - DNA, 25 bp, Artificial
  probe
  misc_feature (1)..(25): SEQ ID NO: 4661; WAN0249FH_at; Start 27; Stop 51
tgatatcccaaataccacctccaca

SEQ ID NO: 20307 - DNA, 25 bp, Artificial
  probe
  misc_feature (1)..(25): SEQ ID NO: 4661; WAN0249FH_at; Start 4; Stop 28
ttacctctcttccaaaatggaggtg

SEQ ID NO: 20308 - DNA, 25 bp, Artificial
  probe
  misc_feature (1)..(25): SEQ ID NO: 4661; WAN0249FH_at; Start 33; Stop 57
cccaaataccacctccacactttct

SEQ ID NO: 20309 - DNA, 25 bp, Artificial
  probe
  misc_feature (1)..(25): SEQ ID NO: 4661; WAN0249FH_at; Start 12; Stop 36
cttccaaaatggaggtgatatccca

SEQ ID NO: 20310 - DNA, 25 bp, Artificial
  probe
  misc_feature (1)..(25): SEQ ID NO: 4661; WAN0249FH_at; Start 8; Stop 32
ctctcttccaaaatggaggtgatat

SEQ ID NO: 20311 - DNA, 25 bp, Artificial
  probe
  misc_feature (1)..(25): SEQ ID NO: 206; WAN0249FI_at; Start 81; Stop 105
aacgaatacaaaaagtaatataatg

SEQ ID NO: 20312 - DNA, 25 bp, Artificial
  probe
  misc_feature (1)..(25): SEQ ID NO: 206; WAN0249FI_at; Start 113; Stop 137
atagatagcgcggaggcgcaggagg

SEQ ID NO: 20313 - DNA, 25 bp, Artificial
  probe
  misc_feature (1)..(25): SEQ ID NO: 206; WAN0249FI_at; Start 119; Stop 143
agcgcggaggcgcaggaggaaaatt

SEQ ID NO: 20314 - DNA, 25 bp, Artificial
  probe
  misc_feature (1)..(25): SEQ ID NO: 206; WAN0249FI_at; Start 105; Stop 129
gatgttaaatagatagcgcggaggc

SEQ ID NO: 20315 - DNA, 25 bp, Artificial
  probe
  misc_feature (1)..(25): SEQ ID NO: 206; WAN0249FI_at; Start 121; Stop 145
cgcggaggcgcaggaggaaaattat

SEQ ID NO: 20316 - DNA, 25 bp, Artificial
  probe
  misc_feature (1)..(25): SEQ ID NO: 206; WAN0249FI_at; Start 7; Stop 31
tttatataggaggtgaacttacgtc

SEQ ID NO: 20317 - DNA, 25 bp, Artificial
  probe
  misc_feature (1)..(25): SEQ ID NO: 206; WAN0249FI_at; Start 83; Stop 107
cgaatacaaaaagtaatataatgat

SEQ ID NO: 20318 - DNA, 25 bp, Artificial
  probe
  misc_feature (1)..(25): SEQ ID NO: 206; WAN0249FI_at; Start 84; Stop 108
gaatacaaaaagtaatataatgatg

SEQ ID NO: 20319 - DNA, 25 bp, Artificial
  probe
  misc_feature (1)..(25): SEQ ID NO: 206; WAN0249FI_at; Start 100; Stop 124
ataatgatgttaaatagatagcgcg

SEQ ID NO: 20320 - DNA, 25 bp, Artificial
  probe
  misc_feature (1)..(25): SEQ ID NO: 206; WAN0249FI_at; Start 106; Stop 130
atgttaaatagatagcgcggaggcg

SEQ ID NO: 20321 - DNA, 25 bp, Artificial
  probe
  misc_feature (1)..(25): SEQ ID NO: 206; WAN0249FI_at; Start 1; Stop 25
aacttgtttatataggaggtgaact

SEQ ID NO: 20322 - DNA, 25 bp, Artificial
  probe
  misc_feature (1)..(25): SEQ ID NO: 206; WAN0249FI_at; Start 115; Stop 139
agatagcgcggaggcgcaggaggaa

SEQ ID NO: 20323 - DNA, 25 bp, Artificial
  probe
  misc_feature (1)..(25): SEQ ID NO: 206; WAN0249FI_at; Start 99; Stop 123
tataatgatgttaaatagatagcgc

SEQ ID NO: 20324 - DNA, 25 bp, Artificial
  probe
  misc_feature (1)..(25): SEQ ID NO: 206; WAN0249FI_at; Start 9; Stop 33
tatataggaggtgaacttacgtccc

SEQ ID NO: 20325 - DNA, 25 bp, Artificial
  probe
  misc_feature (1)..(25): SEQ ID NO: 206; WAN0249FI_at; Start 16; Stop 40
gaggtgaacttacgtccctcctatc

SEQ ID NO: 20326 - DNA, 25 bp, Artificial
  probe
  misc_feature (1)..(25): SEQ ID NO: 206; WAN0249FI_at; Start 104; Stop 128
tgatgttaaatagatagcgcggagg

SEQ ID NO: 20327 - DNA, 25 bp, Artificial
  probe
  misc_feature (1)..(25): SEQ ID NO: 206; WAN0249FI_at; Start 101; Stop 125
taatgatgttaaatagatagcgcgg

SEQ ID NO: 20328 - DNA, 25 bp, Artificial
  probe
  misc_feature (1)..(25): SEQ ID NO: 206; WAN0249FI_at; Start 2; Stop 26
acttgtttatataggaggtgaactt

SEQ ID NO: 20329 - DNA, 25 bp, Artificial
  probe
  misc_feature (1)..(25): SEQ ID NO: 206; WAN0249FI_at; Start 5; Stop 29
tgtttatataggaggtgaacttacg

SEQ ID NO: 20330 - DNA, 25 bp, Artificial
  probe
  misc_feature (1)..(25): SEQ ID NO: 206; WAN0249FI_at; Start 114; Stop 138
tagatagcgcggaggcgcaggagga

SEQ ID NO: 20331 - DNA, 25 bp, Artificial
  probe
  misc_feature (1)..(25): SEQ ID NO: 206; WAN0249FI_at; Start 109; Stop 133
ttaaatagatagcgcggaggcgcag

SEQ ID NO: 20332 - DNA, 25 bp, Artificial
  probe
  misc_feature (1)..(25): SEQ ID NO: 206; WAN0249FI_at; Start 120; Stop 144
gcgcggaggcgcaggaggaaaatta

SEQ ID NO: 20333 - DNA, 25 bp, Artificial
  probe
  misc_feature (1)..(25): SEQ ID NO: 206; WAN0249FI_at; Start 107; Stop 131
tgttaaatagatagcgcggaggcgc

SEQ ID NO: 20334 - DNA, 25 bp, Artificial
  probe
  misc_feature (1)..(25): SEQ ID NO: 206; WAN0249FI_at; Start 102; Stop 126
aatgatgttaaatagatagcgcgga

SEQ ID NO: 20335 - DNA, 25 bp, Artificial
  probe
  misc_feature (1)..(25): SEQ ID NO: 206; WAN0249FI_at; Start 10; Stop 34
atataggaggtgaacttacgtccct

SEQ ID NO: 20336 - DNA, 25 bp, Artificial
  probe
  misc_feature (1)..(25): SEQ ID NO: 206; WAN0249FI_at; Start 51; Stop 75
gatttgttaaacaattcacaaataa

SEQ ID NO: 20337 - DNA, 25 bp, Artificial
  probe
  misc_feature (1)..(25): SEQ ID NO: 206; WAN0249FI_at; Start 110; Stop 134
taaatagatagcgcggaggcgcagg

SEQ ID NO: 20338 - DNA, 25 bp, Artificial
  probe
  misc_feature (1)..(25): SEQ ID NO: 206; WAN0249FI_at; Start 49; Stop 73
aagatttgttaaacaattcacaaat

SEQ ID NO: 20339 - DNA, 25 bp, Artificial
  probe
  misc_feature (1)..(25): SEQ ID NO: 206; WAN0249FI_at; Start 103; Stop 127
atgatgttaaatagatagcgcggag

SEQ ID NO: 20340 - DNA, 25 bp, Artificial
  probe
  misc_feature (1)..(25): SEQ ID NO: 206; WAN0249FI_at; Start 11; Stop 35
tataggaggtgaacttacgtccctc

SEQ ID NO: 20341 - DNA, 25 bp, Artificial
  probe
  misc_feature (1)..(25): SEQ ID NO: 206; WAN0249FI_at; Start 3; Stop 27
cttgtttatataggaggtgaactta

SEQ ID NO: 20342 - DNA, 25 bp, Artificial
  probe
  misc_feature (1)..(25): SEQ ID NO: 206; WAN0249FI_at; Start 8; Stop 32
ttatataggaggtgaacttacgtcc

SEQ ID NO: 20343 - DNA, 25 bp, Artificial
  probe
  misc_feature (1)..(25): SEQ ID NO: 206; WAN0249FI_at; Start 4; Stop 28
ttgtttatataggaggtgaacttac

SEQ ID NO: 20344 - DNA, 25 bp, Artificial
  probe
  misc_feature (1)..(25): SEQ ID NO: 206; WAN0249FI_at; Start 108; Stop 132
gttaaatagatagcgcggaggcgca

SEQ ID NO: 20345 - DNA, 25 bp, Artificial
  probe
  misc_feature (1)..(25): SEQ ID NO: 540; WAN0249FJ_at; Start 15; Stop 39
gcgcctccgcgctatctatttaaca

SEQ ID NO: 20346 - DNA, 25 bp, Artificial
  probe
  misc_feature (1)..(25): SEQ ID NO: 540; WAN0249FJ_at; Start 4; Stop 28
attttcctcctgcgcctccgcgcta

SEQ ID NO: 20347 - DNA, 25 bp, Artificial
  probe
  misc_feature (1)..(25): SEQ ID NO: 540; WAN0249FJ_at; Start 7; Stop 31
ttcctcctgcgcctccgcgctatct

SEQ ID NO: 20348 - DNA, 25 bp, Artificial
  probe
  misc_feature (1)..(25): SEQ ID NO: 540; WAN0249FJ_at; Start 23; Stop 47
gcgctatctatttaacatcattata

SEQ ID NO: 20349 - DNA, 25 bp, Artificial
  probe
  misc_feature (1)..(25): SEQ ID NO: 540; WAN0249FJ_at; Start 3; Stop 27
aattttcctcctgcgcctccgcgct

SEQ ID NO: 20350 - DNA, 25 bp, Artificial
  probe
  misc_feature (1)..(25): SEQ ID NO: 540; WAN0249FJ_at; Start 9; Stop 33
cctcctgcgcctccgcgctatctat

SEQ ID NO: 20351 - DNA, 25 bp, Artificial
  probe
  misc_feature (1)..(25): SEQ ID NO: 540; WAN0249FJ_at; Start 113; Stop 137
gggacgtaagttcacctcctatata

SEQ ID NO: 20352 - DNA, 25 bp, Artificial
  probe
  misc_feature (1)..(25): SEQ ID NO: 540; WAN0249FJ_at; Start 121; Stop 145
agttcacctcctatataaacaagtt

SEQ ID NO: 20353 - DNA, 25 bp, Artificial
  probe
  misc_feature (1)..(25): SEQ ID NO: 540; WAN0249FJ_at; Start 18; Stop 42
cctccgcgctatctatttaacatca

SEQ ID NO: 20354 - DNA, 25 bp, Artificial
  probe
  misc_feature (1)..(25): SEQ ID NO: 540; WAN0249FJ_at; Start 106; Stop 130
gataggagggacgtaagttcacctc

SEQ ID NO: 20355 - DNA, 25 bp, Artificial
  probe
  misc_feature (1)..(25): SEQ ID NO: 540; WAN0249FJ_at; Start 24; Stop 48
cgctatctatttaacatcattatat

SEQ ID NO: 20356 - DNA, 25 bp, Artificial
  probe
  misc_feature (1)..(25): SEQ ID NO: 540; WAN0249FJ_at; Start 1; Stop 25
ataattttcctcctgcgcctccgcg

SEQ ID NO: 20357 - DNA, 25 bp, Artificial
  probe
  misc_feature (1)..(25): SEQ ID NO: 540; WAN0249FJ_at; Start 115; Stop 139
gacgtaagttcacctcctatataaa

SEQ ID NO: 20358 - DNA, 25 bp, Artificial
  probe
  misc_feature (1)..(25): SEQ ID NO: 540; WAN0249FJ_at; Start 111; Stop 135
gagggacgtaagttcacctcctata

SEQ ID NO: 20359 - DNA, 25 bp, Artificial
  probe
  misc_feature (1)..(25): SEQ ID NO: 540; WAN0249FJ_at; Start 20; Stop 44
tccgcgctatctatttaacatcatt

SEQ ID NO: 20360 - DNA, 25 bp, Artificial
  probe
  misc_feature (1)..(25): SEQ ID NO: 540; WAN0249FJ_at; Start 114; Stop 138
ggacgtaagttcacctcctatataa

SEQ ID NO: 20361 - DNA, 25 bp, Artificial
  probe
  misc_feature (1)..(25): SEQ ID NO: 540; WAN0249FJ_at; Start 112; Stop 136
agggacgtaagttcacctcctatat

SEQ ID NO: 20362 - DNA, 25 bp, Artificial
  probe
  misc_feature (1)..(25): SEQ ID NO: 540; WAN0249FJ_at; Start 117; Stop 141
cgtaagttcacctcctatataaaca

SEQ ID NO: 20363 - DNA, 25 bp, Artificial
  probe
  misc_feature (1)..(25): SEQ ID NO: 540; WAN0249FJ_at; Start 25; Stop 49
gctatctatttaacatcattatatt

SEQ ID NO: 20364 - DNA, 25 bp, Artificial
  probe
  misc_feature (1)..(25): SEQ ID NO: 540; WAN0249FJ_at; Start 27; Stop 51
tatctatttaacatcattatattac

SEQ ID NO: 20365 - DNA, 25 bp, Artificial
  probe
  misc_feature (1)..(25): SEQ ID NO: 540; WAN0249FJ_at; Start 14; Stop 38
tgcgcctccgcgctatctatttaac

SEQ ID NO: 20366 - DNA, 25 bp, Artificial
  probe
  misc_feature (1)..(25): SEQ ID NO: 540; WAN0249FJ_at; Start 19; Stop 43
ctccgcgctatctatttaacatcat

SEQ ID NO: 20367 - DNA, 25 bp, Artificial
  probe
  misc_feature (1)..(25): SEQ ID NO: 540; WAN0249FJ_at; Start 118; Stop 142
gtaagttcacctcctatataaacaa

SEQ ID NO: 20368 - DNA, 25 bp, Artificial
  probe
  misc_feature (1)..(25): SEQ ID NO: 540; WAN0249FJ_at; Start 119; Stop 143
taagttcacctcctatataaacaag

SEQ ID NO: 20369 - DNA, 25 bp, Artificial
  probe
  misc_feature (1)..(25): SEQ ID NO: 540; WAN0249FJ_at; Start 2; Stop 26
taattttcctcctgcgcctccgcgc

SEQ ID NO: 20370 - DNA, 25 bp, Artificial
  probe
  misc_feature (1)..(25): SEQ ID NO: 540; WAN0249FJ_at; Start 17; Stop 41
gcctccgcgctatctatttaacatc

SEQ ID NO: 20371 - DNA, 25 bp, Artificial
  probe
  misc_feature (1)..(25): SEQ ID NO: 540; WAN0249FJ_at; Start 8; Stop 32
tcctcctgcgcctccgcgctatcta

SEQ ID NO: 20372 - DNA, 25 bp, Artificial
  probe
  misc_feature (1)..(25): SEQ ID NO: 540; WAN0249FJ_at; Start 22; Stop 46
cgcgctatctatttaacatcattat

SEQ ID NO: 20373 - DNA, 25 bp, Artificial
  probe
  misc_feature (1)..(25): SEQ ID NO: 540; WAN0249FJ_at; Start 41; Stop 65
cattatattactttttgtattcgtt

SEQ ID NO: 20374 - DNA, 25 bp, Artificial
  probe
  misc_feature (1)..(25): SEQ ID NO: 540; WAN0249FJ_at; Start 120; Stop 144
aagttcacctcctatataaacaagt

SEQ ID NO: 20375 - DNA, 25 bp, Artificial
  probe
  misc_feature (1)..(25): SEQ ID NO: 540; WAN0249FJ_at; Start 21; Stop 45
ccgcgctatctatttaacatcatta

SEQ ID NO: 20376 - DNA, 25 bp, Artificial
  probe
  misc_feature (1)..(25): SEQ ID NO: 540; WAN0249FJ_at; Start 16; Stop 40
cgcctccgcgctatctatttaacat

SEQ ID NO: 20377 - DNA, 25 bp, Artificial
  probe
  misc_feature (1)..(25): SEQ ID NO: 540; WAN0249FJ_at; Start 72; Stop 96
tatttgtgaattgtttaacaaatct

SEQ ID NO: 20378 - DNA, 25 bp, Artificial
  probe
  misc_feature (1)..(25): SEQ ID NO: 540; WAN0249FJ_at; Start 5; Stop 29
ttttcctcctgcgcctccgcgctat

SEQ ID NO: 20379 - DNA, 25 bp, Artificial
  probe
  misc_feature (1)..(25): SEQ ID NO: 3195; WAN0249FK_at; Start 53; Stop 77
gaaaaatcgcagtaaaaacggcaca

SEQ ID NO: 20380 - DNA, 25 bp, Artificial
  probe
  misc_feature (1)..(25): SEQ ID NO: 3195; WAN0249FK_at; Start 43; Stop 67
gacatttcaggaaaaatcgcagtaa

SEQ ID NO: 20381 - DNA, 25 bp, Artificial
  probe
  misc_feature (1)..(25): SEQ ID NO: 3195; WAN0249FK_at; Start 98; Stop 122
aatactagaaaaatacttgtggagg

SEQ ID NO: 20382 - DNA, 25 bp, Artificial
  probe
  misc_feature (1)..(25): SEQ ID NO: 3195; WAN0249FK_at; Start 59; Stop 83
tcgcagtaaaaacggcacagccttc

SEQ ID NO: 20383 - DNA, 25 bp, Artificial
  probe
  misc_feature (1)..(25): SEQ ID NO: 3195; WAN0249FK_at; Start 58; Stop 82
atcgcagtaaaaacggcacagcctt

SEQ ID NO: 20384 - DNA, 25 bp, Artificial
  probe
  misc_feature (1)..(25): SEQ ID NO: 3195; WAN0249FK_at; Start 82; Stop 106
tctttaaatgtgctataatactaga

SEQ ID NO: 20385 - DNA, 25 bp, Artificial
  probe
  misc_feature (1)..(25): SEQ ID NO: 3195; WAN0249FK_at; Start 19; Stop 43
taggacaattcacctctaattattg

SEQ ID NO: 20386 - DNA, 25 bp, Artificial
  probe
  misc_feature (1)..(25): SEQ ID NO: 3195; WAN0249FK_at; Start 72; Stop 96
ggcacagccttctttaaatgtgcta

SEQ ID NO: 20387 - DNA, 25 bp, Artificial
  probe
  misc_feature (1)..(25): SEQ ID NO: 3195; WAN0249FK_at; Start 104; Stop 128
agaaaaatacttgtggaggttccat

SEQ ID NO: 20388 - DNA, 25 bp, Artificial
  probe
  misc_feature (1)..(25): SEQ ID NO: 3195; WAN0249FK_at; Start 22; Stop 46
gacaattcacctctaattattgaca

SEQ ID NO: 20389 - DNA, 25 bp, Artificial
  probe
  misc_feature (1)..(25): SEQ ID NO: 3195; WAN0249FK_at; Start 92; Stop 116
tgctataatactagaaaaatacttg

SEQ ID NO: 20390 - DNA, 25 bp, Artificial
  probe
  misc_feature (1)..(25): SEQ ID NO: 3195; WAN0249FK_at; Start 103; Stop 127
tagaaaaatacttgtggaggttcca

SEQ ID NO: 20391 - DNA, 25 bp, Artificial
  probe
  misc_feature (1)..(25): SEQ ID NO: 3195; WAN0249FK_at; Start 90; Stop 114
tgtgctataatactagaaaaatact

SEQ ID NO: 20392 - DNA, 25 bp, Artificial
  probe
  misc_feature (1)..(25): SEQ ID NO: 3195; WAN0249FK_at; Start 97; Stop 121
taatactagaaaaatacttgtggag

SEQ ID NO: 20393 - DNA, 25 bp, Artificial
  probe
  misc_feature (1)..(25): SEQ ID NO: 3195; WAN0249FK_at; Start 21; Stop 45
ggacaattcacctctaattattgac

SEQ ID NO: 20394 - DNA, 25 bp, Artificial
  probe
  misc_feature (1)..(25): SEQ ID NO: 3195; WAN0249FK_at; Start 11; Stop 35
gacgacaataggacaattcacctct

SEQ ID NO: 20395 - DNA, 25 bp, Artificial
  probe
  misc_feature (1)..(25): SEQ ID NO: 3195; WAN0249FK_at; Start 13; Stop 37
cgacaataggacaattcacctctaa

SEQ ID NO: 20396 - DNA, 25 bp, Artificial
  probe
  misc_feature (1)..(25): SEQ ID NO: 3195; WAN0249FK_at; Start 29; Stop 53
cacctctaattattgacatttcagg

SEQ ID NO: 20397 - DNA, 25 bp, Artificial
  probe
  misc_feature (1)..(25): SEQ ID NO: 3195; WAN0249FK_at; Start 14; Stop 38
gacaataggacaattcacctctaat

SEQ ID NO: 20398 - DNA, 25 bp, Artificial
  probe
  misc_feature (1)..(25): SEQ ID NO: 3195; WAN0249FK_at; Start 95; Stop 119
tataatactagaaaaatacttgtgg

SEQ ID NO: 20399 - DNA, 25 bp, Artificial
  probe
  misc_feature (1)..(25): SEQ ID NO: 3195; WAN0249FK_at; Start 55; Stop 79
aaaatcgcagtaaaaacggcacagc

SEQ ID NO: 20400 - DNA, 25 bp, Artificial
  probe
  misc_feature (1)..(25): SEQ ID NO: 3195; WAN0249FK_at; Start 16; Stop 40
caataggacaattcacctctaatta

SEQ ID NO: 20401 - DNA, 25 bp, Artificial
  probe
  misc_feature (1)..(25): SEQ ID NO: 3195; WAN0249FK_at; Start 78; Stop 102
gccttctttaaatgtgctataatac

SEQ ID NO: 20402 - DNA, 25 bp, Artificial
  probe
  misc_feature (1)..(25): SEQ ID NO: 3195; WAN0249FK_at; Start 39; Stop 63
tattgacatttcaggaaaaatcgca

SEQ ID NO: 20403 - DNA, 25 bp, Artificial
  probe
  misc_feature (1)..(25): SEQ ID NO: 3195; WAN0249FK_at; Start 54; Stop 78
aaaaatcgcagtaaaaacggcacag

SEQ ID NO: 20404 - DNA, 25 bp, Artificial
  probe
  misc_feature (1)..(25): SEQ ID NO: 3195; WAN0249FK_at; Start 69; Stop 93
aacggcacagccttctttaaatgtg

SEQ ID NO: 20405 - DNA, 25 bp, Artificial
  probe
  misc_feature (1)..(25): SEQ ID NO: 3195; WAN0249FK_at; Start 31; Stop 55
cctctaattattgacatttcaggaa

SEQ ID NO: 20406 - DNA, 25 bp, Artificial
  probe
  misc_feature (1)..(25): SEQ ID NO: 3195; WAN0249FK_at; Start 74; Stop 98
cacagccttctttaaatgtgctata

SEQ ID NO: 20407 - DNA, 25 bp, Artificial
  probe
  misc_feature (1)..(25): SEQ ID NO: 3195; WAN0249FK_at; Start 38; Stop 62
ttattgacatttcaggaaaaatcgc

SEQ ID NO: 20408 - DNA, 25 bp, Artificial
  probe
  misc_feature (1)..(25): SEQ ID NO: 3195; WAN0249FK_at; Start 57; Stop 81
aatcgcagtaaaaacggcacagcct

SEQ ID NO: 20409 - DNA, 25 bp, Artificial
  probe
  misc_feature (1)..(25): SEQ ID NO: 3195; WAN0249FK_at; Start 45; Stop 69
catttcaggaaaaatcgcagtaaaa

SEQ ID NO: 20410 - DNA, 25 bp, Artificial
  probe
  misc_feature (1)..(25): SEQ ID NO: 3195; WAN0249FK_at; Start 56; Stop 80
aaatcgcagtaaaaacggcacagcc

SEQ ID NO: 20411 - DNA, 25 bp, Artificial
  probe
  misc_feature (1)..(25): SEQ ID NO: 3195; WAN0249FK_at; Start 41; Stop 65
ttgacatttcaggaaaaatcgcagt

SEQ ID NO: 20412 - DNA, 25 bp, Artificial
  probe
  misc_feature (1)..(25): SEQ ID NO: 3195; WAN0249FK_at; Start 62; Stop 86
cagtaaaaacggcacagccttcttt

SEQ ID NO: 20413 - DNA, 25 bp, Artificial
  probe
  misc_feature (1)..(25): SEQ ID NO: 287; WAN0249FL_at; Start 47; Stop 71
gaaggctgtgccgtttttactgcga

SEQ ID NO: 20414 - DNA, 25 bp, Artificial
  probe
  misc_feature (1)..(25): SEQ ID NO: 287; WAN0249FL_at; Start 85; Stop 109
gtcaataattagaggtgaattgtcc

SEQ ID NO: 20415 - DNA, 25 bp, Artificial
  probe
  misc_feature (1)..(25): SEQ ID NO: 287; WAN0249FL_at; Start 38; Stop 62
acatttaaagaaggctgtgccgttt

SEQ ID NO: 20416 - DNA, 25 bp, Artificial
  probe
  misc_feature (1)..(25): SEQ ID NO: 287; WAN0249FL_at; Start 65; Stop 89
actgcgatttttcctgaaatgtcaa

SEQ ID NO: 20417 - DNA, 25 bp, Artificial
  probe
  misc_feature (1)..(25): SEQ ID NO: 287; WAN0249FL_at; Start 35; Stop 59
agcacatttaaagaaggctgtgccg

SEQ ID NO: 20418 - DNA, 25 bp, Artificial
  probe
  misc_feature (1)..(25): SEQ ID NO: 287; WAN0249FL_at; Start 29; Stop 53
tattatagcacatttaaagaaggct

SEQ ID NO: 20419 - DNA, 25 bp, Artificial
  probe
  misc_feature (1)..(25): SEQ ID NO: 287; WAN0249FL_at; Start 78; Stop 102
ctgaaatgtcaataattagaggtga

SEQ ID NO: 20420 - DNA, 25 bp, Artificial
  probe
  misc_feature (1)..(25): SEQ ID NO: 287; WAN0249FL_at; Start 44; Stop 68
aaagaaggctgtgccgtttttactg

SEQ ID NO: 20421 - DNA, 25 bp, Artificial
  probe
  misc_feature (1)..(25): SEQ ID NO: 287; WAN0249FL_at; Start 61; Stop 85
ttttactgcgatttttcctgaaatg

SEQ ID NO: 20422 - DNA, 25 bp, Artificial
  probe
  misc_feature (1)..(25): SEQ ID NO: 287; WAN0249FL_at; Start 86; Stop 110
tcaataattagaggtgaattgtcct

SEQ ID NO: 20423 - DNA, 25 bp, Artificial
  probe
  misc_feature (1)..(25): SEQ ID NO: 287; WAN0249FL_at; Start 95; Stop 119
agaggtgaattgtcctattgtcgtc

SEQ ID NO: 20424 - DNA, 25 bp, Artificial
  probe
  misc_feature (1)..(25): SEQ ID NO: 287; WAN0249FL_at; Start 49; Stop 73
aggctgtgccgtttttactgcgatt

SEQ ID NO: 20425 - DNA, 25 bp, Artificial
  probe
  misc_feature (1)..(25): SEQ ID NO: 287; WAN0249FL_at; Start 64; Stop 88
tactgcgatttttcctgaaatgtca

SEQ ID NO: 20426 - DNA, 25 bp, Artificial
  probe
  misc_feature (1)..(25): SEQ ID NO: 287; WAN0249FL_at; Start 93; Stop 117
ttagaggtgaattgtcctattgtcg

SEQ ID NO: 20427 - DNA, 25 bp, Artificial
  probe
  misc_feature (1)..(25): SEQ ID NO: 287; WAN0249FL_at; Start 76; Stop 100
tcctgaaatgtcaataattagaggt

SEQ ID NO: 20428 - DNA, 25 bp, Artificial
  probe
  misc_feature (1)..(25): SEQ ID NO: 287; WAN0249FL_at; Start 28; Stop 52
gtattatagcacatttaaagaaggc

SEQ ID NO: 20429 - DNA, 25 bp, Artificial
  probe
  misc_feature (1)..(25): SEQ ID NO: 287; WAN0249FL_at; Start 3; Stop 27
tggaacctccacaagtatttttcta

SEQ ID NO: 20430 - DNA, 25 bp, Artificial
  probe
  misc_feature (1)..(25): SEQ ID NO: 287; WAN0249FL_at; Start 50; Stop 74
ggctgtgccgtttttactgcgattt

SEQ ID NO: 20431 - DNA, 25 bp, Artificial
  probe
  misc_feature (1)..(25): SEQ ID NO: 287; WAN0249FL_at; Start 68; Stop 92
gcgatttttcctgaaatgtcaataa

SEQ ID NO: 20432 - DNA, 25 bp, Artificial
  probe
  misc_feature (1)..(25): SEQ ID NO: 287; WAN0249FL_at; Start 48; Stop 72
aaggctgtgccgtttttactgcgat

SEQ ID NO: 20433 - DNA, 25 bp, Artificial
  probe
  misc_feature (1)..(25): SEQ ID NO: 287; WAN0249FL_at; Start 51; Stop 75
gctgtgccgtttttactgcgatttt

SEQ ID NO: 20434 - DNA, 25 bp, Artificial
  probe
  misc_feature (1)..(25): SEQ ID NO: 287; WAN0249FL_at; Start 14; Stop 38
caagtatttttctagtattatagca

SEQ ID NO: 20435 - DNA, 25 bp, Artificial
  probe
  misc_feature (1)..(25): SEQ ID NO: 287; WAN0249FL_at; Start 77; Stop 101
cctgaaatgtcaataattagaggtg

SEQ ID NO: 20436 - DNA, 25 bp, Artificial
  probe
  misc_feature (1)..(25): SEQ ID NO: 287; WAN0249FL_at; Start 87; Stop 111
caataattagaggtgaattgtccta

SEQ ID NO: 20437 - DNA, 25 bp, Artificial
  probe
  misc_feature (1)..(25): SEQ ID NO: 287; WAN0249FL_at; Start 32; Stop 56
tatagcacatttaaagaaggctgtg

SEQ ID NO: 20438 - DNA, 25 bp, Artificial
  probe
  misc_feature (1)..(25): SEQ ID NO: 287; WAN0249FL_at; Start 8; Stop 32
cctccacaagtatttttctagtatt

SEQ ID NO: 20439 - DNA, 25 bp, Artificial
  probe
  misc_feature (1)..(25): SEQ ID NO: 287; WAN0249FL_at; Start 80; Stop 104
gaaatgtcaataattagaggtgaat

SEQ ID NO: 20440 - DNA, 25 bp, Artificial
  probe
  misc_feature (1)..(25): SEQ ID NO: 287; WAN0249FL_at; Start 30; Stop 54
attatagcacatttaaagaaggctg

SEQ ID NO: 20441 - DNA, 25 bp, Artificial
  probe
  misc_feature (1)..(25): SEQ ID NO: 287; WAN0249FL_at; Start 16; Stop 40
agtatttttctagtattatagcaca

SEQ ID NO: 20442 - DNA, 25 bp, Artificial
  probe
  misc_feature (1)..(25): SEQ ID NO: 287; WAN0249FL_at; Start 36; Stop 60
gcacatttaaagaaggctgtgccgt

SEQ ID NO: 20443 - DNA, 25 bp, Artificial
  probe
  misc_feature (1)..(25): SEQ ID NO: 287; WAN0249FL_at; Start 90; Stop 114
taattagaggtgaattgtcctattg

SEQ ID NO: 20444 - DNA, 25 bp, Artificial
  probe
  misc_feature (1)..(25): SEQ ID NO: 287; WAN0249FL_at; Start 37; Stop 61
cacatttaaagaaggctgtgccgtt

SEQ ID NO: 20445 - DNA, 25 bp, Artificial
  probe
  misc_feature (1)..(25): SEQ ID NO: 287; WAN0249FL_at; Start 34; Stop 58
tagcacatttaaagaaggctgtgcc

SEQ ID NO: 20446 - DNA, 25 bp, Artificial
  probe
  misc_feature (1)..(25): SEQ ID NO: 287; WAN0249FL_at; Start 53; Stop 77
tgtgccgtttttactgcgatttttc

SEQ ID NO: 20447 - DNA, 25 bp, Artificial
  probe
  misc_feature (1)..(25): SEQ ID NO: 4760; WAN0249FM_at; Start 51; Stop 75
gttatctcccttaattaggaatgat

SEQ ID NO: 20448 - DNA, 25 bp, Artificial
  probe
  misc_feature (1)..(25): SEQ ID NO: 4760; WAN0249FM_at; Start 66; Stop 90
taggaatgataagggaataactaga

SEQ ID NO: 20449 - DNA, 25 bp, Artificial
  probe
  misc_feature (1)..(25): SEQ ID NO: 4760; WAN0249FM_at; Start 78; Stop 102
gggaataactagaaagatttgtgaa

SEQ ID NO: 20450 - DNA, 25 bp, Artificial
  probe
  misc_feature (1)..(25): SEQ ID NO: 4760; WAN0249FM_at; Start 65; Stop 89
ttaggaatgataagggaataactag

SEQ ID NO: 20451 - DNA, 25 bp, Artificial
  probe
  misc_feature (1)..(25): SEQ ID NO: 4760; WAN0249FM_at; Start 18; Stop 42
catcgatatacatttaactaaaaat

SEQ ID NO: 20452 - DNA, 25 bp, Artificial
  probe
  misc_feature (1)..(25): SEQ ID NO: 4760; WAN0249FM_at; Start 86; Stop 110
ctagaaagatttgtgaatacaaact

SEQ ID NO: 20453 - DNA, 25 bp, Artificial
  probe
  misc_feature (1)..(25): SEQ ID NO: 4760; WAN0249FM_at; Start 46; Stop 70
tgtatgttatctcccttaattagga

SEQ ID NO: 20454 - DNA, 25 bp, Artificial
  probe
  misc_feature (1)..(25): SEQ ID NO: 4760; WAN0249FM_at; Start 5; Stop 29
gaaaaacaaaaaacatcgatataca

SEQ ID NO: 20455 - DNA, 25 bp, Artificial
  probe
  misc_feature (1)..(25): SEQ ID NO: 4760; WAN0249FM_at; Start 55; Stop 79
tctcccttaattaggaatgataagg

SEQ ID NO: 20456 - DNA, 25 bp, Artificial
  probe
  misc_feature (1)..(25): SEQ ID NO: 4760; WAN0249FM_at; Start 45; Stop 69
ttgtatgttatctcccttaattagg

SEQ ID NO: 20457 - DNA, 25 bp, Artificial
  probe
  misc_feature (1)..(25): SEQ ID NO: 4760; WAN0249FM_at; Start 119; Stop 143
tatacaaaatatacagtaataatga

SEQ ID NO: 20458 - DNA, 25 bp, Artificial
  probe
  misc_feature (1)..(25): SEQ ID NO: 4760; WAN0249FM_at; Start 37; Stop 61
aaaaattattgtatgttatctccct

SEQ ID NO: 20459 - DNA, 25 bp, Artificial
  probe
  misc_feature (1)..(25): SEQ ID NO: 4760; WAN0249FM_at; Start 48; Stop 72
tatgttatctcccttaattaggaat

SEQ ID NO: 20460 - DNA, 25 bp, Artificial
  probe
  misc_feature (1)..(25): SEQ ID NO: 4760; WAN0249FM_at; Start 103; Stop 127
tacaaactatttctgatatacaaaa

SEQ ID NO: 20461 - DNA, 25 bp, Artificial
  probe
  misc_feature (1)..(25): SEQ ID NO: 4760; WAN0249FM_at; Start 100; Stop 124
gaatacaaactatttctgatataca

SEQ ID NO: 20462 - DNA, 25 bp, Artificial
  probe
  misc_feature (1)..(25): SEQ ID NO: 4760; WAN0249FM_at; Start 59; Stop 83
ccttaattaggaatgataagggaat

SEQ ID NO: 20463 - DNA, 25 bp, Artificial
  probe
  misc_feature (1)..(25): SEQ ID NO: 4760; WAN0249FM_at; Start 68; Stop 92
ggaatgataagggaataactagaaa

SEQ ID NO: 20464 - DNA, 25 bp, Artificial
  probe
  misc_feature (1)..(25): SEQ ID NO: 4760; WAN0249FM_at; Start 69; Stop 93
gaatgataagggaataactagaaag

SEQ ID NO: 20465 - DNA, 25 bp, Artificial
  probe
  misc_feature (1)..(25): SEQ ID NO: 4760; WAN0249FM_at; Start 97; Stop 121
tgtgaatacaaactatttctgatat

SEQ ID NO: 20466 - DNA, 25 bp, Artificial
  probe
  misc_feature (1)..(25): SEQ ID NO: 4760; WAN0249FM_at; Start 76; Stop 100
aagggaataactagaaagatttgtg

SEQ ID NO: 20467 - DNA, 25 bp, Artificial
  probe
  misc_feature (1)..(25): SEQ ID NO: 4760; WAN0249FM_at; Start 62; Stop 86
taattaggaatgataagggaataac

SEQ ID NO: 20468 - DNA, 25 bp, Artificial
  probe
  misc_feature (1)..(25): SEQ ID NO: 4760; WAN0249FM_at; Start 56; Stop 80
ctcccttaattaggaatgataaggg

SEQ ID NO: 20469 - DNA, 25 bp, Artificial
  probe
  misc_feature (1)..(25): SEQ ID NO: 4760; WAN0249FM_at; Start 72; Stop 96
tgataagggaataactagaaagatt

SEQ ID NO: 20470 - DNA, 25 bp, Artificial
  probe
  misc_feature (1)..(25): SEQ ID NO: 4760; WAN0249FM_at; Start 50; Stop 74
tgttatctcccttaattaggaatga

SEQ ID NO: 20471 - DNA, 25 bp, Artificial
  probe
  misc_feature (1)..(25): SEQ ID NO: 4760; WAN0249FM_at; Start 39; Stop 63
aaattattgtatgttatctccctta

SEQ ID NO: 20472 - DNA, 25 bp, Artificial
  probe
  misc_feature (1)..(25): SEQ ID NO: 4760; WAN0249FM_at; Start 36; Stop 60
taaaaattattgtatgttatctccc

SEQ ID NO: 20473 - DNA, 25 bp, Artificial
  probe
  misc_feature (1)..(25): SEQ ID NO: 4760; WAN0249FM_at; Start 114; Stop 138
tctgatatacaaaatatacagtaat

SEQ ID NO: 20474 - DNA, 25 bp, Artificial
  probe
  misc_feature (1)..(25): SEQ ID NO: 4760; WAN0249FM_at; Start 93; Stop 117
gatttgtgaatacaaactatttctg

SEQ ID NO: 20475 - DNA, 25 bp, Artificial
  probe
  misc_feature (1)..(25): SEQ ID NO: 4760; WAN0249FM_at; Start 11; Stop 35
caaaaaacatcgatatacatttaac

SEQ ID NO: 20476 - DNA, 25 bp, Artificial
  probe
  misc_feature (1)..(25): SEQ ID NO: 4760; WAN0249FM_at; Start 81; Stop 105
aataactagaaagatttgtgaatac

SEQ ID NO: 20477 - DNA, 25 bp, Artificial
  probe
  misc_feature (1)..(25): SEQ ID NO: 4760; WAN0249FM_at; Start 110; Stop 134
tatttctgatatacaaaatatacag

SEQ ID NO: 20478 - DNA, 25 bp, Artificial
  probe
  misc_feature (1)..(25): SEQ ID NO: 4760; WAN0249FM_at; Start 16; Stop 40
aacatcgatatacatttaactaaaa

SEQ ID NO: 20479 - DNA, 25 bp, Artificial
  probe
  misc_feature (1)..(25): SEQ ID NO: 4760; WAN0249FM_at; Start 83; Stop 107
taactagaaagatttgtgaatacaa

SEQ ID NO: 20480 - DNA, 25 bp, Artificial
  probe
  misc_feature (1)..(25): SEQ ID NO: 4760; WAN0249FM_at; Start 53; Stop 77
tatctcccttaattaggaatgataa

SEQ ID NO: 20481 - DNA, 25 bp, Artificial
  probe
  misc_feature (1)..(25): SEQ ID NO: 4604; WAN0249FN_at; Start 66; Stop 90
cttatcattcctaattaagggagat

SEQ ID NO: 20482 - DNA, 25 bp, Artificial
  probe
  misc_feature (1)..(25): SEQ ID NO: 4604; WAN0249FN_at; Start 81; Stop 105
taagggagataacatacaataattt

SEQ ID NO: 20483 - DNA, 25 bp, Artificial
  probe
  misc_feature (1)..(25): SEQ ID NO: 4604; WAN0249FN_at; Start 52; Stop 76
tttctagttattcccttatcattcc

SEQ ID NO: 20484 - DNA, 25 bp, Artificial
  probe
  misc_feature (1)..(25): SEQ ID NO: 4604; WAN0249FN_at; Start 103; Stop 127
tttttagttaaatgtatatcgatgt

SEQ ID NO: 20485 - DNA, 25 bp, Artificial
  probe
  misc_feature (1)..(25): SEQ ID NO: 4604; WAN0249FN_at; Start 27; Stop 51
cagaaatagtttgtattcacaaatc

SEQ ID NO: 20486 - DNA, 25 bp, Artificial
  probe
  misc_feature (1)..(25): SEQ ID NO: 4604; WAN0249FN_at; Start 43; Stop 67
tcacaaatctttctagttattccct

SEQ ID NO: 20487 - DNA, 25 bp, Artificial
  probe
  misc_feature (1)..(25): SEQ ID NO: 4604; WAN0249FN_at; Start 56; Stop 80
tagttattcccttatcattcctaat

SEQ ID NO: 20488 - DNA, 25 bp, Artificial
  probe
  misc_feature (1)..(25): SEQ ID NO: 4604; WAN0249FN_at; Start 42; Stop 66
ttcacaaatctttctagttattccc

SEQ ID NO: 20489 - DNA, 25 bp, Artificial
  probe
  misc_feature (1)..(25): SEQ ID NO: 4604; WAN0249FN_at; Start 24; Stop 48
tatcagaaatagtttgtattcacaa

SEQ ID NO: 20490 - DNA, 25 bp, Artificial
  probe
  misc_feature (1)..(25): SEQ ID NO: 4604; WAN0249FN_at; Start 55; Stop 79
ctagttattcccttatcattcctaa

SEQ ID NO: 20491 - DNA, 25 bp, Artificial
  probe
  misc_feature (1)..(25): SEQ ID NO: 4604; WAN0249FN_at; Start 65; Stop 89
ccttatcattcctaattaagggaga

SEQ ID NO: 20492 - DNA, 25 bp, Artificial
  probe
  misc_feature (1)..(25): SEQ ID NO: 4604; WAN0249FN_at; Start 58; Stop 82
gttattcccttatcattcctaatta

SEQ ID NO: 20493 - DNA, 25 bp, Artificial
  probe
  misc_feature (1)..(25): SEQ ID NO: 4604; WAN0249FN_at; Start 76; Stop 100
ctaattaagggagataacatacaat

SEQ ID NO: 20494 - DNA, 25 bp, Artificial
  probe
  misc_feature (1)..(25): SEQ ID NO: 4604; WAN0249FN_at; Start 22; Stop 46
tatatcagaaatagtttgtattcac

SEQ ID NO: 20495 - DNA, 25 bp, Artificial
  probe
  misc_feature (1)..(25): SEQ ID NO: 4604; WAN0249FN_at; Start 70; Stop 94
tcattcctaattaagggagataaca

SEQ ID NO: 20496 - DNA, 25 bp, Artificial
  probe
  misc_feature (1)..(25): SEQ ID NO: 4604; WAN0249FN_at; Start 109; Stop 133
gttaaatgtatatcgatgttttttg

SEQ ID NO: 20497 - DNA, 25 bp, Artificial
  probe
  misc_feature (1)..(25): SEQ ID NO: 4604; WAN0249FN_at; Start 86; Stop 110
gagataacatacaataatttttagt

SEQ ID NO: 20498 - DNA, 25 bp, Artificial
  probe
  misc_feature (1)..(25): SEQ ID NO: 4604; WAN0249FN_at; Start 74; Stop 98
tcctaattaagggagataacataca

SEQ ID NO: 20499 - DNA, 25 bp, Artificial
  probe
  misc_feature (1)..(25): SEQ ID NO: 4604; WAN0249FN_at; Start 8; Stop 32
tactgtatattttgtatatcagaaa

SEQ ID NO: 20500 - DNA, 25 bp, Artificial
  probe
  misc_feature (1)..(25): SEQ ID NO: 4604; WAN0249FN_at; Start 48; Stop 72
aatctttctagttattcccttatca

SEQ ID NO: 20501 - DNA, 25 bp, Artificial
  probe
  misc_feature (1)..(25): SEQ ID NO: 4604; WAN0249FN_at; Start 75; Stop 99
cctaattaagggagataacatacaa

SEQ ID NO: 20502 - DNA, 25 bp, Artificial
  probe
  misc_feature (1)..(25): SEQ ID NO: 4604; WAN0249FN_at; Start 34; Stop 58
agtttgtattcacaaatctttctag

SEQ ID NO: 20503 - DNA, 25 bp, Artificial
  probe
  misc_feature (1)..(25): SEQ ID NO: 4604; WAN0249FN_at; Start 38; Stop 62
tgtattcacaaatctttctagttat

SEQ ID NO: 20504 - DNA, 25 bp, Artificial
  probe
  misc_feature (1)..(25): SEQ ID NO: 4604; WAN0249FN_at; Start 60; Stop 84
tattcccttatcattcctaattaag

SEQ ID NO: 20505 - DNA, 25 bp, Artificial
  probe
  misc_feature (1)..(25): SEQ ID NO: 4604; WAN0249FN_at; Start 26; Stop 50
tcagaaatagtttgtattcacaaat

SEQ ID NO: 20506 - DNA, 25 bp, Artificial
  probe
  misc_feature (1)..(25): SEQ ID NO: 4604; WAN0249FN_at; Start 44; Stop 68
cacaaatctttctagttattccctt

SEQ ID NO: 20507 - DNA, 25 bp, Artificial
  probe
  misc_feature (1)..(25): SEQ ID NO: 4604; WAN0249FN_at; Start 83; Stop 107
agggagataacatacaataattttt

SEQ ID NO: 20508 - DNA, 25 bp, Artificial
  probe
  misc_feature (1)..(25): SEQ ID NO: 4604; WAN0249FN_at; Start 68; Stop 92
tatcattcctaattaagggagataa

SEQ ID NO: 20509 - DNA, 25 bp, Artificial
  probe
  misc_feature (1)..(25): SEQ ID NO: 4604; WAN0249FN_at; Start 35; Stop 59
gtttgtattcacaaatctttctagt

SEQ ID NO: 20510 - DNA, 25 bp, Artificial
  probe
  misc_feature (1)..(25): SEQ ID NO: 4604; WAN0249FN_at; Start 71; Stop 95
cattcctaattaagggagataacat

SEQ ID NO: 20511 - DNA, 25 bp, Artificial
  probe
  misc_feature (1)..(25): SEQ ID NO: 4604; WAN0249FN_at; Start 77; Stop 101
taattaagggagataacatacaata

SEQ ID NO: 20512 - DNA, 25 bp, Artificial
  probe
  misc_feature (1)..(25): SEQ ID NO: 4604; WAN0249FN_at; Start 85; Stop 109
ggagataacatacaataatttttag

SEQ ID NO: 20513 - DNA, 25 bp, Artificial
  probe
  misc_feature (1)..(25): SEQ ID NO: 4604; WAN0249FN_at; Start 69; Stop 93
atcattcctaattaagggagataac

SEQ ID NO: 20514 - DNA, 25 bp, Artificial
  probe
  misc_feature (1)..(25): SEQ ID NO: 4604; WAN0249FN_at; Start 46; Stop 70
caaatctttctagttattcccttat

SEQ ID NO: 20515 - DNA, 25 bp, Artificial
  probe
  misc_feature (1)..(25): SEQ ID NO: 5880; WAN0249FO_at; Start 125; Stop 149
gaaatattgtacatgttttcaagaa

SEQ ID NO: 20516 - DNA, 25 bp, Artificial
  probe
  misc_feature (1)..(25): SEQ ID NO: 5880; WAN0249FO_at; Start 12; Stop 36
cctgatgtctaacaaagtgtaaaaa

SEQ ID NO: 20517 - DNA, 25 bp, Artificial
  probe
  misc_feature (1)..(25): SEQ ID NO: 5880; WAN0249FO_at; Start 165; Stop 189
tataaagatactagaaatagaatac

SEQ ID NO: 20518 - DNA, 25 bp, Artificial
  probe
  misc_feature (1)..(25): SEQ ID NO: 5880; WAN0249FO_at; Start 127; Stop 151
aatattgtacatgttttcaagaata

SEQ ID NO: 20519 - DNA, 25 bp, Artificial
  probe
  misc_feature (1)..(25): SEQ ID NO: 5880; WAN0249FO_at; Start 175; Stop 199
ctagaaatagaatacatcttattag

SEQ ID NO: 20520 - DNA, 25 bp, Artificial
  probe
  misc_feature (1)..(25): SEQ ID NO: 5880; WAN0249FO_at; Start 162; Stop 186
tgatataaagatactagaaatagaa

SEQ ID NO: 20521 - DNA, 25 bp, Artificial
  probe
  misc_feature (1)..(25): SEQ ID NO: 5880; WAN0249FO_at; Start 2; Stop 26
tgtttttcctcctgatgtctaacaa

SEQ ID NO: 20522 - DNA, 25 bp, Artificial
  probe
  misc_feature (1)..(25): SEQ ID NO: 5880; WAN0249FO_at; Start 7; Stop 31
ttcctcctgatgtctaacaaagtgt

SEQ ID NO: 20523 - DNA, 25 bp, Artificial
  probe
  misc_feature (1)..(25): SEQ ID NO: 5880; WAN0249FO_at; Start 154; Stop 178
ttctaatttgatataaagatactag

SEQ ID NO: 20524 - DNA, 25 bp, Artificial
  probe
  misc_feature (1)..(25): SEQ ID NO: 5880; WAN0249FO_at; Start 136; Stop 160
catgttttcaagaataatttctaat

SEQ ID NO: 20525 - DNA, 25 bp, Artificial
  probe
  misc_feature (1)..(25): SEQ ID NO: 5880; WAN0249FO_at; Start 14; Stop 38
tgatgtctaacaaagtgtaaaaaac

SEQ ID NO: 20526 - DNA, 25 bp, Artificial
  probe
  misc_feature (1)..(25): SEQ ID NO: 5880; WAN0249FO_at; Start 132; Stop 156
tgtacatgttttcaagaataatttc

SEQ ID NO: 20527 - DNA, 25 bp, Artificial
  probe
  misc_feature (1)..(25): SEQ ID NO: 5880; WAN0249FO_at; Start 10; Stop 34
ctcctgatgtctaacaaagtgtaaa

SEQ ID NO: 20528 - DNA, 25 bp, Artificial
  probe
  misc_feature (1)..(25): SEQ ID NO: 5880; WAN0249FO_at; Start 4; Stop 28
tttttcctcctgatgtctaacaaag

SEQ ID NO: 20529 - DNA, 25 bp, Artificial
  probe
  misc_feature (1)..(25): SEQ ID NO: 5880; WAN0249FO_at; Start 8; Stop 32
tcctcctgatgtctaacaaagtgta

SEQ ID NO: 20530 - DNA, 25 bp, Artificial
  probe
  misc_feature (1)..(25): SEQ ID NO: 5880; WAN0249FO_at; Start 168; Stop 192
aaagatactagaaatagaatacatc

SEQ ID NO: 20531 - DNA, 25 bp, Artificial
  probe
  misc_feature (1)..(25): SEQ ID NO: 5880; WAN0249FO_at; Start 65; Stop 89
agaaaacgctttctatttatatttg

SEQ ID NO: 20532 - DNA, 25 bp, Artificial
  probe
  misc_feature (1)..(25): SEQ ID NO: 5880; WAN0249FO_at; Start 59; Stop 83
cattcaagaaaacgctttctattta

SEQ ID NO: 20533 - DNA, 25 bp, Artificial
  probe
  misc_feature (1)..(25): SEQ ID NO: 5880; WAN0249FO_at; Start 134; Stop 158
tacatgttttcaagaataatttcta

SEQ ID NO: 20534 - DNA, 25 bp, Artificial
  probe
  misc_feature (1)..(25): SEQ ID NO: 5880; WAN0249FO_at; Start 55; Stop 79
taaacattcaagaaaacgctttcta

SEQ ID NO: 20535 - DNA, 25 bp, Artificial
  probe
  misc_feature (1)..(25): SEQ ID NO: 5880; WAN0249FO_at; Start 156; Stop 180
ctaatttgatataaagatactagaa

SEQ ID NO: 20536 - DNA, 25 bp, Artificial
  probe
  misc_feature (1)..(25): SEQ ID NO: 5880; WAN0249FO_at; Start 9; Stop 33
cctcctgatgtctaacaaagtgtaa

SEQ ID NO: 20537 - DNA, 25 bp, Artificial
  probe
  misc_feature (1)..(25): SEQ ID NO: 5880; WAN0249FO_at; Start 3; Stop 27
gtttttcctcctgatgtctaacaaa

SEQ ID NO: 20538 - DNA, 25 bp, Artificial
  probe
  misc_feature (1)..(25): SEQ ID NO: 5880; WAN0249FO_at; Start 5; Stop 29
ttttcctcctgatgtctaacaaagt

SEQ ID NO: 20539 - DNA, 25 bp, Artificial
  probe
  misc_feature (1)..(25): SEQ ID NO: 5880; WAN0249FO_at; Start 171; Stop 195
gatactagaaatagaatacatctta

SEQ ID NO: 20540 - DNA, 25 bp, Artificial
  probe
  misc_feature (1)..(25): SEQ ID NO: 5880; WAN0249FO_at; Start 95; Stop 119
ccatattaaagtctaaaactagtat

SEQ ID NO: 20541 - DNA, 25 bp, Artificial
  probe
  misc_feature (1)..(25): SEQ ID NO: 5880; WAN0249FO_at; Start 6; Stop 30
tttcctcctgatgtctaacaaagtg

SEQ ID NO: 20542 - DNA, 25 bp, Artificial
  probe
  misc_feature (1)..(25): SEQ ID NO: 5880; WAN0249FO_at; Start 106; Stop 130
tctaaaactagtatcttttgaaata

SEQ ID NO: 20543 - DNA, 25 bp, Artificial
  probe
  misc_feature (1)..(25): SEQ ID NO: 5880; WAN0249FO_at; Start 62; Stop 86
tcaagaaaacgctttctatttatat

SEQ ID NO: 20544 - DNA, 25 bp, Artificial
  probe
  misc_feature (1)..(25): SEQ ID NO: 5880; WAN0249FO_at; Start 56; Stop 80
aaacattcaagaaaacgctttctat

SEQ ID NO: 20545 - DNA, 25 bp, Artificial
  probe
  misc_feature (1)..(25): SEQ ID NO: 5880; WAN0249FO_at; Start 11; Stop 35
tcctgatgtctaacaaagtgtaaaa

SEQ ID NO: 20546 - DNA, 25 bp, Artificial
  probe
  misc_feature (1)..(25): SEQ ID NO: 5880; WAN0249FO_at; Start 96; Stop 120
catattaaagtctaaaactagtatc

SEQ ID NO: 20547 - DNA, 25 bp, Artificial
  probe
  misc_feature (1)..(25): SEQ ID NO: 5880; WAN0249FO_at; Start 184; Stop 208
gaatacatcttattagtaaaacaac

SEQ ID NO: 20548 - DNA, 25 bp, Artificial
  probe
  misc_feature (1)..(25): SEQ ID NO: 5880; WAN0249FO_at; Start 112; Stop 136
actagtatcttttgaaatattgtac

SEQ ID NO: 20549 - DNA, 25 bp, Artificial
  probe
  misc_feature (1)..(25): SEQ ID NO: 4350; WAN0249FP_at; Start 89; Stop 113
gatactagttttagactttaatatg

SEQ ID NO: 20550 - DNA, 25 bp, Artificial
  probe
  misc_feature (1)..(25): SEQ ID NO: 4350; WAN0249FP_at; Start 1; Stop 25
gttgttttactaataagatgtattc

SEQ ID NO: 20551 - DNA, 25 bp, Artificial
  probe
  misc_feature (1)..(25): SEQ ID NO: 4350; WAN0249FP_at; Start 70; Stop 94
catgtacaatatttcaaaagatact

SEQ ID NO: 20552 - DNA, 25 bp, Artificial
  probe
  misc_feature (1)..(25): SEQ ID NO: 4350; WAN0249FP_at; Start 73; Stop 97
gtacaatatttcaaaagatactagt

SEQ ID NO: 20553 - DNA, 25 bp, Artificial
  probe
  misc_feature (1)..(25): SEQ ID NO: 4350; WAN0249FP_at; Start 17; Stop 41
gatgtattctatttctagtatcttt

SEQ ID NO: 20554 - DNA, 25 bp, Artificial
  probe
  misc_feature (1)..(25): SEQ ID NO: 4350; WAN0249FP_at; Start 110; Stop 134
tatggtaaaacaaatataaatagaa

SEQ ID NO: 20555 - DNA, 25 bp, Artificial
  probe
  misc_feature (1)..(25): SEQ ID NO: 4350; WAN0249FP_at; Start 54; Stop 78
aaattattcttgaaaacatgtacaa

SEQ ID NO: 20556 - DNA, 25 bp, Artificial
  probe
  misc_feature (1)..(25): SEQ ID NO: 4350; WAN0249FP_at; Start 79; Stop 103
tatttcaaaagatactagttttaga

SEQ ID NO: 20557 - DNA, 25 bp, Artificial
  probe
  misc_feature (1)..(25): SEQ ID NO: 4350; WAN0249FP_at; Start 76; Stop 100
caatatttcaaaagatactagtttt

SEQ ID NO: 20558 - DNA, 25 bp, Artificial
  probe
  misc_feature (1)..(25): SEQ ID NO: 4350; WAN0249FP_at; Start 175; Stop 199
tttacactttgttagacatcaggag

SEQ ID NO: 20559 - DNA, 25 bp, Artificial
  probe
  misc_feature (1)..(25): SEQ ID NO: 4350; WAN0249FP_at; Start 120; Stop 144
caaatataaatagaaagcgttttct

SEQ ID NO: 20560 - DNA, 25 bp, Artificial
  probe
  misc_feature (1)..(25): SEQ ID NO: 4350; WAN0249FP_at; Start 58; Stop 82
tattcttgaaaacatgtacaatatt

SEQ ID NO: 20561 - DNA, 25 bp, Artificial
  probe
  misc_feature (1)..(25): SEQ ID NO: 4350; WAN0249FP_at; Start 61; Stop 85
tcttgaaaacatgtacaatatttca

SEQ ID NO: 20562 - DNA, 25 bp, Artificial
  probe
  misc_feature (1)..(25): SEQ ID NO: 4350; WAN0249FP_at; Start 181; Stop 205
ctttgttagacatcaggaggaaaaa

SEQ ID NO: 20563 - DNA, 25 bp, Artificial
  probe
  misc_feature (1)..(25): SEQ ID NO: 4350; WAN0249FP_at; Start 65; Stop 89
gaaaacatgtacaatatttcaaaag

SEQ ID NO: 20564 - DNA, 25 bp, Artificial
  probe
  misc_feature (1)..(25): SEQ ID NO: 4350; WAN0249FP_at; Start 74; Stop 98
tacaatatttcaaaagatactagtt

SEQ ID NO: 20565 - DNA, 25 bp, Artificial
  probe
  misc_feature (1)..(25): SEQ ID NO: 4350; WAN0249FP_at; Start 183; Stop 207
ttgttagacatcaggaggaaaaaca

SEQ ID NO: 20566 - DNA, 25 bp, Artificial
  probe
  misc_feature (1)..(25): SEQ ID NO: 4350; WAN0249FP_at; Start 41; Stop 65
tatatcaaattagaaattattcttg

SEQ ID NO: 20567 - DNA, 25 bp, Artificial
  probe
  misc_feature (1)..(25): SEQ ID NO: 4350; WAN0249FP_at; Start 176; Stop 200
ttacactttgttagacatcaggagg

SEQ ID NO: 20568 - DNA, 25 bp, Artificial
  probe
  misc_feature (1)..(25): SEQ ID NO: 4350; WAN0249FP_at; Start 53; Stop 77
gaaattattcttgaaaacatgtaca

SEQ ID NO: 20569 - DNA, 25 bp, Artificial
  probe
  misc_feature (1)..(25): SEQ ID NO: 4350; WAN0249FP_at; Start 14; Stop 38
taagatgtattctatttctagtatc

SEQ ID NO: 20570 - DNA, 25 bp, Artificial
  probe
  misc_feature (1)..(25): SEQ ID NO: 4350; WAN0249FP_at; Start 25; Stop 49
ctatttctagtatctttatatcaaa

SEQ ID NO: 20571 - DNA, 25 bp, Artificial
  probe
  misc_feature (1)..(25): SEQ ID NO: 4350; WAN0249FP_at; Start 178; Stop 202
acactttgttagacatcaggaggaa

SEQ ID NO: 20572 - DNA, 25 bp, Artificial
  probe
  misc_feature (1)..(25): SEQ ID NO: 4350; WAN0249FP_at; Start 180; Stop 204
actttgttagacatcaggaggaaaa

SEQ ID NO: 20573 - DNA, 25 bp, Artificial
  probe
  misc_feature (1)..(25): SEQ ID NO: 4350; WAN0249FP_at; Start 143; Stop 167
cttgaatgtttatttaagaaagtag

SEQ ID NO: 20574 - DNA, 25 bp, Artificial
  probe
  misc_feature (1)..(25): SEQ ID NO: 4350; WAN0249FP_at; Start 182; Stop 206
tttgttagacatcaggaggaaaaac

SEQ ID NO: 20575 - DNA, 25 bp, Artificial
  probe
  misc_feature (1)..(25): SEQ ID NO: 4350; WAN0249FP_at; Start 177; Stop 201
tacactttgttagacatcaggagga

SEQ ID NO: 20576 - DNA, 25 bp, Artificial
  probe
  misc_feature (1)..(25): SEQ ID NO: 4350; WAN0249FP_at; Start 184; Stop 208
tgttagacatcaggaggaaaaacaa

SEQ ID NO: 20577 - DNA, 25 bp, Artificial
  probe
  misc_feature (1)..(25): SEQ ID NO: 4350; WAN0249FP_at; Start 179; Stop 203
cactttgttagacatcaggaggaaa

SEQ ID NO: 20578 - DNA, 25 bp, Artificial
  probe
  misc_feature (1)..(25): SEQ ID NO: 4350; WAN0249FP_at; Start 123; Stop 147
atataaatagaaagcgttttcttga

SEQ ID NO: 20579 - DNA, 25 bp, Artificial
  probe
  misc_feature (1)..(25): SEQ ID NO: 4350; WAN0249FP_at; Start 31; Stop 55
ctagtatctttatatcaaattagaa

SEQ ID NO: 20580 - DNA, 25 bp, Artificial
  probe
  misc_feature (1)..(25): SEQ ID NO: 4350; WAN0249FP_at; Start 173; Stop 197
tttttacactttgttagacatcagg

SEQ ID NO: 20581 - DNA, 25 bp, Artificial
  probe
  misc_feature (1)..(25): SEQ ID NO: 4350; WAN0249FP_at; Start 72; Stop 96
tgtacaatatttcaaaagatactag

SEQ ID NO: 20582 - DNA, 25 bp, Artificial
  probe
  misc_feature (1)..(25): SEQ ID NO: 4350; WAN0249FP_at; Start 174; Stop 198
ttttacactttgttagacatcagga

SEQ ID NO: 20583 - DNA, 25 bp, Artificial
  probe
  misc_feature (1)..(25): SEQ ID NO: 5924; WAN0249FQ_at; Start 16; Stop 40
ttactagtagtttgcaagttgcact

SEQ ID NO: 20584 - DNA, 25 bp, Artificial
  probe
  misc_feature (1)..(25): SEQ ID NO: 5924; WAN0249FQ_at; Start 71; Stop 95
acagcacgagcaaaaatagacaatt

SEQ ID NO: 20585 - DNA, 25 bp, Artificial
  probe
  misc_feature (1)..(25): SEQ ID NO: 5924; WAN0249FQ_at; Start 64; Stop 88
gagcgtaacagcacgagcaaaaata

SEQ ID NO: 20586 - DNA, 25 bp, Artificial
  probe
  misc_feature (1)..(25): SEQ ID NO: 5924; WAN0249FQ_at; Start 42; Stop 66
gctagttaatacatgatacaaagag

SEQ ID NO: 20587 - DNA, 25 bp, Artificial
  probe
  misc_feature (1)..(25): SEQ ID NO: 5924; WAN0249FQ_at; Start 53; Stop 77
catgatacaaagagcgtaacagcac

SEQ ID NO: 20588 - DNA, 25 bp, Artificial
  probe
  misc_feature (1)..(25): SEQ ID NO: 5924; WAN0249FQ_at; Start 72; Stop 96
cagcacgagcaaaaatagacaattt

SEQ ID NO: 20589 - DNA, 25 bp, Artificial
  probe
  misc_feature (1)..(25): SEQ ID NO: 5924; WAN0249FQ_at; Start 58; Stop 82
tacaaagagcgtaacagcacgagca

SEQ ID NO: 20590 - DNA, 25 bp, Artificial
  probe
  misc_feature (1)..(25): SEQ ID NO: 5924; WAN0249FQ_at; Start 59; Stop 83
acaaagagcgtaacagcacgagcaa

SEQ ID NO: 20591 - DNA, 25 bp, Artificial
  probe
  misc_feature (1)..(25): SEQ ID NO: 5924; WAN0249FQ_at; Start 60; Stop 84
caaagagcgtaacagcacgagcaaa

SEQ ID NO: 20592 - DNA, 25 bp, Artificial
  probe
  misc_feature (1)..(25): SEQ ID NO: 5924; WAN0249FQ_at; Start 37; Stop 61
cacttgctagttaatacatgataca

SEQ ID NO: 20593 - DNA, 25 bp, Artificial
  probe
  misc_feature (1)..(25): SEQ ID NO: 5924; WAN0249FQ_at; Start 14; Stop 38
tcttactagtagtttgcaagttgca

SEQ ID NO: 20594 - DNA, 25 bp, Artificial
  probe
  misc_feature (1)..(25): SEQ ID NO: 5924; WAN0249FQ_at; Start 17; Stop 41
tactagtagtttgcaagttgcactt

SEQ ID NO: 20595 - DNA, 25 bp, Artificial
  probe
  misc_feature (1)..(25): SEQ ID NO: 5924; WAN0249FQ_at; Start 61; Stop 85
aaagagcgtaacagcacgagcaaaa

SEQ ID NO: 20596 - DNA, 25 bp, Artificial
  probe
  misc_feature (1)..(25): SEQ ID NO: 5924; WAN0249FQ_at; Start 48; Stop 72
taatacatgatacaaagagcgtaac

SEQ ID NO: 20597 - DNA, 25 bp, Artificial
  probe
  misc_feature (1)..(25): SEQ ID NO: 5924; WAN0249FQ_at; Start 36; Stop 60
gcacttgctagttaatacatgatac

SEQ ID NO: 20598 - DNA, 25 bp, Artificial
  probe
  misc_feature (1)..(25): SEQ ID NO: 5924; WAN0249FQ_at; Start 15; Stop 39
cttactagtagtttgcaagttgcac

SEQ ID NO: 20599 - DNA, 25 bp, Artificial
  probe
  misc_feature (1)..(25): SEQ ID NO: 5924; WAN0249FQ_at; Start 66; Stop 90
gcgtaacagcacgagcaaaaataga

SEQ ID NO: 20600 - DNA, 25 bp, Artificial
  probe
  misc_feature (1)..(25): SEQ ID NO: 5924; WAN0249FQ_at; Start 62; Stop 86
aagagcgtaacagcacgagcaaaaa

SEQ ID NO: 20601 - DNA, 25 bp, Artificial
  probe
  misc_feature (1)..(25): SEQ ID NO: 5924; WAN0249FQ_at; Start 23; Stop 47
tagtttgcaagttgcacttgctagt

SEQ ID NO: 20602 - DNA, 25 bp, Artificial
  probe
  misc_feature (1)..(25): SEQ ID NO: 5924; WAN0249FQ_at; Start 51; Stop 75
tacatgatacaaagagcgtaacagc

SEQ ID NO: 20603 - DNA, 25 bp, Artificial
  probe
  misc_feature (1)..(25): SEQ ID NO: 5924; WAN0249FQ_at; Start 32; Stop 56
agttgcacttgctagttaatacatg

SEQ ID NO: 20604 - DNA, 25 bp, Artificial
  probe
  misc_feature (1)..(25): SEQ ID NO: 5924; WAN0249FQ_at; Start 68; Stop 92
gtaacagcacgagcaaaaatagaca

SEQ ID NO: 20605 - DNA, 25 bp, Artificial
  probe
  misc_feature (1)..(25): SEQ ID NO: 5924; WAN0249FQ_at; Start 46; Stop 70
gttaatacatgatacaaagagcgta

SEQ ID NO: 20606 - DNA, 25 bp, Artificial
  probe
  misc_feature (1)..(25): SEQ ID NO: 5924; WAN0249FQ_at; Start 67; Stop 91
cgtaacagcacgagcaaaaatagac

SEQ ID NO: 20607 - DNA, 25 bp, Artificial
  probe
  misc_feature (1)..(25): SEQ ID NO: 5924; WAN0249FQ_at; Start 69; Stop 93
taacagcacgagcaaaaatagacaa

SEQ ID NO: 20608 - DNA, 25 bp, Artificial
  probe
  misc_feature (1)..(25): SEQ ID NO: 5924; WAN0249FQ_at; Start 30; Stop 54
caagttgcacttgctagttaataca

SEQ ID NO: 20609 - DNA, 25 bp, Artificial
  probe
  misc_feature (1)..(25): SEQ ID NO: 5924; WAN0249FQ_at; Start 19; Stop 43
ctagtagtttgcaagttgcacttgc

SEQ ID NO: 20610 - DNA, 25 bp, Artificial
  probe
  misc_feature (1)..(25): SEQ ID NO: 5924; WAN0249FQ_at; Start 56; Stop 80
gatacaaagagcgtaacagcacgag

SEQ ID NO: 20611 - DNA, 25 bp, Artificial
  probe
  misc_feature (1)..(25): SEQ ID NO: 5924; WAN0249FQ_at; Start 22; Stop 46
gtagtttgcaagttgcacttgctag

SEQ ID NO: 20612 - DNA, 25 bp, Artificial
  probe
  misc_feature (1)..(25): SEQ ID NO: 5924; WAN0249FQ_at; Start 54; Stop 78
atgatacaaagagcgtaacagcacg

SEQ ID NO: 20613 - DNA, 25 bp, Artificial
  probe
  misc_feature (1)..(25): SEQ ID NO: 5924; WAN0249FQ_at; Start 9; Stop 33
tctcctcttactagtagtttgcaag

SEQ ID NO: 20614 - DNA, 25 bp, Artificial
  probe
  misc_feature (1)..(25): SEQ ID NO: 5924; WAN0249FQ_at; Start 44; Stop 68
tagttaatacatgatacaaagagcg

SEQ ID NO: 20615 - DNA, 25 bp, Artificial
  probe
  misc_feature (1)..(25): SEQ ID NO: 5924; WAN0249FQ_at; Start 33; Stop 57
gttgcacttgctagttaatacatga

SEQ ID NO: 20616 - DNA, 25 bp, Artificial
  probe
  misc_feature (1)..(25): SEQ ID NO: 5924; WAN0249FQ_at; Start 11; Stop 35
tcctcttactagtagtttgcaagtt

SEQ ID NO: 20617 - DNA, 25 bp, Artificial
  probe
  misc_feature (1)..(25): SEQ ID NO: 176; WAN0249FR_at; Start 11; Stop 35
tttttgctcgtgctgttacgctctt

SEQ ID NO: 20618 - DNA, 25 bp, Artificial
  probe
  misc_feature (1)..(25): SEQ ID NO: 176; WAN0249FR_at; Start 38; Stop 62
tatcatgtattaactagcaagtgca

SEQ ID NO: 20619 - DNA, 25 bp, Artificial
  probe
  misc_feature (1)..(25): SEQ ID NO: 176; WAN0249FR_at; Start 7; Stop 31
tctatttttgctcgtgctgttacgc

SEQ ID NO: 20620 - DNA, 25 bp, Artificial
  probe
  misc_feature (1)..(25): SEQ ID NO: 176; WAN0249FR_at; Start 9; Stop 33
tatttttgctcgtgctgttacgctc

SEQ ID NO: 20621 - DNA, 25 bp, Artificial
  probe
  misc_feature (1)..(25): SEQ ID NO: 176; WAN0249FR_at; Start 51; Stop 75
ctagcaagtgcaacttgcaaactac

SEQ ID NO: 20622 - DNA, 25 bp, Artificial
  probe
  misc_feature (1)..(25): SEQ ID NO: 176; WAN0249FR_at; Start 61; Stop 85
caacttgcaaactactagtaagagg

SEQ ID NO: 20623 - DNA, 25 bp, Artificial
  probe
  misc_feature (1)..(25): SEQ ID NO: 176; WAN0249FR_at; Start 40; Stop 64
tcatgtattaactagcaagtgcaac

SEQ ID NO: 20624 - DNA, 25 bp, Artificial
  probe
  misc_feature (1)..(25): SEQ ID NO: 176; WAN0249FR_at; Start 60; Stop 84
gcaacttgcaaactactagtaagag

SEQ ID NO: 20625 - DNA, 25 bp, Artificial
  probe
  misc_feature (1)..(25): SEQ ID NO: 176; WAN0249FR_at; Start 22; Stop 46
gctgttacgctctttgtatcatgta

SEQ ID NO: 20626 - DNA, 25 bp, Artificial
  probe
  misc_feature (1)..(25): SEQ ID NO: 176; WAN0249FR_at; Start 2; Stop 26
aattgtctatttttgctcgtgctgt

SEQ ID NO: 20627 - DNA, 25 bp, Artificial
  probe
  misc_feature (1)..(25): SEQ ID NO: 176; WAN0249FR_at; Start 48; Stop 72
taactagcaagtgcaacttgcaaac

SEQ ID NO: 20628 - DNA, 25 bp, Artificial
  probe
  misc_feature (1)..(25): SEQ ID NO: 176; WAN0249FR_at; Start 67; Stop 91
gcaaactactagtaagaggagaaaa

SEQ ID NO: 20629 - DNA, 25 bp, Artificial
  probe
  misc_feature (1)..(25): SEQ ID NO: 176; WAN0249FR_at; Start 19; Stop 43
cgtgctgttacgctctttgtatcat

SEQ ID NO: 20630 - DNA, 25 bp, Artificial
  probe
  misc_feature (1)..(25): SEQ ID NO: 176; WAN0249FR_at; Start 13; Stop 37
tttgctcgtgctgttacgctctttg

SEQ ID NO: 20631 - DNA, 25 bp, Artificial
  probe
  misc_feature (1)..(25): SEQ ID NO: 176; WAN0249FR_at; Start 66; Stop 90
tgcaaactactagtaagaggagaaa

SEQ ID NO: 20632 - DNA, 25 bp, Artificial
  probe
  misc_feature (1)..(25): SEQ ID NO: 176; WAN0249FR_at; Start 37; Stop 61
gtatcatgtattaactagcaagtgc

SEQ ID NO: 20633 - DNA, 25 bp, Artificial
  probe
  misc_feature (1)..(25): SEQ ID NO: 176; WAN0249FR_at; Start 20; Stop 44
gtgctgttacgctctttgtatcatg

SEQ ID NO: 20634 - DNA, 25 bp, Artificial
  probe
  misc_feature (1)..(25): SEQ ID NO: 176; WAN0249FR_at; Start 32; Stop 56
tctttgtatcatgtattaactagca

SEQ ID NO: 20635 - DNA, 25 bp, Artificial
  probe
  misc_feature (1)..(25): SEQ ID NO: 176; WAN0249FR_at; Start 1; Stop 25
aaattgtctatttttgctcgtgctg

SEQ ID NO: 20636 - DNA, 25 bp, Artificial
  probe
  misc_feature (1)..(25): SEQ ID NO: 176; WAN0249FR_at; Start 15; Stop 39
tgctcgtgctgttacgctctttgta

SEQ ID NO: 20637 - DNA, 25 bp, Artificial
  probe
  misc_feature (1)..(25): SEQ ID NO: 176; WAN0249FR_at; Start 64; Stop 88
cttgcaaactactagtaagaggaga

SEQ ID NO: 20638 - DNA, 25 bp, Artificial
  probe
  misc_feature (1)..(25): SEQ ID NO: 176; WAN0249FR_at; Start 41; Stop 65
catgtattaactagcaagtgcaact

SEQ ID NO: 20639 - DNA, 25 bp, Artificial
  probe
  misc_feature (1)..(25): SEQ ID NO: 176; WAN0249FR_at; Start 30; Stop 54
gctctttgtatcatgtattaactag

SEQ ID NO: 20640 - DNA, 25 bp, Artificial
  probe
  misc_feature (1)..(25): SEQ ID NO: 176; WAN0249FR_at; Start 57; Stop 81
agtgcaacttgcaaactactagtaa

SEQ ID NO: 20641 - DNA, 25 bp, Artificial
  probe
  misc_feature (1)..(25): SEQ ID NO: 176; WAN0249FR_at; Start 27; Stop 51
tacgctctttgtatcatgtattaac

SEQ ID NO: 20642 - DNA, 25 bp, Artificial
  probe
  misc_feature (1)..(25): SEQ ID NO: 176; WAN0249FR_at; Start 43; Stop 67
tgtattaactagcaagtgcaacttg

SEQ ID NO: 20643 - DNA, 25 bp, Artificial
  probe
  misc_feature (1)..(25): SEQ ID NO: 176; WAN0249FR_at; Start 59; Stop 83
tgcaacttgcaaactactagtaaga

SEQ ID NO: 20644 - DNA, 25 bp, Artificial
  probe
  misc_feature (1)..(25): SEQ ID NO: 176; WAN0249FR_at; Start 45; Stop 69
tattaactagcaagtgcaacttgca

SEQ ID NO: 20645 - DNA, 25 bp, Artificial
  probe
  misc_feature (1)..(25): SEQ ID NO: 176; WAN0249FR_at; Start 16; Stop 40
gctcgtgctgttacgctctttgtat

SEQ ID NO: 20646 - DNA, 25 bp, Artificial
  probe
  misc_feature (1)..(25): SEQ ID NO: 176; WAN0249FR_at; Start 36; Stop 60
tgtatcatgtattaactagcaagtg

SEQ ID NO: 20647 - DNA, 25 bp, Artificial
  probe
  misc_feature (1)..(25): SEQ ID NO: 176; WAN0249FR_at; Start 54; Stop 78
gcaagtgcaacttgcaaactactag

SEQ ID NO: 20648 - DNA, 25 bp, Artificial
  probe
  misc_feature (1)..(25): SEQ ID NO: 176; WAN0249FR_at; Start 58; Stop 82
gtgcaacttgcaaactactagtaag

SEQ ID NO: 20649 - DNA, 25 bp, Artificial
  probe
  misc_feature (1)..(25): SEQ ID NO: 176; WAN0249FR_at; Start 62; Stop 86
aacttgcaaactactagtaagagga

SEQ ID NO: 20650 - DNA, 25 bp, Artificial
  probe
  misc_feature (1)..(25): SEQ ID NO: 176; WAN0249FR_at; Start 5; Stop 29
tgtctatttttgctcgtgctgttac

SEQ ID NO: 20651 - DNA, 25 bp, Artificial
  probe
  misc_feature (1)..(25): SEQ ID NO: 175; WAN0249FS_at; Start 26; Stop 50
gaatgcgtttagatttcaatttaat

SEQ ID NO: 20652 - DNA, 25 bp, Artificial
  probe
  misc_feature (1)..(25): SEQ ID NO: 175; WAN0249FS_at; Start 8; Stop 32
cctttatcacactcaatagaatgcg

SEQ ID NO: 20653 - DNA, 25 bp, Artificial
  probe
  misc_feature (1)..(25): SEQ ID NO: 175; WAN0249FS_at; Start 111; Stop 135
aaagctattagtcgcagccctcata

SEQ ID NO: 20654 - DNA, 25 bp, Artificial
  probe
  misc_feature (1)..(25): SEQ ID NO: 175; WAN0249FS_at; Start 121; Stop 145
gtcgcagccctcatagctgttggta

SEQ ID NO: 20655 - DNA, 25 bp, Artificial
  probe
  misc_feature (1)..(25): SEQ ID NO: 175; WAN0249FS_at; Start 37; Stop 61
gatttcaatttaatgatttttcaca

SEQ ID NO: 20656 - DNA, 25 bp, Artificial
  probe
  misc_feature (1)..(25): SEQ ID NO: 175; WAN0249FS_at; Start 17; Stop 41
cactcaatagaatgcgtttagattt

SEQ ID NO: 20657 - DNA, 25 bp, Artificial
  probe
  misc_feature (1)..(25): SEQ ID NO: 175; WAN0249FS_at; Start 125; Stop 149
cagccctcatagctgttggtagacg

SEQ ID NO: 20658 - DNA, 25 bp, Artificial
  probe
  misc_feature (1)..(25): SEQ ID NO: 175; WAN0249FS_at; Start 119; Stop 143
tagtcgcagccctcatagctgttgg

SEQ ID NO: 20659 - DNA, 25 bp, Artificial
  probe
  misc_feature (1)..(25): SEQ ID NO: 175; WAN0249FS_at; Start 118; Stop 142
ttagtcgcagccctcatagctgttg

SEQ ID NO: 20660 - DNA, 25 bp, Artificial
  probe
  misc_feature (1)..(25): SEQ ID NO: 175; WAN0249FS_at; Start 15; Stop 39
cacactcaatagaatgcgtttagat

SEQ ID NO: 20661 - DNA, 25 bp, Artificial
  probe
  misc_feature (1)..(25): SEQ ID NO: 175; WAN0249FS_at; Start 102; Stop 126
gaccggactaaagctattagtcgca

SEQ ID NO: 20662 - DNA, 25 bp, Artificial
  probe
  misc_feature (1)..(25): SEQ ID NO: 175; WAN0249FS_at; Start 115; Stop 139
ctattagtcgcagccctcatagctg

SEQ ID NO: 20663 - DNA, 25 bp, Artificial
  probe
  misc_feature (1)..(25): SEQ ID NO: 175; WAN0249FS_at; Start 128; Stop 152
ccctcatagctgttggtagacggtt

SEQ ID NO: 20664 - DNA, 25 bp, Artificial
  probe
  misc_feature (1)..(25): SEQ ID NO: 175; WAN0249FS_at; Start 97; Stop 121
aagaggaccggactaaagctattag

SEQ ID NO: 20665 - DNA, 25 bp, Artificial
  probe
  misc_feature (1)..(25): SEQ ID NO: 175; WAN0249FS_at; Start 10; Stop 34
tttatcacactcaatagaatgcgtt

SEQ ID NO: 20666 - DNA, 25 bp, Artificial
  probe
  misc_feature (1)..(25): SEQ ID NO: 175; WAN0249FS_at; Start 127; Stop 151
gccctcatagctgttggtagacggt

SEQ ID NO: 20667 - DNA, 25 bp, Artificial
  probe
  misc_feature (1)..(25): SEQ ID NO: 175; WAN0249FS_at; Start 122; Stop 146
tcgcagccctcatagctgttggtag

SEQ ID NO: 20668 - DNA, 25 bp, Artificial
  probe
  misc_feature (1)..(25): SEQ ID NO: 175; WAN0249FS_at; Start 12; Stop 36
tatcacactcaatagaatgcgttta

SEQ ID NO: 20669 - DNA, 25 bp, Artificial
  probe
  misc_feature (1)..(25): SEQ ID NO: 175; WAN0249FS_at; Start 2; Stop 26
aattctcctttatcacactcaatag

SEQ ID NO: 20670 - DNA, 25 bp, Artificial
  probe
  misc_feature (1)..(25): SEQ ID NO: 175; WAN0249FS_at; Start 109; Stop 133
ctaaagctattagtcgcagccctca

SEQ ID NO: 20671 - DNA, 25 bp, Artificial
  probe
  misc_feature (1)..(25): SEQ ID NO: 175; WAN0249FS_at; Start 123; Stop 147
cgcagccctcatagctgttggtaga

SEQ ID NO: 20672 - DNA, 25 bp, Artificial
  probe
  misc_feature (1)..(25): SEQ ID NO: 175; WAN0249FS_at; Start 135; Stop 159
agctgttggtagacggtttattatc

SEQ ID NO: 20673 - DNA, 25 bp, Artificial
  probe
  misc_feature (1)..(25): SEQ ID NO: 175; WAN0249FS_at; Start 107; Stop 131
gactaaagctattagtcgcagccct

SEQ ID NO: 20674 - DNA, 25 bp, Artificial
  probe
  misc_feature (1)..(25): SEQ ID NO: 175; WAN0249FS_at; Start 21; Stop 45
caatagaatgcgtttagatttcaat

SEQ ID NO: 20675 - DNA, 25 bp, Artificial
  probe
  misc_feature (1)..(25): SEQ ID NO: 175; WAN0249FS_at; Start 64; Stop 88
ttttataagaaataatagattacca

SEQ ID NO: 20676 - DNA, 25 bp, Artificial
  probe
  misc_feature (1)..(25): SEQ ID NO: 175; WAN0249FS_at; Start 138; Stop 162
tgttggtagacggtttattatctaa

SEQ ID NO: 20677 - DNA, 25 bp, Artificial
  probe
  misc_feature (1)..(25): SEQ ID NO: 175; WAN0249FS_at; Start 110; Stop 134
taaagctattagtcgcagccctcat

SEQ ID NO: 20678 - DNA, 25 bp, Artificial
  probe
  misc_feature (1)..(25): SEQ ID NO: 175; WAN0249FS_at; Start 14; Stop 38
tcacactcaatagaatgcgtttaga

SEQ ID NO: 20679 - DNA, 25 bp, Artificial
  probe
  misc_feature (1)..(25): SEQ ID NO: 175; WAN0249FS_at; Start 113; Stop 137
agctattagtcgcagccctcatagc

SEQ ID NO: 20680 - DNA, 25 bp, Artificial
  probe
  misc_feature (1)..(25): SEQ ID NO: 175; WAN0249FS_at; Start 130; Stop 154
ctcatagctgttggtagacggttta

SEQ ID NO: 20681 - DNA, 25 bp, Artificial
  probe
  misc_feature (1)..(25): SEQ ID NO: 175; WAN0249FS_at; Start 106; Stop 130
ggactaaagctattagtcgcagccc

SEQ ID NO: 20682 - DNA, 25 bp, Artificial
  probe
  misc_feature (1)..(25): SEQ ID NO: 175; WAN0249FS_at; Start 132; Stop 156
catagctgttggtagacggtttatt

SEQ ID NO: 20683 - DNA, 25 bp, Artificial
  probe
  misc_feature (1)..(25): SEQ ID NO: 175; WAN0249FS_at; Start 99; Stop 123
gaggaccggactaaagctattagtc

SEQ ID NO: 20684 - DNA, 25 bp, Artificial
  probe
  misc_feature (1)..(25): SEQ ID NO: 175; WAN0249FS_at; Start 129; Stop 153
cctcatagctgttggtagacggttt

SEQ ID NO: 20685 - DNA, 25 bp, Artificial
  probe
  misc_feature (1)..(25): SEQ ID NO: 5932; WAN0249FT_at; Start 8; Stop 32
taataaaccgtctaccaacagctat

SEQ ID NO: 20686 - DNA, 25 bp, Artificial
  probe
  misc_feature (1)..(25): SEQ ID NO: 5932; WAN0249FT_at; Start 22; Stop 46
ccaacagctatgagggctgcgacta

SEQ ID NO: 20687 - DNA, 25 bp, Artificial
  probe
  misc_feature (1)..(25): SEQ ID NO: 5932; WAN0249FT_at; Start 133; Stop 157
cgcattctattgagtgtgataaagg

SEQ ID NO: 20688 - DNA, 25 bp, Artificial
  probe
  misc_feature (1)..(25): SEQ ID NO: 5932; WAN0249FT_at; Start 32; Stop 56
tgagggctgcgactaatagctttag

SEQ ID NO: 20689 - DNA, 25 bp, Artificial
  probe
  misc_feature (1)..(25): SEQ ID NO: 5932; WAN0249FT_at; Start 129; Stop 153
taaacgcattctattgagtgtgata

SEQ ID NO: 20690 - DNA, 25 bp, Artificial
  probe
  misc_feature (1)..(25): SEQ ID NO: 5932; WAN0249FT_at; Start 117; Stop 141
taaattgaaatctaaacgcattcta

SEQ ID NO: 20691 - DNA, 25 bp, Artificial
  probe
  misc_feature (1)..(25): SEQ ID NO: 5932; WAN0249FT_at; Start 131; Stop 155
aacgcattctattgagtgtgataaa

SEQ ID NO: 20692 - DNA, 25 bp, Artificial
  probe
  misc_feature (1)..(25): SEQ ID NO: 5932; WAN0249FT_at; Start 12; Stop 36
aaaccgtctaccaacagctatgagg

SEQ ID NO: 20693 - DNA, 25 bp, Artificial
  probe
  misc_feature (1)..(25): SEQ ID NO: 5932; WAN0249FT_at; Start 127; Stop 151
tctaaacgcattctattgagtgtga

SEQ ID NO: 20694 - DNA, 25 bp, Artificial
  probe
  misc_feature (1)..(25): SEQ ID NO: 5932; WAN0249FT_at; Start 19; Stop 43
ctaccaacagctatgagggctgcga

SEQ ID NO: 20695 - DNA, 25 bp, Artificial
  probe
  misc_feature (1)..(25): SEQ ID NO: 5932; WAN0249FT_at; Start 37; Stop 61
gctgcgactaatagctttagtccgg

SEQ ID NO: 20696 - DNA, 25 bp, Artificial
  probe
  misc_feature (1)..(25): SEQ ID NO: 5932; WAN0249FT_at; Start 123; Stop 147
gaaatctaaacgcattctattgagt

SEQ ID NO: 20697 - DNA, 25 bp, Artificial
  probe
  misc_feature (1)..(25): SEQ ID NO: 5932; WAN0249FT_at; Start 28; Stop 52
gctatgagggctgcgactaatagct

SEQ ID NO: 20698 - DNA, 25 bp, Artificial
  probe
  misc_feature (1)..(25): SEQ ID NO: 5932; WAN0249FT_at; Start 20; Stop 44
taccaacagctatgagggctgcgac

SEQ ID NO: 20699 - DNA, 25 bp, Artificial
  probe
  misc_feature (1)..(25): SEQ ID NO: 5932; WAN0249FT_at; Start 14; Stop 38
accgtctaccaacagctatgagggc

SEQ ID NO: 20700 - DNA, 25 bp, Artificial
  probe
  misc_feature (1)..(25): SEQ ID NO: 5932; WAN0249FT_at; Start 39; Stop 63
tgcgactaatagctttagtccggtc

SEQ ID NO: 20701 - DNA, 25 bp, Artificial
  probe
  misc_feature (1)..(25): SEQ ID NO: 5932; WAN0249FT_at; Start 138; Stop 162
tctattgagtgtgataaaggagaat

SEQ ID NO: 20702 - DNA, 25 bp, Artificial
  probe
  misc_feature (1)..(25): SEQ ID NO: 5932; WAN0249FT_at; Start 9; Stop 33
aataaaccgtctaccaacagctatg

SEQ ID NO: 20703 - DNA, 25 bp, Artificial
  probe
  misc_feature (1)..(25): SEQ ID NO: 5932; WAN0249FT_at; Start 23; Stop 47
caacagctatgagggctgcgactaa

SEQ ID NO: 20704 - DNA, 25 bp, Artificial
  probe
  misc_feature (1)..(25): SEQ ID NO: 5932; WAN0249FT_at; Start 15; Stop 39
ccgtctaccaacagctatgagggct

SEQ ID NO: 20705 - DNA, 25 bp, Artificial
  probe
  misc_feature (1)..(25): SEQ ID NO: 5932; WAN0249FT_at; Start 18; Stop 42
tctaccaacagctatgagggctgcg

SEQ ID NO: 20706 - DNA, 25 bp, Artificial
  probe
  misc_feature (1)..(25): SEQ ID NO: 5932; WAN0249FT_at; Start 6; Stop 30
gataataaaccgtctaccaacagct

SEQ ID NO: 20707 - DNA, 25 bp, Artificial
  probe
  misc_feature (1)..(25): SEQ ID NO: 5932; WAN0249FT_at; Start 104; Stop 128
tgtgaaaaatcattaaattgaaatc

SEQ ID NO: 20708 - DNA, 25 bp, Artificial
  probe
  misc_feature (1)..(25): SEQ ID NO: 5932; WAN0249FT_at; Start 13; Stop 37
aaccgtctaccaacagctatgaggg

SEQ ID NO: 20709 - DNA, 25 bp, Artificial
  probe
  misc_feature (1)..(25): SEQ ID NO: 5932; WAN0249FT_at; Start 42; Stop 66
gactaatagctttagtccggtcctc

SEQ ID NO: 20710 - DNA, 25 bp, Artificial
  probe
  misc_feature (1)..(25): SEQ ID NO: 5932; WAN0249FT_at; Start 140; Stop 164
tattgagtgtgataaaggagaattt

SEQ ID NO: 20711 - DNA, 25 bp, Artificial
  probe
  misc_feature (1)..(25): SEQ ID NO: 5932; WAN0249FT_at; Start 30; Stop 54
tatgagggctgcgactaatagcttt

SEQ ID NO: 20712 - DNA, 25 bp, Artificial
  probe
  misc_feature (1)..(25): SEQ ID NO: 5932; WAN0249FT_at; Start 114; Stop 138
cattaaattgaaatctaaacgcatt

SEQ ID NO: 20713 - DNA, 25 bp, Artificial
  probe
  misc_feature (1)..(25): SEQ ID NO: 5932; WAN0249FT_at; Start 135; Stop 159
cattctattgagtgtgataaaggag

SEQ ID NO: 20714 - DNA, 25 bp, Artificial
  probe
  misc_feature (1)..(25): SEQ ID NO: 5932; WAN0249FT_at; Start 44; Stop 68
ctaatagctttagtccggtcctctt

SEQ ID NO: 20715 - DNA, 25 bp, Artificial
  probe
  misc_feature (1)..(25): SEQ ID NO: 5932; WAN0249FT_at; Start 35; Stop 59
gggctgcgactaatagctttagtcc

SEQ ID NO: 20716 - DNA, 25 bp, Artificial
  probe
  misc_feature (1)..(25): SEQ ID NO: 5932; WAN0249FT_at; Start 33; Stop 57
gagggctgcgactaatagctttagt

SEQ ID NO: 20717 - DNA, 25 bp, Artificial
  probe
  misc_feature (1)..(25): SEQ ID NO: 5932; WAN0249FT_at; Start 16; Stop 40
cgtctaccaacagctatgagggctg

SEQ ID NO: 20718 - DNA, 25 bp, Artificial
  probe
  misc_feature (1)..(25): SEQ ID NO: 5932; WAN0249FT_at; Start 11; Stop 35
taaaccgtctaccaacagctatgag

SEQ ID NO: 20719 - DNA, 25 bp, Artificial
  probe
  misc_feature (1)..(25): SEQ ID NO: 3806; WAN0249FU_at; Start 79; Stop 103
taatgtcaatggctataatttctcg

SEQ ID NO: 20720 - DNA, 25 bp, Artificial
  probe
  misc_feature (1)..(25): SEQ ID NO: 3806; WAN0249FU_at; Start 73; Stop 97
cctaggtaatgtcaatggctataat

SEQ ID NO: 20721 - DNA, 25 bp, Artificial
  probe
  misc_feature (1)..(25): SEQ ID NO: 3806; WAN0249FU_at; Start 26; Stop 50
cttggcaccattttgggtaccgctt

SEQ ID NO: 20722 - DNA, 25 bp, Artificial
  probe
  misc_feature (1)..(25): SEQ ID NO: 3806; WAN0249FU_at; Start 28; Stop 52
tggcaccattttgggtaccgcttac

SEQ ID NO: 20723 - DNA, 25 bp, Artificial
  probe
  misc_feature (1)..(25): SEQ ID NO: 3806; WAN0249FU_at; Start 83; Stop 107
gtcaatggctataatttctcggaaa

SEQ ID NO: 20724 - DNA, 25 bp, Artificial
  probe
  misc_feature (1)..(25): SEQ ID NO: 3806; WAN0249FU_at; Start 17; Stop 41
aaattttgacttggcaccattttgg

SEQ ID NO: 20725 - DNA, 25 bp, Artificial
  probe
  misc_feature (1)..(25): SEQ ID NO: 3806; WAN0249FU_at; Start 22; Stop 46
ttgacttggcaccattttgggtacc

SEQ ID NO: 20726 - DNA, 25 bp, Artificial
  probe
  misc_feature (1)..(25): SEQ ID NO: 3806; WAN0249FU_at; Start 67; Stop 91
gcaattcctaggtaatgtcaatggc

SEQ ID NO: 20727 - DNA, 25 bp, Artificial
  probe
  misc_feature (1)..(25): SEQ ID NO: 3806; WAN0249FU_at; Start 89; Stop 113
ggctataatttctcggaaaataata

SEQ ID NO: 20728 - DNA, 25 bp, Artificial
  probe
  misc_feature (1)..(25): SEQ ID NO: 3806; WAN0249FU_at; Start 66; Stop 90
cgcaattcctaggtaatgtcaatgg

SEQ ID NO: 20729 - DNA, 25 bp, Artificial
  probe
  misc_feature (1)..(25): SEQ ID NO: 3806; WAN0249FU_at; Start 27; Stop 51
ttggcaccattttgggtaccgctta

SEQ ID NO: 20730 - DNA, 25 bp, Artificial
  probe
  misc_feature (1)..(25): SEQ ID NO: 3806; WAN0249FU_at; Start 25; Stop 49
acttggcaccattttgggtaccgct

SEQ ID NO: 20731 - DNA, 25 bp, Artificial
  probe
  misc_feature (1)..(25): SEQ ID NO: 3806; WAN0249FU_at; Start 21; Stop 45
tttgacttggcaccattttgggtac

SEQ ID NO: 20732 - DNA, 25 bp, Artificial
  probe
  misc_feature (1)..(25): SEQ ID NO: 3806; WAN0249FU_at; Start 63; Stop 87
taacgcaattcctaggtaatgtcaa

SEQ ID NO: 20733 - DNA, 25 bp, Artificial
  probe
  misc_feature (1)..(25): SEQ ID NO: 3806; WAN0249FU_at; Start 81; Stop 105
atgtcaatggctataatttctcgga

SEQ ID NO: 20734 - DNA, 25 bp, Artificial
  probe
  misc_feature (1)..(25): SEQ ID NO: 3806; WAN0249FU_at; Start 30; Stop 54
gcaccattttgggtaccgcttacat

SEQ ID NO: 20735 - DNA, 25 bp, Artificial
  probe
  misc_feature (1)..(25): SEQ ID NO: 3806; WAN0249FU_at; Start 74; Stop 98
ctaggtaatgtcaatggctataatt

SEQ ID NO: 20736 - DNA, 25 bp, Artificial
  probe
  misc_feature (1)..(25): SEQ ID NO: 3806; WAN0249FU_at; Start 12; Stop 36
cttaaaaattttgacttggcaccat

SEQ ID NO: 20737 - DNA, 25 bp, Artificial
  probe
  misc_feature (1)..(25): SEQ ID NO: 3806; WAN0249FU_at; Start 61; Stop 85
tataacgcaattcctaggtaatgtc

SEQ ID NO: 20738 - DNA, 25 bp, Artificial
  probe
  misc_feature (1)..(25): SEQ ID NO: 3806; WAN0249FU_at; Start 31; Stop 55
caccattttgggtaccgcttacatg

SEQ ID NO: 20739 - DNA, 25 bp, Artificial
  probe
  misc_feature (1)..(25): SEQ ID NO: 3806; WAN0249FU_at; Start 19; Stop 43
attttgacttggcaccattttgggt

SEQ ID NO: 20740 - DNA, 25 bp, Artificial
  probe
  misc_feature (1)..(25): SEQ ID NO: 3806; WAN0249FU_at; Start 80; Stop 104
aatgtcaatggctataatttctcgg

SEQ ID NO: 20741 - DNA, 25 bp, Artificial
  probe
  misc_feature (1)..(25): SEQ ID NO: 3806; WAN0249FU_at; Start 69; Stop 93
aattcctaggtaatgtcaatggcta

SEQ ID NO: 20742 - DNA, 25 bp, Artificial
  probe
  misc_feature (1)..(25): SEQ ID NO: 3806; WAN0249FU_at; Start 68; Stop 92
caattcctaggtaatgtcaatggct

SEQ ID NO: 20743 - DNA, 25 bp, Artificial
  probe
  misc_feature (1)..(25): SEQ ID NO: 3806; WAN0249FU_at; Start 82; Stop 106
tgtcaatggctataatttctcggaa

SEQ ID NO: 20744 - DNA, 25 bp, Artificial
  probe
  misc_feature (1)..(25): SEQ ID NO: 3806; WAN0249FU_at; Start 71; Stop 95
ttcctaggtaatgtcaatggctata

SEQ ID NO: 20745 - DNA, 25 bp, Artificial
  probe
  misc_feature (1)..(25): SEQ ID NO: 3806; WAN0249FU_at; Start 72; Stop 96
tcctaggtaatgtcaatggctataa

SEQ ID NO: 20746 - DNA, 25 bp, Artificial
  probe
  misc_feature (1)..(25): SEQ ID NO: 3806; WAN0249FU_at; Start 84; Stop 108
tcaatggctataatttctcggaaaa

SEQ ID NO: 20747 - DNA, 25 bp, Artificial
  probe
  misc_feature (1)..(25): SEQ ID NO: 3806; WAN0249FU_at; Start 64; Stop 88
aacgcaattcctaggtaatgtcaat

SEQ ID NO: 20748 - DNA, 25 bp, Artificial
  probe
  misc_feature (1)..(25): SEQ ID NO: 3806; WAN0249FU_at; Start 23; Stop 47
tgacttggcaccattttgggtaccg

SEQ ID NO: 20749 - DNA, 25 bp, Artificial
  probe
  misc_feature (1)..(25): SEQ ID NO: 3806; WAN0249FU_at; Start 85; Stop 109
caatggctataatttctcggaaaat

SEQ ID NO: 20750 - DNA, 25 bp, Artificial
  probe
  misc_feature (1)..(25): SEQ ID NO: 3806; WAN0249FU_at; Start 24; Stop 48
gacttggcaccattttgggtaccgc

SEQ ID NO: 20751 - DNA, 25 bp, Artificial
  probe
  misc_feature (1)..(25): SEQ ID NO: 3806; WAN0249FU_at; Start 33; Stop 57
ccattttgggtaccgcttacatgta

SEQ ID NO: 20752 - DNA, 25 bp, Artificial
  probe
  misc_feature (1)..(25): SEQ ID NO: 3806; WAN0249FU_at; Start 99; Stop 123
tctcggaaaataatataaattatga

SEQ ID NO: 20753 - DNA, 25 bp, Artificial
  probe
  misc_feature (1)..(25): SEQ ID NO: 516; WAN0249FV_at; Start 54; Stop 78
acattacctaggaattgcgttataa

SEQ ID NO: 20754 - DNA, 25 bp, Artificial
  probe
  misc_feature (1)..(25): SEQ ID NO: 516; WAN0249FV_at; Start 102; Stop 126
atggtgccaagtcaaaatttttaag

SEQ ID NO: 20755 - DNA, 25 bp, Artificial
  probe
  misc_feature (1)..(25): SEQ ID NO: 516; WAN0249FV_at; Start 94; Stop 118
tacccaaaatggtgccaagtcaaaa

SEQ ID NO: 20756 - DNA, 25 bp, Artificial
  probe
  misc_feature (1)..(25): SEQ ID NO: 516; WAN0249FV_at; Start 30; Stop 54
ttttccgagaaattatagccattga

SEQ ID NO: 20757 - DNA, 25 bp, Artificial
  probe
  misc_feature (1)..(25): SEQ ID NO: 516; WAN0249FV_at; Start 95; Stop 119
acccaaaatggtgccaagtcaaaat

SEQ ID NO: 20758 - DNA, 25 bp, Artificial
  probe
  misc_feature (1)..(25): SEQ ID NO: 516; WAN0249FV_at; Start 33; Stop 57
tccgagaaattatagccattgacat

SEQ ID NO: 20759 - DNA, 25 bp, Artificial
  probe
  misc_feature (1)..(25): SEQ ID NO: 516; WAN0249FV_at; Start 97; Stop 121
ccaaaatggtgccaagtcaaaattt

SEQ ID NO: 20760 - DNA, 25 bp, Artificial
  probe
  misc_feature (1)..(25): SEQ ID NO: 516; WAN0249FV_at; Start 47; Stop 71
gccattgacattacctaggaattgc

SEQ ID NO: 20761 - DNA, 25 bp, Artificial
  probe
  misc_feature (1)..(25): SEQ ID NO: 516; WAN0249FV_at; Start 48; Stop 72
ccattgacattacctaggaattgcg

SEQ ID NO: 20762 - DNA, 25 bp, Artificial
  probe
  misc_feature (1)..(25): SEQ ID NO: 516; WAN0249FV_at; Start 49; Stop 73
cattgacattacctaggaattgcgt

SEQ ID NO: 20763 - DNA, 25 bp, Artificial
  probe
  misc_feature (1)..(25): SEQ ID NO: 516; WAN0249FV_at; Start 90; Stop 114
gcggtacccaaaatggtgccaagtc

SEQ ID NO: 20764 - DNA, 25 bp, Artificial
  probe
  misc_feature (1)..(25): SEQ ID NO: 516; WAN0249FV_at; Start 32; Stop 56
ttccgagaaattatagccattgaca

SEQ ID NO: 20765 - DNA, 25 bp, Artificial
  probe
  misc_feature (1)..(25): SEQ ID NO: 516; WAN0249FV_at; Start 31; Stop 55
tttccgagaaattatagccattgac

SEQ ID NO: 20766 - DNA, 25 bp, Artificial
  probe
  misc_feature (1)..(25): SEQ ID NO: 516; WAN0249FV_at; Start 87; Stop 111
taagcggtacccaaaatggtgccaa

SEQ ID NO: 20767 - DNA, 25 bp, Artificial
  probe
  misc_feature (1)..(25): SEQ ID NO: 516; WAN0249FV_at; Start 35; Stop 59
cgagaaattatagccattgacatta

SEQ ID NO: 20768 - DNA, 25 bp, Artificial
  probe
  misc_feature (1)..(25): SEQ ID NO: 516; WAN0249FV_at; Start 92; Stop 116
ggtacccaaaatggtgccaagtcaa

SEQ ID NO: 20769 - DNA, 25 bp, Artificial
  probe
  misc_feature (1)..(25): SEQ ID NO: 516; WAN0249FV_at; Start 45; Stop 69
tagccattgacattacctaggaatt

SEQ ID NO: 20770 - DNA, 25 bp, Artificial
  probe
  misc_feature (1)..(25): SEQ ID NO: 516; WAN0249FV_at; Start 83; Stop 107
catgtaagcggtacccaaaatggtg

SEQ ID NO: 20771 - DNA, 25 bp, Artificial
  probe
  misc_feature (1)..(25): SEQ ID NO: 516; WAN0249FV_at; Start 91; Stop 115
cggtacccaaaatggtgccaagtca

SEQ ID NO: 20772 - DNA, 25 bp, Artificial
  probe
  misc_feature (1)..(25): SEQ ID NO: 516; WAN0249FV_at; Start 89; Stop 113
agcggtacccaaaatggtgccaagt

SEQ ID NO: 20773 - DNA, 25 bp, Artificial
  probe
  misc_feature (1)..(25): SEQ ID NO: 516; WAN0249FV_at; Start 53; Stop 77
gacattacctaggaattgcgttata

SEQ ID NO: 20774 - DNA, 25 bp, Artificial
  probe
  misc_feature (1)..(25): SEQ ID NO: 516; WAN0249FV_at; Start 34; Stop 58
ccgagaaattatagccattgacatt

SEQ ID NO: 20775 - DNA, 25 bp, Artificial
  probe
  misc_feature (1)..(25): SEQ ID NO: 516; WAN0249FV_at; Start 93; Stop 117
gtacccaaaatggtgccaagtcaaa

SEQ ID NO: 20776 - DNA, 25 bp, Artificial
  probe
  misc_feature (1)..(25): SEQ ID NO: 516; WAN0249FV_at; Start 40; Stop 64
aattatagccattgacattacctag

SEQ ID NO: 20777 - DNA, 25 bp, Artificial
  probe
  misc_feature (1)..(25): SEQ ID NO: 516; WAN0249FV_at; Start 25; Stop 49
tattattttccgagaaattatagcc

SEQ ID NO: 20778 - DNA, 25 bp, Artificial
  probe
  misc_feature (1)..(25): SEQ ID NO: 516; WAN0249FV_at; Start 38; Stop 62
gaaattatagccattgacattacct

SEQ ID NO: 20779 - DNA, 25 bp, Artificial
  probe
  misc_feature (1)..(25): SEQ ID NO: 516; WAN0249FV_at; Start 81; Stop 105
tacatgtaagcggtacccaaaatgg

SEQ ID NO: 20780 - DNA, 25 bp, Artificial
  probe
  misc_feature (1)..(25): SEQ ID NO: 516; WAN0249FV_at; Start 46; Stop 70
agccattgacattacctaggaattg

SEQ ID NO: 20781 - DNA, 25 bp, Artificial
  probe
  misc_feature (1)..(25): SEQ ID NO: 516; WAN0249FV_at; Start 88; Stop 112
aagcggtacccaaaatggtgccaag

SEQ ID NO: 20782 - DNA, 25 bp, Artificial
  probe
  misc_feature (1)..(25): SEQ ID NO: 516; WAN0249FV_at; Start 42; Stop 66
ttatagccattgacattacctagga

SEQ ID NO: 20783 - DNA, 25 bp, Artificial
  probe
  misc_feature (1)..(25): SEQ ID NO: 516; WAN0249FV_at; Start 86; Stop 110
gtaagcggtacccaaaatggtgcca

SEQ ID NO: 20784 - DNA, 25 bp, Artificial
  probe
  misc_feature (1)..(25): SEQ ID NO: 516; WAN0249FV_at; Start 84; Stop 108
atgtaagcggtacccaaaatggtgc

SEQ ID NO: 20785 - DNA, 25 bp, Artificial
  probe
  misc_feature (1)..(25): SEQ ID NO: 516; WAN0249FV_at; Start 51; Stop 75
ttgacattacctaggaattgcgtta

SEQ ID NO: 20786 - DNA, 25 bp, Artificial
  probe
  misc_feature (1)..(25): SEQ ID NO: 516; WAN0249FV_at; Start 43; Stop 67
tatagccattgacattacctaggaa

SEQ ID NO: 20787 - DNA, 25 bp, Artificial
  probe
  misc_feature (1)..(25): SEQ ID NO: 535; WAN0249FW_at; Start 76; Stop 100
tatctcttcctaaatactcagaaaa

SEQ ID NO: 20788 - DNA, 25 bp, Artificial
  probe
  misc_feature (1)..(25): SEQ ID NO: 535; WAN0249FW_at; Start 90; Stop 114
tactcagaaaagattctataatttg

SEQ ID NO: 20789 - DNA, 25 bp, Artificial
  probe
  misc_feature (1)..(25): SEQ ID NO: 535; WAN0249FW_at; Start 94; Stop 118
cagaaaagattctataatttgtaca

SEQ ID NO: 20790 - DNA, 25 bp, Artificial
  probe
  misc_feature (1)..(25): SEQ ID NO: 535; WAN0249FW_at; Start 28; Stop 52
cgtcgactagactataacaaaaaat

SEQ ID NO: 20791 - DNA, 25 bp, Artificial
  probe
  misc_feature (1)..(25): SEQ ID NO: 535; WAN0249FW_at; Start 84; Stop 108
cctaaatactcagaaaagattctat

SEQ ID NO: 20792 - DNA, 25 bp, Artificial
  probe
  misc_feature (1)..(25): SEQ ID NO: 535; WAN0249FW_at; Start 82; Stop 106
ttcctaaatactcagaaaagattct

SEQ ID NO: 20793 - DNA, 25 bp, Artificial
  probe
  misc_feature (1)..(25): SEQ ID NO: 535; WAN0249FW_at; Start 80; Stop 104
tcttcctaaatactcagaaaagatt

SEQ ID NO: 20794 - DNA, 25 bp, Artificial
  probe
  misc_feature (1)..(25): SEQ ID NO: 535; WAN0249FW_at; Start 101; Stop 125
gattctataatttgtacaattgaac

SEQ ID NO: 20795 - DNA, 25 bp, Artificial
  probe
  misc_feature (1)..(25): SEQ ID NO: 535; WAN0249FW_at; Start 81; Stop 105
cttcctaaatactcagaaaagattc

SEQ ID NO: 20796 - DNA, 25 bp, Artificial
  probe
  misc_feature (1)..(25): SEQ ID NO: 535; WAN0249FW_at; Start 79; Stop 103
ctcttcctaaatactcagaaaagat

SEQ ID NO: 20797 - DNA, 25 bp, Artificial
  probe
  misc_feature (1)..(25): SEQ ID NO: 535; WAN0249FW_at; Start 106; Stop 130
tataatttgtacaattgaacaagaa

SEQ ID NO: 20798 - DNA, 25 bp, Artificial
  probe
  misc_feature (1)..(25): SEQ ID NO: 535; WAN0249FW_at; Start 74; Stop 98
attatctcttcctaaatactcagaa

SEQ ID NO: 20799 - DNA, 25 bp, Artificial
  probe
  misc_feature (1)..(25): SEQ ID NO: 535; WAN0249FW_at; Start 62; Stop 86
gtcaataagataattatctcttcct

SEQ ID NO: 20800 - DNA, 25 bp, Artificial
  probe
  misc_feature (1)..(25): SEQ ID NO: 535; WAN0249FW_at; Start 78; Stop 102
tctcttcctaaatactcagaaaaga

SEQ ID NO: 20801 - DNA, 25 bp, Artificial
  probe
  misc_feature (1)..(25): SEQ ID NO: 535; WAN0249FW_at; Start 60; Stop 84
gggtcaataagataattatctcttc

SEQ ID NO: 20802 - DNA, 25 bp, Artificial
  probe
  misc_feature (1)..(25): SEQ ID NO: 535; WAN0249FW_at; Start 26; Stop 50
ctcgtcgactagactataacaaaaa

SEQ ID NO: 20803 - DNA, 25 bp, Artificial
  probe
  misc_feature (1)..(25): SEQ ID NO: 535; WAN0249FW_at; Start 55; Stop 79
aaagagggtcaataagataattatc

SEQ ID NO: 20804 - DNA, 25 bp, Artificial
  probe
  misc_feature (1)..(25): SEQ ID NO: 535; WAN0249FW_at; Start 83; Stop 107
tcctaaatactcagaaaagattcta

SEQ ID NO: 20805 - DNA, 25 bp, Artificial
  probe
  misc_feature (1)..(25): SEQ ID NO: 535; WAN0249FW_at; Start 96; Stop 120
gaaaagattctataatttgtacaat

SEQ ID NO: 20806 - DNA, 25 bp, Artificial
  probe
  misc_feature (1)..(25): SEQ ID NO: 535; WAN0249FW_at; Start 77; Stop 101
atctcttcctaaatactcagaaaag

SEQ ID NO: 20807 - DNA, 25 bp, Artificial
  probe
  misc_feature (1)..(25): SEQ ID NO: 535; WAN0249FW_at; Start 57; Stop 81
agagggtcaataagataattatctc

SEQ ID NO: 20808 - DNA, 25 bp, Artificial
  probe
  misc_feature (1)..(25): SEQ ID NO: 535; WAN0249FW_at; Start 104; Stop 128
tctataatttgtacaattgaacaag

SEQ ID NO: 20809 - DNA, 25 bp, Artificial
  probe
  misc_feature (1)..(25): SEQ ID NO: 535; WAN0249FW_at; Start 30; Stop 54
tcgactagactataacaaaaaataa

SEQ ID NO: 20810 - DNA, 25 bp, Artificial
  probe
  misc_feature (1)..(25): SEQ ID NO: 535; WAN0249FW_at; Start 73; Stop 97
aattatctcttcctaaatactcaga

SEQ ID NO: 20811 - DNA, 25 bp, Artificial
  probe
  misc_feature (1)..(25): SEQ ID NO: 535; WAN0249FW_at; Start 29; Stop 53
gtcgactagactataacaaaaaata

SEQ ID NO: 20812 - DNA, 25 bp, Artificial
  probe
  misc_feature (1)..(25): SEQ ID NO: 535; WAN0249FW_at; Start 58; Stop 82
gagggtcaataagataattatctct

SEQ ID NO: 20813 - DNA, 25 bp, Artificial
  probe
  misc_feature (1)..(25): SEQ ID NO: 535; WAN0249FW_at; Start 86; Stop 110
taaatactcagaaaagattctataa

SEQ ID NO: 20814 - DNA, 25 bp, Artificial
  probe
  misc_feature (1)..(25): SEQ ID NO: 535; WAN0249FW_at; Start 75; Stop 99
ttatctcttcctaaatactcagaaa

SEQ ID NO: 20815 - DNA, 25 bp, Artificial
  probe
  misc_feature (1)..(25): SEQ ID NO: 535; WAN0249FW_at; Start 51; Stop 75
ataaaaagagggtcaataagataat

SEQ ID NO: 20816 - DNA, 25 bp, Artificial
  probe
  misc_feature (1)..(25): SEQ ID NO: 535; WAN0249FW_at; Start 105; Stop 129
ctataatttgtacaattgaacaaga

SEQ ID NO: 20817 - DNA, 25 bp, Artificial
  probe
  misc_feature (1)..(25): SEQ ID NO: 535; WAN0249FW_at; Start 27; Stop 51
tcgtcgactagactataacaaaaaa

SEQ ID NO: 20818 - DNA, 25 bp, Artificial
  probe
  misc_feature (1)..(25): SEQ ID NO: 535; WAN0249FW_at; Start 70; Stop 94
gataattatctcttcctaaatactc

SEQ ID NO: 20819 - DNA, 25 bp, Artificial
  probe
  misc_feature (1)..(25): SEQ ID NO: 535; WAN0249FW_at; Start 61; Stop 85
ggtcaataagataattatctcttcc

SEQ ID NO: 20820 - DNA, 25 bp, Artificial
  probe
  misc_feature (1)..(25): SEQ ID NO: 535; WAN0249FW_at; Start 72; Stop 96
taattatctcttcctaaatactcag

SEQ ID NO: 20821 - DNA, 25 bp, Artificial
  probe
  misc_feature (1)..(25): SEQ ID NO: 5914; WAN0249FX_at; Start 33; Stop 57
tttctgagtatttaggaagagataa

SEQ ID NO: 20822 - DNA, 25 bp, Artificial
  probe
  misc_feature (1)..(25): SEQ ID NO: 5914; WAN0249FX_at; Start 29; Stop 53
atcttttctgagtatttaggaagag

SEQ ID NO: 20823 - DNA, 25 bp, Artificial
  probe
  misc_feature (1)..(25): SEQ ID NO: 5914; WAN0249FX_at; Start 3; Stop 27
tcttgttcaattgtacaaattatag

SEQ ID NO: 20824 - DNA, 25 bp, Artificial
  probe
  misc_feature (1)..(25): SEQ ID NO: 5914; WAN0249FX_at; Start 31; Stop 55
cttttctgagtatttaggaagagat

SEQ ID NO: 20825 - DNA, 25 bp, Artificial
  probe
  misc_feature (1)..(25): SEQ ID NO: 5914; WAN0249FX_at; Start 50; Stop 74
agagataattatcttattgaccctc

SEQ ID NO: 20826 - DNA, 25 bp, Artificial
  probe
  misc_feature (1)..(25): SEQ ID NO: 5914; WAN0249FX_at; Start 98; Stop 122
gtcgacgagatgatagtttagaata

SEQ ID NO: 20827 - DNA, 25 bp, Artificial
  probe
  misc_feature (1)..(25): SEQ ID NO: 5914; WAN0249FX_at; Start 101; Stop 125
gacgagatgatagtttagaataatc

SEQ ID NO: 20828 - DNA, 25 bp, Artificial
  probe
  misc_feature (1)..(25): SEQ ID NO: 5914; WAN0249FX_at; Start 27; Stop 51
gaatcttttctgagtatttaggaag

SEQ ID NO: 20829 - DNA, 25 bp, Artificial
  probe
  misc_feature (1)..(25): SEQ ID NO: 5914; WAN0249FX_at; Start 25; Stop 49
tagaatcttttctgagtatttagga

SEQ ID NO: 20830 - DNA, 25 bp, Artificial
  probe
  misc_feature (1)..(25): SEQ ID NO: 5914; WAN0249FX_at; Start 57; Stop 81
attatcttattgaccctctttttat

SEQ ID NO: 20831 - DNA, 25 bp, Artificial
  probe
  misc_feature (1)..(25): SEQ ID NO: 5914; WAN0249FX_at; Start 7; Stop 31
gttcaattgtacaaattatagaatc

SEQ ID NO: 20832 - DNA, 25 bp, Artificial
  probe
  misc_feature (1)..(25): SEQ ID NO: 5914; WAN0249FX_at; Start 16; Stop 40
tacaaattatagaatcttttctgag

SEQ ID NO: 20833 - DNA, 25 bp, Artificial
  probe
  misc_feature (1)..(25): SEQ ID NO: 5914; WAN0249FX_at; Start 51; Stop 75
gagataattatcttattgaccctct

SEQ ID NO: 20834 - DNA, 25 bp, Artificial
  probe
  misc_feature (1)..(25): SEQ ID NO: 5914; WAN0249FX_at; Start 104; Stop 128
gagatgatagtttagaataatcact

SEQ ID NO: 20835 - DNA, 25 bp, Artificial
  probe
  misc_feature (1)..(25): SEQ ID NO: 5914; WAN0249FX_at; Start 28; Stop 52
aatcttttctgagtatttaggaaga

SEQ ID NO: 20836 - DNA, 25 bp, Artificial
  probe
  misc_feature (1)..(25): SEQ ID NO: 5914; WAN0249FX_at; Start 97; Stop 121
agtcgacgagatgatagtttagaat

SEQ ID NO: 20837 - DNA, 25 bp, Artificial
  probe
  misc_feature (1)..(25): SEQ ID NO: 5914; WAN0249FX_at; Start 18; Stop 42
caaattatagaatcttttctgagta

SEQ ID NO: 20838 - DNA, 25 bp, Artificial
  probe
  misc_feature (1)..(25): SEQ ID NO: 5914; WAN0249FX_at; Start 40; Stop 64
gtatttaggaagagataattatctt

SEQ ID NO: 20839 - DNA, 25 bp, Artificial
  probe
  misc_feature (1)..(25): SEQ ID NO: 5914; WAN0249FX_at; Start 106; Stop 130
gatgatagtttagaataatcactta

SEQ ID NO: 20840 - DNA, 25 bp, Artificial
  probe
  misc_feature (1)..(25): SEQ ID NO: 5914; WAN0249FX_at; Start 99; Stop 123
tcgacgagatgatagtttagaataa

SEQ ID NO: 20841 - DNA, 25 bp, Artificial
  probe
  misc_feature (1)..(25): SEQ ID NO: 5914; WAN0249FX_at; Start 34; Stop 58
ttctgagtatttaggaagagataat

SEQ ID NO: 20842 - DNA, 25 bp, Artificial
  probe
  misc_feature (1)..(25): SEQ ID NO: 5914; WAN0249FX_at; Start 30; Stop 54
tcttttctgagtatttaggaagaga

SEQ ID NO: 20843 - DNA, 25 bp, Artificial
  probe
  misc_feature (1)..(25): SEQ ID NO: 5914; WAN0249FX_at; Start 32; Stop 56
ttttctgagtatttaggaagagata

SEQ ID NO: 20844 - DNA, 25 bp, Artificial
  probe
  misc_feature (1)..(25): SEQ ID NO: 5914; WAN0249FX_at; Start 14; Stop 38
tgtacaaattatagaatcttttctg

SEQ ID NO: 20845 - DNA, 25 bp, Artificial
  probe
  misc_feature (1)..(25): SEQ ID NO: 5914; WAN0249FX_at; Start 103; Stop 127
cgagatgatagtttagaataatcac

SEQ ID NO: 20846 - DNA, 25 bp, Artificial
  probe
  misc_feature (1)..(25): SEQ ID NO: 5914; WAN0249FX_at; Start 48; Stop 72
gaagagataattatcttattgaccc

SEQ ID NO: 20847 - DNA, 25 bp, Artificial
  probe
  misc_feature (1)..(25): SEQ ID NO: 5914; WAN0249FX_at; Start 38; Stop 62
gagtatttaggaagagataattatc

SEQ ID NO: 20848 - DNA, 25 bp, Artificial
  probe
  misc_feature (1)..(25): SEQ ID NO: 5914; WAN0249FX_at; Start 100; Stop 124
cgacgagatgatagtttagaataat

SEQ ID NO: 20849 - DNA, 25 bp, Artificial
  probe
  misc_feature (1)..(25): SEQ ID NO: 5914; WAN0249FX_at; Start 53; Stop 77
gataattatcttattgaccctcttt

SEQ ID NO: 20850 - DNA, 25 bp, Artificial
  probe
  misc_feature (1)..(25): SEQ ID NO: 5914; WAN0249FX_at; Start 26; Stop 50
agaatcttttctgagtatttaggaa

SEQ ID NO: 20851 - DNA, 25 bp, Artificial
  probe
  misc_feature (1)..(25): SEQ ID NO: 5914; WAN0249FX_at; Start 9; Stop 33
tcaattgtacaaattatagaatctt

SEQ ID NO: 20852 - DNA, 25 bp, Artificial
  probe
  misc_feature (1)..(25): SEQ ID NO: 5914; WAN0249FX_at; Start 35; Stop 59
tctgagtatttaggaagagataatt

SEQ ID NO: 20853 - DNA, 25 bp, Artificial
  probe
  misc_feature (1)..(25): SEQ ID NO: 5914; WAN0249FX_at; Start 36; Stop 60
ctgagtatttaggaagagataatta

SEQ ID NO: 20854 - DNA, 25 bp, Artificial
  probe
  misc_feature (1)..(25): SEQ ID NO: 5914; WAN0249FX_at; Start 4; Stop 28
cttgttcaattgtacaaattataga

SEQ ID NO: 20855 - DNA, 25 bp, Artificial
  probe
  misc_feature (1)..(25): SEQ ID NO: 491; WAN0249FY_at; Start 16; Stop 40
tgtttttctacattatatcagaaaa

SEQ ID NO: 20856 - DNA, 25 bp, Artificial
  probe
  misc_feature (1)..(25): SEQ ID NO: 491; WAN0249FY_at; Start 8; Stop 32
cctttagctgtttttctacattata

SEQ ID NO: 20857 - DNA, 25 bp, Artificial
  probe
  misc_feature (1)..(25): SEQ ID NO: 491; WAN0249FY_at; Start 13; Stop 37
agctgtttttctacattatatcaga

SEQ ID NO: 20858 - DNA, 25 bp, Artificial
  probe
  misc_feature (1)..(25): SEQ ID NO: 491; WAN0249FY_at; Start 14; Stop 38
gctgtttttctacattatatcagaa

SEQ ID NO: 20859 - DNA, 25 bp, Artificial
  probe
  misc_feature (1)..(25): SEQ ID NO: 491; WAN0249FY_at; Start 4; Stop 28
ctttcctttagctgtttttctacat

SEQ ID NO: 20860 - DNA, 25 bp, Artificial
  probe
  misc_feature (1)..(25): SEQ ID NO: 491; WAN0249FY_at; Start 3; Stop 27
tctttcctttagctgtttttctaca

SEQ ID NO: 20861 - DNA, 25 bp, Artificial
  probe
  misc_feature (1)..(25): SEQ ID NO: 491; WAN0249FY_at; Start 10; Stop 34
tttagctgtttttctacattatatc

SEQ ID NO: 20862 - DNA, 25 bp, Artificial
  probe
  misc_feature (1)..(25): SEQ ID NO: 491; WAN0249FY_at; Start 31; Stop 55
tatcagaaaaagagggcctttagaa

SEQ ID NO: 20863 - DNA, 25 bp, Artificial
  probe
  misc_feature (1)..(25): SEQ ID NO: 491; WAN0249FY_at; Start 9; Stop 33
ctttagctgtttttctacattatat

SEQ ID NO: 20864 - DNA, 25 bp, Artificial
  probe
  misc_feature (1)..(25): SEQ ID NO: 491; WAN0249FY_at; Start 15; Stop 39
ctgtttttctacattatatcagaaa

SEQ ID NO: 20865 - DNA, 25 bp, Artificial
  probe
  misc_feature (1)..(25): SEQ ID NO: 491; WAN0249FY_at; Start 30; Stop 54
atatcagaaaaagagggcctttaga

SEQ ID NO: 20866 - DNA, 25 bp, Artificial
  probe
  misc_feature (1)..(25): SEQ ID NO: 491; WAN0249FY_at; Start 7; Stop 31
tcctttagctgtttttctacattat

SEQ ID NO: 20867 - DNA, 25 bp, Artificial
  probe
  misc_feature (1)..(25): SEQ ID NO: 491; WAN0249FY_at; Start 28; Stop 52
ttatatcagaaaaagagggccttta

SEQ ID NO: 20868 - DNA, 25 bp, Artificial
  probe
  misc_feature (1)..(25): SEQ ID NO: 491; WAN0249FY_at; Start 12; Stop 36
tagctgtttttctacattatatcag

SEQ ID NO: 20869 - DNA, 25 bp, Artificial
  probe
  misc_feature (1)..(25): SEQ ID NO: 491; WAN0249FY_at; Start 29; Stop 53
tatatcagaaaaagagggcctttag

SEQ ID NO: 20870 - DNA, 25 bp, Artificial
  probe
  misc_feature (1)..(25): SEQ ID NO: 491; WAN0249FY_at; Start 6; Stop 30
ttcctttagctgtttttctacatta

SEQ ID NO: 20871 - DNA, 25 bp, Artificial
  probe
  misc_feature (1)..(25): SEQ ID NO: 491; WAN0249FY_at; Start 11; Stop 35
ttagctgtttttctacattatatca

SEQ ID NO: 20872 - DNA, 25 bp, Artificial
  probe
  misc_feature (1)..(25): SEQ ID NO: 4528; WAN0249FZ_at; Start 41; Stop 65
ctgatataatgtagaaaaacagcta

SEQ ID NO: 20873 - DNA, 25 bp, Artificial
  probe
  misc_feature (1)..(25): SEQ ID NO: 4528; WAN0249FZ_at; Start 27; Stop 51
aaggccctctttttctgatataatg

SEQ ID NO: 20874 - DNA, 25 bp, Artificial
  probe
  misc_feature (1)..(25): SEQ ID NO: 4528; WAN0249FZ_at; Start 46; Stop 70
ataatgtagaaaaacagctaaagga

SEQ ID NO: 20875 - DNA, 25 bp, Artificial
  probe
  misc_feature (1)..(25): SEQ ID NO: 4528; WAN0249FZ_at; Start 42; Stop 66
tgatataatgtagaaaaacagctaa

SEQ ID NO: 20876 - DNA, 25 bp, Artificial
  probe
  misc_feature (1)..(25): SEQ ID NO: 4528; WAN0249FZ_at; Start 28; Stop 52
aggccctctttttctgatataatgt

SEQ ID NO: 20877 - DNA, 25 bp, Artificial
  probe
  misc_feature (1)..(25): SEQ ID NO: 4528; WAN0249FZ_at; Start 44; Stop 68
atataatgtagaaaaacagctaaag

SEQ ID NO: 20878 - DNA, 25 bp, Artificial
  probe
  misc_feature (1)..(25): SEQ ID NO: 4528; WAN0249FZ_at; Start 47; Stop 71
taatgtagaaaaacagctaaaggaa

SEQ ID NO: 20879 - DNA, 25 bp, Artificial
  probe
  misc_feature (1)..(25): SEQ ID NO: 4528; WAN0249FZ_at; Start 26; Stop 50
aaaggccctctttttctgatataat

SEQ ID NO: 20880 - DNA, 25 bp, Artificial
  probe
  misc_feature (1)..(25): SEQ ID NO: 4528; WAN0249FZ_at; Start 31; Stop 55
ccctctttttctgatataatgtaga

SEQ ID NO: 20881 - DNA, 25 bp, Artificial
  probe
  misc_feature (1)..(25): SEQ ID NO: 4528; WAN0249FZ_at; Start 24; Stop 48
ctaaaggccctctttttctgatata

SEQ ID NO: 20882 - DNA, 25 bp, Artificial
  probe
  misc_feature (1)..(25): SEQ ID NO: 4528; WAN0249FZ_at; Start 34; Stop 58
tctttttctgatataatgtagaaaa

SEQ ID NO: 20883 - DNA, 25 bp, Artificial
  probe
  misc_feature (1)..(25): SEQ ID NO: 4528; WAN0249FZ_at; Start 29; Stop 53
ggccctctttttctgatataatgta

SEQ ID NO: 20884 - DNA, 25 bp, Artificial
  probe
  misc_feature (1)..(25): SEQ ID NO: 4528; WAN0249FZ_at; Start 45; Stop 69
tataatgtagaaaaacagctaaagg

SEQ ID NO: 20885 - DNA, 25 bp, Artificial
  probe
  misc_feature (1)..(25): SEQ ID NO: 4528; WAN0249FZ_at; Start 40; Stop 64
tctgatataatgtagaaaaacagct

SEQ ID NO: 20886 - DNA, 25 bp, Artificial
  probe
  misc_feature (1)..(25): SEQ ID NO: 4528; WAN0249FZ_at; Start 39; Stop 63
ttctgatataatgtagaaaaacagc

SEQ ID NO: 20887 - DNA, 25 bp, Artificial
  probe
  misc_feature (1)..(25): SEQ ID NO: 4528; WAN0249FZ_at; Start 33; Stop 57
ctctttttctgatataatgtagaaa

SEQ ID NO: 20888 - DNA, 25 bp, Artificial
  probe
  misc_feature (1)..(25): SEQ ID NO: 4528; WAN0249FZ_at; Start 38; Stop 62
tttctgatataatgtagaaaaacag

SEQ ID NO: 20889 - DNA, 25 bp, Artificial
  probe
  misc_feature (1)..(25): SEQ ID NO: 4528; WAN0249FZ_at; Start 22; Stop 46
ttctaaaggccctctttttctgata

SEQ ID NO: 20890 - DNA, 25 bp, Artificial
  probe
  misc_feature (1)..(25): SEQ ID NO: 4528; WAN0249FZ_at; Start 25; Stop 49
taaaggccctctttttctgatataa

SEQ ID NO: 20891 - DNA, 25 bp, Artificial
  probe
  misc_feature (1)..(25): SEQ ID NO: 4528; WAN0249FZ_at; Start 30; Stop 54
gccctctttttctgatataatgtag

SEQ ID NO: 20892 - DNA, 25 bp, Artificial
  probe
  misc_feature (1)..(25): SEQ ID NO: 4528; WAN0249FZ_at; Start 32; Stop 56
cctctttttctgatataatgtagaa

SEQ ID NO: 20893 - DNA, 25 bp, Artificial
  probe
  misc_feature (1)..(25): SEQ ID NO: 4528; WAN0249FZ_at; Start 50; Stop 74
tgtagaaaaacagctaaaggaaaga

SEQ ID NO: 20894 - DNA, 25 bp, Artificial
  probe
  misc_feature (1)..(25): SEQ ID NO: 4528; WAN0249FZ_at; Start 23; Stop 47
tctaaaggccctctttttctgatat

SEQ ID NO: 20895 - DNA, 25 bp, Artificial
  probe
  misc_feature (1)..(25): SEQ ID NO: 4528; WAN0249FZ_at; Start 37; Stop 61
ttttctgatataatgtagaaaaaca

SEQ ID NO: 20896 - DNA, 25 bp, Artificial
  probe
  misc_feature (1)..(25): SEQ ID NO: 4528; WAN0249FZ_at; Start 49; Stop 73
atgtagaaaaacagctaaaggaaag

SEQ ID NO: 20897 - DNA, 25 bp, Artificial
  probe
  misc_feature (1)..(25): SEQ ID NO: 4528; WAN0249FZ_at; Start 35; Stop 59
ctttttctgatataatgtagaaaaa

SEQ ID NO: 20898 - DNA, 25 bp, Artificial
  probe
  misc_feature (1)..(25): SEQ ID NO: 4528; WAN0249FZ_at; Start 43; Stop 67
gatataatgtagaaaaacagctaaa

SEQ ID NO: 20899 - DNA, 25 bp, Artificial
  probe
  misc_feature (1)..(25): SEQ ID NO: 4528; WAN0249FZ_at; Start 36; Stop 60
tttttctgatataatgtagaaaaac

SEQ ID NO: 20900 - DNA, 25 bp, Artificial
  probe
  misc_feature (1)..(25): SEQ ID NO: 3755; WAN0249G2_at; Start 3; Stop 27
ggctcgctttagctcaaccgattct

SEQ ID NO: 20901 - DNA, 25 bp, Artificial
  probe
  misc_feature (1)..(25): SEQ ID NO: 3755; WAN0249G2_at; Start 7; Stop 31
cgctttagctcaaccgattcttatc

SEQ ID NO: 20902 - DNA, 25 bp, Artificial
  probe
  misc_feature (1)..(25): SEQ ID NO: 3755; WAN0249G2_at; Start 4; Stop 28
gctcgctttagctcaaccgattctt

SEQ ID NO: 20903 - DNA, 25 bp, Artificial
  probe
  misc_feature (1)..(25): SEQ ID NO: 3755; WAN0249G2_at; Start 21; Stop 45
cgattcttatcagaatcacaagttt

SEQ ID NO: 20904 - DNA, 25 bp, Artificial
  probe
  misc_feature (1)..(25): SEQ ID NO: 3755; WAN0249G2_at; Start 8; Stop 32
gctttagctcaaccgattcttatca

SEQ ID NO: 20905 - DNA, 25 bp, Artificial
  probe
  misc_feature (1)..(25): SEQ ID NO: 3755; WAN0249G2_at; Start 20; Stop 44
ccgattcttatcagaatcacaagtt

SEQ ID NO: 20906 - DNA, 25 bp, Artificial
  probe
  misc_feature (1)..(25): SEQ ID NO: 3755; WAN0249G2_at; Start 30; Stop 54
tcagaatcacaagtttacatttaaa

SEQ ID NO: 20907 - DNA, 25 bp, Artificial
  probe
  misc_feature (1)..(25): SEQ ID NO: 3755; WAN0249G2_at; Start 31; Stop 55
cagaatcacaagtttacatttaaaa

SEQ ID NO: 20908 - DNA, 25 bp, Artificial
  probe
  misc_feature (1)..(25): SEQ ID NO: 3755; WAN0249G2_at; Start 14; Stop 38
gctcaaccgattcttatcagaatca

SEQ ID NO: 20909 - DNA, 25 bp, Artificial
  probe
  misc_feature (1)..(25): SEQ ID NO: 3755; WAN0249G2_at; Start 13; Stop 37
agctcaaccgattcttatcagaatc

SEQ ID NO: 20910 - DNA, 25 bp, Artificial
  probe
  misc_feature (1)..(25): SEQ ID NO: 3755; WAN0249G2_at; Start 18; Stop 42
aaccgattcttatcagaatcacaag

SEQ ID NO: 20911 - DNA, 25 bp, Artificial
  probe
  misc_feature (1)..(25): SEQ ID NO: 3755; WAN0249G2_at; Start 1; Stop 25
ggggctcgctttagctcaaccgatt

SEQ ID NO: 20912 - DNA, 25 bp, Artificial
  probe
  misc_feature (1)..(25): SEQ ID NO: 3755; WAN0249G2_at; Start 16; Stop 40
tcaaccgattcttatcagaatcaca

SEQ ID NO: 20913 - DNA, 25 bp, Artificial
  probe
  misc_feature (1)..(25): SEQ ID NO: 3755; WAN0249G2_at; Start 11; Stop 35
ttagctcaaccgattcttatcagaa

SEQ ID NO: 20914 - DNA, 25 bp, Artificial
  probe
  misc_feature (1)..(25): SEQ ID NO: 3755; WAN0249G2_at; Start 9; Stop 33
ctttagctcaaccgattcttatcag

SEQ ID NO: 20915 - DNA, 25 bp, Artificial
  probe
  misc_feature (1)..(25): SEQ ID NO: 3755; WAN0249G2_at; Start 29; Stop 53
atcagaatcacaagtttacatttaa

SEQ ID NO: 20916 - DNA, 25 bp, Artificial
  probe
  misc_feature (1)..(25): SEQ ID NO: 3755; WAN0249G2_at; Start 27; Stop 51
ttatcagaatcacaagtttacattt

SEQ ID NO: 20917 - DNA, 25 bp, Artificial
  probe
  misc_feature (1)..(25): SEQ ID NO: 3755; WAN0249G2_at; Start 22; Stop 46
gattcttatcagaatcacaagttta

SEQ ID NO: 20918 - DNA, 25 bp, Artificial
  probe
  misc_feature (1)..(25): SEQ ID NO: 3755; WAN0249G2_at; Start 12; Stop 36
tagctcaaccgattcttatcagaat

SEQ ID NO: 20919 - DNA, 25 bp, Artificial
  probe
  misc_feature (1)..(25): SEQ ID NO: 3755; WAN0249G2_at; Start 15; Stop 39
ctcaaccgattcttatcagaatcac

SEQ ID NO: 20920 - DNA, 25 bp, Artificial
  probe
  misc_feature (1)..(25): SEQ ID NO: 3755; WAN0249G2_at; Start 2; Stop 26
gggctcgctttagctcaaccgattc

SEQ ID NO: 20921 - DNA, 25 bp, Artificial
  probe
  misc_feature (1)..(25): SEQ ID NO: 3755; WAN0249G2_at; Start 6; Stop 30
tcgctttagctcaaccgattcttat

SEQ ID NO: 20922 - DNA, 25 bp, Artificial
  probe
  misc_feature (1)..(25): SEQ ID NO: 3755; WAN0249G2_at; Start 10; Stop 34
tttagctcaaccgattcttatcaga

SEQ ID NO: 20923 - DNA, 25 bp, Artificial
  probe
  misc_feature (1)..(25): SEQ ID NO: 3755; WAN0249G2_at; Start 28; Stop 52
tatcagaatcacaagtttacattta

SEQ ID NO: 20924 - DNA, 25 bp, Artificial
  probe
  misc_feature (1)..(25): SEQ ID NO: 3755; WAN0249G2_at; Start 5; Stop 29
ctcgctttagctcaaccgattctta

SEQ ID NO: 20925 - DNA, 25 bp, Artificial
  probe
  misc_feature (1)..(25): SEQ ID NO: 3755; WAN0249G2_at; Start 24; Stop 48
ttcttatcagaatcacaagtttaca

SEQ ID NO: 20926 - DNA, 25 bp, Artificial
  probe
  misc_feature (1)..(25): SEQ ID NO: 3755; WAN0249G2_at; Start 26; Stop 50
cttatcagaatcacaagtttacatt

SEQ ID NO: 20927 - DNA, 25 bp, Artificial
  probe
  misc_feature (1)..(25): SEQ ID NO: 3755; WAN0249G2_at; Start 17; Stop 41
caaccgattcttatcagaatcacaa

SEQ ID NO: 20928 - DNA, 25 bp, Artificial
  probe
  misc_feature (1)..(25): SEQ ID NO: 3755; WAN0249G2_at; Start 23; Stop 47
attcttatcagaatcacaagtttac

SEQ ID NO: 20929 - DNA, 25 bp, Artificial
  probe
  misc_feature (1)..(25): SEQ ID NO: 3755; WAN0249G2_at; Start 25; Stop 49
tcttatcagaatcacaagtttacat

SEQ ID NO: 20930 - DNA, 25 bp, Artificial
  probe
  misc_feature (1)..(25): SEQ ID NO: 3755; WAN0249G2_at; Start 19; Stop 43
accgattcttatcagaatcacaagt

SEQ ID NO: 20931 - DNA, 25 bp, Artificial
  probe
  misc_feature (1)..(25): SEQ ID NO: 4641; WAN0249G3_at; Start 21; Stop 45
ttttaaatgtaaacttgtgattctg

SEQ ID NO: 20932 - DNA, 25 bp, Artificial
  probe
  misc_feature (1)..(25): SEQ ID NO: 4641; WAN0249G3_at; Start 48; Stop 72
aagaatcggttgagctaaagcgagc

SEQ ID NO: 20933 - DNA, 25 bp, Artificial
  probe
  misc_feature (1)..(25): SEQ ID NO: 4641; WAN0249G3_at; Start 30; Stop 54
taaacttgtgattctgataagaatc

SEQ ID NO: 20934 - DNA, 25 bp, Artificial
  probe
  misc_feature (1)..(25): SEQ ID NO: 4641; WAN0249G3_at; Start 47; Stop 71
taagaatcggttgagctaaagcgag

SEQ ID NO: 20935 - DNA, 25 bp, Artificial
  probe
  misc_feature (1)..(25): SEQ ID NO: 4641; WAN0249G3_at; Start 33; Stop 57
acttgtgattctgataagaatcggt

SEQ ID NO: 20936 - DNA, 25 bp, Artificial
  probe
  misc_feature (1)..(25): SEQ ID NO: 4641; WAN0249G3_at; Start 39; Stop 63
gattctgataagaatcggttgagct

SEQ ID NO: 20937 - DNA, 25 bp, Artificial
  probe
  misc_feature (1)..(25): SEQ ID NO: 4641; WAN0249G3_at; Start 32; Stop 56
aacttgtgattctgataagaatcgg

SEQ ID NO: 20938 - DNA, 25 bp, Artificial
  probe
  misc_feature (1)..(25): SEQ ID NO: 4641; WAN0249G3_at; Start 40; Stop 64
attctgataagaatcggttgagcta

SEQ ID NO: 20939 - DNA, 25 bp, Artificial
  probe
  misc_feature (1)..(25): SEQ ID NO: 4641; WAN0249G3_at; Start 23; Stop 47
ttaaatgtaaacttgtgattctgat

SEQ ID NO: 20940 - DNA, 25 bp, Artificial
  probe
  misc_feature (1)..(25): SEQ ID NO: 4641; WAN0249G3_at; Start 51; Stop 75
aatcggttgagctaaagcgagcccc

SEQ ID NO: 20941 - DNA, 25 bp, Artificial
  probe
  misc_feature (1)..(25): SEQ ID NO: 4641; WAN0249G3_at; Start 25; Stop 49
aaatgtaaacttgtgattctgataa

SEQ ID NO: 20942 - DNA, 25 bp, Artificial
  probe
  misc_feature (1)..(25): SEQ ID NO: 4641; WAN0249G3_at; Start 24; Stop 48
taaatgtaaacttgtgattctgata

SEQ ID NO: 20943 - DNA, 25 bp, Artificial
  probe
  misc_feature (1)..(25): SEQ ID NO: 4641; WAN0249G3_at; Start 22; Stop 46
tttaaatgtaaacttgtgattctga

SEQ ID NO: 20944 - DNA, 25 bp, Artificial
  probe
  misc_feature (1)..(25): SEQ ID NO: 4641; WAN0249G3_at; Start 49; Stop 73
agaatcggttgagctaaagcgagcc

SEQ ID NO: 20945 - DNA, 25 bp, Artificial
  probe
  misc_feature (1)..(25): SEQ ID NO: 4641; WAN0249G3_at; Start 31; Stop 55
aaacttgtgattctgataagaatcg

SEQ ID NO: 20946 - DNA, 25 bp, Artificial
  probe
  misc_feature (1)..(25): SEQ ID NO: 4641; WAN0249G3_at; Start 34; Stop 58
cttgtgattctgataagaatcggtt

SEQ ID NO: 20947 - DNA, 25 bp, Artificial
  probe
  misc_feature (1)..(25): SEQ ID NO: 4641; WAN0249G3_at; Start 37; Stop 61
gtgattctgataagaatcggttgag

SEQ ID NO: 20948 - DNA, 25 bp, Artificial
  probe
  misc_feature (1)..(25): SEQ ID NO: 4641; WAN0249G3_at; Start 35; Stop 59
ttgtgattctgataagaatcggttg

SEQ ID NO: 20949 - DNA, 25 bp, Artificial
  probe
  misc_feature (1)..(25): SEQ ID NO: 4641; WAN0249G3_at; Start 50; Stop 74
gaatcggttgagctaaagcgagccc

SEQ ID NO: 20950 - DNA, 25 bp, Artificial
  probe
  misc_feature (1)..(25): SEQ ID NO: 4641; WAN0249G3_at; Start 28; Stop 52
tgtaaacttgtgattctgataagaa

SEQ ID NO: 20951 - DNA, 25 bp, Artificial
  probe
  misc_feature (1)..(25): SEQ ID NO: 4641; WAN0249G3_at; Start 42; Stop 66
tctgataagaatcggttgagctaaa

SEQ ID NO: 20952 - DNA, 25 bp, Artificial
  probe
  misc_feature (1)..(25): SEQ ID NO: 4641; WAN0249G3_at; Start 36; Stop 60
tgtgattctgataagaatcggttga

SEQ ID NO: 20953 - DNA, 25 bp, Artificial
  probe
  misc_feature (1)..(25): SEQ ID NO: 4641; WAN0249G3_at; Start 29; Stop 53
gtaaacttgtgattctgataagaat

SEQ ID NO: 20954 - DNA, 25 bp, Artificial
  probe
  misc_feature (1)..(25): SEQ ID NO: 4641; WAN0249G3_at; Start 44; Stop 68
tgataagaatcggttgagctaaagc

SEQ ID NO: 20955 - DNA, 25 bp, Artificial
  probe
  misc_feature (1)..(25): SEQ ID NO: 4641; WAN0249G3_at; Start 27; Stop 51
atgtaaacttgtgattctgataaga

SEQ ID NO: 20956 - DNA, 25 bp, Artificial
  probe
  misc_feature (1)..(25): SEQ ID NO: 4641; WAN0249G3_at; Start 43; Stop 67
ctgataagaatcggttgagctaaag

SEQ ID NO: 20957 - DNA, 25 bp, Artificial
  probe
  misc_feature (1)..(25): SEQ ID NO: 4641; WAN0249G3_at; Start 26; Stop 50
aatgtaaacttgtgattctgataag

SEQ ID NO: 20958 - DNA, 25 bp, Artificial
  probe
  misc_feature (1)..(25): SEQ ID NO: 4641; WAN0249G3_at; Start 38; Stop 62
tgattctgataagaatcggttgagc

SEQ ID NO: 20959 - DNA, 25 bp, Artificial
  probe
  misc_feature (1)..(25): SEQ ID NO: 4641; WAN0249G3_at; Start 45; Stop 69
gataagaatcggttgagctaaagcg

SEQ ID NO: 20960 - DNA, 25 bp, Artificial
  probe
  misc_feature (1)..(25): SEQ ID NO: 4641; WAN0249G3_at; Start 46; Stop 70
ataagaatcggttgagctaaagcga

SEQ ID NO: 20961 - DNA, 25 bp, Artificial
  probe
  misc_feature (1)..(25): SEQ ID NO: 4641; WAN0249G3_at; Start 41; Stop 65
ttctgataagaatcggttgagctaa

SEQ ID NO: 20962 - DNA, 25 bp, Artificial
  probe
  misc_feature (1)..(25): SEQ ID NO: 300; WAN0249G6_at; Start 11; Stop 35
agtctgtgtaggcttagtatttcaa

SEQ ID NO: 20963 - DNA, 25 bp, Artificial
  probe
  misc_feature (1)..(25): SEQ ID NO: 300; WAN0249G6_at; Start 15; Stop 39
tgtgtaggcttagtatttcaataga

SEQ ID NO: 20964 - DNA, 25 bp, Artificial
  probe
  misc_feature (1)..(25): SEQ ID NO: 300; WAN0249G6_at; Start 20; Stop 44
aggcttagtatttcaatagacttcc

SEQ ID NO: 20965 - DNA, 25 bp, Artificial
  probe
  misc_feature (1)..(25): SEQ ID NO: 300; WAN0249G6_at; Start 9; Stop 33
tcagtctgtgtaggcttagtatttc

SEQ ID NO: 20966 - DNA, 25 bp, Artificial
  probe
  misc_feature (1)..(25): SEQ ID NO: 300; WAN0249G6_at; Start 8; Stop 32
atcagtctgtgtaggcttagtattt

SEQ ID NO: 20967 - DNA, 25 bp, Artificial
  probe
  misc_feature (1)..(25): SEQ ID NO: 300; WAN0249G6_at; Start 5; Stop 29
gaaatcagtctgtgtaggcttagta

SEQ ID NO: 20968 - DNA, 25 bp, Artificial
  probe
  misc_feature (1)..(25): SEQ ID NO: 300; WAN0249G6_at; Start 17; Stop 41
tgtaggcttagtatttcaatagact

SEQ ID NO: 20969 - DNA, 25 bp, Artificial
  probe
  misc_feature (1)..(25): SEQ ID NO: 300; WAN0249G6_at; Start 7; Stop 31
aatcagtctgtgtaggcttagtatt

SEQ ID NO: 20970 - DNA, 25 bp, Artificial
  probe
  misc_feature (1)..(25): SEQ ID NO: 300; WAN0249G6_at; Start 19; Stop 43
taggcttagtatttcaatagacttc

SEQ ID NO: 20971 - DNA, 25 bp, Artificial
  probe
  misc_feature (1)..(25): SEQ ID NO: 300; WAN0249G6_at; Start 14; Stop 38
ctgtgtaggcttagtatttcaatag

SEQ ID NO: 20972 - DNA, 25 bp, Artificial
  probe
  misc_feature (1)..(25): SEQ ID NO: 300; WAN0249G6_at; Start 1; Stop 25
aattgaaatcagtctgtgtaggctt

SEQ ID NO: 20973 - DNA, 25 bp, Artificial
  probe
  misc_feature (1)..(25): SEQ ID NO: 300; WAN0249G6_at; Start 18; Stop 42
gtaggcttagtatttcaatagactt

SEQ ID NO: 20974 - DNA, 25 bp, Artificial
  probe
  misc_feature (1)..(25): SEQ ID NO: 300; WAN0249G6_at; Start 4; Stop 28
tgaaatcagtctgtgtaggcttagt

SEQ ID NO: 20975 - DNA, 25 bp, Artificial
  probe
  misc_feature (1)..(25): SEQ ID NO: 300; WAN0249G6_at; Start 10; Stop 34
cagtctgtgtaggcttagtatttca

SEQ ID NO: 20976 - DNA, 25 bp, Artificial
  probe
  misc_feature (1)..(25): SEQ ID NO: 300; WAN0249G6_at; Start 12; Stop 36
gtctgtgtaggcttagtatttcaat

SEQ ID NO: 20977 - DNA, 25 bp, Artificial
  probe
  misc_feature (1)..(25): SEQ ID NO: 300; WAN0249G6_at; Start 16; Stop 40
gtgtaggcttagtatttcaatagac

SEQ ID NO: 20978 - DNA, 25 bp, Artificial
  probe
  misc_feature (1)..(25): SEQ ID NO: 300; WAN0249G6_at; Start 2; Stop 26
attgaaatcagtctgtgtaggctta

SEQ ID NO: 20979 - DNA, 25 bp, Artificial
  probe
  misc_feature (1)..(25): SEQ ID NO: 300; WAN0249G6_at; Start 3; Stop 27
ttgaaatcagtctgtgtaggcttag

SEQ ID NO: 20980 - DNA, 25 bp, Artificial
  probe
  misc_feature (1)..(25): SEQ ID NO: 300; WAN0249G6_at; Start 6; Stop 30
aaatcagtctgtgtaggcttagtat

SEQ ID NO: 20981 - DNA, 25 bp, Artificial
  probe
  misc_feature (1)..(25): SEQ ID NO: 300; WAN0249G6_at; Start 13; Stop 37
tctgtgtaggcttagtatttcaata

SEQ ID NO: 20982 - DNA, 25 bp, Artificial
  probe
  misc_feature (1)..(25): SEQ ID NO: 5944; WAN0249G7_at; Start 13; Stop 37
tctattgaaatactaagcctacaca

SEQ ID NO: 20983 - DNA, 25 bp, Artificial
  probe
  misc_feature (1)..(25): SEQ ID NO: 5944; WAN0249G7_at; Start 9; Stop 33
gaagtctattgaaatactaagccta

SEQ ID NO: 20984 - DNA, 25 bp, Artificial
  probe
  misc_feature (1)..(25): SEQ ID NO: 5944; WAN0249G7_at; Start 11; Stop 35
agtctattgaaatactaagcctaca

SEQ ID NO: 20985 - DNA, 25 bp, Artificial
  probe
  misc_feature (1)..(25): SEQ ID NO: 5944; WAN0249G7_at; Start 12; Stop 36
gtctattgaaatactaagcctacac

SEQ ID NO: 20986 - DNA, 25 bp, Artificial
  probe
  misc_feature (1)..(25): SEQ ID NO: 5944; WAN0249G7_at; Start 14; Stop 38
ctattgaaatactaagcctacacag

SEQ ID NO: 20987 - DNA, 25 bp, Artificial
  probe
  misc_feature (1)..(25): SEQ ID NO: 5944; WAN0249G7_at; Start 15; Stop 39
tattgaaatactaagcctacacaga

SEQ ID NO: 20988 - DNA, 25 bp, Artificial
  probe
  misc_feature (1)..(25): SEQ ID NO: 5944; WAN0249G7_at; Start 23; Stop 47
tactaagcctacacagactgatttc

SEQ ID NO: 20989 - DNA, 25 bp, Artificial
  probe
  misc_feature (1)..(25): SEQ ID NO: 5944; WAN0249G7_at; Start 27; Stop 51
aagcctacacagactgatttcaatt

SEQ ID NO: 20990 - DNA, 25 bp, Artificial
  probe
  misc_feature (1)..(25): SEQ ID NO: 5944; WAN0249G7_at; Start 21; Stop 45
aatactaagcctacacagactgatt

SEQ ID NO: 20991 - DNA, 25 bp, Artificial
  probe
  misc_feature (1)..(25): SEQ ID NO: 5944; WAN0249G7_at; Start 16; Stop 40
attgaaatactaagcctacacagac

SEQ ID NO: 20992 - DNA, 25 bp, Artificial
  probe
  misc_feature (1)..(25): SEQ ID NO: 5944; WAN0249G7_at; Start 19; Stop 43
gaaatactaagcctacacagactga

SEQ ID NO: 20993 - DNA, 25 bp, Artificial
  probe
  misc_feature (1)..(25): SEQ ID NO: 5944; WAN0249G7_at; Start 24; Stop 48
actaagcctacacagactgatttca

SEQ ID NO: 20994 - DNA, 25 bp, Artificial
  probe
  misc_feature (1)..(25): SEQ ID NO: 5944; WAN0249G7_at; Start 17; Stop 41
ttgaaatactaagcctacacagact

SEQ ID NO: 20995 - DNA, 25 bp, Artificial
  probe
  misc_feature (1)..(25): SEQ ID NO: 5944; WAN0249G7_at; Start 20; Stop 44
aaatactaagcctacacagactgat

SEQ ID NO: 20996 - DNA, 25 bp, Artificial
  probe
  misc_feature (1)..(25): SEQ ID NO: 5944; WAN0249G7_at; Start 18; Stop 42
tgaaatactaagcctacacagactg

SEQ ID NO: 20997 - DNA, 25 bp, Artificial
  probe
  misc_feature (1)..(25): SEQ ID NO: 5944; WAN0249G7_at; Start 10; Stop 34
aagtctattgaaatactaagcctac

SEQ ID NO: 20998 - DNA, 25 bp, Artificial
  probe
  misc_feature (1)..(25): SEQ ID NO: 5944; WAN0249G7_at; Start 25; Stop 49
ctaagcctacacagactgatttcaa

SEQ ID NO: 20999 - DNA, 25 bp, Artificial
  probe
  misc_feature (1)..(25): SEQ ID NO: 5944; WAN0249G7_at; Start 8; Stop 32
ggaagtctattgaaatactaagcct

SEQ ID NO: 21000 - DNA, 25 bp, Artificial
  probe
  misc_feature (1)..(25): SEQ ID NO: 5944; WAN0249G7_at; Start 22; Stop 46
atactaagcctacacagactgattt

SEQ ID NO: 21001 - DNA, 25 bp, Artificial
  probe
  misc_feature (1)..(25): SEQ ID NO: 5944; WAN0249G7_at; Start 26; Stop 50
taagcctacacagactgatttcaat

SEQ ID NO: 21002 - DNA, 25 bp, Artificial
  probe
  misc_feature (1)..(25): SEQ ID NO: 4337; WAN0249G8_at; Start 158; Stop 182
tgtactactctattctactagataa

SEQ ID NO: 21003 - DNA, 25 bp, Artificial
  probe
  misc_feature (1)..(25): SEQ ID NO: 4337; WAN0249G8_at; Start 206; Stop 230
caacggctagcaaagttataatttt

SEQ ID NO: 21004 - DNA, 25 bp, Artificial
  probe
  misc_feature (1)..(25): SEQ ID NO: 4337; WAN0249G8_at; Start 196; Stop 220
ctttttataacaacggctagcaaag

SEQ ID NO: 21005 - DNA, 25 bp, Artificial
  probe
  misc_feature (1)..(25): SEQ ID NO: 4337; WAN0249G8_at; Start 106; Stop 130
taaaatttaaaaatgatatactgtg

SEQ ID NO: 21006 - DNA, 25 bp, Artificial
  probe
  misc_feature (1)..(25): SEQ ID NO: 4337; WAN0249G8_at; Start 200; Stop 224
ttataacaacggctagcaaagttat

SEQ ID NO: 21007 - DNA, 25 bp, Artificial
  probe
  misc_feature (1)..(25): SEQ ID NO: 4337; WAN0249G8_at; Start 119; Stop 143
tgatatactgtgtttatggagagat

SEQ ID NO: 21008 - DNA, 25 bp, Artificial
  probe
  misc_feature (1)..(25): SEQ ID NO: 4337; WAN0249G8_at; Start 123; Stop 147
atactgtgtttatggagagatgaca

SEQ ID NO: 21009 - DNA, 25 bp, Artificial
  probe
  misc_feature (1)..(25): SEQ ID NO: 4337; WAN0249G8_at; Start 122; Stop 146
tatactgtgtttatggagagatgac

SEQ ID NO: 21010 - DNA, 25 bp, Artificial
  probe
  misc_feature (1)..(25): SEQ ID NO: 4337; WAN0249G8_at; Start 141; Stop 165
gatgacaatttataaaatgtactac

SEQ ID NO: 21011 - DNA, 25 bp, Artificial
  probe
  misc_feature (1)..(25): SEQ ID NO: 4337; WAN0249G8_at; Start 203; Stop 227
taacaacggctagcaaagttataat

SEQ ID NO: 21012 - DNA, 25 bp, Artificial
  probe
  misc_feature (1)..(25): SEQ ID NO: 4337; WAN0249G8_at; Start 144; Stop 168
gacaatttataaaatgtactactct

SEQ ID NO: 21013 - DNA, 25 bp, Artificial
  probe
  misc_feature (1)..(25): SEQ ID NO: 4337; WAN0249G8_at; Start 211; Stop 235
gctagcaaagttataattttatatc

SEQ ID NO: 21014 - DNA, 25 bp, Artificial
  probe
  misc_feature (1)..(25): SEQ ID NO: 4337; WAN0249G8_at; Start 126; Stop 150
ctgtgtttatggagagatgacaatt

SEQ ID NO: 21015 - DNA, 25 bp, Artificial
  probe
  misc_feature (1)..(25): SEQ ID NO: 4337; WAN0249G8_at; Start 164; Stop 188
actctattctactagataatgattg

SEQ ID NO: 21016 - DNA, 25 bp, Artificial
  probe
  misc_feature (1)..(25): SEQ ID NO: 4337; WAN0249G8_at; Start 172; Stop 196
ctactagataatgattgaataaaac

SEQ ID NO: 21017 - DNA, 25 bp, Artificial
  probe
  misc_feature (1)..(25): SEQ ID NO: 4337; WAN0249G8_at; Start 154; Stop 178
aaaatgtactactctattctactag

SEQ ID NO: 21018 - DNA, 25 bp, Artificial
  probe
  misc_feature (1)..(25): SEQ ID NO: 4337; WAN0249G8_at; Start 135; Stop 159
tggagagatgacaatttataaaatg

SEQ ID NO: 21019 - DNA, 25 bp, Artificial
  probe
  misc_feature (1)..(25): SEQ ID NO: 4337; WAN0249G8_at; Start 175; Stop 199
ctagataatgattgaataaaacttt

SEQ ID NO: 21020 - DNA, 25 bp, Artificial
  probe
  misc_feature (1)..(25): SEQ ID NO: 4337; WAN0249G8_at; Start 155; Stop 179
aaatgtactactctattctactaga

SEQ ID NO: 21021 - DNA, 25 bp, Artificial
  probe
  misc_feature (1)..(25): SEQ ID NO: 4337; WAN0249G8_at; Start 125; Stop 149
actgtgtttatggagagatgacaat

SEQ ID NO: 21022 - DNA, 25 bp, Artificial
  probe
  misc_feature (1)..(25): SEQ ID NO: 4337; WAN0249G8_at; Start 124; Stop 148
tactgtgtttatggagagatgacaa

SEQ ID NO: 21023 - DNA, 25 bp, Artificial
  probe
  misc_feature (1)..(25): SEQ ID NO: 4337; WAN0249G8_at; Start 120; Stop 144
gatatactgtgtttatggagagatg

SEQ ID NO: 21024 - DNA, 25 bp, Artificial
  probe
  misc_feature (1)..(25): SEQ ID NO: 4337; WAN0249G8_at; Start 128; Stop 152
gtgtttatggagagatgacaattta

SEQ ID NO: 21025 - DNA, 25 bp, Artificial
  probe
  misc_feature (1)..(25): SEQ ID NO: 4337; WAN0249G8_at; Start 178; Stop 202
gataatgattgaataaaacttttta

SEQ ID NO: 21026 - DNA, 25 bp, Artificial
  probe
  misc_feature (1)..(25): SEQ ID NO: 4337; WAN0249G8_at; Start 136; Stop 160
ggagagatgacaatttataaaatgt

SEQ ID NO: 21027 - DNA, 25 bp, Artificial
  probe
  misc_feature (1)..(25): SEQ ID NO: 4337; WAN0249G8_at; Start 129; Stop 153
tgtttatggagagatgacaatttat

SEQ ID NO: 21028 - DNA, 25 bp, Artificial
  probe
  misc_feature (1)..(25): SEQ ID NO: 4337; WAN0249G8_at; Start 160; Stop 184
tactactctattctactagataatg

SEQ ID NO: 21029 - DNA, 25 bp, Artificial
  probe
  misc_feature (1)..(25): SEQ ID NO: 4337; WAN0249G8_at; Start 201; Stop 225
tataacaacggctagcaaagttata

SEQ ID NO: 21030 - DNA, 25 bp, Artificial
  probe
  misc_feature (1)..(25): SEQ ID NO: 4337; WAN0249G8_at; Start 166; Stop 190
tctattctactagataatgattgaa

SEQ ID NO: 21031 - DNA, 25 bp, Artificial
  probe
  misc_feature (1)..(25): SEQ ID NO: 4337; WAN0249G8_at; Start 204; Stop 228
aacaacggctagcaaagttataatt

SEQ ID NO: 21032 - DNA, 25 bp, Artificial
  probe
  misc_feature (1)..(25): SEQ ID NO: 4337; WAN0249G8_at; Start 115; Stop 139
aaaatgatatactgtgtttatggag

SEQ ID NO: 21033 - DNA, 25 bp, Artificial
  probe
  misc_feature (1)..(25): SEQ ID NO: 4337; WAN0249G8_at; Start 117; Stop 141
aatgatatactgtgtttatggagag

SEQ ID NO: 21034 - DNA, 25 bp, Artificial
  probe
  misc_feature (1)..(25): SEQ ID NO: 4337; WAN0249G8_at; Start 209; Stop 233
cggctagcaaagttataattttata

SEQ ID NO: 21035 - DNA, 25 bp, Artificial
  probe
  misc_feature (1)..(25): SEQ ID NO: 4337; WAN0249G8_at; Start 156; Stop 180
aatgtactactctattctactagat

SEQ ID NO: 21036 - DNA, 25 bp, Artificial
  probe
  misc_feature (1)..(25): SEQ ID NO: 4754; WAN0249G9_at; Start 117; Stop 141
aattgtcatctctccataaacacag

SEQ ID NO: 21037 - DNA, 25 bp, Artificial
  probe
  misc_feature (1)..(25): SEQ ID NO: 4754; WAN0249G9_at; Start 82; Stop 106
tcattatctagtagaatagagtagt

SEQ ID NO: 21038 - DNA, 25 bp, Artificial
  probe
  misc_feature (1)..(25): SEQ ID NO: 4754; WAN0249G9_at; Start 35; Stop 59
ataaaattataactttgctagccgt

SEQ ID NO: 21039 - DNA, 25 bp, Artificial
  probe
  misc_feature (1)..(25): SEQ ID NO: 4754; WAN0249G9_at; Start 121; Stop 145
gtcatctctccataaacacagtata

SEQ ID NO: 21040 - DNA, 25 bp, Artificial
  probe
  misc_feature (1)..(25): SEQ ID NO: 4754; WAN0249G9_at; Start 100; Stop 124
gagtagtacattttataaattgtca

SEQ ID NO: 21041 - DNA, 25 bp, Artificial
  probe
  misc_feature (1)..(25): SEQ ID NO: 4754; WAN0249G9_at; Start 122; Stop 146
tcatctctccataaacacagtatat

SEQ ID NO: 21042 - DNA, 25 bp, Artificial
  probe
  misc_feature (1)..(25): SEQ ID NO: 4754; WAN0249G9_at; Start 42; Stop 66
tataactttgctagccgttgttata

SEQ ID NO: 21043 - DNA, 25 bp, Artificial
  probe
  misc_feature (1)..(25): SEQ ID NO: 4754; WAN0249G9_at; Start 108; Stop 132
cattttataaattgtcatctctcca

SEQ ID NO: 21044 - DNA, 25 bp, Artificial
  probe
  misc_feature (1)..(25): SEQ ID NO: 4754; WAN0249G9_at; Start 123; Stop 147
catctctccataaacacagtatatc

SEQ ID NO: 21045 - DNA, 25 bp, Artificial
  probe
  misc_feature (1)..(25): SEQ ID NO: 4754; WAN0249G9_at; Start 79; Stop 103
caatcattatctagtagaatagagt

SEQ ID NO: 21046 - DNA, 25 bp, Artificial
  probe
  misc_feature (1)..(25): SEQ ID NO: 4754; WAN0249G9_at; Start 119; Stop 143
ttgtcatctctccataaacacagta

SEQ ID NO: 21047 - DNA, 25 bp, Artificial
  probe
  misc_feature (1)..(25): SEQ ID NO: 4754; WAN0249G9_at; Start 71; Stop 95
gttttattcaatcattatctagtag

SEQ ID NO: 21048 - DNA, 25 bp, Artificial
  probe
  misc_feature (1)..(25): SEQ ID NO: 4754; WAN0249G9_at; Start 44; Stop 68
taactttgctagccgttgttataaa

SEQ ID NO: 21049 - DNA, 25 bp, Artificial
  probe
  misc_feature (1)..(25): SEQ ID NO: 4754; WAN0249G9_at; Start 120; Stop 144
tgtcatctctccataaacacagtat

SEQ ID NO: 21050 - DNA, 25 bp, Artificial
  probe
  misc_feature (1)..(25): SEQ ID NO: 4754; WAN0249G9_at; Start 115; Stop 139
taaattgtcatctctccataaacac

SEQ ID NO: 21051 - DNA, 25 bp, Artificial
  probe
  misc_feature (1)..(25): SEQ ID NO: 4754; WAN0249G9_at; Start 125; Stop 149
tctctccataaacacagtatatcat

SEQ ID NO: 21052 - DNA, 25 bp, Artificial
  probe
  misc_feature (1)..(25): SEQ ID NO: 4754; WAN0249G9_at; Start 39; Stop 63
aattataactttgctagccgttgtt

SEQ ID NO: 21053 - DNA, 25 bp, Artificial
  probe
  misc_feature (1)..(25): SEQ ID NO: 4754; WAN0249G9_at; Start 78; Stop 102
tcaatcattatctagtagaatagag

SEQ ID NO: 21054 - DNA, 25 bp, Artificial
  probe
  misc_feature (1)..(25): SEQ ID NO: 4754; WAN0249G9_at; Start 89; Stop 113
ctagtagaatagagtagtacatttt

SEQ ID NO: 21055 - DNA, 25 bp, Artificial
  probe
  misc_feature (1)..(25): SEQ ID NO: 4754; WAN0249G9_at; Start 34; Stop 58
tataaaattataactttgctagccg

SEQ ID NO: 21056 - DNA, 25 bp, Artificial
  probe
  misc_feature (1)..(25): SEQ ID NO: 4754; WAN0249G9_at; Start 68; Stop 92
aaagttttattcaatcattatctag

SEQ ID NO: 21057 - DNA, 25 bp, Artificial
  probe
  misc_feature (1)..(25): SEQ ID NO: 4754; WAN0249G9_at; Start 131; Stop 155
cataaacacagtatatcatttttaa

SEQ ID NO: 21058 - DNA, 25 bp, Artificial
  probe
  misc_feature (1)..(25): SEQ ID NO: 4754; WAN0249G9_at; Start 127; Stop 151
tctccataaacacagtatatcattt

SEQ ID NO: 21059 - DNA, 25 bp, Artificial
  probe
  misc_feature (1)..(25): SEQ ID NO: 4754; WAN0249G9_at; Start 38; Stop 62
aaattataactttgctagccgttgt

SEQ ID NO: 21060 - DNA, 25 bp, Artificial
  probe
  misc_feature (1)..(25): SEQ ID NO: 4754; WAN0249G9_at; Start 86; Stop 110
tatctagtagaatagagtagtacat

SEQ ID NO: 21061 - DNA, 25 bp, Artificial
  probe
  misc_feature (1)..(25): SEQ ID NO: 4754; WAN0249G9_at; Start 83; Stop 107
cattatctagtagaatagagtagta

SEQ ID NO: 21062 - DNA, 25 bp, Artificial
  probe
  misc_feature (1)..(25): SEQ ID NO: 4754; WAN0249G9_at; Start 118; Stop 142
attgtcatctctccataaacacagt

SEQ ID NO: 21063 - DNA, 25 bp, Artificial
  probe
  misc_feature (1)..(25): SEQ ID NO: 4754; WAN0249G9_at; Start 37; Stop 61
aaaattataactttgctagccgttg

SEQ ID NO: 21064 - DNA, 25 bp, Artificial
  probe
  misc_feature (1)..(25): SEQ ID NO: 4754; WAN0249G9_at; Start 8; Stop 32
tccttacatatttattttctaatag

SEQ ID NO: 21065 - DNA, 25 bp, Artificial
  probe
  misc_feature (1)..(25): SEQ ID NO: 4754; WAN0249G9_at; Start 128; Stop 152
ctccataaacacagtatatcatttt

SEQ ID NO: 21066 - DNA, 25 bp, Artificial
  probe
  misc_feature (1)..(25): SEQ ID NO: 4754; WAN0249G9_at; Start 88; Stop 112
tctagtagaatagagtagtacattt

SEQ ID NO: 21067 - DNA, 25 bp, Artificial
  probe
  misc_feature (1)..(25): SEQ ID NO: 4754; WAN0249G9_at; Start 113; Stop 137
tataaattgtcatctctccataaac

SEQ ID NO: 21068 - DNA, 25 bp, Artificial
  probe
  misc_feature (1)..(25): SEQ ID NO: 4754; WAN0249G9_at; Start 40; Stop 64
attataactttgctagccgttgtta

SEQ ID NO: 21069 - DNA, 25 bp, Artificial
  probe
  misc_feature (1)..(25): SEQ ID NO: 4754; WAN0249G9_at; Start 43; Stop 67
ataactttgctagccgttgttataa

SEQ ID NO: 21070 - DNA, 25 bp, Artificial
  probe
  misc_feature (1)..(25): SEQ ID NO: 4852; WAN0249GA_at; Start 166; Stop 190
ggtactcacttacatattctaactt

SEQ ID NO: 21071 - DNA, 25 bp, Artificial
  probe
  misc_feature (1)..(25): SEQ ID NO: 4852; WAN0249GA_at; Start 149; Stop 173
gatgtcttggtatatctggtactca

SEQ ID NO: 21072 - DNA, 25 bp, Artificial
  probe
  misc_feature (1)..(25): SEQ ID NO: 4852; WAN0249GA_at; Start 347; Stop 371
aaaatgtagtcattcgaatgatttc

SEQ ID NO: 21073 - DNA, 25 bp, Artificial
  probe
  misc_feature (1)..(25): SEQ ID NO: 4852; WAN0249GA_at; Start 66; Stop 90
ccaattttaagaatggatatataag

SEQ ID NO: 21074 - DNA, 25 bp, Artificial
  probe
  misc_feature (1)..(25): SEQ ID NO: 4852; WAN0249GA_at; Start 310; Stop 334
gtccgaatccgtattcttatttcaa

SEQ ID NO: 21075 - DNA, 25 bp, Artificial
  probe
  misc_feature (1)..(25): SEQ ID NO: 4852; WAN0249GA_at; Start 93; Stop 117
tattcagaaatctagttggtcaact

SEQ ID NO: 21076 - DNA, 25 bp, Artificial
  probe
  misc_feature (1)..(25): SEQ ID NO: 4852; WAN0249GA_at; Start 143; Stop 167
ggtgacgatgtcttggtatatctgg

SEQ ID NO: 21077 - DNA, 25 bp, Artificial
  probe
  misc_feature (1)..(25): SEQ ID NO: 4852; WAN0249GA_at; Start 394; Stop 418
caaaaagaaaaaacgctgatcaagc

SEQ ID NO: 21078 - DNA, 25 bp, Artificial
  probe
  misc_feature (1)..(25): SEQ ID NO: 4852; WAN0249GA_at; Start 408; Stop 432
gctgatcaagcgtttttcttctgta

SEQ ID NO: 21079 - DNA, 25 bp, Artificial
  probe
  misc_feature (1)..(25): SEQ ID NO: 4852; WAN0249GA_at; Start 426; Stop 450
ttctgtattgattcgtattgaatgc

SEQ ID NO: 21080 - DNA, 25 bp, Artificial
  probe
  misc_feature (1)..(25): SEQ ID NO: 4852; WAN0249GA_at; Start 133; Stop 157
taccttagatggtgacgatgtcttg

SEQ ID NO: 21081 - DNA, 25 bp, Artificial
  probe
  misc_feature (1)..(25): SEQ ID NO: 4852; WAN0249GA_at; Start 344; Stop 368
tgaaaaatgtagtcattcgaatgat

SEQ ID NO: 21082 - DNA, 25 bp, Artificial
  probe
  misc_feature (1)..(25): SEQ ID NO: 4852; WAN0249GA_at; Start 112; Stop 136
tcaacttttgtattttgaatatacc

SEQ ID NO: 21083 - DNA, 25 bp, Artificial
  probe
  misc_feature (1)..(25): SEQ ID NO: 4852; WAN0249GA_at; Start 90; Stop 114
ggatattcagaaatctagttggtca

SEQ ID NO: 21084 - DNA, 25 bp, Artificial
  probe
  misc_feature (1)..(25): SEQ ID NO: 4852; WAN0249GA_at; Start 125; Stop 149
tttgaatataccttagatggtgacg

SEQ ID NO: 21085 - DNA, 25 bp, Artificial
  probe
  misc_feature (1)..(25): SEQ ID NO: 4852; WAN0249GA_at; Start 221; Stop 245
aatttgctacaaatagtgtagaggc

SEQ ID NO: 21086 - DNA, 25 bp, Artificial
  probe
  misc_feature (1)..(25): SEQ ID NO: 4852; WAN0249GA_at; Start 337; Stop 361
aaggtagtgaaaaatgtagtcattc

SEQ ID NO: 21087 - DNA, 25 bp, Artificial
  probe
  misc_feature (1)..(25): SEQ ID NO: 4852; WAN0249GA_at; Start 153; Stop 177
tcttggtatatctggtactcactta

SEQ ID NO: 21088 - DNA, 25 bp, Artificial
  probe
  misc_feature (1)..(25): SEQ ID NO: 4852; WAN0249GA_at; Start 128; Stop 152
gaatataccttagatggtgacgatg

SEQ ID NO: 21089 - DNA, 25 bp, Artificial
  probe
  misc_feature (1)..(25): SEQ ID NO: 4852; WAN0249GA_at; Start 5; Stop 29
tacatatgtaggaagattttttgga

SEQ ID NO: 21090 - DNA, 25 bp, Artificial
  probe
  misc_feature (1)..(25): SEQ ID NO: 4852; WAN0249GA_at; Start 411; Stop 435
gatcaagcgtttttcttctgtattg

SEQ ID NO: 21091 - DNA, 25 bp, Artificial
  probe
  misc_feature (1)..(25): SEQ ID NO: 4852; WAN0249GA_at; Start 416; Stop 440
agcgtttttcttctgtattgattcg

SEQ ID NO: 21092 - DNA, 25 bp, Artificial
  probe
  misc_feature (1)..(25): SEQ ID NO: 4852; WAN0249GA_at; Start 206; Stop 230
caactgtagttggtgaatttgctac

SEQ ID NO: 21093 - DNA, 25 bp, Artificial
  probe
  misc_feature (1)..(25): SEQ ID NO: 4852; WAN0249GA_at; Start 234; Stop 258
tagtgtagaggcgttatttgaaaaa

SEQ ID NO: 21094 - DNA, 25 bp, Artificial
  probe
  misc_feature (1)..(25): SEQ ID NO: 4852; WAN0249GA_at; Start 157; Stop 181
ggtatatctggtactcacttacata

SEQ ID NO: 21095 - DNA, 25 bp, Artificial
  probe
  misc_feature (1)..(25): SEQ ID NO: 4852; WAN0249GA_at; Start 131; Stop 155
tataccttagatggtgacgatgtct

SEQ ID NO: 21096 - DNA, 25 bp, Artificial
  probe
  misc_feature (1)..(25): SEQ ID NO: 4852; WAN0249GA_at; Start 241; Stop 265
gaggcgttatttgaaaaatatacaa

SEQ ID NO: 21097 - DNA, 25 bp, Artificial
  probe
  misc_feature (1)..(25): SEQ ID NO: 4852; WAN0249GA_at; Start 99; Stop 123
gaaatctagttggtcaacttttgta

SEQ ID NO: 21098 - DNA, 25 bp, Artificial
  probe
  misc_feature (1)..(25): SEQ ID NO: 4852; WAN0249GA_at; Start 12; Stop 36
gtaggaagattttttggattctcaa

SEQ ID NO: 21099 - DNA, 25 bp, Artificial
  probe
  misc_feature (1)..(25): SEQ ID NO: 4852; WAN0249GA_at; Start 18; Stop 42
agattttttggattctcaaaactag

SEQ ID NO: 21100 - DNA, 25 bp, Artificial
  probe
  misc_feature (1)..(25): SEQ ID NO: 4852; WAN0249GA_at; Start 136; Stop 160
cttagatggtgacgatgtcttggta

SEQ ID NO: 21101 - DNA, 25 bp, Artificial
  probe
  misc_feature (1)..(25): SEQ ID NO: 4852; WAN0249GA_at; Start 226; Stop 250
gctacaaatagtgtagaggcgttat

SEQ ID NO: 21102 - DNA, 25 bp, Artificial
  probe
  misc_feature (1)..(25): SEQ ID NO: 4852; WAN0249GA_at; Start 80; Stop 104
ggatatataaggatattcagaaatc

SEQ ID NO: 21103 - DNA, 25 bp, Artificial
  probe
  misc_feature (1)..(25): SEQ ID NO: 4852; WAN0249GA_at; Start 146; Stop 170
gacgatgtcttggtatatctggtac

SEQ ID NO: 21104 - DNA, 25 bp, Artificial
  probe
  misc_feature (1)..(25): SEQ ID NO: 3676; WAN0249GB_at; Start 302; Stop 326
cgtcaccatctaaggtatattcaaa

SEQ ID NO: 21105 - DNA, 25 bp, Artificial
  probe
  misc_feature (1)..(25): SEQ ID NO: 3676; WAN0249GB_at; Start 276; Stop 300
agtgagtaccagatataccaagaca

SEQ ID NO: 21106 - DNA, 25 bp, Artificial
  probe
  misc_feature (1)..(25): SEQ ID NO: 3676; WAN0249GB_at; Start 261; Stop 285
aagttagaatatgtaagtgagtacc

SEQ ID NO: 21107 - DNA, 25 bp, Artificial
  probe
  misc_feature (1)..(25): SEQ ID NO: 3676; WAN0249GB_at; Start 270; Stop 294
tatgtaagtgagtaccagatatacc

SEQ ID NO: 21108 - DNA, 25 bp, Artificial
  probe
  misc_feature (1)..(25): SEQ ID NO: 3676; WAN0249GB_at; Start 282; Stop 306
taccagatataccaagacatcgtca

SEQ ID NO: 21109 - DNA, 25 bp, Artificial
  probe
  misc_feature (1)..(25): SEQ ID NO: 3676; WAN0249GB_at; Start 265; Stop 289
tagaatatgtaagtgagtaccagat

SEQ ID NO: 21110 - DNA, 25 bp, Artificial
  probe
  misc_feature (1)..(25): SEQ ID NO: 3676; WAN0249GB_at; Start 317; Stop 341
tatattcaaaatacaaaagttgacc

SEQ ID NO: 21111 - DNA, 25 bp, Artificial
  probe
  misc_feature (1)..(25): SEQ ID NO: 3676; WAN0249GB_at; Start 285; Stop 309
cagatataccaagacatcgtcacca

SEQ ID NO: 21112 - DNA, 25 bp, Artificial
  probe
  misc_feature (1)..(25): SEQ ID NO: 3676; WAN0249GB_at; Start 90; Stop 114
gaatgactacatttttcactacctt

SEQ ID NO: 21113 - DNA, 25 bp, Artificial
  probe
  misc_feature (1)..(25): SEQ ID NO: 3676; WAN0249GB_at; Start 287; Stop 311
gatataccaagacatcgtcaccatc

SEQ ID NO: 21114 - DNA, 25 bp, Artificial
  probe
  misc_feature (1)..(25): SEQ ID NO: 3676; WAN0249GB_at; Start 1; Stop 25
gcattcaatacgaatcaatacagaa

SEQ ID NO: 21115 - DNA, 25 bp, Artificial
  probe
  misc_feature (1)..(25): SEQ ID NO: 3676; WAN0249GB_at; Start 297; Stop 321
gacatcgtcaccatctaaggtatat

SEQ ID NO: 21116 - DNA, 25 bp, Artificial
  probe
  misc_feature (1)..(25): SEQ ID NO: 3676; WAN0249GB_at; Start 351; Stop 375
tctgaatatccttatatatccattc

SEQ ID NO: 21117 - DNA, 25 bp, Artificial
  probe
  misc_feature (1)..(25): SEQ ID NO: 3676; WAN0249GB_at; Start 11; Stop 35
cgaatcaatacagaagaaaaacgct

SEQ ID NO: 21118 - DNA, 25 bp, Artificial
  probe
  misc_feature (1)..(25): SEQ ID NO: 3676; WAN0249GB_at; Start 274; Stop 298
taagtgagtaccagatataccaaga

SEQ ID NO: 21119 - DNA, 25 bp, Artificial
  probe
  misc_feature (1)..(25): SEQ ID NO: 3676; WAN0249GB_at; Start 117; Stop 141
ttgaaataagaatacggattcggac

SEQ ID NO: 21120 - DNA, 25 bp, Artificial
  probe
  misc_feature (1)..(25): SEQ ID NO: 3676; WAN0249GB_at; Start 415; Stop 439
ttgagaatccaaaaaatcttcctac

SEQ ID NO: 21121 - DNA, 25 bp, Artificial
  probe
  misc_feature (1)..(25): SEQ ID NO: 3676; WAN0249GB_at; Start 307; Stop 331
ccatctaaggtatattcaaaataca

SEQ ID NO: 21122 - DNA, 25 bp, Artificial
  probe
  misc_feature (1)..(25): SEQ ID NO: 3676; WAN0249GB_at; Start 191; Stop 215
tatttttcaaataacgcctctacac

SEQ ID NO: 21123 - DNA, 25 bp, Artificial
  probe
  misc_feature (1)..(25): SEQ ID NO: 3676; WAN0249GB_at; Start 291; Stop 315
taccaagacatcgtcaccatctaag

SEQ ID NO: 21124 - DNA, 25 bp, Artificial
  probe
  misc_feature (1)..(25): SEQ ID NO: 3676; WAN0249GB_at; Start 33; Stop 57
gcttgatcagcgttttttctttttg

SEQ ID NO: 21125 - DNA, 25 bp, Artificial
  probe
  misc_feature (1)..(25): SEQ ID NO: 3676; WAN0249GB_at; Start 202; Stop 226
taacgcctctacactatttgtagca

SEQ ID NO: 21126 - DNA, 25 bp, Artificial
  probe
  misc_feature (1)..(25): SEQ ID NO: 3676; WAN0249GB_at; Start 424; Stop 448
caaaaaatcttcctacatatgtaag

SEQ ID NO: 21127 - DNA, 25 bp, Artificial
  probe
  misc_feature (1)..(25): SEQ ID NO: 3676; WAN0249GB_at; Start 360; Stop 384
ccttatatatccattcttaaaattg

SEQ ID NO: 21128 - DNA, 25 bp, Artificial
  probe
  misc_feature (1)..(25): SEQ ID NO: 3676; WAN0249GB_at; Start 323; Stop 347
caaaatacaaaagttgaccaactag

SEQ ID NO: 21129 - DNA, 25 bp, Artificial
  probe
  misc_feature (1)..(25): SEQ ID NO: 3676; WAN0249GB_at; Start 338; Stop 362
gaccaactagatttctgaatatcct

SEQ ID NO: 21130 - DNA, 25 bp, Artificial
  probe
  misc_feature (1)..(25): SEQ ID NO: 3676; WAN0249GB_at; Start 23; Stop 47
gaagaaaaacgcttgatcagcgttt

SEQ ID NO: 21131 - DNA, 25 bp, Artificial
  probe
  misc_feature (1)..(25): SEQ ID NO: 3676; WAN0249GB_at; Start 211; Stop 235
tacactatttgtagcaaattcacca

SEQ ID NO: 21132 - DNA, 25 bp, Artificial
  probe
  misc_feature (1)..(25): SEQ ID NO: 3676; WAN0249GB_at; Start 332; Stop 356
aaagttgaccaactagatttctgaa

SEQ ID NO: 21133 - DNA, 25 bp, Artificial
  probe
  misc_feature (1)..(25): SEQ ID NO: 3676; WAN0249GB_at; Start 193; Stop 217
tttttcaaataacgcctctacacta

SEQ ID NO: 21134 - DNA, 25 bp, Artificial
  probe
  misc_feature (1)..(25): SEQ ID NO: 3676; WAN0249GB_at; Start 294; Stop 318
caagacatcgtcaccatctaaggta

SEQ ID NO: 21135 - DNA, 25 bp, Artificial
  probe
  misc_feature (1)..(25): SEQ ID NO: 3676; WAN0249GB_at; Start 221; Stop 245
gtagcaaattcaccaactacagttg

SEQ ID NO: 21136 - DNA, 25 bp, Artificial
  probe
  misc_feature (1)..(25): SEQ ID NO: 3676; WAN0249GB_at; Start 279; Stop 303
gagtaccagatataccaagacatcg

SEQ ID NO: 21137 - DNA, 25 bp, Artificial
  probe
  misc_feature (1)..(25): SEQ ID NO: 3676; WAN0249GB_at; Start 80; Stop 104
gaaatcattcgaatgactacatttt

SEQ ID NO: 21138 - DNA, 25 bp, Artificial
  probe
  misc_feature (1)..(25): SEQ ID NO: 216; WAN0249GC_at; Start 115; Stop 139
gtgagattatattgtgctcaaatac

SEQ ID NO: 21139 - DNA, 25 bp, Artificial
  probe
  misc_feature (1)..(25): SEQ ID NO: 216; WAN0249GC_at; Start 119; Stop 143
gattatattgtgctcaaatactctt

SEQ ID NO: 21140 - DNA, 25 bp, Artificial
  probe
  misc_feature (1)..(25): SEQ ID NO: 216; WAN0249GC_at; Start 167; Stop 191
taattgtagttagaaaggaagagaa

SEQ ID NO: 21141 - DNA, 25 bp, Artificial
  probe
  misc_feature (1)..(25): SEQ ID NO: 216; WAN0249GC_at; Start 74; Stop 98
taatcactaaaaactttcagcccaa

SEQ ID NO: 21142 - DNA, 25 bp, Artificial
  probe
  misc_feature (1)..(25): SEQ ID NO: 216; WAN0249GC_at; Start 114; Stop 138
ggtgagattatattgtgctcaaata

SEQ ID NO: 21143 - DNA, 25 bp, Artificial
  probe
  misc_feature (1)..(25): SEQ ID NO: 216; WAN0249GC_at; Start 77; Stop 101
tcactaaaaactttcagcccaataa

SEQ ID NO: 21144 - DNA, 25 bp, Artificial
  probe
  misc_feature (1)..(25): SEQ ID NO: 216; WAN0249GC_at; Start 111; Stop 135
aaaggtgagattatattgtgctcaa

SEQ ID NO: 21145 - DNA, 25 bp, Artificial
  probe
  misc_feature (1)..(25): SEQ ID NO: 216; WAN0249GC_at; Start 76; Stop 100
atcactaaaaactttcagcccaata

SEQ ID NO: 21146 - DNA, 25 bp, Artificial
  probe
  misc_feature (1)..(25): SEQ ID NO: 216; WAN0249GC_at; Start 112; Stop 136
aaggtgagattatattgtgctcaaa

SEQ ID NO: 21147 - DNA, 25 bp, Artificial
  probe
  misc_feature (1)..(25): SEQ ID NO: 216; WAN0249GC_at; Start 78; Stop 102
cactaaaaactttcagcccaataat

SEQ ID NO: 21148 - DNA, 25 bp, Artificial
  probe
  misc_feature (1)..(25): SEQ ID NO: 216; WAN0249GC_at; Start 118; Stop 142
agattatattgtgctcaaatactct

SEQ ID NO: 21149 - DNA, 25 bp, Artificial
  probe
  misc_feature (1)..(25): SEQ ID NO: 216; WAN0249GC_at; Start 107; Stop 131
tttaaaaggtgagattatattgtgc

SEQ ID NO: 21150 - DNA, 25 bp, Artificial
  probe
  misc_feature (1)..(25): SEQ ID NO: 216; WAN0249GC_at; Start 73; Stop 97
ataatcactaaaaactttcagccca

SEQ ID NO: 21151 - DNA, 25 bp, Artificial
  probe
  misc_feature (1)..(25): SEQ ID NO: 216; WAN0249GC_at; Start 161; Stop 185
acactataattgtagttagaaagga

SEQ ID NO: 21152 - DNA, 25 bp, Artificial
  probe
  misc_feature (1)..(25): SEQ ID NO: 216; WAN0249GC_at; Start 117; Stop 141
gagattatattgtgctcaaatactc

SEQ ID NO: 21153 - DNA, 25 bp, Artificial
  probe
  misc_feature (1)..(25): SEQ ID NO: 216; WAN0249GC_at; Start 75; Stop 99
aatcactaaaaactttcagcccaat

SEQ ID NO: 21154 - DNA, 25 bp, Artificial
  probe
  misc_feature (1)..(25): SEQ ID NO: 216; WAN0249GC_at; Start 116; Stop 140
tgagattatattgtgctcaaatact

SEQ ID NO: 21155 - DNA, 25 bp, Artificial
  probe
  misc_feature (1)..(25): SEQ ID NO: 216; WAN0249GC_at; Start 17; Stop 41
tatttgatatctaaatgatatcact

SEQ ID NO: 21156 - DNA, 25 bp, Artificial
  probe
  misc_feature (1)..(25): SEQ ID NO: 216; WAN0249GC_at; Start 122; Stop 146
tatattgtgctcaaatactctttta

SEQ ID NO: 21157 - DNA, 25 bp, Artificial
  probe
  misc_feature (1)..(25): SEQ ID NO: 216; WAN0249GC_at; Start 162; Stop 186
cactataattgtagttagaaaggaa

SEQ ID NO: 21158 - DNA, 25 bp, Artificial
  probe
  misc_feature (1)..(25): SEQ ID NO: 216; WAN0249GC_at; Start 163; Stop 187
actataattgtagttagaaaggaag

SEQ ID NO: 21159 - DNA, 25 bp, Artificial
  probe
  misc_feature (1)..(25): SEQ ID NO: 216; WAN0249GC_at; Start 113; Stop 137
aggtgagattatattgtgctcaaat

SEQ ID NO: 21160 - DNA, 25 bp, Artificial
  probe
  misc_feature (1)..(25): SEQ ID NO: 216; WAN0249GC_at; Start 125; Stop 149
attgtgctcaaatactcttttattc

SEQ ID NO: 21161 - DNA, 25 bp, Artificial
  probe
  misc_feature (1)..(25): SEQ ID NO: 216; WAN0249GC_at; Start 109; Stop 133
taaaaggtgagattatattgtgctc

SEQ ID NO: 21162 - DNA, 25 bp, Artificial
  probe
  misc_feature (1)..(25): SEQ ID NO: 216; WAN0249GC_at; Start 56; Stop 80
caatagaaagttgaaaaataatcac

SEQ ID NO: 21163 - DNA, 25 bp, Artificial
  probe
  misc_feature (1)..(25): SEQ ID NO: 216; WAN0249GC_at; Start 104; Stop 128
tcttttaaaaggtgagattatattg

SEQ ID NO: 21164 - DNA, 25 bp, Artificial
  probe
  misc_feature (1)..(25): SEQ ID NO: 216; WAN0249GC_at; Start 130; Stop 154
gctcaaatactcttttattcttata

SEQ ID NO: 21165 - DNA, 25 bp, Artificial
  probe
  misc_feature (1)..(25): SEQ ID NO: 216; WAN0249GC_at; Start 160; Stop 184
tacactataattgtagttagaaagg

SEQ ID NO: 21166 - DNA, 25 bp, Artificial
  probe
  misc_feature (1)..(25): SEQ ID NO: 216; WAN0249GC_at; Start 165; Stop 189
tataattgtagttagaaaggaagag

SEQ ID NO: 21167 - DNA, 25 bp, Artificial
  probe
  misc_feature (1)..(25): SEQ ID NO: 216; WAN0249GC_at; Start 110; Stop 134
aaaaggtgagattatattgtgctca

SEQ ID NO: 21168 - DNA, 25 bp, Artificial
  probe
  misc_feature (1)..(25): SEQ ID NO: 216; WAN0249GC_at; Start 59; Stop 83
tagaaagttgaaaaataatcactaa

SEQ ID NO: 21169 - DNA, 25 bp, Artificial
  probe
  misc_feature (1)..(25): SEQ ID NO: 216; WAN0249GC_at; Start 124; Stop 148
tattgtgctcaaatactcttttatt

SEQ ID NO: 21170 - DNA, 25 bp, Artificial
  probe
  misc_feature (1)..(25): SEQ ID NO: 216; WAN0249GC_at; Start 127; Stop 151
tgtgctcaaatactcttttattctt

SEQ ID NO: 21171 - DNA, 25 bp, Artificial
  probe
  misc_feature (1)..(25): SEQ ID NO: 216; WAN0249GC_at; Start 164; Stop 188
ctataattgtagttagaaaggaaga

SEQ ID NO: 21172 - DNA, 25 bp, Artificial
  probe
  misc_feature (1)..(25): SEQ ID NO: 4851; WAN0249GD_at; Start 43; Stop 67
gaataaaagagtatttgagcacaat

SEQ ID NO: 21173 - DNA, 25 bp, Artificial
  probe
  misc_feature (1)..(25): SEQ ID NO: 4851; WAN0249GD_at; Start 7; Stop 31
tcctttctaactacaattatagtgt

SEQ ID NO: 21174 - DNA, 25 bp, Artificial
  probe
  misc_feature (1)..(25): SEQ ID NO: 4851; WAN0249GD_at; Start 38; Stop 62
tataagaataaaagagtatttgagc

SEQ ID NO: 21175 - DNA, 25 bp, Artificial
  probe
  misc_feature (1)..(25): SEQ ID NO: 4851; WAN0249GD_at; Start 41; Stop 65
aagaataaaagagtatttgagcaca

SEQ ID NO: 21176 - DNA, 25 bp, Artificial
  probe
  misc_feature (1)..(25): SEQ ID NO: 4851; WAN0249GD_at; Start 8; Stop 32
cctttctaactacaattatagtgta

SEQ ID NO: 21177 - DNA, 25 bp, Artificial
  probe
  misc_feature (1)..(25): SEQ ID NO: 4851; WAN0249GD_at; Start 58; Stop 82
tgagcacaatataatctcacctttt

SEQ ID NO: 21178 - DNA, 25 bp, Artificial
  probe
  misc_feature (1)..(25): SEQ ID NO: 4851; WAN0249GD_at; Start 4; Stop 28
tcttcctttctaactacaattatag

SEQ ID NO: 21179 - DNA, 25 bp, Artificial
  probe
  misc_feature (1)..(25): SEQ ID NO: 4851; WAN0249GD_at; Start 59; Stop 83
gagcacaatataatctcacctttta

SEQ ID NO: 21180 - DNA, 25 bp, Artificial
  probe
  misc_feature (1)..(25): SEQ ID NO: 4851; WAN0249GD_at; Start 6; Stop 30
ttcctttctaactacaattatagtg

SEQ ID NO: 21181 - DNA, 25 bp, Artificial
  probe
  misc_feature (1)..(25): SEQ ID NO: 4851; WAN0249GD_at; Start 114; Stop 138
gattatttttcaactttctattgac

SEQ ID NO: 21182 - DNA, 25 bp, Artificial
  probe
  misc_feature (1)..(25): SEQ ID NO: 4851; WAN0249GD_at; Start 40; Stop 64
taagaataaaagagtatttgagcac

SEQ ID NO: 21183 - DNA, 25 bp, Artificial
  probe
  misc_feature (1)..(25): SEQ ID NO: 4851; WAN0249GD_at; Start 12; Stop 36
tctaactacaattatagtgtaaaaa

SEQ ID NO: 21184 - DNA, 25 bp, Artificial
  probe
  misc_feature (1)..(25): SEQ ID NO: 4851; WAN0249GD_at; Start 55; Stop 79
atttgagcacaatataatctcacct

SEQ ID NO: 21185 - DNA, 25 bp, Artificial
  probe
  misc_feature (1)..(25): SEQ ID NO: 4851; WAN0249GD_at; Start 54; Stop 78
tatttgagcacaatataatctcacc

SEQ ID NO: 21186 - DNA, 25 bp, Artificial
  probe
  misc_feature (1)..(25): SEQ ID NO: 4851; WAN0249GD_at; Start 1; Stop 25
ttctcttcctttctaactacaatta

SEQ ID NO: 21187 - DNA, 25 bp, Artificial
  probe
  misc_feature (1)..(25): SEQ ID NO: 4851; WAN0249GD_at; Start 49; Stop 73
aagagtatttgagcacaatataatc

SEQ ID NO: 21188 - DNA, 25 bp, Artificial
  probe
  misc_feature (1)..(25): SEQ ID NO: 4851; WAN0249GD_at; Start 90; Stop 114
attattgggctgaaagtttttagtg

SEQ ID NO: 21189 - DNA, 25 bp, Artificial
  probe
  misc_feature (1)..(25): SEQ ID NO: 4851; WAN0249GD_at; Start 53; Stop 77
gtatttgagcacaatataatctcac

SEQ ID NO: 21190 - DNA, 25 bp, Artificial
  probe
  misc_feature (1)..(25): SEQ ID NO: 4851; WAN0249GD_at; Start 52; Stop 76
agtatttgagcacaatataatctca

SEQ ID NO: 21191 - DNA, 25 bp, Artificial
  probe
  misc_feature (1)..(25): SEQ ID NO: 4851; WAN0249GD_at; Start 64; Stop 88
caatataatctcaccttttaaaaga

SEQ ID NO: 21192 - DNA, 25 bp, Artificial
  probe
  misc_feature (1)..(25): SEQ ID NO: 4851; WAN0249GD_at; Start 91; Stop 115
ttattgggctgaaagtttttagtga

SEQ ID NO: 21193 - DNA, 25 bp, Artificial
  probe
  misc_feature (1)..(25): SEQ ID NO: 4851; WAN0249GD_at; Start 47; Stop 71
aaaagagtatttgagcacaatataa

SEQ ID NO: 21194 - DNA, 25 bp, Artificial
  probe
  misc_feature (1)..(25): SEQ ID NO: 4851; WAN0249GD_at; Start 149; Stop 173
aaagtgatatcatttagatatcaaa

SEQ ID NO: 21195 - DNA, 25 bp, Artificial
  probe
  misc_feature (1)..(25): SEQ ID NO: 4851; WAN0249GD_at; Start 56; Stop 80
tttgagcacaatataatctcacctt

SEQ ID NO: 21196 - DNA, 25 bp, Artificial
  probe
  misc_feature (1)..(25): SEQ ID NO: 4851; WAN0249GD_at; Start 9; Stop 33
ctttctaactacaattatagtgtaa

SEQ ID NO: 21197 - DNA, 25 bp, Artificial
  probe
  misc_feature (1)..(25): SEQ ID NO: 4851; WAN0249GD_at; Start 95; Stop 119
tgggctgaaagtttttagtgattat

SEQ ID NO: 21198 - DNA, 25 bp, Artificial
  probe
  misc_feature (1)..(25): SEQ ID NO: 4851; WAN0249GD_at; Start 57; Stop 81
ttgagcacaatataatctcaccttt

SEQ ID NO: 21199 - DNA, 25 bp, Artificial
  probe
  misc_feature (1)..(25): SEQ ID NO: 4851; WAN0249GD_at; Start 44; Stop 68
aataaaagagtatttgagcacaata

SEQ ID NO: 21200 - DNA, 25 bp, Artificial
  probe
  misc_feature (1)..(25): SEQ ID NO: 4851; WAN0249GD_at; Start 51; Stop 75
gagtatttgagcacaatataatctc

SEQ ID NO: 21201 - DNA, 25 bp, Artificial
  probe
  misc_feature (1)..(25): SEQ ID NO: 4851; WAN0249GD_at; Start 92; Stop 116
tattgggctgaaagtttttagtgat

SEQ ID NO: 21202 - DNA, 25 bp, Artificial
  probe
  misc_feature (1)..(25): SEQ ID NO: 4851; WAN0249GD_at; Start 42; Stop 66
agaataaaagagtatttgagcacaa

SEQ ID NO: 21203 - DNA, 25 bp, Artificial
  probe
  misc_feature (1)..(25): SEQ ID NO: 4851; WAN0249GD_at; Start 20; Stop 44
caattatagtgtaaaaattataaga

SEQ ID NO: 21204 - DNA, 25 bp, Artificial
  probe
  misc_feature (1)..(25): SEQ ID NO: 4851; WAN0249GD_at; Start 61; Stop 85
gcacaatataatctcaccttttaaa

SEQ ID NO: 21205 - DNA, 25 bp, Artificial
  probe
  misc_feature (1)..(25): SEQ ID NO: 4851; WAN0249GD_at; Start 46; Stop 70
taaaagagtatttgagcacaatata

SEQ ID NO: 21206 - DNA, 25 bp, Artificial
  probe
  misc_feature (1)..(25): SEQ ID NO: 4520; WAN0249GE_at; Start 8; Stop 32
ctccttgatttttcttacgcccata

SEQ ID NO: 21207 - DNA, 25 bp, Artificial
  probe
  misc_feature (1)..(25): SEQ ID NO: 4520; WAN0249GE_at; Start 34; Stop 58
gggcaccctagcttgaagctagggg

SEQ ID NO: 21208 - DNA, 25 bp, Artificial
  probe
  misc_feature (1)..(25): SEQ ID NO: 4520; WAN0249GE_at; Start 13; Stop 37
tgatttttcttacgcccataagggc

SEQ ID NO: 21209 - DNA, 25 bp, Artificial
  probe
  misc_feature (1)..(25): SEQ ID NO: 4520; WAN0249GE_at; Start 26; Stop 50
gcccataagggcaccctagcttgaa

SEQ ID NO: 21210 - DNA, 25 bp, Artificial
  probe
  misc_feature (1)..(25): SEQ ID NO: 4520; WAN0249GE_at; Start 6; Stop 30
ttctccttgatttttcttacgccca

SEQ ID NO: 21211 - DNA, 25 bp, Artificial
  probe
  misc_feature (1)..(25): SEQ ID NO: 4520; WAN0249GE_at; Start 36; Stop 60
gcaccctagcttgaagctaggggac

SEQ ID NO: 21212 - DNA, 25 bp, Artificial
  probe
  misc_feature (1)..(25): SEQ ID NO: 4520; WAN0249GE_at; Start 21; Stop 45
cttacgcccataagggcaccctagc

SEQ ID NO: 21213 - DNA, 25 bp, Artificial
  probe
  misc_feature (1)..(25): SEQ ID NO: 4520; WAN0249GE_at; Start 7; Stop 31
tctccttgatttttcttacgcccat

SEQ ID NO: 21214 - DNA, 25 bp, Artificial
  probe
  misc_feature (1)..(25): SEQ ID NO: 4520; WAN0249GE_at; Start 9; Stop 33
tccttgatttttcttacgcccataa

SEQ ID NO: 21215 - DNA, 25 bp, Artificial
  probe
  misc_feature (1)..(25): SEQ ID NO: 4520; WAN0249GE_at; Start 30; Stop 54
ataagggcaccctagcttgaagcta

SEQ ID NO: 21216 - DNA, 25 bp, Artificial
  probe
  misc_feature (1)..(25): SEQ ID NO: 4520; WAN0249GE_at; Start 41; Stop 65
ctagcttgaagctaggggactagtt

SEQ ID NO: 21217 - DNA, 25 bp, Artificial
  probe
  misc_feature (1)..(25): SEQ ID NO: 4520; WAN0249GE_at; Start 43; Stop 67
agcttgaagctaggggactagtttg

SEQ ID NO: 21218 - DNA, 25 bp, Artificial
  probe
  misc_feature (1)..(25): SEQ ID NO: 4520; WAN0249GE_at; Start 10; Stop 34
ccttgatttttcttacgcccataag

SEQ ID NO: 21219 - DNA, 25 bp, Artificial
  probe
  misc_feature (1)..(25): SEQ ID NO: 4520; WAN0249GE_at; Start 11; Stop 35
cttgatttttcttacgcccataagg

SEQ ID NO: 21220 - DNA, 25 bp, Artificial
  probe
  misc_feature (1)..(25): SEQ ID NO: 4520; WAN0249GE_at; Start 31; Stop 55
taagggcaccctagcttgaagctag

SEQ ID NO: 21221 - DNA, 25 bp, Artificial
  probe
  misc_feature (1)..(25): SEQ ID NO: 4520; WAN0249GE_at; Start 47; Stop 71
tgaagctaggggactagtttgttcc

SEQ ID NO: 21222 - DNA, 25 bp, Artificial
  probe
  misc_feature (1)..(25): SEQ ID NO: 4520; WAN0249GE_at; Start 32; Stop 56
aagggcaccctagcttgaagctagg

SEQ ID NO: 21223 - DNA, 25 bp, Artificial
  probe
  misc_feature (1)..(25): SEQ ID NO: 4520; WAN0249GE_at; Start 38; Stop 62
accctagcttgaagctaggggacta

SEQ ID NO: 21224 - DNA, 25 bp, Artificial
  probe
  misc_feature (1)..(25): SEQ ID NO: 4520; WAN0249GE_at; Start 14; Stop 38
gatttttcttacgcccataagggca

SEQ ID NO: 21225 - DNA, 25 bp, Artificial
  probe
  misc_feature (1)..(25): SEQ ID NO: 4520; WAN0249GE_at; Start 42; Stop 66
tagcttgaagctaggggactagttt

SEQ ID NO: 21226 - DNA, 25 bp, Artificial
  probe
  misc_feature (1)..(25): SEQ ID NO: 4520; WAN0249GE_at; Start 33; Stop 57
agggcaccctagcttgaagctaggg

SEQ ID NO: 21227 - DNA, 25 bp, Artificial
  probe
  misc_feature (1)..(25): SEQ ID NO: 4520; WAN0249GE_at; Start 22; Stop 46
ttacgcccataagggcaccctagct

SEQ ID NO: 21228 - DNA, 25 bp, Artificial
  probe
  misc_feature (1)..(25): SEQ ID NO: 4520; WAN0249GE_at; Start 27; Stop 51
cccataagggcaccctagcttgaag

SEQ ID NO: 21229 - DNA, 25 bp, Artificial
  probe
  misc_feature (1)..(25): SEQ ID NO: 4520; WAN0249GE_at; Start 37; Stop 61
caccctagcttgaagctaggggact

SEQ ID NO: 21230 - DNA, 25 bp, Artificial
  probe
  misc_feature (1)..(25): SEQ ID NO: 4520; WAN0249GE_at; Start 35; Stop 59
ggcaccctagcttgaagctagggga

SEQ ID NO: 21231 - DNA, 25 bp, Artificial
  probe
  misc_feature (1)..(25): SEQ ID NO: 4520; WAN0249GE_at; Start 28; Stop 52
ccataagggcaccctagcttgaagc

SEQ ID NO: 21232 - DNA, 25 bp, Artificial
  probe
  misc_feature (1)..(25): SEQ ID NO: 4520; WAN0249GE_at; Start 44; Stop 68
gcttgaagctaggggactagtttgt

SEQ ID NO: 21233 - DNA, 25 bp, Artificial
  probe
  misc_feature (1)..(25): SEQ ID NO: 4520; WAN0249GE_at; Start 39; Stop 63
ccctagcttgaagctaggggactag

SEQ ID NO: 21234 - DNA, 25 bp, Artificial
  probe
  misc_feature (1)..(25): SEQ ID NO: 4520; WAN0249GE_at; Start 29; Stop 53
cataagggcaccctagcttgaagct

SEQ ID NO: 21235 - DNA, 25 bp, Artificial
  probe
  misc_feature (1)..(25): SEQ ID NO: 4520; WAN0249GE_at; Start 45; Stop 69
cttgaagctaggggactagtttgtt

SEQ ID NO: 21236 - DNA, 25 bp, Artificial
  probe
  misc_feature (1)..(25): SEQ ID NO: 4520; WAN0249GE_at; Start 40; Stop 64
cctagcttgaagctaggggactagt

SEQ ID NO: 21237 - DNA, 25 bp, Artificial
  probe
  misc_feature (1)..(25): SEQ ID NO: 4520; WAN0249GE_at; Start 20; Stop 44
tcttacgcccataagggcaccctag

SEQ ID NO: 21238 - DNA, 25 bp, Artificial
  probe
  misc_feature (1)..(25): SEQ ID NO: 4520; WAN0249GE_at; Start 19; Stop 43
ttcttacgcccataagggcacccta

SEQ ID NO: 21239 - DNA, 25 bp, Artificial
  probe
  misc_feature (1)..(25): SEQ ID NO: 4520; WAN0249GE_at; Start 46; Stop 70
ttgaagctaggggactagtttgttc

SEQ ID NO: 21240 - DNA, 25 bp, Artificial
  probe
  misc_feature (1)..(25): SEQ ID NO: 5951; WAN0249GF_at; Start 22; Stop 46
cctagcttcaagctagggtgccctt

SEQ ID NO: 21241 - DNA, 25 bp, Artificial
  probe
  misc_feature (1)..(25): SEQ ID NO: 5951; WAN0249GF_at; Start 31; Stop 55
aagctagggtgcccttatgggcgta

SEQ ID NO: 21242 - DNA, 25 bp, Artificial
  probe
  misc_feature (1)..(25): SEQ ID NO: 5951; WAN0249GF_at; Start 15; Stop 39
ctagtcccctagcttcaagctaggg

SEQ ID NO: 21243 - DNA, 25 bp, Artificial
  probe
  misc_feature (1)..(25): SEQ ID NO: 5951; WAN0249GF_at; Start 8; Stop 32
gaacaaactagtcccctagcttcaa

SEQ ID NO: 21244 - DNA, 25 bp, Artificial
  probe
  misc_feature (1)..(25): SEQ ID NO: 5951; WAN0249GF_at; Start 28; Stop 52
ttcaagctagggtgcccttatgggc

SEQ ID NO: 21245 - DNA, 25 bp, Artificial
  probe
  misc_feature (1)..(25): SEQ ID NO: 5951; WAN0249GF_at; Start 7; Stop 31
ggaacaaactagtcccctagcttca

SEQ ID NO: 21246 - DNA, 25 bp, Artificial
  probe
  misc_feature (1)..(25): SEQ ID NO: 5951; WAN0249GF_at; Start 16; Stop 40
tagtcccctagcttcaagctagggt

SEQ ID NO: 21247 - DNA, 25 bp, Artificial
  probe
  misc_feature (1)..(25): SEQ ID NO: 5951; WAN0249GF_at; Start 41; Stop 65
gcccttatgggcgtaagaaaaatca

SEQ ID NO: 21248 - DNA, 25 bp, Artificial
  probe
  misc_feature (1)..(25): SEQ ID NO: 5951; WAN0249GF_at; Start 14; Stop 38
actagtcccctagcttcaagctagg

SEQ ID NO: 21249 - DNA, 25 bp, Artificial
  probe
  misc_feature (1)..(25): SEQ ID NO: 5951; WAN0249GF_at; Start 23; Stop 47
ctagcttcaagctagggtgccctta

SEQ ID NO: 21250 - DNA, 25 bp, Artificial
  probe
  misc_feature (1)..(25): SEQ ID NO: 5951; WAN0249GF_at; Start 33; Stop 57
gctagggtgcccttatgggcgtaag

SEQ ID NO: 21251 - DNA, 25 bp, Artificial
  probe
  misc_feature (1)..(25): SEQ ID NO: 5951; WAN0249GF_at; Start 25; Stop 49
agcttcaagctagggtgcccttatg

SEQ ID NO: 21252 - DNA, 25 bp, Artificial
  probe
  misc_feature (1)..(25): SEQ ID NO: 5951; WAN0249GF_at; Start 12; Stop 36
aaactagtcccctagcttcaagcta

SEQ ID NO: 21253 - DNA, 25 bp, Artificial
  probe
  misc_feature (1)..(25): SEQ ID NO: 5951; WAN0249GF_at; Start 34; Stop 58
ctagggtgcccttatgggcgtaaga

SEQ ID NO: 21254 - DNA, 25 bp, Artificial
  probe
  misc_feature (1)..(25): SEQ ID NO: 5951; WAN0249GF_at; Start 13; Stop 37
aactagtcccctagcttcaagctag

SEQ ID NO: 21255 - DNA, 25 bp, Artificial
  probe
  misc_feature (1)..(25): SEQ ID NO: 5951; WAN0249GF_at; Start 43; Stop 67
ccttatgggcgtaagaaaaatcaag

SEQ ID NO: 21256 - DNA, 25 bp, Artificial
  probe
  misc_feature (1)..(25): SEQ ID NO: 5951; WAN0249GF_at; Start 29; Stop 53
tcaagctagggtgcccttatgggcg

SEQ ID NO: 21257 - DNA, 25 bp, Artificial
  probe
  misc_feature (1)..(25): SEQ ID NO: 5951; WAN0249GF_at; Start 18; Stop 42
gtcccctagcttcaagctagggtgc

SEQ ID NO: 21258 - DNA, 25 bp, Artificial
  probe
  misc_feature (1)..(25): SEQ ID NO: 5951; WAN0249GF_at; Start 48; Stop 72
tgggcgtaagaaaaatcaaggagaa

SEQ ID NO: 21259 - DNA, 25 bp, Artificial
  probe
  misc_feature (1)..(25): SEQ ID NO: 5951; WAN0249GF_at; Start 10; Stop 34
acaaactagtcccctagcttcaagc

SEQ ID NO: 21260 - DNA, 25 bp, Artificial
  probe
  misc_feature (1)..(25): SEQ ID NO: 5951; WAN0249GF_at; Start 32; Stop 56
agctagggtgcccttatgggcgtaa

SEQ ID NO: 21261 - DNA, 25 bp, Artificial
  probe
  misc_feature (1)..(25): SEQ ID NO: 5951; WAN0249GF_at; Start 44; Stop 68
cttatgggcgtaagaaaaatcaagg

SEQ ID NO: 21262 - DNA, 25 bp, Artificial
  probe
  misc_feature (1)..(25): SEQ ID NO: 5951; WAN0249GF_at; Start 46; Stop 70
tatgggcgtaagaaaaatcaaggag

SEQ ID NO: 21263 - DNA, 25 bp, Artificial
  probe
  misc_feature (1)..(25): SEQ ID NO: 5951; WAN0249GF_at; Start 24; Stop 48
tagcttcaagctagggtgcccttat

SEQ ID NO: 21264 - DNA, 25 bp, Artificial
  probe
  misc_feature (1)..(25): SEQ ID NO: 5951; WAN0249GF_at; Start 17; Stop 41
agtcccctagcttcaagctagggtg

SEQ ID NO: 21265 - DNA, 25 bp, Artificial
  probe
  misc_feature (1)..(25): SEQ ID NO: 5951; WAN0249GF_at; Start 11; Stop 35
caaactagtcccctagcttcaagct

SEQ ID NO: 21266 - DNA, 25 bp, Artificial
  probe
  misc_feature (1)..(25): SEQ ID NO: 5951; WAN0249GF_at; Start 45; Stop 69
ttatgggcgtaagaaaaatcaagga

SEQ ID NO: 21267 - DNA, 25 bp, Artificial
  probe
  misc_feature (1)..(25): SEQ ID NO: 5951; WAN0249GF_at; Start 30; Stop 54
caagctagggtgcccttatgggcgt

SEQ ID NO: 21268 - DNA, 25 bp, Artificial
  probe
  misc_feature (1)..(25): SEQ ID NO: 5951; WAN0249GF_at; Start 35; Stop 59
tagggtgcccttatgggcgtaagaa

SEQ ID NO: 21269 - DNA, 25 bp, Artificial
  probe
  misc_feature (1)..(25): SEQ ID NO: 5951; WAN0249GF_at; Start 9; Stop 33
aacaaactagtcccctagcttcaag

SEQ ID NO: 21270 - DNA, 25 bp, Artificial
  probe
  misc_feature (1)..(25): SEQ ID NO: 5951; WAN0249GF_at; Start 26; Stop 50
gcttcaagctagggtgcccttatgg

SEQ ID NO: 21271 - DNA, 25 bp, Artificial
  probe
  misc_feature (1)..(25): SEQ ID NO: 5951; WAN0249GF_at; Start 47; Stop 71
atgggcgtaagaaaaatcaaggaga

SEQ ID NO: 21272 - DNA, 25 bp, Artificial
  probe
  misc_feature (1)..(25): SEQ ID NO: 5951; WAN0249GF_at; Start 27; Stop 51
cttcaagctagggtgcccttatggg

SEQ ID NO: 21273 - DNA, 25 bp, Artificial
  probe
  misc_feature (1)..(25): SEQ ID NO: 5951; WAN0249GF_at; Start 19; Stop 43
tcccctagcttcaagctagggtgcc

SEQ ID NO: 21274 - DNA, 25 bp, Artificial
  probe
  misc_feature (1)..(25): SEQ ID NO: 2985; WAN0249GG_at; Start 69; Stop 93
aaaaagcatattctggtcatcagaa

SEQ ID NO: 21275 - DNA, 25 bp, Artificial
  probe
  misc_feature (1)..(25): SEQ ID NO: 2985; WAN0249GG_at; Start 64; Stop 88
ggattaaaaagcatattctggtcat

SEQ ID NO: 21276 - DNA, 25 bp, Artificial
  probe
  misc_feature (1)..(25): SEQ ID NO: 2985; WAN0249GG_at; Start 11; Stop 35
cacttatttgaaagaatttctgtaa

SEQ ID NO: 21277 - DNA, 25 bp, Artificial
  probe
  misc_feature (1)..(25): SEQ ID NO: 2985; WAN0249GG_at; Start 83; Stop 107
ggtcatcagaaagtgcactaatccg

SEQ ID NO: 21278 - DNA, 25 bp, Artificial
  probe
  misc_feature (1)..(25): SEQ ID NO: 2985; WAN0249GG_at; Start 54; Stop 78
taaagaaagcggattaaaaagcata

SEQ ID NO: 21279 - DNA, 25 bp, Artificial
  probe
  misc_feature (1)..(25): SEQ ID NO: 2985; WAN0249GG_at; Start 71; Stop 95
aaagcatattctggtcatcagaaag

SEQ ID NO: 21280 - DNA, 25 bp, Artificial
  probe
  misc_feature (1)..(25): SEQ ID NO: 2985; WAN0249GG_at; Start 89; Stop 113
cagaaagtgcactaatccgctttgt

SEQ ID NO: 21281 - DNA, 25 bp, Artificial
  probe
  misc_feature (1)..(25): SEQ ID NO: 2985; WAN0249GG_at; Start 60; Stop 84
aagcggattaaaaagcatattctgg

SEQ ID NO: 21282 - DNA, 25 bp, Artificial
  probe
  misc_feature (1)..(25): SEQ ID NO: 2985; WAN0249GG_at; Start 65; Stop 89
gattaaaaagcatattctggtcatc

SEQ ID NO: 21283 - DNA, 25 bp, Artificial
  probe
  misc_feature (1)..(25): SEQ ID NO: 2985; WAN0249GG_at; Start 86; Stop 110
catcagaaagtgcactaatccgctt

SEQ ID NO: 21284 - DNA, 25 bp, Artificial
  probe
  misc_feature (1)..(25): SEQ ID NO: 2985; WAN0249GG_at; Start 195; Stop 219
tgtgctataatagtaaaaactgaaa

SEQ ID NO: 21285 - DNA, 25 bp, Artificial
  probe
  misc_feature (1)..(25): SEQ ID NO: 2985; WAN0249GG_at; Start 19; Stop 43
tgaaagaatttctgtaaaaattaca

SEQ ID NO: 21286 - DNA, 25 bp, Artificial
  probe
  misc_feature (1)..(25): SEQ ID NO: 2985; WAN0249GG_at; Start 78; Stop 102
attctggtcatcagaaagtgcacta

SEQ ID NO: 21287 - DNA, 25 bp, Artificial
  probe
  misc_feature (1)..(25): SEQ ID NO: 2985; WAN0249GG_at; Start 201; Stop 225
ataatagtaaaaactgaaatgggag

SEQ ID NO: 21288 - DNA, 25 bp, Artificial
  probe
  misc_feature (1)..(25): SEQ ID NO: 2985; WAN0249GG_at; Start 91; Stop 115
gaaagtgcactaatccgctttgttg

SEQ ID NO: 21289 - DNA, 25 bp, Artificial
  probe
  misc_feature (1)..(25): SEQ ID NO: 2985; WAN0249GG_at; Start 198; Stop 222
gctataatagtaaaaactgaaatgg

SEQ ID NO: 21290 - DNA, 25 bp, Artificial
  probe
  misc_feature (1)..(25): SEQ ID NO: 2985; WAN0249GG_at; Start 68; Stop 92
taaaaagcatattctggtcatcaga

SEQ ID NO: 21291 - DNA, 25 bp, Artificial
  probe
  misc_feature (1)..(25): SEQ ID NO: 2985; WAN0249GG_at; Start 77; Stop 101
tattctggtcatcagaaagtgcact

SEQ ID NO: 21292 - DNA, 25 bp, Artificial
  probe
  misc_feature (1)..(25): SEQ ID NO: 2985; WAN0249GG_at; Start 93; Stop 117
aagtgcactaatccgctttgttgtt

SEQ ID NO: 21293 - DNA, 25 bp, Artificial
  probe
  misc_feature (1)..(25): SEQ ID NO: 2985; WAN0249GG_at; Start 97; Stop 121
gcactaatccgctttgttgttttta

SEQ ID NO: 21294 - DNA, 25 bp, Artificial
  probe
  misc_feature (1)..(25): SEQ ID NO: 2985; WAN0249GG_at; Start 92; Stop 116
aaagtgcactaatccgctttgttgt

SEQ ID NO: 21295 - DNA, 25 bp, Artificial
  probe
  misc_feature (1)..(25): SEQ ID NO: 2985; WAN0249GG_at; Start 62; Stop 86
gcggattaaaaagcatattctggtc

SEQ ID NO: 21296 - DNA, 25 bp, Artificial
  probe
  misc_feature (1)..(25): SEQ ID NO: 2985; WAN0249GG_at; Start 2; Stop 26
tgttaaatacacttatttgaaagaa

SEQ ID NO: 21297 - DNA, 25 bp, Artificial
  probe
  misc_feature (1)..(25): SEQ ID NO: 2985; WAN0249GG_at; Start 58; Stop 82
gaaagcggattaaaaagcatattct

SEQ ID NO: 21298 - DNA, 25 bp, Artificial
  probe
  misc_feature (1)..(25): SEQ ID NO: 2985; WAN0249GG_at; Start 81; Stop 105
ctggtcatcagaaagtgcactaatc

SEQ ID NO: 21299 - DNA, 25 bp, Artificial
  probe
  misc_feature (1)..(25): SEQ ID NO: 2985; WAN0249GG_at; Start 82; Stop 106
tggtcatcagaaagtgcactaatcc

SEQ ID NO: 21300 - DNA, 25 bp, Artificial
  probe
  misc_feature (1)..(25): SEQ ID NO: 2985; WAN0249GG_at; Start 75; Stop 99
catattctggtcatcagaaagtgca

SEQ ID NO: 21301 - DNA, 25 bp, Artificial
  probe
  misc_feature (1)..(25): SEQ ID NO: 2985; WAN0249GG_at; Start 85; Stop 109
tcatcagaaagtgcactaatccgct

SEQ ID NO: 21302 - DNA, 25 bp, Artificial
  probe
  misc_feature (1)..(25): SEQ ID NO: 2985; WAN0249GG_at; Start 67; Stop 91
ttaaaaagcatattctggtcatcag

SEQ ID NO: 21303 - DNA, 25 bp, Artificial
  probe
  misc_feature (1)..(25): SEQ ID NO: 2985; WAN0249GG_at; Start 88; Stop 112
tcagaaagtgcactaatccgctttg

SEQ ID NO: 21304 - DNA, 25 bp, Artificial
  probe
  misc_feature (1)..(25): SEQ ID NO: 2985; WAN0249GG_at; Start 74; Stop 98
gcatattctggtcatcagaaagtgc

SEQ ID NO: 21305 - DNA, 25 bp, Artificial
  probe
  misc_feature (1)..(25): SEQ ID NO: 2985; WAN0249GG_at; Start 80; Stop 104
tctggtcatcagaaagtgcactaat

SEQ ID NO: 21306 - DNA, 25 bp, Artificial
  probe
  misc_feature (1)..(25): SEQ ID NO: 2985; WAN0249GG_at; Start 63; Stop 87
cggattaaaaagcatattctggtca

SEQ ID NO: 21307 - DNA, 25 bp, Artificial
  probe
  misc_feature (1)..(25): SEQ ID NO: 2985; WAN0249GG_at; Start 84; Stop 108
gtcatcagaaagtgcactaatccgc

SEQ ID NO: 21308 - DNA, 25 bp, Artificial
  probe
  misc_feature (1)..(25): SEQ ID NO: 3483; WAN0249GH_at; Start 14; Stop 38
tttcagtttttactattatagcaca

SEQ ID NO: 21309 - DNA, 25 bp, Artificial
  probe
  misc_feature (1)..(25): SEQ ID NO: 3483; WAN0249GH_at; Start 112; Stop 136
taaaaacaacaaagcggattagtgc

SEQ ID NO: 21310 - DNA, 25 bp, Artificial
  probe
  misc_feature (1)..(25): SEQ ID NO: 3483; WAN0249GH_at; Start 123; Stop 147
aagcggattagtgcactttctgatg

SEQ ID NO: 21311 - DNA, 25 bp, Artificial
  probe
  misc_feature (1)..(25): SEQ ID NO: 3483; WAN0249GH_at; Start 132; Stop 156
agtgcactttctgatgaccagaata

SEQ ID NO: 21312 - DNA, 25 bp, Artificial
  probe
  misc_feature (1)..(25): SEQ ID NO: 3483; WAN0249GH_at; Start 155; Stop 179
tatgctttttaatccgctttcttta

SEQ ID NO: 21313 - DNA, 25 bp, Artificial
  probe
  misc_feature (1)..(25): SEQ ID NO: 3483; WAN0249GH_at; Start 119; Stop 143
aacaaagcggattagtgcactttct

SEQ ID NO: 21314 - DNA, 25 bp, Artificial
  probe
  misc_feature (1)..(25): SEQ ID NO: 3483; WAN0249GH_at; Start 124; Stop 148
agcggattagtgcactttctgatga

SEQ ID NO: 21315 - DNA, 25 bp, Artificial
  probe
  misc_feature (1)..(25): SEQ ID NO: 3483; WAN0249GH_at; Start 147; Stop 171
gaccagaatatgctttttaatccgc

SEQ ID NO: 21316 - DNA, 25 bp, Artificial
  probe
  misc_feature (1)..(25): SEQ ID NO: 3483; WAN0249GH_at; Start 121; Stop 145
caaagcggattagtgcactttctga

SEQ ID NO: 21317 - DNA, 25 bp, Artificial
  probe
  misc_feature (1)..(25): SEQ ID NO: 3483; WAN0249GH_at; Start 118; Stop 142
caacaaagcggattagtgcactttc

SEQ ID NO: 21318 - DNA, 25 bp, Artificial
  probe
  misc_feature (1)..(25): SEQ ID NO: 3483; WAN0249GH_at; Start 136; Stop 160
cactttctgatgaccagaatatgct

SEQ ID NO: 21319 - DNA, 25 bp, Artificial
  probe
  misc_feature (1)..(25): SEQ ID NO: 3483; WAN0249GH_at; Start 148; Stop 172
accagaatatgctttttaatccgct

SEQ ID NO: 21320 - DNA, 25 bp, Artificial
  probe
  misc_feature (1)..(25): SEQ ID NO: 3483; WAN0249GH_at; Start 125; Stop 149
gcggattagtgcactttctgatgac

SEQ ID NO: 21321 - DNA, 25 bp, Artificial
  probe
  misc_feature (1)..(25): SEQ ID NO: 3483; WAN0249GH_at; Start 198; Stop 222
ttacagaaattctttcaaataagtg

SEQ ID NO: 21322 - DNA, 25 bp, Artificial
  probe
  misc_feature (1)..(25): SEQ ID NO: 3483; WAN0249GH_at; Start 149; Stop 173
ccagaatatgctttttaatccgctt

SEQ ID NO: 21323 - DNA, 25 bp, Artificial
  probe
  misc_feature (1)..(25): SEQ ID NO: 3483; WAN0249GH_at; Start 55; Stop 79
cagaataaaattcttgaattttcag

SEQ ID NO: 21324 - DNA, 25 bp, Artificial
  probe
  misc_feature (1)..(25): SEQ ID NO: 3483; WAN0249GH_at; Start 201; Stop 225
cagaaattctttcaaataagtgtat

SEQ ID NO: 21325 - DNA, 25 bp, Artificial
  probe
  misc_feature (1)..(25): SEQ ID NO: 3483; WAN0249GH_at; Start 142; Stop 166
ctgatgaccagaatatgctttttaa

SEQ ID NO: 21326 - DNA, 25 bp, Artificial
  probe
  misc_feature (1)..(25): SEQ ID NO: 3483; WAN0249GH_at; Start 146; Stop 170
tgaccagaatatgctttttaatccg

SEQ ID NO: 21327 - DNA, 25 bp, Artificial
  probe
  misc_feature (1)..(25): SEQ ID NO: 3483; WAN0249GH_at; Start 120; Stop 144
acaaagcggattagtgcactttctg

SEQ ID NO: 21328 - DNA, 25 bp, Artificial
  probe
  misc_feature (1)..(25): SEQ ID NO: 3483; WAN0249GH_at; Start 116; Stop 140
aacaacaaagcggattagtgcactt

SEQ ID NO: 21329 - DNA, 25 bp, Artificial
  probe
  misc_feature (1)..(25): SEQ ID NO: 3483; WAN0249GH_at; Start 129; Stop 153
attagtgcactttctgatgaccaga

SEQ ID NO: 21330 - DNA, 25 bp, Artificial
  probe
  misc_feature (1)..(25): SEQ ID NO: 3483; WAN0249GH_at; Start 131; Stop 155
tagtgcactttctgatgaccagaat

SEQ ID NO: 21331 - DNA, 25 bp, Artificial
  probe
  misc_feature (1)..(25): SEQ ID NO: 3483; WAN0249GH_at; Start 141; Stop 165
tctgatgaccagaatatgcttttta

SEQ ID NO: 21332 - DNA, 25 bp, Artificial
  probe
  misc_feature (1)..(25): SEQ ID NO: 3483; WAN0249GH_at; Start 134; Stop 158
tgcactttctgatgaccagaatatg

SEQ ID NO: 21333 - DNA, 25 bp, Artificial
  probe
  misc_feature (1)..(25): SEQ ID NO: 3483; WAN0249GH_at; Start 17; Stop 41
cagtttttactattatagcacaatt

SEQ ID NO: 21334 - DNA, 25 bp, Artificial
  probe
  misc_feature (1)..(25): SEQ ID NO: 3483; WAN0249GH_at; Start 152; Stop 176
gaatatgctttttaatccgctttct

SEQ ID NO: 21335 - DNA, 25 bp, Artificial
  probe
  misc_feature (1)..(25): SEQ ID NO: 3483; WAN0249GH_at; Start 150; Stop 174
cagaatatgctttttaatccgcttt

SEQ ID NO: 21336 - DNA, 25 bp, Artificial
  probe
  misc_feature (1)..(25): SEQ ID NO: 3483; WAN0249GH_at; Start 11; Stop 35
ccatttcagtttttactattatagc

SEQ ID NO: 21337 - DNA, 25 bp, Artificial
  probe
  misc_feature (1)..(25): SEQ ID NO: 3483; WAN0249GH_at; Start 113; Stop 137
aaaaacaacaaagcggattagtgca

SEQ ID NO: 21338 - DNA, 25 bp, Artificial
  probe
  misc_feature (1)..(25): SEQ ID NO: 3483; WAN0249GH_at; Start 127; Stop 151
ggattagtgcactttctgatgacca

SEQ ID NO: 21339 - DNA, 25 bp, Artificial
  probe
  misc_feature (1)..(25): SEQ ID NO: 3483; WAN0249GH_at; Start 128; Stop 152
gattagtgcactttctgatgaccag

SEQ ID NO: 21340 - DNA, 25 bp, Artificial
  probe
  misc_feature (1)..(25): SEQ ID NO: 3483; WAN0249GH_at; Start 126; Stop 150
cggattagtgcactttctgatgacc

SEQ ID NO: 21341 - DNA, 25 bp, Artificial
  probe
  misc_feature (1)..(25): SEQ ID NO: 3483; WAN0249GH_at; Start 122; Stop 146
aaagcggattagtgcactttctgat

SEQ ID NO: 21342 - DNA, 25 bp, Artificial
  probe
  misc_feature (1)..(25): SEQ ID NO: 467; WAN0249GK_at; Start 12; Stop 36
taaaaggtgttttctatatgagtat

SEQ ID NO: 21343 - DNA, 25 bp, Artificial
  probe
  misc_feature (1)..(25): SEQ ID NO: 467; WAN0249GK_at; Start 11; Stop 35
ctaaaaggtgttttctatatgagta

SEQ ID NO: 21344 - DNA, 25 bp, Artificial
  probe
  misc_feature (1)..(25): SEQ ID NO: 467; WAN0249GK_at; Start 15; Stop 39
aaggtgttttctatatgagtattat

SEQ ID NO: 21345 - DNA, 25 bp, Artificial
  probe
  misc_feature (1)..(25): SEQ ID NO: 467; WAN0249GK_at; Start 9; Stop 33
ttctaaaaggtgttttctatatgag

SEQ ID NO: 21346 - DNA, 25 bp, Artificial
  probe
  misc_feature (1)..(25): SEQ ID NO: 467; WAN0249GK_at; Start 17; Stop 41
ggtgttttctatatgagtattatta

SEQ ID NO: 21347 - DNA, 25 bp, Artificial
  probe
  misc_feature (1)..(25): SEQ ID NO: 467; WAN0249GK_at; Start 8; Stop 32
tttctaaaaggtgttttctatatga

SEQ ID NO: 21348 - DNA, 25 bp, Artificial
  probe
  misc_feature (1)..(25): SEQ ID NO: 467; WAN0249GK_at; Start 14; Stop 38
aaaggtgttttctatatgagtatta

SEQ ID NO: 21349 - DNA, 25 bp, Artificial
  probe
  misc_feature (1)..(25): SEQ ID NO: 467; WAN0249GK_at; Start 13; Stop 37
aaaaggtgttttctatatgagtatt

SEQ ID NO: 21350 - DNA, 25 bp, Artificial
  probe
  misc_feature (1)..(25): SEQ ID NO: 467; WAN0249GK_at; Start 26; Stop 50
tatatgagtattattatatagagaa

SEQ ID NO: 21351 - DNA, 25 bp, Artificial
  probe
  misc_feature (1)..(25): SEQ ID NO: 467; WAN0249GK_at; Start 18; Stop 42
gtgttttctatatgagtattattat

SEQ ID NO: 21352 - DNA, 25 bp, Artificial
  probe
  misc_feature (1)..(25): SEQ ID NO: 467; WAN0249GK_at; Start 7; Stop 31
ctttctaaaaggtgttttctatatg

SEQ ID NO: 21353 - DNA, 25 bp, Artificial
  probe
  misc_feature (1)..(25): SEQ ID NO: 467; WAN0249GK_at; Start 16; Stop 40
aggtgttttctatatgagtattatt

SEQ ID NO: 21354 - DNA, 25 bp, Artificial
  probe
  misc_feature (1)..(25): SEQ ID NO: 467; WAN0249GK_at; Start 25; Stop 49
ctatatgagtattattatatagaga

SEQ ID NO: 21355 - DNA, 25 bp, Artificial
  probe
  misc_feature (1)..(25): SEQ ID NO: 467; WAN0249GK_at; Start 10; Stop 34
tctaaaaggtgttttctatatgagt

SEQ ID NO: 21356 - DNA, 25 bp, Artificial
  probe
  misc_feature (1)..(25): SEQ ID NO: 4850; WAN0249GL_at; Start 10; Stop 34
taataatactcatatagaaaacacc

SEQ ID NO: 21357 - DNA, 25 bp, Artificial
  probe
  misc_feature (1)..(25): SEQ ID NO: 4850; WAN0249GL_at; Start 16; Stop 40
tactcatatagaaaacaccttttag

SEQ ID NO: 21358 - DNA, 25 bp, Artificial
  probe
  misc_feature (1)..(25): SEQ ID NO: 4850; WAN0249GL_at; Start 18; Stop 42
ctcatatagaaaacaccttttagaa

SEQ ID NO: 21359 - DNA, 25 bp, Artificial
  probe
  misc_feature (1)..(25): SEQ ID NO: 4850; WAN0249GL_at; Start 12; Stop 36
ataatactcatatagaaaacacctt

SEQ ID NO: 21360 - DNA, 25 bp, Artificial
  probe
  misc_feature (1)..(25): SEQ ID NO: 4850; WAN0249GL_at; Start 9; Stop 33
ataataatactcatatagaaaacac

SEQ ID NO: 21361 - DNA, 25 bp, Artificial
  probe
  misc_feature (1)..(25): SEQ ID NO: 4850; WAN0249GL_at; Start 11; Stop 35
aataatactcatatagaaaacacct

SEQ ID NO: 21362 - DNA, 25 bp, Artificial
  probe
  misc_feature (1)..(25): SEQ ID NO: 4850; WAN0249GL_at; Start 8; Stop 32
tataataatactcatatagaaaaca

SEQ ID NO: 21363 - DNA, 25 bp, Artificial
  probe
  misc_feature (1)..(25): SEQ ID NO: 4850; WAN0249GL_at; Start 7; Stop 31
atataataatactcatatagaaaac

SEQ ID NO: 21364 - DNA, 25 bp, Artificial
  probe
  misc_feature (1)..(25): SEQ ID NO: 4850; WAN0249GL_at; Start 20; Stop 44
catatagaaaacaccttttagaaag

SEQ ID NO: 21365 - DNA, 25 bp, Artificial
  probe
  misc_feature (1)..(25): SEQ ID NO: 4850; WAN0249GL_at; Start 1; Stop 25
ttctctatataataatactcatata

SEQ ID NO: 21366 - DNA, 25 bp, Artificial
  probe
  misc_feature (1)..(25): SEQ ID NO: 4850; WAN0249GL_at; Start 17; Stop 41
actcatatagaaaacaccttttaga

SEQ ID NO: 21367 - DNA, 25 bp, Artificial
  probe
  misc_feature (1)..(25): SEQ ID NO: 4850; WAN0249GL_at; Start 19; Stop 43
tcatatagaaaacaccttttagaaa

SEQ ID NO: 21368 - DNA, 25 bp, Artificial
  probe
  misc_feature (1)..(25): SEQ ID NO: 4850; WAN0249GL_at; Start 6; Stop 30
tatataataatactcatatagaaaa

SEQ ID NO: 21369 - DNA, 25 bp, Artificial
  probe
  misc_feature (1)..(25): SEQ ID NO: 4850; WAN0249GL_at; Start 14; Stop 38
aatactcatatagaaaacacctttt

SEQ ID NO: 21370 - DNA, 25 bp, Artificial
  probe
  misc_feature (1)..(25): SEQ ID NO: 4850; WAN0249GL_at; Start 13; Stop 37
taatactcatatagaaaacaccttt

SEQ ID NO: 21371 - DNA, 25 bp, Artificial
  probe
  misc_feature (1)..(25): SEQ ID NO: 4850; WAN0249GL_at; Start 2; Stop 26
tctctatataataatactcatatag

SEQ ID NO: 21372 - DNA, 25 bp, Artificial
  probe
  misc_feature (1)..(25): SEQ ID NO: 4850; WAN0249GL_at; Start 15; Stop 39
atactcatatagaaaacacctttta

SEQ ID NO: 21373 - DNA, 25 bp, Artificial
  probe
  misc_feature (1)..(25): SEQ ID NO: 460; WAN0249GM_at; Start 37; Stop 61
gtgtctctattgataaattcaaagg

SEQ ID NO: 21374 - DNA, 25 bp, Artificial
  probe
  misc_feature (1)..(25): SEQ ID NO: 460; WAN0249GM_at; Start 20; Stop 44
agaaagctaaattatttgtgtctct

SEQ ID NO: 21375 - DNA, 25 bp, Artificial
  probe
  misc_feature (1)..(25): SEQ ID NO: 460; WAN0249GM_at; Start 31; Stop 55
ttatttgtgtctctattgataaatt

SEQ ID NO: 21376 - DNA, 25 bp, Artificial
  probe
  misc_feature (1)..(25): SEQ ID NO: 460; WAN0249GM_at; Start 40; Stop 64
tctctattgataaattcaaaggggg

SEQ ID NO: 21377 - DNA, 25 bp, Artificial
  probe
  misc_feature (1)..(25): SEQ ID NO: 460; WAN0249GM_at; Start 27; Stop 51
taaattatttgtgtctctattgata

SEQ ID NO: 21378 - DNA, 25 bp, Artificial
  probe
  misc_feature (1)..(25): SEQ ID NO: 460; WAN0249GM_at; Start 18; Stop 42
taagaaagctaaattatttgtgtct

SEQ ID NO: 21379 - DNA, 25 bp, Artificial
  probe
  misc_feature (1)..(25): SEQ ID NO: 460; WAN0249GM_at; Start 25; Stop 49
gctaaattatttgtgtctctattga

SEQ ID NO: 21380 - DNA, 25 bp, Artificial
  probe
  misc_feature (1)..(25): SEQ ID NO: 460; WAN0249GM_at; Start 17; Stop 41
ataagaaagctaaattatttgtgtc

SEQ ID NO: 21381 - DNA, 25 bp, Artificial
  probe
  misc_feature (1)..(25): SEQ ID NO: 460; WAN0249GM_at; Start 30; Stop 54
attatttgtgtctctattgataaat

SEQ ID NO: 21382 - DNA, 25 bp, Artificial
  probe
  misc_feature (1)..(25): SEQ ID NO: 460; WAN0249GM_at; Start 15; Stop 39
ttataagaaagctaaattatttgtg

SEQ ID NO: 21383 - DNA, 25 bp, Artificial
  probe
  misc_feature (1)..(25): SEQ ID NO: 460; WAN0249GM_at; Start 36; Stop 60
tgtgtctctattgataaattcaaag

SEQ ID NO: 21384 - DNA, 25 bp, Artificial
  probe
  misc_feature (1)..(25): SEQ ID NO: 460; WAN0249GM_at; Start 43; Stop 67
ctattgataaattcaaagggggatt

SEQ ID NO: 21385 - DNA, 25 bp, Artificial
  probe
  misc_feature (1)..(25): SEQ ID NO: 460; WAN0249GM_at; Start 35; Stop 59
ttgtgtctctattgataaattcaaa

SEQ ID NO: 21386 - DNA, 25 bp, Artificial
  probe
  misc_feature (1)..(25): SEQ ID NO: 460; WAN0249GM_at; Start 24; Stop 48
agctaaattatttgtgtctctattg

SEQ ID NO: 21387 - DNA, 25 bp, Artificial
  probe
  misc_feature (1)..(25): SEQ ID NO: 460; WAN0249GM_at; Start 23; Stop 47
aagctaaattatttgtgtctctatt

SEQ ID NO: 21388 - DNA, 25 bp, Artificial
  probe
  misc_feature (1)..(25): SEQ ID NO: 460; WAN0249GM_at; Start 39; Stop 63
gtctctattgataaattcaaagggg

SEQ ID NO: 21389 - DNA, 25 bp, Artificial
  probe
  misc_feature (1)..(25): SEQ ID NO: 460; WAN0249GM_at; Start 42; Stop 66
tctattgataaattcaaagggggat

SEQ ID NO: 21390 - DNA, 25 bp, Artificial
  probe
  misc_feature (1)..(25): SEQ ID NO: 460; WAN0249GM_at; Start 19; Stop 43
aagaaagctaaattatttgtgtctc

SEQ ID NO: 21391 - DNA, 25 bp, Artificial
  probe
  misc_feature (1)..(25): SEQ ID NO: 460; WAN0249GM_at; Start 16; Stop 40
tataagaaagctaaattatttgtgt

SEQ ID NO: 21392 - DNA, 25 bp, Artificial
  probe
  misc_feature (1)..(25): SEQ ID NO: 460; WAN0249GM_at; Start 47; Stop 71
tgataaattcaaagggggatttgat

SEQ ID NO: 21393 - DNA, 25 bp, Artificial
  probe
  misc_feature (1)..(25): SEQ ID NO: 460; WAN0249GM_at; Start 28; Stop 52
aaattatttgtgtctctattgataa

SEQ ID NO: 21394 - DNA, 25 bp, Artificial
  probe
  misc_feature (1)..(25): SEQ ID NO: 460; WAN0249GM_at; Start 26; Stop 50
ctaaattatttgtgtctctattgat

SEQ ID NO: 21395 - DNA, 25 bp, Artificial
  probe
  misc_feature (1)..(25): SEQ ID NO: 460; WAN0249GM_at; Start 34; Stop 58
tttgtgtctctattgataaattcaa

SEQ ID NO: 21396 - DNA, 25 bp, Artificial
  probe
  misc_feature (1)..(25): SEQ ID NO: 460; WAN0249GM_at; Start 21; Stop 45
gaaagctaaattatttgtgtctcta

SEQ ID NO: 21397 - DNA, 25 bp, Artificial
  probe
  misc_feature (1)..(25): SEQ ID NO: 460; WAN0249GM_at; Start 33; Stop 57
atttgtgtctctattgataaattca

SEQ ID NO: 21398 - DNA, 25 bp, Artificial
  probe
  misc_feature (1)..(25): SEQ ID NO: 460; WAN0249GM_at; Start 32; Stop 56
tatttgtgtctctattgataaattc

SEQ ID NO: 21399 - DNA, 25 bp, Artificial
  probe
  misc_feature (1)..(25): SEQ ID NO: 460; WAN0249GM_at; Start 38; Stop 62
tgtctctattgataaattcaaaggg

SEQ ID NO: 21400 - DNA, 25 bp, Artificial
  probe
  misc_feature (1)..(25): SEQ ID NO: 460; WAN0249GM_at; Start 41; Stop 65
ctctattgataaattcaaaggggga

SEQ ID NO: 21401 - DNA, 25 bp, Artificial
  probe
  misc_feature (1)..(25): SEQ ID NO: 460; WAN0249GM_at; Start 45; Stop 69
attgataaattcaaagggggatttg

SEQ ID NO: 21402 - DNA, 25 bp, Artificial
  probe
  misc_feature (1)..(25): SEQ ID NO: 460; WAN0249GM_at; Start 29; Stop 53
aattatttgtgtctctattgataaa

SEQ ID NO: 21403 - DNA, 25 bp, Artificial
  probe
  misc_feature (1)..(25): SEQ ID NO: 460; WAN0249GM_at; Start 22; Stop 46
aaagctaaattatttgtgtctctat

SEQ ID NO: 21404 - DNA, 25 bp, Artificial
  probe
  misc_feature (1)..(25): SEQ ID NO: 106; WAN0249GN_at; Start 30; Stop 54
atccccctttgaatttatcaataga

SEQ ID NO: 21405 - DNA, 25 bp, Artificial
  probe
  misc_feature (1)..(25): SEQ ID NO: 106; WAN0249GN_at; Start 45; Stop 69
tatcaatagagacacaaataattta

SEQ ID NO: 21406 - DNA, 25 bp, Artificial
  probe
  misc_feature (1)..(25): SEQ ID NO: 106; WAN0249GN_at; Start 37; Stop 61
tttgaatttatcaatagagacacaa

SEQ ID NO: 21407 - DNA, 25 bp, Artificial
  probe
  misc_feature (1)..(25): SEQ ID NO: 106; WAN0249GN_at; Start 54; Stop 78
agacacaaataatttagctttctta

SEQ ID NO: 21408 - DNA, 25 bp, Artificial
  probe
  misc_feature (1)..(25): SEQ ID NO: 106; WAN0249GN_at; Start 55; Stop 79
gacacaaataatttagctttcttat

SEQ ID NO: 21409 - DNA, 25 bp, Artificial
  probe
  misc_feature (1)..(25): SEQ ID NO: 106; WAN0249GN_at; Start 34; Stop 58
ccctttgaatttatcaatagagaca

SEQ ID NO: 21410 - DNA, 25 bp, Artificial
  probe
  misc_feature (1)..(25): SEQ ID NO: 106; WAN0249GN_at; Start 33; Stop 57
cccctttgaatttatcaatagagac

SEQ ID NO: 21411 - DNA, 25 bp, Artificial
  probe
  misc_feature (1)..(25): SEQ ID NO: 106; WAN0249GN_at; Start 52; Stop 76
agagacacaaataatttagctttct

SEQ ID NO: 21412 - DNA, 25 bp, Artificial
  probe
  misc_feature (1)..(25): SEQ ID NO: 106; WAN0249GN_at; Start 26; Stop 50
tcaaatccccctttgaatttatcaa

SEQ ID NO: 21413 - DNA, 25 bp, Artificial
  probe
  misc_feature (1)..(25): SEQ ID NO: 106; WAN0249GN_at; Start 57; Stop 81
cacaaataatttagctttcttataa

SEQ ID NO: 21414 - DNA, 25 bp, Artificial
  probe
  misc_feature (1)..(25): SEQ ID NO: 106; WAN0249GN_at; Start 40; Stop 64
gaatttatcaatagagacacaaata

SEQ ID NO: 21415 - DNA, 25 bp, Artificial
  probe
  misc_feature (1)..(25): SEQ ID NO: 106; WAN0249GN_at; Start 25; Stop 49
atcaaatccccctttgaatttatca

SEQ ID NO: 21416 - DNA, 25 bp, Artificial
  probe
  misc_feature (1)..(25): SEQ ID NO: 106; WAN0249GN_at; Start 44; Stop 68
ttatcaatagagacacaaataattt

SEQ ID NO: 21417 - DNA, 25 bp, Artificial
  probe
  misc_feature (1)..(25): SEQ ID NO: 106; WAN0249GN_at; Start 47; Stop 71
tcaatagagacacaaataatttagc

SEQ ID NO: 21418 - DNA, 25 bp, Artificial
  probe
  misc_feature (1)..(25): SEQ ID NO: 106; WAN0249GN_at; Start 46; Stop 70
atcaatagagacacaaataatttag

SEQ ID NO: 21419 - DNA, 25 bp, Artificial
  probe
  misc_feature (1)..(25): SEQ ID NO: 106; WAN0249GN_at; Start 41; Stop 65
aatttatcaatagagacacaaataa

SEQ ID NO: 21420 - DNA, 25 bp, Artificial
  probe
  misc_feature (1)..(25): SEQ ID NO: 106; WAN0249GN_at; Start 43; Stop 67
tttatcaatagagacacaaataatt

SEQ ID NO: 21421 - DNA, 25 bp, Artificial
  probe
  misc_feature (1)..(25): SEQ ID NO: 106; WAN0249GN_at; Start 56; Stop 80
acacaaataatttagctttcttata

SEQ ID NO: 21422 - DNA, 25 bp, Artificial
  probe
  misc_feature (1)..(25): SEQ ID NO: 106; WAN0249GN_at; Start 42; Stop 66
atttatcaatagagacacaaataat

SEQ ID NO: 21423 - DNA, 25 bp, Artificial
  probe
  misc_feature (1)..(25): SEQ ID NO: 106; WAN0249GN_at; Start 32; Stop 56
ccccctttgaatttatcaatagaga

SEQ ID NO: 21424 - DNA, 25 bp, Artificial
  probe
  misc_feature (1)..(25): SEQ ID NO: 106; WAN0249GN_at; Start 39; Stop 63
tgaatttatcaatagagacacaaat

SEQ ID NO: 21425 - DNA, 25 bp, Artificial
  probe
  misc_feature (1)..(25): SEQ ID NO: 106; WAN0249GN_at; Start 49; Stop 73
aatagagacacaaataatttagctt

SEQ ID NO: 21426 - DNA, 25 bp, Artificial
  probe
  misc_feature (1)..(25): SEQ ID NO: 106; WAN0249GN_at; Start 51; Stop 75
tagagacacaaataatttagctttc

SEQ ID NO: 21427 - DNA, 25 bp, Artificial
  probe
  misc_feature (1)..(25): SEQ ID NO: 106; WAN0249GN_at; Start 53; Stop 77
gagacacaaataatttagctttctt

SEQ ID NO: 21428 - DNA, 25 bp, Artificial
  probe
  misc_feature (1)..(25): SEQ ID NO: 106; WAN0249GN_at; Start 48; Stop 72
caatagagacacaaataatttagct

SEQ ID NO: 21429 - DNA, 25 bp, Artificial
  probe
  misc_feature (1)..(25): SEQ ID NO: 106; WAN0249GN_at; Start 29; Stop 53
aatccccctttgaatttatcaatag

SEQ ID NO: 21430 - DNA, 25 bp, Artificial
  probe
  misc_feature (1)..(25): SEQ ID NO: 106; WAN0249GN_at; Start 35; Stop 59
cctttgaatttatcaatagagacac

SEQ ID NO: 21431 - DNA, 25 bp, Artificial
  probe
  misc_feature (1)..(25): SEQ ID NO: 106; WAN0249GN_at; Start 50; Stop 74
atagagacacaaataatttagcttt

SEQ ID NO: 21432 - DNA, 25 bp, Artificial
  probe
  misc_feature (1)..(25): SEQ ID NO: 106; WAN0249GN_at; Start 31; Stop 55
tccccctttgaatttatcaatagag

SEQ ID NO: 21433 - DNA, 25 bp, Artificial
  probe
  misc_feature (1)..(25): SEQ ID NO: 106; WAN0249GN_at; Start 27; Stop 51
caaatccccctttgaatttatcaat

SEQ ID NO: 21434 - DNA, 25 bp, Artificial
  probe
  misc_feature (1)..(25): SEQ ID NO: 106; WAN0249GN_at; Start 38; Stop 62
ttgaatttatcaatagagacacaaa

SEQ ID NO: 21435 - DNA, 25 bp, Artificial
  probe
  misc_feature (1)..(25): SEQ ID NO: 106; WAN0249GN_at; Start 36; Stop 60
ctttgaatttatcaatagagacaca

SEQ ID NO: 21436 - DNA, 25 bp, Artificial
  probe
  misc_feature (1)..(25): SEQ ID NO: 497; WAN0249GO_at; Start 79; Stop 103
caaatagaaaacggttgcaagtatt

SEQ ID NO: 21437 - DNA, 25 bp, Artificial
  probe
  misc_feature (1)..(25): SEQ ID NO: 497; WAN0249GO_at; Start 62; Stop 86
atgagcttagtatagcacaaataga

SEQ ID NO: 21438 - DNA, 25 bp, Artificial
  probe
  misc_feature (1)..(25): SEQ ID NO: 497; WAN0249GO_at; Start 23; Stop 47
gcaagttttattgataaggaaacgc

SEQ ID NO: 21439 - DNA, 25 bp, Artificial
  probe
  misc_feature (1)..(25): SEQ ID NO: 497; WAN0249GO_at; Start 64; Stop 88
gagcttagtatagcacaaatagaaa

SEQ ID NO: 21440 - DNA, 25 bp, Artificial
  probe
  misc_feature (1)..(25): SEQ ID NO: 497; WAN0249GO_at; Start 71; Stop 95
gtatagcacaaatagaaaacggttg

SEQ ID NO: 21441 - DNA, 25 bp, Artificial
  probe
  misc_feature (1)..(25): SEQ ID NO: 497; WAN0249GO_at; Start 77; Stop 101
cacaaatagaaaacggttgcaagta

SEQ ID NO: 21442 - DNA, 25 bp, Artificial
  probe
  misc_feature (1)..(25): SEQ ID NO: 497; WAN0249GO_at; Start 67; Stop 91
cttagtatagcacaaatagaaaacg

SEQ ID NO: 21443 - DNA, 25 bp, Artificial
  probe
  misc_feature (1)..(25): SEQ ID NO: 497; WAN0249GO_at; Start 73; Stop 97
atagcacaaatagaaaacggttgca

SEQ ID NO: 21444 - DNA, 25 bp, Artificial
  probe
  misc_feature (1)..(25): SEQ ID NO: 497; WAN0249GO_at; Start 61; Stop 85
tatgagcttagtatagcacaaatag

SEQ ID NO: 21445 - DNA, 25 bp, Artificial
  probe
  misc_feature (1)..(25): SEQ ID NO: 497; WAN0249GO_at; Start 78; Stop 102
acaaatagaaaacggttgcaagtat

SEQ ID NO: 21446 - DNA, 25 bp, Artificial
  probe
  misc_feature (1)..(25): SEQ ID NO: 497; WAN0249GO_at; Start 52; Stop 76
gttttcctttatgagcttagtatag

SEQ ID NO: 21447 - DNA, 25 bp, Artificial
  probe
  misc_feature (1)..(25): SEQ ID NO: 497; WAN0249GO_at; Start 59; Stop 83
tttatgagcttagtatagcacaaat

SEQ ID NO: 21448 - DNA, 25 bp, Artificial
  probe
  misc_feature (1)..(25): SEQ ID NO: 497; WAN0249GO_at; Start 63; Stop 87
tgagcttagtatagcacaaatagaa

SEQ ID NO: 21449 - DNA, 25 bp, Artificial
  probe
  misc_feature (1)..(25): SEQ ID NO: 497; WAN0249GO_at; Start 70; Stop 94
agtatagcacaaatagaaaacggtt

SEQ ID NO: 21450 - DNA, 25 bp, Artificial
  probe
  misc_feature (1)..(25): SEQ ID NO: 497; WAN0249GO_at; Start 46; Stop 70
gcaaacgttttcctttatgagctta

SEQ ID NO: 21451 - DNA, 25 bp, Artificial
  probe
  misc_feature (1)..(25): SEQ ID NO: 497; WAN0249GO_at; Start 76; Stop 100
gcacaaatagaaaacggttgcaagt

SEQ ID NO: 21452 - DNA, 25 bp, Artificial
  probe
  misc_feature (1)..(25): SEQ ID NO: 497; WAN0249GO_at; Start 72; Stop 96
tatagcacaaatagaaaacggttgc

SEQ ID NO: 21453 - DNA, 25 bp, Artificial
  probe
  misc_feature (1)..(25): SEQ ID NO: 497; WAN0249GO_at; Start 68; Stop 92
ttagtatagcacaaatagaaaacgg

SEQ ID NO: 21454 - DNA, 25 bp, Artificial
  probe
  misc_feature (1)..(25): SEQ ID NO: 497; WAN0249GO_at; Start 56; Stop 80
tcctttatgagcttagtatagcaca

SEQ ID NO: 21455 - DNA, 25 bp, Artificial
  probe
  misc_feature (1)..(25): SEQ ID NO: 497; WAN0249GO_at; Start 51; Stop 75
cgttttcctttatgagcttagtata

SEQ ID NO: 21456 - DNA, 25 bp, Artificial
  probe
  misc_feature (1)..(25): SEQ ID NO: 497; WAN0249GO_at; Start 53; Stop 77
ttttcctttatgagcttagtatagc

SEQ ID NO: 21457 - DNA, 25 bp, Artificial
  probe
  misc_feature (1)..(25): SEQ ID NO: 497; WAN0249GO_at; Start 44; Stop 68
acgcaaacgttttcctttatgagct

SEQ ID NO: 21458 - DNA, 25 bp, Artificial
  probe
  misc_feature (1)..(25): SEQ ID NO: 497; WAN0249GO_at; Start 45; Stop 69
cgcaaacgttttcctttatgagctt

SEQ ID NO: 21459 - DNA, 25 bp, Artificial
  probe
  misc_feature (1)..(25): SEQ ID NO: 497; WAN0249GO_at; Start 69; Stop 93
tagtatagcacaaatagaaaacggt

SEQ ID NO: 21460 - DNA, 25 bp, Artificial
  probe
  misc_feature (1)..(25): SEQ ID NO: 497; WAN0249GO_at; Start 24; Stop 48
caagttttattgataaggaaacgca

SEQ ID NO: 21461 - DNA, 25 bp, Artificial
  probe
  misc_feature (1)..(25): SEQ ID NO: 497; WAN0249GO_at; Start 57; Stop 81
cctttatgagcttagtatagcacaa

SEQ ID NO: 21462 - DNA, 25 bp, Artificial
  probe
  misc_feature (1)..(25): SEQ ID NO: 497; WAN0249GO_at; Start 74; Stop 98
tagcacaaatagaaaacggttgcaa

SEQ ID NO: 21463 - DNA, 25 bp, Artificial
  probe
  misc_feature (1)..(25): SEQ ID NO: 497; WAN0249GO_at; Start 66; Stop 90
gcttagtatagcacaaatagaaaac

SEQ ID NO: 21464 - DNA, 25 bp, Artificial
  probe
  misc_feature (1)..(25): SEQ ID NO: 497; WAN0249GO_at; Start 50; Stop 74
acgttttcctttatgagcttagtat

SEQ ID NO: 21465 - DNA, 25 bp, Artificial
  probe
  misc_feature (1)..(25): SEQ ID NO: 497; WAN0249GO_at; Start 55; Stop 79
ttcctttatgagcttagtatagcac

SEQ ID NO: 21466 - DNA, 25 bp, Artificial
  probe
  misc_feature (1)..(25): SEQ ID NO: 497; WAN0249GO_at; Start 75; Stop 99
agcacaaatagaaaacggttgcaag

SEQ ID NO: 21467 - DNA, 25 bp, Artificial
  probe
  misc_feature (1)..(25): SEQ ID NO: 497; WAN0249GO_at; Start 47; Stop 71
caaacgttttcctttatgagcttag

SEQ ID NO: 21468 - DNA, 25 bp, Artificial
  probe
  misc_feature (1)..(25): SEQ ID NO: 497; WAN0249GO_at; Start 54; Stop 78
tttcctttatgagcttagtatagca

SEQ ID NO: 21469 - DNA, 25 bp, Artificial
  probe
  misc_feature (1)..(25): SEQ ID NO: 497; WAN0249GO_at; Start 58; Stop 82
ctttatgagcttagtatagcacaaa

SEQ ID NO: 21470 - DNA, 25 bp, Artificial
  probe
  misc_feature (1)..(25): SEQ ID NO: 4407; WAN0249GP_at; Start 34; Stop 58
tctatttgtgctatactaagctcat

SEQ ID NO: 21471 - DNA, 25 bp, Artificial
  probe
  misc_feature (1)..(25): SEQ ID NO: 4407; WAN0249GP_at; Start 73; Stop 97
gcgtttccttatcaataaaacttgc

SEQ ID NO: 21472 - DNA, 25 bp, Artificial
  probe
  misc_feature (1)..(25): SEQ ID NO: 4407; WAN0249GP_at; Start 40; Stop 64
tgtgctatactaagctcataaagga

SEQ ID NO: 21473 - DNA, 25 bp, Artificial
  probe
  misc_feature (1)..(25): SEQ ID NO: 4407; WAN0249GP_at; Start 49; Stop 73
ctaagctcataaaggaaaacgtttg

SEQ ID NO: 21474 - DNA, 25 bp, Artificial
  probe
  misc_feature (1)..(25): SEQ ID NO: 4407; WAN0249GP_at; Start 31; Stop 55
ttttctatttgtgctatactaagct

SEQ ID NO: 21475 - DNA, 25 bp, Artificial
  probe
  misc_feature (1)..(25): SEQ ID NO: 4407; WAN0249GP_at; Start 45; Stop 69
tatactaagctcataaaggaaaacg

SEQ ID NO: 21476 - DNA, 25 bp, Artificial
  probe
  misc_feature (1)..(25): SEQ ID NO: 4407; WAN0249GP_at; Start 27; Stop 51
accgttttctatttgtgctatacta

SEQ ID NO: 21477 - DNA, 25 bp, Artificial
  probe
  misc_feature (1)..(25): SEQ ID NO: 4407; WAN0249GP_at; Start 33; Stop 57
ttctatttgtgctatactaagctca

SEQ ID NO: 21478 - DNA, 25 bp, Artificial
  probe
  misc_feature (1)..(25): SEQ ID NO: 4407; WAN0249GP_at; Start 44; Stop 68
ctatactaagctcataaaggaaaac

SEQ ID NO: 21479 - DNA, 25 bp, Artificial
  probe
  misc_feature (1)..(25): SEQ ID NO: 4407; WAN0249GP_at; Start 38; Stop 62
tttgtgctatactaagctcataaag

SEQ ID NO: 21480 - DNA, 25 bp, Artificial
  probe
  misc_feature (1)..(25): SEQ ID NO: 4407; WAN0249GP_at; Start 24; Stop 48
gcaaccgttttctatttgtgctata

SEQ ID NO: 21481 - DNA, 25 bp, Artificial
  probe
  misc_feature (1)..(25): SEQ ID NO: 4407; WAN0249GP_at; Start 19; Stop 43
tacttgcaaccgttttctatttgtg

SEQ ID NO: 21482 - DNA, 25 bp, Artificial
  probe
  misc_feature (1)..(25): SEQ ID NO: 4407; WAN0249GP_at; Start 32; Stop 56
tttctatttgtgctatactaagctc

SEQ ID NO: 21483 - DNA, 25 bp, Artificial
  probe
  misc_feature (1)..(25): SEQ ID NO: 4407; WAN0249GP_at; Start 51; Stop 75
aagctcataaaggaaaacgtttgcg

SEQ ID NO: 21484 - DNA, 25 bp, Artificial
  probe
  misc_feature (1)..(25): SEQ ID NO: 4407; WAN0249GP_at; Start 21; Stop 45
cttgcaaccgttttctatttgtgct

SEQ ID NO: 21485 - DNA, 25 bp, Artificial
  probe
  misc_feature (1)..(25): SEQ ID NO: 4407; WAN0249GP_at; Start 28; Stop 52
ccgttttctatttgtgctatactaa

SEQ ID NO: 21486 - DNA, 25 bp, Artificial
  probe
  misc_feature (1)..(25): SEQ ID NO: 4407; WAN0249GP_at; Start 36; Stop 60
tatttgtgctatactaagctcataa

SEQ ID NO: 21487 - DNA, 25 bp, Artificial
  probe
  misc_feature (1)..(25): SEQ ID NO: 4407; WAN0249GP_at; Start 26; Stop 50
aaccgttttctatttgtgctatact

SEQ ID NO: 21488 - DNA, 25 bp, Artificial
  probe
  misc_feature (1)..(25): SEQ ID NO: 4407; WAN0249GP_at; Start 25; Stop 49
caaccgttttctatttgtgctatac

SEQ ID NO: 21489 - DNA, 25 bp, Artificial
  probe
  misc_feature (1)..(25): SEQ ID NO: 4407; WAN0249GP_at; Start 72; Stop 96
tgcgtttccttatcaataaaacttg

SEQ ID NO: 21490 - DNA, 25 bp, Artificial
  probe
  misc_feature (1)..(25): SEQ ID NO: 4407; WAN0249GP_at; Start 74; Stop 98
cgtttccttatcaataaaacttgct

SEQ ID NO: 21491 - DNA, 25 bp, Artificial
  probe
  misc_feature (1)..(25): SEQ ID NO: 4407; WAN0249GP_at; Start 29; Stop 53
cgttttctatttgtgctatactaag

SEQ ID NO: 21492 - DNA, 25 bp, Artificial
  probe
  misc_feature (1)..(25): SEQ ID NO: 4407; WAN0249GP_at; Start 22; Stop 46
ttgcaaccgttttctatttgtgcta

SEQ ID NO: 21493 - DNA, 25 bp, Artificial
  probe
  misc_feature (1)..(25): SEQ ID NO: 4407; WAN0249GP_at; Start 30; Stop 54
gttttctatttgtgctatactaagc

SEQ ID NO: 21494 - DNA, 25 bp, Artificial
  probe
  misc_feature (1)..(25): SEQ ID NO: 4407; WAN0249GP_at; Start 43; Stop 67
gctatactaagctcataaaggaaaa

SEQ ID NO: 21495 - DNA, 25 bp, Artificial
  probe
  misc_feature (1)..(25): SEQ ID NO: 4407; WAN0249GP_at; Start 46; Stop 70
atactaagctcataaaggaaaacgt

SEQ ID NO: 21496 - DNA, 25 bp, Artificial
  probe
  misc_feature (1)..(25): SEQ ID NO: 4407; WAN0249GP_at; Start 52; Stop 76
agctcataaaggaaaacgtttgcgt

SEQ ID NO: 21497 - DNA, 25 bp, Artificial
  probe
  misc_feature (1)..(25): SEQ ID NO: 4407; WAN0249GP_at; Start 23; Stop 47
tgcaaccgttttctatttgtgctat

SEQ ID NO: 21498 - DNA, 25 bp, Artificial
  probe
  misc_feature (1)..(25): SEQ ID NO: 4407; WAN0249GP_at; Start 35; Stop 59
ctatttgtgctatactaagctcata

SEQ ID NO: 21499 - DNA, 25 bp, Artificial
  probe
  misc_feature (1)..(25): SEQ ID NO: 4407; WAN0249GP_at; Start 20; Stop 44
acttgcaaccgttttctatttgtgc

SEQ ID NO: 21500 - DNA, 25 bp, Artificial
  probe
  misc_feature (1)..(25): SEQ ID NO: 4407; WAN0249GP_at; Start 42; Stop 66
tgctatactaagctcataaaggaaa

SEQ ID NO: 21501 - DNA, 25 bp, Artificial
  probe
  misc_feature (1)..(25): SEQ ID NO: 4407; WAN0249GP_at; Start 39; Stop 63
ttgtgctatactaagctcataaagg

SEQ ID NO: 21502 - DNA, 25 bp, Artificial
  probe
  misc_feature (1)..(25): SEQ ID NO: 4407; WAN0249GP_at; Start 41; Stop 65
gtgctatactaagctcataaaggaa

SEQ ID NO: 21503 - DNA, 25 bp, Artificial
  probe
  misc_feature (1)..(25): SEQ ID NO: 4407; WAN0249GP_at; Start 50; Stop 74
taagctcataaaggaaaacgtttgc

SEQ ID NO: 21504 - DNA, 25 bp, Artificial
  probe
  misc_feature (1)..(25): SEQ ID NO: 262; WAN0249GQ_at; Start 6; Stop 30
cacctcgtgtgttaaaataatggaa

SEQ ID NO: 21505 - DNA, 25 bp, Artificial
  probe
  misc_feature (1)..(25): SEQ ID NO: 262; WAN0249GQ_at; Start 89; Stop 113
gcataattgcaagcgtttttaaaaa

SEQ ID NO: 21506 - DNA, 25 bp, Artificial
  probe
  misc_feature (1)..(25): SEQ ID NO: 262; WAN0249GQ_at; Start 149; Stop 173
ttagcaaagataacttaaaactatc

SEQ ID NO: 21507 - DNA, 25 bp, Artificial
  probe
  misc_feature (1)..(25): SEQ ID NO: 262; WAN0249GQ_at; Start 80; Stop 104
ccttttcaagcataattgcaagcgt

SEQ ID NO: 21508 - DNA, 25 bp, Artificial
  probe
  misc_feature (1)..(25): SEQ ID NO: 262; WAN0249GQ_at; Start 137; Stop 161
gactaactcattttagcaaagataa

SEQ ID NO: 21509 - DNA, 25 bp, Artificial
  probe
  misc_feature (1)..(25): SEQ ID NO: 262; WAN0249GQ_at; Start 9; Stop 33
ctcgtgtgttaaaataatggaacgt

SEQ ID NO: 21510 - DNA, 25 bp, Artificial
  probe
  misc_feature (1)..(25): SEQ ID NO: 262; WAN0249GQ_at; Start 79; Stop 103
tccttttcaagcataattgcaagcg

SEQ ID NO: 21511 - DNA, 25 bp, Artificial
  probe
  misc_feature (1)..(25): SEQ ID NO: 262; WAN0249GQ_at; Start 157; Stop 181
gataacttaaaactatctaatccta

SEQ ID NO: 21512 - DNA, 25 bp, Artificial
  probe
  misc_feature (1)..(25): SEQ ID NO: 262; WAN0249GQ_at; Start 55; Stop 79
cgtttgcgttacttataagtatact

SEQ ID NO: 21513 - DNA, 25 bp, Artificial
  probe
  misc_feature (1)..(25): SEQ ID NO: 262; WAN0249GQ_at; Start 13; Stop 37
tgtgttaaaataatggaacgttgcg

SEQ ID NO: 21514 - DNA, 25 bp, Artificial
  probe
  misc_feature (1)..(25): SEQ ID NO: 262; WAN0249GQ_at; Start 222; Stop 246
tccttagggagcttgaatttatatg

SEQ ID NO: 21515 - DNA, 25 bp, Artificial
  probe
  misc_feature (1)..(25): SEQ ID NO: 262; WAN0249GQ_at; Start 213; Stop 237
tacaaaacctccttagggagcttga

SEQ ID NO: 21516 - DNA, 25 bp, Artificial
  probe
  misc_feature (1)..(25): SEQ ID NO: 262; WAN0249GQ_at; Start 220; Stop 244
cctccttagggagcttgaatttata

SEQ ID NO: 21517 - DNA, 25 bp, Artificial
  probe
  misc_feature (1)..(25): SEQ ID NO: 262; WAN0249GQ_at; Start 142; Stop 166
actcattttagcaaagataacttaa

SEQ ID NO: 21518 - DNA, 25 bp, Artificial
  probe
  misc_feature (1)..(25): SEQ ID NO: 262; WAN0249GQ_at; Start 68; Stop 92
tataagtatactccttttcaagcat

SEQ ID NO: 21519 - DNA, 25 bp, Artificial
  probe
  misc_feature (1)..(25): SEQ ID NO: 262; WAN0249GQ_at; Start 76; Stop 100
tactccttttcaagcataattgcaa

SEQ ID NO: 21520 - DNA, 25 bp, Artificial
  probe
  misc_feature (1)..(25): SEQ ID NO: 262; WAN0249GQ_at; Start 59; Stop 83
tgcgttacttataagtatactcctt

SEQ ID NO: 21521 - DNA, 25 bp, Artificial
  probe
  misc_feature (1)..(25): SEQ ID NO: 262; WAN0249GQ_at; Start 3; Stop 27
tagcacctcgtgtgttaaaataatg

SEQ ID NO: 21522 - DNA, 25 bp, Artificial
  probe
  misc_feature (1)..(25): SEQ ID NO: 262; WAN0249GQ_at; Start 83; Stop 107
tttcaagcataattgcaagcgtttt

SEQ ID NO: 21523 - DNA, 25 bp, Artificial
  probe
  misc_feature (1)..(25): SEQ ID NO: 262; WAN0249GQ_at; Start 49; Stop 73
cgcaaacgtttgcgttacttataag

SEQ ID NO: 21524 - DNA, 25 bp, Artificial
  probe
  misc_feature (1)..(25): SEQ ID NO: 262; WAN0249GQ_at; Start 215; Stop 239
caaaacctccttagggagcttgaat

SEQ ID NO: 21525 - DNA, 25 bp, Artificial
  probe
  misc_feature (1)..(25): SEQ ID NO: 262; WAN0249GQ_at; Start 74; Stop 98
tatactccttttcaagcataattgc

SEQ ID NO: 21526 - DNA, 25 bp, Artificial
  probe
  misc_feature (1)..(25): SEQ ID NO: 262; WAN0249GQ_at; Start 129; Stop 153
tttaaggagactaactcattttagc

SEQ ID NO: 21527 - DNA, 25 bp, Artificial
  probe
  misc_feature (1)..(25): SEQ ID NO: 262; WAN0249GQ_at; Start 1; Stop 25
aatagcacctcgtgtgttaaaataa

SEQ ID NO: 21528 - DNA, 25 bp, Artificial
  probe
  misc_feature (1)..(25): SEQ ID NO: 262; WAN0249GQ_at; Start 86; Stop 110
caagcataattgcaagcgtttttaa

SEQ ID NO: 21529 - DNA, 25 bp, Artificial
  probe
  misc_feature (1)..(25): SEQ ID NO: 262; WAN0249GQ_at; Start 5; Stop 29
gcacctcgtgtgttaaaataatgga

SEQ ID NO: 21530 - DNA, 25 bp, Artificial
  probe
  misc_feature (1)..(25): SEQ ID NO: 262; WAN0249GQ_at; Start 131; Stop 155
taaggagactaactcattttagcaa

SEQ ID NO: 21531 - DNA, 25 bp, Artificial
  probe
  misc_feature (1)..(25): SEQ ID NO: 262; WAN0249GQ_at; Start 70; Stop 94
taagtatactccttttcaagcataa

SEQ ID NO: 21532 - DNA, 25 bp, Artificial
  probe
  misc_feature (1)..(25): SEQ ID NO: 262; WAN0249GQ_at; Start 140; Stop 164
taactcattttagcaaagataactt

SEQ ID NO: 21533 - DNA, 25 bp, Artificial
  probe
  misc_feature (1)..(25): SEQ ID NO: 262; WAN0249GQ_at; Start 15; Stop 39
tgttaaaataatggaacgttgcgta

SEQ ID NO: 21534 - DNA, 25 bp, Artificial
  probe
  misc_feature (1)..(25): SEQ ID NO: 262; WAN0249GQ_at; Start 8; Stop 32
cctcgtgtgttaaaataatggaacg

SEQ ID NO: 21535 - DNA, 25 bp, Artificial
  probe
  misc_feature (1)..(25): SEQ ID NO: 262; WAN0249GQ_at; Start 135; Stop 159
gagactaactcattttagcaaagat

SEQ ID NO: 21536 - DNA, 25 bp, Artificial
  probe
  misc_feature (1)..(25): SEQ ID NO: 262; WAN0249GQ_at; Start 134; Stop 158
ggagactaactcattttagcaaaga

SEQ ID NO: 21537 - DNA, 25 bp, Artificial
  probe
  misc_feature (1)..(25): SEQ ID NO: 262; WAN0249GQ_at; Start 81; Stop 105
cttttcaagcataattgcaagcgtt

SEQ ID NO: 21538 - DNA, 25 bp, Artificial
  probe
  misc_feature (1)..(25): SEQ ID NO: 3733; WAN0249GR_at; Start 196; Stop 220
tttttaaaaacgcttgcaattatgc

SEQ ID NO: 21539 - DNA, 25 bp, Artificial
  probe
  misc_feature (1)..(25): SEQ ID NO: 3733; WAN0249GR_at; Start 202; Stop 226
aaaacgcttgcaattatgcttgaaa

SEQ ID NO: 21540 - DNA, 25 bp, Artificial
  probe
  misc_feature (1)..(25): SEQ ID NO: 3733; WAN0249GR_at; Start 63; Stop 87
catataaattcaagctccctaagga

SEQ ID NO: 21541 - DNA, 25 bp, Artificial
  probe
  misc_feature (1)..(25): SEQ ID NO: 3733; WAN0249GR_at; Start 284; Stop 308
ttattttaacacacgaggtgctatt

SEQ ID NO: 21542 - DNA, 25 bp, Artificial
  probe
  misc_feature (1)..(25): SEQ ID NO: 3733; WAN0249GR_at; Start 206; Stop 230
cgcttgcaattatgcttgaaaagga

SEQ ID NO: 21543 - DNA, 25 bp, Artificial
  probe
  misc_feature (1)..(25): SEQ ID NO: 3733; WAN0249GR_at; Start 277; Stop 301
cgttccattattttaacacacgagg

SEQ ID NO: 21544 - DNA, 25 bp, Artificial
  probe
  misc_feature (1)..(25): SEQ ID NO: 3733; WAN0249GR_at; Start 236; Stop 260
cttataagtaacgcaaacgtttgcg

SEQ ID NO: 21545 - DNA, 25 bp, Artificial
  probe
  misc_feature (1)..(25): SEQ ID NO: 3733; WAN0249GR_at; Start 70; Stop 94
attcaagctccctaaggaggttttg

SEQ ID NO: 21546 - DNA, 25 bp, Artificial
  probe
  misc_feature (1)..(25): SEQ ID NO: 3733; WAN0249GR_at; Start 219; Stop 243
gcttgaaaaggagtatacttataag

SEQ ID NO: 21547 - DNA, 25 bp, Artificial
  probe
  misc_feature (1)..(25): SEQ ID NO: 3733; WAN0249GR_at; Start 204; Stop 228
aacgcttgcaattatgcttgaaaag

SEQ ID NO: 21548 - DNA, 25 bp, Artificial
  probe
  misc_feature (1)..(25): SEQ ID NO: 3733; WAN0249GR_at; Start 128; Stop 152
taggattagatagttttaagttatc

SEQ ID NO: 21549 - DNA, 25 bp, Artificial
  probe
  misc_feature (1)..(25): SEQ ID NO: 3733; WAN0249GR_at; Start 222; Stop 246
tgaaaaggagtatacttataagtaa

SEQ ID NO: 21550 - DNA, 25 bp, Artificial
  probe
  misc_feature (1)..(25): SEQ ID NO: 3733; WAN0249GR_at; Start 154; Stop 178
ttgctaaaatgagttagtctcctta

SEQ ID NO: 21551 - DNA, 25 bp, Artificial
  probe
  misc_feature (1)..(25): SEQ ID NO: 3733; WAN0249GR_at; Start 200; Stop 224
taaaaacgcttgcaattatgcttga

SEQ ID NO: 21552 - DNA, 25 bp, Artificial
  probe
  misc_feature (1)..(25): SEQ ID NO: 3733; WAN0249GR_at; Start 281; Stop 305
ccattattttaacacacgaggtgct

SEQ ID NO: 21553 - DNA, 25 bp, Artificial
  probe
  misc_feature (1)..(25): SEQ ID NO: 3733; WAN0249GR_at; Start 143; Stop 167
ttaagttatctttgctaaaatgagt

SEQ ID NO: 21554 - DNA, 25 bp, Artificial
  probe
  misc_feature (1)..(25): SEQ ID NO: 3733; WAN0249GR_at; Start 66; Stop 90
ataaattcaagctccctaaggaggt

SEQ ID NO: 21555 - DNA, 25 bp, Artificial
  probe
  misc_feature (1)..(25): SEQ ID NO: 3733; WAN0249GR_at; Start 152; Stop 176
ctttgctaaaatgagttagtctcct

SEQ ID NO: 21556 - DNA, 25 bp, Artificial
  probe
  misc_feature (1)..(25): SEQ ID NO: 3733; WAN0249GR_at; Start 282; Stop 306
cattattttaacacacgaggtgcta

SEQ ID NO: 21557 - DNA, 25 bp, Artificial
  probe
  misc_feature (1)..(25): SEQ ID NO: 3733; WAN0249GR_at; Start 72; Stop 96
tcaagctccctaaggaggttttgta

SEQ ID NO: 21558 - DNA, 25 bp, Artificial
  probe
  misc_feature (1)..(25): SEQ ID NO: 3733; WAN0249GR_at; Start 65; Stop 89
tataaattcaagctccctaaggagg

SEQ ID NO: 21559 - DNA, 25 bp, Artificial
  probe
  misc_feature (1)..(25): SEQ ID NO: 3733; WAN0249GR_at; Start 208; Stop 232
cttgcaattatgcttgaaaaggagt

SEQ ID NO: 21560 - DNA, 25 bp, Artificial
  probe
  misc_feature (1)..(25): SEQ ID NO: 3733; WAN0249GR_at; Start 199; Stop 223
ttaaaaacgcttgcaattatgcttg

SEQ ID NO: 21561 - DNA, 25 bp, Artificial
  probe
  misc_feature (1)..(25): SEQ ID NO: 3733; WAN0249GR_at; Start 279; Stop 303
ttccattattttaacacacgaggtg

SEQ ID NO: 21562 - DNA, 25 bp, Artificial
  probe
  misc_feature (1)..(25): SEQ ID NO: 3733; WAN0249GR_at; Start 197; Stop 221
ttttaaaaacgcttgcaattatgct

SEQ ID NO: 21563 - DNA, 25 bp, Artificial
  probe
  misc_feature (1)..(25): SEQ ID NO: 3733; WAN0249GR_at; Start 212; Stop 236
caattatgcttgaaaaggagtatac

SEQ ID NO: 21564 - DNA, 25 bp, Artificial
  probe
  misc_feature (1)..(25): SEQ ID NO: 3733; WAN0249GR_at; Start 270; Stop 294
tacgcaacgttccattattttaaca

SEQ ID NO: 21565 - DNA, 25 bp, Artificial
  probe
  misc_feature (1)..(25): SEQ ID NO: 3733; WAN0249GR_at; Start 156; Stop 180
gctaaaatgagttagtctccttaaa

SEQ ID NO: 21566 - DNA, 25 bp, Artificial
  probe
  misc_feature (1)..(25): SEQ ID NO: 3733; WAN0249GR_at; Start 280; Stop 304
tccattattttaacacacgaggtgc

SEQ ID NO: 21567 - DNA, 25 bp, Artificial
  probe
  misc_feature (1)..(25): SEQ ID NO: 3733; WAN0249GR_at; Start 207; Stop 231
gcttgcaattatgcttgaaaaggag

SEQ ID NO: 21568 - DNA, 25 bp, Artificial
  probe
  misc_feature (1)..(25): SEQ ID NO: 3733; WAN0249GR_at; Start 273; Stop 297
gcaacgttccattattttaacacac

SEQ ID NO: 21569 - DNA, 25 bp, Artificial
  probe
  misc_feature (1)..(25): SEQ ID NO: 3733; WAN0249GR_at; Start 216; Stop 240
tatgcttgaaaaggagtatacttat

SEQ ID NO: 21570 - DNA, 25 bp, Artificial
  probe
  misc_feature (1)..(25): SEQ ID NO: 3733; WAN0249GR_at; Start 210; Stop 234
tgcaattatgcttgaaaaggagtat

SEQ ID NO: 21571 - DNA, 25 bp, Artificial
  probe
  misc_feature (1)..(25): SEQ ID NO: 3733; WAN0249GR_at; Start 151; Stop 175
tctttgctaaaatgagttagtctcc

SEQ ID NO: 21572 - DNA, 25 bp, Artificial
  probe
  misc_feature (1)..(25): SEQ ID NO: 5146; WAN0249GS_at; Start 10; Stop 34
agatacaaatttatactaatacatt

SEQ ID NO: 21573 - DNA, 25 bp, Artificial
  probe
  misc_feature (1)..(25): SEQ ID NO: 5146; WAN0249GS_at; Start 35; Stop 59
ttgtaaaaaagcgagtttcgattga

SEQ ID NO: 21574 - DNA, 25 bp, Artificial
  probe
  misc_feature (1)..(25): SEQ ID NO: 5146; WAN0249GS_at; Start 2; Stop 26
tgagtataagatacaaatttatact

SEQ ID NO: 21575 - DNA, 25 bp, Artificial
  probe
  misc_feature (1)..(25): SEQ ID NO: 5146; WAN0249GS_at; Start 8; Stop 32
taagatacaaatttatactaataca

SEQ ID NO: 21576 - DNA, 25 bp, Artificial
  probe
  misc_feature (1)..(25): SEQ ID NO: 5146; WAN0249GS_at; Start 15; Stop 39
caaatttatactaatacattttgta

SEQ ID NO: 21577 - DNA, 25 bp, Artificial
  probe
  misc_feature (1)..(25): SEQ ID NO: 5146; WAN0249GS_at; Start 53; Stop 77
cgattgaaattcgcttttttaaatg

SEQ ID NO: 21578 - DNA, 25 bp, Artificial
  probe
  misc_feature (1)..(25): SEQ ID NO: 5146; WAN0249GS_at; Start 25; Stop 49
ctaatacattttgtaaaaaagcgag

SEQ ID NO: 21579 - DNA, 25 bp, Artificial
  probe
  misc_feature (1)..(25): SEQ ID NO: 5146; WAN0249GS_at; Start 36; Stop 60
tgtaaaaaagcgagtttcgattgaa

SEQ ID NO: 21580 - DNA, 25 bp, Artificial
  probe
  misc_feature (1)..(25): SEQ ID NO: 5146; WAN0249GS_at; Start 11; Stop 35
gatacaaatttatactaatacattt

SEQ ID NO: 21581 - DNA, 25 bp, Artificial
  probe
  misc_feature (1)..(25): SEQ ID NO: 5146; WAN0249GS_at; Start 13; Stop 37
tacaaatttatactaatacattttg

SEQ ID NO: 21582 - DNA, 25 bp, Artificial
  probe
  misc_feature (1)..(25): SEQ ID NO: 5146; WAN0249GS_at; Start 46; Stop 70
cgagtttcgattgaaattcgctttt

SEQ ID NO: 21583 - DNA, 25 bp, Artificial
  probe
  misc_feature (1)..(25): SEQ ID NO: 5146; WAN0249GS_at; Start 1; Stop 25
ttgagtataagatacaaatttatac

SEQ ID NO: 21584 - DNA, 25 bp, Artificial
  probe
  misc_feature (1)..(25): SEQ ID NO: 5146; WAN0249GS_at; Start 9; Stop 33
aagatacaaatttatactaatacat

SEQ ID NO: 21585 - DNA, 25 bp, Artificial
  probe
  misc_feature (1)..(25): SEQ ID NO: 5146; WAN0249GS_at; Start 41; Stop 65
aaaagcgagtttcgattgaaattcg

SEQ ID NO: 21586 - DNA, 25 bp, Artificial
  probe
  misc_feature (1)..(25): SEQ ID NO: 5146; WAN0249GS_at; Start 45; Stop 69
gcgagtttcgattgaaattcgcttt

SEQ ID NO: 21587 - DNA, 25 bp, Artificial
  probe
  misc_feature (1)..(25): SEQ ID NO: 5146; WAN0249GS_at; Start 43; Stop 67
aagcgagtttcgattgaaattcgct

SEQ ID NO: 21588 - DNA, 25 bp, Artificial
  probe
  misc_feature (1)..(25): SEQ ID NO: 5146; WAN0249GS_at; Start 42; Stop 66
aaagcgagtttcgattgaaattcgc

SEQ ID NO: 21589 - DNA, 25 bp, Artificial
  probe
  misc_feature (1)..(25): SEQ ID NO: 5146; WAN0249GS_at; Start 44; Stop 68
agcgagtttcgattgaaattcgctt

SEQ ID NO: 21590 - DNA, 25 bp, Artificial
  probe
  misc_feature (1)..(25): SEQ ID NO: 5146; WAN0249GS_at; Start 3; Stop 27
gagtataagatacaaatttatacta

SEQ ID NO: 21591 - DNA, 25 bp, Artificial
  probe
  misc_feature (1)..(25): SEQ ID NO: 3653; WAN0249GT_at; Start 72; Stop 96
gtataaatttgtatcttatactcaa

SEQ ID NO: 21592 - DNA, 25 bp, Artificial
  probe
  misc_feature (1)..(25): SEQ ID NO: 3653; WAN0249GT_at; Start 30; Stop 54
agcgaatttcaatcgaaactcgctt

SEQ ID NO: 21593 - DNA, 25 bp, Artificial
  probe
  misc_feature (1)..(25): SEQ ID NO: 3653; WAN0249GT_at; Start 70; Stop 94
tagtataaatttgtatcttatactc

SEQ ID NO: 21594 - DNA, 25 bp, Artificial
  probe
  misc_feature (1)..(25): SEQ ID NO: 3653; WAN0249GT_at; Start 48; Stop 72
ctcgcttttttacaaaatgtattag

SEQ ID NO: 21595 - DNA, 25 bp, Artificial
  probe
  misc_feature (1)..(25): SEQ ID NO: 3653; WAN0249GT_at; Start 37; Stop 61
ttcaatcgaaactcgcttttttaca

SEQ ID NO: 21596 - DNA, 25 bp, Artificial
  probe
  misc_feature (1)..(25): SEQ ID NO: 3653; WAN0249GT_at; Start 60; Stop 84
caaaatgtattagtataaatttgta

SEQ ID NO: 21597 - DNA, 25 bp, Artificial
  probe
  misc_feature (1)..(25): SEQ ID NO: 3653; WAN0249GT_at; Start 29; Stop 53
aagcgaatttcaatcgaaactcgct

SEQ ID NO: 21598 - DNA, 25 bp, Artificial
  probe
  misc_feature (1)..(25): SEQ ID NO: 3653; WAN0249GT_at; Start 20; Stop 44
catttaaaaaagcgaatttcaatcg

SEQ ID NO: 21599 - DNA, 25 bp, Artificial
  probe
  misc_feature (1)..(25): SEQ ID NO: 3653; WAN0249GT_at; Start 58; Stop 82
tacaaaatgtattagtataaatttg

SEQ ID NO: 21600 - DNA, 25 bp, Artificial
  probe
  misc_feature (1)..(25): SEQ ID NO: 3653; WAN0249GT_at; Start 27; Stop 51
aaaagcgaatttcaatcgaaactcg

SEQ ID NO: 21601 - DNA, 25 bp, Artificial
  probe
  misc_feature (1)..(25): SEQ ID NO: 3653; WAN0249GT_at; Start 31; Stop 55
gcgaatttcaatcgaaactcgcttt

SEQ ID NO: 21602 - DNA, 25 bp, Artificial
  probe
  misc_feature (1)..(25): SEQ ID NO: 3653; WAN0249GT_at; Start 63; Stop 87
aatgtattagtataaatttgtatct

SEQ ID NO: 21603 - DNA, 25 bp, Artificial
  probe
  misc_feature (1)..(25): SEQ ID NO: 3653; WAN0249GT_at; Start 38; Stop 62
tcaatcgaaactcgcttttttacaa

SEQ ID NO: 21604 - DNA, 25 bp, Artificial
  probe
  misc_feature (1)..(25): SEQ ID NO: 3653; WAN0249GT_at; Start 62; Stop 86
aaatgtattagtataaatttgtatc

SEQ ID NO: 21605 - DNA, 25 bp, Artificial
  probe
  misc_feature (1)..(25): SEQ ID NO: 3653; WAN0249GT_at; Start 65; Stop 89
tgtattagtataaatttgtatctta

SEQ ID NO: 21606 - DNA, 25 bp, Artificial
  probe
  misc_feature (1)..(25): SEQ ID NO: 3653; WAN0249GT_at; Start 32; Stop 56
cgaatttcaatcgaaactcgctttt

SEQ ID NO: 21607 - DNA, 25 bp, Artificial
  probe
  misc_feature (1)..(25): SEQ ID NO: 3653; WAN0249GT_at; Start 71; Stop 95
agtataaatttgtatcttatactca

SEQ ID NO: 21608 - DNA, 25 bp, Artificial
  probe
  misc_feature (1)..(25): SEQ ID NO: 3653; WAN0249GT_at; Start 28; Stop 52
aaagcgaatttcaatcgaaactcgc

SEQ ID NO: 21609 - DNA, 25 bp, Artificial
  probe
  misc_feature (1)..(25): SEQ ID NO: 3822; WAN0249GU_at; Start 11; Stop 35
cctatctcctgatggcgaaaagaat

SEQ ID NO: 21610 - DNA, 25 bp, Artificial
  probe
  misc_feature (1)..(25): SEQ ID NO: 3822; WAN0249GU_at; Start 241; Stop 265
gccgtcaatattgcaaaaactattt

SEQ ID NO: 21611 - DNA, 25 bp, Artificial
  probe
  misc_feature (1)..(25): SEQ ID NO: 3822; WAN0249GU_at; Start 46; Stop 70
tgcaagttgttctgaactcgagaaa

SEQ ID NO: 21612 - DNA, 25 bp, Artificial
  probe
  misc_feature (1)..(25): SEQ ID NO: 3822; WAN0249GU_at; Start 74; Stop 98
catgccgaaatcgaagaaaagcgtg

SEQ ID NO: 21613 - DNA, 25 bp, Artificial
  probe
  misc_feature (1)..(25): SEQ ID NO: 3822; WAN0249GU_at; Start 344; Stop 368
taagtgtgtatatcataaaaacacc

SEQ ID NO: 21614 - DNA, 25 bp, Artificial
  probe
  misc_feature (1)..(25): SEQ ID NO: 3822; WAN0249GU_at; Start 40; Stop 64
caatggtgcaagttgttctgaactc

SEQ ID NO: 21615 - DNA, 25 bp, Artificial
  probe
  misc_feature (1)..(25): SEQ ID NO: 3822; WAN0249GU_at; Start 196; Stop 220
tacattcttaaaataacttagtaca

SEQ ID NO: 21616 - DNA, 25 bp, Artificial
  probe
  misc_feature (1)..(25): SEQ ID NO: 3822; WAN0249GU_at; Start 226; Stop 250
gacaatgctgccactgccgtcaata

SEQ ID NO: 21617 - DNA, 25 bp, Artificial
  probe
  misc_feature (1)..(25): SEQ ID NO: 3822; WAN0249GU_at; Start 213; Stop 237
ttagtacataaatgacaatgctgcc

SEQ ID NO: 21618 - DNA, 25 bp, Artificial
  probe
  misc_feature (1)..(25): SEQ ID NO: 3822; WAN0249GU_at; Start 352; Stop 376
tatatcataaaaacaccttctttcc

SEQ ID NO: 21619 - DNA, 25 bp, Artificial
  probe
  misc_feature (1)..(25): SEQ ID NO: 3822; WAN0249GU_at; Start 95; Stop 119
cgtgcagaacttgaagcgaagaagc

SEQ ID NO: 21620 - DNA, 25 bp, Artificial
  probe
  misc_feature (1)..(25): SEQ ID NO: 3822; WAN0249GU_at; Start 232; Stop 256
gctgccactgccgtcaatattgcaa

SEQ ID NO: 21621 - DNA, 25 bp, Artificial
  probe
  misc_feature (1)..(25): SEQ ID NO: 3822; WAN0249GU_at; Start 4; Stop 28
gactcaccctatctcctgatggcga

SEQ ID NO: 21622 - DNA, 25 bp, Artificial
  probe
  misc_feature (1)..(25): SEQ ID NO: 3822; WAN0249GU_at; Start 327; Stop 351
aataaacaacaccaatttaagtgtg

SEQ ID NO: 21623 - DNA, 25 bp, Artificial
  probe
  misc_feature (1)..(25): SEQ ID NO: 3822; WAN0249GU_at; Start 385; Stop 409
tattataatactttatgtaagcgaa

SEQ ID NO: 21624 - DNA, 25 bp, Artificial
  probe
  misc_feature (1)..(25): SEQ ID NO: 3822; WAN0249GU_at; Start 235; Stop 259
gccactgccgtcaatattgcaaaaa

SEQ ID NO: 21625 - DNA, 25 bp, Artificial
  probe
  misc_feature (1)..(25): SEQ ID NO: 3822; WAN0249GU_at; Start 33; Stop 57
aatttagcaatggtgcaagttgttc

SEQ ID NO: 21626 - DNA, 25 bp, Artificial
  probe
  misc_feature (1)..(25): SEQ ID NO: 3822; WAN0249GU_at; Start 17; Stop 41
tcctgatggcgaaaagaatttagca

SEQ ID NO: 21627 - DNA, 25 bp, Artificial
  probe
  misc_feature (1)..(25): SEQ ID NO: 3822; WAN0249GU_at; Start 336; Stop 360
caccaatttaagtgtgtatatcata

SEQ ID NO: 21628 - DNA, 25 bp, Artificial
  probe
  misc_feature (1)..(25): SEQ ID NO: 3822; WAN0249GU_at; Start 84; Stop 108
tcgaagaaaagcgtgcagaacttga

SEQ ID NO: 21629 - DNA, 25 bp, Artificial
  probe
  misc_feature (1)..(25): SEQ ID NO: 3822; WAN0249GU_at; Start 98; Stop 122
gcagaacttgaagcgaagaagcaag

SEQ ID NO: 21630 - DNA, 25 bp, Artificial
  probe
  misc_feature (1)..(25): SEQ ID NO: 3822; WAN0249GU_at; Start 106; Stop 130
tgaagcgaagaagcaagaaatgttg

SEQ ID NO: 21631 - DNA, 25 bp, Artificial
  probe
  misc_feature (1)..(25): SEQ ID NO: 3822; WAN0249GU_at; Start 56; Stop 80
tctgaactcgagaaaaaacatgccg

SEQ ID NO: 21632 - DNA, 25 bp, Artificial
  probe
  misc_feature (1)..(25): SEQ ID NO: 3822; WAN0249GU_at; Start 363; Stop 387
aacaccttctttcctacaattatat

SEQ ID NO: 21633 - DNA, 25 bp, Artificial
  probe
  misc_feature (1)..(25): SEQ ID NO: 3822; WAN0249GU_at; Start 89; Stop 113
gaaaagcgtgcagaacttgaagcga

SEQ ID NO: 21634 - DNA, 25 bp, Artificial
  probe
  misc_feature (1)..(25): SEQ ID NO: 3822; WAN0249GU_at; Start 221; Stop 245
taaatgacaatgctgccactgccgt

SEQ ID NO: 21635 - DNA, 25 bp, Artificial
  probe
  misc_feature (1)..(25): SEQ ID NO: 3822; WAN0249GU_at; Start 134; Stop 158
cgcttggataaatagaatttagaaa

SEQ ID NO: 21636 - DNA, 25 bp, Artificial
  probe
  misc_feature (1)..(25): SEQ ID NO: 3822; WAN0249GU_at; Start 8; Stop 32
caccctatctcctgatggcgaaaag

SEQ ID NO: 21637 - DNA, 25 bp, Artificial
  probe
  misc_feature (1)..(25): SEQ ID NO: 3822; WAN0249GU_at; Start 303; Stop 327
taacaagcttattacaagaaaggta

SEQ ID NO: 21638 - DNA, 25 bp, Artificial
  probe
  misc_feature (1)..(25): SEQ ID NO: 3822; WAN0249GU_at; Start 78; Stop 102
ccgaaatcgaagaaaagcgtgcaga

SEQ ID NO: 21639 - DNA, 25 bp, Artificial
  probe
  misc_feature (1)..(25): SEQ ID NO: 3822; WAN0249GU_at; Start 296; Stop 320
tatcaggtaacaagcttattacaag

SEQ ID NO: 21640 - DNA, 25 bp, Artificial
  probe
  misc_feature (1)..(25): SEQ ID NO: 3822; WAN0249GU_at; Start 1; Stop 25
gtcgactcaccctatctcctgatgg

SEQ ID NO: 21641 - DNA, 25 bp, Artificial
  probe
  misc_feature (1)..(25): SEQ ID NO: 3822; WAN0249GU_at; Start 65; Stop 89
gagaaaaaacatgccgaaatcgaag

SEQ ID NO: 21642 - DNA, 25 bp, Artificial
  probe
  misc_feature (1)..(25): SEQ ID NO: 3822; WAN0249GU_at; Start 286; Stop 310
ccaaaaatcttatcaggtaacaagc

SEQ ID NO: 21643 - DNA, 25 bp, Artificial
  probe
  misc_feature (1)..(25): SEQ ID NO: 3799; WAN0249GV_at; Start 196; Stop 220
cagtggcagcattgtcatttatgta

SEQ ID NO: 21644 - DNA, 25 bp, Artificial
  probe
  misc_feature (1)..(25): SEQ ID NO: 3799; WAN0249GV_at; Start 201; Stop 225
gcagcattgtcatttatgtactaag

SEQ ID NO: 21645 - DNA, 25 bp, Artificial
  probe
  misc_feature (1)..(25): SEQ ID NO: 3799; WAN0249GV_at; Start 121; Stop 145
taataagcttgttacctgataagat

SEQ ID NO: 21646 - DNA, 25 bp, Artificial
  probe
  misc_feature (1)..(25): SEQ ID NO: 3799; WAN0249GV_at; Start 127; Stop 151
gcttgttacctgataagatttttgg

SEQ ID NO: 21647 - DNA, 25 bp, Artificial
  probe
  misc_feature (1)..(25): SEQ ID NO: 3799; WAN0249GV_at; Start 351; Stop 375
cgatttcggcatgttttttctcgag

SEQ ID NO: 21648 - DNA, 25 bp, Artificial
  probe
  misc_feature (1)..(25): SEQ ID NO: 3799; WAN0249GV_at; Start 184; Stop 208
caatattgacggcagtggcagcatt

SEQ ID NO: 21649 - DNA, 25 bp, Artificial
  probe
  misc_feature (1)..(25): SEQ ID NO: 3799; WAN0249GV_at; Start 329; Stop 353
tcaagttctgcacgcttttcttcga

SEQ ID NO: 21650 - DNA, 25 bp, Artificial
  probe
  misc_feature (1)..(25): SEQ ID NO: 3799; WAN0249GV_at; Start 62; Stop 86
gaaagaaggtgtttttatgatatac

SEQ ID NO: 21651 - DNA, 25 bp, Artificial
  probe
  misc_feature (1)..(25): SEQ ID NO: 3799; WAN0249GV_at; Start 324; Stop 348
tcgcttcaagttctgcacgcttttc

SEQ ID NO: 21652 - DNA, 25 bp, Artificial
  probe
  misc_feature (1)..(25): SEQ ID NO: 3799; WAN0249GV_at; Start 77; Stop 101
tatgatatacacacttaaattggtg

SEQ ID NO: 21653 - DNA, 25 bp, Artificial
  probe
  misc_feature (1)..(25): SEQ ID NO: 3799; WAN0249GV_at; Start 307; Stop 331
caacatttcttgcttcttcgcttca

SEQ ID NO: 21654 - DNA, 25 bp, Artificial
  probe
  misc_feature (1)..(25): SEQ ID NO: 3799; WAN0249GV_at; Start 178; Stop 202
tttttgcaatattgacggcagtggc

SEQ ID NO: 21655 - DNA, 25 bp, Artificial
  probe
  misc_feature (1)..(25): SEQ ID NO: 3799; WAN0249GV_at; Start 404; Stop 428
tcttttcgccatcaggagatagggt

SEQ ID NO: 21656 - DNA, 25 bp, Artificial
  probe
  misc_feature (1)..(25): SEQ ID NO: 3799; WAN0249GV_at; Start 172; Stop 196
aaatagtttttgcaatattgacggc

SEQ ID NO: 21657 - DNA, 25 bp, Artificial
  probe
  misc_feature (1)..(25): SEQ ID NO: 3799; WAN0249GV_at; Start 279; Stop 303
tttctaaattctatttatccaagcg

SEQ ID NO: 21658 - DNA, 25 bp, Artificial
  probe
  misc_feature (1)..(25): SEQ ID NO: 3799; WAN0249GV_at; Start 187; Stop 211
tattgacggcagtggcagcattgtc

SEQ ID NO: 21659 - DNA, 25 bp, Artificial
  probe
  misc_feature (1)..(25): SEQ ID NO: 3799; WAN0249GV_at; Start 373; Stop 397
gagttcagaacaacttgcaccattg

SEQ ID NO: 21660 - DNA, 25 bp, Artificial
  probe
  misc_feature (1)..(25): SEQ ID NO: 3799; WAN0249GV_at; Start 357; Stop 381
cggcatgttttttctcgagttcaga

SEQ ID NO: 21661 - DNA, 25 bp, Artificial
  probe
  misc_feature (1)..(25): SEQ ID NO: 3799; WAN0249GV_at; Start 48; Stop 72
taatataattgtaggaaagaaggtg

SEQ ID NO: 21662 - DNA, 25 bp, Artificial
  probe
  misc_feature (1)..(25): SEQ ID NO: 3799; WAN0249GV_at; Start 378; Stop 402
cagaacaacttgcaccattgctaaa

SEQ ID NO: 21663 - DNA, 25 bp, Artificial
  probe
  misc_feature (1)..(25): SEQ ID NO: 3799; WAN0249GV_at; Start 409; Stop 433
tcgccatcaggagatagggtgagtc

SEQ ID NO: 21664 - DNA, 25 bp, Artificial
  probe
  misc_feature (1)..(25): SEQ ID NO: 3799; WAN0249GV_at; Start 397; Stop 421
gctaaattcttttcgccatcaggag

SEQ ID NO: 21665 - DNA, 25 bp, Artificial
  probe
  misc_feature (1)..(25): SEQ ID NO: 3799; WAN0249GV_at; Start 335; Stop 359
tctgcacgcttttcttcgatttcgg

SEQ ID NO: 21666 - DNA, 25 bp, Artificial
  probe
  misc_feature (1)..(25): SEQ ID NO: 3799; WAN0249GV_at; Start 107; Stop 131
tattacctttcttgtaataagcttg

SEQ ID NO: 21667 - DNA, 25 bp, Artificial
  probe
  misc_feature (1)..(25): SEQ ID NO: 3799; WAN0249GV_at; Start 412; Stop 436
ccatcaggagatagggtgagtcgac

SEQ ID NO: 21668 - DNA, 25 bp, Artificial
  probe
  misc_feature (1)..(25): SEQ ID NO: 3799; WAN0249GV_at; Start 367; Stop 391
tttctcgagttcagaacaacttgca

SEQ ID NO: 21669 - DNA, 25 bp, Artificial
  probe
  misc_feature (1)..(25): SEQ ID NO: 3799; WAN0249GV_at; Start 318; Stop 342
gcttcttcgcttcaagttctgcacg

SEQ ID NO: 21670 - DNA, 25 bp, Artificial
  probe
  misc_feature (1)..(25): SEQ ID NO: 3799; WAN0249GV_at; Start 181; Stop 205
ttgcaatattgacggcagtggcagc

SEQ ID NO: 21671 - DNA, 25 bp, Artificial
  probe
  misc_feature (1)..(25): SEQ ID NO: 3799; WAN0249GV_at; Start 191; Stop 215
gacggcagtggcagcattgtcattt

SEQ ID NO: 21672 - DNA, 25 bp, Artificial
  probe
  misc_feature (1)..(25): SEQ ID NO: 3799; WAN0249GV_at; Start 383; Stop 407
caacttgcaccattgctaaattctt

SEQ ID NO: 21673 - DNA, 25 bp, Artificial
  probe
  misc_feature (1)..(25): SEQ ID NO: 3799; WAN0249GV_at; Start 26; Stop 50
tattcgcttacataaagtattataa

SEQ ID NO: 21674 - DNA, 25 bp, Artificial
  probe
  misc_feature (1)..(25): SEQ ID NO: 3799; WAN0249GV_at; Start 339; Stop 363
cacgcttttcttcgatttcggcatg

SEQ ID NO: 21675 - DNA, 25 bp, Artificial
  probe
  misc_feature (1)..(25): SEQ ID NO: 3799; WAN0249GV_at; Start 80; Stop 104
gatatacacacttaaattggtgttg

SEQ ID NO: 21676 - DNA, 25 bp, Artificial
  probe
  misc_feature (1)..(25): SEQ ID NO: 3799; WAN0249GV_at; Start 217; Stop 241
tgtactaagttattttaagaatgta

SEQ ID NO: 21677 - DNA, 25 bp, Artificial
  probe
  misc_feature (1)..(25): SEQ ID NO: 534; WAN0249GW_at; Start 110; Stop 134
gataagataaagaatataaacaacg

SEQ ID NO: 21678 - DNA, 25 bp, Artificial
  probe
  misc_feature (1)..(25): SEQ ID NO: 534; WAN0249GW_at; Start 92; Stop 116
ggaactttaaacaacattgataaga

SEQ ID NO: 21679 - DNA, 25 bp, Artificial
  probe
  misc_feature (1)..(25): SEQ ID NO: 534; WAN0249GW_at; Start 48; Stop 72
tgtacgacgaagtcgtcattgcaat

SEQ ID NO: 21680 - DNA, 25 bp, Artificial
  probe
  misc_feature (1)..(25): SEQ ID NO: 534; WAN0249GW_at; Start 69; Stop 93
caatgctgatccaccacctaaaggg

SEQ ID NO: 21681 - DNA, 25 bp, Artificial
  probe
  misc_feature (1)..(25): SEQ ID NO: 534; WAN0249GW_at; Start 62; Stop 86
gtcattgcaatgctgatccaccacc

SEQ ID NO: 21682 - DNA, 25 bp, Artificial
  probe
  misc_feature (1)..(25): SEQ ID NO: 534; WAN0249GW_at; Start 106; Stop 130
cattgataagataaagaatataaac

SEQ ID NO: 21683 - DNA, 25 bp, Artificial
  probe
  misc_feature (1)..(25): SEQ ID NO: 534; WAN0249GW_at; Start 71; Stop 95
atgctgatccaccacctaaagggaa

SEQ ID NO: 21684 - DNA, 25 bp, Artificial
  probe
  misc_feature (1)..(25): SEQ ID NO: 534; WAN0249GW_at; Start 72; Stop 96
tgctgatccaccacctaaagggaac

SEQ ID NO: 21685 - DNA, 25 bp, Artificial
  probe
  misc_feature (1)..(25): SEQ ID NO: 534; WAN0249GW_at; Start 60; Stop 84
tcgtcattgcaatgctgatccacca

SEQ ID NO: 21686 - DNA, 25 bp, Artificial
  probe
  misc_feature (1)..(25): SEQ ID NO: 534; WAN0249GW_at; Start 73; Stop 97
gctgatccaccacctaaagggaact

SEQ ID NO: 21687 - DNA, 25 bp, Artificial
  probe
  misc_feature (1)..(25): SEQ ID NO: 534; WAN0249GW_at; Start 39; Stop 63
tatatacaatgtacgacgaagtcgt

SEQ ID NO: 21688 - DNA, 25 bp, Artificial
  probe
  misc_feature (1)..(25): SEQ ID NO: 534; WAN0249GW_at; Start 148; Stop 172
cccaattaattttattgtatatctc

SEQ ID NO: 21689 - DNA, 25 bp, Artificial
  probe
  misc_feature (1)..(25): SEQ ID NO: 534; WAN0249GW_at; Start 63; Stop 87
tcattgcaatgctgatccaccacct

SEQ ID NO: 21690 - DNA, 25 bp, Artificial
  probe
  misc_feature (1)..(25): SEQ ID NO: 534; WAN0249GW_at; Start 52; Stop 76
cgacgaagtcgtcattgcaatgctg

SEQ ID NO: 21691 - DNA, 25 bp, Artificial
  probe
  misc_feature (1)..(25): SEQ ID NO: 534; WAN0249GW_at; Start 58; Stop 82
agtcgtcattgcaatgctgatccac

SEQ ID NO: 21692 - DNA, 25 bp, Artificial
  probe
  misc_feature (1)..(25): SEQ ID NO: 534; WAN0249GW_at; Start 55; Stop 79
cgaagtcgtcattgcaatgctgatc

SEQ ID NO: 21693 - DNA, 25 bp, Artificial
  probe
  misc_feature (1)..(25): SEQ ID NO: 534; WAN0249GW_at; Start 112; Stop 136
taagataaagaatataaacaacgaa

SEQ ID NO: 21694 - DNA, 25 bp, Artificial
  probe
  misc_feature (1)..(25): SEQ ID NO: 534; WAN0249GW_at; Start 70; Stop 94
aatgctgatccaccacctaaaggga

SEQ ID NO: 21695 - DNA, 25 bp, Artificial
  probe
  misc_feature (1)..(25): SEQ ID NO: 534; WAN0249GW_at; Start 45; Stop 69
caatgtacgacgaagtcgtcattgc

SEQ ID NO: 21696 - DNA, 25 bp, Artificial
  probe
  misc_feature (1)..(25): SEQ ID NO: 534; WAN0249GW_at; Start 35; Stop 59
taattatatacaatgtacgacgaag

SEQ ID NO: 21697 - DNA, 25 bp, Artificial
  probe
  misc_feature (1)..(25): SEQ ID NO: 534; WAN0249GW_at; Start 31; Stop 55
taagtaattatatacaatgtacgac

SEQ ID NO: 21698 - DNA, 25 bp, Artificial
  probe
  misc_feature (1)..(25): SEQ ID NO: 534; WAN0249GW_at; Start 38; Stop 62
ttatatacaatgtacgacgaagtcg

SEQ ID NO: 21699 - DNA, 25 bp, Artificial
  probe
  misc_feature (1)..(25): SEQ ID NO: 534; WAN0249GW_at; Start 5; Stop 29
gatcattccttttctctctttttct

SEQ ID NO: 21700 - DNA, 25 bp, Artificial
  probe
  misc_feature (1)..(25): SEQ ID NO: 534; WAN0249GW_at; Start 50; Stop 74
tacgacgaagtcgtcattgcaatgc

SEQ ID NO: 21701 - DNA, 25 bp, Artificial
  probe
  misc_feature (1)..(25): SEQ ID NO: 534; WAN0249GW_at; Start 57; Stop 81
aagtcgtcattgcaatgctgatcca

SEQ ID NO: 21702 - DNA, 25 bp, Artificial
  probe
  misc_feature (1)..(25): SEQ ID NO: 534; WAN0249GW_at; Start 43; Stop 67
tacaatgtacgacgaagtcgtcatt

SEQ ID NO: 21703 - DNA, 25 bp, Artificial
  probe
  misc_feature (1)..(25): SEQ ID NO: 534; WAN0249GW_at; Start 53; Stop 77
gacgaagtcgtcattgcaatgctga

SEQ ID NO: 21704 - DNA, 25 bp, Artificial
  probe
  misc_feature (1)..(25): SEQ ID NO: 534; WAN0249GW_at; Start 46; Stop 70
aatgtacgacgaagtcgtcattgca

SEQ ID NO: 21705 - DNA, 25 bp, Artificial
  probe
  misc_feature (1)..(25): SEQ ID NO: 534; WAN0249GW_at; Start 68; Stop 92
gcaatgctgatccaccacctaaagg

SEQ ID NO: 21706 - DNA, 25 bp, Artificial
  probe
  misc_feature (1)..(25): SEQ ID NO: 534; WAN0249GW_at; Start 41; Stop 65
tatacaatgtacgacgaagtcgtca

SEQ ID NO: 21707 - DNA, 25 bp, Artificial
  probe
  misc_feature (1)..(25): SEQ ID NO: 534; WAN0249GW_at; Start 65; Stop 89
attgcaatgctgatccaccacctaa

SEQ ID NO: 21708 - DNA, 25 bp, Artificial
  probe
  misc_feature (1)..(25): SEQ ID NO: 534; WAN0249GW_at; Start 67; Stop 91
tgcaatgctgatccaccacctaaag

SEQ ID NO: 21709 - DNA, 25 bp, Artificial
  probe
  misc_feature (1)..(25): SEQ ID NO: 534; WAN0249GW_at; Start 56; Stop 80
gaagtcgtcattgcaatgctgatcc

SEQ ID NO: 21710 - DNA, 25 bp, Artificial
  probe
  misc_feature (1)..(25): SEQ ID NO: 534; WAN0249GW_at; Start 74; Stop 98
ctgatccaccacctaaagggaactt

SEQ ID NO: 21711 - DNA, 25 bp, Artificial
  probe
  misc_feature (1)..(25): SEQ ID NO: 4603; WAN0249GX_at; Start 90; Stop 114
aggtggtggatcagcattgcaatga

SEQ ID NO: 21712 - DNA, 25 bp, Artificial
  probe
  misc_feature (1)..(25): SEQ ID NO: 4603; WAN0249GX_at; Start 81; Stop 105
gttccctttaggtggtggatcagca

SEQ ID NO: 21713 - DNA, 25 bp, Artificial
  probe
  misc_feature (1)..(25): SEQ ID NO: 4603; WAN0249GX_at; Start 94; Stop 118
ggtggatcagcattgcaatgacgac

SEQ ID NO: 21714 - DNA, 25 bp, Artificial
  probe
  misc_feature (1)..(25): SEQ ID NO: 4603; WAN0249GX_at; Start 88; Stop 112
ttaggtggtggatcagcattgcaat

SEQ ID NO: 21715 - DNA, 25 bp, Artificial
  probe
  misc_feature (1)..(25): SEQ ID NO: 4603; WAN0249GX_at; Start 102; Stop 126
agcattgcaatgacgacttcgtcgt

SEQ ID NO: 21716 - DNA, 25 bp, Artificial
  probe
  misc_feature (1)..(25): SEQ ID NO: 4603; WAN0249GX_at; Start 106; Stop 130
ttgcaatgacgacttcgtcgtacat

SEQ ID NO: 21717 - DNA, 25 bp, Artificial
  probe
  misc_feature (1)..(25): SEQ ID NO: 4603; WAN0249GX_at; Start 95; Stop 119
gtggatcagcattgcaatgacgact

SEQ ID NO: 21718 - DNA, 25 bp, Artificial
  probe
  misc_feature (1)..(25): SEQ ID NO: 4603; WAN0249GX_at; Start 103; Stop 127
gcattgcaatgacgacttcgtcgta

SEQ ID NO: 21719 - DNA, 25 bp, Artificial
  probe
  misc_feature (1)..(25): SEQ ID NO: 4603; WAN0249GX_at; Start 115; Stop 139
cgacttcgtcgtacattgtatataa

SEQ ID NO: 21720 - DNA, 25 bp, Artificial
  probe
  misc_feature (1)..(25): SEQ ID NO: 4603; WAN0249GX_at; Start 148; Stop 172
agaaaaagagagaaaaggaatgatc

SEQ ID NO: 21721 - DNA, 25 bp, Artificial
  probe
  misc_feature (1)..(25): SEQ ID NO: 4603; WAN0249GX_at; Start 79; Stop 103
aagttccctttaggtggtggatcag

SEQ ID NO: 21722 - DNA, 25 bp, Artificial
  probe
  misc_feature (1)..(25): SEQ ID NO: 4603; WAN0249GX_at; Start 80; Stop 104
agttccctttaggtggtggatcagc

SEQ ID NO: 21723 - DNA, 25 bp, Artificial
  probe
  misc_feature (1)..(25): SEQ ID NO: 4603; WAN0249GX_at; Start 83; Stop 107
tccctttaggtggtggatcagcatt

SEQ ID NO: 21724 - DNA, 25 bp, Artificial
  probe
  misc_feature (1)..(25): SEQ ID NO: 4603; WAN0249GX_at; Start 96; Stop 120
tggatcagcattgcaatgacgactt

SEQ ID NO: 21725 - DNA, 25 bp, Artificial
  probe
  misc_feature (1)..(25): SEQ ID NO: 4603; WAN0249GX_at; Start 86; Stop 110
ctttaggtggtggatcagcattgca

SEQ ID NO: 21726 - DNA, 25 bp, Artificial
  probe
  misc_feature (1)..(25): SEQ ID NO: 4603; WAN0249GX_at; Start 98; Stop 122
gatcagcattgcaatgacgacttcg

SEQ ID NO: 21727 - DNA, 25 bp, Artificial
  probe
  misc_feature (1)..(25): SEQ ID NO: 4603; WAN0249GX_at; Start 108; Stop 132
gcaatgacgacttcgtcgtacattg

SEQ ID NO: 21728 - DNA, 25 bp, Artificial
  probe
  misc_feature (1)..(25): SEQ ID NO: 4603; WAN0249GX_at; Start 124; Stop 148
cgtacattgtatataattacttaaa

SEQ ID NO: 21729 - DNA, 25 bp, Artificial
  probe
  misc_feature (1)..(25): SEQ ID NO: 4603; WAN0249GX_at; Start 50; Stop 74
tatattctttatcttatcaatgttg

SEQ ID NO: 21730 - DNA, 25 bp, Artificial
  probe
  misc_feature (1)..(25): SEQ ID NO: 4603; WAN0249GX_at; Start 93; Stop 117
tggtggatcagcattgcaatgacga

SEQ ID NO: 21731 - DNA, 25 bp, Artificial
  probe
  misc_feature (1)..(25): SEQ ID NO: 4603; WAN0249GX_at; Start 113; Stop 137
gacgacttcgtcgtacattgtatat

SEQ ID NO: 21732 - DNA, 25 bp, Artificial
  probe
  misc_feature (1)..(25): SEQ ID NO: 4603; WAN0249GX_at; Start 97; Stop 121
ggatcagcattgcaatgacgacttc

SEQ ID NO: 21733 - DNA, 25 bp, Artificial
  probe
  misc_feature (1)..(25): SEQ ID NO: 4603; WAN0249GX_at; Start 87; Stop 111
tttaggtggtggatcagcattgcaa

SEQ ID NO: 21734 - DNA, 25 bp, Artificial
  probe
  misc_feature (1)..(25): SEQ ID NO: 4603; WAN0249GX_at; Start 85; Stop 109
cctttaggtggtggatcagcattgc

SEQ ID NO: 21735 - DNA, 25 bp, Artificial
  probe
  misc_feature (1)..(25): SEQ ID NO: 4603; WAN0249GX_at; Start 5; Stop 29
gagatatacaataaaattaattggg

SEQ ID NO: 21736 - DNA, 25 bp, Artificial
  probe
  misc_feature (1)..(25): SEQ ID NO: 4603; WAN0249GX_at; Start 101; Stop 125
cagcattgcaatgacgacttcgtcg

SEQ ID NO: 21737 - DNA, 25 bp, Artificial
  probe
  misc_feature (1)..(25): SEQ ID NO: 4603; WAN0249GX_at; Start 100; Stop 124
tcagcattgcaatgacgacttcgtc

SEQ ID NO: 21738 - DNA, 25 bp, Artificial
  probe
  misc_feature (1)..(25): SEQ ID NO: 4603; WAN0249GX_at; Start 120; Stop 144
tcgtcgtacattgtatataattact

SEQ ID NO: 21739 - DNA, 25 bp, Artificial
  probe
  misc_feature (1)..(25): SEQ ID NO: 4603; WAN0249GX_at; Start 91; Stop 115
ggtggtggatcagcattgcaatgac

SEQ ID NO: 21740 - DNA, 25 bp, Artificial
  probe
  misc_feature (1)..(25): SEQ ID NO: 4603; WAN0249GX_at; Start 110; Stop 134
aatgacgacttcgtcgtacattgta

SEQ ID NO: 21741 - DNA, 25 bp, Artificial
  probe
  misc_feature (1)..(25): SEQ ID NO: 4603; WAN0249GX_at; Start 84; Stop 108
ccctttaggtggtggatcagcattg

SEQ ID NO: 21742 - DNA, 25 bp, Artificial
  probe
  misc_feature (1)..(25): SEQ ID NO: 4603; WAN0249GX_at; Start 61; Stop 85
tcttatcaatgttgtttaaagttcc

SEQ ID NO: 21743 - DNA, 25 bp, Artificial
  probe
  misc_feature (1)..(25): SEQ ID NO: 4603; WAN0249GX_at; Start 82; Stop 106
ttccctttaggtggtggatcagcat

SEQ ID NO: 21744 - DNA, 25 bp, Artificial
  probe
  misc_feature (1)..(25): SEQ ID NO: 4603; WAN0249GX_at; Start 104; Stop 128
cattgcaatgacgacttcgtcgtac

SEQ ID NO: 21745 - DNA, 25 bp, Artificial
  probe
  misc_feature (1)..(25): SEQ ID NO: 3604; WAN0249GY_at; Start 33; Stop 57
cattttatcatatactgttattata

SEQ ID NO: 21746 - DNA, 25 bp, Artificial
  probe
  misc_feature (1)..(25): SEQ ID NO: 3604; WAN0249GY_at; Start 39; Stop 63
atcatatactgttattatagtcaaa

SEQ ID NO: 21747 - DNA, 25 bp, Artificial
  probe
  misc_feature (1)..(25): SEQ ID NO: 3604; WAN0249GY_at; Start 31; Stop 55
tacattttatcatatactgttatta

SEQ ID NO: 21748 - DNA, 25 bp, Artificial
  probe
  misc_feature (1)..(25): SEQ ID NO: 3604; WAN0249GY_at; Start 42; Stop 66
atatactgttattatagtcaaaaaa

SEQ ID NO: 21749 - DNA, 25 bp, Artificial
  probe
  misc_feature (1)..(25): SEQ ID NO: 3604; WAN0249GY_at; Start 26; Stop 50
ctgcttacattttatcatatactgt

SEQ ID NO: 21750 - DNA, 25 bp, Artificial
  probe
  misc_feature (1)..(25): SEQ ID NO: 3604; WAN0249GY_at; Start 24; Stop 48
atctgcttacattttatcatatact

SEQ ID NO: 21751 - DNA, 25 bp, Artificial
  probe
  misc_feature (1)..(25): SEQ ID NO: 3604; WAN0249GY_at; Start 40; Stop 64
tcatatactgttattatagtcaaaa

SEQ ID NO: 21752 - DNA, 25 bp, Artificial
  probe
  misc_feature (1)..(25): SEQ ID NO: 3604; WAN0249GY_at; Start 38; Stop 62
tatcatatactgttattatagtcaa

SEQ ID NO: 21753 - DNA, 25 bp, Artificial
  probe
  misc_feature (1)..(25): SEQ ID NO: 3604; WAN0249GY_at; Start 25; Stop 49
tctgcttacattttatcatatactg

SEQ ID NO: 21754 - DNA, 25 bp, Artificial
  probe
  misc_feature (1)..(25): SEQ ID NO: 3604; WAN0249GY_at; Start 45; Stop 69
tactgttattatagtcaaaaaaata

SEQ ID NO: 21755 - DNA, 25 bp, Artificial
  probe
  misc_feature (1)..(25): SEQ ID NO: 3604; WAN0249GY_at; Start 44; Stop 68
atactgttattatagtcaaaaaaat

SEQ ID NO: 21756 - DNA, 25 bp, Artificial
  probe
  misc_feature (1)..(25): SEQ ID NO: 3604; WAN0249GY_at; Start 28; Stop 52
gcttacattttatcatatactgtta

SEQ ID NO: 21757 - DNA, 25 bp, Artificial
  probe
  misc_feature (1)..(25): SEQ ID NO: 3604; WAN0249GY_at; Start 41; Stop 65
catatactgttattatagtcaaaaa

SEQ ID NO: 21758 - DNA, 25 bp, Artificial
  probe
  misc_feature (1)..(25): SEQ ID NO: 3604; WAN0249GY_at; Start 43; Stop 67
tatactgttattatagtcaaaaaaa

SEQ ID NO: 21759 - DNA, 25 bp, Artificial
  probe
  misc_feature (1)..(25): SEQ ID NO: 3604; WAN0249GY_at; Start 37; Stop 61
ttatcatatactgttattatagtca

SEQ ID NO: 21760 - DNA, 25 bp, Artificial
  probe
  misc_feature (1)..(25): SEQ ID NO: 3604; WAN0249GY_at; Start 32; Stop 56
acattttatcatatactgttattat

SEQ ID NO: 21761 - DNA, 25 bp, Artificial
  probe
  misc_feature (1)..(25): SEQ ID NO: 3604; WAN0249GY_at; Start 36; Stop 60
tttatcatatactgttattatagtc

SEQ ID NO: 21762 - DNA, 25 bp, Artificial
  probe
  misc_feature (1)..(25): SEQ ID NO: 3604; WAN0249GY_at; Start 29; Stop 53
cttacattttatcatatactgttat

SEQ ID NO: 21763 - DNA, 25 bp, Artificial
  probe
  misc_feature (1)..(25): SEQ ID NO: 3604; WAN0249GY_at; Start 27; Stop 51
tgcttacattttatcatatactgtt

SEQ ID NO: 21764 - DNA, 25 bp, Artificial
  probe
  misc_feature (1)..(25): SEQ ID NO: 263; WAN0249GZ_at; Start 21; Stop 45
ataataacagtatatgataaaatgt

SEQ ID NO: 21765 - DNA, 25 bp, Artificial
  probe
  misc_feature (1)..(25): SEQ ID NO: 263; WAN0249GZ_at; Start 19; Stop 43
ctataataacagtatatgataaaat

SEQ ID NO: 21766 - DNA, 25 bp, Artificial
  probe
  misc_feature (1)..(25): SEQ ID NO: 263; WAN0249GZ_at; Start 11; Stop 35
ttttttgactataataacagtatat

SEQ ID NO: 21767 - DNA, 25 bp, Artificial
  probe
  misc_feature (1)..(25): SEQ ID NO: 263; WAN0249GZ_at; Start 27; Stop 51
acagtatatgataaaatgtaagcag

SEQ ID NO: 21768 - DNA, 25 bp, Artificial
  probe
  misc_feature (1)..(25): SEQ ID NO: 263; WAN0249GZ_at; Start 15; Stop 39
ttgactataataacagtatatgata

SEQ ID NO: 21769 - DNA, 25 bp, Artificial
  probe
  misc_feature (1)..(25): SEQ ID NO: 263; WAN0249GZ_at; Start 28; Stop 52
cagtatatgataaaatgtaagcaga

SEQ ID NO: 21770 - DNA, 25 bp, Artificial
  probe
  misc_feature (1)..(25): SEQ ID NO: 263; WAN0249GZ_at; Start 13; Stop 37
ttttgactataataacagtatatga

SEQ ID NO: 21771 - DNA, 25 bp, Artificial
  probe
  misc_feature (1)..(25): SEQ ID NO: 263; WAN0249GZ_at; Start 25; Stop 49
taacagtatatgataaaatgtaagc

SEQ ID NO: 21772 - DNA, 25 bp, Artificial
  probe
  misc_feature (1)..(25): SEQ ID NO: 263; WAN0249GZ_at; Start 10; Stop 34
tttttttgactataataacagtata

SEQ ID NO: 21773 - DNA, 25 bp, Artificial
  probe
  misc_feature (1)..(25): SEQ ID NO: 263; WAN0249GZ_at; Start 20; Stop 44
tataataacagtatatgataaaatg

SEQ ID NO: 21774 - DNA, 25 bp, Artificial
  probe
  misc_feature (1)..(25): SEQ ID NO: 263; WAN0249GZ_at; Start 23; Stop 47
aataacagtatatgataaaatgtaa

SEQ ID NO: 21775 - DNA, 25 bp, Artificial
  probe
  misc_feature (1)..(25): SEQ ID NO: 263; WAN0249GZ_at; Start 24; Stop 48
ataacagtatatgataaaatgtaag

SEQ ID NO: 21776 - DNA, 25 bp, Artificial
  probe
  misc_feature (1)..(25): SEQ ID NO: 263; WAN0249GZ_at; Start 18; Stop 42
actataataacagtatatgataaaa

SEQ ID NO: 21777 - DNA, 25 bp, Artificial
  probe
  misc_feature (1)..(25): SEQ ID NO: 263; WAN0249GZ_at; Start 26; Stop 50
aacagtatatgataaaatgtaagca

SEQ ID NO: 21778 - DNA, 25 bp, Artificial
  probe
  misc_feature (1)..(25): SEQ ID NO: 263; WAN0249GZ_at; Start 9; Stop 33
atttttttgactataataacagtat

SEQ ID NO: 21779 - DNA, 25 bp, Artificial
  probe
  misc_feature (1)..(25): SEQ ID NO: 263; WAN0249GZ_at; Start 8; Stop 32
tatttttttgactataataacagta

SEQ ID NO: 21780 - DNA, 25 bp, Artificial
  probe
  misc_feature (1)..(25): SEQ ID NO: 263; WAN0249GZ_at; Start 16; Stop 40
tgactataataacagtatatgataa

SEQ ID NO: 21781 - DNA, 25 bp, Artificial
  probe
  misc_feature (1)..(25): SEQ ID NO: 263; WAN0249GZ_at; Start 12; Stop 36
tttttgactataataacagtatatg

SEQ ID NO: 21782 - DNA, 25 bp, Artificial
  probe
  misc_feature (1)..(25): SEQ ID NO: 263; WAN0249GZ_at; Start 17; Stop 41
gactataataacagtatatgataaa

SEQ ID NO: 21783 - DNA, 25 bp, Artificial
  probe
  misc_feature (1)..(25): SEQ ID NO: 263; WAN0249GZ_at; Start 29; Stop 53
agtatatgataaaatgtaagcagat

SEQ ID NO: 21784 - DNA, 25 bp, Artificial
  probe
  misc_feature (1)..(25): SEQ ID NO: 263; WAN0249GZ_at; Start 22; Stop 46
taataacagtatatgataaaatgta

SEQ ID NO: 21785 - DNA, 25 bp, Artificial
  probe
  misc_feature (1)..(25): SEQ ID NO: 263; WAN0249GZ_at; Start 14; Stop 38
tttgactataataacagtatatgat

SEQ ID NO: 21786 - DNA, 25 bp, Artificial
  probe
  misc_feature (1)..(25): SEQ ID NO: 5933; WAN0249H2_at; Start 13; Stop 37
tcctttaaatgttgtaccacagcgg

SEQ ID NO: 21787 - DNA, 25 bp, Artificial
  probe
  misc_feature (1)..(25): SEQ ID NO: 5933; WAN0249H2_at; Start 46; Stop 70
cctatggagcgctaccgagctggcg

SEQ ID NO: 21788 - DNA, 25 bp, Artificial
  probe
  misc_feature (1)..(25): SEQ ID NO: 5933; WAN0249H2_at; Start 17; Stop 41
ttaaatgttgtaccacagcggcttg

SEQ ID NO: 21789 - DNA, 25 bp, Artificial
  probe
  misc_feature (1)..(25): SEQ ID NO: 5933; WAN0249H2_at; Start 67; Stop 91
ggcggatttactagttgcttaagcg

SEQ ID NO: 21790 - DNA, 25 bp, Artificial
  probe
  misc_feature (1)..(25): SEQ ID NO: 5933; WAN0249H2_at; Start 38; Stop 62
cttgcactcctatggagcgctaccg

SEQ ID NO: 21791 - DNA, 25 bp, Artificial
  probe
  misc_feature (1)..(25): SEQ ID NO: 5933; WAN0249H2_at; Start 41; Stop 65
gcactcctatggagcgctaccgagc

SEQ ID NO: 21792 - DNA, 25 bp, Artificial
  probe
  misc_feature (1)..(25): SEQ ID NO: 5933; WAN0249H2_at; Start 28; Stop 52
accacagcggcttgcactcctatgg

SEQ ID NO: 21793 - DNA, 25 bp, Artificial
  probe
  misc_feature (1)..(25): SEQ ID NO: 5933; WAN0249H2_at; Start 36; Stop 60
ggcttgcactcctatggagcgctac

SEQ ID NO: 21794 - DNA, 25 bp, Artificial
  probe
  misc_feature (1)..(25): SEQ ID NO: 5933; WAN0249H2_at; Start 75; Stop 99
tactagttgcttaagcgactagttt

SEQ ID NO: 21795 - DNA, 25 bp, Artificial
  probe
  misc_feature (1)..(25): SEQ ID NO: 5933; WAN0249H2_at; Start 30; Stop 54
cacagcggcttgcactcctatggag

SEQ ID NO: 21796 - DNA, 25 bp, Artificial
  probe
  misc_feature (1)..(25): SEQ ID NO: 5933; WAN0249H2_at; Start 33; Stop 57
agcggcttgcactcctatggagcgc

SEQ ID NO: 21797 - DNA, 25 bp, Artificial
  probe
  misc_feature (1)..(25): SEQ ID NO: 5933; WAN0249H2_at; Start 11; Stop 35
tctcctttaaatgttgtaccacagc

SEQ ID NO: 21798 - DNA, 25 bp, Artificial
  probe
  misc_feature (1)..(25): SEQ ID NO: 5933; WAN0249H2_at; Start 60; Stop 84
ccgagctggcggatttactagttgc

SEQ ID NO: 21799 - DNA, 25 bp, Artificial
  probe
  misc_feature (1)..(25): SEQ ID NO: 5933; WAN0249H2_at; Start 32; Stop 56
cagcggcttgcactcctatggagcg

SEQ ID NO: 21800 - DNA, 25 bp, Artificial
  probe
  misc_feature (1)..(25): SEQ ID NO: 5933; WAN0249H2_at; Start 53; Stop 77
agcgctaccgagctggcggatttac

SEQ ID NO: 21801 - DNA, 25 bp, Artificial
  probe
  misc_feature (1)..(25): SEQ ID NO: 5933; WAN0249H2_at; Start 15; Stop 39
ctttaaatgttgtaccacagcggct

SEQ ID NO: 21802 - DNA, 25 bp, Artificial
  probe
  misc_feature (1)..(25): SEQ ID NO: 5933; WAN0249H2_at; Start 64; Stop 88
gctggcggatttactagttgcttaa

SEQ ID NO: 21803 - DNA, 25 bp, Artificial
  probe
  misc_feature (1)..(25): SEQ ID NO: 5933; WAN0249H2_at; Start 69; Stop 93
cggatttactagttgcttaagcgac

SEQ ID NO: 21804 - DNA, 25 bp, Artificial
  probe
  misc_feature (1)..(25): SEQ ID NO: 5933; WAN0249H2_at; Start 61; Stop 85
cgagctggcggatttactagttgct

SEQ ID NO: 21805 - DNA, 25 bp, Artificial
  probe
  misc_feature (1)..(25): SEQ ID NO: 5933; WAN0249H2_at; Start 22; Stop 46
tgttgtaccacagcggcttgcactc

SEQ ID NO: 21806 - DNA, 25 bp, Artificial
  probe
  misc_feature (1)..(25): SEQ ID NO: 5933; WAN0249H2_at; Start 54; Stop 78
gcgctaccgagctggcggatttact

SEQ ID NO: 21807 - DNA, 25 bp, Artificial
  probe
  misc_feature (1)..(25): SEQ ID NO: 5933; WAN0249H2_at; Start 55; Stop 79
cgctaccgagctggcggatttacta

SEQ ID NO: 21808 - DNA, 25 bp, Artificial
  probe
  misc_feature (1)..(25): SEQ ID NO: 5933; WAN0249H2_at; Start 35; Stop 59
cggcttgcactcctatggagcgcta

SEQ ID NO: 21809 - DNA, 25 bp, Artificial
  probe
  misc_feature (1)..(25): SEQ ID NO: 5933; WAN0249H2_at; Start 71; Stop 95
gatttactagttgcttaagcgacta

SEQ ID NO: 21810 - DNA, 25 bp, Artificial
  probe
  misc_feature (1)..(25): SEQ ID NO: 5933; WAN0249H2_at; Start 26; Stop 50
gtaccacagcggcttgcactcctat

SEQ ID NO: 21811 - DNA, 25 bp, Artificial
  probe
  misc_feature (1)..(25): SEQ ID NO: 5933; WAN0249H2_at; Start 79; Stop 103
agttgcttaagcgactagtttaata

SEQ ID NO: 21812 - DNA, 25 bp, Artificial
  probe
  misc_feature (1)..(25): SEQ ID NO: 5933; WAN0249H2_at; Start 20; Stop 44
aatgttgtaccacagcggcttgcac

SEQ ID NO: 21813 - DNA, 25 bp, Artificial
  probe
  misc_feature (1)..(25): SEQ ID NO: 5933; WAN0249H2_at; Start 19; Stop 43
aaatgttgtaccacagcggcttgca

SEQ ID NO: 21814 - DNA, 25 bp, Artificial
  probe
  misc_feature (1)..(25): SEQ ID NO: 5933; WAN0249H2_at; Start 18; Stop 42
taaatgttgtaccacagcggcttgc

SEQ ID NO: 21815 - DNA, 25 bp, Artificial
  probe
  misc_feature (1)..(25): SEQ ID NO: 5933; WAN0249H2_at; Start 31; Stop 55
acagcggcttgcactcctatggagc

SEQ ID NO: 21816 - DNA, 25 bp, Artificial
  probe
  misc_feature (1)..(25): SEQ ID NO: 5933; WAN0249H2_at; Start 45; Stop 69
tcctatggagcgctaccgagctggc

SEQ ID NO: 21817 - DNA, 25 bp, Artificial
  probe
  misc_feature (1)..(25): SEQ ID NO: 5933; WAN0249H2_at; Start 62; Stop 86
gagctggcggatttactagttgctt

SEQ ID NO: 21818 - DNA, 25 bp, Artificial
  probe
  misc_feature (1)..(25): SEQ ID NO: 5933; WAN0249H2_at; Start 40; Stop 64
tgcactcctatggagcgctaccgag

SEQ ID NO: 21819 - DNA, 25 bp, Artificial
  probe
  misc_feature (1)..(25): SEQ ID NO: 5933; WAN0249H2_at; Start 52; Stop 76
gagcgctaccgagctggcggattta

SEQ ID NO: 21820 - DNA, 25 bp, Artificial
  probe
  misc_feature (1)..(25): SEQ ID NO: 4564; WAN0249H3_at; Start 3; Stop 27
ttaaactagtcgcttaagcaactag

SEQ ID NO: 21821 - DNA, 25 bp, Artificial
  probe
  misc_feature (1)..(25): SEQ ID NO: 4564; WAN0249H3_at; Start 63; Stop 87
caagccgctgtggtacaacatttaa

SEQ ID NO: 21822 - DNA, 25 bp, Artificial
  probe
  misc_feature (1)..(25): SEQ ID NO: 4564; WAN0249H3_at; Start 52; Stop 76
ccataggagtgcaagccgctgtggt

SEQ ID NO: 21823 - DNA, 25 bp, Artificial
  probe
  misc_feature (1)..(25): SEQ ID NO: 4564; WAN0249H3_at; Start 61; Stop 85
tgcaagccgctgtggtacaacattt

SEQ ID NO: 21824 - DNA, 25 bp, Artificial
  probe
  misc_feature (1)..(25): SEQ ID NO: 4564; WAN0249H3_at; Start 49; Stop 73
gctccataggagtgcaagccgctgt

SEQ ID NO: 21825 - DNA, 25 bp, Artificial
  probe
  misc_feature (1)..(25): SEQ ID NO: 4564; WAN0249H3_at; Start 54; Stop 78
ataggagtgcaagccgctgtggtac

SEQ ID NO: 21826 - DNA, 25 bp, Artificial
  probe
  misc_feature (1)..(25): SEQ ID NO: 4564; WAN0249H3_at; Start 69; Stop 93
gctgtggtacaacatttaaaggaga

SEQ ID NO: 21827 - DNA, 25 bp, Artificial
  probe
  misc_feature (1)..(25): SEQ ID NO: 4564; WAN0249H3_at; Start 25; Stop 49
tagtaaatccgccagctcggtagcg

SEQ ID NO: 21828 - DNA, 25 bp, Artificial
  probe
  misc_feature (1)..(25): SEQ ID NO: 4564; WAN0249H3_at; Start 39; Stop 63
gctcggtagcgctccataggagtgc

SEQ ID NO: 21829 - DNA, 25 bp, Artificial
  probe
  misc_feature (1)..(25): SEQ ID NO: 4564; WAN0249H3_at; Start 28; Stop 52
taaatccgccagctcggtagcgctc

SEQ ID NO: 21830 - DNA, 25 bp, Artificial
  probe
  misc_feature (1)..(25): SEQ ID NO: 4564; WAN0249H3_at; Start 65; Stop 89
agccgctgtggtacaacatttaaag

SEQ ID NO: 21831 - DNA, 25 bp, Artificial
  probe
  misc_feature (1)..(25): SEQ ID NO: 4564; WAN0249H3_at; Start 27; Stop 51
gtaaatccgccagctcggtagcgct

SEQ ID NO: 21832 - DNA, 25 bp, Artificial
  probe
  misc_feature (1)..(25): SEQ ID NO: 4564; WAN0249H3_at; Start 62; Stop 86
gcaagccgctgtggtacaacattta

SEQ ID NO: 21833 - DNA, 25 bp, Artificial
  probe
  misc_feature (1)..(25): SEQ ID NO: 4564; WAN0249H3_at; Start 41; Stop 65
tcggtagcgctccataggagtgcaa

SEQ ID NO: 21834 - DNA, 25 bp, Artificial
  probe
  misc_feature (1)..(25): SEQ ID NO: 4564; WAN0249H3_at; Start 53; Stop 77
cataggagtgcaagccgctgtggta

SEQ ID NO: 21835 - DNA, 25 bp, Artificial
  probe
  misc_feature (1)..(25): SEQ ID NO: 4564; WAN0249H3_at; Start 16; Stop 40
ttaagcaactagtaaatccgccagc

SEQ ID NO: 21836 - DNA, 25 bp, Artificial
  probe
  misc_feature (1)..(25): SEQ ID NO: 4564; WAN0249H3_at; Start 50; Stop 74
ctccataggagtgcaagccgctgtg

SEQ ID NO: 21837 - DNA, 25 bp, Artificial
  probe
  misc_feature (1)..(25): SEQ ID NO: 4564; WAN0249H3_at; Start 43; Stop 67
ggtagcgctccataggagtgcaagc

SEQ ID NO: 21838 - DNA, 25 bp, Artificial
  probe
  misc_feature (1)..(25): SEQ ID NO: 4564; WAN0249H3_at; Start 58; Stop 82
gagtgcaagccgctgtggtacaaca

SEQ ID NO: 21839 - DNA, 25 bp, Artificial
  probe
  misc_feature (1)..(25): SEQ ID NO: 4564; WAN0249H3_at; Start 1; Stop 25
tattaaactagtcgcttaagcaact

SEQ ID NO: 21840 - DNA, 25 bp, Artificial
  probe
  misc_feature (1)..(25): SEQ ID NO: 4564; WAN0249H3_at; Start 21; Stop 45
caactagtaaatccgccagctcggt

SEQ ID NO: 21841 - DNA, 25 bp, Artificial
  probe
  misc_feature (1)..(25): SEQ ID NO: 4564; WAN0249H3_at; Start 9; Stop 33
tagtcgcttaagcaactagtaaatc

SEQ ID NO: 21842 - DNA, 25 bp, Artificial
  probe
  misc_feature (1)..(25): SEQ ID NO: 4564; WAN0249H3_at; Start 12; Stop 36
tcgcttaagcaactagtaaatccgc

SEQ ID NO: 21843 - DNA, 25 bp, Artificial
  probe
  misc_feature (1)..(25): SEQ ID NO: 4564; WAN0249H3_at; Start 76; Stop 100
tacaacatttaaaggagaaaatata

SEQ ID NO: 21844 - DNA, 25 bp, Artificial
  probe
  misc_feature (1)..(25): SEQ ID NO: 4564; WAN0249H3_at; Start 67; Stop 91
ccgctgtggtacaacatttaaagga

SEQ ID NO: 21845 - DNA, 25 bp, Artificial
  probe
  misc_feature (1)..(25): SEQ ID NO: 4564; WAN0249H3_at; Start 60; Stop 84
gtgcaagccgctgtggtacaacatt

SEQ ID NO: 21846 - DNA, 25 bp, Artificial
  probe
  misc_feature (1)..(25): SEQ ID NO: 4564; WAN0249H3_at; Start 48; Stop 72
cgctccataggagtgcaagccgctg

SEQ ID NO: 21847 - DNA, 25 bp, Artificial
  probe
  misc_feature (1)..(25): SEQ ID NO: 4564; WAN0249H3_at; Start 35; Stop 59
gccagctcggtagcgctccatagga

SEQ ID NO: 21848 - DNA, 25 bp, Artificial
  probe
  misc_feature (1)..(25): SEQ ID NO: 4564; WAN0249H3_at; Start 14; Stop 38
gcttaagcaactagtaaatccgcca

SEQ ID NO: 21849 - DNA, 25 bp, Artificial
  probe
  misc_feature (1)..(25): SEQ ID NO: 4564; WAN0249H3_at; Start 17; Stop 41
taagcaactagtaaatccgccagct

SEQ ID NO: 21850 - DNA, 25 bp, Artificial
  probe
  misc_feature (1)..(25): SEQ ID NO: 4564; WAN0249H3_at; Start 45; Stop 69
tagcgctccataggagtgcaagccg

SEQ ID NO: 21851 - DNA, 25 bp, Artificial
  probe
  misc_feature (1)..(25): SEQ ID NO: 4564; WAN0249H3_at; Start 71; Stop 95
tgtggtacaacatttaaaggagaaa

SEQ ID NO: 21852 - DNA, 25 bp, Artificial
  probe
  misc_feature (1)..(25): SEQ ID NO: 4564; WAN0249H3_at; Start 20; Stop 44
gcaactagtaaatccgccagctcgg

SEQ ID NO: 21853 - DNA, 25 bp, Artificial
  probe
  misc_feature (1)..(25): SEQ ID NO: 4564; WAN0249H3_at; Start 11; Stop 35
gtcgcttaagcaactagtaaatccg

SEQ ID NO: 21854 - DNA, 25 bp, Artificial
  probe
  misc_feature (1)..(25): SEQ ID NO: 4770; WAN0249H4_at; Start 40; Stop 64
aggtttgtgtacctgttcttatacg

SEQ ID NO: 21855 - DNA, 25 bp, Artificial
  probe
  misc_feature (1)..(25): SEQ ID NO: 4770; WAN0249H4_at; Start 29; Stop 53
gcataagattaaggtttgtgtacct

SEQ ID NO: 21856 - DNA, 25 bp, Artificial
  probe
  misc_feature (1)..(25): SEQ ID NO: 4770; WAN0249H4_at; Start 24; Stop 48
aaaacgcataagattaaggtttgtg

SEQ ID NO: 21857 - DNA, 25 bp, Artificial
  probe
  misc_feature (1)..(25): SEQ ID NO: 4770; WAN0249H4_at; Start 4; Stop 28
atgtgtatggaaactataacaaaac

SEQ ID NO: 21858 - DNA, 25 bp, Artificial
  probe
  misc_feature (1)..(25): SEQ ID NO: 4770; WAN0249H4_at; Start 27; Stop 51
acgcataagattaaggtttgtgtac

SEQ ID NO: 21859 - DNA, 25 bp, Artificial
  probe
  misc_feature (1)..(25): SEQ ID NO: 4770; WAN0249H4_at; Start 5; Stop 29
tgtgtatggaaactataacaaaacg

SEQ ID NO: 21860 - DNA, 25 bp, Artificial
  probe
  misc_feature (1)..(25): SEQ ID NO: 4770; WAN0249H4_at; Start 28; Stop 52
cgcataagattaaggtttgtgtacc

SEQ ID NO: 21861 - DNA, 25 bp, Artificial
  probe
  misc_feature (1)..(25): SEQ ID NO: 4770; WAN0249H4_at; Start 31; Stop 55
ataagattaaggtttgtgtacctgt

SEQ ID NO: 21862 - DNA, 25 bp, Artificial
  probe
  misc_feature (1)..(25): SEQ ID NO: 4770; WAN0249H4_at; Start 2; Stop 26
taatgtgtatggaaactataacaaa

SEQ ID NO: 21863 - DNA, 25 bp, Artificial
  probe
  misc_feature (1)..(25): SEQ ID NO: 4770; WAN0249H4_at; Start 25; Stop 49
aaacgcataagattaaggtttgtgt

SEQ ID NO: 21864 - DNA, 25 bp, Artificial
  probe
  misc_feature (1)..(25): SEQ ID NO: 4770; WAN0249H4_at; Start 26; Stop 50
aacgcataagattaaggtttgtgta

SEQ ID NO: 21865 - DNA, 25 bp, Artificial
  probe
  misc_feature (1)..(25): SEQ ID NO: 4770; WAN0249H4_at; Start 23; Stop 47
caaaacgcataagattaaggtttgt

SEQ ID NO: 21866 - DNA, 25 bp, Artificial
  probe
  misc_feature (1)..(25): SEQ ID NO: 4770; WAN0249H4_at; Start 22; Stop 46
acaaaacgcataagattaaggtttg

SEQ ID NO: 21867 - DNA, 25 bp, Artificial
  probe
  misc_feature (1)..(25): SEQ ID NO: 4770; WAN0249H4_at; Start 3; Stop 27
aatgtgtatggaaactataacaaaa

SEQ ID NO: 21868 - DNA, 25 bp, Artificial
  probe
  misc_feature (1)..(25): SEQ ID NO: 4770; WAN0249H4_at; Start 38; Stop 62
taaggtttgtgtacctgttcttata

SEQ ID NO: 21869 - DNA, 25 bp, Artificial
  probe
  misc_feature (1)..(25): SEQ ID NO: 4770; WAN0249H4_at; Start 1; Stop 25
ttaatgtgtatggaaactataacaa

SEQ ID NO: 21870 - DNA, 25 bp, Artificial
  probe
  misc_feature (1)..(25): SEQ ID NO: 4770; WAN0249H4_at; Start 7; Stop 31
tgtatggaaactataacaaaacgca

SEQ ID NO: 21871 - DNA, 25 bp, Artificial
  probe
  misc_feature (1)..(25): SEQ ID NO: 4770; WAN0249H4_at; Start 30; Stop 54
cataagattaaggtttgtgtacctg

SEQ ID NO: 21872 - DNA, 25 bp, Artificial
  probe
  misc_feature (1)..(25): SEQ ID NO: 4770; WAN0249H4_at; Start 6; Stop 30
gtgtatggaaactataacaaaacgc

SEQ ID NO: 21873 - DNA, 25 bp, Artificial
  probe
  misc_feature (1)..(25): SEQ ID NO: 4770; WAN0249H4_at; Start 34; Stop 58
agattaaggtttgtgtacctgttct

SEQ ID NO: 21874 - DNA, 25 bp, Artificial
  probe
  misc_feature (1)..(25): SEQ ID NO: 4685; WAN0249H5_at; Start 99; Stop 123
gttttgttatagtttccatacacat

SEQ ID NO: 21875 - DNA, 25 bp, Artificial
  probe
  misc_feature (1)..(25): SEQ ID NO: 4685; WAN0249H5_at; Start 75; Stop 99
ggtacacaaaccttaatcttatgcg

SEQ ID NO: 21876 - DNA, 25 bp, Artificial
  probe
  misc_feature (1)..(25): SEQ ID NO: 4685; WAN0249H5_at; Start 100; Stop 124
ttttgttatagtttccatacacatt

SEQ ID NO: 21877 - DNA, 25 bp, Artificial
  probe
  misc_feature (1)..(25): SEQ ID NO: 4685; WAN0249H5_at; Start 69; Stop 93
agaacaggtacacaaaccttaatct

SEQ ID NO: 21878 - DNA, 25 bp, Artificial
  probe
  misc_feature (1)..(25): SEQ ID NO: 4685; WAN0249H5_at; Start 76; Stop 100
gtacacaaaccttaatcttatgcgt

SEQ ID NO: 21879 - DNA, 25 bp, Artificial
  probe
  misc_feature (1)..(25): SEQ ID NO: 4685; WAN0249H5_at; Start 65; Stop 89
tataagaacaggtacacaaacctta

SEQ ID NO: 21880 - DNA, 25 bp, Artificial
  probe
  misc_feature (1)..(25): SEQ ID NO: 4685; WAN0249H5_at; Start 74; Stop 98
aggtacacaaaccttaatcttatgc

SEQ ID NO: 21881 - DNA, 25 bp, Artificial
  probe
  misc_feature (1)..(25): SEQ ID NO: 4685; WAN0249H5_at; Start 63; Stop 87
cgtataagaacaggtacacaaacct

SEQ ID NO: 21882 - DNA, 25 bp, Artificial
  probe
  misc_feature (1)..(25): SEQ ID NO: 4685; WAN0249H5_at; Start 98; Stop 122
cgttttgttatagtttccatacaca

SEQ ID NO: 21883 - DNA, 25 bp, Artificial
  probe
  misc_feature (1)..(25): SEQ ID NO: 4685; WAN0249H5_at; Start 97; Stop 121
gcgttttgttatagtttccatacac

SEQ ID NO: 21884 - DNA, 25 bp, Artificial
  probe
  misc_feature (1)..(25): SEQ ID NO: 4685; WAN0249H5_at; Start 73; Stop 97
caggtacacaaaccttaatcttatg

SEQ ID NO: 21885 - DNA, 25 bp, Artificial
  probe
  misc_feature (1)..(25): SEQ ID NO: 4685; WAN0249H5_at; Start 77; Stop 101
tacacaaaccttaatcttatgcgtt

SEQ ID NO: 21886 - DNA, 25 bp, Artificial
  probe
  misc_feature (1)..(25): SEQ ID NO: 4685; WAN0249H5_at; Start 102; Stop 126
ttgttatagtttccatacacattaa

SEQ ID NO: 21887 - DNA, 25 bp, Artificial
  probe
  misc_feature (1)..(25): SEQ ID NO: 4685; WAN0249H5_at; Start 101; Stop 125
tttgttatagtttccatacacatta

SEQ ID NO: 21888 - DNA, 25 bp, Artificial
  probe
  misc_feature (1)..(25): SEQ ID NO: 4685; WAN0249H5_at; Start 81; Stop 105
caaaccttaatcttatgcgttttgt

SEQ ID NO: 21889 - DNA, 25 bp, Artificial
  probe
  misc_feature (1)..(25): SEQ ID NO: 4685; WAN0249H5_at; Start 78; Stop 102
acacaaaccttaatcttatgcgttt

SEQ ID NO: 21890 - DNA, 25 bp, Artificial
  probe
  misc_feature (1)..(25): SEQ ID NO: 4685; WAN0249H5_at; Start 80; Stop 104
acaaaccttaatcttatgcgttttg

SEQ ID NO: 21891 - DNA, 25 bp, Artificial
  probe
  misc_feature (1)..(25): SEQ ID NO: 4685; WAN0249H5_at; Start 79; Stop 103
cacaaaccttaatcttatgcgtttt

SEQ ID NO: 21892 - DNA, 25 bp, Artificial
  probe
  misc_feature (1)..(25): SEQ ID NO: 4685; WAN0249H5_at; Start 72; Stop 96
acaggtacacaaaccttaatcttat

SEQ ID NO: 21893 - DNA, 25 bp, Artificial
  probe
  misc_feature (1)..(25): SEQ ID NO: 4685; WAN0249H5_at; Start 96; Stop 120
tgcgttttgttatagtttccataca

SEQ ID NO: 21894 - DNA, 25 bp, Artificial
  probe
  misc_feature (1)..(25): SEQ ID NO: 504; WAN0249H6_at; Start 19; Stop 43
gaggcaaatgaaagcaactttagga

SEQ ID NO: 21895 - DNA, 25 bp, Artificial
  probe
  misc_feature (1)..(25): SEQ ID NO: 504; WAN0249H6_at; Start 17; Stop 41
aagaggcaaatgaaagcaactttag

SEQ ID NO: 21896 - DNA, 25 bp, Artificial
  probe
  misc_feature (1)..(25): SEQ ID NO: 504; WAN0249H6_at; Start 71; Stop 95
taaaactaattctccaatttataga

SEQ ID NO: 21897 - DNA, 25 bp, Artificial
  probe
  misc_feature (1)..(25): SEQ ID NO: 504; WAN0249H6_at; Start 21; Stop 45
ggcaaatgaaagcaactttaggaat

SEQ ID NO: 21898 - DNA, 25 bp, Artificial
  probe
  misc_feature (1)..(25): SEQ ID NO: 504; WAN0249H6_at; Start 2; Stop 26
gtttaagtgtatcaaaagaggcaaa

SEQ ID NO: 21899 - DNA, 25 bp, Artificial
  probe
  misc_feature (1)..(25): SEQ ID NO: 504; WAN0249H6_at; Start 27; Stop 51
tgaaagcaactttaggaataagtag

SEQ ID NO: 21900 - DNA, 25 bp, Artificial
  probe
  misc_feature (1)..(25): SEQ ID NO: 504; WAN0249H6_at; Start 6; Stop 30
aagtgtatcaaaagaggcaaatgaa

SEQ ID NO: 21901 - DNA, 25 bp, Artificial
  probe
  misc_feature (1)..(25): SEQ ID NO: 504; WAN0249H6_at; Start 46; Stop 70
aagtagatgggagattcagtagaaa

SEQ ID NO: 21902 - DNA, 25 bp, Artificial
  probe
  misc_feature (1)..(25): SEQ ID NO: 504; WAN0249H6_at; Start 9; Stop 33
tgtatcaaaagaggcaaatgaaagc

SEQ ID NO: 21903 - DNA, 25 bp, Artificial
  probe
  misc_feature (1)..(25): SEQ ID NO: 504; WAN0249H6_at; Start 14; Stop 38
caaaagaggcaaatgaaagcaactt

SEQ ID NO: 21904 - DNA, 25 bp, Artificial
  probe
  misc_feature (1)..(25): SEQ ID NO: 504; WAN0249H6_at; Start 55; Stop 79
ggagattcagtagaaataaaactaa

SEQ ID NO: 21905 - DNA, 25 bp, Artificial
  probe
  misc_feature (1)..(25): SEQ ID NO: 504; WAN0249H6_at; Start 13; Stop 37
tcaaaagaggcaaatgaaagcaact

SEQ ID NO: 21906 - DNA, 25 bp, Artificial
  probe
  misc_feature (1)..(25): SEQ ID NO: 504; WAN0249H6_at; Start 45; Stop 69
taagtagatgggagattcagtagaa

SEQ ID NO: 21907 - DNA, 25 bp, Artificial
  probe
  misc_feature (1)..(25): SEQ ID NO: 504; WAN0249H6_at; Start 47; Stop 71
agtagatgggagattcagtagaaat

SEQ ID NO: 21908 - DNA, 25 bp, Artificial
  probe
  misc_feature (1)..(25): SEQ ID NO: 504; WAN0249H6_at; Start 94; Stop 118
gaatgaaattgcttttatatctaaa

SEQ ID NO: 21909 - DNA, 25 bp, Artificial
  probe
  misc_feature (1)..(25): SEQ ID NO: 504; WAN0249H6_at; Start 53; Stop 77
tgggagattcagtagaaataaaact

SEQ ID NO: 21910 - DNA, 25 bp, Artificial
  probe
  misc_feature (1)..(25): SEQ ID NO: 504; WAN0249H6_at; Start 39; Stop 63
taggaataagtagatgggagattca

SEQ ID NO: 21911 - DNA, 25 bp, Artificial
  probe
  misc_feature (1)..(25): SEQ ID NO: 504; WAN0249H6_at; Start 4; Stop 28
ttaagtgtatcaaaagaggcaaatg

SEQ ID NO: 21912 - DNA, 25 bp, Artificial
  probe
  misc_feature (1)..(25): SEQ ID NO: 504; WAN0249H6_at; Start 28; Stop 52
gaaagcaactttaggaataagtaga

SEQ ID NO: 21913 - DNA, 25 bp, Artificial
  probe
  misc_feature (1)..(25): SEQ ID NO: 504; WAN0249H6_at; Start 22; Stop 46
gcaaatgaaagcaactttaggaata

SEQ ID NO: 21914 - DNA, 25 bp, Artificial
  probe
  misc_feature (1)..(25): SEQ ID NO: 504; WAN0249H6_at; Start 42; Stop 66
gaataagtagatgggagattcagta

SEQ ID NO: 21915 - DNA, 25 bp, Artificial
  probe
  misc_feature (1)..(25): SEQ ID NO: 504; WAN0249H6_at; Start 61; Stop 85
tcagtagaaataaaactaattctcc

SEQ ID NO: 21916 - DNA, 25 bp, Artificial
  probe
  misc_feature (1)..(25): SEQ ID NO: 504; WAN0249H6_at; Start 32; Stop 56
gcaactttaggaataagtagatggg

SEQ ID NO: 21917 - DNA, 25 bp, Artificial
  probe
  misc_feature (1)..(25): SEQ ID NO: 504; WAN0249H6_at; Start 33; Stop 57
caactttaggaataagtagatggga

SEQ ID NO: 21918 - DNA, 25 bp, Artificial
  probe
  misc_feature (1)..(25): SEQ ID NO: 504; WAN0249H6_at; Start 62; Stop 86
cagtagaaataaaactaattctcca

SEQ ID NO: 21919 - DNA, 25 bp, Artificial
  probe
  misc_feature (1)..(25): SEQ ID NO: 504; WAN0249H6_at; Start 1; Stop 25
agtttaagtgtatcaaaagaggcaa

SEQ ID NO: 21920 - DNA, 25 bp, Artificial
  probe
  misc_feature (1)..(25): SEQ ID NO: 504; WAN0249H6_at; Start 34; Stop 58
aactttaggaataagtagatgggag

SEQ ID NO: 21921 - DNA, 25 bp, Artificial
  probe
  misc_feature (1)..(25): SEQ ID NO: 504; WAN0249H6_at; Start 51; Stop 75
gatgggagattcagtagaaataaaa

SEQ ID NO: 21922 - DNA, 25 bp, Artificial
  probe
  misc_feature (1)..(25): SEQ ID NO: 504; WAN0249H6_at; Start 36; Stop 60
ctttaggaataagtagatgggagat

SEQ ID NO: 21923 - DNA, 25 bp, Artificial
  probe
  misc_feature (1)..(25): SEQ ID NO: 504; WAN0249H6_at; Start 11; Stop 35
tatcaaaagaggcaaatgaaagcaa

SEQ ID NO: 21924 - DNA, 25 bp, Artificial
  probe
  misc_feature (1)..(25): SEQ ID NO: 504; WAN0249H6_at; Start 23; Stop 47
caaatgaaagcaactttaggaataa

SEQ ID NO: 21925 - DNA, 25 bp, Artificial
  probe
  misc_feature (1)..(25): SEQ ID NO: 504; WAN0249H6_at; Start 81; Stop 105
tctccaatttatagaatgaaattgc

SEQ ID NO: 21926 - DNA, 25 bp, Artificial
  probe
  misc_feature (1)..(25): SEQ ID NO: 504; WAN0249H6_at; Start 5; Stop 29
taagtgtatcaaaagaggcaaatga

SEQ ID NO: 21927 - DNA, 25 bp, Artificial
  probe
  misc_feature (1)..(25): SEQ ID NO: 504; WAN0249H6_at; Start 49; Stop 73
tagatgggagattcagtagaaataa

SEQ ID NO: 21928 - DNA, 25 bp, Artificial
  probe
  misc_feature (1)..(25): SEQ ID NO: 5894; WAN0249H7_at; Start 59; Stop 83
atctcccatctacttattcctaaag

SEQ ID NO: 21929 - DNA, 25 bp, Artificial
  probe
  misc_feature (1)..(25): SEQ ID NO: 5894; WAN0249H7_at; Start 79; Stop 103
taaagttgctttcatttgcctcttt

SEQ ID NO: 21930 - DNA, 25 bp, Artificial
  probe
  misc_feature (1)..(25): SEQ ID NO: 5894; WAN0249H7_at; Start 86; Stop 110
gctttcatttgcctcttttgataca

SEQ ID NO: 21931 - DNA, 25 bp, Artificial
  probe
  misc_feature (1)..(25): SEQ ID NO: 5894; WAN0249H7_at; Start 41; Stop 65
tagttttatttctactgaatctccc

SEQ ID NO: 21932 - DNA, 25 bp, Artificial
  probe
  misc_feature (1)..(25): SEQ ID NO: 5894; WAN0249H7_at; Start 93; Stop 117
tttgcctcttttgatacacttaaac

SEQ ID NO: 21933 - DNA, 25 bp, Artificial
  probe
  misc_feature (1)..(25): SEQ ID NO: 5894; WAN0249H7_at; Start 42; Stop 66
agttttatttctactgaatctccca

SEQ ID NO: 21934 - DNA, 25 bp, Artificial
  probe
  misc_feature (1)..(25): SEQ ID NO: 5894; WAN0249H7_at; Start 57; Stop 81
gaatctcccatctacttattcctaa

SEQ ID NO: 21935 - DNA, 25 bp, Artificial
  probe
  misc_feature (1)..(25): SEQ ID NO: 5894; WAN0249H7_at; Start 34; Stop 58
ggagaattagttttatttctactga

SEQ ID NO: 21936 - DNA, 25 bp, Artificial
  probe
  misc_feature (1)..(25): SEQ ID NO: 5894; WAN0249H7_at; Start 44; Stop 68
ttttatttctactgaatctcccatc

SEQ ID NO: 21937 - DNA, 25 bp, Artificial
  probe
  misc_feature (1)..(25): SEQ ID NO: 5894; WAN0249H7_at; Start 49; Stop 73
tttctactgaatctcccatctactt

SEQ ID NO: 21938 - DNA, 25 bp, Artificial
  probe
  misc_feature (1)..(25): SEQ ID NO: 5894; WAN0249H7_at; Start 67; Stop 91
tctacttattcctaaagttgctttc

SEQ ID NO: 21939 - DNA, 25 bp, Artificial
  probe
  misc_feature (1)..(25): SEQ ID NO: 5894; WAN0249H7_at; Start 14; Stop 38
gcaatttcattctataaattggaga

SEQ ID NO: 21940 - DNA, 25 bp, Artificial
  probe
  misc_feature (1)..(25): SEQ ID NO: 5894; WAN0249H7_at; Start 65; Stop 89
catctacttattcctaaagttgctt

SEQ ID NO: 21941 - DNA, 25 bp, Artificial
  probe
  misc_feature (1)..(25): SEQ ID NO: 5894; WAN0249H7_at; Start 43; Stop 67
gttttatttctactgaatctcccat

SEQ ID NO: 21942 - DNA, 25 bp, Artificial
  probe
  misc_feature (1)..(25): SEQ ID NO: 5894; WAN0249H7_at; Start 1; Stop 25
tttagatataaaagcaatttcattc

SEQ ID NO: 21943 - DNA, 25 bp, Artificial
  probe
  misc_feature (1)..(25): SEQ ID NO: 5894; WAN0249H7_at; Start 78; Stop 102
ctaaagttgctttcatttgcctctt

SEQ ID NO: 21944 - DNA, 25 bp, Artificial
  probe
  misc_feature (1)..(25): SEQ ID NO: 5894; WAN0249H7_at; Start 51; Stop 75
tctactgaatctcccatctacttat

SEQ ID NO: 21945 - DNA, 25 bp, Artificial
  probe
  misc_feature (1)..(25): SEQ ID NO: 5894; WAN0249H7_at; Start 94; Stop 118
ttgcctcttttgatacacttaaact

SEQ ID NO: 21946 - DNA, 25 bp, Artificial
  probe
  misc_feature (1)..(25): SEQ ID NO: 5894; WAN0249H7_at; Start 53; Stop 77
tactgaatctcccatctacttattc

SEQ ID NO: 21947 - DNA, 25 bp, Artificial
  probe
  misc_feature (1)..(25): SEQ ID NO: 5894; WAN0249H7_at; Start 82; Stop 106
agttgctttcatttgcctcttttga

SEQ ID NO: 21948 - DNA, 25 bp, Artificial
  probe
  misc_feature (1)..(25): SEQ ID NO: 5894; WAN0249H7_at; Start 47; Stop 71
tatttctactgaatctcccatctac

SEQ ID NO: 21949 - DNA, 25 bp, Artificial
  probe
  misc_feature (1)..(25): SEQ ID NO: 5894; WAN0249H7_at; Start 21; Stop 45
cattctataaattggagaattagtt

SEQ ID NO: 21950 - DNA, 25 bp, Artificial
  probe
  misc_feature (1)..(25): SEQ ID NO: 5894; WAN0249H7_at; Start 91; Stop 115
catttgcctcttttgatacacttaa

SEQ ID NO: 21951 - DNA, 25 bp, Artificial
  probe
  misc_feature (1)..(25): SEQ ID NO: 5894; WAN0249H7_at; Start 87; Stop 111
ctttcatttgcctcttttgatacac

SEQ ID NO: 21952 - DNA, 25 bp, Artificial
  probe
  misc_feature (1)..(25): SEQ ID NO: 5894; WAN0249H7_at; Start 74; Stop 98
attcctaaagttgctttcatttgcc

SEQ ID NO: 21953 - DNA, 25 bp, Artificial
  probe
  misc_feature (1)..(25): SEQ ID NO: 5894; WAN0249H7_at; Start 76; Stop 100
tcctaaagttgctttcatttgcctc

SEQ ID NO: 21954 - DNA, 25 bp, Artificial
  probe
  misc_feature (1)..(25): SEQ ID NO: 5894; WAN0249H7_at; Start 73; Stop 97
tattcctaaagttgctttcatttgc

SEQ ID NO: 21955 - DNA, 25 bp, Artificial
  probe
  misc_feature (1)..(25): SEQ ID NO: 5894; WAN0249H7_at; Start 62; Stop 86
tcccatctacttattcctaaagttg

SEQ ID NO: 21956 - DNA, 25 bp, Artificial
  probe
  misc_feature (1)..(25): SEQ ID NO: 5894; WAN0249H7_at; Start 83; Stop 107
gttgctttcatttgcctcttttgat

SEQ ID NO: 21957 - DNA, 25 bp, Artificial
  probe
  misc_feature (1)..(25): SEQ ID NO: 5894; WAN0249H7_at; Start 50; Stop 74
ttctactgaatctcccatctactta

SEQ ID NO: 21958 - DNA, 25 bp, Artificial
  probe
  misc_feature (1)..(25): SEQ ID NO: 5894; WAN0249H7_at; Start 69; Stop 93
tacttattcctaaagttgctttcat

SEQ ID NO: 21959 - DNA, 25 bp, Artificial
  probe
  misc_feature (1)..(25): SEQ ID NO: 5894; WAN0249H7_at; Start 77; Stop 101
cctaaagttgctttcatttgcctct

SEQ ID NO: 21960 - DNA, 25 bp, Artificial
  probe
  misc_feature (1)..(25): SEQ ID NO: 5894; WAN0249H7_at; Start 81; Stop 105
aagttgctttcatttgcctcttttg

SEQ ID NO: 21961 - DNA, 25 bp, Artificial
  probe
  misc_feature (1)..(25): SEQ ID NO: 5894; WAN0249H7_at; Start 64; Stop 88
ccatctacttattcctaaagttgct

SEQ ID NO: 21962 - DNA, 25 bp, Artificial
  probe
  misc_feature (1)..(25): SEQ ID NO: 1544; WAN0249H8_at; Start 50; Stop 74
ctttgtttatagataaatgttgaat

SEQ ID NO: 21963 - DNA, 25 bp, Artificial
  probe
  misc_feature (1)..(25): SEQ ID NO: 1544; WAN0249H8_at; Start 3; Stop 27
gagagttattaacagcaaaaaggag

SEQ ID NO: 21964 - DNA, 25 bp, Artificial
  probe
  misc_feature (1)..(25): SEQ ID NO: 1544; WAN0249H8_at; Start 46; Stop 70
actcctttgtttatagataaatgtt

SEQ ID NO: 21965 - DNA, 25 bp, Artificial
  probe
  misc_feature (1)..(25): SEQ ID NO: 1544; WAN0249H8_at; Start 45; Stop 69
aactcctttgtttatagataaatgt

SEQ ID NO: 21966 - DNA, 25 bp, Artificial
  probe
  misc_feature (1)..(25): SEQ ID NO: 1544; WAN0249H8_at; Start 49; Stop 73
cctttgtttatagataaatgttgaa

SEQ ID NO: 21967 - DNA, 25 bp, Artificial
  probe
  misc_feature (1)..(25): SEQ ID NO: 1544; WAN0249H8_at; Start 48; Stop 72
tcctttgtttatagataaatgttga

SEQ ID NO: 21968 - DNA, 25 bp, Artificial
  probe
  misc_feature (1)..(25): SEQ ID NO: 1544; WAN0249H8_at; Start 2; Stop 26
tgagagttattaacagcaaaaagga

SEQ ID NO: 21969 - DNA, 25 bp, Artificial
  probe
  misc_feature (1)..(25): SEQ ID NO: 1544; WAN0249H8_at; Start 52; Stop 76
ttgtttatagataaatgttgaatag

SEQ ID NO: 21970 - DNA, 25 bp, Artificial
  probe
  misc_feature (1)..(25): SEQ ID NO: 1544; WAN0249H8_at; Start 53; Stop 77
tgtttatagataaatgttgaatagt

SEQ ID NO: 21971 - DNA, 25 bp, Artificial
  probe
  misc_feature (1)..(25): SEQ ID NO: 1544; WAN0249H8_at; Start 15; Stop 39
cagcaaaaaggagttacctttctcg

SEQ ID NO: 21972 - DNA, 25 bp, Artificial
  probe
  misc_feature (1)..(25): SEQ ID NO: 1544; WAN0249H8_at; Start 4; Stop 28
agagttattaacagcaaaaaggagt

SEQ ID NO: 21973 - DNA, 25 bp, Artificial
  probe
  misc_feature (1)..(25): SEQ ID NO: 1544; WAN0249H8_at; Start 47; Stop 71
ctcctttgtttatagataaatgttg

SEQ ID NO: 21974 - DNA, 25 bp, Artificial
  probe
  misc_feature (1)..(25): SEQ ID NO: 1544; WAN0249H8_at; Start 44; Stop 68
taactcctttgtttatagataaatg

SEQ ID NO: 21975 - DNA, 25 bp, Artificial
  probe
  misc_feature (1)..(25): SEQ ID NO: 1544; WAN0249H8_at; Start 1; Stop 25
atgagagttattaacagcaaaaagg

SEQ ID NO: 21976 - DNA, 25 bp, Artificial
  probe
  misc_feature (1)..(25): SEQ ID NO: 374; WAN0249H9_at; Start 5; Stop 29
ttcaacatttatctataaacaaagg

SEQ ID NO: 21977 - DNA, 25 bp, Artificial
  probe
  misc_feature (1)..(25): SEQ ID NO: 374; WAN0249H9_at; Start 3; Stop 27
tattcaacatttatctataaacaaa

SEQ ID NO: 21978 - DNA, 25 bp, Artificial
  probe
  misc_feature (1)..(25): SEQ ID NO: 374; WAN0249H9_at; Start 51; Stop 75
ctcctttttgctgttaataactctc

SEQ ID NO: 21979 - DNA, 25 bp, Artificial
  probe
  misc_feature (1)..(25): SEQ ID NO: 374; WAN0249H9_at; Start 6; Stop 30
tcaacatttatctataaacaaagga

SEQ ID NO: 21980 - DNA, 25 bp, Artificial
  probe
  misc_feature (1)..(25): SEQ ID NO: 374; WAN0249H9_at; Start 53; Stop 77
cctttttgctgttaataactctcat

SEQ ID NO: 21981 - DNA, 25 bp, Artificial
  probe
  misc_feature (1)..(25): SEQ ID NO: 374; WAN0249H9_at; Start 8; Stop 32
aacatttatctataaacaaaggagt

SEQ ID NO: 21982 - DNA, 25 bp, Artificial
  probe
  misc_feature (1)..(25): SEQ ID NO: 374; WAN0249H9_at; Start 10; Stop 34
catttatctataaacaaaggagtta

SEQ ID NO: 21983 - DNA, 25 bp, Artificial
  probe
  misc_feature (1)..(25): SEQ ID NO: 374; WAN0249H9_at; Start 39; Stop 63
cgagaaaggtaactcctttttgctg

SEQ ID NO: 21984 - DNA, 25 bp, Artificial
  probe
  misc_feature (1)..(25): SEQ ID NO: 374; WAN0249H9_at; Start 50; Stop 74
actcctttttgctgttaataactct

SEQ ID NO: 21985 - DNA, 25 bp, Artificial
  probe
  misc_feature (1)..(25): SEQ ID NO: 374; WAN0249H9_at; Start 9; Stop 33
acatttatctataaacaaaggagtt

SEQ ID NO: 21986 - DNA, 25 bp, Artificial
  probe
  misc_feature (1)..(25): SEQ ID NO: 374; WAN0249H9_at; Start 7; Stop 31
caacatttatctataaacaaaggag

SEQ ID NO: 21987 - DNA, 25 bp, Artificial
  probe
  misc_feature (1)..(25): SEQ ID NO: 374; WAN0249H9_at; Start 2; Stop 26
ctattcaacatttatctataaacaa

SEQ ID NO: 21988 - DNA, 25 bp, Artificial
  probe
  misc_feature (1)..(25): SEQ ID NO: 374; WAN0249H9_at; Start 52; Stop 76
tcctttttgctgttaataactctca

SEQ ID NO: 21989 - DNA, 25 bp, Artificial
  probe
  misc_feature (1)..(25): SEQ ID NO: 374; WAN0249H9_at; Start 1; Stop 25
actattcaacatttatctataaaca

SEQ ID NO: 21990 - DNA, 25 bp, Artificial
  probe
  misc_feature (1)..(25): SEQ ID NO: 374; WAN0249H9_at; Start 4; Stop 28
attcaacatttatctataaacaaag

SEQ ID NO: 21991 - DNA, 25 bp, Artificial
  probe
  misc_feature (1)..(25): SEQ ID NO: 559; WAN0249HA_at; Start 4; Stop 28
gggaagaaagtggctattttattga

SEQ ID NO: 21992 - DNA, 25 bp, Artificial
  probe
  misc_feature (1)..(25): SEQ ID NO: 559; WAN0249HA_at; Start 3; Stop 27
agggaagaaagtggctattttattg

SEQ ID NO: 21993 - DNA, 25 bp, Artificial
  probe
  misc_feature (1)..(25): SEQ ID NO: 559; WAN0249HA_at; Start 6; Stop 30
gaagaaagtggctattttattgaaa

SEQ ID NO: 21994 - DNA, 25 bp, Artificial
  probe
  misc_feature (1)..(25): SEQ ID NO: 559; WAN0249HA_at; Start 44; Stop 68
ggtataatagataaagtgaggaaat

SEQ ID NO: 21995 - DNA, 25 bp, Artificial
  probe
  misc_feature (1)..(25): SEQ ID NO: 559; WAN0249HA_at; Start 41; Stop 65
tgtggtataatagataaagtgagga

SEQ ID NO: 21996 - DNA, 25 bp, Artificial
  probe
  misc_feature (1)..(25): SEQ ID NO: 559; WAN0249HA_at; Start 46; Stop 70
tataatagataaagtgaggaaatcc

SEQ ID NO: 21997 - DNA, 25 bp, Artificial
  probe
  misc_feature (1)..(25): SEQ ID NO: 559; WAN0249HA_at; Start 45; Stop 69
gtataatagataaagtgaggaaatc

SEQ ID NO: 21998 - DNA, 25 bp, Artificial
  probe
  misc_feature (1)..(25): SEQ ID NO: 559; WAN0249HA_at; Start 1; Stop 25
atagggaagaaagtggctattttat

SEQ ID NO: 21999 - DNA, 25 bp, Artificial
  probe
  misc_feature (1)..(25): SEQ ID NO: 559; WAN0249HA_at; Start 43; Stop 67
tggtataatagataaagtgaggaaa

SEQ ID NO: 22000 - DNA, 25 bp, Artificial
  probe
  misc_feature (1)..(25): SEQ ID NO: 559; WAN0249HA_at; Start 8; Stop 32
agaaagtggctattttattgaaaat

SEQ ID NO: 22001 - DNA, 25 bp, Artificial
  probe
  misc_feature (1)..(25): SEQ ID NO: 559; WAN0249HA_at; Start 5; Stop 29
ggaagaaagtggctattttattgaa

SEQ ID NO: 22002 - DNA, 25 bp, Artificial
  probe
  misc_feature (1)..(25): SEQ ID NO: 559; WAN0249HA_at; Start 42; Stop 66
gtggtataatagataaagtgaggaa

SEQ ID NO: 22003 - DNA, 25 bp, Artificial
  probe
  misc_feature (1)..(25): SEQ ID NO: 3739; WAN0249HB_at; Start 6; Stop 30
tcctcactttatctattataccaca

SEQ ID NO: 22004 - DNA, 25 bp, Artificial
  probe
  misc_feature (1)..(25): SEQ ID NO: 3739; WAN0249HB_at; Start 39; Stop 63
attttcaataaaatagccactttct

SEQ ID NO: 22005 - DNA, 25 bp, Artificial
  probe
  misc_feature (1)..(25): SEQ ID NO: 3739; WAN0249HB_at; Start 2; Stop 26
gatttcctcactttatctattatac

SEQ ID NO: 22006 - DNA, 25 bp, Artificial
  probe
  misc_feature (1)..(25): SEQ ID NO: 3739; WAN0249HB_at; Start 46; Stop 70
ataaaatagccactttcttccctat

SEQ ID NO: 22007 - DNA, 25 bp, Artificial
  probe
  misc_feature (1)..(25): SEQ ID NO: 3739; WAN0249HB_at; Start 1; Stop 25
ggatttcctcactttatctattata

SEQ ID NO: 22008 - DNA, 25 bp, Artificial
  probe
  misc_feature (1)..(25): SEQ ID NO: 3739; WAN0249HB_at; Start 43; Stop 67
tcaataaaatagccactttcttccc

SEQ ID NO: 22009 - DNA, 25 bp, Artificial
  probe
  misc_feature (1)..(25): SEQ ID NO: 3739; WAN0249HB_at; Start 41; Stop 65
tttcaataaaatagccactttcttc

SEQ ID NO: 22010 - DNA, 25 bp, Artificial
  probe
  misc_feature (1)..(25): SEQ ID NO: 3739; WAN0249HB_at; Start 5; Stop 29
ttcctcactttatctattataccac

SEQ ID NO: 22011 - DNA, 25 bp, Artificial
  probe
  misc_feature (1)..(25): SEQ ID NO: 3739; WAN0249HB_at; Start 4; Stop 28
tttcctcactttatctattatacca

SEQ ID NO: 22012 - DNA, 25 bp, Artificial
  probe
  misc_feature (1)..(25): SEQ ID NO: 3739; WAN0249HB_at; Start 42; Stop 66
ttcaataaaatagccactttcttcc

SEQ ID NO: 22013 - DNA, 25 bp, Artificial
  probe
  misc_feature (1)..(25): SEQ ID NO: 3739; WAN0249HB_at; Start 3; Stop 27
atttcctcactttatctattatacc

SEQ ID NO: 22014 - DNA, 25 bp, Artificial
  probe
  misc_feature (1)..(25): SEQ ID NO: 3739; WAN0249HB_at; Start 44; Stop 68
caataaaatagccactttcttccct

SEQ ID NO: 22015 - DNA, 25 bp, Artificial
  probe
  misc_feature (1)..(25): SEQ ID NO: 135; WAN0249HC_at; Start 18; Stop 42
ctaaaagtgtgctatactggaatag

SEQ ID NO: 22016 - DNA, 25 bp, Artificial
  probe
  misc_feature (1)..(25): SEQ ID NO: 135; WAN0249HC_at; Start 81; Stop 105
taggttgtatcggtaggggcttgct

SEQ ID NO: 22017 - DNA, 25 bp, Artificial
  probe
  misc_feature (1)..(25): SEQ ID NO: 135; WAN0249HC_at; Start 100; Stop 124
cttgcttttaccgacagcacgtttt

SEQ ID NO: 22018 - DNA, 25 bp, Artificial
  probe
  misc_feature (1)..(25): SEQ ID NO: 135; WAN0249HC_at; Start 37; Stop 61
gaatagtcaataaaacacggggaga

SEQ ID NO: 22019 - DNA, 25 bp, Artificial
  probe
  misc_feature (1)..(25): SEQ ID NO: 135; WAN0249HC_at; Start 106; Stop 130
tttaccgacagcacgttttatctca

SEQ ID NO: 22020 - DNA, 25 bp, Artificial
  probe
  misc_feature (1)..(25): SEQ ID NO: 135; WAN0249HC_at; Start 28; Stop 52
gctatactggaatagtcaataaaac

SEQ ID NO: 22021 - DNA, 25 bp, Artificial
  probe
  misc_feature (1)..(25): SEQ ID NO: 135; WAN0249HC_at; Start 22; Stop 46
aagtgtgctatactggaatagtcaa

SEQ ID NO: 22022 - DNA, 25 bp, Artificial
  probe
  misc_feature (1)..(25): SEQ ID NO: 135; WAN0249HC_at; Start 103; Stop 127
gcttttaccgacagcacgttttatc

SEQ ID NO: 22023 - DNA, 25 bp, Artificial
  probe
  misc_feature (1)..(25): SEQ ID NO: 135; WAN0249HC_at; Start 19; Stop 43
taaaagtgtgctatactggaatagt

SEQ ID NO: 22024 - DNA, 25 bp, Artificial
  probe
  misc_feature (1)..(25): SEQ ID NO: 135; WAN0249HC_at; Start 16; Stop 40
ttctaaaagtgtgctatactggaat

SEQ ID NO: 22025 - DNA, 25 bp, Artificial
  probe
  misc_feature (1)..(25): SEQ ID NO: 135; WAN0249HC_at; Start 32; Stop 56
tactggaatagtcaataaaacacgg

SEQ ID NO: 22026 - DNA, 25 bp, Artificial
  probe
  misc_feature (1)..(25): SEQ ID NO: 135; WAN0249HC_at; Start 98; Stop 122
ggcttgcttttaccgacagcacgtt

SEQ ID NO: 22027 - DNA, 25 bp, Artificial
  probe
  misc_feature (1)..(25): SEQ ID NO: 135; WAN0249HC_at; Start 68; Stop 92
tgaagagtgtttttaggttgtatcg

SEQ ID NO: 22028 - DNA, 25 bp, Artificial
  probe
  misc_feature (1)..(25): SEQ ID NO: 135; WAN0249HC_at; Start 10; Stop 34
tcttaattctaaaagtgtgctatac

SEQ ID NO: 22029 - DNA, 25 bp, Artificial
  probe
  misc_feature (1)..(25): SEQ ID NO: 135; WAN0249HC_at; Start 20; Stop 44
aaaagtgtgctatactggaatagtc

SEQ ID NO: 22030 - DNA, 25 bp, Artificial
  probe
  misc_feature (1)..(25): SEQ ID NO: 135; WAN0249HC_at; Start 40; Stop 64
tagtcaataaaacacggggagatag

SEQ ID NO: 22031 - DNA, 25 bp, Artificial
  probe
  misc_feature (1)..(25): SEQ ID NO: 135; WAN0249HC_at; Start 58; Stop 82
gagatagttgtgaagagtgttttta

SEQ ID NO: 22032 - DNA, 25 bp, Artificial
  probe
  misc_feature (1)..(25): SEQ ID NO: 135; WAN0249HC_at; Start 13; Stop 37
taattctaaaagtgtgctatactgg

SEQ ID NO: 22033 - DNA, 25 bp, Artificial
  probe
  misc_feature (1)..(25): SEQ ID NO: 135; WAN0249HC_at; Start 14; Stop 38
aattctaaaagtgtgctatactgga

SEQ ID NO: 22034 - DNA, 25 bp, Artificial
  probe
  misc_feature (1)..(25): SEQ ID NO: 135; WAN0249HC_at; Start 33; Stop 57
actggaatagtcaataaaacacggg

SEQ ID NO: 22035 - DNA, 25 bp, Artificial
  probe
  misc_feature (1)..(25): SEQ ID NO: 135; WAN0249HC_at; Start 24; Stop 48
gtgtgctatactggaatagtcaata

SEQ ID NO: 22036 - DNA, 25 bp, Artificial
  probe
  misc_feature (1)..(25): SEQ ID NO: 135; WAN0249HC_at; Start 30; Stop 54
tatactggaatagtcaataaaacac

SEQ ID NO: 22037 - DNA, 25 bp, Artificial
  probe
  misc_feature (1)..(25): SEQ ID NO: 135; WAN0249HC_at; Start 5; Stop 29
tcttttcttaattctaaaagtgtgc

SEQ ID NO: 22038 - DNA, 25 bp, Artificial
  probe
  misc_feature (1)..(25): SEQ ID NO: 135; WAN0249HC_at; Start 97; Stop 121
gggcttgcttttaccgacagcacgt

SEQ ID NO: 22039 - DNA, 25 bp, Artificial
  probe
  misc_feature (1)..(25): SEQ ID NO: 135; WAN0249HC_at; Start 105; Stop 129
ttttaccgacagcacgttttatctc

SEQ ID NO: 22040 - DNA, 25 bp, Artificial
  probe
  misc_feature (1)..(25): SEQ ID NO: 135; WAN0249HC_at; Start 102; Stop 126
tgcttttaccgacagcacgttttat

SEQ ID NO: 22041 - DNA, 25 bp, Artificial
  probe
  misc_feature (1)..(25): SEQ ID NO: 135; WAN0249HC_at; Start 21; Stop 45
aaagtgtgctatactggaatagtca

SEQ ID NO: 22042 - DNA, 25 bp, Artificial
  probe
  misc_feature (1)..(25): SEQ ID NO: 135; WAN0249HC_at; Start 17; Stop 41
tctaaaagtgtgctatactggaata

SEQ ID NO: 22043 - DNA, 25 bp, Artificial
  probe
  misc_feature (1)..(25): SEQ ID NO: 135; WAN0249HC_at; Start 104; Stop 128
cttttaccgacagcacgttttatct

SEQ ID NO: 22044 - DNA, 25 bp, Artificial
  probe
  misc_feature (1)..(25): SEQ ID NO: 135; WAN0249HC_at; Start 25; Stop 49
tgtgctatactggaatagtcaataa

SEQ ID NO: 22045 - DNA, 25 bp, Artificial
  probe
  misc_feature (1)..(25): SEQ ID NO: 135; WAN0249HC_at; Start 60; Stop 84
gatagttgtgaagagtgtttttagg

SEQ ID NO: 22046 - DNA, 25 bp, Artificial
  probe
  misc_feature (1)..(25): SEQ ID NO: 135; WAN0249HC_at; Start 47; Stop 71
taaaacacggggagatagttgtgaa

SEQ ID NO: 22047 - DNA, 25 bp, Artificial
  probe
  misc_feature (1)..(25): SEQ ID NO: 135; WAN0249HC_at; Start 26; Stop 50
gtgctatactggaatagtcaataaa

SEQ ID NO: 22048 - DNA, 25 bp, Artificial
  probe
  misc_feature (1)..(25): SEQ ID NO: 135; WAN0249HC_at; Start 101; Stop 125
ttgcttttaccgacagcacgtttta

SEQ ID NO: 22049 - DNA, 25 bp, Artificial
  probe
  misc_feature (1)..(25): SEQ ID NO: 4683; WAN0249HD_at; Start 13; Stop 37
tgctgtcggtaaaagcaagccccta

SEQ ID NO: 22050 - DNA, 25 bp, Artificial
  probe
  misc_feature (1)..(25): SEQ ID NO: 4683; WAN0249HD_at; Start 83; Stop 107
tattgactattccagtatagcacac

SEQ ID NO: 22051 - DNA, 25 bp, Artificial
  probe
  misc_feature (1)..(25): SEQ ID NO: 4683; WAN0249HD_at; Start 97; Stop 121
gtatagcacacttttagaattaaga

SEQ ID NO: 22052 - DNA, 25 bp, Artificial
  probe
  misc_feature (1)..(25): SEQ ID NO: 4683; WAN0249HD_at; Start 44; Stop 68
caacctaaaaacactcttcacaact

SEQ ID NO: 22053 - DNA, 25 bp, Artificial
  probe
  misc_feature (1)..(25): SEQ ID NO: 4683; WAN0249HD_at; Start 14; Stop 38
gctgtcggtaaaagcaagcccctac

SEQ ID NO: 22054 - DNA, 25 bp, Artificial
  probe
  misc_feature (1)..(25): SEQ ID NO: 4683; WAN0249HD_at; Start 68; Stop 92
tatctccccgtgttttattgactat

SEQ ID NO: 22055 - DNA, 25 bp, Artificial
  probe
  misc_feature (1)..(25): SEQ ID NO: 4683; WAN0249HD_at; Start 12; Stop 36
gtgctgtcggtaaaagcaagcccct

SEQ ID NO: 22056 - DNA, 25 bp, Artificial
  probe
  misc_feature (1)..(25): SEQ ID NO: 4683; WAN0249HD_at; Start 94; Stop 118
ccagtatagcacacttttagaatta

SEQ ID NO: 22057 - DNA, 25 bp, Artificial
  probe
  misc_feature (1)..(25): SEQ ID NO: 4683; WAN0249HD_at; Start 102; Stop 126
gcacacttttagaattaagaaaaga

SEQ ID NO: 22058 - DNA, 25 bp, Artificial
  probe
  misc_feature (1)..(25): SEQ ID NO: 4683; WAN0249HD_at; Start 9; Stop 33
aacgtgctgtcggtaaaagcaagcc

SEQ ID NO: 22059 - DNA, 25 bp, Artificial
  probe
  misc_feature (1)..(25): SEQ ID NO: 4683; WAN0249HD_at; Start 86; Stop 110
tgactattccagtatagcacacttt

SEQ ID NO: 22060 - DNA, 25 bp, Artificial
  probe
  misc_feature (1)..(25): SEQ ID NO: 4683; WAN0249HD_at; Start 42; Stop 66
tacaacctaaaaacactcttcacaa

SEQ ID NO: 22061 - DNA, 25 bp, Artificial
  probe
  misc_feature (1)..(25): SEQ ID NO: 4683; WAN0249HD_at; Start 4; Stop 28
gataaaacgtgctgtcggtaaaagc

SEQ ID NO: 22062 - DNA, 25 bp, Artificial
  probe
  misc_feature (1)..(25): SEQ ID NO: 4683; WAN0249HD_at; Start 90; Stop 114
tattccagtatagcacacttttaga

SEQ ID NO: 22063 - DNA, 25 bp, Artificial
  probe
  misc_feature (1)..(25): SEQ ID NO: 4683; WAN0249HD_at; Start 39; Stop 63
cgatacaacctaaaaacactcttca

SEQ ID NO: 22064 - DNA, 25 bp, Artificial
  probe
  misc_feature (1)..(25): SEQ ID NO: 4683; WAN0249HD_at; Start 6; Stop 30
taaaacgtgctgtcggtaaaagcaa

SEQ ID NO: 22065 - DNA, 25 bp, Artificial
  probe
  misc_feature (1)..(25): SEQ ID NO: 4683; WAN0249HD_at; Start 1; Stop 25
tgagataaaacgtgctgtcggtaaa

SEQ ID NO: 22066 - DNA, 25 bp, Artificial
  probe
  misc_feature (1)..(25): SEQ ID NO: 4683; WAN0249HD_at; Start 25; Stop 49
aagcaagcccctaccgatacaacct

SEQ ID NO: 22067 - DNA, 25 bp, Artificial
  probe
  misc_feature (1)..(25): SEQ ID NO: 4683; WAN0249HD_at; Start 58; Stop 82
tcttcacaactatctccccgtgttt

SEQ ID NO: 22068 - DNA, 25 bp, Artificial
  probe
  misc_feature (1)..(25): SEQ ID NO: 4683; WAN0249HD_at; Start 87; Stop 111
gactattccagtatagcacactttt

SEQ ID NO: 22069 - DNA, 25 bp, Artificial
  probe
  misc_feature (1)..(25): SEQ ID NO: 4683; WAN0249HD_at; Start 100; Stop 124
tagcacacttttagaattaagaaaa

SEQ ID NO: 22070 - DNA, 25 bp, Artificial
  probe
  misc_feature (1)..(25): SEQ ID NO: 4683; WAN0249HD_at; Start 61; Stop 85
tcacaactatctccccgtgttttat

SEQ ID NO: 22071 - DNA, 25 bp, Artificial
  probe
  misc_feature (1)..(25): SEQ ID NO: 4683; WAN0249HD_at; Start 40; Stop 64
gatacaacctaaaaacactcttcac

SEQ ID NO: 22072 - DNA, 25 bp, Artificial
  probe
  misc_feature (1)..(25): SEQ ID NO: 4683; WAN0249HD_at; Start 3; Stop 27
agataaaacgtgctgtcggtaaaag

SEQ ID NO: 22073 - DNA, 25 bp, Artificial
  probe
  misc_feature (1)..(25): SEQ ID NO: 4683; WAN0249HD_at; Start 10; Stop 34
acgtgctgtcggtaaaagcaagccc

SEQ ID NO: 22074 - DNA, 25 bp, Artificial
  probe
  misc_feature (1)..(25): SEQ ID NO: 4683; WAN0249HD_at; Start 7; Stop 31
aaaacgtgctgtcggtaaaagcaag

SEQ ID NO: 22075 - DNA, 25 bp, Artificial
  probe
  misc_feature (1)..(25): SEQ ID NO: 4683; WAN0249HD_at; Start 49; Stop 73
taaaaacactcttcacaactatctc

SEQ ID NO: 22076 - DNA, 25 bp, Artificial
  probe
  misc_feature (1)..(25): SEQ ID NO: 4683; WAN0249HD_at; Start 66; Stop 90
actatctccccgtgttttattgact

SEQ ID NO: 22077 - DNA, 25 bp, Artificial
  probe
  misc_feature (1)..(25): SEQ ID NO: 4683; WAN0249HD_at; Start 70; Stop 94
tctccccgtgttttattgactattc

SEQ ID NO: 22078 - DNA, 25 bp, Artificial
  probe
  misc_feature (1)..(25): SEQ ID NO: 4683; WAN0249HD_at; Start 11; Stop 35
cgtgctgtcggtaaaagcaagcccc

SEQ ID NO: 22079 - DNA, 25 bp, Artificial
  probe
  misc_feature (1)..(25): SEQ ID NO: 4683; WAN0249HD_at; Start 75; Stop 99
ccgtgttttattgactattccagta

SEQ ID NO: 22080 - DNA, 25 bp, Artificial
  probe
  misc_feature (1)..(25): SEQ ID NO: 4683; WAN0249HD_at; Start 2; Stop 26
gagataaaacgtgctgtcggtaaaa

SEQ ID NO: 22081 - DNA, 25 bp, Artificial
  probe
  misc_feature (1)..(25): SEQ ID NO: 4683; WAN0249HD_at; Start 21; Stop 45
gtaaaagcaagcccctaccgataca

SEQ ID NO: 22082 - DNA, 25 bp, Artificial
  probe
  misc_feature (1)..(25): SEQ ID NO: 4683; WAN0249HD_at; Start 73; Stop 97
ccccgtgttttattgactattccag

SEQ ID NO: 22083 - DNA, 25 bp, Artificial
  probe
  misc_feature (1)..(25): SEQ ID NO: 5668; WAN0249HE_at; Start 36; Stop 60
agcctctttctgctatatcggagga

SEQ ID NO: 22084 - DNA, 25 bp, Artificial
  probe
  misc_feature (1)..(25): SEQ ID NO: 5668; WAN0249HE_at; Start 30; Stop 54
ttttccagcctctttctgctatatc

SEQ ID NO: 22085 - DNA, 25 bp, Artificial
  probe
  misc_feature (1)..(25): SEQ ID NO: 5668; WAN0249HE_at; Start 28; Stop 52
ctttttccagcctctttctgctata

SEQ ID NO: 22086 - DNA, 25 bp, Artificial
  probe
  misc_feature (1)..(25): SEQ ID NO: 5668; WAN0249HE_at; Start 26; Stop 50
ccctttttccagcctctttctgcta

SEQ ID NO: 22087 - DNA, 25 bp, Artificial
  probe
  misc_feature (1)..(25): SEQ ID NO: 5668; WAN0249HE_at; Start 32; Stop 56
ttccagcctctttctgctatatcgg

SEQ ID NO: 22088 - DNA, 25 bp, Artificial
  probe
  misc_feature (1)..(25): SEQ ID NO: 5668; WAN0249HE_at; Start 39; Stop 63
ctctttctgctatatcggaggacag

SEQ ID NO: 22089 - DNA, 25 bp, Artificial
  probe
  misc_feature (1)..(25): SEQ ID NO: 5668; WAN0249HE_at; Start 35; Stop 59
cagcctctttctgctatatcggagg

SEQ ID NO: 22090 - DNA, 25 bp, Artificial
  probe
  misc_feature (1)..(25): SEQ ID NO: 5668; WAN0249HE_at; Start 25; Stop 49
accctttttccagcctctttctgct

SEQ ID NO: 22091 - DNA, 25 bp, Artificial
  probe
  misc_feature (1)..(25): SEQ ID NO: 5668; WAN0249HE_at; Start 27; Stop 51
cctttttccagcctctttctgctat

SEQ ID NO: 22092 - DNA, 25 bp, Artificial
  probe
  misc_feature (1)..(25): SEQ ID NO: 5668; WAN0249HE_at; Start 29; Stop 53
tttttccagcctctttctgctatat

SEQ ID NO: 22093 - DNA, 25 bp, Artificial
  probe
  misc_feature (1)..(25): SEQ ID NO: 5668; WAN0249HE_at; Start 33; Stop 57
tccagcctctttctgctatatcgga

SEQ ID NO: 22094 - DNA, 25 bp, Artificial
  probe
  misc_feature (1)..(25): SEQ ID NO: 5668; WAN0249HE_at; Start 42; Stop 66
tttctgctatatcggaggacagata

SEQ ID NO: 22095 - DNA, 25 bp, Artificial
  probe
  misc_feature (1)..(25): SEQ ID NO: 5668; WAN0249HE_at; Start 41; Stop 65
ctttctgctatatcggaggacagat

SEQ ID NO: 22096 - DNA, 25 bp, Artificial
  probe
  misc_feature (1)..(25): SEQ ID NO: 5668; WAN0249HE_at; Start 34; Stop 58
ccagcctctttctgctatatcggag

SEQ ID NO: 22097 - DNA, 25 bp, Artificial
  probe
  misc_feature (1)..(25): SEQ ID NO: 5668; WAN0249HE_at; Start 37; Stop 61
gcctctttctgctatatcggaggac

SEQ ID NO: 22098 - DNA, 25 bp, Artificial
  probe
  misc_feature (1)..(25): SEQ ID NO: 5668; WAN0249HE_at; Start 40; Stop 64
tctttctgctatatcggaggacaga

SEQ ID NO: 22099 - DNA, 25 bp, Artificial
  probe
  misc_feature (1)..(25): SEQ ID NO: 5668; WAN0249HE_at; Start 38; Stop 62
cctctttctgctatatcggaggaca

SEQ ID NO: 22100 - DNA, 25 bp, Artificial
  probe
  misc_feature (1)..(25): SEQ ID NO: 5668; WAN0249HE_at; Start 43; Stop 67
ttctgctatatcggaggacagatag

SEQ ID NO: 22101 - DNA, 25 bp, Artificial
  probe
  misc_feature (1)..(25): SEQ ID NO: 5668; WAN0249HE_at; Start 31; Stop 55
tttccagcctctttctgctatatcg

SEQ ID NO: 22102 - DNA, 25 bp, Artificial
  probe
  misc_feature (1)..(25): SEQ ID NO: 3290; WAN0249HF_at; Start 19; Stop 43
agcagaaagaggctggaaaaagggt

SEQ ID NO: 22103 - DNA, 25 bp, Artificial
  probe
  misc_feature (1)..(25): SEQ ID NO: 3290; WAN0249HF_at; Start 5; Stop 29
ctgtcctccgatatagcagaaagag

SEQ ID NO: 22104 - DNA, 25 bp, Artificial
  probe
  misc_feature (1)..(25): SEQ ID NO: 3290; WAN0249HF_at; Start 8; Stop 32
tcctccgatatagcagaaagaggct

SEQ ID NO: 22105 - DNA, 25 bp, Artificial
  probe
  misc_feature (1)..(25): SEQ ID NO: 3290; WAN0249HF_at; Start 4; Stop 28
tctgtcctccgatatagcagaaaga

SEQ ID NO: 22106 - DNA, 25 bp, Artificial
  probe
  misc_feature (1)..(25): SEQ ID NO: 3290; WAN0249HF_at; Start 14; Stop 38
gatatagcagaaagaggctggaaaa

SEQ ID NO: 22107 - DNA, 25 bp, Artificial
  probe
  misc_feature (1)..(25): SEQ ID NO: 3290; WAN0249HF_at; Start 12; Stop 36
ccgatatagcagaaagaggctggaa

SEQ ID NO: 22108 - DNA, 25 bp, Artificial
  probe
  misc_feature (1)..(25): SEQ ID NO: 3290; WAN0249HF_at; Start 15; Stop 39
atatagcagaaagaggctggaaaaa

SEQ ID NO: 22109 - DNA, 25 bp, Artificial
  probe
  misc_feature (1)..(25): SEQ ID NO: 3290; WAN0249HF_at; Start 6; Stop 30
tgtcctccgatatagcagaaagagg

SEQ ID NO: 22110 - DNA, 25 bp, Artificial
  probe
  misc_feature (1)..(25): SEQ ID NO: 3290; WAN0249HF_at; Start 1; Stop 25
ctatctgtcctccgatatagcagaa

SEQ ID NO: 22111 - DNA, 25 bp, Artificial
  probe
  misc_feature (1)..(25): SEQ ID NO: 3290; WAN0249HF_at; Start 7; Stop 31
gtcctccgatatagcagaaagaggc

SEQ ID NO: 22112 - DNA, 25 bp, Artificial
  probe
  misc_feature (1)..(25): SEQ ID NO: 3290; WAN0249HF_at; Start 3; Stop 27
atctgtcctccgatatagcagaaag

SEQ ID NO: 22113 - DNA, 25 bp, Artificial
  probe
  misc_feature (1)..(25): SEQ ID NO: 3290; WAN0249HF_at; Start 10; Stop 34
ctccgatatagcagaaagaggctgg

SEQ ID NO: 22114 - DNA, 25 bp, Artificial
  probe
  misc_feature (1)..(25): SEQ ID NO: 3290; WAN0249HF_at; Start 16; Stop 40
tatagcagaaagaggctggaaaaag

SEQ ID NO: 22115 - DNA, 25 bp, Artificial
  probe
  misc_feature (1)..(25): SEQ ID NO: 3290; WAN0249HF_at; Start 17; Stop 41
atagcagaaagaggctggaaaaagg

SEQ ID NO: 22116 - DNA, 25 bp, Artificial
  probe
  misc_feature (1)..(25): SEQ ID NO: 3290; WAN0249HF_at; Start 2; Stop 26
tatctgtcctccgatatagcagaaa

SEQ ID NO: 22117 - DNA, 25 bp, Artificial
  probe
  misc_feature (1)..(25): SEQ ID NO: 3290; WAN0249HF_at; Start 11; Stop 35
tccgatatagcagaaagaggctgga

SEQ ID NO: 22118 - DNA, 25 bp, Artificial
  probe
  misc_feature (1)..(25): SEQ ID NO: 3290; WAN0249HF_at; Start 13; Stop 37
cgatatagcagaaagaggctggaaa

SEQ ID NO: 22119 - DNA, 25 bp, Artificial
  probe
  misc_feature (1)..(25): SEQ ID NO: 3290; WAN0249HF_at; Start 9; Stop 33
cctccgatatagcagaaagaggctg

SEQ ID NO: 22120 - DNA, 25 bp, Artificial
  probe
  misc_feature (1)..(25): SEQ ID NO: 3290; WAN0249HF_at; Start 18; Stop 42
tagcagaaagaggctggaaaaaggg

SEQ ID NO: 22121 - DNA, 25 bp, Artificial
  probe
  misc_feature (1)..(25): SEQ ID NO: 282; WAN0249HG_at; Start 42; Stop 66
actcttctcttttaaggattagttg

SEQ ID NO: 22122 - DNA, 25 bp, Artificial
  probe
  misc_feature (1)..(25): SEQ ID NO: 282; WAN0249HG_at; Start 36; Stop 60
aatcgtactcttctcttttaaggat

SEQ ID NO: 22123 - DNA, 25 bp, Artificial
  probe
  misc_feature (1)..(25): SEQ ID NO: 282; WAN0249HG_at; Start 44; Stop 68
tcttctcttttaaggattagttgaa

SEQ ID NO: 22124 - DNA, 25 bp, Artificial
  probe
  misc_feature (1)..(25): SEQ ID NO: 282; WAN0249HG_at; Start 38; Stop 62
tcgtactcttctcttttaaggatta

SEQ ID NO: 22125 - DNA, 25 bp, Artificial
  probe
  misc_feature (1)..(25): SEQ ID NO: 282; WAN0249HG_at; Start 39; Stop 63
cgtactcttctcttttaaggattag

SEQ ID NO: 22126 - DNA, 25 bp, Artificial
  probe
  misc_feature (1)..(25): SEQ ID NO: 282; WAN0249HG_at; Start 43; Stop 67
ctcttctcttttaaggattagttga

SEQ ID NO: 22127 - DNA, 25 bp, Artificial
  probe
  misc_feature (1)..(25): SEQ ID NO: 282; WAN0249HG_at; Start 35; Stop 59
taatcgtactcttctcttttaagga

SEQ ID NO: 22128 - DNA, 25 bp, Artificial
  probe
  misc_feature (1)..(25): SEQ ID NO: 282; WAN0249HG_at; Start 33; Stop 57
cttaatcgtactcttctcttttaag

SEQ ID NO: 22129 - DNA, 25 bp, Artificial
  probe
  misc_feature (1)..(25): SEQ ID NO: 282; WAN0249HG_at; Start 37; Stop 61
atcgtactcttctcttttaaggatt

SEQ ID NO: 22130 - DNA, 25 bp, Artificial
  probe
  misc_feature (1)..(25): SEQ ID NO: 4818; WAN0249HH_at; Start 10; Stop 34
tccttaaaagagaagagtacgatta

SEQ ID NO: 22131 - DNA, 25 bp, Artificial
  probe
  misc_feature (1)..(25): SEQ ID NO: 4818; WAN0249HH_at; Start 3; Stop 27
caactaatccttaaaagagaagagt

SEQ ID NO: 22132 - DNA, 25 bp, Artificial
  probe
  misc_feature (1)..(25): SEQ ID NO: 4818; WAN0249HH_at; Start 7; Stop 31
taatccttaaaagagaagagtacga

SEQ ID NO: 22133 - DNA, 25 bp, Artificial
  probe
  misc_feature (1)..(25): SEQ ID NO: 4818; WAN0249HH_at; Start 2; Stop 26
tcaactaatccttaaaagagaagag

SEQ ID NO: 22134 - DNA, 25 bp, Artificial
  probe
  misc_feature (1)..(25): SEQ ID NO: 4818; WAN0249HH_at; Start 1; Stop 25
ttcaactaatccttaaaagagaaga

SEQ ID NO: 22135 - DNA, 25 bp, Artificial
  probe
  misc_feature (1)..(25): SEQ ID NO: 4818; WAN0249HH_at; Start 12; Stop 36
cttaaaagagaagagtacgattaag

SEQ ID NO: 22136 - DNA, 25 bp, Artificial
  probe
  misc_feature (1)..(25): SEQ ID NO: 4818; WAN0249HH_at; Start 6; Stop 30
ctaatccttaaaagagaagagtacg

SEQ ID NO: 22137 - DNA, 25 bp, Artificial
  probe
  misc_feature (1)..(25): SEQ ID NO: 4818; WAN0249HH_at; Start 9; Stop 33
atccttaaaagagaagagtacgatt

SEQ ID NO: 22138 - DNA, 25 bp, Artificial
  probe
  misc_feature (1)..(25): SEQ ID NO: 4818; WAN0249HH_at; Start 8; Stop 32
aatccttaaaagagaagagtacgat

SEQ ID NO: 22139 - DNA, 25 bp, Artificial
  probe
  misc_feature (1)..(25): SEQ ID NO: 587; WAN0249HI_at; Start 36; Stop 60
taactaacgccaaatcctattcgga

SEQ ID NO: 22140 - DNA, 25 bp, Artificial
  probe
  misc_feature (1)..(25): SEQ ID NO: 587; WAN0249HI_at; Start 211; Stop 235
gacccctaaatataatcgatttaga

SEQ ID NO: 22141 - DNA, 25 bp, Artificial
  probe
  misc_feature (1)..(25): SEQ ID NO: 587; WAN0249HI_at; Start 72; Stop 96
cgcttcactagttttaggacataaa

SEQ ID NO: 22142 - DNA, 25 bp, Artificial
  probe
  misc_feature (1)..(25): SEQ ID NO: 587; WAN0249HI_at; Start 244; Stop 268
cgtcgtaaccagagacacttgccta

SEQ ID NO: 22143 - DNA, 25 bp, Artificial
  probe
  misc_feature (1)..(25): SEQ ID NO: 587; WAN0249HI_at; Start 192; Stop 216
taactgcttcactagtcatgacccc

SEQ ID NO: 22144 - DNA, 25 bp, Artificial
  probe
  misc_feature (1)..(25): SEQ ID NO: 587; WAN0249HI_at; Start 94; Stop 118
aaatatgatcgatttatgtcctaaa

SEQ ID NO: 22145 - DNA, 25 bp, Artificial
  probe
  misc_feature (1)..(25): SEQ ID NO: 587; WAN0249HI_at; Start 273; Stop 297
cttcactaattcacctaaccaaata

SEQ ID NO: 22146 - DNA, 25 bp, Artificial
  probe
  misc_feature (1)..(25): SEQ ID NO: 587; WAN0249HI_at; Start 148; Stop 172
aagttcctaattgttagacgctagc

SEQ ID NO: 22147 - DNA, 25 bp, Artificial
  probe
  misc_feature (1)..(25): SEQ ID NO: 587; WAN0249HI_at; Start 164; Stop 188
gacgctagccgcttatatgcgaact

SEQ ID NO: 22148 - DNA, 25 bp, Artificial
  probe
  misc_feature (1)..(25): SEQ ID NO: 587; WAN0249HI_at; Start 238; Stop 262
ccatgacgtcgtaaccagagacact

SEQ ID NO: 22149 - DNA, 25 bp, Artificial
  probe
  misc_feature (1)..(25): SEQ ID NO: 587; WAN0249HI_at; Start 159; Stop 183
tgttagacgctagccgcttatatgc

SEQ ID NO: 22150 - DNA, 25 bp, Artificial
  probe
  misc_feature (1)..(25): SEQ ID NO: 587; WAN0249HI_at; Start 68; Stop 92
taggcgcttcactagttttaggaca

SEQ ID NO: 22151 - DNA, 25 bp, Artificial
  probe
  misc_feature (1)..(25): SEQ ID NO: 587; WAN0249HI_at; Start 47; Stop 71
aaatcctattcggactttggctagg

SEQ ID NO: 22152 - DNA, 25 bp, Artificial
  probe
  misc_feature (1)..(25): SEQ ID NO: 587; WAN0249HI_at; Start 241; Stop 265
tgacgtcgtaaccagagacacttgc

SEQ ID NO: 22153 - DNA, 25 bp, Artificial
  probe
  misc_feature (1)..(25): SEQ ID NO: 587; WAN0249HI_at; Start 2; Stop 26
tcgccaaagttacttgattgcaaag

SEQ ID NO: 22154 - DNA, 25 bp, Artificial
  probe
  misc_feature (1)..(25): SEQ ID NO: 587; WAN0249HI_at; Start 152; Stop 176
tcctaattgttagacgctagccgct

SEQ ID NO: 22155 - DNA, 25 bp, Artificial
  probe
  misc_feature (1)..(25): SEQ ID NO: 587; WAN0249HI_at; Start 57; Stop 81
cggactttggctaggcgcttcacta

SEQ ID NO: 22156 - DNA, 25 bp, Artificial
  probe
  misc_feature (1)..(25): SEQ ID NO: 587; WAN0249HI_at; Start 188; Stop 212
tagctaactgcttcactagtcatga

SEQ ID NO: 22157 - DNA, 25 bp, Artificial
  probe
  misc_feature (1)..(25): SEQ ID NO: 587; WAN0249HI_at; Start 64; Stop 88
tggctaggcgcttcactagttttag

SEQ ID NO: 22158 - DNA, 25 bp, Artificial
  probe
  misc_feature (1)..(25): SEQ ID NO: 587; WAN0249HI_at; Start 204; Stop 228
tagtcatgacccctaaatataatcg

SEQ ID NO: 22159 - DNA, 25 bp, Artificial
  probe
  misc_feature (1)..(25): SEQ ID NO: 587; WAN0249HI_at; Start 156; Stop 180
aattgttagacgctagccgcttata

SEQ ID NO: 22160 - DNA, 25 bp, Artificial
  probe
  misc_feature (1)..(25): SEQ ID NO: 587; WAN0249HI_at; Start 30; Stop 54
tctaagtaactaacgccaaatccta

SEQ ID NO: 22161 - DNA, 25 bp, Artificial
  probe
  misc_feature (1)..(25): SEQ ID NO: 587; WAN0249HI_at; Start 247; Stop 271
cgtaaccagagacacttgcctaaac

SEQ ID NO: 22162 - DNA, 25 bp, Artificial
  probe
  misc_feature (1)..(25): SEQ ID NO: 587; WAN0249HI_at; Start 5; Stop 29
ccaaagttacttgattgcaaagcaa

SEQ ID NO: 22163 - DNA, 25 bp, Artificial
  probe
  misc_feature (1)..(25): SEQ ID NO: 587; WAN0249HI_at; Start 108; Stop 132
tatgtcctaaaacgtcgtaatctta

SEQ ID NO: 22164 - DNA, 25 bp, Artificial
  probe
  misc_feature (1)..(25): SEQ ID NO: 587; WAN0249HI_at; Start 206; Stop 230
gtcatgacccctaaatataatcgat

SEQ ID NO: 22165 - DNA, 25 bp, Artificial
  probe
  misc_feature (1)..(25): SEQ ID NO: 587; WAN0249HI_at; Start 170; Stop 194
agccgcttatatgcgaactagctaa

SEQ ID NO: 22166 - DNA, 25 bp, Artificial
  probe
  misc_feature (1)..(25): SEQ ID NO: 587; WAN0249HI_at; Start 53; Stop 77
tattcggactttggctaggcgcttc

SEQ ID NO: 22167 - DNA, 25 bp, Artificial
  probe
  misc_feature (1)..(25): SEQ ID NO: 587; WAN0249HI_at; Start 196; Stop 220
tgcttcactagtcatgacccctaaa

SEQ ID NO: 22168 - DNA, 25 bp, Artificial
  probe
  misc_feature (1)..(25): SEQ ID NO: 587; WAN0249HI_at; Start 83; Stop 107
ttttaggacataaatatgatcgatt

SEQ ID NO: 22169 - DNA, 25 bp, Artificial
  probe
  misc_feature (1)..(25): SEQ ID NO: 587; WAN0249HI_at; Start 50; Stop 74
tcctattcggactttggctaggcgc

SEQ ID NO: 22170 - DNA, 25 bp, Artificial
  probe
  misc_feature (1)..(25): SEQ ID NO: 587; WAN0249HI_at; Start 285; Stop 309
acctaaccaaataatagacttcctg

SEQ ID NO: 22171 - DNA, 25 bp, Artificial
  probe
  misc_feature (1)..(25): SEQ ID NO: 587; WAN0249HI_at; Start 172; Stop 196
ccgcttatatgcgaactagctaact

SEQ ID NO: 22172 - DNA, 25 bp, Artificial
  probe
  misc_feature (1)..(25): SEQ ID NO: 587; WAN0249HI_at; Start 20; Stop 44
tgcaaagcaatctaagtaactaacg

SEQ ID NO: 22173 - DNA, 25 bp, Artificial
  probe
  misc_feature (1)..(25): SEQ ID NO: 5943; WAN0249HJ_at; Start 104; Stop 128
catgactagtgaagcagttagctag

SEQ ID NO: 22174 - DNA, 25 bp, Artificial
  probe
  misc_feature (1)..(25): SEQ ID NO: 5943; WAN0249HJ_at; Start 47; Stop 71
taggcaagtgtctctggttacgacg

SEQ ID NO: 22175 - DNA, 25 bp, Artificial
  probe
  misc_feature (1)..(25): SEQ ID NO: 5943; WAN0249HJ_at; Start 132; Stop 156
gcatataagcggctagcgtctaaca

SEQ ID NO: 22176 - DNA, 25 bp, Artificial
  probe
  misc_feature (1)..(25): SEQ ID NO: 5943; WAN0249HJ_at; Start 250; Stop 274
caaagtccgaataggatttggcgtt

SEQ ID NO: 22177 - DNA, 25 bp, Artificial
  probe
  misc_feature (1)..(25): SEQ ID NO: 5943; WAN0249HJ_at; Start 126; Stop 150
tagttcgcatataagcggctagcgt

SEQ ID NO: 22178 - DNA, 25 bp, Artificial
  probe
  misc_feature (1)..(25): SEQ ID NO: 5943; WAN0249HJ_at; Start 244; Stop 268
cctagccaaagtccgaataggattt

SEQ ID NO: 22179 - DNA, 25 bp, Artificial
  probe
  misc_feature (1)..(25): SEQ ID NO: 5943; WAN0249HJ_at; Start 233; Stop 257
ctagtgaagcgcctagccaaagtcc

SEQ ID NO: 22180 - DNA, 25 bp, Artificial
  probe
  misc_feature (1)..(25): SEQ ID NO: 5943; WAN0249HJ_at; Start 183; Stop 207
taagattacgacgttttaggacata

SEQ ID NO: 22181 - DNA, 25 bp, Artificial
  probe
  misc_feature (1)..(25): SEQ ID NO: 5943; WAN0249HJ_at; Start 221; Stop 245
tatgtcctaaaactagtgaagcgcc

SEQ ID NO: 22182 - DNA, 25 bp, Artificial
  probe
  misc_feature (1)..(25): SEQ ID NO: 5943; WAN0249HJ_at; Start 225; Stop 249
tcctaaaactagtgaagcgcctagc

SEQ ID NO: 22183 - DNA, 25 bp, Artificial
  probe
  misc_feature (1)..(25): SEQ ID NO: 5943; WAN0249HJ_at; Start 228; Stop 252
taaaactagtgaagcgcctagccaa

SEQ ID NO: 22184 - DNA, 25 bp, Artificial
  probe
  misc_feature (1)..(25): SEQ ID NO: 5943; WAN0249HJ_at; Start 206; Stop 230
taaatcgatcatatttatgtcctaa

SEQ ID NO: 22185 - DNA, 25 bp, Artificial
  probe
  misc_feature (1)..(25): SEQ ID NO: 5943; WAN0249HJ_at; Start 290; Stop 314
tttgcaatcaagtaactttggcgat

SEQ ID NO: 22186 - DNA, 25 bp, Artificial
  probe
  misc_feature (1)..(25): SEQ ID NO: 5943; WAN0249HJ_at; Start 138; Stop 162
aagcggctagcgtctaacaattagg

SEQ ID NO: 22187 - DNA, 25 bp, Artificial
  probe
  misc_feature (1)..(25): SEQ ID NO: 5943; WAN0249HJ_at; Start 122; Stop 146
tagctagttcgcatataagcggcta

SEQ ID NO: 22188 - DNA, 25 bp, Artificial
  probe
  misc_feature (1)..(25): SEQ ID NO: 5943; WAN0249HJ_at; Start 86; Stop 110
tcgattatatttaggggtcatgact

SEQ ID NO: 22189 - DNA, 25 bp, Artificial
  probe
  misc_feature (1)..(25): SEQ ID NO: 5943; WAN0249HJ_at; Start 101; Stop 125
ggtcatgactagtgaagcagttagc

SEQ ID NO: 22190 - DNA, 25 bp, Artificial
  probe
  misc_feature (1)..(25): SEQ ID NO: 5943; WAN0249HJ_at; Start 271; Stop 295
cgttagttacttagattgctttgca

SEQ ID NO: 22191 - DNA, 25 bp, Artificial
  probe
  misc_feature (1)..(25): SEQ ID NO: 5943; WAN0249HJ_at; Start 53; Stop 77
agtgtctctggttacgacgtcatgg

SEQ ID NO: 22192 - DNA, 25 bp, Artificial
  probe
  misc_feature (1)..(25): SEQ ID NO: 5943; WAN0249HJ_at; Start 140; Stop 164
gcggctagcgtctaacaattaggaa

SEQ ID NO: 22193 - DNA, 25 bp, Artificial
  probe
  misc_feature (1)..(25): SEQ ID NO: 5943; WAN0249HJ_at; Start 50; Stop 74
gcaagtgtctctggttacgacgtca

SEQ ID NO: 22194 - DNA, 25 bp, Artificial
  probe
  misc_feature (1)..(25): SEQ ID NO: 5943; WAN0249HJ_at; Start 255; Stop 279
tccgaataggatttggcgttagtta

SEQ ID NO: 22195 - DNA, 25 bp, Artificial
  probe
  misc_feature (1)..(25): SEQ ID NO: 5943; WAN0249HJ_at; Start 6; Stop 30
caggaagtctattatttggttaggt

SEQ ID NO: 22196 - DNA, 25 bp, Artificial
  probe
  misc_feature (1)..(25): SEQ ID NO: 5943; WAN0249HJ_at; Start 239; Stop 263
aagcgcctagccaaagtccgaatag

SEQ ID NO: 22197 - DNA, 25 bp, Artificial
  probe
  misc_feature (1)..(25): SEQ ID NO: 5943; WAN0249HJ_at; Start 119; Stop 143
agttagctagttcgcatataagcgg

SEQ ID NO: 22198 - DNA, 25 bp, Artificial
  probe
  misc_feature (1)..(25): SEQ ID NO: 5943; WAN0249HJ_at; Start 44; Stop 68
gtttaggcaagtgtctctggttacg

SEQ ID NO: 22199 - DNA, 25 bp, Artificial
  probe
  misc_feature (1)..(25): SEQ ID NO: 5943; WAN0249HJ_at; Start 241; Stop 265
gcgcctagccaaagtccgaatagga

SEQ ID NO: 22200 - DNA, 25 bp, Artificial
  probe
  misc_feature (1)..(25): SEQ ID NO: 5943; WAN0249HJ_at; Start 18; Stop 42
tatttggttaggtgaattagtgaag

SEQ ID NO: 22201 - DNA, 25 bp, Artificial
  probe
  misc_feature (1)..(25): SEQ ID NO: 5943; WAN0249HJ_at; Start 143; Stop 167
gctagcgtctaacaattaggaactt

SEQ ID NO: 22202 - DNA, 25 bp, Artificial
  probe
  misc_feature (1)..(25): SEQ ID NO: 5943; WAN0249HJ_at; Start 261; Stop 285
taggatttggcgttagttacttaga

SEQ ID NO: 22203 - DNA, 25 bp, Artificial
  probe
  misc_feature (1)..(25): SEQ ID NO: 5943; WAN0249HJ_at; Start 236; Stop 260
gtgaagcgcctagccaaagtccgaa

SEQ ID NO: 22204 - DNA, 25 bp, Artificial
  probe
  misc_feature (1)..(25): SEQ ID NO: 5943; WAN0249HJ_at; Start 287; Stop 311
tgctttgcaatcaagtaactttggc

SEQ ID NO: 22205 - DNA, 25 bp, Artificial
  probe
  misc_feature (1)..(25): SEQ ID NO: 5943; WAN0249HJ_at; Start 196; Stop 220
ttttaggacataaatcgatcatatt

SEQ ID NO: 22206 - DNA, 25 bp, Artificial
  probe
  misc_feature (1)..(25): SEQ ID NO: 5943; WAN0249HJ_at; Start 135; Stop 159
tataagcggctagcgtctaacaatt

SEQ ID NO: 22207 - DNA, 25 bp, Artificial
  probe
  misc_feature (1)..(25): SEQ ID NO: 4440; WAN0249HK_at; Start 85; Stop 109
ggtataatatggttataaatatagt

SEQ ID NO: 22208 - DNA, 25 bp, Artificial
  probe
  misc_feature (1)..(25): SEQ ID NO: 4440; WAN0249HK_at; Start 13; Stop 37
tttggacttttctactattttatca

SEQ ID NO: 22209 - DNA, 25 bp, Artificial
  probe
  misc_feature (1)..(25): SEQ ID NO: 4440; WAN0249HK_at; Start 15; Stop 39
tggacttttctactattttatcaca

SEQ ID NO: 22210 - DNA, 25 bp, Artificial
  probe
  misc_feature (1)..(25): SEQ ID NO: 4440; WAN0249HK_at; Start 84; Stop 108
tggtataatatggttataaatatag

SEQ ID NO: 22211 - DNA, 25 bp, Artificial
  probe
  misc_feature (1)..(25): SEQ ID NO: 4440; WAN0249HK_at; Start 14; Stop 38
ttggacttttctactattttatcac

SEQ ID NO: 22212 - DNA, 25 bp, Artificial
  probe
  misc_feature (1)..(25): SEQ ID NO: 4440; WAN0249HK_at; Start 32; Stop 56
ttatcacaattttaaagaaagaaga

SEQ ID NO: 22213 - DNA, 25 bp, Artificial
  probe
  misc_feature (1)..(25): SEQ ID NO: 4440; WAN0249HK_at; Start 33; Stop 57
tatcacaattttaaagaaagaagaa

SEQ ID NO: 22214 - DNA, 25 bp, Artificial
  probe
  misc_feature (1)..(25): SEQ ID NO: 4440; WAN0249HK_at; Start 66; Stop 90
tgaaatctcctgtttttttggtata

SEQ ID NO: 22215 - DNA, 25 bp, Artificial
  probe
  misc_feature (1)..(25): SEQ ID NO: 91; WAN0249HL_at; Start 47; Stop 71
tatttataaccatattataccaaaa

SEQ ID NO: 22216 - DNA, 25 bp, Artificial
  probe
  misc_feature (1)..(25): SEQ ID NO: 91; WAN0249HL_at; Start 42; Stop 66
aactatatttataaccatattatac

SEQ ID NO: 22217 - DNA, 25 bp, Artificial
  probe
  misc_feature (1)..(25): SEQ ID NO: 91; WAN0249HL_at; Start 33; Stop 57
catatttataactatatttataacc

SEQ ID NO: 22218 - DNA, 25 bp, Artificial
  probe
  misc_feature (1)..(25): SEQ ID NO: 91; WAN0249HL_at; Start 45; Stop 69
tatatttataaccatattataccaa

SEQ ID NO: 22219 - DNA, 25 bp, Artificial
  probe
  misc_feature (1)..(25): SEQ ID NO: 91; WAN0249HL_at; Start 95; Stop 119
ttcttctttctttaaaattgtgata

SEQ ID NO: 22220 - DNA, 25 bp, Artificial
  probe
  misc_feature (1)..(25): SEQ ID NO: 91; WAN0249HL_at; Start 29; Stop 53
cgtgcatatttataactatatttat

SEQ ID NO: 22221 - DNA, 25 bp, Artificial
  probe
  misc_feature (1)..(25): SEQ ID NO: 91; WAN0249HL_at; Start 43; Stop 67
actatatttataaccatattatacc

SEQ ID NO: 22222 - DNA, 25 bp, Artificial
  probe
  misc_feature (1)..(25): SEQ ID NO: 91; WAN0249HL_at; Start 46; Stop 70
atatttataaccatattataccaaa

SEQ ID NO: 22223 - DNA, 25 bp, Artificial
  probe
  misc_feature (1)..(25): SEQ ID NO: 91; WAN0249HL_at; Start 96; Stop 120
tcttctttctttaaaattgtgataa

SEQ ID NO: 22224 - DNA, 25 bp, Artificial
  probe
  misc_feature (1)..(25): SEQ ID NO: 91; WAN0249HL_at; Start 115; Stop 139
tgataaaatagtagaaaagtccaaa

SEQ ID NO: 22225 - DNA, 25 bp, Artificial
  probe
  misc_feature (1)..(25): SEQ ID NO: 91; WAN0249HL_at; Start 114; Stop 138
gtgataaaatagtagaaaagtccaa

SEQ ID NO: 22226 - DNA, 25 bp, Artificial
  probe
  misc_feature (1)..(25): SEQ ID NO: 91; WAN0249HL_at; Start 113; Stop 137
tgtgataaaatagtagaaaagtcca

SEQ ID NO: 22227 - DNA, 25 bp, Artificial
  probe
  misc_feature (1)..(25): SEQ ID NO: 91; WAN0249HL_at; Start 44; Stop 68
ctatatttataaccatattatacca

SEQ ID NO: 22228 - DNA, 25 bp, Artificial
  probe
  misc_feature (1)..(25): SEQ ID NO: 91; WAN0249HL_at; Start 62; Stop 86
tataccaaaaaaacaggagatttca

SEQ ID NO: 22229 - DNA, 25 bp, Artificial
  probe
  misc_feature (1)..(25): SEQ ID NO: 3608; WAN0249HM_at; Start 151; Stop 175
taatcgatttagctaatttgaaccc

SEQ ID NO: 22230 - DNA, 25 bp, Artificial
  probe
  misc_feature (1)..(25): SEQ ID NO: 3608; WAN0249HM_at; Start 67; Stop 91
taggcaggacctacccgttctcaat

SEQ ID NO: 22231 - DNA, 25 bp, Artificial
  probe
  misc_feature (1)..(25): SEQ ID NO: 3608; WAN0249HM_at; Start 101; Stop 125
ctattgttggtttcaacttacgaga

SEQ ID NO: 22232 - DNA, 25 bp, Artificial
  probe
  misc_feature (1)..(25): SEQ ID NO: 3608; WAN0249HM_at; Start 78; Stop 102
tacccgttctcaatgttttcatgct

SEQ ID NO: 22233 - DNA, 25 bp, Artificial
  probe
  misc_feature (1)..(25): SEQ ID NO: 3608; WAN0249HM_at; Start 97; Stop 121
catgctattgttggtttcaacttac

SEQ ID NO: 22234 - DNA, 25 bp, Artificial
  probe
  misc_feature (1)..(25): SEQ ID NO: 3608; WAN0249HM_at; Start 119; Stop 143
tacgagatggtaagctgagttatag

SEQ ID NO: 22235 - DNA, 25 bp, Artificial
  probe
  misc_feature (1)..(25): SEQ ID NO: 3608; WAN0249HM_at; Start 31; Stop 55
tctattctattataacacgatttta

SEQ ID NO: 22236 - DNA, 25 bp, Artificial
  probe
  misc_feature (1)..(25): SEQ ID NO: 3608; WAN0249HM_at; Start 152; Stop 176
aatcgatttagctaatttgaacccg

SEQ ID NO: 22237 - DNA, 25 bp, Artificial
  probe
  misc_feature (1)..(25): SEQ ID NO: 3608; WAN0249HM_at; Start 80; Stop 104
cccgttctcaatgttttcatgctat

SEQ ID NO: 22238 - DNA, 25 bp, Artificial
  probe
  misc_feature (1)..(25): SEQ ID NO: 3608; WAN0249HM_at; Start 135; Stop 159
gagttatagctaatactaatcgatt

SEQ ID NO: 22239 - DNA, 25 bp, Artificial
  probe
  misc_feature (1)..(25): SEQ ID NO: 3608; WAN0249HM_at; Start 132; Stop 156
gctgagttatagctaatactaatcg

SEQ ID NO: 22240 - DNA, 25 bp, Artificial
  probe
  misc_feature (1)..(25): SEQ ID NO: 3608; WAN0249HM_at; Start 113; Stop 137
tcaacttacgagatggtaagctgag

SEQ ID NO: 22241 - DNA, 25 bp, Artificial
  probe
  misc_feature (1)..(25): SEQ ID NO: 3608; WAN0249HM_at; Start 120; Stop 144
acgagatggtaagctgagttatagc

SEQ ID NO: 22242 - DNA, 25 bp, Artificial
  probe
  misc_feature (1)..(25): SEQ ID NO: 3608; WAN0249HM_at; Start 111; Stop 135
tttcaacttacgagatggtaagctg

SEQ ID NO: 22243 - DNA, 25 bp, Artificial
  probe
  misc_feature (1)..(25): SEQ ID NO: 3608; WAN0249HM_at; Start 100; Stop 124
gctattgttggtttcaacttacgag

SEQ ID NO: 22244 - DNA, 25 bp, Artificial
  probe
  misc_feature (1)..(25): SEQ ID NO: 3608; WAN0249HM_at; Start 105; Stop 129
tgttggtttcaacttacgagatggt

SEQ ID NO: 22245 - DNA, 25 bp, Artificial
  probe
  misc_feature (1)..(25): SEQ ID NO: 3608; WAN0249HM_at; Start 126; Stop 150
tggtaagctgagttatagctaatac

SEQ ID NO: 22246 - DNA, 25 bp, Artificial
  probe
  misc_feature (1)..(25): SEQ ID NO: 3608; WAN0249HM_at; Start 153; Stop 177
atcgatttagctaatttgaacccgg

SEQ ID NO: 22247 - DNA, 25 bp, Artificial
  probe
  misc_feature (1)..(25): SEQ ID NO: 3608; WAN0249HM_at; Start 68; Stop 92
aggcaggacctacccgttctcaatg

SEQ ID NO: 22248 - DNA, 25 bp, Artificial
  probe
  misc_feature (1)..(25): SEQ ID NO: 3608; WAN0249HM_at; Start 86; Stop 110
ctcaatgttttcatgctattgttgg

SEQ ID NO: 22249 - DNA, 25 bp, Artificial
  probe
  misc_feature (1)..(25): SEQ ID NO: 3608; WAN0249HM_at; Start 63; Stop 87
cggataggcaggacctacccgttct

SEQ ID NO: 22250 - DNA, 25 bp, Artificial
  probe
  misc_feature (1)..(25): SEQ ID NO: 3608; WAN0249HM_at; Start 74; Stop 98
gacctacccgttctcaatgttttca

SEQ ID NO: 22251 - DNA, 25 bp, Artificial
  probe
  misc_feature (1)..(25): SEQ ID NO: 3608; WAN0249HM_at; Start 71; Stop 95
caggacctacccgttctcaatgttt

SEQ ID NO: 22252 - DNA, 25 bp, Artificial
  probe
  misc_feature (1)..(25): SEQ ID NO: 3608; WAN0249HM_at; Start 76; Stop 100
cctacccgttctcaatgttttcatg

SEQ ID NO: 22253 - DNA, 25 bp, Artificial
  probe
  misc_feature (1)..(25): SEQ ID NO: 3608; WAN0249HM_at; Start 82; Stop 106
cgttctcaatgttttcatgctattg

SEQ ID NO: 22254 - DNA, 25 bp, Artificial
  probe
  misc_feature (1)..(25): SEQ ID NO: 3608; WAN0249HM_at; Start 106; Stop 130
gttggtttcaacttacgagatggta

SEQ ID NO: 22255 - DNA, 25 bp, Artificial
  probe
  misc_feature (1)..(25): SEQ ID NO: 3608; WAN0249HM_at; Start 26; Stop 50
tgatttctattctattataacacga

SEQ ID NO: 22256 - DNA, 25 bp, Artificial
  probe
  misc_feature (1)..(25): SEQ ID NO: 3608; WAN0249HM_at; Start 65; Stop 89
gataggcaggacctacccgttctca

SEQ ID NO: 22257 - DNA, 25 bp, Artificial
  probe
  misc_feature (1)..(25): SEQ ID NO: 3608; WAN0249HM_at; Start 93; Stop 117
ttttcatgctattgttggtttcaac

SEQ ID NO: 22258 - DNA, 25 bp, Artificial
  probe
  misc_feature (1)..(25): SEQ ID NO: 3608; WAN0249HM_at; Start 114; Stop 138
caacttacgagatggtaagctgagt

SEQ ID NO: 22259 - DNA, 25 bp, Artificial
  probe
  misc_feature (1)..(25): SEQ ID NO: 3608; WAN0249HM_at; Start 109; Stop 133
ggtttcaacttacgagatggtaagc

SEQ ID NO: 22260 - DNA, 25 bp, Artificial
  probe
  misc_feature (1)..(25): SEQ ID NO: 3608; WAN0249HM_at; Start 139; Stop 163
tatagctaatactaatcgatttagc

SEQ ID NO: 22261 - DNA, 25 bp, Artificial
  probe
  misc_feature (1)..(25): SEQ ID NO: 3608; WAN0249HM_at; Start 116; Stop 140
acttacgagatggtaagctgagtta

SEQ ID NO: 22262 - DNA, 25 bp, Artificial
  probe
  misc_feature (1)..(25): SEQ ID NO: 3608; WAN0249HM_at; Start 122; Stop 146
gagatggtaagctgagttatagcta

SEQ ID NO: 22263 - DNA, 25 bp, Artificial
  probe
  misc_feature (1)..(25): SEQ ID NO: 4640; WAN0249HN_at; Start 71; Stop 95
gataaacttcctagtgtctgctaga

SEQ ID NO: 22264 - DNA, 25 bp, Artificial
  probe
  misc_feature (1)..(25): SEQ ID NO: 4640; WAN0249HN_at; Start 13; Stop 37
aagagcagaggctggtgtttcaatc

SEQ ID NO: 22265 - DNA, 25 bp, Artificial
  probe
  misc_feature (1)..(25): SEQ ID NO: 4640; WAN0249HN_at; Start 145; Stop 169
ttagacttgagcataaaaaacgctc

SEQ ID NO: 22266 - DNA, 25 bp, Artificial
  probe
  misc_feature (1)..(25): SEQ ID NO: 4640; WAN0249HN_at; Start 112; Stop 136
tattttcacgttgagtttgacgccc

SEQ ID NO: 22267 - DNA, 25 bp, Artificial
  probe
  misc_feature (1)..(25): SEQ ID NO: 4640; WAN0249HN_at; Start 1; Stop 25
tctaaaatataaaagagcagaggct

SEQ ID NO: 22268 - DNA, 25 bp, Artificial
  probe
  misc_feature (1)..(25): SEQ ID NO: 4640; WAN0249HN_at; Start 143; Stop 167
tcttagacttgagcataaaaaacgc

SEQ ID NO: 22269 - DNA, 25 bp, Artificial
  probe
  misc_feature (1)..(25): SEQ ID NO: 4640; WAN0249HN_at; Start 15; Stop 39
gagcagaggctggtgtttcaatcta

SEQ ID NO: 22270 - DNA, 25 bp, Artificial
  probe
  misc_feature (1)..(25): SEQ ID NO: 4640; WAN0249HN_at; Start 85; Stop 109
tgtctgctagacactgcgtcagttt

SEQ ID NO: 22271 - DNA, 25 bp, Artificial
  probe
  misc_feature (1)..(25): SEQ ID NO: 4640; WAN0249HN_at; Start 22; Stop 46
ggctggtgtttcaatctaattgaac

SEQ ID NO: 22272 - DNA, 25 bp, Artificial
  probe
  misc_feature (1)..(25): SEQ ID NO: 4640; WAN0249HN_at; Start 3; Stop 27
taaaatataaaagagcagaggctgg

SEQ ID NO: 22273 - DNA, 25 bp, Artificial
  probe
  misc_feature (1)..(25): SEQ ID NO: 4640; WAN0249HN_at; Start 50; Stop 74
ggctaaactcggtgtgaaaaagata

SEQ ID NO: 22274 - DNA, 25 bp, Artificial
  probe
  misc_feature (1)..(25): SEQ ID NO: 4640; WAN0249HN_at; Start 28; Stop 52
tgtttcaatctaattgaacacgggc

SEQ ID NO: 22275 - DNA, 25 bp, Artificial
  probe
  misc_feature (1)..(25): SEQ ID NO: 4640; WAN0249HN_at; Start 133; Stop 157
gccctttgtatcttagacttgagca

SEQ ID NO: 22276 - DNA, 25 bp, Artificial
  probe
  misc_feature (1)..(25): SEQ ID NO: 4640; WAN0249HN_at; Start 103; Stop 127
tcagtttcctattttcacgttgagt

SEQ ID NO: 22277 - DNA, 25 bp, Artificial
  probe
  misc_feature (1)..(25): SEQ ID NO: 4640; WAN0249HN_at; Start 116; Stop 140
ttcacgttgagtttgacgccctttg

SEQ ID NO: 22278 - DNA, 25 bp, Artificial
  probe
  misc_feature (1)..(25): SEQ ID NO: 4640; WAN0249HN_at; Start 130; Stop 154
gacgccctttgtatcttagacttga

SEQ ID NO: 22279 - DNA, 25 bp, Artificial
  probe
  misc_feature (1)..(25): SEQ ID NO: 4640; WAN0249HN_at; Start 6; Stop 30
aatataaaagagcagaggctggtgt

SEQ ID NO: 22280 - DNA, 25 bp, Artificial
  probe
  misc_feature (1)..(25): SEQ ID NO: 4640; WAN0249HN_at; Start 67; Stop 91
aaaagataaacttcctagtgtctgc

SEQ ID NO: 22281 - DNA, 25 bp, Artificial
  probe
  misc_feature (1)..(25): SEQ ID NO: 4640; WAN0249HN_at; Start 78; Stop 102
ttcctagtgtctgctagacactgcg

SEQ ID NO: 22282 - DNA, 25 bp, Artificial
  probe
  misc_feature (1)..(25): SEQ ID NO: 4640; WAN0249HN_at; Start 43; Stop 67
gaacacgggctaaactcggtgtgaa

SEQ ID NO: 22283 - DNA, 25 bp, Artificial
  probe
  misc_feature (1)..(25): SEQ ID NO: 4640; WAN0249HN_at; Start 33; Stop 57
caatctaattgaacacgggctaaac

SEQ ID NO: 22284 - DNA, 25 bp, Artificial
  probe
  misc_feature (1)..(25): SEQ ID NO: 4640; WAN0249HN_at; Start 41; Stop 65
ttgaacacgggctaaactcggtgtg

SEQ ID NO: 22285 - DNA, 25 bp, Artificial
  probe
  misc_feature (1)..(25): SEQ ID NO: 4640; WAN0249HN_at; Start 82; Stop 106
tagtgtctgctagacactgcgtcag

SEQ ID NO: 22286 - DNA, 25 bp, Artificial
  probe
  misc_feature (1)..(25): SEQ ID NO: 4640; WAN0249HN_at; Start 10; Stop 34
taaaagagcagaggctggtgtttca

SEQ ID NO: 22287 - DNA, 25 bp, Artificial
  probe
  misc_feature (1)..(25): SEQ ID NO: 4640; WAN0249HN_at; Start 148; Stop 172
gacttgagcataaaaaacgctcgtt

SEQ ID NO: 22288 - DNA, 25 bp, Artificial
  probe
  misc_feature (1)..(25): SEQ ID NO: 4640; WAN0249HN_at; Start 20; Stop 44
gaggctggtgtttcaatctaattga

SEQ ID NO: 22289 - DNA, 25 bp, Artificial
  probe
  misc_feature (1)..(25): SEQ ID NO: 4640; WAN0249HN_at; Start 152; Stop 176
tgagcataaaaaacgctcgttaaaa

SEQ ID NO: 22290 - DNA, 25 bp, Artificial
  probe
  misc_feature (1)..(25): SEQ ID NO: 4640; WAN0249HN_at; Start 87; Stop 111
tctgctagacactgcgtcagtttcc

SEQ ID NO: 22291 - DNA, 25 bp, Artificial
  probe
  misc_feature (1)..(25): SEQ ID NO: 4640; WAN0249HN_at; Start 135; Stop 159
cctttgtatcttagacttgagcata

SEQ ID NO: 22292 - DNA, 25 bp, Artificial
  probe
  misc_feature (1)..(25): SEQ ID NO: 4640; WAN0249HN_at; Start 51; Stop 75
gctaaactcggtgtgaaaaagataa

SEQ ID NO: 22293 - DNA, 25 bp, Artificial
  probe
  misc_feature (1)..(25): SEQ ID NO: 4640; WAN0249HN_at; Start 35; Stop 59
atctaattgaacacgggctaaactc

SEQ ID NO: 22294 - DNA, 25 bp, Artificial
  probe
  misc_feature (1)..(25): SEQ ID NO: 4640; WAN0249HN_at; Start 117; Stop 141
tcacgttgagtttgacgccctttgt

SEQ ID NO: 22295 - DNA, 25 bp, Artificial
  probe
  misc_feature (1)..(25): SEQ ID NO: 4640; WAN0249HN_at; Start 73; Stop 97
taaacttcctagtgtctgctagaca

SEQ ID NO: 22296 - DNA, 25 bp, Artificial
  probe
  misc_feature (1)..(25): SEQ ID NO: 4640; WAN0249HN_at; Start 17; Stop 41
gcagaggctggtgtttcaatctaat

SEQ ID NO: 22297 - DNA, 25 bp, Artificial
  probe
  misc_feature (1)..(25): SEQ ID NO: 3589; WAN0249HO_at; Start 64; Stop 88
caagtctaagatacaaagggcgtca

SEQ ID NO: 22298 - DNA, 25 bp, Artificial
  probe
  misc_feature (1)..(25): SEQ ID NO: 3589; WAN0249HO_at; Start 69; Stop 93
ctaagatacaaagggcgtcaaactc

SEQ ID NO: 22299 - DNA, 25 bp, Artificial
  probe
  misc_feature (1)..(25): SEQ ID NO: 3589; WAN0249HO_at; Start 66; Stop 90
agtctaagatacaaagggcgtcaaa

SEQ ID NO: 22300 - DNA, 25 bp, Artificial
  probe
  misc_feature (1)..(25): SEQ ID NO: 3589; WAN0249HO_at; Start 143; Stop 167
tatctttttcacaccgagtttagcc

SEQ ID NO: 22301 - DNA, 25 bp, Artificial
  probe
  misc_feature (1)..(25): SEQ ID NO: 3589; WAN0249HO_at; Start 160; Stop 184
gtttagcccgtgttcaattagattg

SEQ ID NO: 22302 - DNA, 25 bp, Artificial
  probe
  misc_feature (1)..(25): SEQ ID NO: 3589; WAN0249HO_at; Start 63; Stop 87
tcaagtctaagatacaaagggcgtc

SEQ ID NO: 22303 - DNA, 25 bp, Artificial
  probe
  misc_feature (1)..(25): SEQ ID NO: 3589; WAN0249HO_at; Start 90; Stop 114
actcaacgtgaaaataggaaactga

SEQ ID NO: 22304 - DNA, 25 bp, Artificial
  probe
  misc_feature (1)..(25): SEQ ID NO: 3589; WAN0249HO_at; Start 81; Stop 105
gggcgtcaaactcaacgtgaaaata

SEQ ID NO: 22305 - DNA, 25 bp, Artificial
  probe
  misc_feature (1)..(25): SEQ ID NO: 3589; WAN0249HO_at; Start 75; Stop 99
tacaaagggcgtcaaactcaacgtg

SEQ ID NO: 22306 - DNA, 25 bp, Artificial
  probe
  misc_feature (1)..(25): SEQ ID NO: 3589; WAN0249HO_at; Start 173; Stop 197
tcaattagattgaaacaccagcctc

SEQ ID NO: 22307 - DNA, 25 bp, Artificial
  probe
  misc_feature (1)..(25): SEQ ID NO: 3589; WAN0249HO_at; Start 180; Stop 204
gattgaaacaccagcctctgctctt

SEQ ID NO: 22308 - DNA, 25 bp, Artificial
  probe
  misc_feature (1)..(25): SEQ ID NO: 3589; WAN0249HO_at; Start 191; Stop 215
cagcctctgctcttttatattttag

SEQ ID NO: 22309 - DNA, 25 bp, Artificial
  probe
  misc_feature (1)..(25): SEQ ID NO: 3589; WAN0249HO_at; Start 122; Stop 146
tctagcagacactaggaagtttatc

SEQ ID NO: 22310 - DNA, 25 bp, Artificial
  probe
  misc_feature (1)..(25): SEQ ID NO: 3589; WAN0249HO_at; Start 84; Stop 108
cgtcaaactcaacgtgaaaatagga

SEQ ID NO: 22311 - DNA, 25 bp, Artificial
  probe
  misc_feature (1)..(25): SEQ ID NO: 3589; WAN0249HO_at; Start 163; Stop 187
tagcccgtgttcaattagattgaaa

SEQ ID NO: 22312 - DNA, 25 bp, Artificial
  probe
  misc_feature (1)..(25): SEQ ID NO: 3589; WAN0249HO_at; Start 150; Stop 174
ttcacaccgagtttagcccgtgttc

SEQ ID NO: 22313 - DNA, 25 bp, Artificial
  probe
  misc_feature (1)..(25): SEQ ID NO: 3589; WAN0249HO_at; Start 184; Stop 208
gaaacaccagcctctgctcttttat

SEQ ID NO: 22314 - DNA, 25 bp, Artificial
  probe
  misc_feature (1)..(25): SEQ ID NO: 3589; WAN0249HO_at; Start 73; Stop 97
gatacaaagggcgtcaaactcaacg

SEQ ID NO: 22315 - DNA, 25 bp, Artificial
  probe
  misc_feature (1)..(25): SEQ ID NO: 3589; WAN0249HO_at; Start 126; Stop 150
gcagacactaggaagtttatctttt

SEQ ID NO: 22316 - DNA, 25 bp, Artificial
  probe
  misc_feature (1)..(25): SEQ ID NO: 3589; WAN0249HO_at; Start 43; Stop 67
ttaacgagcgttttttatgctcaag

SEQ ID NO: 22317 - DNA, 25 bp, Artificial
  probe
  misc_feature (1)..(25): SEQ ID NO: 3589; WAN0249HO_at; Start 89; Stop 113
aactcaacgtgaaaataggaaactg

SEQ ID NO: 22318 - DNA, 25 bp, Artificial
  probe
  misc_feature (1)..(25): SEQ ID NO: 3589; WAN0249HO_at; Start 120; Stop 144
tgtctagcagacactaggaagttta

SEQ ID NO: 22319 - DNA, 25 bp, Artificial
  probe
  misc_feature (1)..(25): SEQ ID NO: 3589; WAN0249HO_at; Start 175; Stop 199
aattagattgaaacaccagcctctg

SEQ ID NO: 22320 - DNA, 25 bp, Artificial
  probe
  misc_feature (1)..(25): SEQ ID NO: 3589; WAN0249HO_at; Start 108; Stop 132
aaactgacgcagtgtctagcagaca

SEQ ID NO: 22321 - DNA, 25 bp, Artificial
  probe
  misc_feature (1)..(25): SEQ ID NO: 3589; WAN0249HO_at; Start 60; Stop 84
tgctcaagtctaagatacaaagggc

SEQ ID NO: 22322 - DNA, 25 bp, Artificial
  probe
  misc_feature (1)..(25): SEQ ID NO: 3589; WAN0249HO_at; Start 50; Stop 74
gcgttttttatgctcaagtctaaga

SEQ ID NO: 22323 - DNA, 25 bp, Artificial
  probe
  misc_feature (1)..(25): SEQ ID NO: 3589; WAN0249HO_at; Start 178; Stop 202
tagattgaaacaccagcctctgctc

SEQ ID NO: 22324 - DNA, 25 bp, Artificial
  probe
  misc_feature (1)..(25): SEQ ID NO: 3589; WAN0249HO_at; Start 106; Stop 130
ggaaactgacgcagtgtctagcaga

SEQ ID NO: 22325 - DNA, 25 bp, Artificial
  probe
  misc_feature (1)..(25): SEQ ID NO: 3589; WAN0249HO_at; Start 77; Stop 101
caaagggcgtcaaactcaacgtgaa

SEQ ID NO: 22326 - DNA, 25 bp, Artificial
  probe
  misc_feature (1)..(25): SEQ ID NO: 3589; WAN0249HO_at; Start 157; Stop 181
cgagtttagcccgtgttcaattaga

SEQ ID NO: 22327 - DNA, 25 bp, Artificial
  probe
  misc_feature (1)..(25): SEQ ID NO: 3589; WAN0249HO_at; Start 116; Stop 140
gcagtgtctagcagacactaggaag

SEQ ID NO: 22328 - DNA, 25 bp, Artificial
  probe
  misc_feature (1)..(25): SEQ ID NO: 3589; WAN0249HO_at; Start 152; Stop 176
cacaccgagtttagcccgtgttcaa

SEQ ID NO: 22329 - DNA, 25 bp, Artificial
  probe
  misc_feature (1)..(25): SEQ ID NO: 3589; WAN0249HO_at; Start 131; Stop 155
cactaggaagtttatctttttcaca

SEQ ID NO: 22330 - DNA, 25 bp, Artificial
  probe
  misc_feature (1)..(25): SEQ ID NO: 3589; WAN0249HO_at; Start 112; Stop 136
tgacgcagtgtctagcagacactag

SEQ ID NO: 22331 - DNA, 25 bp, Artificial
  probe
  misc_feature (1)..(25): SEQ ID NO: 3705; WAN0249HP_at; Start 186; Stop 210
gcttaccatctcgtaagttgaaacc

SEQ ID NO: 22332 - DNA, 25 bp, Artificial
  probe
  misc_feature (1)..(25): SEQ ID NO: 3705; WAN0249HP_at; Start 232; Stop 256
agaacgggtaggtcctgcctatccg

SEQ ID NO: 22333 - DNA, 25 bp, Artificial
  probe
  misc_feature (1)..(25): SEQ ID NO: 3705; WAN0249HP_at; Start 216; Stop 240
tagcatgaaaacattgagaacgggt

SEQ ID NO: 22334 - DNA, 25 bp, Artificial
  probe
  misc_feature (1)..(25): SEQ ID NO: 3705; WAN0249HP_at; Start 194; Stop 218
tctcgtaagttgaaaccaacaatag

SEQ ID NO: 22335 - DNA, 25 bp, Artificial
  probe
  misc_feature (1)..(25): SEQ ID NO: 3705; WAN0249HP_at; Start 199; Stop 223
taagttgaaaccaacaatagcatga

SEQ ID NO: 22336 - DNA, 25 bp, Artificial
  probe
  misc_feature (1)..(25): SEQ ID NO: 3705; WAN0249HP_at; Start 163; Stop 187
cgattagtattagctataactcagc

SEQ ID NO: 22337 - DNA, 25 bp, Artificial
  probe
  misc_feature (1)..(25): SEQ ID NO: 3705; WAN0249HP_at; Start 221; Stop 245
tgaaaacattgagaacgggtaggtc

SEQ ID NO: 22338 - DNA, 25 bp, Artificial
  probe
  misc_feature (1)..(25): SEQ ID NO: 3705; WAN0249HP_at; Start 177; Stop 201
tataactcagcttaccatctcgtaa

SEQ ID NO: 22339 - DNA, 25 bp, Artificial
  probe
  misc_feature (1)..(25): SEQ ID NO: 3705; WAN0249HP_at; Start 270; Stop 294
cgtgttataatagaatagaaatcaa

SEQ ID NO: 22340 - DNA, 25 bp, Artificial
  probe
  misc_feature (1)..(25): SEQ ID NO: 3705; WAN0249HP_at; Start 227; Stop 251
cattgagaacgggtaggtcctgcct

SEQ ID NO: 22341 - DNA, 25 bp, Artificial
  probe
  misc_feature (1)..(25): SEQ ID NO: 3705; WAN0249HP_at; Start 209; Stop 233
ccaacaatagcatgaaaacattgag

SEQ ID NO: 22342 - DNA, 25 bp, Artificial
  probe
  misc_feature (1)..(25): SEQ ID NO: 3705; WAN0249HP_at; Start 143; Stop 167
cgggttcaaattagctaaatcgatt

SEQ ID NO: 22343 - DNA, 25 bp, Artificial
  probe
  misc_feature (1)..(25): SEQ ID NO: 3705; WAN0249HP_at; Start 191; Stop 215
ccatctcgtaagttgaaaccaacaa

SEQ ID NO: 22344 - DNA, 25 bp, Artificial
  probe
  misc_feature (1)..(25): SEQ ID NO: 3705; WAN0249HP_at; Start 145; Stop 169
ggttcaaattagctaaatcgattag

SEQ ID NO: 22345 - DNA, 25 bp, Artificial
  probe
  misc_feature (1)..(25): SEQ ID NO: 3705; WAN0249HP_at; Start 169; Stop 193
gtattagctataactcagcttacca

SEQ ID NO: 22346 - DNA, 25 bp, Artificial
  probe
  misc_feature (1)..(25): SEQ ID NO: 3705; WAN0249HP_at; Start 218; Stop 242
gcatgaaaacattgagaacgggtag

SEQ ID NO: 22347 - DNA, 25 bp, Artificial
  probe
  misc_feature (1)..(25): SEQ ID NO: 3705; WAN0249HP_at; Start 213; Stop 237
caatagcatgaaaacattgagaacg

SEQ ID NO: 22348 - DNA, 25 bp, Artificial
  probe
  misc_feature (1)..(25): SEQ ID NO: 3705; WAN0249HP_at; Start 197; Stop 221
cgtaagttgaaaccaacaatagcat

SEQ ID NO: 22349 - DNA, 25 bp, Artificial
  probe
  misc_feature (1)..(25): SEQ ID NO: 3705; WAN0249HP_at; Start 179; Stop 203
taactcagcttaccatctcgtaagt

SEQ ID NO: 22350 - DNA, 25 bp, Artificial
  probe
  misc_feature (1)..(25): SEQ ID NO: 3705; WAN0249HP_at; Start 205; Stop 229
gaaaccaacaatagcatgaaaacat

SEQ ID NO: 22351 - DNA, 25 bp, Artificial
  probe
  misc_feature (1)..(25): SEQ ID NO: 3705; WAN0249HP_at; Start 264; Stop 288
taaaatcgtgttataatagaataga

SEQ ID NO: 22352 - DNA, 25 bp, Artificial
  probe
  misc_feature (1)..(25): SEQ ID NO: 3705; WAN0249HP_at; Start 167; Stop 191
tagtattagctataactcagcttac

SEQ ID NO: 22353 - DNA, 25 bp, Artificial
  probe
  misc_feature (1)..(25): SEQ ID NO: 3705; WAN0249HP_at; Start 202; Stop 226
gttgaaaccaacaatagcatgaaaa

SEQ ID NO: 22354 - DNA, 25 bp, Artificial
  probe
  misc_feature (1)..(25): SEQ ID NO: 3705; WAN0249HP_at; Start 285; Stop 309
tagaaatcaaaaataaataggagaa

SEQ ID NO: 22355 - DNA, 25 bp, Artificial
  probe
  misc_feature (1)..(25): SEQ ID NO: 3705; WAN0249HP_at; Start 228; Stop 252
attgagaacgggtaggtcctgccta

SEQ ID NO: 22356 - DNA, 25 bp, Artificial
  probe
  misc_feature (1)..(25): SEQ ID NO: 3705; WAN0249HP_at; Start 148; Stop 172
tcaaattagctaaatcgattagtat

SEQ ID NO: 22357 - DNA, 25 bp, Artificial
  probe
  misc_feature (1)..(25): SEQ ID NO: 3705; WAN0249HP_at; Start 175; Stop 199
gctataactcagcttaccatctcgt

SEQ ID NO: 22358 - DNA, 25 bp, Artificial
  probe
  misc_feature (1)..(25): SEQ ID NO: 3705; WAN0249HP_at; Start 231; Stop 255
gagaacgggtaggtcctgcctatcc

SEQ ID NO: 22359 - DNA, 25 bp, Artificial
  probe
  misc_feature (1)..(25): SEQ ID NO: 3705; WAN0249HP_at; Start 183; Stop 207
tcagcttaccatctcgtaagttgaa

SEQ ID NO: 22360 - DNA, 25 bp, Artificial
  probe
  misc_feature (1)..(25): SEQ ID NO: 3705; WAN0249HP_at; Start 219; Stop 243
catgaaaacattgagaacgggtagg

SEQ ID NO: 22361 - DNA, 25 bp, Artificial
  probe
  misc_feature (1)..(25): SEQ ID NO: 3705; WAN0249HP_at; Start 230; Stop 254
tgagaacgggtaggtcctgcctatc

SEQ ID NO: 22362 - DNA, 25 bp, Artificial
  probe
  misc_feature (1)..(25): SEQ ID NO: 3705; WAN0249HP_at; Start 189; Stop 213
taccatctcgtaagttgaaaccaac

SEQ ID NO: 22363 - DNA, 25 bp, Artificial
  probe
  misc_feature (1)..(25): SEQ ID NO: 3705; WAN0249HP_at; Start 142; Stop 166
ccgggttcaaattagctaaatcgat

SEQ ID NO: 22364 - DNA, 25 bp, Artificial
  probe
  misc_feature (1)..(25): SEQ ID NO: 3705; WAN0249HP_at; Start 229; Stop 253
ttgagaacgggtaggtcctgcctat

SEQ ID NO: 22365 - DNA, 25 bp, Artificial
  probe
  misc_feature (1)..(25): SEQ ID NO: 3531; WAN0249HQ_at; Start 69; Stop 93
aacatattagacgaaagtcattttg

SEQ ID NO: 22366 - DNA, 25 bp, Artificial
  probe
  misc_feature (1)..(25): SEQ ID NO: 3531; WAN0249HQ_at; Start 38; Stop 62
cataaaaaatgtttatcacagcctt

SEQ ID NO: 22367 - DNA, 25 bp, Artificial
  probe
  misc_feature (1)..(25): SEQ ID NO: 3531; WAN0249HQ_at; Start 8; Stop 32
gttgtcctatgtgggcagctttttc

SEQ ID NO: 22368 - DNA, 25 bp, Artificial
  probe
  misc_feature (1)..(25): SEQ ID NO: 3531; WAN0249HQ_at; Start 22; Stop 46
gcagctttttcttgtccataaaaaa

SEQ ID NO: 22369 - DNA, 25 bp, Artificial
  probe
  misc_feature (1)..(25): SEQ ID NO: 3531; WAN0249HQ_at; Start 21; Stop 45
ggcagctttttcttgtccataaaaa

SEQ ID NO: 22370 - DNA, 25 bp, Artificial
  probe
  misc_feature (1)..(25): SEQ ID NO: 3531; WAN0249HQ_at; Start 73; Stop 97
tattagacgaaagtcattttgagtg

SEQ ID NO: 22371 - DNA, 25 bp, Artificial
  probe
  misc_feature (1)..(25): SEQ ID NO: 3531; WAN0249HQ_at; Start 14; Stop 38
ctatgtgggcagctttttcttgtcc

SEQ ID NO: 22372 - DNA, 25 bp, Artificial
  probe
  misc_feature (1)..(25): SEQ ID NO: 3531; WAN0249HQ_at; Start 20; Stop 44
gggcagctttttcttgtccataaaa

SEQ ID NO: 22373 - DNA, 25 bp, Artificial
  probe
  misc_feature (1)..(25): SEQ ID NO: 3531; WAN0249HQ_at; Start 75; Stop 99
ttagacgaaagtcattttgagtgat

SEQ ID NO: 22374 - DNA, 25 bp, Artificial
  probe
  misc_feature (1)..(25): SEQ ID NO: 3531; WAN0249HQ_at; Start 40; Stop 64
taaaaaatgtttatcacagccttaa

SEQ ID NO: 22375 - DNA, 25 bp, Artificial
  probe
  misc_feature (1)..(25): SEQ ID NO: 3531; WAN0249HQ_at; Start 13; Stop 37
cctatgtgggcagctttttcttgtc

SEQ ID NO: 22376 - DNA, 25 bp, Artificial
  probe
  misc_feature (1)..(25): SEQ ID NO: 3531; WAN0249HQ_at; Start 74; Stop 98
attagacgaaagtcattttgagtga

SEQ ID NO: 22377 - DNA, 25 bp, Artificial
  probe
  misc_feature (1)..(25): SEQ ID NO: 3531; WAN0249HQ_at; Start 71; Stop 95
catattagacgaaagtcattttgag

SEQ ID NO: 22378 - DNA, 25 bp, Artificial
  probe
  misc_feature (1)..(25): SEQ ID NO: 3531; WAN0249HQ_at; Start 66; Stop 90
aaaaacatattagacgaaagtcatt

SEQ ID NO: 22379 - DNA, 25 bp, Artificial
  probe
  misc_feature (1)..(25): SEQ ID NO: 3531; WAN0249HQ_at; Start 65; Stop 89
aaaaaacatattagacgaaagtcat

SEQ ID NO: 22380 - DNA, 25 bp, Artificial
  probe
  misc_feature (1)..(25): SEQ ID NO: 3531; WAN0249HQ_at; Start 2; Stop 26
aaagaagttgtcctatgtgggcagc

SEQ ID NO: 22381 - DNA, 25 bp, Artificial
  probe
  misc_feature (1)..(25): SEQ ID NO: 3531; WAN0249HQ_at; Start 18; Stop 42
gtgggcagctttttcttgtccataa

SEQ ID NO: 22382 - DNA, 25 bp, Artificial
  probe
  misc_feature (1)..(25): SEQ ID NO: 3531; WAN0249HQ_at; Start 5; Stop 29
gaagttgtcctatgtgggcagcttt

SEQ ID NO: 22383 - DNA, 25 bp, Artificial
  probe
  misc_feature (1)..(25): SEQ ID NO: 3531; WAN0249HQ_at; Start 12; Stop 36
tcctatgtgggcagctttttcttgt

SEQ ID NO: 22384 - DNA, 25 bp, Artificial
  probe
  misc_feature (1)..(25): SEQ ID NO: 3531; WAN0249HQ_at; Start 17; Stop 41
tgtgggcagctttttcttgtccata

SEQ ID NO: 22385 - DNA, 25 bp, Artificial
  probe
  misc_feature (1)..(25): SEQ ID NO: 3531; WAN0249HQ_at; Start 7; Stop 31
agttgtcctatgtgggcagcttttt

SEQ ID NO: 22386 - DNA, 25 bp, Artificial
  probe
  misc_feature (1)..(25): SEQ ID NO: 3531; WAN0249HQ_at; Start 15; Stop 39
tatgtgggcagctttttcttgtcca

SEQ ID NO: 22387 - DNA, 25 bp, Artificial
  probe
  misc_feature (1)..(25): SEQ ID NO: 3531; WAN0249HQ_at; Start 3; Stop 27
aagaagttgtcctatgtgggcagct

SEQ ID NO: 22388 - DNA, 25 bp, Artificial
  probe
  misc_feature (1)..(25): SEQ ID NO: 3531; WAN0249HQ_at; Start 37; Stop 61
ccataaaaaatgtttatcacagcct

SEQ ID NO: 22389 - DNA, 25 bp, Artificial
  probe
  misc_feature (1)..(25): SEQ ID NO: 3531; WAN0249HQ_at; Start 70; Stop 94
acatattagacgaaagtcattttga

SEQ ID NO: 22390 - DNA, 25 bp, Artificial
  probe
  misc_feature (1)..(25): SEQ ID NO: 3531; WAN0249HQ_at; Start 34; Stop 58
tgtccataaaaaatgtttatcacag

SEQ ID NO: 22391 - DNA, 25 bp, Artificial
  probe
  misc_feature (1)..(25): SEQ ID NO: 3531; WAN0249HQ_at; Start 30; Stop 54
ttcttgtccataaaaaatgtttatc

SEQ ID NO: 22392 - DNA, 25 bp, Artificial
  probe
  misc_feature (1)..(25): SEQ ID NO: 3531; WAN0249HQ_at; Start 36; Stop 60
tccataaaaaatgtttatcacagcc

SEQ ID NO: 22393 - DNA, 25 bp, Artificial
  probe
  misc_feature (1)..(25): SEQ ID NO: 3531; WAN0249HQ_at; Start 6; Stop 30
aagttgtcctatgtgggcagctttt

SEQ ID NO: 22394 - DNA, 25 bp, Artificial
  probe
  misc_feature (1)..(25): SEQ ID NO: 3531; WAN0249HQ_at; Start 16; Stop 40
atgtgggcagctttttcttgtccat

SEQ ID NO: 22395 - DNA, 25 bp, Artificial
  probe
  misc_feature (1)..(25): SEQ ID NO: 3531; WAN0249HQ_at; Start 19; Stop 43
tgggcagctttttcttgtccataaa

SEQ ID NO: 22396 - DNA, 25 bp, Artificial
  probe
  misc_feature (1)..(25): SEQ ID NO: 3531; WAN0249HQ_at; Start 24; Stop 48
agctttttcttgtccataaaaaatg

SEQ ID NO: 22397 - DNA, 25 bp, Artificial
  probe
  misc_feature (1)..(25): SEQ ID NO: 3531; WAN0249HQ_at; Start 4; Stop 28
agaagttgtcctatgtgggcagctt

SEQ ID NO: 22398 - DNA, 25 bp, Artificial
  probe
  misc_feature (1)..(25): SEQ ID NO: 3531; WAN0249HQ_at; Start 32; Stop 56
cttgtccataaaaaatgtttatcac

SEQ ID NO: 22399 - DNA, 25 bp, Artificial
  probe
  misc_feature (1)..(25): SEQ ID NO: 576; WAN0249HR_at; Start 74; Stop 98
gctgcccacataggacaacttcttt

SEQ ID NO: 22400 - DNA, 25 bp, Artificial
  probe
  misc_feature (1)..(25): SEQ ID NO: 576; WAN0249HR_at; Start 60; Stop 84
atggacaagaaaaagctgcccacat

SEQ ID NO: 22401 - DNA, 25 bp, Artificial
  probe
  misc_feature (1)..(25): SEQ ID NO: 576; WAN0249HR_at; Start 54; Stop 78
ttttttatggacaagaaaaagctgc

SEQ ID NO: 22402 - DNA, 25 bp, Artificial
  probe
  misc_feature (1)..(25): SEQ ID NO: 576; WAN0249HR_at; Start 55; Stop 79
tttttatggacaagaaaaagctgcc

SEQ ID NO: 22403 - DNA, 25 bp, Artificial
  probe
  misc_feature (1)..(25): SEQ ID NO: 576; WAN0249HR_at; Start 69; Stop 93
aaaaagctgcccacataggacaact

SEQ ID NO: 22404 - DNA, 25 bp, Artificial
  probe
  misc_feature (1)..(25): SEQ ID NO: 576; WAN0249HR_at; Start 70; Stop 94
aaaagctgcccacataggacaactt

SEQ ID NO: 22405 - DNA, 25 bp, Artificial
  probe
  misc_feature (1)..(25): SEQ ID NO: 576; WAN0249HR_at; Start 40; Stop 64
ggctgtgataaacattttttatgga

SEQ ID NO: 22406 - DNA, 25 bp, Artificial
  probe
  misc_feature (1)..(25): SEQ ID NO: 576; WAN0249HR_at; Start 22; Stop 46
ctaatatgttttttttaaggctgtg

SEQ ID NO: 22407 - DNA, 25 bp, Artificial
  probe
  misc_feature (1)..(25): SEQ ID NO: 576; WAN0249HR_at; Start 9; Stop 33
aaatgactttcgtctaatatgtttt

SEQ ID NO: 22408 - DNA, 25 bp, Artificial
  probe
  misc_feature (1)..(25): SEQ ID NO: 576; WAN0249HR_at; Start 75; Stop 99
ctgcccacataggacaacttctttc

SEQ ID NO: 22409 - DNA, 25 bp, Artificial
  probe
  misc_feature (1)..(25): SEQ ID NO: 576; WAN0249HR_at; Start 1; Stop 25
atcactcaaaatgactttcgtctaa

SEQ ID NO: 22410 - DNA, 25 bp, Artificial
  probe
  misc_feature (1)..(25): SEQ ID NO: 576; WAN0249HR_at; Start 58; Stop 82
ttatggacaagaaaaagctgcccac

SEQ ID NO: 22411 - DNA, 25 bp, Artificial
  probe
  misc_feature (1)..(25): SEQ ID NO: 576; WAN0249HR_at; Start 36; Stop 60
ttaaggctgtgataaacatttttta

SEQ ID NO: 22412 - DNA, 25 bp, Artificial
  probe
  misc_feature (1)..(25): SEQ ID NO: 576; WAN0249HR_at; Start 73; Stop 97
agctgcccacataggacaacttctt

SEQ ID NO: 22413 - DNA, 25 bp, Artificial
  probe
  misc_feature (1)..(25): SEQ ID NO: 576; WAN0249HR_at; Start 61; Stop 85
tggacaagaaaaagctgcccacata

SEQ ID NO: 22414 - DNA, 25 bp, Artificial
  probe
  misc_feature (1)..(25): SEQ ID NO: 576; WAN0249HR_at; Start 59; Stop 83
tatggacaagaaaaagctgcccaca

SEQ ID NO: 22415 - DNA, 25 bp, Artificial
  probe
  misc_feature (1)..(25): SEQ ID NO: 576; WAN0249HR_at; Start 72; Stop 96
aagctgcccacataggacaacttct

SEQ ID NO: 22416 - DNA, 25 bp, Artificial
  probe
  misc_feature (1)..(25): SEQ ID NO: 576; WAN0249HR_at; Start 2; Stop 26
tcactcaaaatgactttcgtctaat

SEQ ID NO: 22417 - DNA, 25 bp, Artificial
  probe
  misc_feature (1)..(25): SEQ ID NO: 576; WAN0249HR_at; Start 44; Stop 68
gtgataaacattttttatggacaag

SEQ ID NO: 22418 - DNA, 25 bp, Artificial
  probe
  misc_feature (1)..(25): SEQ ID NO: 576; WAN0249HR_at; Start 5; Stop 29
ctcaaaatgactttcgtctaatatg

SEQ ID NO: 22419 - DNA, 25 bp, Artificial
  probe
  misc_feature (1)..(25): SEQ ID NO: 576; WAN0249HR_at; Start 56; Stop 80
ttttatggacaagaaaaagctgccc

SEQ ID NO: 22420 - DNA, 25 bp, Artificial
  probe
  misc_feature (1)..(25): SEQ ID NO: 576; WAN0249HR_at; Start 63; Stop 87
gacaagaaaaagctgcccacatagg

SEQ ID NO: 22421 - DNA, 25 bp, Artificial
  probe
  misc_feature (1)..(25): SEQ ID NO: 576; WAN0249HR_at; Start 3; Stop 27
cactcaaaatgactttcgtctaata

SEQ ID NO: 22422 - DNA, 25 bp, Artificial
  probe
  misc_feature (1)..(25): SEQ ID NO: 576; WAN0249HR_at; Start 57; Stop 81
tttatggacaagaaaaagctgccca

SEQ ID NO: 22423 - DNA, 25 bp, Artificial
  probe
  misc_feature (1)..(25): SEQ ID NO: 576; WAN0249HR_at; Start 38; Stop 62
aaggctgtgataaacattttttatg

SEQ ID NO: 22424 - DNA, 25 bp, Artificial
  probe
  misc_feature (1)..(25): SEQ ID NO: 576; WAN0249HR_at; Start 52; Stop 76
cattttttatggacaagaaaaagct

SEQ ID NO: 22425 - DNA, 25 bp, Artificial
  probe
  misc_feature (1)..(25): SEQ ID NO: 576; WAN0249HR_at; Start 64; Stop 88
acaagaaaaagctgcccacatagga

SEQ ID NO: 22426 - DNA, 25 bp, Artificial
  probe
  misc_feature (1)..(25): SEQ ID NO: 576; WAN0249HR_at; Start 6; Stop 30
tcaaaatgactttcgtctaatatgt

SEQ ID NO: 22427 - DNA, 25 bp, Artificial
  probe
  misc_feature (1)..(25): SEQ ID NO: 576; WAN0249HR_at; Start 7; Stop 31
caaaatgactttcgtctaatatgtt

SEQ ID NO: 22428 - DNA, 25 bp, Artificial
  probe
  misc_feature (1)..(25): SEQ ID NO: 576; WAN0249HR_at; Start 46; Stop 70
gataaacattttttatggacaagaa

SEQ ID NO: 22429 - DNA, 25 bp, Artificial
  probe
  misc_feature (1)..(25): SEQ ID NO: 576; WAN0249HR_at; Start 71; Stop 95
aaagctgcccacataggacaacttc

SEQ ID NO: 22430 - DNA, 25 bp, Artificial
  probe
  misc_feature (1)..(25): SEQ ID NO: 576; WAN0249HR_at; Start 68; Stop 92
gaaaaagctgcccacataggacaac

SEQ ID NO: 22431 - DNA, 25 bp, Artificial
  probe
  misc_feature (1)..(25): SEQ ID NO: 576; WAN0249HR_at; Start 65; Stop 89
caagaaaaagctgcccacataggac

SEQ ID NO: 22432 - DNA, 25 bp, Artificial
  probe
  misc_feature (1)..(25): SEQ ID NO: 576; WAN0249HR_at; Start 62; Stop 86
ggacaagaaaaagctgcccacatag

SEQ ID NO: 22433 - DNA, 25 bp, Artificial
  probe
  misc_feature (1)..(25): SEQ ID NO: 4484; WAN0249HS_at; Start 60; Stop 84
cagccaagacttgtgatataatata

SEQ ID NO: 22434 - DNA, 25 bp, Artificial
  probe
  misc_feature (1)..(25): SEQ ID NO: 4484; WAN0249HS_at; Start 45; Stop 69
catagaaattggactcagccaagac

SEQ ID NO: 22435 - DNA, 25 bp, Artificial
  probe
  misc_feature (1)..(25): SEQ ID NO: 4484; WAN0249HS_at; Start 50; Stop 74
aaattggactcagccaagacttgtg

SEQ ID NO: 22436 - DNA, 25 bp, Artificial
  probe
  misc_feature (1)..(25): SEQ ID NO: 4484; WAN0249HS_at; Start 39; Stop 63
tttatccatagaaattggactcagc

SEQ ID NO: 22437 - DNA, 25 bp, Artificial
  probe
  misc_feature (1)..(25): SEQ ID NO: 4484; WAN0249HS_at; Start 98; Stop 122
cagacgcctagataataggagaaac

SEQ ID NO: 22438 - DNA, 25 bp, Artificial
  probe
  misc_feature (1)..(25): SEQ ID NO: 4484; WAN0249HS_at; Start 82; Stop 106
atagaaagcaaaaaggcagacgcct

SEQ ID NO: 22439 - DNA, 25 bp, Artificial
  probe
  misc_feature (1)..(25): SEQ ID NO: 4484; WAN0249HS_at; Start 14; Stop 38
tggtttgcccactctttttactctc

SEQ ID NO: 22440 - DNA, 25 bp, Artificial
  probe
  misc_feature (1)..(25): SEQ ID NO: 4484; WAN0249HS_at; Start 54; Stop 78
tggactcagccaagacttgtgatat

SEQ ID NO: 22441 - DNA, 25 bp, Artificial
  probe
  misc_feature (1)..(25): SEQ ID NO: 4484; WAN0249HS_at; Start 81; Stop 105
tatagaaagcaaaaaggcagacgcc

SEQ ID NO: 22442 - DNA, 25 bp, Artificial
  probe
  misc_feature (1)..(25): SEQ ID NO: 4484; WAN0249HS_at; Start 78; Stop 102
taatatagaaagcaaaaaggcagac

SEQ ID NO: 22443 - DNA, 25 bp, Artificial
  probe
  misc_feature (1)..(25): SEQ ID NO: 4484; WAN0249HS_at; Start 56; Stop 80
gactcagccaagacttgtgatataa

SEQ ID NO: 22444 - DNA, 25 bp, Artificial
  probe
  misc_feature (1)..(25): SEQ ID NO: 4484; WAN0249HS_at; Start 37; Stop 61
tctttatccatagaaattggactca

SEQ ID NO: 22445 - DNA, 25 bp, Artificial
  probe
  misc_feature (1)..(25): SEQ ID NO: 4484; WAN0249HS_at; Start 3; Stop 27
gaagaaaagagtggtttgcccactc

SEQ ID NO: 22446 - DNA, 25 bp, Artificial
  probe
  misc_feature (1)..(25): SEQ ID NO: 4484; WAN0249HS_at; Start 86; Stop 110
aaagcaaaaaggcagacgcctagat

SEQ ID NO: 22447 - DNA, 25 bp, Artificial
  probe
  misc_feature (1)..(25): SEQ ID NO: 4484; WAN0249HS_at; Start 99; Stop 123
agacgcctagataataggagaaact

SEQ ID NO: 22448 - DNA, 25 bp, Artificial
  probe
  misc_feature (1)..(25): SEQ ID NO: 4484; WAN0249HS_at; Start 4; Stop 28
aagaaaagagtggtttgcccactct

SEQ ID NO: 22449 - DNA, 25 bp, Artificial
  probe
  misc_feature (1)..(25): SEQ ID NO: 4484; WAN0249HS_at; Start 32; Stop 56
tactctctttatccatagaaattgg

SEQ ID NO: 22450 - DNA, 25 bp, Artificial
  probe
  misc_feature (1)..(25): SEQ ID NO: 4484; WAN0249HS_at; Start 63; Stop 87
ccaagacttgtgatataatatagaa

SEQ ID NO: 22451 - DNA, 25 bp, Artificial
  probe
  misc_feature (1)..(25): SEQ ID NO: 4484; WAN0249HS_at; Start 52; Stop 76
attggactcagccaagacttgtgat

SEQ ID NO: 22452 - DNA, 25 bp, Artificial
  probe
  misc_feature (1)..(25): SEQ ID NO: 4484; WAN0249HS_at; Start 49; Stop 73
gaaattggactcagccaagacttgt

SEQ ID NO: 22453 - DNA, 25 bp, Artificial
  probe
  misc_feature (1)..(25): SEQ ID NO: 4484; WAN0249HS_at; Start 62; Stop 86
gccaagacttgtgatataatataga

SEQ ID NO: 22454 - DNA, 25 bp, Artificial
  probe
  misc_feature (1)..(25): SEQ ID NO: 4484; WAN0249HS_at; Start 84; Stop 108
agaaagcaaaaaggcagacgcctag

SEQ ID NO: 22455 - DNA, 25 bp, Artificial
  probe
  misc_feature (1)..(25): SEQ ID NO: 4484; WAN0249HS_at; Start 18; Stop 42
ttgcccactctttttactctcttta

SEQ ID NO: 22456 - DNA, 25 bp, Artificial
  probe
  misc_feature (1)..(25): SEQ ID NO: 4484; WAN0249HS_at; Start 89; Stop 113
gcaaaaaggcagacgcctagataat

SEQ ID NO: 22457 - DNA, 25 bp, Artificial
  probe
  misc_feature (1)..(25): SEQ ID NO: 4484; WAN0249HS_at; Start 74; Stop 98
gatataatatagaaagcaaaaaggc

SEQ ID NO: 22458 - DNA, 25 bp, Artificial
  probe
  misc_feature (1)..(25): SEQ ID NO: 4484; WAN0249HS_at; Start 67; Stop 91
gacttgtgatataatatagaaagca

SEQ ID NO: 22459 - DNA, 25 bp, Artificial
  probe
  misc_feature (1)..(25): SEQ ID NO: 4484; WAN0249HS_at; Start 1; Stop 25
tagaagaaaagagtggtttgcccac

SEQ ID NO: 22460 - DNA, 25 bp, Artificial
  probe
  misc_feature (1)..(25): SEQ ID NO: 4484; WAN0249HS_at; Start 94; Stop 118
aaggcagacgcctagataataggag

SEQ ID NO: 22461 - DNA, 25 bp, Artificial
  probe
  misc_feature (1)..(25): SEQ ID NO: 4484; WAN0249HS_at; Start 83; Stop 107
tagaaagcaaaaaggcagacgccta

SEQ ID NO: 22462 - DNA, 25 bp, Artificial
  probe
  misc_feature (1)..(25): SEQ ID NO: 4484; WAN0249HS_at; Start 44; Stop 68
ccatagaaattggactcagccaaga

SEQ ID NO: 22463 - DNA, 25 bp, Artificial
  probe
  misc_feature (1)..(25): SEQ ID NO: 4484; WAN0249HS_at; Start 96; Stop 120
ggcagacgcctagataataggagaa

SEQ ID NO: 22464 - DNA, 25 bp, Artificial
  probe
  misc_feature (1)..(25): SEQ ID NO: 4484; WAN0249HS_at; Start 43; Stop 67
tccatagaaattggactcagccaag

SEQ ID NO: 22465 - DNA, 25 bp, Artificial
  probe
  misc_feature (1)..(25): SEQ ID NO: 4484; WAN0249HS_at; Start 47; Stop 71
tagaaattggactcagccaagactt

SEQ ID NO: 22466 - DNA, 25 bp, Artificial
  probe
  misc_feature (1)..(25): SEQ ID NO: 4484; WAN0249HS_at; Start 41; Stop 65
tatccatagaaattggactcagcca

SEQ ID NO: 22467 - DNA, 25 bp, Artificial
  probe
  misc_feature (1)..(25): SEQ ID NO: 507; WAN0249HT_at; Start 22; Stop 46
gtctgcctttttgctttctatatta

SEQ ID NO: 22468 - DNA, 25 bp, Artificial
  probe
  misc_feature (1)..(25): SEQ ID NO: 507; WAN0249HT_at; Start 75; Stop 99
ctatggataaagagagtaaaaagag

SEQ ID NO: 22469 - DNA, 25 bp, Artificial
  probe
  misc_feature (1)..(25): SEQ ID NO: 507; WAN0249HT_at; Start 52; Stop 76
caagtcttggctgagtccaatttct

SEQ ID NO: 22470 - DNA, 25 bp, Artificial
  probe
  misc_feature (1)..(25): SEQ ID NO: 507; WAN0249HT_at; Start 40; Stop 64
tatattatatcacaagtcttggctg

SEQ ID NO: 22471 - DNA, 25 bp, Artificial
  probe
  misc_feature (1)..(25): SEQ ID NO: 507; WAN0249HT_at; Start 64; Stop 88
gagtccaatttctatggataaagag

SEQ ID NO: 22472 - DNA, 25 bp, Artificial
  probe
  misc_feature (1)..(25): SEQ ID NO: 507; WAN0249HT_at; Start 80; Stop 104
gataaagagagtaaaaagagtgggc

SEQ ID NO: 22473 - DNA, 25 bp, Artificial
  probe
  misc_feature (1)..(25): SEQ ID NO: 507; WAN0249HT_at; Start 42; Stop 66
tattatatcacaagtcttggctgag

SEQ ID NO: 22474 - DNA, 25 bp, Artificial
  probe
  misc_feature (1)..(25): SEQ ID NO: 507; WAN0249HT_at; Start 86; Stop 110
gagagtaaaaagagtgggcaaacca

SEQ ID NO: 22475 - DNA, 25 bp, Artificial
  probe
  misc_feature (1)..(25): SEQ ID NO: 507; WAN0249HT_at; Start 45; Stop 69
tatatcacaagtcttggctgagtcc

SEQ ID NO: 22476 - DNA, 25 bp, Artificial
  probe
  misc_feature (1)..(25): SEQ ID NO: 507; WAN0249HT_at; Start 97; Stop 121
gagtgggcaaaccactcttttcttc

SEQ ID NO: 22477 - DNA, 25 bp, Artificial
  probe
  misc_feature (1)..(25): SEQ ID NO: 507; WAN0249HT_at; Start 61; Stop 85
gctgagtccaatttctatggataaa

SEQ ID NO: 22478 - DNA, 25 bp, Artificial
  probe
  misc_feature (1)..(25): SEQ ID NO: 507; WAN0249HT_at; Start 10; Stop 34
tattatctaggcgtctgcctttttg

SEQ ID NO: 22479 - DNA, 25 bp, Artificial
  probe
  misc_feature (1)..(25): SEQ ID NO: 507; WAN0249HT_at; Start 20; Stop 44
gcgtctgcctttttgctttctatat

SEQ ID NO: 22480 - DNA, 25 bp, Artificial
  probe
  misc_feature (1)..(25): SEQ ID NO: 507; WAN0249HT_at; Start 57; Stop 81
cttggctgagtccaatttctatgga

SEQ ID NO: 22481 - DNA, 25 bp, Artificial
  probe
  misc_feature (1)..(25): SEQ ID NO: 507; WAN0249HT_at; Start 7; Stop 31
tcctattatctaggcgtctgccttt

SEQ ID NO: 22482 - DNA, 25 bp, Artificial
  probe
  misc_feature (1)..(25): SEQ ID NO: 507; WAN0249HT_at; Start 38; Stop 62
tctatattatatcacaagtcttggc

SEQ ID NO: 22483 - DNA, 25 bp, Artificial
  probe
  misc_feature (1)..(25): SEQ ID NO: 507; WAN0249HT_at; Start 68; Stop 92
ccaatttctatggataaagagagta

SEQ ID NO: 22484 - DNA, 25 bp, Artificial
  probe
  misc_feature (1)..(25): SEQ ID NO: 507; WAN0249HT_at; Start 2; Stop 26
gtttctcctattatctaggcgtctg

SEQ ID NO: 22485 - DNA, 25 bp, Artificial
  probe
  misc_feature (1)..(25): SEQ ID NO: 507; WAN0249HT_at; Start 47; Stop 71
tatcacaagtcttggctgagtccaa

SEQ ID NO: 22486 - DNA, 25 bp, Artificial
  probe
  misc_feature (1)..(25): SEQ ID NO: 507; WAN0249HT_at; Start 56; Stop 80
tcttggctgagtccaatttctatgg

SEQ ID NO: 22487 - DNA, 25 bp, Artificial
  probe
  misc_feature (1)..(25): SEQ ID NO: 507; WAN0249HT_at; Start 50; Stop 74
cacaagtcttggctgagtccaattt

SEQ ID NO: 22488 - DNA, 25 bp, Artificial
  probe
  misc_feature (1)..(25): SEQ ID NO: 507; WAN0249HT_at; Start 48; Stop 72
atcacaagtcttggctgagtccaat

SEQ ID NO: 22489 - DNA, 25 bp, Artificial
  probe
  misc_feature (1)..(25): SEQ ID NO: 507; WAN0249HT_at; Start 5; Stop 29
tctcctattatctaggcgtctgcct

SEQ ID NO: 22490 - DNA, 25 bp, Artificial
  probe
  misc_feature (1)..(25): SEQ ID NO: 507; WAN0249HT_at; Start 59; Stop 83
tggctgagtccaatttctatggata

SEQ ID NO: 22491 - DNA, 25 bp, Artificial
  probe
  misc_feature (1)..(25): SEQ ID NO: 507; WAN0249HT_at; Start 17; Stop 41
taggcgtctgcctttttgctttcta

SEQ ID NO: 22492 - DNA, 25 bp, Artificial
  probe
  misc_feature (1)..(25): SEQ ID NO: 507; WAN0249HT_at; Start 82; Stop 106
taaagagagtaaaaagagtgggcaa

SEQ ID NO: 22493 - DNA, 25 bp, Artificial
  probe
  misc_feature (1)..(25): SEQ ID NO: 507; WAN0249HT_at; Start 66; Stop 90
gtccaatttctatggataaagagag

SEQ ID NO: 22494 - DNA, 25 bp, Artificial
  probe
  misc_feature (1)..(25): SEQ ID NO: 507; WAN0249HT_at; Start 53; Stop 77
aagtcttggctgagtccaatttcta

SEQ ID NO: 22495 - DNA, 25 bp, Artificial
  probe
  misc_feature (1)..(25): SEQ ID NO: 507; WAN0249HT_at; Start 69; Stop 93
caatttctatggataaagagagtaa

SEQ ID NO: 22496 - DNA, 25 bp, Artificial
  probe
  misc_feature (1)..(25): SEQ ID NO: 507; WAN0249HT_at; Start 19; Stop 43
ggcgtctgcctttttgctttctata

SEQ ID NO: 22497 - DNA, 25 bp, Artificial
  probe
  misc_feature (1)..(25): SEQ ID NO: 507; WAN0249HT_at; Start 60; Stop 84
ggctgagtccaatttctatggataa

SEQ ID NO: 22498 - DNA, 25 bp, Artificial
  probe
  misc_feature (1)..(25): SEQ ID NO: 507; WAN0249HT_at; Start 4; Stop 28
ttctcctattatctaggcgtctgcc

SEQ ID NO: 22499 - DNA, 25 bp, Artificial
  probe
  misc_feature (1)..(25): SEQ ID NO: 507; WAN0249HT_at; Start 13; Stop 37
tatctaggcgtctgcctttttgctt

SEQ ID NO: 22500 - DNA, 25 bp, Artificial
  probe
  misc_feature (1)..(25): SEQ ID NO: 507; WAN0249HT_at; Start 99; Stop 123
gtgggcaaaccactcttttcttcta

SEQ ID NO: 22501 - DNA, 25 bp, Artificial
  probe
  misc_feature (1)..(25): SEQ ID NO: 4524; WAN0249HU_at; Start 5; Stop 29
atagtgttaggaacgttgttattct

SEQ ID NO: 22502 - DNA, 25 bp, Artificial
  probe
  misc_feature (1)..(25): SEQ ID NO: 4524; WAN0249HU_at; Start 1; Stop 25
tagtatagtgttaggaacgttgtta

SEQ ID NO: 22503 - DNA, 25 bp, Artificial
  probe
  misc_feature (1)..(25): SEQ ID NO: 4524; WAN0249HU_at; Start 53; Stop 77
tggtataattatagttattcaaatt

SEQ ID NO: 22504 - DNA, 25 bp, Artificial
  probe
  misc_feature (1)..(25): SEQ ID NO: 4524; WAN0249HU_at; Start 2; Stop 26
agtatagtgttaggaacgttgttat

SEQ ID NO: 22505 - DNA, 25 bp, Artificial
  probe
  misc_feature (1)..(25): SEQ ID NO: 4524; WAN0249HU_at; Start 4; Stop 28
tatagtgttaggaacgttgttattc

SEQ ID NO: 22506 - DNA, 25 bp, Artificial
  probe
  misc_feature (1)..(25): SEQ ID NO: 4524; WAN0249HU_at; Start 51; Stop 75
tttggtataattatagttattcaaa

SEQ ID NO: 22507 - DNA, 25 bp, Artificial
  probe
  misc_feature (1)..(25): SEQ ID NO: 378; WAN0249HV_at; Start 81; Stop 105
ataacaacgttcctaacactatact

SEQ ID NO: 22508 - DNA, 25 bp, Artificial
  probe
  misc_feature (1)..(25): SEQ ID NO: 378; WAN0249HV_at; Start 33; Stop 57
ttgaataactataattataccaaaa

SEQ ID NO: 22509 - DNA, 25 bp, Artificial
  probe
  misc_feature (1)..(25): SEQ ID NO: 378; WAN0249HV_at; Start 30; Stop 54
aatttgaataactataattatacca

SEQ ID NO: 22510 - DNA, 25 bp, Artificial
  probe
  misc_feature (1)..(25): SEQ ID NO: 378; WAN0249HV_at; Start 21; Stop 45
tctaaataaaatttgaataactata

SEQ ID NO: 22511 - DNA, 25 bp, Artificial
  probe
  misc_feature (1)..(25): SEQ ID NO: 378; WAN0249HV_at; Start 34; Stop 58
tgaataactataattataccaaaaa

SEQ ID NO: 22512 - DNA, 25 bp, Artificial
  probe
  misc_feature (1)..(25): SEQ ID NO: 378; WAN0249HV_at; Start 32; Stop 56
tttgaataactataattataccaaa

SEQ ID NO: 22513 - DNA, 25 bp, Artificial
  probe
  misc_feature (1)..(25): SEQ ID NO: 378; WAN0249HV_at; Start 79; Stop 103
gaataacaacgttcctaacactata

SEQ ID NO: 22514 - DNA, 25 bp, Artificial
  probe
  misc_feature (1)..(25): SEQ ID NO: 378; WAN0249HV_at; Start 78; Stop 102
agaataacaacgttcctaacactat

SEQ ID NO: 22515 - DNA, 25 bp, Artificial
  probe
  misc_feature (1)..(25): SEQ ID NO: 378; WAN0249HV_at; Start 82; Stop 106
taacaacgttcctaacactatacta

SEQ ID NO: 22516 - DNA, 25 bp, Artificial
  probe
  misc_feature (1)..(25): SEQ ID NO: 378; WAN0249HV_at; Start 31; Stop 55
atttgaataactataattataccaa

SEQ ID NO: 22517 - DNA, 25 bp, Artificial
  probe
  misc_feature (1)..(25): SEQ ID NO: 5911; WAN0249HW_at; Start 27; Stop 51
gaaaaatcatgatataatggacgag

SEQ ID NO: 22518 - DNA, 25 bp, Artificial
  probe
  misc_feature (1)..(25): SEQ ID NO: 5911; WAN0249HW_at; Start 38; Stop 62
atataatggacgagactatagataa

SEQ ID NO: 22519 - DNA, 25 bp, Artificial
  probe
  misc_feature (1)..(25): SEQ ID NO: 5911; WAN0249HW_at; Start 40; Stop 64
ataatggacgagactatagataaag

SEQ ID NO: 22520 - DNA, 25 bp, Artificial
  probe
  misc_feature (1)..(25): SEQ ID NO: 5911; WAN0249HW_at; Start 33; Stop 57
tcatgatataatggacgagactata

SEQ ID NO: 22521 - DNA, 25 bp, Artificial
  probe
  misc_feature (1)..(25): SEQ ID NO: 5911; WAN0249HW_at; Start 36; Stop 60
tgatataatggacgagactatagat

SEQ ID NO: 22522 - DNA, 25 bp, Artificial
  probe
  misc_feature (1)..(25): SEQ ID NO: 5911; WAN0249HW_at; Start 37; Stop 61
gatataatggacgagactatagata

SEQ ID NO: 22523 - DNA, 25 bp, Artificial
  probe
  misc_feature (1)..(25): SEQ ID NO: 5911; WAN0249HW_at; Start 29; Stop 53
aaaatcatgatataatggacgagac

SEQ ID NO: 22524 - DNA, 25 bp, Artificial
  probe
  misc_feature (1)..(25): SEQ ID NO: 5911; WAN0249HW_at; Start 35; Stop 59
atgatataatggacgagactataga

SEQ ID NO: 22525 - DNA, 25 bp, Artificial
  probe
  misc_feature (1)..(25): SEQ ID NO: 5911; WAN0249HW_at; Start 43; Stop 67
atggacgagactatagataaaggat

SEQ ID NO: 22526 - DNA, 25 bp, Artificial
  probe
  misc_feature (1)..(25): SEQ ID NO: 5911; WAN0249HW_at; Start 47; Stop 71
acgagactatagataaaggatagag

SEQ ID NO: 22527 - DNA, 25 bp, Artificial
  probe
  misc_feature (1)..(25): SEQ ID NO: 5911; WAN0249HW_at; Start 5; Stop 29
tcttataaagggagaattttctgaa

SEQ ID NO: 22528 - DNA, 25 bp, Artificial
  probe
  misc_feature (1)..(25): SEQ ID NO: 5911; WAN0249HW_at; Start 3; Stop 27
tctcttataaagggagaattttctg

SEQ ID NO: 22529 - DNA, 25 bp, Artificial
  probe
  misc_feature (1)..(25): SEQ ID NO: 5911; WAN0249HW_at; Start 41; Stop 65
taatggacgagactatagataaagg

SEQ ID NO: 22530 - DNA, 25 bp, Artificial
  probe
  misc_feature (1)..(25): SEQ ID NO: 5911; WAN0249HW_at; Start 50; Stop 74
agactatagataaaggatagagagt

SEQ ID NO: 22531 - DNA, 25 bp, Artificial
  probe
  misc_feature (1)..(25): SEQ ID NO: 5911; WAN0249HW_at; Start 42; Stop 66
aatggacgagactatagataaagga

SEQ ID NO: 22532 - DNA, 25 bp, Artificial
  probe
  misc_feature (1)..(25): SEQ ID NO: 5911; WAN0249HW_at; Start 48; Stop 72
cgagactatagataaaggatagaga

SEQ ID NO: 22533 - DNA, 25 bp, Artificial
  probe
  misc_feature (1)..(25): SEQ ID NO: 5911; WAN0249HW_at; Start 34; Stop 58
catgatataatggacgagactatag

SEQ ID NO: 22534 - DNA, 25 bp, Artificial
  probe
  misc_feature (1)..(25): SEQ ID NO: 5911; WAN0249HW_at; Start 39; Stop 63
tataatggacgagactatagataaa

SEQ ID NO: 22535 - DNA, 25 bp, Artificial
  probe
  misc_feature (1)..(25): SEQ ID NO: 5911; WAN0249HW_at; Start 31; Stop 55
aatcatgatataatggacgagacta

SEQ ID NO: 22536 - DNA, 25 bp, Artificial
  probe
  misc_feature (1)..(25): SEQ ID NO: 5911; WAN0249HW_at; Start 46; Stop 70
gacgagactatagataaaggataga

SEQ ID NO: 22537 - DNA, 25 bp, Artificial
  probe
  misc_feature (1)..(25): SEQ ID NO: 5911; WAN0249HW_at; Start 32; Stop 56
atcatgatataatggacgagactat

SEQ ID NO: 22538 - DNA, 25 bp, Artificial
  probe
  misc_feature (1)..(25): SEQ ID NO: 5911; WAN0249HW_at; Start 45; Stop 69
ggacgagactatagataaaggatag

SEQ ID NO: 22539 - DNA, 25 bp, Artificial
  probe
  misc_feature (1)..(25): SEQ ID NO: 5911; WAN0249HW_at; Start 49; Stop 73
gagactatagataaaggatagagag

SEQ ID NO: 22540 - DNA, 25 bp, Artificial
  probe
  misc_feature (1)..(25): SEQ ID NO: 5911; WAN0249HW_at; Start 44; Stop 68
tggacgagactatagataaaggata

SEQ ID NO: 22541 - DNA, 25 bp, Artificial
  probe
  misc_feature (1)..(25): SEQ ID NO: 5911; WAN0249HW_at; Start 30; Stop 54
aaatcatgatataatggacgagact

SEQ ID NO: 22542 - DNA, 25 bp, Artificial
  probe
  misc_feature (1)..(25): SEQ ID NO: 5911; WAN0249HW_at; Start 51; Stop 75
gactatagataaaggatagagagta

SEQ ID NO: 22543 - DNA, 25 bp, Artificial
  probe
  misc_feature (1)..(25): SEQ ID NO: 5911; WAN0249HW_at; Start 28; Stop 52
aaaaatcatgatataatggacgaga

SEQ ID NO: 22544 - DNA, 25 bp, Artificial
  probe
  misc_feature (1)..(25): SEQ ID NO: 5911; WAN0249HW_at; Start 4; Stop 28
ctcttataaagggagaattttctga

SEQ ID NO: 22545 - DNA, 25 bp, Artificial
  probe
  misc_feature (1)..(25): SEQ ID NO: 5911; WAN0249HW_at; Start 26; Stop 50
tgaaaaatcatgatataatggacga

SEQ ID NO: 22546 - DNA, 25 bp, Artificial
  probe
  misc_feature (1)..(25): SEQ ID NO: 4471; WAN0249HX_at; Start 20; Stop 44
atagtctcgtccattatatcatgat

SEQ ID NO: 22547 - DNA, 25 bp, Artificial
  probe
  misc_feature (1)..(25): SEQ ID NO: 4471; WAN0249HX_at; Start 4; Stop 28
tctctatcctttatctatagtctcg

SEQ ID NO: 22548 - DNA, 25 bp, Artificial
  probe
  misc_feature (1)..(25): SEQ ID NO: 4471; WAN0249HX_at; Start 14; Stop 38
ttatctatagtctcgtccattatat

SEQ ID NO: 22549 - DNA, 25 bp, Artificial
  probe
  misc_feature (1)..(25): SEQ ID NO: 4471; WAN0249HX_at; Start 12; Stop 36
ctttatctatagtctcgtccattat

SEQ ID NO: 22550 - DNA, 25 bp, Artificial
  probe
  misc_feature (1)..(25): SEQ ID NO: 4471; WAN0249HX_at; Start 25; Stop 49
ctcgtccattatatcatgatttttc

SEQ ID NO: 22551 - DNA, 25 bp, Artificial
  probe
  misc_feature (1)..(25): SEQ ID NO: 4471; WAN0249HX_at; Start 9; Stop 33
atcctttatctatagtctcgtccat

SEQ ID NO: 22552 - DNA, 25 bp, Artificial
  probe
  misc_feature (1)..(25): SEQ ID NO: 4471; WAN0249HX_at; Start 11; Stop 35
cctttatctatagtctcgtccatta

SEQ ID NO: 22553 - DNA, 25 bp, Artificial
  probe
  misc_feature (1)..(25): SEQ ID NO: 4471; WAN0249HX_at; Start 1; Stop 25
tactctctatcctttatctatagtc

SEQ ID NO: 22554 - DNA, 25 bp, Artificial
  probe
  misc_feature (1)..(25): SEQ ID NO: 4471; WAN0249HX_at; Start 2; Stop 26
actctctatcctttatctatagtct

SEQ ID NO: 22555 - DNA, 25 bp, Artificial
  probe
  misc_feature (1)..(25): SEQ ID NO: 4471; WAN0249HX_at; Start 6; Stop 30
tctatcctttatctatagtctcgtc

SEQ ID NO: 22556 - DNA, 25 bp, Artificial
  probe
  misc_feature (1)..(25): SEQ ID NO: 4471; WAN0249HX_at; Start 8; Stop 32
tatcctttatctatagtctcgtcca

SEQ ID NO: 22557 - DNA, 25 bp, Artificial
  probe
  misc_feature (1)..(25): SEQ ID NO: 4471; WAN0249HX_at; Start 17; Stop 41
tctatagtctcgtccattatatcat

SEQ ID NO: 22558 - DNA, 25 bp, Artificial
  probe
  misc_feature (1)..(25): SEQ ID NO: 4471; WAN0249HX_at; Start 47; Stop 71
ttcagaaaattctccctttataaga

SEQ ID NO: 22559 - DNA, 25 bp, Artificial
  probe
  misc_feature (1)..(25): SEQ ID NO: 4471; WAN0249HX_at; Start 19; Stop 43
tatagtctcgtccattatatcatga

SEQ ID NO: 22560 - DNA, 25 bp, Artificial
  probe
  misc_feature (1)..(25): SEQ ID NO: 4471; WAN0249HX_at; Start 24; Stop 48
tctcgtccattatatcatgattttt

SEQ ID NO: 22561 - DNA, 25 bp, Artificial
  probe
  misc_feature (1)..(25): SEQ ID NO: 4471; WAN0249HX_at; Start 22; Stop 46
agtctcgtccattatatcatgattt

SEQ ID NO: 22562 - DNA, 25 bp, Artificial
  probe
  misc_feature (1)..(25): SEQ ID NO: 4471; WAN0249HX_at; Start 18; Stop 42
ctatagtctcgtccattatatcatg

SEQ ID NO: 22563 - DNA, 25 bp, Artificial
  probe
  misc_feature (1)..(25): SEQ ID NO: 4471; WAN0249HX_at; Start 10; Stop 34
tcctttatctatagtctcgtccatt

SEQ ID NO: 22564 - DNA, 25 bp, Artificial
  probe
  misc_feature (1)..(25): SEQ ID NO: 4471; WAN0249HX_at; Start 16; Stop 40
atctatagtctcgtccattatatca

SEQ ID NO: 22565 - DNA, 25 bp, Artificial
  probe
  misc_feature (1)..(25): SEQ ID NO: 4471; WAN0249HX_at; Start 49; Stop 73
cagaaaattctccctttataagaga

SEQ ID NO: 22566 - DNA, 25 bp, Artificial
  probe
  misc_feature (1)..(25): SEQ ID NO: 4471; WAN0249HX_at; Start 21; Stop 45
tagtctcgtccattatatcatgatt

SEQ ID NO: 22567 - DNA, 25 bp, Artificial
  probe
  misc_feature (1)..(25): SEQ ID NO: 4471; WAN0249HX_at; Start 23; Stop 47
gtctcgtccattatatcatgatttt

SEQ ID NO: 22568 - DNA, 25 bp, Artificial
  probe
  misc_feature (1)..(25): SEQ ID NO: 4471; WAN0249HX_at; Start 48; Stop 72
tcagaaaattctccctttataagag

SEQ ID NO: 22569 - DNA, 25 bp, Artificial
  probe
  misc_feature (1)..(25): SEQ ID NO: 4471; WAN0249HX_at; Start 31; Stop 55
cattatatcatgatttttcagaaaa

SEQ ID NO: 22570 - DNA, 25 bp, Artificial
  probe
  misc_feature (1)..(25): SEQ ID NO: 4471; WAN0249HX_at; Start 26; Stop 50
tcgtccattatatcatgatttttca

SEQ ID NO: 22571 - DNA, 25 bp, Artificial
  probe
  misc_feature (1)..(25): SEQ ID NO: 4471; WAN0249HX_at; Start 5; Stop 29
ctctatcctttatctatagtctcgt

SEQ ID NO: 22572 - DNA, 25 bp, Artificial
  probe
  misc_feature (1)..(25): SEQ ID NO: 4471; WAN0249HX_at; Start 15; Stop 39
tatctatagtctcgtccattatatc

SEQ ID NO: 22573 - DNA, 25 bp, Artificial
  probe
  misc_feature (1)..(25): SEQ ID NO: 4471; WAN0249HX_at; Start 7; Stop 31
ctatcctttatctatagtctcgtcc

SEQ ID NO: 22574 - DNA, 25 bp, Artificial
  probe
  misc_feature (1)..(25): SEQ ID NO: 4471; WAN0249HX_at; Start 13; Stop 37
tttatctatagtctcgtccattata

SEQ ID NO: 22575 - DNA, 25 bp, Artificial
  probe
  misc_feature (1)..(25): SEQ ID NO: 4471; WAN0249HX_at; Start 3; Stop 27
ctctctatcctttatctatagtctc

SEQ ID NO: 22576 - DNA, 25 bp, Artificial
  probe
  misc_feature (1)..(25): SEQ ID NO: 3668; WAN0249HY_at; Start 31; Stop 55
aactgagtttcttttcatcaggagg

SEQ ID NO: 22577 - DNA, 25 bp, Artificial
  probe
  misc_feature (1)..(25): SEQ ID NO: 3668; WAN0249HY_at; Start 33; Stop 57
ctgagtttcttttcatcaggaggag

SEQ ID NO: 22578 - DNA, 25 bp, Artificial
  probe
  misc_feature (1)..(25): SEQ ID NO: 3668; WAN0249HY_at; Start 35; Stop 59
gagtttcttttcatcaggaggagag

SEQ ID NO: 22579 - DNA, 25 bp, Artificial
  probe
  misc_feature (1)..(25): SEQ ID NO: 3668; WAN0249HY_at; Start 26; Stop 50
aaaccaactgagtttcttttcatca

SEQ ID NO: 22580 - DNA, 25 bp, Artificial
  probe
  misc_feature (1)..(25): SEQ ID NO: 3668; WAN0249HY_at; Start 30; Stop 54
caactgagtttcttttcatcaggag

SEQ ID NO: 22581 - DNA, 25 bp, Artificial
  probe
  misc_feature (1)..(25): SEQ ID NO: 3668; WAN0249HY_at; Start 29; Stop 53
ccaactgagtttcttttcatcagga

SEQ ID NO: 22582 - DNA, 25 bp, Artificial
  probe
  misc_feature (1)..(25): SEQ ID NO: 3668; WAN0249HY_at; Start 25; Stop 49
gaaaccaactgagtttcttttcatc

SEQ ID NO: 22583 - DNA, 25 bp, Artificial
  probe
  misc_feature (1)..(25): SEQ ID NO: 3668; WAN0249HY_at; Start 36; Stop 60
agtttcttttcatcaggaggagaga

SEQ ID NO: 22584 - DNA, 25 bp, Artificial
  probe
  misc_feature (1)..(25): SEQ ID NO: 3668; WAN0249HY_at; Start 27; Stop 51
aaccaactgagtttcttttcatcag

SEQ ID NO: 22585 - DNA, 25 bp, Artificial
  probe
  misc_feature (1)..(25): SEQ ID NO: 3668; WAN0249HY_at; Start 32; Stop 56
actgagtttcttttcatcaggagga

SEQ ID NO: 22586 - DNA, 25 bp, Artificial
  probe
  misc_feature (1)..(25): SEQ ID NO: 3668; WAN0249HY_at; Start 28; Stop 52
accaactgagtttcttttcatcagg

SEQ ID NO: 22587 - DNA, 25 bp, Artificial
  probe
  misc_feature (1)..(25): SEQ ID NO: 3668; WAN0249HY_at; Start 34; Stop 58
tgagtttcttttcatcaggaggaga

SEQ ID NO: 22588 - DNA, 25 bp, Artificial
  probe
  misc_feature (1)..(25): SEQ ID NO: 4650; WAN0249HZ_at; Start 2; Stop 26
ctctcctcctgatgaaaagaaactc

SEQ ID NO: 22589 - DNA, 25 bp, Artificial
  probe
  misc_feature (1)..(25): SEQ ID NO: 4650; WAN0249HZ_at; Start 11; Stop 35
tgatgaaaagaaactcagttggttt

SEQ ID NO: 22590 - DNA, 25 bp, Artificial
  probe
  misc_feature (1)..(25): SEQ ID NO: 4650; WAN0249HZ_at; Start 5; Stop 29
tcctcctgatgaaaagaaactcagt

SEQ ID NO: 22591 - DNA, 25 bp, Artificial
  probe
  misc_feature (1)..(25): SEQ ID NO: 4650; WAN0249HZ_at; Start 1; Stop 25
tctctcctcctgatgaaaagaaact

SEQ ID NO: 22592 - DNA, 25 bp, Artificial
  probe
  misc_feature (1)..(25): SEQ ID NO: 4650; WAN0249HZ_at; Start 8; Stop 32
tcctgatgaaaagaaactcagttgg

SEQ ID NO: 22593 - DNA, 25 bp, Artificial
  probe
  misc_feature (1)..(25): SEQ ID NO: 4650; WAN0249HZ_at; Start 9; Stop 33
cctgatgaaaagaaactcagttggt

SEQ ID NO: 22594 - DNA, 25 bp, Artificial
  probe
  misc_feature (1)..(25): SEQ ID NO: 4650; WAN0249HZ_at; Start 7; Stop 31
ctcctgatgaaaagaaactcagttg

SEQ ID NO: 22595 - DNA, 25 bp, Artificial
  probe
  misc_feature (1)..(25): SEQ ID NO: 4650; WAN0249HZ_at; Start 12; Stop 36
gatgaaaagaaactcagttggtttc

SEQ ID NO: 22596 - DNA, 25 bp, Artificial
  probe
  misc_feature (1)..(25): SEQ ID NO: 4650; WAN0249HZ_at; Start 4; Stop 28
ctcctcctgatgaaaagaaactcag

SEQ ID NO: 22597 - DNA, 25 bp, Artificial
  probe
  misc_feature (1)..(25): SEQ ID NO: 4650; WAN0249HZ_at; Start 10; Stop 34
ctgatgaaaagaaactcagttggtt

SEQ ID NO: 22598 - DNA, 25 bp, Artificial
  probe
  misc_feature (1)..(25): SEQ ID NO: 4650; WAN0249HZ_at; Start 3; Stop 27
tctcctcctgatgaaaagaaactca

SEQ ID NO: 22599 - DNA, 25 bp, Artificial
  probe
  misc_feature (1)..(25): SEQ ID NO: 4650; WAN0249HZ_at; Start 6; Stop 30
cctcctgatgaaaagaaactcagtt

SEQ ID NO: 22600 - DNA, 25 bp, Artificial
  probe
  misc_feature (1)..(25): SEQ ID NO: 4397; WAN0249I2_at; Start 26; Stop 50
cagagacctaacaaactatttcaag

SEQ ID NO: 22601 - DNA, 25 bp, Artificial
  probe
  misc_feature (1)..(25): SEQ ID NO: 4397; WAN0249I2_at; Start 77; Stop 101
cagttctgttaaataggcccgagag

SEQ ID NO: 22602 - DNA, 25 bp, Artificial
  probe
  misc_feature (1)..(25): SEQ ID NO: 4397; WAN0249I2_at; Start 76; Stop 100
acagttctgttaaataggcccgaga

SEQ ID NO: 22603 - DNA, 25 bp, Artificial
  probe
  misc_feature (1)..(25): SEQ ID NO: 4397; WAN0249I2_at; Start 58; Stop 82
gtttgttacaaggaatagacagttc

SEQ ID NO: 22604 - DNA, 25 bp, Artificial
  probe
  misc_feature (1)..(25): SEQ ID NO: 4397; WAN0249I2_at; Start 80; Stop 104
ttctgttaaataggcccgagagggc

SEQ ID NO: 22605 - DNA, 25 bp, Artificial
  probe
  misc_feature (1)..(25): SEQ ID NO: 4397; WAN0249I2_at; Start 56; Stop 80
tagtttgttacaaggaatagacagt

SEQ ID NO: 22606 - DNA, 25 bp, Artificial
  probe
  misc_feature (1)..(25): SEQ ID NO: 4397; WAN0249I2_at; Start 136; Stop 160
caggtactcatttgaaaggaatttg

SEQ ID NO: 22607 - DNA, 25 bp, Artificial
  probe
  misc_feature (1)..(25): SEQ ID NO: 4397; WAN0249I2_at; Start 78; Stop 102
agttctgttaaataggcccgagagg

SEQ ID NO: 22608 - DNA, 25 bp, Artificial
  probe
  misc_feature (1)..(25): SEQ ID NO: 4397; WAN0249I2_at; Start 22; Stop 46
gtgacagagacctaacaaactattt

SEQ ID NO: 22609 - DNA, 25 bp, Artificial
  probe
  misc_feature (1)..(25): SEQ ID NO: 4397; WAN0249I2_at; Start 82; Stop 106
ctgttaaataggcccgagagggctt

SEQ ID NO: 22610 - DNA, 25 bp, Artificial
  probe
  misc_feature (1)..(25): SEQ ID NO: 4397; WAN0249I2_at; Start 28; Stop 52
gagacctaacaaactatttcaagta

SEQ ID NO: 22611 - DNA, 25 bp, Artificial
  probe
  misc_feature (1)..(25): SEQ ID NO: 4397; WAN0249I2_at; Start 11; Stop 35
gtgtcagttttgtgacagagaccta

SEQ ID NO: 22612 - DNA, 25 bp, Artificial
  probe
  misc_feature (1)..(25): SEQ ID NO: 4397; WAN0249I2_at; Start 138; Stop 162
ggtactcatttgaaaggaatttgaa

SEQ ID NO: 22613 - DNA, 25 bp, Artificial
  probe
  misc_feature (1)..(25): SEQ ID NO: 4397; WAN0249I2_at; Start 17; Stop 41
gttttgtgacagagacctaacaaac

SEQ ID NO: 22614 - DNA, 25 bp, Artificial
  probe
  misc_feature (1)..(25): SEQ ID NO: 4397; WAN0249I2_at; Start 73; Stop 97
tagacagttctgttaaataggcccg

SEQ ID NO: 22615 - DNA, 25 bp, Artificial
  probe
  misc_feature (1)..(25): SEQ ID NO: 4397; WAN0249I2_at; Start 54; Stop 78
cctagtttgttacaaggaatagaca

SEQ ID NO: 22616 - DNA, 25 bp, Artificial
  probe
  misc_feature (1)..(25): SEQ ID NO: 4397; WAN0249I2_at; Start 134; Stop 158
gacaggtactcatttgaaaggaatt

SEQ ID NO: 22617 - DNA, 25 bp, Artificial
  probe
  misc_feature (1)..(25): SEQ ID NO: 4397; WAN0249I2_at; Start 140; Stop 164
tactcatttgaaaggaatttgaaag

SEQ ID NO: 22618 - DNA, 25 bp, Artificial
  probe
  misc_feature (1)..(25): SEQ ID NO: 4397; WAN0249I2_at; Start 9; Stop 33
ttgtgtcagttttgtgacagagacc

SEQ ID NO: 22619 - DNA, 25 bp, Artificial
  probe
  misc_feature (1)..(25): SEQ ID NO: 4397; WAN0249I2_at; Start 15; Stop 39
cagttttgtgacagagacctaacaa

SEQ ID NO: 22620 - DNA, 25 bp, Artificial
  probe
  misc_feature (1)..(25): SEQ ID NO: 4397; WAN0249I2_at; Start 14; Stop 38
tcagttttgtgacagagacctaaca

SEQ ID NO: 22621 - DNA, 25 bp, Artificial
  probe
  misc_feature (1)..(25): SEQ ID NO: 4397; WAN0249I2_at; Start 60; Stop 84
ttgttacaaggaatagacagttctg

SEQ ID NO: 22622 - DNA, 25 bp, Artificial
  probe
  misc_feature (1)..(25): SEQ ID NO: 4397; WAN0249I2_at; Start 24; Stop 48
gacagagacctaacaaactatttca

SEQ ID NO: 22623 - DNA, 25 bp, Artificial
  probe
  misc_feature (1)..(25): SEQ ID NO: 4397; WAN0249I2_at; Start 19; Stop 43
tttgtgacagagacctaacaaacta

SEQ ID NO: 22624 - DNA, 25 bp, Artificial
  probe
  misc_feature (1)..(25): SEQ ID NO: 4397; WAN0249I2_at; Start 132; Stop 156
tagacaggtactcatttgaaaggaa

SEQ ID NO: 22625 - DNA, 25 bp, Artificial
  probe
  misc_feature (1)..(25): SEQ ID NO: 4397; WAN0249I2_at; Start 74; Stop 98
agacagttctgttaaataggcccga

SEQ ID NO: 22626 - DNA, 25 bp, Artificial
  probe
  misc_feature (1)..(25): SEQ ID NO: 4397; WAN0249I2_at; Start 141; Stop 165
actcatttgaaaggaatttgaaaga

SEQ ID NO: 22627 - DNA, 25 bp, Artificial
  probe
  misc_feature (1)..(25): SEQ ID NO: 4397; WAN0249I2_at; Start 2; Stop 26
aaaaagattgtgtcagttttgtgac

SEQ ID NO: 22628 - DNA, 25 bp, Artificial
  probe
  misc_feature (1)..(25): SEQ ID NO: 4397; WAN0249I2_at; Start 5; Stop 29
aagattgtgtcagttttgtgacaga

SEQ ID NO: 22629 - DNA, 25 bp, Artificial
  probe
  misc_feature (1)..(25): SEQ ID NO: 4397; WAN0249I2_at; Start 62; Stop 86
gttacaaggaatagacagttctgtt

SEQ ID NO: 22630 - DNA, 25 bp, Artificial
  probe
  misc_feature (1)..(25): SEQ ID NO: 4397; WAN0249I2_at; Start 64; Stop 88
tacaaggaatagacagttctgttaa

SEQ ID NO: 22631 - DNA, 25 bp, Artificial
  probe
  misc_feature (1)..(25): SEQ ID NO: 4397; WAN0249I2_at; Start 75; Stop 99
gacagttctgttaaataggcccgag

SEQ ID NO: 22632 - DNA, 25 bp, Artificial
  probe
  misc_feature (1)..(25): SEQ ID NO: 4397; WAN0249I2_at; Start 21; Stop 45
tgtgacagagacctaacaaactatt

SEQ ID NO: 22633 - DNA, 25 bp, Artificial
  probe
  misc_feature (1)..(25): SEQ ID NO: 4397; WAN0249I2_at; Start 23; Stop 47
tgacagagacctaacaaactatttc

SEQ ID NO: 22634 - DNA, 25 bp, Artificial
  probe
  misc_feature (1)..(25): SEQ ID NO: 4662; WAN0249I3_at; Start 6; Stop 30
caaattcctttcaaatgagtacctg

SEQ ID NO: 22635 - DNA, 25 bp, Artificial
  probe
  misc_feature (1)..(25): SEQ ID NO: 4662; WAN0249I3_at; Start 1; Stop 25
tctttcaaattcctttcaaatgagt

SEQ ID NO: 22636 - DNA, 25 bp, Artificial
  probe
  misc_feature (1)..(25): SEQ ID NO: 4662; WAN0249I3_at; Start 65; Stop 89
ctctcgggcctatttaacagaactg

SEQ ID NO: 22637 - DNA, 25 bp, Artificial
  probe
  misc_feature (1)..(25): SEQ ID NO: 4662; WAN0249I3_at; Start 69; Stop 93
cgggcctatttaacagaactgtcta

SEQ ID NO: 22638 - DNA, 25 bp, Artificial
  probe
  misc_feature (1)..(25): SEQ ID NO: 4662; WAN0249I3_at; Start 82; Stop 106
cagaactgtctattccttgtaacaa

SEQ ID NO: 22639 - DNA, 25 bp, Artificial
  probe
  misc_feature (1)..(25): SEQ ID NO: 4662; WAN0249I3_at; Start 62; Stop 86
gccctctcgggcctatttaacagaa

SEQ ID NO: 22640 - DNA, 25 bp, Artificial
  probe
  misc_feature (1)..(25): SEQ ID NO: 4662; WAN0249I3_at; Start 73; Stop 97
cctatttaacagaactgtctattcc

SEQ ID NO: 22641 - DNA, 25 bp, Artificial
  probe
  misc_feature (1)..(25): SEQ ID NO: 4662; WAN0249I3_at; Start 84; Stop 108
gaactgtctattccttgtaacaaac

SEQ ID NO: 22642 - DNA, 25 bp, Artificial
  probe
  misc_feature (1)..(25): SEQ ID NO: 4662; WAN0249I3_at; Start 128; Stop 152
tgttaggtctctgtcacaaaactga

SEQ ID NO: 22643 - DNA, 25 bp, Artificial
  probe
  misc_feature (1)..(25): SEQ ID NO: 4662; WAN0249I3_at; Start 66; Stop 90
tctcgggcctatttaacagaactgt

SEQ ID NO: 22644 - DNA, 25 bp, Artificial
  probe
  misc_feature (1)..(25): SEQ ID NO: 4662; WAN0249I3_at; Start 129; Stop 153
gttaggtctctgtcacaaaactgac

SEQ ID NO: 22645 - DNA, 25 bp, Artificial
  probe
  misc_feature (1)..(25): SEQ ID NO: 4662; WAN0249I3_at; Start 120; Stop 144
aaatagtttgttaggtctctgtcac

SEQ ID NO: 22646 - DNA, 25 bp, Artificial
  probe
  misc_feature (1)..(25): SEQ ID NO: 4662; WAN0249I3_at; Start 134; Stop 158
gtctctgtcacaaaactgacacaat

SEQ ID NO: 22647 - DNA, 25 bp, Artificial
  probe
  misc_feature (1)..(25): SEQ ID NO: 4662; WAN0249I3_at; Start 79; Stop 103
taacagaactgtctattccttgtaa

SEQ ID NO: 22648 - DNA, 25 bp, Artificial
  probe
  misc_feature (1)..(25): SEQ ID NO: 4662; WAN0249I3_at; Start 119; Stop 143
gaaatagtttgttaggtctctgtca

SEQ ID NO: 22649 - DNA, 25 bp, Artificial
  probe
  misc_feature (1)..(25): SEQ ID NO: 4662; WAN0249I3_at; Start 123; Stop 147
tagtttgttaggtctctgtcacaaa

SEQ ID NO: 22650 - DNA, 25 bp, Artificial
  probe
  misc_feature (1)..(25): SEQ ID NO: 4662; WAN0249I3_at; Start 88; Stop 112
tgtctattccttgtaacaaactagg

SEQ ID NO: 22651 - DNA, 25 bp, Artificial
  probe
  misc_feature (1)..(25): SEQ ID NO: 4662; WAN0249I3_at; Start 70; Stop 94
gggcctatttaacagaactgtctat

SEQ ID NO: 22652 - DNA, 25 bp, Artificial
  probe
  misc_feature (1)..(25): SEQ ID NO: 4662; WAN0249I3_at; Start 11; Stop 35
tcctttcaaatgagtacctgtctat

SEQ ID NO: 22653 - DNA, 25 bp, Artificial
  probe
  misc_feature (1)..(25): SEQ ID NO: 4662; WAN0249I3_at; Start 68; Stop 92
tcgggcctatttaacagaactgtct

SEQ ID NO: 22654 - DNA, 25 bp, Artificial
  probe
  misc_feature (1)..(25): SEQ ID NO: 4662; WAN0249I3_at; Start 10; Stop 34
ttcctttcaaatgagtacctgtcta

SEQ ID NO: 22655 - DNA, 25 bp, Artificial
  probe
  misc_feature (1)..(25): SEQ ID NO: 4662; WAN0249I3_at; Start 8; Stop 32
aattcctttcaaatgagtacctgtc

SEQ ID NO: 22656 - DNA, 25 bp, Artificial
  probe
  misc_feature (1)..(25): SEQ ID NO: 4662; WAN0249I3_at; Start 114; Stop 138
tacttgaaatagtttgttaggtctc

SEQ ID NO: 22657 - DNA, 25 bp, Artificial
  probe
  misc_feature (1)..(25): SEQ ID NO: 4662; WAN0249I3_at; Start 4; Stop 28
ttcaaattcctttcaaatgagtacc

SEQ ID NO: 22658 - DNA, 25 bp, Artificial
  probe
  misc_feature (1)..(25): SEQ ID NO: 4662; WAN0249I3_at; Start 140; Stop 164
gtcacaaaactgacacaatcttttt

SEQ ID NO: 22659 - DNA, 25 bp, Artificial
  probe
  misc_feature (1)..(25): SEQ ID NO: 4662; WAN0249I3_at; Start 64; Stop 88
cctctcgggcctatttaacagaact

SEQ ID NO: 22660 - DNA, 25 bp, Artificial
  probe
  misc_feature (1)..(25): SEQ ID NO: 4662; WAN0249I3_at; Start 127; Stop 151
ttgttaggtctctgtcacaaaactg

SEQ ID NO: 22661 - DNA, 25 bp, Artificial
  probe
  misc_feature (1)..(25): SEQ ID NO: 4662; WAN0249I3_at; Start 133; Stop 157
ggtctctgtcacaaaactgacacaa

SEQ ID NO: 22662 - DNA, 25 bp, Artificial
  probe
  misc_feature (1)..(25): SEQ ID NO: 4662; WAN0249I3_at; Start 71; Stop 95
ggcctatttaacagaactgtctatt

SEQ ID NO: 22663 - DNA, 25 bp, Artificial
  probe
  misc_feature (1)..(25): SEQ ID NO: 4662; WAN0249I3_at; Start 116; Stop 140
cttgaaatagtttgttaggtctctg

SEQ ID NO: 22664 - DNA, 25 bp, Artificial
  probe
  misc_feature (1)..(25): SEQ ID NO: 4662; WAN0249I3_at; Start 137; Stop 161
tctgtcacaaaactgacacaatctt

SEQ ID NO: 22665 - DNA, 25 bp, Artificial
  probe
  misc_feature (1)..(25): SEQ ID NO: 4662; WAN0249I3_at; Start 67; Stop 91
ctcgggcctatttaacagaactgtc

SEQ ID NO: 22666 - DNA, 25 bp, Artificial
  probe
  misc_feature (1)..(25): SEQ ID NO: 4662; WAN0249I3_at; Start 131; Stop 155
taggtctctgtcacaaaactgacac

SEQ ID NO: 22667 - DNA, 25 bp, Artificial
  probe
  misc_feature (1)..(25): SEQ ID NO: 4662; WAN0249I3_at; Start 121; Stop 145
aatagtttgttaggtctctgtcaca

SEQ ID NO: 22668 - DNA, 25 bp, Artificial
  probe
  misc_feature (1)..(25): SEQ ID NO: 3514; WAN0249I4_at; Start 31; Stop 55
taggctagctccacaagaaaaccga

SEQ ID NO: 22669 - DNA, 25 bp, Artificial
  probe
  misc_feature (1)..(25): SEQ ID NO: 3514; WAN0249I4_at; Start 136; Stop 160
tagaataacacaaagcccctgcgat

SEQ ID NO: 22670 - DNA, 25 bp, Artificial
  probe
  misc_feature (1)..(25): SEQ ID NO: 3514; WAN0249I4_at; Start 69; Stop 93
ggcaatgcaaccgagcgtgtcgcaa

SEQ ID NO: 22671 - DNA, 25 bp, Artificial
  probe
  misc_feature (1)..(25): SEQ ID NO: 3514; WAN0249I4_at; Start 153; Stop 177
cctgcgattgcaagggatttgttgc

SEQ ID NO: 22672 - DNA, 25 bp, Artificial
  probe
  misc_feature (1)..(25): SEQ ID NO: 3514; WAN0249I4_at; Start 19; Stop 43
tatttaagataataggctagctcca

SEQ ID NO: 22673 - DNA, 25 bp, Artificial
  probe
  misc_feature (1)..(25): SEQ ID NO: 3514; WAN0249I4_at; Start 144; Stop 168
cacaaagcccctgcgattgcaaggg

SEQ ID NO: 22674 - DNA, 25 bp, Artificial
  probe
  misc_feature (1)..(25): SEQ ID NO: 3514; WAN0249I4_at; Start 66; Stop 90
cgtggcaatgcaaccgagcgtgtcg

SEQ ID NO: 22675 - DNA, 25 bp, Artificial
  probe
  misc_feature (1)..(25): SEQ ID NO: 3514; WAN0249I4_at; Start 84; Stop 108
cgtgtcgcaacctcttgcatcaaaa

SEQ ID NO: 22676 - DNA, 25 bp, Artificial
  probe
  misc_feature (1)..(25): SEQ ID NO: 3514; WAN0249I4_at; Start 81; Stop 105
gagcgtgtcgcaacctcttgcatca

SEQ ID NO: 22677 - DNA, 25 bp, Artificial
  probe
  misc_feature (1)..(25): SEQ ID NO: 3514; WAN0249I4_at; Start 70; Stop 94
gcaatgcaaccgagcgtgtcgcaac

SEQ ID NO: 22678 - DNA, 25 bp, Artificial
  probe
  misc_feature (1)..(25): SEQ ID NO: 3514; WAN0249I4_at; Start 50; Stop 74
aaccgacgcggtgttgcgtggcaat

SEQ ID NO: 22679 - DNA, 25 bp, Artificial
  probe
  misc_feature (1)..(25): SEQ ID NO: 3514; WAN0249I4_at; Start 55; Stop 79
acgcggtgttgcgtggcaatgcaac

SEQ ID NO: 22680 - DNA, 25 bp, Artificial
  probe
  misc_feature (1)..(25): SEQ ID NO: 3514; WAN0249I4_at; Start 163; Stop 187
caagggatttgttgctgttttttcg

SEQ ID NO: 22681 - DNA, 25 bp, Artificial
  probe
  misc_feature (1)..(25): SEQ ID NO: 3514; WAN0249I4_at; Start 44; Stop 68
caagaaaaccgacgcggtgttgcgt

SEQ ID NO: 22682 - DNA, 25 bp, Artificial
  probe
  misc_feature (1)..(25): SEQ ID NO: 3514; WAN0249I4_at; Start 77; Stop 101
aaccgagcgtgtcgcaacctcttgc

SEQ ID NO: 22683 - DNA, 25 bp, Artificial
  probe
  misc_feature (1)..(25): SEQ ID NO: 3514; WAN0249I4_at; Start 142; Stop 166
aacacaaagcccctgcgattgcaag

SEQ ID NO: 22684 - DNA, 25 bp, Artificial
  probe
  misc_feature (1)..(25): SEQ ID NO: 3514; WAN0249I4_at; Start 38; Stop 62
gctccacaagaaaaccgacgcggtg

SEQ ID NO: 22685 - DNA, 25 bp, Artificial
  probe
  misc_feature (1)..(25): SEQ ID NO: 3514; WAN0249I4_at; Start 42; Stop 66
cacaagaaaaccgacgcggtgttgc

SEQ ID NO: 22686 - DNA, 25 bp, Artificial
  probe
  misc_feature (1)..(25): SEQ ID NO: 3514; WAN0249I4_at; Start 26; Stop 50
gataataggctagctccacaagaaa

SEQ ID NO: 22687 - DNA, 25 bp, Artificial
  probe
  misc_feature (1)..(25): SEQ ID NO: 3514; WAN0249I4_at; Start 6; Stop 30
tctccttttcgtctatttaagataa

SEQ ID NO: 22688 - DNA, 25 bp, Artificial
  probe
  misc_feature (1)..(25): SEQ ID NO: 3514; WAN0249I4_at; Start 33; Stop 57
ggctagctccacaagaaaaccgacg

SEQ ID NO: 22689 - DNA, 25 bp, Artificial
  probe
  misc_feature (1)..(25): SEQ ID NO: 3514; WAN0249I4_at; Start 110; Stop 134
taaggctgtaatttacagcaccata

SEQ ID NO: 22690 - DNA, 25 bp, Artificial
  probe
  misc_feature (1)..(25): SEQ ID NO: 3514; WAN0249I4_at; Start 116; Stop 140
tgtaatttacagcaccataatagaa

SEQ ID NO: 22691 - DNA, 25 bp, Artificial
  probe
  misc_feature (1)..(25): SEQ ID NO: 3514; WAN0249I4_at; Start 23; Stop 47
taagataataggctagctccacaag

SEQ ID NO: 22692 - DNA, 25 bp, Artificial
  probe
  misc_feature (1)..(25): SEQ ID NO: 3514; WAN0249I4_at; Start 61; Stop 85
tgttgcgtggcaatgcaaccgagcg

SEQ ID NO: 22693 - DNA, 25 bp, Artificial
  probe
  misc_feature (1)..(25): SEQ ID NO: 3514; WAN0249I4_at; Start 28; Stop 52
taataggctagctccacaagaaaac

SEQ ID NO: 22694 - DNA, 25 bp, Artificial
  probe
  misc_feature (1)..(25): SEQ ID NO: 3514; WAN0249I4_at; Start 123; Stop 147
tacagcaccataatagaataacaca

SEQ ID NO: 22695 - DNA, 25 bp, Artificial
  probe
  misc_feature (1)..(25): SEQ ID NO: 3514; WAN0249I4_at; Start 146; Stop 170
caaagcccctgcgattgcaagggat

SEQ ID NO: 22696 - DNA, 25 bp, Artificial
  probe
  misc_feature (1)..(25): SEQ ID NO: 3514; WAN0249I4_at; Start 48; Stop 72
aaaaccgacgcggtgttgcgtggca

SEQ ID NO: 22697 - DNA, 25 bp, Artificial
  probe
  misc_feature (1)..(25): SEQ ID NO: 3514; WAN0249I4_at; Start 133; Stop 157
taatagaataacacaaagcccctgc

SEQ ID NO: 22698 - DNA, 25 bp, Artificial
  probe
  misc_feature (1)..(25): SEQ ID NO: 3514; WAN0249I4_at; Start 234; Stop 258
gggattttcttctatatttcttcta

SEQ ID NO: 22699 - DNA, 25 bp, Artificial
  probe
  misc_feature (1)..(25): SEQ ID NO: 3514; WAN0249I4_at; Start 74; Stop 98
tgcaaccgagcgtgtcgcaacctct

SEQ ID NO: 22700 - DNA, 25 bp, Artificial
  probe
  misc_feature (1)..(25): SEQ ID NO: 3514; WAN0249I4_at; Start 63; Stop 87
ttgcgtggcaatgcaaccgagcgtg

SEQ ID NO: 22701 - DNA, 25 bp, Artificial
  probe
  misc_feature (1)..(25): SEQ ID NO: 3514; WAN0249I4_at; Start 150; Stop 174
gcccctgcgattgcaagggatttgt

SEQ ID NO: 22702 - DNA, 25 bp, Artificial
  probe
  misc_feature (1)..(25): SEQ ID NO: 3486; WAN0249I5_at; Start 166; Stop 190
gcaagaggttgcgacacgctcggtt

SEQ ID NO: 22703 - DNA, 25 bp, Artificial
  probe
  misc_feature (1)..(25): SEQ ID NO: 3486; WAN0249I5_at; Start 182; Stop 206
cgctcggttgcattgccacgcaaca

SEQ ID NO: 22704 - DNA, 25 bp, Artificial
  probe
  misc_feature (1)..(25): SEQ ID NO: 3486; WAN0249I5_at; Start 180; Stop 204
cacgctcggttgcattgccacgcaa

SEQ ID NO: 22705 - DNA, 25 bp, Artificial
  probe
  misc_feature (1)..(25): SEQ ID NO: 3486; WAN0249I5_at; Start 174; Stop 198
ttgcgacacgctcggttgcattgcc

SEQ ID NO: 22706 - DNA, 25 bp, Artificial
  probe
  misc_feature (1)..(25): SEQ ID NO: 3486; WAN0249I5_at; Start 217; Stop 241
tttcttgtggagctagcctattatc

SEQ ID NO: 22707 - DNA, 25 bp, Artificial
  probe
  misc_feature (1)..(25): SEQ ID NO: 3486; WAN0249I5_at; Start 115; Stop 139
ggctttgtgttattctattatggtg

SEQ ID NO: 22708 - DNA, 25 bp, Artificial
  probe
  misc_feature (1)..(25): SEQ ID NO: 3486; WAN0249I5_at; Start 80; Stop 104
cgaaaaaacagcaacaaatcccttg

SEQ ID NO: 22709 - DNA, 25 bp, Artificial
  probe
  misc_feature (1)..(25): SEQ ID NO: 3486; WAN0249I5_at; Start 188; Stop 212
gttgcattgccacgcaacaccgcgt

SEQ ID NO: 22710 - DNA, 25 bp, Artificial
  probe
  misc_feature (1)..(25): SEQ ID NO: 3486; WAN0249I5_at; Start 204; Stop 228
acaccgcgtcggttttcttgtggag

SEQ ID NO: 22711 - DNA, 25 bp, Artificial
  probe
  misc_feature (1)..(25): SEQ ID NO: 3486; WAN0249I5_at; Start 128; Stop 152
tctattatggtgctgtaaattacag

SEQ ID NO: 22712 - DNA, 25 bp, Artificial
  probe
  misc_feature (1)..(25): SEQ ID NO: 3486; WAN0249I5_at; Start 90; Stop 114
gcaacaaatcccttgcaatcgcagg

SEQ ID NO: 22713 - DNA, 25 bp, Artificial
  probe
  misc_feature (1)..(25): SEQ ID NO: 3486; WAN0249I5_at; Start 163; Stop 187
gatgcaagaggttgcgacacgctcg

SEQ ID NO: 22714 - DNA, 25 bp, Artificial
  probe
  misc_feature (1)..(25): SEQ ID NO: 3486; WAN0249I5_at; Start 213; Stop 237
cggttttcttgtggagctagcctat

SEQ ID NO: 22715 - DNA, 25 bp, Artificial
  probe
  misc_feature (1)..(25): SEQ ID NO: 3486; WAN0249I5_at; Start 91; Stop 115
caacaaatcccttgcaatcgcaggg

SEQ ID NO: 22716 - DNA, 25 bp, Artificial
  probe
  misc_feature (1)..(25): SEQ ID NO: 3486; WAN0249I5_at; Start 100; Stop 124
ccttgcaatcgcaggggctttgtgt

SEQ ID NO: 22717 - DNA, 25 bp, Artificial
  probe
  misc_feature (1)..(25): SEQ ID NO: 3486; WAN0249I5_at; Start 133; Stop 157
tatggtgctgtaaattacagcctta

SEQ ID NO: 22718 - DNA, 25 bp, Artificial
  probe
  misc_feature (1)..(25): SEQ ID NO: 3486; WAN0249I5_at; Start 222; Stop 246
tgtggagctagcctattatcttaaa

SEQ ID NO: 22719 - DNA, 25 bp, Artificial
  probe
  misc_feature (1)..(25): SEQ ID NO: 3486; WAN0249I5_at; Start 177; Stop 201
cgacacgctcggttgcattgccacg

SEQ ID NO: 22720 - DNA, 25 bp, Artificial
  probe
  misc_feature (1)..(25): SEQ ID NO: 3486; WAN0249I5_at; Start 169; Stop 193
agaggttgcgacacgctcggttgca

SEQ ID NO: 22721 - DNA, 25 bp, Artificial
  probe
  misc_feature (1)..(25): SEQ ID NO: 3486; WAN0249I5_at; Start 9; Stop 33
tagaagaaatatagaagaaaatccc

SEQ ID NO: 22722 - DNA, 25 bp, Artificial
  probe
  misc_feature (1)..(25): SEQ ID NO: 3486; WAN0249I5_at; Start 193; Stop 217
attgccacgcaacaccgcgtcggtt

SEQ ID NO: 22723 - DNA, 25 bp, Artificial
  probe
  misc_feature (1)..(25): SEQ ID NO: 3486; WAN0249I5_at; Start 187; Stop 211
ggttgcattgccacgcaacaccgcg

SEQ ID NO: 22724 - DNA, 25 bp, Artificial
  probe
  misc_feature (1)..(25): SEQ ID NO: 3486; WAN0249I5_at; Start 225; Stop 249
ggagctagcctattatcttaaatag

SEQ ID NO: 22725 - DNA, 25 bp, Artificial
  probe
  misc_feature (1)..(25): SEQ ID NO: 3486; WAN0249I5_at; Start 120; Stop 144
tgtgttattctattatggtgctgta

SEQ ID NO: 22726 - DNA, 25 bp, Artificial
  probe
  misc_feature (1)..(25): SEQ ID NO: 3486; WAN0249I5_at; Start 11; Stop 35
gaagaaatatagaagaaaatcccta

SEQ ID NO: 22727 - DNA, 25 bp, Artificial
  probe
  misc_feature (1)..(25): SEQ ID NO: 3486; WAN0249I5_at; Start 207; Stop 231
ccgcgtcggttttcttgtggagcta

SEQ ID NO: 22728 - DNA, 25 bp, Artificial
  probe
  misc_feature (1)..(25): SEQ ID NO: 3486; WAN0249I5_at; Start 195; Stop 219
tgccacgcaacaccgcgtcggtttt

SEQ ID NO: 22729 - DNA, 25 bp, Artificial
  probe
  misc_feature (1)..(25): SEQ ID NO: 3486; WAN0249I5_at; Start 159; Stop 183
ttttgatgcaagaggttgcgacacg

SEQ ID NO: 22730 - DNA, 25 bp, Artificial
  probe
  misc_feature (1)..(25): SEQ ID NO: 3486; WAN0249I5_at; Start 201; Stop 225
gcaacaccgcgtcggttttcttgtg

SEQ ID NO: 22731 - DNA, 25 bp, Artificial
  probe
  misc_feature (1)..(25): SEQ ID NO: 3486; WAN0249I5_at; Start 238; Stop 262
tatcttaaatagacgaaaaggagaa

SEQ ID NO: 22732 - DNA, 25 bp, Artificial
  probe
  misc_feature (1)..(25): SEQ ID NO: 3486; WAN0249I5_at; Start 210; Stop 234
cgtcggttttcttgtggagctagcc

SEQ ID NO: 22733 - DNA, 25 bp, Artificial
  probe
  misc_feature (1)..(25): SEQ ID NO: 3486; WAN0249I5_at; Start 161; Stop 185
ttgatgcaagaggttgcgacacgct

SEQ ID NO: 22734 - DNA, 25 bp, Artificial
  probe
  misc_feature (1)..(25): SEQ ID NO: 3486; WAN0249I5_at; Start 130; Stop 154
tattatggtgctgtaaattacagcc

SEQ ID NO: 22735 - DNA, 25 bp, Artificial
  probe
  misc_feature (1)..(25): SEQ ID NO: 3486; WAN0249I5_at; Start 219; Stop 243
tcttgtggagctagcctattatctt

SEQ ID NO: 22736 - DNA, 25 bp, Artificial
  probe
  misc_feature (1)..(25): SEQ ID NO: 240; WAN0249I6_at; Start 14; Stop 38
atctcgctaatcctttttaatccag

SEQ ID NO: 22737 - DNA, 25 bp, Artificial
  probe
  misc_feature (1)..(25): SEQ ID NO: 240; WAN0249I6_at; Start 78; Stop 102
tctcattgaattggttttgaggagt

SEQ ID NO: 22738 - DNA, 25 bp, Artificial
  probe
  misc_feature (1)..(25): SEQ ID NO: 240; WAN0249I6_at; Start 12; Stop 36
taatctcgctaatcctttttaatcc

SEQ ID NO: 22739 - DNA, 25 bp, Artificial
  probe
  misc_feature (1)..(25): SEQ ID NO: 240; WAN0249I6_at; Start 20; Stop 44
ctaatcctttttaatccagaataag

SEQ ID NO: 22740 - DNA, 25 bp, Artificial
  probe
  misc_feature (1)..(25): SEQ ID NO: 240; WAN0249I6_at; Start 81; Stop 105
cattgaattggttttgaggagttag

SEQ ID NO: 22741 - DNA, 25 bp, Artificial
  probe
  misc_feature (1)..(25): SEQ ID NO: 240; WAN0249I6_at; Start 18; Stop 42
cgctaatcctttttaatccagaata

SEQ ID NO: 22742 - DNA, 25 bp, Artificial
  probe
  misc_feature (1)..(25): SEQ ID NO: 240; WAN0249I6_at; Start 15; Stop 39
tctcgctaatcctttttaatccaga

SEQ ID NO: 22743 - DNA, 25 bp, Artificial
  probe
  misc_feature (1)..(25): SEQ ID NO: 240; WAN0249I6_at; Start 6; Stop 30
cgattctaatctcgctaatcctttt

SEQ ID NO: 22744 - DNA, 25 bp, Artificial
  probe
  misc_feature (1)..(25): SEQ ID NO: 240; WAN0249I6_at; Start 2; Stop 26
aggtcgattctaatctcgctaatcc

SEQ ID NO: 22745 - DNA, 25 bp, Artificial
  probe
  misc_feature (1)..(25): SEQ ID NO: 240; WAN0249I6_at; Start 29; Stop 53
tttaatccagaataagggaaatatg

SEQ ID NO: 22746 - DNA, 25 bp, Artificial
  probe
  misc_feature (1)..(25): SEQ ID NO: 240; WAN0249I6_at; Start 77; Stop 101
gtctcattgaattggttttgaggag

SEQ ID NO: 22747 - DNA, 25 bp, Artificial
  probe
  misc_feature (1)..(25): SEQ ID NO: 240; WAN0249I6_at; Start 30; Stop 54
ttaatccagaataagggaaatatgt

SEQ ID NO: 22748 - DNA, 25 bp, Artificial
  probe
  misc_feature (1)..(25): SEQ ID NO: 240; WAN0249I6_at; Start 38; Stop 62
gaataagggaaatatgttatacttg

SEQ ID NO: 22749 - DNA, 25 bp, Artificial
  probe
  misc_feature (1)..(25): SEQ ID NO: 240; WAN0249I6_at; Start 9; Stop 33
ttctaatctcgctaatcctttttaa

SEQ ID NO: 22750 - DNA, 25 bp, Artificial
  probe
  misc_feature (1)..(25): SEQ ID NO: 240; WAN0249I6_at; Start 4; Stop 28
gtcgattctaatctcgctaatcctt

SEQ ID NO: 22751 - DNA, 25 bp, Artificial
  probe
  misc_feature (1)..(25): SEQ ID NO: 240; WAN0249I6_at; Start 40; Stop 64
ataagggaaatatgttatacttgtt

SEQ ID NO: 22752 - DNA, 25 bp, Artificial
  probe
  misc_feature (1)..(25): SEQ ID NO: 240; WAN0249I6_at; Start 75; Stop 99
aagtctcattgaattggttttgagg

SEQ ID NO: 22753 - DNA, 25 bp, Artificial
  probe
  misc_feature (1)..(25): SEQ ID NO: 240; WAN0249I6_at; Start 36; Stop 60
cagaataagggaaatatgttatact

SEQ ID NO: 22754 - DNA, 25 bp, Artificial
  probe
  misc_feature (1)..(25): SEQ ID NO: 240; WAN0249I6_at; Start 83; Stop 107
ttgaattggttttgaggagttagaa

SEQ ID NO: 22755 - DNA, 25 bp, Artificial
  probe
  misc_feature (1)..(25): SEQ ID NO: 240; WAN0249I6_at; Start 67; Stop 91
taagaaaaaagtctcattgaattgg

SEQ ID NO: 22756 - DNA, 25 bp, Artificial
  probe
  misc_feature (1)..(25): SEQ ID NO: 240; WAN0249I6_at; Start 69; Stop 93
agaaaaaagtctcattgaattggtt

SEQ ID NO: 22757 - DNA, 25 bp, Artificial
  probe
  misc_feature (1)..(25): SEQ ID NO: 240; WAN0249I6_at; Start 16; Stop 40
ctcgctaatcctttttaatccagaa

SEQ ID NO: 22758 - DNA, 25 bp, Artificial
  probe
  misc_feature (1)..(25): SEQ ID NO: 240; WAN0249I6_at; Start 5; Stop 29
tcgattctaatctcgctaatccttt

SEQ ID NO: 22759 - DNA, 25 bp, Artificial
  probe
  misc_feature (1)..(25): SEQ ID NO: 240; WAN0249I6_at; Start 31; Stop 55
taatccagaataagggaaatatgtt

SEQ ID NO: 22760 - DNA, 25 bp, Artificial
  probe
  misc_feature (1)..(25): SEQ ID NO: 240; WAN0249I6_at; Start 19; Stop 43
gctaatcctttttaatccagaataa

SEQ ID NO: 22761 - DNA, 25 bp, Artificial
  probe
  misc_feature (1)..(25): SEQ ID NO: 240; WAN0249I6_at; Start 8; Stop 32
attctaatctcgctaatccttttta

SEQ ID NO: 22762 - DNA, 25 bp, Artificial
  probe
  misc_feature (1)..(25): SEQ ID NO: 240; WAN0249I6_at; Start 3; Stop 27
ggtcgattctaatctcgctaatcct

SEQ ID NO: 22763 - DNA, 25 bp, Artificial
  probe
  misc_feature (1)..(25): SEQ ID NO: 240; WAN0249I6_at; Start 35; Stop 59
ccagaataagggaaatatgttatac

SEQ ID NO: 22764 - DNA, 25 bp, Artificial
  probe
  misc_feature (1)..(25): SEQ ID NO: 240; WAN0249I6_at; Start 34; Stop 58
tccagaataagggaaatatgttata

SEQ ID NO: 22765 - DNA, 25 bp, Artificial
  probe
  misc_feature (1)..(25): SEQ ID NO: 240; WAN0249I6_at; Start 32; Stop 56
aatccagaataagggaaatatgtta

SEQ ID NO: 22766 - DNA, 25 bp, Artificial
  probe
  misc_feature (1)..(25): SEQ ID NO: 240; WAN0249I6_at; Start 17; Stop 41
tcgctaatcctttttaatccagaat

SEQ ID NO: 22767 - DNA, 25 bp, Artificial
  probe
  misc_feature (1)..(25): SEQ ID NO: 240; WAN0249I6_at; Start 68; Stop 92
aagaaaaaagtctcattgaattggt

SEQ ID NO: 22768 - DNA, 25 bp, Artificial
  probe
  misc_feature (1)..(25): SEQ ID NO: 240; WAN0249I6_at; Start 13; Stop 37
aatctcgctaatcctttttaatcca

SEQ ID NO: 22769 - DNA, 25 bp, Artificial
  probe
  misc_feature (1)..(25): SEQ ID NO: 240; WAN0249I6_at; Start 1; Stop 25
aaggtcgattctaatctcgctaatc

SEQ ID NO: 22770 - DNA, 25 bp, Artificial
  probe
  misc_feature (1)..(25): SEQ ID NO: 4842; WAN0249I7_at; Start 69; Stop 93
tctggattaaaaaggattagcgaga

SEQ ID NO: 22771 - DNA, 25 bp, Artificial
  probe
  misc_feature (1)..(25): SEQ ID NO: 4842; WAN0249I7_at; Start 17; Stop 41
ccaattcaatgagacttttttctta

SEQ ID NO: 22772 - DNA, 25 bp, Artificial
  probe
  misc_feature (1)..(25): SEQ ID NO: 4842; WAN0249I7_at; Start 72; Stop 96
ggattaaaaaggattagcgagatta

SEQ ID NO: 22773 - DNA, 25 bp, Artificial
  probe
  misc_feature (1)..(25): SEQ ID NO: 4842; WAN0249I7_at; Start 82; Stop 106
ggattagcgagattagaatcgacct

SEQ ID NO: 22774 - DNA, 25 bp, Artificial
  probe
  misc_feature (1)..(25): SEQ ID NO: 4842; WAN0249I7_at; Start 81; Stop 105
aggattagcgagattagaatcgacc

SEQ ID NO: 22775 - DNA, 25 bp, Artificial
  probe
  misc_feature (1)..(25): SEQ ID NO: 4842; WAN0249I7_at; Start 73; Stop 97
gattaaaaaggattagcgagattag

SEQ ID NO: 22776 - DNA, 25 bp, Artificial
  probe
  misc_feature (1)..(25): SEQ ID NO: 4842; WAN0249I7_at; Start 9; Stop 33
cctcaaaaccaattcaatgagactt

SEQ ID NO: 22777 - DNA, 25 bp, Artificial
  probe
  misc_feature (1)..(25): SEQ ID NO: 4842; WAN0249I7_at; Start 75; Stop 99
ttaaaaaggattagcgagattagaa

SEQ ID NO: 22778 - DNA, 25 bp, Artificial
  probe
  misc_feature (1)..(25): SEQ ID NO: 4842; WAN0249I7_at; Start 67; Stop 91
attctggattaaaaaggattagcga

SEQ ID NO: 22779 - DNA, 25 bp, Artificial
  probe
  misc_feature (1)..(25): SEQ ID NO: 4842; WAN0249I7_at; Start 5; Stop 29
aactcctcaaaaccaattcaatgag

SEQ ID NO: 22780 - DNA, 25 bp, Artificial
  probe
  misc_feature (1)..(25): SEQ ID NO: 4842; WAN0249I7_at; Start 50; Stop 74
tataacatatttcccttattctgga

SEQ ID NO: 22781 - DNA, 25 bp, Artificial
  probe
  misc_feature (1)..(25): SEQ ID NO: 4842; WAN0249I7_at; Start 68; Stop 92
ttctggattaaaaaggattagcgag

SEQ ID NO: 22782 - DNA, 25 bp, Artificial
  probe
  misc_feature (1)..(25): SEQ ID NO: 4842; WAN0249I7_at; Start 52; Stop 76
taacatatttcccttattctggatt

SEQ ID NO: 22783 - DNA, 25 bp, Artificial
  probe
  misc_feature (1)..(25): SEQ ID NO: 4842; WAN0249I7_at; Start 4; Stop 28
taactcctcaaaaccaattcaatga

SEQ ID NO: 22784 - DNA, 25 bp, Artificial
  probe
  misc_feature (1)..(25): SEQ ID NO: 4842; WAN0249I7_at; Start 12; Stop 36
caaaaccaattcaatgagacttttt

SEQ ID NO: 22785 - DNA, 25 bp, Artificial
  probe
  misc_feature (1)..(25): SEQ ID NO: 4842; WAN0249I7_at; Start 11; Stop 35
tcaaaaccaattcaatgagactttt

SEQ ID NO: 22786 - DNA, 25 bp, Artificial
  probe
  misc_feature (1)..(25): SEQ ID NO: 4842; WAN0249I7_at; Start 6; Stop 30
actcctcaaaaccaattcaatgaga

SEQ ID NO: 22787 - DNA, 25 bp, Artificial
  probe
  misc_feature (1)..(25): SEQ ID NO: 4842; WAN0249I7_at; Start 1; Stop 25
ttctaactcctcaaaaccaattcaa

SEQ ID NO: 22788 - DNA, 25 bp, Artificial
  probe
  misc_feature (1)..(25): SEQ ID NO: 4842; WAN0249I7_at; Start 66; Stop 90
tattctggattaaaaaggattagcg

SEQ ID NO: 22789 - DNA, 25 bp, Artificial
  probe
  misc_feature (1)..(25): SEQ ID NO: 4842; WAN0249I7_at; Start 76; Stop 100
taaaaaggattagcgagattagaat

SEQ ID NO: 22790 - DNA, 25 bp, Artificial
  probe
  misc_feature (1)..(25): SEQ ID NO: 4842; WAN0249I7_at; Start 15; Stop 39
aaccaattcaatgagacttttttct

SEQ ID NO: 22791 - DNA, 25 bp, Artificial
  probe
  misc_feature (1)..(25): SEQ ID NO: 4842; WAN0249I7_at; Start 70; Stop 94
ctggattaaaaaggattagcgagat

SEQ ID NO: 22792 - DNA, 25 bp, Artificial
  probe
  misc_feature (1)..(25): SEQ ID NO: 4842; WAN0249I7_at; Start 8; Stop 32
tcctcaaaaccaattcaatgagact

SEQ ID NO: 22793 - DNA, 25 bp, Artificial
  probe
  misc_feature (1)..(25): SEQ ID NO: 4842; WAN0249I7_at; Start 18; Stop 42
caattcaatgagacttttttcttaa

SEQ ID NO: 22794 - DNA, 25 bp, Artificial
  probe
  misc_feature (1)..(25): SEQ ID NO: 4842; WAN0249I7_at; Start 49; Stop 73
gtataacatatttcccttattctgg

SEQ ID NO: 22795 - DNA, 25 bp, Artificial
  probe
  misc_feature (1)..(25): SEQ ID NO: 4842; WAN0249I7_at; Start 80; Stop 104
aaggattagcgagattagaatcgac

SEQ ID NO: 22796 - DNA, 25 bp, Artificial
  probe
  misc_feature (1)..(25): SEQ ID NO: 4842; WAN0249I7_at; Start 44; Stop 68
aacaagtataacatatttcccttat

SEQ ID NO: 22797 - DNA, 25 bp, Artificial
  probe
  misc_feature (1)..(25): SEQ ID NO: 4842; WAN0249I7_at; Start 53; Stop 77
aacatatttcccttattctggatta

SEQ ID NO: 22798 - DNA, 25 bp, Artificial
  probe
  misc_feature (1)..(25): SEQ ID NO: 4842; WAN0249I7_at; Start 71; Stop 95
tggattaaaaaggattagcgagatt

SEQ ID NO: 22799 - DNA, 25 bp, Artificial
  probe
  misc_feature (1)..(25): SEQ ID NO: 4842; WAN0249I7_at; Start 79; Stop 103
aaaggattagcgagattagaatcga

SEQ ID NO: 22800 - DNA, 25 bp, Artificial
  probe
  misc_feature (1)..(25): SEQ ID NO: 4842; WAN0249I7_at; Start 3; Stop 27
ctaactcctcaaaaccaattcaatg

SEQ ID NO: 22801 - DNA, 25 bp, Artificial
  probe
  misc_feature (1)..(25): SEQ ID NO: 4842; WAN0249I7_at; Start 55; Stop 79
catatttcccttattctggattaaa

SEQ ID NO: 22802 - DNA, 25 bp, Artificial
  probe
  misc_feature (1)..(25): SEQ ID NO: 4842; WAN0249I7_at; Start 83; Stop 107
gattagcgagattagaatcgacctt

SEQ ID NO: 22803 - DNA, 25 bp, Artificial
  probe
  misc_feature (1)..(25): SEQ ID NO: 4842; WAN0249I7_at; Start 78; Stop 102
aaaaggattagcgagattagaatcg

SEQ ID NO: 22804 - DNA, 25 bp, Artificial
  probe
  misc_feature (1)..(25): SEQ ID NO: 4651; WAN0249I8_at; Start 58; Stop 82
taaaatcatacagtgtgtccttggg

SEQ ID NO: 22805 - DNA, 25 bp, Artificial
  probe
  misc_feature (1)..(25): SEQ ID NO: 4651; WAN0249I8_at; Start 56; Stop 80
gataaaatcatacagtgtgtccttg

SEQ ID NO: 22806 - DNA, 25 bp, Artificial
  probe
  misc_feature (1)..(25): SEQ ID NO: 4651; WAN0249I8_at; Start 1; Stop 25
tctcttattataccatagttcttat

SEQ ID NO: 22807 - DNA, 25 bp, Artificial
  probe
  misc_feature (1)..(25): SEQ ID NO: 4651; WAN0249I8_at; Start 23; Stop 47
tatacatagttcgtgacagttccta

SEQ ID NO: 22808 - DNA, 25 bp, Artificial
  probe
  misc_feature (1)..(25): SEQ ID NO: 4651; WAN0249I8_at; Start 98; Stop 122
gggactgtctttcccagcttcggag

SEQ ID NO: 22809 - DNA, 25 bp, Artificial
  probe
  misc_feature (1)..(25): SEQ ID NO: 4651; WAN0249I8_at; Start 76; Stop 100
ccttgggcacactgtatgaactggg

SEQ ID NO: 22810 - DNA, 25 bp, Artificial
  probe
  misc_feature (1)..(25): SEQ ID NO: 4651; WAN0249I8_at; Start 64; Stop 88
catacagtgtgtccttgggcacact

SEQ ID NO: 22811 - DNA, 25 bp, Artificial
  probe
  misc_feature (1)..(25): SEQ ID NO: 4651; WAN0249I8_at; Start 81; Stop 105
ggcacactgtatgaactgggactgt

SEQ ID NO: 22812 - DNA, 25 bp, Artificial
  probe
  misc_feature (1)..(25): SEQ ID NO: 4651; WAN0249I8_at; Start 97; Stop 121
tgggactgtctttcccagcttcgga

SEQ ID NO: 22813 - DNA, 25 bp, Artificial
  probe
  misc_feature (1)..(25): SEQ ID NO: 4651; WAN0249I8_at; Start 21; Stop 45
cttatacatagttcgtgacagttcc

SEQ ID NO: 22814 - DNA, 25 bp, Artificial
  probe
  misc_feature (1)..(25): SEQ ID NO: 4651; WAN0249I8_at; Start 103; Stop 127
tgtctttcccagcttcggaggtaaa

SEQ ID NO: 22815 - DNA, 25 bp, Artificial
  probe
  misc_feature (1)..(25): SEQ ID NO: 4651; WAN0249I8_at; Start 80; Stop 104
gggcacactgtatgaactgggactg

SEQ ID NO: 22816 - DNA, 25 bp, Artificial
  probe
  misc_feature (1)..(25): SEQ ID NO: 4651; WAN0249I8_at; Start 75; Stop 99
tccttgggcacactgtatgaactgg

SEQ ID NO: 22817 - DNA, 25 bp, Artificial
  probe
  misc_feature (1)..(25): SEQ ID NO: 4651; WAN0249I8_at; Start 11; Stop 35
taccatagttcttatacatagttcg

SEQ ID NO: 22818 - DNA, 25 bp, Artificial
  probe
  misc_feature (1)..(25): SEQ ID NO: 4651; WAN0249I8_at; Start 92; Stop 116
tgaactgggactgtctttcccagct

SEQ ID NO: 22819 - DNA, 25 bp, Artificial
  probe
  misc_feature (1)..(25): SEQ ID NO: 4651; WAN0249I8_at; Start 85; Stop 109
cactgtatgaactgggactgtcttt

SEQ ID NO: 22820 - DNA, 25 bp, Artificial
  probe
  misc_feature (1)..(25): SEQ ID NO: 4651; WAN0249I8_at; Start 14; Stop 38
catagttcttatacatagttcgtga

SEQ ID NO: 22821 - DNA, 25 bp, Artificial
  probe
  misc_feature (1)..(25): SEQ ID NO: 4651; WAN0249I8_at; Start 27; Stop 51
catagttcgtgacagttcctacttt

SEQ ID NO: 22822 - DNA, 25 bp, Artificial
  probe
  misc_feature (1)..(25): SEQ ID NO: 4651; WAN0249I8_at; Start 25; Stop 49
tacatagttcgtgacagttcctact

SEQ ID NO: 22823 - DNA, 25 bp, Artificial
  probe
  misc_feature (1)..(25): SEQ ID NO: 4651; WAN0249I8_at; Start 63; Stop 87
tcatacagtgtgtccttgggcacac

SEQ ID NO: 22824 - DNA, 25 bp, Artificial
  probe
  misc_feature (1)..(25): SEQ ID NO: 4651; WAN0249I8_at; Start 73; Stop 97
tgtccttgggcacactgtatgaact

SEQ ID NO: 22825 - DNA, 25 bp, Artificial
  probe
  misc_feature (1)..(25): SEQ ID NO: 4651; WAN0249I8_at; Start 100; Stop 124
gactgtctttcccagcttcggaggt

SEQ ID NO: 22826 - DNA, 25 bp, Artificial
  probe
  misc_feature (1)..(25): SEQ ID NO: 4651; WAN0249I8_at; Start 53; Stop 77
tttgataaaatcatacagtgtgtcc

SEQ ID NO: 22827 - DNA, 25 bp, Artificial
  probe
  misc_feature (1)..(25): SEQ ID NO: 4651; WAN0249I8_at; Start 77; Stop 101
cttgggcacactgtatgaactggga

SEQ ID NO: 22828 - DNA, 25 bp, Artificial
  probe
  misc_feature (1)..(25): SEQ ID NO: 4651; WAN0249I8_at; Start 90; Stop 114
tatgaactgggactgtctttcccag

SEQ ID NO: 22829 - DNA, 25 bp, Artificial
  probe
  misc_feature (1)..(25): SEQ ID NO: 4651; WAN0249I8_at; Start 34; Stop 58
cgtgacagttcctactttttttgat

SEQ ID NO: 22830 - DNA, 25 bp, Artificial
  probe
  misc_feature (1)..(25): SEQ ID NO: 4651; WAN0249I8_at; Start 86; Stop 110
actgtatgaactgggactgtctttc

SEQ ID NO: 22831 - DNA, 25 bp, Artificial
  probe
  misc_feature (1)..(25): SEQ ID NO: 4651; WAN0249I8_at; Start 61; Stop 85
aatcatacagtgtgtccttgggcac

SEQ ID NO: 22832 - DNA, 25 bp, Artificial
  probe
  misc_feature (1)..(25): SEQ ID NO: 4651; WAN0249I8_at; Start 101; Stop 125
actgtctttcccagcttcggaggta

SEQ ID NO: 22833 - DNA, 25 bp, Artificial
  probe
  misc_feature (1)..(25): SEQ ID NO: 4651; WAN0249I8_at; Start 83; Stop 107
cacactgtatgaactgggactgtct

SEQ ID NO: 22834 - DNA, 25 bp, Artificial
  probe
  misc_feature (1)..(25): SEQ ID NO: 4651; WAN0249I8_at; Start 60; Stop 84
aaatcatacagtgtgtccttgggca

SEQ ID NO: 22835 - DNA, 25 bp, Artificial
  probe
  misc_feature (1)..(25): SEQ ID NO: 4651; WAN0249I8_at; Start 88; Stop 112
tgtatgaactgggactgtctttccc

SEQ ID NO: 22836 - DNA, 25 bp, Artificial
  probe
  misc_feature (1)..(25): SEQ ID NO: 4651; WAN0249I8_at; Start 17; Stop 41
agttcttatacatagttcgtgacag

SEQ ID NO: 22837 - DNA, 25 bp, Artificial
  probe
  misc_feature (1)..(25): SEQ ID NO: 4651; WAN0249I8_at; Start 79; Stop 103
tgggcacactgtatgaactgggact

SEQ ID NO: 22838 - DNA, 25 bp, Artificial
  probe
  misc_feature (1)..(25): SEQ ID NO: 5948; WAN0249I9_at; Start 5; Stop 29
tacctccgaagctgggaaagacagt

SEQ ID NO: 22839 - DNA, 25 bp, Artificial
  probe
  misc_feature (1)..(25): SEQ ID NO: 5948; WAN0249I9_at; Start 26; Stop 50
cagtcccagttcatacagtgtgccc

SEQ ID NO: 22840 - DNA, 25 bp, Artificial
  probe
  misc_feature (1)..(25): SEQ ID NO: 5948; WAN0249I9_at; Start 86; Stop 110
gaactgtcacgaactatgtataaga

SEQ ID NO: 22841 - DNA, 25 bp, Artificial
  probe
  misc_feature (1)..(25): SEQ ID NO: 5948; WAN0249I9_at; Start 82; Stop 106
gtaggaactgtcacgaactatgtat

SEQ ID NO: 22842 - DNA, 25 bp, Artificial
  probe
  misc_feature (1)..(25): SEQ ID NO: 5948; WAN0249I9_at; Start 15; Stop 39
gctgggaaagacagtcccagttcat

SEQ ID NO: 22843 - DNA, 25 bp, Artificial
  probe
  misc_feature (1)..(25): SEQ ID NO: 5948; WAN0249I9_at; Start 27; Stop 51
agtcccagttcatacagtgtgccca

SEQ ID NO: 22844 - DNA, 25 bp, Artificial
  probe
  misc_feature (1)..(25): SEQ ID NO: 5948; WAN0249I9_at; Start 54; Stop 78
gacacactgtatgattttatcaaaa

SEQ ID NO: 22845 - DNA, 25 bp, Artificial
  probe
  misc_feature (1)..(25): SEQ ID NO: 5948; WAN0249I9_at; Start 46; Stop 70
tgcccaaggacacactgtatgattt

SEQ ID NO: 22846 - DNA, 25 bp, Artificial
  probe
  misc_feature (1)..(25): SEQ ID NO: 5948; WAN0249I9_at; Start 71; Stop 95
tatcaaaaaaagtaggaactgtcac

SEQ ID NO: 22847 - DNA, 25 bp, Artificial
  probe
  misc_feature (1)..(25): SEQ ID NO: 5948; WAN0249I9_at; Start 33; Stop 57
agttcatacagtgtgcccaaggaca

SEQ ID NO: 22848 - DNA, 25 bp, Artificial
  probe
  misc_feature (1)..(25): SEQ ID NO: 5948; WAN0249I9_at; Start 29; Stop 53
tcccagttcatacagtgtgcccaag

SEQ ID NO: 22849 - DNA, 25 bp, Artificial
  probe
  misc_feature (1)..(25): SEQ ID NO: 5948; WAN0249I9_at; Start 11; Stop 35
cgaagctgggaaagacagtcccagt

SEQ ID NO: 22850 - DNA, 25 bp, Artificial
  probe
  misc_feature (1)..(25): SEQ ID NO: 5948; WAN0249I9_at; Start 48; Stop 72
cccaaggacacactgtatgatttta

SEQ ID NO: 22851 - DNA, 25 bp, Artificial
  probe
  misc_feature (1)..(25): SEQ ID NO: 5948; WAN0249I9_at; Start 44; Stop 68
tgtgcccaaggacacactgtatgat

SEQ ID NO: 22852 - DNA, 25 bp, Artificial
  probe
  misc_feature (1)..(25): SEQ ID NO: 5948; WAN0249I9_at; Start 31; Stop 55
ccagttcatacagtgtgcccaagga

SEQ ID NO: 22853 - DNA, 25 bp, Artificial
  probe
  misc_feature (1)..(25): SEQ ID NO: 5948; WAN0249I9_at; Start 6; Stop 30
acctccgaagctgggaaagacagtc

SEQ ID NO: 22854 - DNA, 25 bp, Artificial
  probe
  misc_feature (1)..(25): SEQ ID NO: 5948; WAN0249I9_at; Start 89; Stop 113
ctgtcacgaactatgtataagaact

SEQ ID NO: 22855 - DNA, 25 bp, Artificial
  probe
  misc_feature (1)..(25): SEQ ID NO: 5948; WAN0249I9_at; Start 17; Stop 41
tgggaaagacagtcccagttcatac

SEQ ID NO: 22856 - DNA, 25 bp, Artificial
  probe
  misc_feature (1)..(25): SEQ ID NO: 5948; WAN0249I9_at; Start 32; Stop 56
cagttcatacagtgtgcccaaggac

SEQ ID NO: 22857 - DNA, 25 bp, Artificial
  probe
  misc_feature (1)..(25): SEQ ID NO: 5948; WAN0249I9_at; Start 35; Stop 59
ttcatacagtgtgcccaaggacaca

SEQ ID NO: 22858 - DNA, 25 bp, Artificial
  probe
  misc_feature (1)..(25): SEQ ID NO: 5948; WAN0249I9_at; Start 79; Stop 103
aaagtaggaactgtcacgaactatg

SEQ ID NO: 22859 - DNA, 25 bp, Artificial
  probe
  misc_feature (1)..(25): SEQ ID NO: 5948; WAN0249I9_at; Start 23; Stop 47
agacagtcccagttcatacagtgtg

SEQ ID NO: 22860 - DNA, 25 bp, Artificial
  probe
  misc_feature (1)..(25): SEQ ID NO: 5948; WAN0249I9_at; Start 104; Stop 128
tataagaactatggtataataagag

SEQ ID NO: 22861 - DNA, 25 bp, Artificial
  probe
  misc_feature (1)..(25): SEQ ID NO: 5948; WAN0249I9_at; Start 21; Stop 45
aaagacagtcccagttcatacagtg

SEQ ID NO: 22862 - DNA, 25 bp, Artificial
  probe
  misc_feature (1)..(25): SEQ ID NO: 5948; WAN0249I9_at; Start 8; Stop 32
ctccgaagctgggaaagacagtccc

SEQ ID NO: 22863 - DNA, 25 bp, Artificial
  probe
  misc_feature (1)..(25): SEQ ID NO: 5948; WAN0249I9_at; Start 20; Stop 44
gaaagacagtcccagttcatacagt

SEQ ID NO: 22864 - DNA, 25 bp, Artificial
  probe
  misc_feature (1)..(25): SEQ ID NO: 5948; WAN0249I9_at; Start 24; Stop 48
gacagtcccagttcatacagtgtgc

SEQ ID NO: 22865 - DNA, 25 bp, Artificial
  probe
  misc_feature (1)..(25): SEQ ID NO: 5948; WAN0249I9_at; Start 95; Stop 119
cgaactatgtataagaactatggta

SEQ ID NO: 22866 - DNA, 25 bp, Artificial
  probe
  misc_feature (1)..(25): SEQ ID NO: 5948; WAN0249I9_at; Start 9; Stop 33
tccgaagctgggaaagacagtccca

SEQ ID NO: 22867 - DNA, 25 bp, Artificial
  probe
  misc_feature (1)..(25): SEQ ID NO: 5948; WAN0249I9_at; Start 3; Stop 27
tttacctccgaagctgggaaagaca

SEQ ID NO: 22868 - DNA, 25 bp, Artificial
  probe
  misc_feature (1)..(25): SEQ ID NO: 5948; WAN0249I9_at; Start 52; Stop 76
aggacacactgtatgattttatcaa

SEQ ID NO: 22869 - DNA, 25 bp, Artificial
  probe
  misc_feature (1)..(25): SEQ ID NO: 5948; WAN0249I9_at; Start 93; Stop 117
cacgaactatgtataagaactatgg

SEQ ID NO: 22870 - DNA, 25 bp, Artificial
  probe
  misc_feature (1)..(25): SEQ ID NO: 5948; WAN0249I9_at; Start 85; Stop 109
ggaactgtcacgaactatgtataag

SEQ ID NO: 22871 - DNA, 25 bp, Artificial
  probe
  misc_feature (1)..(25): SEQ ID NO: 5948; WAN0249I9_at; Start 50; Stop 74
caaggacacactgtatgattttatc

SEQ ID NO: 22872 - DNA, 25 bp, Artificial
  probe
  misc_feature (1)..(25): SEQ ID NO: 361; WAN0249IA_at; Start 11; Stop 35
tcttcctttcattgtacactttatt

SEQ ID NO: 22873 - DNA, 25 bp, Artificial
  probe
  misc_feature (1)..(25): SEQ ID NO: 361; WAN0249IA_at; Start 20; Stop 44
cattgtacactttattctatcaaaa

SEQ ID NO: 22874 - DNA, 25 bp, Artificial
  probe
  misc_feature (1)..(25): SEQ ID NO: 361; WAN0249IA_at; Start 71; Stop 95
ttaggatttttttatatcaattcca

SEQ ID NO: 22875 - DNA, 25 bp, Artificial
  probe
  misc_feature (1)..(25): SEQ ID NO: 361; WAN0249IA_at; Start 72; Stop 96
taggatttttttatatcaattccat

SEQ ID NO: 22876 - DNA, 25 bp, Artificial
  probe
  misc_feature (1)..(25): SEQ ID NO: 361; WAN0249IA_at; Start 12; Stop 36
cttcctttcattgtacactttattc

SEQ ID NO: 22877 - DNA, 25 bp, Artificial
  probe
  misc_feature (1)..(25): SEQ ID NO: 361; WAN0249IA_at; Start 14; Stop 38
tcctttcattgtacactttattcta

SEQ ID NO: 22878 - DNA, 25 bp, Artificial
  probe
  misc_feature (1)..(25): SEQ ID NO: 361; WAN0249IA_at; Start 19; Stop 43
tcattgtacactttattctatcaaa

SEQ ID NO: 22879 - DNA, 25 bp, Artificial
  probe
  misc_feature (1)..(25): SEQ ID NO: 361; WAN0249IA_at; Start 18; Stop 42
ttcattgtacactttattctatcaa

SEQ ID NO: 22880 - DNA, 25 bp, Artificial
  probe
  misc_feature (1)..(25): SEQ ID NO: 361; WAN0249IA_at; Start 10; Stop 34
ttcttcctttcattgtacactttat

SEQ ID NO: 22881 - DNA, 25 bp, Artificial
  probe
  misc_feature (1)..(25): SEQ ID NO: 361; WAN0249IA_at; Start 16; Stop 40
ctttcattgtacactttattctatc

SEQ ID NO: 22882 - DNA, 25 bp, Artificial
  probe
  misc_feature (1)..(25): SEQ ID NO: 361; WAN0249IA_at; Start 27; Stop 51
cactttattctatcaaaaaaagaag

SEQ ID NO: 22883 - DNA, 25 bp, Artificial
  probe
  misc_feature (1)..(25): SEQ ID NO: 361; WAN0249IA_at; Start 22; Stop 46
ttgtacactttattctatcaaaaaa

SEQ ID NO: 22884 - DNA, 25 bp, Artificial
  probe
  misc_feature (1)..(25): SEQ ID NO: 361; WAN0249IA_at; Start 13; Stop 37
ttcctttcattgtacactttattct

SEQ ID NO: 22885 - DNA, 25 bp, Artificial
  probe
  misc_feature (1)..(25): SEQ ID NO: 361; WAN0249IA_at; Start 15; Stop 39
cctttcattgtacactttattctat

SEQ ID NO: 22886 - DNA, 25 bp, Artificial
  probe
  misc_feature (1)..(25): SEQ ID NO: 361; WAN0249IA_at; Start 23; Stop 47
tgtacactttattctatcaaaaaaa

SEQ ID NO: 22887 - DNA, 25 bp, Artificial
  probe
  misc_feature (1)..(25): SEQ ID NO: 361; WAN0249IA_at; Start 25; Stop 49
tacactttattctatcaaaaaaaga

SEQ ID NO: 22888 - DNA, 25 bp, Artificial
  probe
  misc_feature (1)..(25): SEQ ID NO: 361; WAN0249IA_at; Start 21; Stop 45
attgtacactttattctatcaaaaa

SEQ ID NO: 22889 - DNA, 25 bp, Artificial
  probe
  misc_feature (1)..(25): SEQ ID NO: 361; WAN0249IA_at; Start 17; Stop 41
tttcattgtacactttattctatca

SEQ ID NO: 22890 - DNA, 25 bp, Artificial
  probe
  misc_feature (1)..(25): SEQ ID NO: 361; WAN0249IA_at; Start 73; Stop 97
aggatttttttatatcaattccatt

SEQ ID NO: 22891 - DNA, 25 bp, Artificial
  probe
  misc_feature (1)..(25): SEQ ID NO: 288; WAN0249IB_at; Start 55; Stop 79
tttgatagaataaagtgtacaatga

SEQ ID NO: 22892 - DNA, 25 bp, Artificial
  probe
  misc_feature (1)..(25): SEQ ID NO: 288; WAN0249IB_at; Start 59; Stop 83
atagaataaagtgtacaatgaaagg

SEQ ID NO: 22893 - DNA, 25 bp, Artificial
  probe
  misc_feature (1)..(25): SEQ ID NO: 288; WAN0249IB_at; Start 52; Stop 76
ttttttgatagaataaagtgtacaa

SEQ ID NO: 22894 - DNA, 25 bp, Artificial
  probe
  misc_feature (1)..(25): SEQ ID NO: 288; WAN0249IB_at; Start 62; Stop 86
gaataaagtgtacaatgaaaggaag

SEQ ID NO: 22895 - DNA, 25 bp, Artificial
  probe
  misc_feature (1)..(25): SEQ ID NO: 288; WAN0249IB_at; Start 57; Stop 81
tgatagaataaagtgtacaatgaaa

SEQ ID NO: 22896 - DNA, 25 bp, Artificial
  probe
  misc_feature (1)..(25): SEQ ID NO: 288; WAN0249IB_at; Start 54; Stop 78
ttttgatagaataaagtgtacaatg

SEQ ID NO: 22897 - DNA, 25 bp, Artificial
  probe
  misc_feature (1)..(25): SEQ ID NO: 288; WAN0249IB_at; Start 3; Stop 27
tggaattgatataaaaaaatcctaa

SEQ ID NO: 22898 - DNA, 25 bp, Artificial
  probe
  misc_feature (1)..(25): SEQ ID NO: 288; WAN0249IB_at; Start 53; Stop 77
tttttgatagaataaagtgtacaat

SEQ ID NO: 22899 - DNA, 25 bp, Artificial
  probe
  misc_feature (1)..(25): SEQ ID NO: 288; WAN0249IB_at; Start 58; Stop 82
gatagaataaagtgtacaatgaaag

SEQ ID NO: 22900 - DNA, 25 bp, Artificial
  probe
  misc_feature (1)..(25): SEQ ID NO: 288; WAN0249IB_at; Start 2; Stop 26
atggaattgatataaaaaaatccta

SEQ ID NO: 22901 - DNA, 25 bp, Artificial
  probe
  misc_feature (1)..(25): SEQ ID NO: 288; WAN0249IB_at; Start 60; Stop 84
tagaataaagtgtacaatgaaagga

SEQ ID NO: 22902 - DNA, 25 bp, Artificial
  probe
  misc_feature (1)..(25): SEQ ID NO: 288; WAN0249IB_at; Start 61; Stop 85
agaataaagtgtacaatgaaaggaa

SEQ ID NO: 22903 - DNA, 25 bp, Artificial
  probe
  misc_feature (1)..(25): SEQ ID NO: 288; WAN0249IB_at; Start 63; Stop 87
aataaagtgtacaatgaaaggaaga

SEQ ID NO: 22904 - DNA, 25 bp, Artificial
  probe
  misc_feature (1)..(25): SEQ ID NO: 288; WAN0249IB_at; Start 64; Stop 88
ataaagtgtacaatgaaaggaagaa

SEQ ID NO: 22905 - DNA, 25 bp, Artificial
  probe
  misc_feature (1)..(25): SEQ ID NO: 288; WAN0249IB_at; Start 1; Stop 25
aatggaattgatataaaaaaatcct

SEQ ID NO: 22906 - DNA, 25 bp, Artificial
  probe
  misc_feature (1)..(25): SEQ ID NO: 288; WAN0249IB_at; Start 56; Stop 80
ttgatagaataaagtgtacaatgaa

SEQ ID NO: 22907 - DNA, 25 bp, Artificial
  probe
  misc_feature (1)..(25): SEQ ID NO: 3500; WAN0249IC_at; Start 17; Stop 41
gaagagttggagaaatccagctctt

SEQ ID NO: 22908 - DNA, 25 bp, Artificial
  probe
  misc_feature (1)..(25): SEQ ID NO: 3500; WAN0249IC_at; Start 45; Stop 69
aaatatctccaaaaaataggtctat

SEQ ID NO: 22909 - DNA, 25 bp, Artificial
  probe
  misc_feature (1)..(25): SEQ ID NO: 3500; WAN0249IC_at; Start 26; Stop 50
gagaaatccagctcttttaaaatat

SEQ ID NO: 22910 - DNA, 25 bp, Artificial
  probe
  misc_feature (1)..(25): SEQ ID NO: 3500; WAN0249IC_at; Start 48; Stop 72
tatctccaaaaaataggtctatacc

SEQ ID NO: 22911 - DNA, 25 bp, Artificial
  probe
  misc_feature (1)..(25): SEQ ID NO: 3500; WAN0249IC_at; Start 3; Stop 27
tgtattaaaaaagagaagagttgga

SEQ ID NO: 22912 - DNA, 25 bp, Artificial
  probe
  misc_feature (1)..(25): SEQ ID NO: 3500; WAN0249IC_at; Start 47; Stop 71
atatctccaaaaaataggtctatac

SEQ ID NO: 22913 - DNA, 25 bp, Artificial
  probe
  misc_feature (1)..(25): SEQ ID NO: 3500; WAN0249IC_at; Start 15; Stop 39
gagaagagttggagaaatccagctc

SEQ ID NO: 22914 - DNA, 25 bp, Artificial
  probe
  misc_feature (1)..(25): SEQ ID NO: 3500; WAN0249IC_at; Start 18; Stop 42
aagagttggagaaatccagctcttt

SEQ ID NO: 22915 - DNA, 25 bp, Artificial
  probe
  misc_feature (1)..(25): SEQ ID NO: 3500; WAN0249IC_at; Start 25; Stop 49
ggagaaatccagctcttttaaaata

SEQ ID NO: 22916 - DNA, 25 bp, Artificial
  probe
  misc_feature (1)..(25): SEQ ID NO: 3500; WAN0249IC_at; Start 24; Stop 48
tggagaaatccagctcttttaaaat

SEQ ID NO: 22917 - DNA, 25 bp, Artificial
  probe
  misc_feature (1)..(25): SEQ ID NO: 3500; WAN0249IC_at; Start 23; Stop 47
ttggagaaatccagctcttttaaaa

SEQ ID NO: 22918 - DNA, 25 bp, Artificial
  probe
  misc_feature (1)..(25): SEQ ID NO: 3500; WAN0249IC_at; Start 51; Stop 75
ctccaaaaaataggtctataccatt

SEQ ID NO: 22919 - DNA, 25 bp, Artificial
  probe
  misc_feature (1)..(25): SEQ ID NO: 3500; WAN0249IC_at; Start 50; Stop 74
tctccaaaaaataggtctataccat

SEQ ID NO: 22920 - DNA, 25 bp, Artificial
  probe
  misc_feature (1)..(25): SEQ ID NO: 3500; WAN0249IC_at; Start 34; Stop 58
cagctcttttaaaatatctccaaaa

SEQ ID NO: 22921 - DNA, 25 bp, Artificial
  probe
  misc_feature (1)..(25): SEQ ID NO: 3500; WAN0249IC_at; Start 32; Stop 56
tccagctcttttaaaatatctccaa

SEQ ID NO: 22922 - DNA, 25 bp, Artificial
  probe
  misc_feature (1)..(25): SEQ ID NO: 3500; WAN0249IC_at; Start 59; Stop 83
aataggtctataccatttacaaata

SEQ ID NO: 22923 - DNA, 25 bp, Artificial
  probe
  misc_feature (1)..(25): SEQ ID NO: 3500; WAN0249IC_at; Start 16; Stop 40
agaagagttggagaaatccagctct

SEQ ID NO: 22924 - DNA, 25 bp, Artificial
  probe
  misc_feature (1)..(25): SEQ ID NO: 3500; WAN0249IC_at; Start 12; Stop 36
aaagagaagagttggagaaatccag

SEQ ID NO: 22925 - DNA, 25 bp, Artificial
  probe
  misc_feature (1)..(25): SEQ ID NO: 3500; WAN0249IC_at; Start 14; Stop 38
agagaagagttggagaaatccagct

SEQ ID NO: 22926 - DNA, 25 bp, Artificial
  probe
  misc_feature (1)..(25): SEQ ID NO: 3500; WAN0249IC_at; Start 61; Stop 85
taggtctataccatttacaaataaa

SEQ ID NO: 22927 - DNA, 25 bp, Artificial
  probe
  misc_feature (1)..(25): SEQ ID NO: 3500; WAN0249IC_at; Start 19; Stop 43
agagttggagaaatccagctctttt

SEQ ID NO: 22928 - DNA, 25 bp, Artificial
  probe
  misc_feature (1)..(25): SEQ ID NO: 3500; WAN0249IC_at; Start 22; Stop 46
gttggagaaatccagctcttttaaa

SEQ ID NO: 22929 - DNA, 25 bp, Artificial
  probe
  misc_feature (1)..(25): SEQ ID NO: 3500; WAN0249IC_at; Start 28; Stop 52
gaaatccagctcttttaaaatatct

SEQ ID NO: 22930 - DNA, 25 bp, Artificial
  probe
  misc_feature (1)..(25): SEQ ID NO: 3500; WAN0249IC_at; Start 5; Stop 29
tattaaaaaagagaagagttggaga

SEQ ID NO: 22931 - DNA, 25 bp, Artificial
  probe
  misc_feature (1)..(25): SEQ ID NO: 3500; WAN0249IC_at; Start 33; Stop 57
ccagctcttttaaaatatctccaaa

SEQ ID NO: 22932 - DNA, 25 bp, Artificial
  probe
  misc_feature (1)..(25): SEQ ID NO: 3500; WAN0249IC_at; Start 21; Stop 45
agttggagaaatccagctcttttaa

SEQ ID NO: 22933 - DNA, 25 bp, Artificial
  probe
  misc_feature (1)..(25): SEQ ID NO: 3500; WAN0249IC_at; Start 46; Stop 70
aatatctccaaaaaataggtctata

SEQ ID NO: 22934 - DNA, 25 bp, Artificial
  probe
  misc_feature (1)..(25): SEQ ID NO: 3500; WAN0249IC_at; Start 13; Stop 37
aagagaagagttggagaaatccagc

SEQ ID NO: 22935 - DNA, 25 bp, Artificial
  probe
  misc_feature (1)..(25): SEQ ID NO: 3500; WAN0249IC_at; Start 20; Stop 44
gagttggagaaatccagctctttta

SEQ ID NO: 22936 - DNA, 25 bp, Artificial
  probe
  misc_feature (1)..(25): SEQ ID NO: 3500; WAN0249IC_at; Start 58; Stop 82
aaataggtctataccatttacaaat

SEQ ID NO: 22937 - DNA, 25 bp, Artificial
  probe
  misc_feature (1)..(25): SEQ ID NO: 3500; WAN0249IC_at; Start 30; Stop 54
aatccagctcttttaaaatatctcc

SEQ ID NO: 22938 - DNA, 25 bp, Artificial
  probe
  misc_feature (1)..(25): SEQ ID NO: 3500; WAN0249IC_at; Start 1; Stop 25
cttgtattaaaaaagagaagagttg

SEQ ID NO: 22939 - DNA, 25 bp, Artificial
  probe
  misc_feature (1)..(25): SEQ ID NO: 3500; WAN0249IC_at; Start 11; Stop 35
aaaagagaagagttggagaaatcca

SEQ ID NO: 22940 - DNA, 25 bp, Artificial
  probe
  misc_feature (1)..(25): SEQ ID NO: 3500; WAN0249IC_at; Start 27; Stop 51
agaaatccagctcttttaaaatatc

SEQ ID NO: 22941 - DNA, 25 bp, Artificial
  probe
  misc_feature (1)..(25): SEQ ID NO: 358; WAN0249ID_at; Start 24; Stop 48
ggtatagacctattttttggagata

SEQ ID NO: 22942 - DNA, 25 bp, Artificial
  probe
  misc_feature (1)..(25): SEQ ID NO: 358; WAN0249ID_at; Start 22; Stop 46
atggtatagacctattttttggaga

SEQ ID NO: 22943 - DNA, 25 bp, Artificial
  probe
  misc_feature (1)..(25): SEQ ID NO: 358; WAN0249ID_at; Start 60; Stop 84
ctggatttctccaactcttctcttt

SEQ ID NO: 22944 - DNA, 25 bp, Artificial
  probe
  misc_feature (1)..(25): SEQ ID NO: 358; WAN0249ID_at; Start 39; Stop 63
tttggagatattttaaaagagctgg

SEQ ID NO: 22945 - DNA, 25 bp, Artificial
  probe
  misc_feature (1)..(25): SEQ ID NO: 358; WAN0249ID_at; Start 41; Stop 65
tggagatattttaaaagagctggat

SEQ ID NO: 22946 - DNA, 25 bp, Artificial
  probe
  misc_feature (1)..(25): SEQ ID NO: 358; WAN0249ID_at; Start 69; Stop 93
tccaactcttctcttttttaataca

SEQ ID NO: 22947 - DNA, 25 bp, Artificial
  probe
  misc_feature (1)..(25): SEQ ID NO: 358; WAN0249ID_at; Start 55; Stop 79
aagagctggatttctccaactcttc

SEQ ID NO: 22948 - DNA, 25 bp, Artificial
  probe
  misc_feature (1)..(25): SEQ ID NO: 358; WAN0249ID_at; Start 45; Stop 69
gatattttaaaagagctggatttct

SEQ ID NO: 22949 - DNA, 25 bp, Artificial
  probe
  misc_feature (1)..(25): SEQ ID NO: 358; WAN0249ID_at; Start 53; Stop 77
aaaagagctggatttctccaactct

SEQ ID NO: 22950 - DNA, 25 bp, Artificial
  probe
  misc_feature (1)..(25): SEQ ID NO: 358; WAN0249ID_at; Start 12; Stop 36
ttatttgtaaatggtatagacctat

SEQ ID NO: 22951 - DNA, 25 bp, Artificial
  probe
  misc_feature (1)..(25): SEQ ID NO: 358; WAN0249ID_at; Start 50; Stop 74
tttaaaagagctggatttctccaac

SEQ ID NO: 22952 - DNA, 25 bp, Artificial
  probe
  misc_feature (1)..(25): SEQ ID NO: 358; WAN0249ID_at; Start 54; Stop 78
aaagagctggatttctccaactctt

SEQ ID NO: 22953 - DNA, 25 bp, Artificial
  probe
  misc_feature (1)..(25): SEQ ID NO: 358; WAN0249ID_at; Start 71; Stop 95
caactcttctcttttttaatacaag

SEQ ID NO: 22954 - DNA, 25 bp, Artificial
  probe
  misc_feature (1)..(25): SEQ ID NO: 358; WAN0249ID_at; Start 44; Stop 68
agatattttaaaagagctggatttc

SEQ ID NO: 22955 - DNA, 25 bp, Artificial
  probe
  misc_feature (1)..(25): SEQ ID NO: 358; WAN0249ID_at; Start 51; Stop 75
ttaaaagagctggatttctccaact

SEQ ID NO: 22956 - DNA, 25 bp, Artificial
  probe
  misc_feature (1)..(25): SEQ ID NO: 358; WAN0249ID_at; Start 61; Stop 85
tggatttctccaactcttctctttt

SEQ ID NO: 22957 - DNA, 25 bp, Artificial
  probe
  misc_feature (1)..(25): SEQ ID NO: 358; WAN0249ID_at; Start 56; Stop 80
agagctggatttctccaactcttct

SEQ ID NO: 22958 - DNA, 25 bp, Artificial
  probe
  misc_feature (1)..(25): SEQ ID NO: 358; WAN0249ID_at; Start 40; Stop 64
ttggagatattttaaaagagctgga

SEQ ID NO: 22959 - DNA, 25 bp, Artificial
  probe
  misc_feature (1)..(25): SEQ ID NO: 358; WAN0249ID_at; Start 58; Stop 82
agctggatttctccaactcttctct

SEQ ID NO: 22960 - DNA, 25 bp, Artificial
  probe
  misc_feature (1)..(25): SEQ ID NO: 358; WAN0249ID_at; Start 13; Stop 37
tatttgtaaatggtatagacctatt

SEQ ID NO: 22961 - DNA, 25 bp, Artificial
  probe
  misc_feature (1)..(25): SEQ ID NO: 358; WAN0249ID_at; Start 57; Stop 81
gagctggatttctccaactcttctc

SEQ ID NO: 22962 - DNA, 25 bp, Artificial
  probe
  misc_feature (1)..(25): SEQ ID NO: 358; WAN0249ID_at; Start 21; Stop 45
aatggtatagacctattttttggag

SEQ ID NO: 22963 - DNA, 25 bp, Artificial
  probe
  misc_feature (1)..(25): SEQ ID NO: 358; WAN0249ID_at; Start 11; Stop 35
tttatttgtaaatggtatagaccta

SEQ ID NO: 22964 - DNA, 25 bp, Artificial
  probe
  misc_feature (1)..(25): SEQ ID NO: 358; WAN0249ID_at; Start 43; Stop 67
gagatattttaaaagagctggattt

SEQ ID NO: 22965 - DNA, 25 bp, Artificial
  probe
  misc_feature (1)..(25): SEQ ID NO: 358; WAN0249ID_at; Start 67; Stop 91
tctccaactcttctcttttttaata

SEQ ID NO: 22966 - DNA, 25 bp, Artificial
  probe
  misc_feature (1)..(25): SEQ ID NO: 358; WAN0249ID_at; Start 14; Stop 38
atttgtaaatggtatagacctattt

SEQ ID NO: 22967 - DNA, 25 bp, Artificial
  probe
  misc_feature (1)..(25): SEQ ID NO: 358; WAN0249ID_at; Start 49; Stop 73
ttttaaaagagctggatttctccaa

SEQ ID NO: 22968 - DNA, 25 bp, Artificial
  probe
  misc_feature (1)..(25): SEQ ID NO: 358; WAN0249ID_at; Start 59; Stop 83
gctggatttctccaactcttctctt

SEQ ID NO: 22969 - DNA, 25 bp, Artificial
  probe
  misc_feature (1)..(25): SEQ ID NO: 358; WAN0249ID_at; Start 47; Stop 71
tattttaaaagagctggatttctcc

SEQ ID NO: 22970 - DNA, 25 bp, Artificial
  probe
  misc_feature (1)..(25): SEQ ID NO: 358; WAN0249ID_at; Start 25; Stop 49
gtatagacctattttttggagatat

SEQ ID NO: 22971 - DNA, 25 bp, Artificial
  probe
  misc_feature (1)..(25): SEQ ID NO: 358; WAN0249ID_at; Start 26; Stop 50
tatagacctattttttggagatatt

SEQ ID NO: 22972 - DNA, 25 bp, Artificial
  probe
  misc_feature (1)..(25): SEQ ID NO: 358; WAN0249ID_at; Start 48; Stop 72
attttaaaagagctggatttctcca

SEQ ID NO: 22973 - DNA, 25 bp, Artificial
  probe
  misc_feature (1)..(25): SEQ ID NO: 358; WAN0249ID_at; Start 52; Stop 76
taaaagagctggatttctccaactc

SEQ ID NO: 22974 - DNA, 25 bp, Artificial
  probe
  misc_feature (1)..(25): SEQ ID NO: 358; WAN0249ID_at; Start 42; Stop 66
ggagatattttaaaagagctggatt

SEQ ID NO: 22975 - DNA, 25 bp, Artificial
  probe
  misc_feature (1)..(25): SEQ ID NO: 3798; WAN0249IE_at; Start 29; Stop 53
aatagaaattcagtcatccatcaga

SEQ ID NO: 22976 - DNA, 25 bp, Artificial
  probe
  misc_feature (1)..(25): SEQ ID NO: 3798; WAN0249IE_at; Start 107; Stop 131
tggcggaattggttataatatacgg

SEQ ID NO: 22977 - DNA, 25 bp, Artificial
  probe
  misc_feature (1)..(25): SEQ ID NO: 3798; WAN0249IE_at; Start 100; Stop 124
ccttgtctggcggaattggttataa

SEQ ID NO: 22978 - DNA, 25 bp, Artificial
  probe
  misc_feature (1)..(25): SEQ ID NO: 3798; WAN0249IE_at; Start 85; Stop 109
tgagcatatttctttccttgtctgg

SEQ ID NO: 22979 - DNA, 25 bp, Artificial
  probe
  misc_feature (1)..(25): SEQ ID NO: 3798; WAN0249IE_at; Start 33; Stop 57
gaaattcagtcatccatcagatggc

SEQ ID NO: 22980 - DNA, 25 bp, Artificial
  probe
  misc_feature (1)..(25): SEQ ID NO: 3798; WAN0249IE_at; Start 89; Stop 113
catatttctttccttgtctggcgga

SEQ ID NO: 22981 - DNA, 25 bp, Artificial
  probe
  misc_feature (1)..(25): SEQ ID NO: 3798; WAN0249IE_at; Start 39; Stop 63
cagtcatccatcagatggctggatt

SEQ ID NO: 22982 - DNA, 25 bp, Artificial
  probe
  misc_feature (1)..(25): SEQ ID NO: 3798; WAN0249IE_at; Start 95; Stop 119
tctttccttgtctggcggaattggt

SEQ ID NO: 22983 - DNA, 25 bp, Artificial
  probe
  misc_feature (1)..(25): SEQ ID NO: 3798; WAN0249IE_at; Start 88; Stop 112
gcatatttctttccttgtctggcgg

SEQ ID NO: 22984 - DNA, 25 bp, Artificial
  probe
  misc_feature (1)..(25): SEQ ID NO: 3798; WAN0249IE_at; Start 101; Stop 125
cttgtctggcggaattggttataat

SEQ ID NO: 22985 - DNA, 25 bp, Artificial
  probe
  misc_feature (1)..(25): SEQ ID NO: 3798; WAN0249IE_at; Start 43; Stop 67
catccatcagatggctggatttttt

SEQ ID NO: 22986 - DNA, 25 bp, Artificial
  probe
  misc_feature (1)..(25): SEQ ID NO: 3798; WAN0249IE_at; Start 46; Stop 70
ccatcagatggctggattttttatc

SEQ ID NO: 22987 - DNA, 25 bp, Artificial
  probe
  misc_feature (1)..(25): SEQ ID NO: 3798; WAN0249IE_at; Start 105; Stop 129
tctggcggaattggttataatatac

SEQ ID NO: 22988 - DNA, 25 bp, Artificial
  probe
  misc_feature (1)..(25): SEQ ID NO: 3798; WAN0249IE_at; Start 23; Stop 47
taagtaaatagaaattcagtcatcc

SEQ ID NO: 22989 - DNA, 25 bp, Artificial
  probe
  misc_feature (1)..(25): SEQ ID NO: 3798; WAN0249IE_at; Start 91; Stop 115
tatttctttccttgtctggcggaat

SEQ ID NO: 22990 - DNA, 25 bp, Artificial
  probe
  misc_feature (1)..(25): SEQ ID NO: 3798; WAN0249IE_at; Start 94; Stop 118
ttctttccttgtctggcggaattgg

SEQ ID NO: 22991 - DNA, 25 bp, Artificial
  probe
  misc_feature (1)..(25): SEQ ID NO: 3798; WAN0249IE_at; Start 28; Stop 52
aaatagaaattcagtcatccatcag

SEQ ID NO: 22992 - DNA, 25 bp, Artificial
  probe
  misc_feature (1)..(25): SEQ ID NO: 3798; WAN0249IE_at; Start 17; Stop 41
tgtacataagtaaatagaaattcag

SEQ ID NO: 22993 - DNA, 25 bp, Artificial
  probe
  misc_feature (1)..(25): SEQ ID NO: 3798; WAN0249IE_at; Start 111; Stop 135
ggaattggttataatatacggtaca

SEQ ID NO: 22994 - DNA, 25 bp, Artificial
  probe
  misc_feature (1)..(25): SEQ ID NO: 3798; WAN0249IE_at; Start 86; Stop 110
gagcatatttctttccttgtctggc

SEQ ID NO: 22995 - DNA, 25 bp, Artificial
  probe
  misc_feature (1)..(25): SEQ ID NO: 3798; WAN0249IE_at; Start 34; Stop 58
aaattcagtcatccatcagatggct

SEQ ID NO: 22996 - DNA, 25 bp, Artificial
  probe
  misc_feature (1)..(25): SEQ ID NO: 3798; WAN0249IE_at; Start 37; Stop 61
ttcagtcatccatcagatggctgga

SEQ ID NO: 22997 - DNA, 25 bp, Artificial
  probe
  misc_feature (1)..(25): SEQ ID NO: 3798; WAN0249IE_at; Start 120; Stop 144
tataatatacggtacaaaggaatga

SEQ ID NO: 22998 - DNA, 25 bp, Artificial
  probe
  misc_feature (1)..(25): SEQ ID NO: 3798; WAN0249IE_at; Start 103; Stop 127
tgtctggcggaattggttataatat

SEQ ID NO: 22999 - DNA, 25 bp, Artificial
  probe
  misc_feature (1)..(25): SEQ ID NO: 3798; WAN0249IE_at; Start 19; Stop 43
tacataagtaaatagaaattcagtc

SEQ ID NO: 23000 - DNA, 25 bp, Artificial
  probe
  misc_feature (1)..(25): SEQ ID NO: 3798; WAN0249IE_at; Start 38; Stop 62
tcagtcatccatcagatggctggat

SEQ ID NO: 23001 - DNA, 25 bp, Artificial
  probe
  misc_feature (1)..(25): SEQ ID NO: 3798; WAN0249IE_at; Start 41; Stop 65
gtcatccatcagatggctggatttt

SEQ ID NO: 23002 - DNA, 25 bp, Artificial
  probe
  misc_feature (1)..(25): SEQ ID NO: 3798; WAN0249IE_at; Start 35; Stop 59
aattcagtcatccatcagatggctg

SEQ ID NO: 23003 - DNA, 25 bp, Artificial
  probe
  misc_feature (1)..(25): SEQ ID NO: 3798; WAN0249IE_at; Start 109; Stop 133
gcggaattggttataatatacggta

SEQ ID NO: 23004 - DNA, 25 bp, Artificial
  probe
  misc_feature (1)..(25): SEQ ID NO: 3798; WAN0249IE_at; Start 67; Stop 91
tatcaaaaaattaagaaatgagcat

SEQ ID NO: 23005 - DNA, 25 bp, Artificial
  probe
  misc_feature (1)..(25): SEQ ID NO: 3798; WAN0249IE_at; Start 70; Stop 94
caaaaaattaagaaatgagcatatt

SEQ ID NO: 23006 - DNA, 25 bp, Artificial
  probe
  misc_feature (1)..(25): SEQ ID NO: 3798; WAN0249IE_at; Start 116; Stop 140
tggttataatatacggtacaaagga

SEQ ID NO: 23007 - DNA, 25 bp, Artificial
  probe
  misc_feature (1)..(25): SEQ ID NO: 3798; WAN0249IE_at; Start 31; Stop 55
tagaaattcagtcatccatcagatg

SEQ ID NO: 23008 - DNA, 25 bp, Artificial
  probe
  misc_feature (1)..(25): SEQ ID NO: 3798; WAN0249IE_at; Start 47; Stop 71
catcagatggctggattttttatca

SEQ ID NO: 23009 - DNA, 25 bp, Artificial
  probe
  misc_feature (1)..(25): SEQ ID NO: 4605; WAN0249IF_at; Start 35; Stop 59
gccagacaaggaaagaaatatgctc

SEQ ID NO: 23010 - DNA, 25 bp, Artificial
  probe
  misc_feature (1)..(25): SEQ ID NO: 4605; WAN0249IF_at; Start 2; Stop 26
cattcctttgtaccgtatattataa

SEQ ID NO: 23011 - DNA, 25 bp, Artificial
  probe
  misc_feature (1)..(25): SEQ ID NO: 4605; WAN0249IF_at; Start 88; Stop 112
gccatctgatggatgactgaatttc

SEQ ID NO: 23012 - DNA, 25 bp, Artificial
  probe
  misc_feature (1)..(25): SEQ ID NO: 4605; WAN0249IF_at; Start 16; Stop 40
gtatattataaccaattccgccaga

SEQ ID NO: 23013 - DNA, 25 bp, Artificial
  probe
  misc_feature (1)..(25): SEQ ID NO: 4605; WAN0249IF_at; Start 10; Stop 34
tgtaccgtatattataaccaattcc

SEQ ID NO: 23014 - DNA, 25 bp, Artificial
  probe
  misc_feature (1)..(25): SEQ ID NO: 4605; WAN0249IF_at; Start 95; Stop 119
gatggatgactgaatttctatttac

SEQ ID NO: 23015 - DNA, 25 bp, Artificial
  probe
  misc_feature (1)..(25): SEQ ID NO: 4605; WAN0249IF_at; Start 92; Stop 116
tctgatggatgactgaatttctatt

SEQ ID NO: 23016 - DNA, 25 bp, Artificial
  probe
  misc_feature (1)..(25): SEQ ID NO: 4605; WAN0249IF_at; Start 21; Stop 45
ttataaccaattccgccagacaagg

SEQ ID NO: 23017 - DNA, 25 bp, Artificial
  probe
  misc_feature (1)..(25): SEQ ID NO: 4605; WAN0249IF_at; Start 41; Stop 65
caaggaaagaaatatgctcatttct

SEQ ID NO: 23018 - DNA, 25 bp, Artificial
  probe
  misc_feature (1)..(25): SEQ ID NO: 4605; WAN0249IF_at; Start 15; Stop 39
cgtatattataaccaattccgccag

SEQ ID NO: 23019 - DNA, 25 bp, Artificial
  probe
  misc_feature (1)..(25): SEQ ID NO: 4605; WAN0249IF_at; Start 5; Stop 29
tcctttgtaccgtatattataacca

SEQ ID NO: 23020 - DNA, 25 bp, Artificial
  probe
  misc_feature (1)..(25): SEQ ID NO: 4605; WAN0249IF_at; Start 106; Stop 130
gaatttctatttacttatgtacaaa

SEQ ID NO: 23021 - DNA, 25 bp, Artificial
  probe
  misc_feature (1)..(25): SEQ ID NO: 4605; WAN0249IF_at; Start 80; Stop 104
aaaatccagccatctgatggatgac

SEQ ID NO: 23022 - DNA, 25 bp, Artificial
  probe
  misc_feature (1)..(25): SEQ ID NO: 4605; WAN0249IF_at; Start 98; Stop 122
ggatgactgaatttctatttactta

SEQ ID NO: 23023 - DNA, 25 bp, Artificial
  probe
  misc_feature (1)..(25): SEQ ID NO: 4605; WAN0249IF_at; Start 19; Stop 43
tattataaccaattccgccagacaa

SEQ ID NO: 23024 - DNA, 25 bp, Artificial
  probe
  misc_feature (1)..(25): SEQ ID NO: 4605; WAN0249IF_at; Start 17; Stop 41
tatattataaccaattccgccagac

SEQ ID NO: 23025 - DNA, 25 bp, Artificial
  probe
  misc_feature (1)..(25): SEQ ID NO: 4605; WAN0249IF_at; Start 82; Stop 106
aatccagccatctgatggatgactg

SEQ ID NO: 23026 - DNA, 25 bp, Artificial
  probe
  misc_feature (1)..(25): SEQ ID NO: 4605; WAN0249IF_at; Start 27; Stop 51
ccaattccgccagacaaggaaagaa

SEQ ID NO: 23027 - DNA, 25 bp, Artificial
  probe
  misc_feature (1)..(25): SEQ ID NO: 4605; WAN0249IF_at; Start 84; Stop 108
tccagccatctgatggatgactgaa

SEQ ID NO: 23028 - DNA, 25 bp, Artificial
  probe
  misc_feature (1)..(25): SEQ ID NO: 4605; WAN0249IF_at; Start 32; Stop 56
tccgccagacaaggaaagaaatatg

SEQ ID NO: 23029 - DNA, 25 bp, Artificial
  probe
  misc_feature (1)..(25): SEQ ID NO: 4605; WAN0249IF_at; Start 74; Stop 98
tgataaaaaatccagccatctgatg

SEQ ID NO: 23030 - DNA, 25 bp, Artificial
  probe
  misc_feature (1)..(25): SEQ ID NO: 4605; WAN0249IF_at; Start 86; Stop 110
cagccatctgatggatgactgaatt

SEQ ID NO: 23031 - DNA, 25 bp, Artificial
  probe
  misc_feature (1)..(25): SEQ ID NO: 4605; WAN0249IF_at; Start 33; Stop 57
ccgccagacaaggaaagaaatatgc

SEQ ID NO: 23032 - DNA, 25 bp, Artificial
  probe
  misc_feature (1)..(25): SEQ ID NO: 4605; WAN0249IF_at; Start 36; Stop 60
ccagacaaggaaagaaatatgctca

SEQ ID NO: 23033 - DNA, 25 bp, Artificial
  probe
  misc_feature (1)..(25): SEQ ID NO: 4605; WAN0249IF_at; Start 34; Stop 58
cgccagacaaggaaagaaatatgct

SEQ ID NO: 23034 - DNA, 25 bp, Artificial
  probe
  misc_feature (1)..(25): SEQ ID NO: 4605; WAN0249IF_at; Start 25; Stop 49
aaccaattccgccagacaaggaaag

SEQ ID NO: 23035 - DNA, 25 bp, Artificial
  probe
  misc_feature (1)..(25): SEQ ID NO: 4605; WAN0249IF_at; Start 39; Stop 63
gacaaggaaagaaatatgctcattt

SEQ ID NO: 23036 - DNA, 25 bp, Artificial
  probe
  misc_feature (1)..(25): SEQ ID NO: 4605; WAN0249IF_at; Start 37; Stop 61
cagacaaggaaagaaatatgctcat

SEQ ID NO: 23037 - DNA, 25 bp, Artificial
  probe
  misc_feature (1)..(25): SEQ ID NO: 4605; WAN0249IF_at; Start 28; Stop 52
caattccgccagacaaggaaagaaa

SEQ ID NO: 23038 - DNA, 25 bp, Artificial
  probe
  misc_feature (1)..(25): SEQ ID NO: 4605; WAN0249IF_at; Start 44; Stop 68
ggaaagaaatatgctcatttcttaa

SEQ ID NO: 23039 - DNA, 25 bp, Artificial
  probe
  misc_feature (1)..(25): SEQ ID NO: 4605; WAN0249IF_at; Start 12; Stop 36
taccgtatattataaccaattccgc

SEQ ID NO: 23040 - DNA, 25 bp, Artificial
  probe
  misc_feature (1)..(25): SEQ ID NO: 4605; WAN0249IF_at; Start 75; Stop 99
gataaaaaatccagccatctgatgg

SEQ ID NO: 23041 - DNA, 25 bp, Artificial
  probe
  misc_feature (1)..(25): SEQ ID NO: 4605; WAN0249IF_at; Start 78; Stop 102
aaaaaatccagccatctgatggatg

SEQ ID NO: 23042 - DNA, 25 bp, Artificial
  probe
  misc_feature (1)..(25): SEQ ID NO: 4605; WAN0249IF_at; Start 90; Stop 114
catctgatggatgactgaatttcta

SEQ ID NO: 23043 - DNA, 25 bp, Artificial
  probe
  misc_feature (1)..(25): SEQ ID NO: 400; WAN0249IG_at; Start 32; Stop 56
tatttttctaactctttgcgaatag

SEQ ID NO: 23044 - DNA, 25 bp, Artificial
  probe
  misc_feature (1)..(25): SEQ ID NO: 400; WAN0249IG_at; Start 40; Stop 64
taactctttgcgaatagtataggtg

SEQ ID NO: 23045 - DNA, 25 bp, Artificial
  probe
  misc_feature (1)..(25): SEQ ID NO: 400; WAN0249IG_at; Start 41; Stop 65
aactctttgcgaatagtataggtga

SEQ ID NO: 23046 - DNA, 25 bp, Artificial
  probe
  misc_feature (1)..(25): SEQ ID NO: 400; WAN0249IG_at; Start 47; Stop 71
ttgcgaatagtataggtgaggaggt

SEQ ID NO: 23047 - DNA, 25 bp, Artificial
  probe
  misc_feature (1)..(25): SEQ ID NO: 400; WAN0249IG_at; Start 46; Stop 70
tttgcgaatagtataggtgaggagg

SEQ ID NO: 23048 - DNA, 25 bp, Artificial
  probe
  misc_feature (1)..(25): SEQ ID NO: 400; WAN0249IG_at; Start 36; Stop 60
tttctaactctttgcgaatagtata

SEQ ID NO: 23049 - DNA, 25 bp, Artificial
  probe
  misc_feature (1)..(25): SEQ ID NO: 400; WAN0249IG_at; Start 44; Stop 68
tctttgcgaatagtataggtgagga

SEQ ID NO: 23050 - DNA, 25 bp, Artificial
  probe
  misc_feature (1)..(25): SEQ ID NO: 400; WAN0249IG_at; Start 42; Stop 66
actctttgcgaatagtataggtgag

SEQ ID NO: 23051 - DNA, 25 bp, Artificial
  probe
  misc_feature (1)..(25): SEQ ID NO: 400; WAN0249IG_at; Start 43; Stop 67
ctctttgcgaatagtataggtgagg

SEQ ID NO: 23052 - DNA, 25 bp, Artificial
  probe
  misc_feature (1)..(25): SEQ ID NO: 400; WAN0249IG_at; Start 48; Stop 72
tgcgaatagtataggtgaggaggta

SEQ ID NO: 23053 - DNA, 25 bp, Artificial
  probe
  misc_feature (1)..(25): SEQ ID NO: 400; WAN0249IG_at; Start 31; Stop 55
ttatttttctaactctttgcgaata

SEQ ID NO: 23054 - DNA, 25 bp, Artificial
  probe
  misc_feature (1)..(25): SEQ ID NO: 400; WAN0249IG_at; Start 34; Stop 58
tttttctaactctttgcgaatagta

SEQ ID NO: 23055 - DNA, 25 bp, Artificial
  probe
  misc_feature (1)..(25): SEQ ID NO: 400; WAN0249IG_at; Start 35; Stop 59
ttttctaactctttgcgaatagtat

SEQ ID NO: 23056 - DNA, 25 bp, Artificial
  probe
  misc_feature (1)..(25): SEQ ID NO: 400; WAN0249IG_at; Start 49; Stop 73
gcgaatagtataggtgaggaggtaa

SEQ ID NO: 23057 - DNA, 25 bp, Artificial
  probe
  misc_feature (1)..(25): SEQ ID NO: 400; WAN0249IG_at; Start 37; Stop 61
ttctaactctttgcgaatagtatag

SEQ ID NO: 23058 - DNA, 25 bp, Artificial
  probe
  misc_feature (1)..(25): SEQ ID NO: 400; WAN0249IG_at; Start 33; Stop 57
atttttctaactctttgcgaatagt

SEQ ID NO: 23059 - DNA, 25 bp, Artificial
  probe
  misc_feature (1)..(25): SEQ ID NO: 400; WAN0249IG_at; Start 39; Stop 63
ctaactctttgcgaatagtataggt

SEQ ID NO: 23060 - DNA, 25 bp, Artificial
  probe
  misc_feature (1)..(25): SEQ ID NO: 400; WAN0249IG_at; Start 38; Stop 62
tctaactctttgcgaatagtatagg

SEQ ID NO: 23061 - DNA, 25 bp, Artificial
  probe
  misc_feature (1)..(25): SEQ ID NO: 400; WAN0249IG_at; Start 50; Stop 74
cgaatagtataggtgaggaggtaag

SEQ ID NO: 23062 - DNA, 25 bp, Artificial
  probe
  misc_feature (1)..(25): SEQ ID NO: 400; WAN0249IG_at; Start 45; Stop 69
ctttgcgaatagtataggtgaggag

SEQ ID NO: 23063 - DNA, 25 bp, Artificial
  probe
  misc_feature (1)..(25): SEQ ID NO: 400; WAN0249IG_at; Start 51; Stop 75
gaatagtataggtgaggaggtaagt

SEQ ID NO: 23064 - DNA, 25 bp, Artificial
  probe
  misc_feature (1)..(25): SEQ ID NO: 391; WAN0249IH_at; Start 9; Stop 33
cctcacctatactattcgcaaagag

SEQ ID NO: 23065 - DNA, 25 bp, Artificial
  probe
  misc_feature (1)..(25): SEQ ID NO: 391; WAN0249IH_at; Start 8; Stop 32
tcctcacctatactattcgcaaaga

SEQ ID NO: 23066 - DNA, 25 bp, Artificial
  probe
  misc_feature (1)..(25): SEQ ID NO: 391; WAN0249IH_at; Start 2; Stop 26
cttacctcctcacctatactattcg

SEQ ID NO: 23067 - DNA, 25 bp, Artificial
  probe
  misc_feature (1)..(25): SEQ ID NO: 391; WAN0249IH_at; Start 4; Stop 28
tacctcctcacctatactattcgca

SEQ ID NO: 23068 - DNA, 25 bp, Artificial
  probe
  misc_feature (1)..(25): SEQ ID NO: 391; WAN0249IH_at; Start 18; Stop 42
tactattcgcaaagagttagaaaaa

SEQ ID NO: 23069 - DNA, 25 bp, Artificial
  probe
  misc_feature (1)..(25): SEQ ID NO: 391; WAN0249IH_at; Start 5; Stop 29
acctcctcacctatactattcgcaa

SEQ ID NO: 23070 - DNA, 25 bp, Artificial
  probe
  misc_feature (1)..(25): SEQ ID NO: 391; WAN0249IH_at; Start 16; Stop 40
tatactattcgcaaagagttagaaa

SEQ ID NO: 23071 - DNA, 25 bp, Artificial
  probe
  misc_feature (1)..(25): SEQ ID NO: 391; WAN0249IH_at; Start 14; Stop 38
cctatactattcgcaaagagttaga

SEQ ID NO: 23072 - DNA, 25 bp, Artificial
  probe
  misc_feature (1)..(25): SEQ ID NO: 391; WAN0249IH_at; Start 13; Stop 37
acctatactattcgcaaagagttag

SEQ ID NO: 23073 - DNA, 25 bp, Artificial
  probe
  misc_feature (1)..(25): SEQ ID NO: 391; WAN0249IH_at; Start 12; Stop 36
cacctatactattcgcaaagagtta

SEQ ID NO: 23074 - DNA, 25 bp, Artificial
  probe
  misc_feature (1)..(25): SEQ ID NO: 391; WAN0249IH_at; Start 21; Stop 45
tattcgcaaagagttagaaaaataa

SEQ ID NO: 23075 - DNA, 25 bp, Artificial
  probe
  misc_feature (1)..(25): SEQ ID NO: 391; WAN0249IH_at; Start 20; Stop 44
ctattcgcaaagagttagaaaaata

SEQ ID NO: 23076 - DNA, 25 bp, Artificial
  probe
  misc_feature (1)..(25): SEQ ID NO: 391; WAN0249IH_at; Start 11; Stop 35
tcacctatactattcgcaaagagtt

SEQ ID NO: 23077 - DNA, 25 bp, Artificial
  probe
  misc_feature (1)..(25): SEQ ID NO: 391; WAN0249IH_at; Start 7; Stop 31
ctcctcacctatactattcgcaaag

SEQ ID NO: 23078 - DNA, 25 bp, Artificial
  probe
  misc_feature (1)..(25): SEQ ID NO: 391; WAN0249IH_at; Start 6; Stop 30
cctcctcacctatactattcgcaaa

SEQ ID NO: 23079 - DNA, 25 bp, Artificial
  probe
  misc_feature (1)..(25): SEQ ID NO: 391; WAN0249IH_at; Start 3; Stop 27
ttacctcctcacctatactattcgc

SEQ ID NO: 23080 - DNA, 25 bp, Artificial
  probe
  misc_feature (1)..(25): SEQ ID NO: 391; WAN0249IH_at; Start 17; Stop 41
atactattcgcaaagagttagaaaa

SEQ ID NO: 23081 - DNA, 25 bp, Artificial
  probe
  misc_feature (1)..(25): SEQ ID NO: 391; WAN0249IH_at; Start 19; Stop 43
actattcgcaaagagttagaaaaat

SEQ ID NO: 23082 - DNA, 25 bp, Artificial
  probe
  misc_feature (1)..(25): SEQ ID NO: 391; WAN0249IH_at; Start 15; Stop 39
ctatactattcgcaaagagttagaa

SEQ ID NO: 23083 - DNA, 25 bp, Artificial
  probe
  misc_feature (1)..(25): SEQ ID NO: 391; WAN0249IH_at; Start 1; Stop 25
acttacctcctcacctatactattc

SEQ ID NO: 23084 - DNA, 25 bp, Artificial
  probe
  misc_feature (1)..(25): SEQ ID NO: 391; WAN0249IH_at; Start 10; Stop 34
ctcacctatactattcgcaaagagt

SEQ ID NO: 23085 - DNA, 25 bp, Artificial
  probe
  misc_feature (1)..(25): SEQ ID NO: 3815; WAN0249II_at; Start 8; Stop 32
agtgatttttctataaggatggaaa

SEQ ID NO: 23086 - DNA, 25 bp, Artificial
  probe
  misc_feature (1)..(25): SEQ ID NO: 3815; WAN0249II_at; Start 5; Stop 29
gggagtgatttttctataaggatgg

SEQ ID NO: 23087 - DNA, 25 bp, Artificial
  probe
  misc_feature (1)..(25): SEQ ID NO: 3815; WAN0249II_at; Start 3; Stop 27
cagggagtgatttttctataaggat

SEQ ID NO: 23088 - DNA, 25 bp, Artificial
  probe
  misc_feature (1)..(25): SEQ ID NO: 3815; WAN0249II_at; Start 1; Stop 25
gtcagggagtgatttttctataagg

SEQ ID NO: 23089 - DNA, 25 bp, Artificial
  probe
  misc_feature (1)..(25): SEQ ID NO: 3815; WAN0249II_at; Start 7; Stop 31
gagtgatttttctataaggatggaa

SEQ ID NO: 23090 - DNA, 25 bp, Artificial
  probe
  misc_feature (1)..(25): SEQ ID NO: 3815; WAN0249II_at; Start 10; Stop 34
tgatttttctataaggatggaaaaa

SEQ ID NO: 23091 - DNA, 25 bp, Artificial
  probe
  misc_feature (1)..(25): SEQ ID NO: 3815; WAN0249II_at; Start 2; Stop 26
tcagggagtgatttttctataagga

SEQ ID NO: 23092 - DNA, 25 bp, Artificial
  probe
  misc_feature (1)..(25): SEQ ID NO: 3815; WAN0249II_at; Start 6; Stop 30
ggagtgatttttctataaggatgga

SEQ ID NO: 23093 - DNA, 25 bp, Artificial
  probe
  misc_feature (1)..(25): SEQ ID NO: 3815; WAN0249II_at; Start 4; Stop 28
agggagtgatttttctataaggatg

SEQ ID NO: 23094 - DNA, 25 bp, Artificial
  probe
  misc_feature (1)..(25): SEQ ID NO: 3815; WAN0249II_at; Start 9; Stop 33
gtgatttttctataaggatggaaaa

SEQ ID NO: 23095 - DNA, 25 bp, Artificial
  probe
  misc_feature (1)..(25): SEQ ID NO: 3149; WAN0249IJ_at; Start 36; Stop 60
tccttatagaaaaatcactccctga

SEQ ID NO: 23096 - DNA, 25 bp, Artificial
  probe
  misc_feature (1)..(25): SEQ ID NO: 3149; WAN0249IJ_at; Start 37; Stop 61
ccttatagaaaaatcactccctgac

SEQ ID NO: 23097 - DNA, 25 bp, Artificial
  probe
  misc_feature (1)..(25): SEQ ID NO: 3149; WAN0249IJ_at; Start 29; Stop 53
ttttccatccttatagaaaaatcac

SEQ ID NO: 23098 - DNA, 25 bp, Artificial
  probe
  misc_feature (1)..(25): SEQ ID NO: 3149; WAN0249IJ_at; Start 35; Stop 59
atccttatagaaaaatcactccctg

SEQ ID NO: 23099 - DNA, 25 bp, Artificial
  probe
  misc_feature (1)..(25): SEQ ID NO: 3149; WAN0249IJ_at; Start 32; Stop 56
tccatccttatagaaaaatcactcc

SEQ ID NO: 23100 - DNA, 25 bp, Artificial
  probe
  misc_feature (1)..(25): SEQ ID NO: 3149; WAN0249IJ_at; Start 34; Stop 58
catccttatagaaaaatcactccct

SEQ ID NO: 23101 - DNA, 25 bp, Artificial
  probe
  misc_feature (1)..(25): SEQ ID NO: 3149; WAN0249IJ_at; Start 31; Stop 55
ttccatccttatagaaaaatcactc

SEQ ID NO: 23102 - DNA, 25 bp, Artificial
  probe
  misc_feature (1)..(25): SEQ ID NO: 3149; WAN0249IJ_at; Start 30; Stop 54
tttccatccttatagaaaaatcact

SEQ ID NO: 23103 - DNA, 25 bp, Artificial
  probe
  misc_feature (1)..(25): SEQ ID NO: 3149; WAN0249IJ_at; Start 33; Stop 57
ccatccttatagaaaaatcactccc

SEQ ID NO: 23104 - DNA, 25 bp, Artificial
  probe
  misc_feature (1)..(25): SEQ ID NO: 3149; WAN0249IJ_at; Start 28; Stop 52
tttttccatccttatagaaaaatca

SEQ ID NO: 23105 - DNA, 25 bp, Artificial
  probe
  misc_feature (1)..(25): SEQ ID NO: 3785; WAN0249IK_at; Start 6; Stop 30
atcaggtttatcctgattttttgct

SEQ ID NO: 23106 - DNA, 25 bp, Artificial
  probe
  misc_feature (1)..(25): SEQ ID NO: 3785; WAN0249IK_at; Start 8; Stop 32
caggtttatcctgattttttgctag

SEQ ID NO: 23107 - DNA, 25 bp, Artificial
  probe
  misc_feature (1)..(25): SEQ ID NO: 3785; WAN0249IK_at; Start 19; Stop 43
tgattttttgctagttagaggaggt

SEQ ID NO: 23108 - DNA, 25 bp, Artificial
  probe
  misc_feature (1)..(25): SEQ ID NO: 3785; WAN0249IK_at; Start 9; Stop 33
aggtttatcctgattttttgctagt

SEQ ID NO: 23109 - DNA, 25 bp, Artificial
  probe
  misc_feature (1)..(25): SEQ ID NO: 3785; WAN0249IK_at; Start 14; Stop 38
tatcctgattttttgctagttagag

SEQ ID NO: 23110 - DNA, 25 bp, Artificial
  probe
  misc_feature (1)..(25): SEQ ID NO: 3785; WAN0249IK_at; Start 26; Stop 50
ttgctagttagaggaggttaaactg

SEQ ID NO: 23111 - DNA, 25 bp, Artificial
  probe
  misc_feature (1)..(25): SEQ ID NO: 3785; WAN0249IK_at; Start 13; Stop 37
ttatcctgattttttgctagttaga

SEQ ID NO: 23112 - DNA, 25 bp, Artificial
  probe
  misc_feature (1)..(25): SEQ ID NO: 3785; WAN0249IK_at; Start 16; Stop 40
tcctgattttttgctagttagagga

SEQ ID NO: 23113 - DNA, 25 bp, Artificial
  probe
  misc_feature (1)..(25): SEQ ID NO: 3785; WAN0249IK_at; Start 5; Stop 29
aatcaggtttatcctgattttttgc

SEQ ID NO: 23114 - DNA, 25 bp, Artificial
  probe
  misc_feature (1)..(25): SEQ ID NO: 3785; WAN0249IK_at; Start 4; Stop 28
aaatcaggtttatcctgattttttg

SEQ ID NO: 23115 - DNA, 25 bp, Artificial
  probe
  misc_feature (1)..(25): SEQ ID NO: 3785; WAN0249IK_at; Start 12; Stop 36
tttatcctgattttttgctagttag

SEQ ID NO: 23116 - DNA, 25 bp, Artificial
  probe
  misc_feature (1)..(25): SEQ ID NO: 3785; WAN0249IK_at; Start 17; Stop 41
cctgattttttgctagttagaggag

SEQ ID NO: 23117 - DNA, 25 bp, Artificial
  probe
  misc_feature (1)..(25): SEQ ID NO: 3785; WAN0249IK_at; Start 18; Stop 42
ctgattttttgctagttagaggagg

SEQ ID NO: 23118 - DNA, 25 bp, Artificial
  probe
  misc_feature (1)..(25): SEQ ID NO: 3785; WAN0249IK_at; Start 11; Stop 35
gtttatcctgattttttgctagtta

SEQ ID NO: 23119 - DNA, 25 bp, Artificial
  probe
  misc_feature (1)..(25): SEQ ID NO: 3785; WAN0249IK_at; Start 15; Stop 39
atcctgattttttgctagttagagg

SEQ ID NO: 23120 - DNA, 25 bp, Artificial
  probe
  misc_feature (1)..(25): SEQ ID NO: 3785; WAN0249IK_at; Start 7; Stop 31
tcaggtttatcctgattttttgcta

SEQ ID NO: 23121 - DNA, 25 bp, Artificial
  probe
  misc_feature (1)..(25): SEQ ID NO: 3217; WAN0249IL_at; Start 19; Stop 43
ctagcaaaaaatcaggataaacctg

SEQ ID NO: 23122 - DNA, 25 bp, Artificial
  probe
  misc_feature (1)..(25): SEQ ID NO: 3217; WAN0249IL_at; Start 23; Stop 47
caaaaaatcaggataaacctgattt

SEQ ID NO: 23123 - DNA, 25 bp, Artificial
  probe
  misc_feature (1)..(25): SEQ ID NO: 3217; WAN0249IL_at; Start 16; Stop 40
taactagcaaaaaatcaggataaac

SEQ ID NO: 23124 - DNA, 25 bp, Artificial
  probe
  misc_feature (1)..(25): SEQ ID NO: 3217; WAN0249IL_at; Start 11; Stop 35
tcctctaactagcaaaaaatcagga

SEQ ID NO: 23125 - DNA, 25 bp, Artificial
  probe
  misc_feature (1)..(25): SEQ ID NO: 3217; WAN0249IL_at; Start 15; Stop 39
ctaactagcaaaaaatcaggataaa

SEQ ID NO: 23126 - DNA, 25 bp, Artificial
  probe
  misc_feature (1)..(25): SEQ ID NO: 3217; WAN0249IL_at; Start 8; Stop 32
acctcctctaactagcaaaaaatca

SEQ ID NO: 23127 - DNA, 25 bp, Artificial
  probe
  misc_feature (1)..(25): SEQ ID NO: 3217; WAN0249IL_at; Start 21; Stop 45
agcaaaaaatcaggataaacctgat

SEQ ID NO: 23128 - DNA, 25 bp, Artificial
  probe
  misc_feature (1)..(25): SEQ ID NO: 3217; WAN0249IL_at; Start 22; Stop 46
gcaaaaaatcaggataaacctgatt

SEQ ID NO: 23129 - DNA, 25 bp, Artificial
  probe
  misc_feature (1)..(25): SEQ ID NO: 3217; WAN0249IL_at; Start 12; Stop 36
cctctaactagcaaaaaatcaggat

SEQ ID NO: 23130 - DNA, 25 bp, Artificial
  probe
  misc_feature (1)..(25): SEQ ID NO: 3217; WAN0249IL_at; Start 13; Stop 37
ctctaactagcaaaaaatcaggata

SEQ ID NO: 23131 - DNA, 25 bp, Artificial
  probe
  misc_feature (1)..(25): SEQ ID NO: 3217; WAN0249IL_at; Start 10; Stop 34
ctcctctaactagcaaaaaatcagg

SEQ ID NO: 23132 - DNA, 25 bp, Artificial
  probe
  misc_feature (1)..(25): SEQ ID NO: 3217; WAN0249IL_at; Start 9; Stop 33
cctcctctaactagcaaaaaatcag

SEQ ID NO: 23133 - DNA, 25 bp, Artificial
  probe
  misc_feature (1)..(25): SEQ ID NO: 3217; WAN0249IL_at; Start 14; Stop 38
tctaactagcaaaaaatcaggataa

SEQ ID NO: 23134 - DNA, 25 bp, Artificial
  probe
  misc_feature (1)..(25): SEQ ID NO: 3217; WAN0249IL_at; Start 1; Stop 25
cagtttaacctcctctaactagcaa

SEQ ID NO: 23135 - DNA, 25 bp, Artificial
  probe
  misc_feature (1)..(25): SEQ ID NO: 3217; WAN0249IL_at; Start 18; Stop 42
actagcaaaaaatcaggataaacct

SEQ ID NO: 23136 - DNA, 25 bp, Artificial
  probe
  misc_feature (1)..(25): SEQ ID NO: 3217; WAN0249IL_at; Start 20; Stop 44
tagcaaaaaatcaggataaacctga

SEQ ID NO: 23137 - DNA, 25 bp, Artificial
  probe
  misc_feature (1)..(25): SEQ ID NO: 3623; WAN0249IM_at; Start 35; Stop 59
aagagtgaacagtccgctgtgtaat

SEQ ID NO: 23138 - DNA, 25 bp, Artificial
  probe
  misc_feature (1)..(25): SEQ ID NO: 3623; WAN0249IM_at; Start 37; Stop 61
gagtgaacagtccgctgtgtaattc

SEQ ID NO: 23139 - DNA, 25 bp, Artificial
  probe
  misc_feature (1)..(25): SEQ ID NO: 3623; WAN0249IM_at; Start 18; Stop 42
cataaatcatacagtccaagagtga

SEQ ID NO: 23140 - DNA, 25 bp, Artificial
  probe
  misc_feature (1)..(25): SEQ ID NO: 3623; WAN0249IM_at; Start 10; Stop 34
taaaacatcataaatcatacagtcc

SEQ ID NO: 23141 - DNA, 25 bp, Artificial
  probe
  misc_feature (1)..(25): SEQ ID NO: 3623; WAN0249IM_at; Start 23; Stop 47
atcatacagtccaagagtgaacagt

SEQ ID NO: 23142 - DNA, 25 bp, Artificial
  probe
  misc_feature (1)..(25): SEQ ID NO: 3623; WAN0249IM_at; Start 29; Stop 53
cagtccaagagtgaacagtccgctg

SEQ ID NO: 23143 - DNA, 25 bp, Artificial
  probe
  misc_feature (1)..(25): SEQ ID NO: 3623; WAN0249IM_at; Start 32; Stop 56
tccaagagtgaacagtccgctgtgt

SEQ ID NO: 23144 - DNA, 25 bp, Artificial
  probe
  misc_feature (1)..(25): SEQ ID NO: 3623; WAN0249IM_at; Start 15; Stop 39
catcataaatcatacagtccaagag

SEQ ID NO: 23145 - DNA, 25 bp, Artificial
  probe
  misc_feature (1)..(25): SEQ ID NO: 3623; WAN0249IM_at; Start 21; Stop 45
aaatcatacagtccaagagtgaaca

SEQ ID NO: 23146 - DNA, 25 bp, Artificial
  probe
  misc_feature (1)..(25): SEQ ID NO: 3623; WAN0249IM_at; Start 12; Stop 36
aaacatcataaatcatacagtccaa

SEQ ID NO: 23147 - DNA, 25 bp, Artificial
  probe
  misc_feature (1)..(25): SEQ ID NO: 3623; WAN0249IM_at; Start 11; Stop 35
aaaacatcataaatcatacagtcca

SEQ ID NO: 23148 - DNA, 25 bp, Artificial
  probe
  misc_feature (1)..(25): SEQ ID NO: 3623; WAN0249IM_at; Start 14; Stop 38
acatcataaatcatacagtccaaga

SEQ ID NO: 23149 - DNA, 25 bp, Artificial
  probe
  misc_feature (1)..(25): SEQ ID NO: 3623; WAN0249IM_at; Start 22; Stop 46
aatcatacagtccaagagtgaacag

SEQ ID NO: 23150 - DNA, 25 bp, Artificial
  probe
  misc_feature (1)..(25): SEQ ID NO: 3623; WAN0249IM_at; Start 34; Stop 58
caagagtgaacagtccgctgtgtaa

SEQ ID NO: 23151 - DNA, 25 bp, Artificial
  probe
  misc_feature (1)..(25): SEQ ID NO: 3623; WAN0249IM_at; Start 20; Stop 44
taaatcatacagtccaagagtgaac

SEQ ID NO: 23152 - DNA, 25 bp, Artificial
  probe
  misc_feature (1)..(25): SEQ ID NO: 3623; WAN0249IM_at; Start 28; Stop 52
acagtccaagagtgaacagtccgct

SEQ ID NO: 23153 - DNA, 25 bp, Artificial
  probe
  misc_feature (1)..(25): SEQ ID NO: 3623; WAN0249IM_at; Start 3; Stop 27
taatttgtaaaacatcataaatcat

SEQ ID NO: 23154 - DNA, 25 bp, Artificial
  probe
  misc_feature (1)..(25): SEQ ID NO: 3623; WAN0249IM_at; Start 17; Stop 41
tcataaatcatacagtccaagagtg

SEQ ID NO: 23155 - DNA, 25 bp, Artificial
  probe
  misc_feature (1)..(25): SEQ ID NO: 3623; WAN0249IM_at; Start 25; Stop 49
catacagtccaagagtgaacagtcc

SEQ ID NO: 23156 - DNA, 25 bp, Artificial
  probe
  misc_feature (1)..(25): SEQ ID NO: 3623; WAN0249IM_at; Start 19; Stop 43
ataaatcatacagtccaagagtgaa

SEQ ID NO: 23157 - DNA, 25 bp, Artificial
  probe
  misc_feature (1)..(25): SEQ ID NO: 3623; WAN0249IM_at; Start 26; Stop 50
atacagtccaagagtgaacagtccg

SEQ ID NO: 23158 - DNA, 25 bp, Artificial
  probe
  misc_feature (1)..(25): SEQ ID NO: 3623; WAN0249IM_at; Start 33; Stop 57
ccaagagtgaacagtccgctgtgta

SEQ ID NO: 23159 - DNA, 25 bp, Artificial
  probe
  misc_feature (1)..(25): SEQ ID NO: 3623; WAN0249IM_at; Start 9; Stop 33
gtaaaacatcataaatcatacagtc

SEQ ID NO: 23160 - DNA, 25 bp, Artificial
  probe
  misc_feature (1)..(25): SEQ ID NO: 3623; WAN0249IM_at; Start 13; Stop 37
aacatcataaatcatacagtccaag

SEQ ID NO: 23161 - DNA, 25 bp, Artificial
  probe
  misc_feature (1)..(25): SEQ ID NO: 3623; WAN0249IM_at; Start 36; Stop 60
agagtgaacagtccgctgtgtaatt

SEQ ID NO: 23162 - DNA, 25 bp, Artificial
  probe
  misc_feature (1)..(25): SEQ ID NO: 3623; WAN0249IM_at; Start 31; Stop 55
gtccaagagtgaacagtccgctgtg

SEQ ID NO: 23163 - DNA, 25 bp, Artificial
  probe
  misc_feature (1)..(25): SEQ ID NO: 3623; WAN0249IM_at; Start 5; Stop 29
atttgtaaaacatcataaatcatac

SEQ ID NO: 23164 - DNA, 25 bp, Artificial
  probe
  misc_feature (1)..(25): SEQ ID NO: 3623; WAN0249IM_at; Start 16; Stop 40
atcataaatcatacagtccaagagt

SEQ ID NO: 23165 - DNA, 25 bp, Artificial
  probe
  misc_feature (1)..(25): SEQ ID NO: 3623; WAN0249IM_at; Start 24; Stop 48
tcatacagtccaagagtgaacagtc

SEQ ID NO: 23166 - DNA, 25 bp, Artificial
  probe
  misc_feature (1)..(25): SEQ ID NO: 3623; WAN0249IM_at; Start 1; Stop 25
gataatttgtaaaacatcataaatc

SEQ ID NO: 23167 - DNA, 25 bp, Artificial
  probe
  misc_feature (1)..(25): SEQ ID NO: 3623; WAN0249IM_at; Start 30; Stop 54
agtccaagagtgaacagtccgctgt

SEQ ID NO: 23168 - DNA, 25 bp, Artificial
  probe
  misc_feature (1)..(25): SEQ ID NO: 3623; WAN0249IM_at; Start 7; Stop 31
ttgtaaaacatcataaatcatacag

SEQ ID NO: 23169 - DNA, 25 bp, Artificial
  probe
  misc_feature (1)..(25): SEQ ID NO: 3623; WAN0249IM_at; Start 27; Stop 51
tacagtccaagagtgaacagtccgc

SEQ ID NO: 23170 - DNA, 25 bp, Artificial
  probe
  misc_feature (1)..(25): SEQ ID NO: 3623; WAN0249IM_at; Start 8; Stop 32
tgtaaaacatcataaatcatacagt

SEQ ID NO: 23171 - DNA, 25 bp, Artificial
  probe
  misc_feature (1)..(25): SEQ ID NO: 3567; WAN0249IN_at; Start 13; Stop 37
ggactgttcactcttggactgtatg

SEQ ID NO: 23172 - DNA, 25 bp, Artificial
  probe
  misc_feature (1)..(25): SEQ ID NO: 3567; WAN0249IN_at; Start 24; Stop 48
tcttggactgtatgatttatgatgt

SEQ ID NO: 23173 - DNA, 25 bp, Artificial
  probe
  misc_feature (1)..(25): SEQ ID NO: 3567; WAN0249IN_at; Start 21; Stop 45
cactcttggactgtatgatttatga

SEQ ID NO: 23174 - DNA, 25 bp, Artificial
  probe
  misc_feature (1)..(25): SEQ ID NO: 3567; WAN0249IN_at; Start 10; Stop 34
agcggactgttcactcttggactgt

SEQ ID NO: 23175 - DNA, 25 bp, Artificial
  probe
  misc_feature (1)..(25): SEQ ID NO: 3567; WAN0249IN_at; Start 7; Stop 31
cacagcggactgttcactcttggac

SEQ ID NO: 23176 - DNA, 25 bp, Artificial
  probe
  misc_feature (1)..(25): SEQ ID NO: 3567; WAN0249IN_at; Start 26; Stop 50
ttggactgtatgatttatgatgttt

SEQ ID NO: 23177 - DNA, 25 bp, Artificial
  probe
  misc_feature (1)..(25): SEQ ID NO: 3567; WAN0249IN_at; Start 15; Stop 39
actgttcactcttggactgtatgat

SEQ ID NO: 23178 - DNA, 25 bp, Artificial
  probe
  misc_feature (1)..(25): SEQ ID NO: 3567; WAN0249IN_at; Start 28; Stop 52
ggactgtatgatttatgatgtttta

SEQ ID NO: 23179 - DNA, 25 bp, Artificial
  probe
  misc_feature (1)..(25): SEQ ID NO: 3567; WAN0249IN_at; Start 4; Stop 28
ttacacagcggactgttcactcttg

SEQ ID NO: 23180 - DNA, 25 bp, Artificial
  probe
  misc_feature (1)..(25): SEQ ID NO: 3567; WAN0249IN_at; Start 6; Stop 30
acacagcggactgttcactcttgga

SEQ ID NO: 23181 - DNA, 25 bp, Artificial
  probe
  misc_feature (1)..(25): SEQ ID NO: 3567; WAN0249IN_at; Start 25; Stop 49
cttggactgtatgatttatgatgtt

SEQ ID NO: 23182 - DNA, 25 bp, Artificial
  probe
  misc_feature (1)..(25): SEQ ID NO: 3567; WAN0249IN_at; Start 19; Stop 43
ttcactcttggactgtatgatttat

SEQ ID NO: 23183 - DNA, 25 bp, Artificial
  probe
  misc_feature (1)..(25): SEQ ID NO: 3567; WAN0249IN_at; Start 23; Stop 47
ctcttggactgtatgatttatgatg

SEQ ID NO: 23184 - DNA, 25 bp, Artificial
  probe
  misc_feature (1)..(25): SEQ ID NO: 3567; WAN0249IN_at; Start 31; Stop 55
ctgtatgatttatgatgttttacaa

SEQ ID NO: 23185 - DNA, 25 bp, Artificial
  probe
  misc_feature (1)..(25): SEQ ID NO: 3567; WAN0249IN_at; Start 3; Stop 27
attacacagcggactgttcactctt

SEQ ID NO: 23186 - DNA, 25 bp, Artificial
  probe
  misc_feature (1)..(25): SEQ ID NO: 3567; WAN0249IN_at; Start 1; Stop 25
gaattacacagcggactgttcactc

SEQ ID NO: 23187 - DNA, 25 bp, Artificial
  probe
  misc_feature (1)..(25): SEQ ID NO: 3567; WAN0249IN_at; Start 32; Stop 56
tgtatgatttatgatgttttacaaa

SEQ ID NO: 23188 - DNA, 25 bp, Artificial
  probe
  misc_feature (1)..(25): SEQ ID NO: 3567; WAN0249IN_at; Start 18; Stop 42
gttcactcttggactgtatgattta

SEQ ID NO: 23189 - DNA, 25 bp, Artificial
  probe
  misc_feature (1)..(25): SEQ ID NO: 3567; WAN0249IN_at; Start 5; Stop 29
tacacagcggactgttcactcttgg

SEQ ID NO: 23190 - DNA, 25 bp, Artificial
  probe
  misc_feature (1)..(25): SEQ ID NO: 3567; WAN0249IN_at; Start 20; Stop 44
tcactcttggactgtatgatttatg

SEQ ID NO: 23191 - DNA, 25 bp, Artificial
  probe
  misc_feature (1)..(25): SEQ ID NO: 3567; WAN0249IN_at; Start 22; Stop 46
actcttggactgtatgatttatgat

SEQ ID NO: 23192 - DNA, 25 bp, Artificial
  probe
  misc_feature (1)..(25): SEQ ID NO: 3567; WAN0249IN_at; Start 27; Stop 51
tggactgtatgatttatgatgtttt

SEQ ID NO: 23193 - DNA, 25 bp, Artificial
  probe
  misc_feature (1)..(25): SEQ ID NO: 3567; WAN0249IN_at; Start 9; Stop 33
cagcggactgttcactcttggactg

SEQ ID NO: 23194 - DNA, 25 bp, Artificial
  probe
  misc_feature (1)..(25): SEQ ID NO: 3567; WAN0249IN_at; Start 16; Stop 40
ctgttcactcttggactgtatgatt

SEQ ID NO: 23195 - DNA, 25 bp, Artificial
  probe
  misc_feature (1)..(25): SEQ ID NO: 3567; WAN0249IN_at; Start 29; Stop 53
gactgtatgatttatgatgttttac

SEQ ID NO: 23196 - DNA, 25 bp, Artificial
  probe
  misc_feature (1)..(25): SEQ ID NO: 3567; WAN0249IN_at; Start 14; Stop 38
gactgttcactcttggactgtatga

SEQ ID NO: 23197 - DNA, 25 bp, Artificial
  probe
  misc_feature (1)..(25): SEQ ID NO: 3567; WAN0249IN_at; Start 12; Stop 36
cggactgttcactcttggactgtat

SEQ ID NO: 23198 - DNA, 25 bp, Artificial
  probe
  misc_feature (1)..(25): SEQ ID NO: 3567; WAN0249IN_at; Start 2; Stop 26
aattacacagcggactgttcactct

SEQ ID NO: 23199 - DNA, 25 bp, Artificial
  probe
  misc_feature (1)..(25): SEQ ID NO: 3567; WAN0249IN_at; Start 33; Stop 57
gtatgatttatgatgttttacaaat

SEQ ID NO: 23200 - DNA, 25 bp, Artificial
  probe
  misc_feature (1)..(25): SEQ ID NO: 3567; WAN0249IN_at; Start 30; Stop 54
actgtatgatttatgatgttttaca

SEQ ID NO: 23201 - DNA, 25 bp, Artificial
  probe
  misc_feature (1)..(25): SEQ ID NO: 3567; WAN0249IN_at; Start 8; Stop 32
acagcggactgttcactcttggact

SEQ ID NO: 23202 - DNA, 25 bp, Artificial
  probe
  misc_feature (1)..(25): SEQ ID NO: 3567; WAN0249IN_at; Start 11; Stop 35
gcggactgttcactcttggactgta

SEQ ID NO: 23203 - DNA, 25 bp, Artificial
  probe
  misc_feature (1)..(25): SEQ ID NO: 3567; WAN0249IN_at; Start 17; Stop 41
tgttcactcttggactgtatgattt

SEQ ID NO: 23204 - DNA, 25 bp, Artificial
  probe
  misc_feature (1)..(25): SEQ ID NO: 3567; WAN0249IN_at; Start 34; Stop 58
tatgatttatgatgttttacaaatt

SEQ ID NO: 23205 - DNA, 25 bp, Artificial
  probe
  misc_feature (1)..(25): SEQ ID NO: 598; WAN0249IO_at; Start 23; Stop 47
ttgatatagtagtcctatgtaaaag

SEQ ID NO: 23206 - DNA, 25 bp, Artificial
  probe
  misc_feature (1)..(25): SEQ ID NO: 598; WAN0249IO_at; Start 2; Stop 26
tcttgtaaaagtagctgaaatttga

SEQ ID NO: 23207 - DNA, 25 bp, Artificial
  probe
  misc_feature (1)..(25): SEQ ID NO: 598; WAN0249IO_at; Start 16; Stop 40
ctgaaatttgatatagtagtcctat

SEQ ID NO: 23208 - DNA, 25 bp, Artificial
  probe
  misc_feature (1)..(25): SEQ ID NO: 598; WAN0249IO_at; Start 19; Stop 43
aaatttgatatagtagtcctatgta

SEQ ID NO: 23209 - DNA, 25 bp, Artificial
  probe
  misc_feature (1)..(25): SEQ ID NO: 598; WAN0249IO_at; Start 35; Stop 59
tcctatgtaaaagacaaaggagaaa

SEQ ID NO: 23210 - DNA, 25 bp, Artificial
  probe
  misc_feature (1)..(25): SEQ ID NO: 598; WAN0249IO_at; Start 27; Stop 51
tatagtagtcctatgtaaaagacaa

SEQ ID NO: 23211 - DNA, 25 bp, Artificial
  probe
  misc_feature (1)..(25): SEQ ID NO: 598; WAN0249IO_at; Start 29; Stop 53
tagtagtcctatgtaaaagacaaag

SEQ ID NO: 23212 - DNA, 25 bp, Artificial
  probe
  misc_feature (1)..(25): SEQ ID NO: 598; WAN0249IO_at; Start 20; Stop 44
aatttgatatagtagtcctatgtaa

SEQ ID NO: 23213 - DNA, 25 bp, Artificial
  probe
  misc_feature (1)..(25): SEQ ID NO: 598; WAN0249IO_at; Start 33; Stop 57
agtcctatgtaaaagacaaaggaga

SEQ ID NO: 23214 - DNA, 25 bp, Artificial
  probe
  misc_feature (1)..(25): SEQ ID NO: 598; WAN0249IO_at; Start 24; Stop 48
tgatatagtagtcctatgtaaaaga

SEQ ID NO: 23215 - DNA, 25 bp, Artificial
  probe
  misc_feature (1)..(25): SEQ ID NO: 598; WAN0249IO_at; Start 22; Stop 46
tttgatatagtagtcctatgtaaaa

SEQ ID NO: 23216 - DNA, 25 bp, Artificial
  probe
  misc_feature (1)..(25): SEQ ID NO: 598; WAN0249IO_at; Start 31; Stop 55
gtagtcctatgtaaaagacaaagga

SEQ ID NO: 23217 - DNA, 25 bp, Artificial
  probe
  misc_feature (1)..(25): SEQ ID NO: 598; WAN0249IO_at; Start 1; Stop 25
atcttgtaaaagtagctgaaatttg

SEQ ID NO: 23218 - DNA, 25 bp, Artificial
  probe
  misc_feature (1)..(25): SEQ ID NO: 598; WAN0249IO_at; Start 32; Stop 56
tagtcctatgtaaaagacaaaggag

SEQ ID NO: 23219 - DNA, 25 bp, Artificial
  probe
  misc_feature (1)..(25): SEQ ID NO: 598; WAN0249IO_at; Start 30; Stop 54
agtagtcctatgtaaaagacaaagg

SEQ ID NO: 23220 - DNA, 25 bp, Artificial
  probe
  misc_feature (1)..(25): SEQ ID NO: 598; WAN0249IO_at; Start 25; Stop 49
gatatagtagtcctatgtaaaagac

SEQ ID NO: 23221 - DNA, 25 bp, Artificial
  probe
  misc_feature (1)..(25): SEQ ID NO: 598; WAN0249IO_at; Start 34; Stop 58
gtcctatgtaaaagacaaaggagaa

SEQ ID NO: 23222 - DNA, 25 bp, Artificial
  probe
  misc_feature (1)..(25): SEQ ID NO: 598; WAN0249IO_at; Start 17; Stop 41
tgaaatttgatatagtagtcctatg

SEQ ID NO: 23223 - DNA, 25 bp, Artificial
  probe
  misc_feature (1)..(25): SEQ ID NO: 598; WAN0249IO_at; Start 28; Stop 52
atagtagtcctatgtaaaagacaaa

SEQ ID NO: 23224 - DNA, 25 bp, Artificial
  probe
  misc_feature (1)..(25): SEQ ID NO: 598; WAN0249IO_at; Start 18; Stop 42
gaaatttgatatagtagtcctatgt

SEQ ID NO: 23225 - DNA, 25 bp, Artificial
  probe
  misc_feature (1)..(25): SEQ ID NO: 598; WAN0249IO_at; Start 21; Stop 45
atttgatatagtagtcctatgtaaa

SEQ ID NO: 23226 - DNA, 25 bp, Artificial
  probe
  misc_feature (1)..(25): SEQ ID NO: 598; WAN0249IO_at; Start 26; Stop 50
atatagtagtcctatgtaaaagaca

SEQ ID NO: 23227 - DNA, 25 bp, Artificial
  probe
  misc_feature (1)..(25): SEQ ID NO: 598; WAN0249IO_at; Start 15; Stop 39
gctgaaatttgatatagtagtccta

SEQ ID NO: 23228 - DNA, 25 bp, Artificial
  probe
  misc_feature (1)..(25): SEQ ID NO: 598; WAN0249IO_at; Start 14; Stop 38
agctgaaatttgatatagtagtcct

SEQ ID NO: 23229 - DNA, 25 bp, Artificial
  probe
  misc_feature (1)..(25): SEQ ID NO: 598; WAN0249IO_at; Start 3; Stop 27
cttgtaaaagtagctgaaatttgat

SEQ ID NO: 23230 - DNA, 25 bp, Artificial
  probe
  misc_feature (1)..(25): SEQ ID NO: 4739; WAN0249IP_at; Start 38; Stop 62
caaatttcagctacttttacaagat

SEQ ID NO: 23231 - DNA, 25 bp, Artificial
  probe
  misc_feature (1)..(25): SEQ ID NO: 4739; WAN0249IP_at; Start 18; Stop 42
tttacataggactactatatcaaat

SEQ ID NO: 23232 - DNA, 25 bp, Artificial
  probe
  misc_feature (1)..(25): SEQ ID NO: 4739; WAN0249IP_at; Start 6; Stop 30
tctcctttgtcttttacataggact

SEQ ID NO: 23233 - DNA, 25 bp, Artificial
  probe
  misc_feature (1)..(25): SEQ ID NO: 4739; WAN0249IP_at; Start 11; Stop 35
tttgtcttttacataggactactat

SEQ ID NO: 23234 - DNA, 25 bp, Artificial
  probe
  misc_feature (1)..(25): SEQ ID NO: 4739; WAN0249IP_at; Start 15; Stop 39
tcttttacataggactactatatca

SEQ ID NO: 23235 - DNA, 25 bp, Artificial
  probe
  misc_feature (1)..(25): SEQ ID NO: 4739; WAN0249IP_at; Start 4; Stop 28
tttctcctttgtcttttacatagga

SEQ ID NO: 23236 - DNA, 25 bp, Artificial
  probe
  misc_feature (1)..(25): SEQ ID NO: 4739; WAN0249IP_at; Start 12; Stop 36
ttgtcttttacataggactactata

SEQ ID NO: 23237 - DNA, 25 bp, Artificial
  probe
  misc_feature (1)..(25): SEQ ID NO: 4739; WAN0249IP_at; Start 8; Stop 32
tcctttgtcttttacataggactac

SEQ ID NO: 23238 - DNA, 25 bp, Artificial
  probe
  misc_feature (1)..(25): SEQ ID NO: 4739; WAN0249IP_at; Start 24; Stop 48
taggactactatatcaaatttcagc

SEQ ID NO: 23239 - DNA, 25 bp, Artificial
  probe
  misc_feature (1)..(25): SEQ ID NO: 4739; WAN0249IP_at; Start 16; Stop 40
cttttacataggactactatatcaa

SEQ ID NO: 23240 - DNA, 25 bp, Artificial
  probe
  misc_feature (1)..(25): SEQ ID NO: 4739; WAN0249IP_at; Start 20; Stop 44
tacataggactactatatcaaattt

SEQ ID NO: 23241 - DNA, 25 bp, Artificial
  probe
  misc_feature (1)..(25): SEQ ID NO: 4739; WAN0249IP_at; Start 36; Stop 60
atcaaatttcagctacttttacaag

SEQ ID NO: 23242 - DNA, 25 bp, Artificial
  probe
  misc_feature (1)..(25): SEQ ID NO: 4739; WAN0249IP_at; Start 17; Stop 41
ttttacataggactactatatcaaa

SEQ ID NO: 23243 - DNA, 25 bp, Artificial
  probe
  misc_feature (1)..(25): SEQ ID NO: 4739; WAN0249IP_at; Start 10; Stop 34
ctttgtcttttacataggactacta

SEQ ID NO: 23244 - DNA, 25 bp, Artificial
  probe
  misc_feature (1)..(25): SEQ ID NO: 4739; WAN0249IP_at; Start 7; Stop 31
ctcctttgtcttttacataggacta

SEQ ID NO: 23245 - DNA, 25 bp, Artificial
  probe
  misc_feature (1)..(25): SEQ ID NO: 4739; WAN0249IP_at; Start 21; Stop 45
acataggactactatatcaaatttc

SEQ ID NO: 23246 - DNA, 25 bp, Artificial
  probe
  misc_feature (1)..(25): SEQ ID NO: 4739; WAN0249IP_at; Start 23; Stop 47
ataggactactatatcaaatttcag

SEQ ID NO: 23247 - DNA, 25 bp, Artificial
  probe
  misc_feature (1)..(25): SEQ ID NO: 4739; WAN0249IP_at; Start 13; Stop 37
tgtcttttacataggactactatat

SEQ ID NO: 23248 - DNA, 25 bp, Artificial
  probe
  misc_feature (1)..(25): SEQ ID NO: 4739; WAN0249IP_at; Start 14; Stop 38
gtcttttacataggactactatatc

SEQ ID NO: 23249 - DNA, 25 bp, Artificial
  probe
  misc_feature (1)..(25): SEQ ID NO: 4739; WAN0249IP_at; Start 5; Stop 29
ttctcctttgtcttttacataggac

SEQ ID NO: 23250 - DNA, 25 bp, Artificial
  probe
  misc_feature (1)..(25): SEQ ID NO: 4739; WAN0249IP_at; Start 19; Stop 43
ttacataggactactatatcaaatt

SEQ ID NO: 23251 - DNA, 25 bp, Artificial
  probe
  misc_feature (1)..(25): SEQ ID NO: 4739; WAN0249IP_at; Start 37; Stop 61
tcaaatttcagctacttttacaaga

SEQ ID NO: 23252 - DNA, 25 bp, Artificial
  probe
  misc_feature (1)..(25): SEQ ID NO: 4739; WAN0249IP_at; Start 22; Stop 46
cataggactactatatcaaatttca

SEQ ID NO: 23253 - DNA, 25 bp, Artificial
  probe
  misc_feature (1)..(25): SEQ ID NO: 4739; WAN0249IP_at; Start 9; Stop 33
cctttgtcttttacataggactact

SEQ ID NO: 23254 - DNA, 25 bp, Artificial
  probe
  misc_feature (1)..(25): SEQ ID NO: 4739; WAN0249IP_at; Start 25; Stop 49
aggactactatatcaaatttcagct

SEQ ID NO: 23255 - DNA, 25 bp, Artificial
  probe
  misc_feature (1)..(25): SEQ ID NO: 1968; WAN0249IQ_at; Start 91; Stop 115
ttttaaaaatacacaagatattgat

SEQ ID NO: 23256 - DNA, 25 bp, Artificial
  probe
  misc_feature (1)..(25): SEQ ID NO: 1968; WAN0249IQ_at; Start 2; Stop 26
tgcatgctcttttctaaaatgttct

SEQ ID NO: 23257 - DNA, 25 bp, Artificial
  probe
  misc_feature (1)..(25): SEQ ID NO: 1968; WAN0249IQ_at; Start 4; Stop 28
catgctcttttctaaaatgttcttt

SEQ ID NO: 23258 - DNA, 25 bp, Artificial
  probe
  misc_feature (1)..(25): SEQ ID NO: 1968; WAN0249IQ_at; Start 1; Stop 25
atgcatgctcttttctaaaatgttc

SEQ ID NO: 23259 - DNA, 25 bp, Artificial
  probe
  misc_feature (1)..(25): SEQ ID NO: 1968; WAN0249IQ_at; Start 44; Stop 68
ccactctaaaaagaaaaatcaatat

SEQ ID NO: 23260 - DNA, 25 bp, Artificial
  probe
  misc_feature (1)..(25): SEQ ID NO: 1968; WAN0249IQ_at; Start 3; Stop 27
gcatgctcttttctaaaatgttctt

SEQ ID NO: 23261 - DNA, 25 bp, Artificial
  probe
  misc_feature (1)..(25): SEQ ID NO: 1968; WAN0249IQ_at; Start 27; Stop 51
ttctaaaaagtattataccactcta

SEQ ID NO: 23262 - DNA, 25 bp, Artificial
  probe
  misc_feature (1)..(25): SEQ ID NO: 1968; WAN0249IQ_at; Start 28; Stop 52
tctaaaaagtattataccactctaa

SEQ ID NO: 23263 - DNA, 25 bp, Artificial
  probe
  misc_feature (1)..(25): SEQ ID NO: 1968; WAN0249IQ_at; Start 46; Stop 70
actctaaaaagaaaaatcaatatct

SEQ ID NO: 23264 - DNA, 25 bp, Artificial
  probe
  misc_feature (1)..(25): SEQ ID NO: 1968; WAN0249IQ_at; Start 5; Stop 29
atgctcttttctaaaatgttctttc

SEQ ID NO: 23265 - DNA, 25 bp, Artificial
  probe
  misc_feature (1)..(25): SEQ ID NO: 1968; WAN0249IQ_at; Start 40; Stop 64
tataccactctaaaaagaaaaatca

SEQ ID NO: 23266 - DNA, 25 bp, Artificial
  probe
  misc_feature (1)..(25): SEQ ID NO: 1968; WAN0249IQ_at; Start 6; Stop 30
tgctcttttctaaaatgttctttct

SEQ ID NO: 23267 - DNA, 25 bp, Artificial
  probe
  misc_feature (1)..(25): SEQ ID NO: 1968; WAN0249IQ_at; Start 90; Stop 114
tttttaaaaatacacaagatattga

SEQ ID NO: 23268 - DNA, 25 bp, Artificial
  probe
  misc_feature (1)..(25): SEQ ID NO: 1968; WAN0249IQ_at; Start 45; Stop 69
cactctaaaaagaaaaatcaatatc

SEQ ID NO: 23269 - DNA, 25 bp, Artificial
  probe
  misc_feature (1)..(25): SEQ ID NO: 1968; WAN0249IQ_at; Start 7; Stop 31
gctcttttctaaaatgttctttcta

SEQ ID NO: 23270 - DNA, 25 bp, Artificial
  probe
  misc_feature (1)..(25): SEQ ID NO: 3232; WAN0249IR_at; Start 91; Stop 115
gaaagaacattttagaaaagagcat

SEQ ID NO: 23271 - DNA, 25 bp, Artificial
  probe
  misc_feature (1)..(25): SEQ ID NO: 3232; WAN0249IR_at; Start 94; Stop 118
agaacattttagaaaagagcatgca

SEQ ID NO: 23272 - DNA, 25 bp, Artificial
  probe
  misc_feature (1)..(25): SEQ ID NO: 3232; WAN0249IR_at; Start 5; Stop 29
atcaatatcttgtgtatttttaaaa

SEQ ID NO: 23273 - DNA, 25 bp, Artificial
  probe
  misc_feature (1)..(25): SEQ ID NO: 3232; WAN0249IR_at; Start 6; Stop 30
tcaatatcttgtgtatttttaaaaa

SEQ ID NO: 23274 - DNA, 25 bp, Artificial
  probe
  misc_feature (1)..(25): SEQ ID NO: 3232; WAN0249IR_at; Start 89; Stop 113
tagaaagaacattttagaaaagagc

SEQ ID NO: 23275 - DNA, 25 bp, Artificial
  probe
  misc_feature (1)..(25): SEQ ID NO: 3232; WAN0249IR_at; Start 68; Stop 92
ttagagtggtataatactttttaga

SEQ ID NO: 23276 - DNA, 25 bp, Artificial
  probe
  misc_feature (1)..(25): SEQ ID NO: 3232; WAN0249IR_at; Start 69; Stop 93
tagagtggtataatactttttagaa

SEQ ID NO: 23277 - DNA, 25 bp, Artificial
  probe
  misc_feature (1)..(25): SEQ ID NO: 3232; WAN0249IR_at; Start 48; Stop 72
caagatattgatttttctttttaga

SEQ ID NO: 23278 - DNA, 25 bp, Artificial
  probe
  misc_feature (1)..(25): SEQ ID NO: 3232; WAN0249IR_at; Start 47; Stop 71
acaagatattgatttttctttttag

SEQ ID NO: 23279 - DNA, 25 bp, Artificial
  probe
  misc_feature (1)..(25): SEQ ID NO: 3232; WAN0249IR_at; Start 92; Stop 116
aaagaacattttagaaaagagcatg

SEQ ID NO: 23280 - DNA, 25 bp, Artificial
  probe
  misc_feature (1)..(25): SEQ ID NO: 3232; WAN0249IR_at; Start 93; Stop 117
aagaacattttagaaaagagcatgc

SEQ ID NO: 23281 - DNA, 25 bp, Artificial
  probe
  misc_feature (1)..(25): SEQ ID NO: 3232; WAN0249IR_at; Start 95; Stop 119
gaacattttagaaaagagcatgcat

SEQ ID NO: 23282 - DNA, 25 bp, Artificial
  probe
  misc_feature (1)..(25): SEQ ID NO: 3232; WAN0249IR_at; Start 90; Stop 114
agaaagaacattttagaaaagagca

SEQ ID NO: 23283 - DNA, 25 bp, Artificial
  probe
  misc_feature (1)..(25): SEQ ID NO: 3175; WAN0249IS_at; Start 121; Stop 145
tcttgtgaaacttttctcattttct

SEQ ID NO: 23284 - DNA, 25 bp, Artificial
  probe
  misc_feature (1)..(25): SEQ ID NO: 3175; WAN0249IS_at; Start 14; Stop 38
gctttcaaggaacgatatcctttgt

SEQ ID NO: 23285 - DNA, 25 bp, Artificial
  probe
  misc_feature (1)..(25): SEQ ID NO: 3175; WAN0249IS_at; Start 154; Stop 178
caggttttatctttgaagtttgtga

SEQ ID NO: 23286 - DNA, 25 bp, Artificial
  probe
  misc_feature (1)..(25): SEQ ID NO: 3175; WAN0249IS_at; Start 208; Stop 232
aacttgcttggaagagggatttgga

SEQ ID NO: 23287 - DNA, 25 bp, Artificial
  probe
  misc_feature (1)..(25): SEQ ID NO: 3175; WAN0249IS_at; Start 204; Stop 228
cacaaacttgcttggaagagggatt

SEQ ID NO: 23288 - DNA, 25 bp, Artificial
  probe
  misc_feature (1)..(25): SEQ ID NO: 3175; WAN0249IS_at; Start 47; Stop 71
tcacaagtttattataacgcattat

SEQ ID NO: 23289 - DNA, 25 bp, Artificial
  probe
  misc_feature (1)..(25): SEQ ID NO: 3175; WAN0249IS_at; Start 8; Stop 32
tccatagctttcaaggaacgatatc

SEQ ID NO: 23290 - DNA, 25 bp, Artificial
  probe
  misc_feature (1)..(25): SEQ ID NO: 3175; WAN0249IS_at; Start 103; Stop 127
cacaaagaatttttaaactcttgtg

SEQ ID NO: 23291 - DNA, 25 bp, Artificial
  probe
  misc_feature (1)..(25): SEQ ID NO: 3175; WAN0249IS_at; Start 5; Stop 29
tcctccatagctttcaaggaacgat

SEQ ID NO: 23292 - DNA, 25 bp, Artificial
  probe
  misc_feature (1)..(25): SEQ ID NO: 3175; WAN0249IS_at; Start 210; Stop 234
cttgcttggaagagggatttggaaa

SEQ ID NO: 23293 - DNA, 25 bp, Artificial
  probe
  misc_feature (1)..(25): SEQ ID NO: 3175; WAN0249IS_at; Start 64; Stop 88
cgcattatttcaactttgtaaacag

SEQ ID NO: 23294 - DNA, 25 bp, Artificial
  probe
  misc_feature (1)..(25): SEQ ID NO: 3175; WAN0249IS_at; Start 69; Stop 93
tatttcaactttgtaaacagtttca

SEQ ID NO: 23295 - DNA, 25 bp, Artificial
  probe
  misc_feature (1)..(25): SEQ ID NO: 3175; WAN0249IS_at; Start 202; Stop 226
ttcacaaacttgcttggaagaggga

SEQ ID NO: 23296 - DNA, 25 bp, Artificial
  probe
  misc_feature (1)..(25): SEQ ID NO: 3175; WAN0249IS_at; Start 201; Stop 225
tttcacaaacttgcttggaagaggg

SEQ ID NO: 23297 - DNA, 25 bp, Artificial
  probe
  misc_feature (1)..(25): SEQ ID NO: 3175; WAN0249IS_at; Start 27; Stop 51
gatatcctttgttaattttttcaca

SEQ ID NO: 23298 - DNA, 25 bp, Artificial
  probe
  misc_feature (1)..(25): SEQ ID NO: 3175; WAN0249IS_at; Start 12; Stop 36
tagctttcaaggaacgatatccttt

SEQ ID NO: 23299 - DNA, 25 bp, Artificial
  probe
  misc_feature (1)..(25): SEQ ID NO: 3175; WAN0249IS_at; Start 206; Stop 230
caaacttgcttggaagagggatttg

SEQ ID NO: 23300 - DNA, 25 bp, Artificial
  probe
  misc_feature (1)..(25): SEQ ID NO: 3175; WAN0249IS_at; Start 79; Stop 103
ttgtaaacagtttcataaacatttc

SEQ ID NO: 23301 - DNA, 25 bp, Artificial
  probe
  misc_feature (1)..(25): SEQ ID NO: 3175; WAN0249IS_at; Start 61; Stop 85
taacgcattatttcaactttgtaaa

SEQ ID NO: 23302 - DNA, 25 bp, Artificial
  probe
  misc_feature (1)..(25): SEQ ID NO: 3175; WAN0249IS_at; Start 115; Stop 139
ttaaactcttgtgaaacttttctca

SEQ ID NO: 23303 - DNA, 25 bp, Artificial
  probe
  misc_feature (1)..(25): SEQ ID NO: 3175; WAN0249IS_at; Start 6; Stop 30
cctccatagctttcaaggaacgata

SEQ ID NO: 23304 - DNA, 25 bp, Artificial
  probe
  misc_feature (1)..(25): SEQ ID NO: 3175; WAN0249IS_at; Start 275; Stop 299
taatacctcctttgataaggaggct

SEQ ID NO: 23305 - DNA, 25 bp, Artificial
  probe
  misc_feature (1)..(25): SEQ ID NO: 3175; WAN0249IS_at; Start 19; Stop 43
caaggaacgatatcctttgttaatt

SEQ ID NO: 23306 - DNA, 25 bp, Artificial
  probe
  misc_feature (1)..(25): SEQ ID NO: 3175; WAN0249IS_at; Start 270; Stop 294
tctaataatacctcctttgataagg

SEQ ID NO: 23307 - DNA, 25 bp, Artificial
  probe
  misc_feature (1)..(25): SEQ ID NO: 3175; WAN0249IS_at; Start 195; Stop 219
tttttatttcacaaacttgcttgga

SEQ ID NO: 23308 - DNA, 25 bp, Artificial
  probe
  misc_feature (1)..(25): SEQ ID NO: 3175; WAN0249IS_at; Start 272; Stop 296
taataatacctcctttgataaggag

SEQ ID NO: 23309 - DNA, 25 bp, Artificial
  probe
  misc_feature (1)..(25): SEQ ID NO: 3175; WAN0249IS_at; Start 161; Stop 185
tatctttgaagtttgtgaaatttat

SEQ ID NO: 23310 - DNA, 25 bp, Artificial
  probe
  misc_feature (1)..(25): SEQ ID NO: 3175; WAN0249IS_at; Start 9; Stop 33
ccatagctttcaaggaacgatatcc

SEQ ID NO: 23311 - DNA, 25 bp, Artificial
  probe
  misc_feature (1)..(25): SEQ ID NO: 3175; WAN0249IS_at; Start 43; Stop 67
tttttcacaagtttattataacgca

SEQ ID NO: 23312 - DNA, 25 bp, Artificial
  probe
  misc_feature (1)..(25): SEQ ID NO: 3175; WAN0249IS_at; Start 148; Stop 172
tcttatcaggttttatctttgaagt

SEQ ID NO: 23313 - DNA, 25 bp, Artificial
  probe
  misc_feature (1)..(25): SEQ ID NO: 3175; WAN0249IS_at; Start 199; Stop 223
tatttcacaaacttgcttggaagag

SEQ ID NO: 23314 - DNA, 25 bp, Artificial
  probe
  misc_feature (1)..(25): SEQ ID NO: 3175; WAN0249IS_at; Start 90; Stop 114
ttcataaacatttcacaaagaattt

SEQ ID NO: 23315 - DNA, 25 bp, Artificial
  probe
  misc_feature (1)..(25): SEQ ID NO: 3175; WAN0249IS_at; Start 10; Stop 34
catagctttcaaggaacgatatcct

SEQ ID NO: 23316 - DNA, 25 bp, Artificial
  probe
  misc_feature (1)..(25): SEQ ID NO: 3175; WAN0249IS_at; Start 3; Stop 27
tttcctccatagctttcaaggaacg

SEQ ID NO: 23317 - DNA, 25 bp, Artificial
  probe
  misc_feature (1)..(25): SEQ ID NO: 450; WAN0249IT_at; Start 268; Stop 292
gatatcgttccttgaaagctatgga

SEQ ID NO: 23318 - DNA, 25 bp, Artificial
  probe
  misc_feature (1)..(25): SEQ ID NO: 450; WAN0249IT_at; Start 273; Stop 297
cgttccttgaaagctatggaggaaa

SEQ ID NO: 23319 - DNA, 25 bp, Artificial
  probe
  misc_feature (1)..(25): SEQ ID NO: 450; WAN0249IT_at; Start 275; Stop 299
ttccttgaaagctatggaggaaaat

SEQ ID NO: 23320 - DNA, 25 bp, Artificial
  probe
  misc_feature (1)..(25): SEQ ID NO: 450; WAN0249IT_at; Start 74; Stop 98
tccctcttccaagcaagtttgtgaa

SEQ ID NO: 23321 - DNA, 25 bp, Artificial
  probe
  misc_feature (1)..(25): SEQ ID NO: 450; WAN0249IT_at; Start 257; Stop 281
aattaacaaaggatatcgttccttg

SEQ ID NO: 23322 - DNA, 25 bp, Artificial
  probe
  misc_feature (1)..(25): SEQ ID NO: 450; WAN0249IT_at; Start 263; Stop 287
caaaggatatcgttccttgaaagct

SEQ ID NO: 23323 - DNA, 25 bp, Artificial
  probe
  misc_feature (1)..(25): SEQ ID NO: 450; WAN0249IT_at; Start 78; Stop 102
tcttccaagcaagtttgtgaaataa

SEQ ID NO: 23324 - DNA, 25 bp, Artificial
  probe
  misc_feature (1)..(25): SEQ ID NO: 450; WAN0249IT_at; Start 190; Stop 214
tctttgtgaaatgtttatgaaactg

SEQ ID NO: 23325 - DNA, 25 bp, Artificial
  probe
  misc_feature (1)..(25): SEQ ID NO: 450; WAN0249IT_at; Start 72; Stop 96
aatccctcttccaagcaagtttgtg

SEQ ID NO: 23326 - DNA, 25 bp, Artificial
  probe
  misc_feature (1)..(25): SEQ ID NO: 450; WAN0249IT_at; Start 156; Stop 180
gaaaatgagaaaagtttcacaagag

SEQ ID NO: 23327 - DNA, 25 bp, Artificial
  probe
  misc_feature (1)..(25): SEQ ID NO: 450; WAN0249IT_at; Start 132; Stop 156
caaagataaaacctgataagaaaag

SEQ ID NO: 23328 - DNA, 25 bp, Artificial
  probe
  misc_feature (1)..(25): SEQ ID NO: 450; WAN0249IT_at; Start 68; Stop 92
tccaaatccctcttccaagcaagtt

SEQ ID NO: 23329 - DNA, 25 bp, Artificial
  probe
  misc_feature (1)..(25): SEQ ID NO: 450; WAN0249IT_at; Start 270; Stop 294
tatcgttccttgaaagctatggagg

SEQ ID NO: 23330 - DNA, 25 bp, Artificial
  probe
  misc_feature (1)..(25): SEQ ID NO: 450; WAN0249IT_at; Start 173; Stop 197
cacaagagtttaaaaattctttgtg

SEQ ID NO: 23331 - DNA, 25 bp, Artificial
  probe
  misc_feature (1)..(25): SEQ ID NO: 450; WAN0249IT_at; Start 217; Stop 241
tacaaagttgaaataatgcgttata

SEQ ID NO: 23332 - DNA, 25 bp, Artificial
  probe
  misc_feature (1)..(25): SEQ ID NO: 450; WAN0249IT_at; Start 212; Stop 236
ctgtttacaaagttgaaataatgcg

SEQ ID NO: 23333 - DNA, 25 bp, Artificial
  probe
  misc_feature (1)..(25): SEQ ID NO: 450; WAN0249IT_at; Start 125; Stop 149
caaacttcaaagataaaacctgata

SEQ ID NO: 23334 - DNA, 25 bp, Artificial
  probe
  misc_feature (1)..(25): SEQ ID NO: 450; WAN0249IT_at; Start 76; Stop 100
cctcttccaagcaagtttgtgaaat

SEQ ID NO: 23335 - DNA, 25 bp, Artificial
  probe
  misc_feature (1)..(25): SEQ ID NO: 450; WAN0249IT_at; Start 161; Stop 185
tgagaaaagtttcacaagagtttaa

SEQ ID NO: 23336 - DNA, 25 bp, Artificial
  probe
  misc_feature (1)..(25): SEQ ID NO: 450; WAN0249IT_at; Start 226; Stop 250
gaaataatgcgttataataaacttg

SEQ ID NO: 23337 - DNA, 25 bp, Artificial
  probe
  misc_feature (1)..(25): SEQ ID NO: 450; WAN0249IT_at; Start 83; Stop 107
caagcaagtttgtgaaataaaaaat

SEQ ID NO: 23338 - DNA, 25 bp, Artificial
  probe
  misc_feature (1)..(25): SEQ ID NO: 450; WAN0249IT_at; Start 230; Stop 254
taatgcgttataataaacttgtgaa

SEQ ID NO: 23339 - DNA, 25 bp, Artificial
  probe
  misc_feature (1)..(25): SEQ ID NO: 450; WAN0249IT_at; Start 66; Stop 90
tttccaaatccctcttccaagcaag

SEQ ID NO: 23340 - DNA, 25 bp, Artificial
  probe
  misc_feature (1)..(25): SEQ ID NO: 450; WAN0249IT_at; Start 267; Stop 291
ggatatcgttccttgaaagctatgg

SEQ ID NO: 23341 - DNA, 25 bp, Artificial
  probe
  misc_feature (1)..(25): SEQ ID NO: 450; WAN0249IT_at; Start 197; Stop 221
gaaatgtttatgaaactgtttacaa

SEQ ID NO: 23342 - DNA, 25 bp, Artificial
  probe
  misc_feature (1)..(25): SEQ ID NO: 450; WAN0249IT_at; Start 8; Stop 32
ttatcaaaggaggtattattagaat

SEQ ID NO: 23343 - DNA, 25 bp, Artificial
  probe
  misc_feature (1)..(25): SEQ ID NO: 450; WAN0249IT_at; Start 249; Stop 273
tgtgaaaaaattaacaaaggatatc

SEQ ID NO: 23344 - DNA, 25 bp, Artificial
  probe
  misc_feature (1)..(25): SEQ ID NO: 450; WAN0249IT_at; Start 81; Stop 105
tccaagcaagtttgtgaaataaaaa

SEQ ID NO: 23345 - DNA, 25 bp, Artificial
  probe
  misc_feature (1)..(25): SEQ ID NO: 450; WAN0249IT_at; Start 2; Stop 26
gcctccttatcaaaggaggtattat

SEQ ID NO: 23346 - DNA, 25 bp, Artificial
  probe
  misc_feature (1)..(25): SEQ ID NO: 450; WAN0249IT_at; Start 6; Stop 30
ccttatcaaaggaggtattattaga

SEQ ID NO: 23347 - DNA, 25 bp, Artificial
  probe
  misc_feature (1)..(25): SEQ ID NO: 450; WAN0249IT_at; Start 233; Stop 257
tgcgttataataaacttgtgaaaaa

SEQ ID NO: 23348 - DNA, 25 bp, Artificial
  probe
  misc_feature (1)..(25): SEQ ID NO: 450; WAN0249IT_at; Start 205; Stop 229
tatgaaactgtttacaaagttgaaa

SEQ ID NO: 23349 - DNA, 25 bp, Artificial
  probe
  misc_feature (1)..(25): SEQ ID NO: 450; WAN0249IT_at; Start 122; Stop 146
tcacaaacttcaaagataaaacctg

SEQ ID NO: 23350 - DNA, 25 bp, Artificial
  probe
  misc_feature (1)..(25): SEQ ID NO: 450; WAN0249IT_at; Start 116; Stop 140
taaatttcacaaacttcaaagataa

SEQ ID NO: 23351 - DNA, 25 bp, Artificial
  probe
  misc_feature (1)..(25): SEQ ID NO: 4458; WAN0249IU_at; Start 89; Stop 113
tagaatattatagagagaaccagat

SEQ ID NO: 23352 - DNA, 25 bp, Artificial
  probe
  misc_feature (1)..(25): SEQ ID NO: 4458; WAN0249IU_at; Start 37; Stop 61
ttgatacatatcttgtgtttgcctc

SEQ ID NO: 23353 - DNA, 25 bp, Artificial
  probe
  misc_feature (1)..(25): SEQ ID NO: 4458; WAN0249IU_at; Start 53; Stop 77
gtttgcctcatttcttgaactttgt

SEQ ID NO: 23354 - DNA, 25 bp, Artificial
  probe
  misc_feature (1)..(25): SEQ ID NO: 4458; WAN0249IU_at; Start 43; Stop 67
catatcttgtgtttgcctcatttct

SEQ ID NO: 23355 - DNA, 25 bp, Artificial
  probe
  misc_feature (1)..(25): SEQ ID NO: 4458; WAN0249IU_at; Start 91; Stop 115
gaatattatagagagaaccagatta

SEQ ID NO: 23356 - DNA, 25 bp, Artificial
  probe
  misc_feature (1)..(25): SEQ ID NO: 4458; WAN0249IU_at; Start 49; Stop 73
ttgtgtttgcctcatttcttgaact

SEQ ID NO: 23357 - DNA, 25 bp, Artificial
  probe
  misc_feature (1)..(25): SEQ ID NO: 4458; WAN0249IU_at; Start 58; Stop 82
cctcatttcttgaactttgttatac

SEQ ID NO: 23358 - DNA, 25 bp, Artificial
  probe
  misc_feature (1)..(25): SEQ ID NO: 4458; WAN0249IU_at; Start 40; Stop 64
atacatatcttgtgtttgcctcatt

SEQ ID NO: 23359 - DNA, 25 bp, Artificial
  probe
  misc_feature (1)..(25): SEQ ID NO: 4458; WAN0249IU_at; Start 38; Stop 62
tgatacatatcttgtgtttgcctca

SEQ ID NO: 23360 - DNA, 25 bp, Artificial
  probe
  misc_feature (1)..(25): SEQ ID NO: 4458; WAN0249IU_at; Start 42; Stop 66
acatatcttgtgtttgcctcatttc

SEQ ID NO: 23361 - DNA, 25 bp, Artificial
  probe
  misc_feature (1)..(25): SEQ ID NO: 4458; WAN0249IU_at; Start 87; Stop 111
attagaatattatagagagaaccag

SEQ ID NO: 23362 - DNA, 25 bp, Artificial
  probe
  misc_feature (1)..(25): SEQ ID NO: 4458; WAN0249IU_at; Start 71; Stop 95
actttgttatactactattagaata

SEQ ID NO: 23363 - DNA, 25 bp, Artificial
  probe
  misc_feature (1)..(25): SEQ ID NO: 4458; WAN0249IU_at; Start 50; Stop 74
tgtgtttgcctcatttcttgaactt

SEQ ID NO: 23364 - DNA, 25 bp, Artificial
  probe
  misc_feature (1)..(25): SEQ ID NO: 4458; WAN0249IU_at; Start 48; Stop 72
cttgtgtttgcctcatttcttgaac

SEQ ID NO: 23365 - DNA, 25 bp, Artificial
  probe
  misc_feature (1)..(25): SEQ ID NO: 4458; WAN0249IU_at; Start 65; Stop 89
tcttgaactttgttatactactatt

SEQ ID NO: 23366 - DNA, 25 bp, Artificial
  probe
  misc_feature (1)..(25): SEQ ID NO: 4458; WAN0249IU_at; Start 45; Stop 69
tatcttgtgtttgcctcatttcttg

SEQ ID NO: 23367 - DNA, 25 bp, Artificial
  probe
  misc_feature (1)..(25): SEQ ID NO: 4458; WAN0249IU_at; Start 20; Stop 44
gacatttttaaaaattgttgataca

SEQ ID NO: 23368 - DNA, 25 bp, Artificial
  probe
  misc_feature (1)..(25): SEQ ID NO: 4458; WAN0249IU_at; Start 35; Stop 59
tgttgatacatatcttgtgtttgcc

SEQ ID NO: 23369 - DNA, 25 bp, Artificial
  probe
  misc_feature (1)..(25): SEQ ID NO: 4458; WAN0249IU_at; Start 92; Stop 116
aatattatagagagaaccagattaa

SEQ ID NO: 23370 - DNA, 25 bp, Artificial
  probe
  misc_feature (1)..(25): SEQ ID NO: 4458; WAN0249IU_at; Start 41; Stop 65
tacatatcttgtgtttgcctcattt

SEQ ID NO: 23371 - DNA, 25 bp, Artificial
  probe
  misc_feature (1)..(25): SEQ ID NO: 4458; WAN0249IU_at; Start 57; Stop 81
gcctcatttcttgaactttgttata

SEQ ID NO: 23372 - DNA, 25 bp, Artificial
  probe
  misc_feature (1)..(25): SEQ ID NO: 4458; WAN0249IU_at; Start 52; Stop 76
tgtttgcctcatttcttgaactttg

SEQ ID NO: 23373 - DNA, 25 bp, Artificial
  probe
  misc_feature (1)..(25): SEQ ID NO: 4458; WAN0249IU_at; Start 51; Stop 75
gtgtttgcctcatttcttgaacttt

SEQ ID NO: 23374 - DNA, 25 bp, Artificial
  probe
  misc_feature (1)..(25): SEQ ID NO: 4458; WAN0249IU_at; Start 68; Stop 92
tgaactttgttatactactattaga

SEQ ID NO: 23375 - DNA, 25 bp, Artificial
  probe
  misc_feature (1)..(25): SEQ ID NO: 4458; WAN0249IU_at; Start 47; Stop 71
tcttgtgtttgcctcatttcttgaa

SEQ ID NO: 23376 - DNA, 25 bp, Artificial
  probe
  misc_feature (1)..(25): SEQ ID NO: 4458; WAN0249IU_at; Start 61; Stop 85
catttcttgaactttgttatactac

SEQ ID NO: 23377 - DNA, 25 bp, Artificial
  probe
  misc_feature (1)..(25): SEQ ID NO: 4458; WAN0249IU_at; Start 69; Stop 93
gaactttgttatactactattagaa

SEQ ID NO: 23378 - DNA, 25 bp, Artificial
  probe
  misc_feature (1)..(25): SEQ ID NO: 4458; WAN0249IU_at; Start 90; Stop 114
agaatattatagagagaaccagatt

SEQ ID NO: 23379 - DNA, 25 bp, Artificial
  probe
  misc_feature (1)..(25): SEQ ID NO: 4458; WAN0249IU_at; Start 86; Stop 110
tattagaatattatagagagaacca

SEQ ID NO: 23380 - DNA, 25 bp, Artificial
  probe
  misc_feature (1)..(25): SEQ ID NO: 4458; WAN0249IU_at; Start 39; Stop 63
gatacatatcttgtgtttgcctcat

SEQ ID NO: 23381 - DNA, 25 bp, Artificial
  probe
  misc_feature (1)..(25): SEQ ID NO: 4458; WAN0249IU_at; Start 54; Stop 78
tttgcctcatttcttgaactttgtt

SEQ ID NO: 23382 - DNA, 25 bp, Artificial
  probe
  misc_feature (1)..(25): SEQ ID NO: 4458; WAN0249IU_at; Start 36; Stop 60
gttgatacatatcttgtgtttgcct

SEQ ID NO: 23383 - DNA, 25 bp, Artificial
  probe
  misc_feature (1)..(25): SEQ ID NO: 4458; WAN0249IU_at; Start 55; Stop 79
ttgcctcatttcttgaactttgtta

SEQ ID NO: 23384 - DNA, 25 bp, Artificial
  probe
  misc_feature (1)..(25): SEQ ID NO: 4458; WAN0249IU_at; Start 88; Stop 112
ttagaatattatagagagaaccaga

SEQ ID NO: 23385 - DNA, 25 bp, Artificial
  probe
  misc_feature (1)..(25): SEQ ID NO: 4767; WAN0249IV_at; Start 41; Stop 65
caaagttcaagaaatgaggcaaaca

SEQ ID NO: 23386 - DNA, 25 bp, Artificial
  probe
  misc_feature (1)..(25): SEQ ID NO: 4767; WAN0249IV_at; Start 62; Stop 86
aacacaagatatgtatcaacaattt

SEQ ID NO: 23387 - DNA, 25 bp, Artificial
  probe
  misc_feature (1)..(25): SEQ ID NO: 4767; WAN0249IV_at; Start 77; Stop 101
tcaacaatttttaaaaatgtctaga

SEQ ID NO: 23388 - DNA, 25 bp, Artificial
  probe
  misc_feature (1)..(25): SEQ ID NO: 4767; WAN0249IV_at; Start 42; Stop 66
aaagttcaagaaatgaggcaaacac

SEQ ID NO: 23389 - DNA, 25 bp, Artificial
  probe
  misc_feature (1)..(25): SEQ ID NO: 4767; WAN0249IV_at; Start 6; Stop 30
ctggttctctctataatattctaat

SEQ ID NO: 23390 - DNA, 25 bp, Artificial
  probe
  misc_feature (1)..(25): SEQ ID NO: 4767; WAN0249IV_at; Start 48; Stop 72
caagaaatgaggcaaacacaagata

SEQ ID NO: 23391 - DNA, 25 bp, Artificial
  probe
  misc_feature (1)..(25): SEQ ID NO: 4767; WAN0249IV_at; Start 3; Stop 27
aatctggttctctctataatattct

SEQ ID NO: 23392 - DNA, 25 bp, Artificial
  probe
  misc_feature (1)..(25): SEQ ID NO: 4767; WAN0249IV_at; Start 43; Stop 67
aagttcaagaaatgaggcaaacaca

SEQ ID NO: 23393 - DNA, 25 bp, Artificial
  probe
  misc_feature (1)..(25): SEQ ID NO: 4767; WAN0249IV_at; Start 35; Stop 59
gtataacaaagttcaagaaatgagg

SEQ ID NO: 23394 - DNA, 25 bp, Artificial
  probe
  misc_feature (1)..(25): SEQ ID NO: 4767; WAN0249IV_at; Start 39; Stop 63
aacaaagttcaagaaatgaggcaaa

SEQ ID NO: 23395 - DNA, 25 bp, Artificial
  probe
  misc_feature (1)..(25): SEQ ID NO: 4767; WAN0249IV_at; Start 49; Stop 73
aagaaatgaggcaaacacaagatat

SEQ ID NO: 23396 - DNA, 25 bp, Artificial
  probe
  misc_feature (1)..(25): SEQ ID NO: 4767; WAN0249IV_at; Start 8; Stop 32
ggttctctctataatattctaatag

SEQ ID NO: 23397 - DNA, 25 bp, Artificial
  probe
  misc_feature (1)..(25): SEQ ID NO: 4767; WAN0249IV_at; Start 24; Stop 48
ttctaatagtagtataacaaagttc

SEQ ID NO: 23398 - DNA, 25 bp, Artificial
  probe
  misc_feature (1)..(25): SEQ ID NO: 4767; WAN0249IV_at; Start 46; Stop 70
ttcaagaaatgaggcaaacacaaga

SEQ ID NO: 23399 - DNA, 25 bp, Artificial
  probe
  misc_feature (1)..(25): SEQ ID NO: 4767; WAN0249IV_at; Start 38; Stop 62
taacaaagttcaagaaatgaggcaa

SEQ ID NO: 23400 - DNA, 25 bp, Artificial
  probe
  misc_feature (1)..(25): SEQ ID NO: 4767; WAN0249IV_at; Start 26; Stop 50
ctaatagtagtataacaaagttcaa

SEQ ID NO: 23401 - DNA, 25 bp, Artificial
  probe
  misc_feature (1)..(25): SEQ ID NO: 4767; WAN0249IV_at; Start 44; Stop 68
agttcaagaaatgaggcaaacacaa

SEQ ID NO: 23402 - DNA, 25 bp, Artificial
  probe
  misc_feature (1)..(25): SEQ ID NO: 4767; WAN0249IV_at; Start 32; Stop 56
gtagtataacaaagttcaagaaatg

SEQ ID NO: 23403 - DNA, 25 bp, Artificial
  probe
  misc_feature (1)..(25): SEQ ID NO: 4767; WAN0249IV_at; Start 40; Stop 64
acaaagttcaagaaatgaggcaaac

SEQ ID NO: 23404 - DNA, 25 bp, Artificial
  probe
  misc_feature (1)..(25): SEQ ID NO: 4767; WAN0249IV_at; Start 2; Stop 26
taatctggttctctctataatattc

SEQ ID NO: 23405 - DNA, 25 bp, Artificial
  probe
  misc_feature (1)..(25): SEQ ID NO: 4767; WAN0249IV_at; Start 25; Stop 49
tctaatagtagtataacaaagttca

SEQ ID NO: 23406 - DNA, 25 bp, Artificial
  probe
  misc_feature (1)..(25): SEQ ID NO: 4767; WAN0249IV_at; Start 33; Stop 57
tagtataacaaagttcaagaaatga

SEQ ID NO: 23407 - DNA, 25 bp, Artificial
  probe
  misc_feature (1)..(25): SEQ ID NO: 4767; WAN0249IV_at; Start 36; Stop 60
tataacaaagttcaagaaatgaggc

SEQ ID NO: 23408 - DNA, 25 bp, Artificial
  probe
  misc_feature (1)..(25): SEQ ID NO: 4767; WAN0249IV_at; Start 27; Stop 51
taatagtagtataacaaagttcaag

SEQ ID NO: 23409 - DNA, 25 bp, Artificial
  probe
  misc_feature (1)..(25): SEQ ID NO: 4767; WAN0249IV_at; Start 66; Stop 90
caagatatgtatcaacaatttttaa

SEQ ID NO: 23410 - DNA, 25 bp, Artificial
  probe
  misc_feature (1)..(25): SEQ ID NO: 4767; WAN0249IV_at; Start 5; Stop 29
tctggttctctctataatattctaa

SEQ ID NO: 23411 - DNA, 25 bp, Artificial
  probe
  misc_feature (1)..(25): SEQ ID NO: 4767; WAN0249IV_at; Start 4; Stop 28
atctggttctctctataatattcta

SEQ ID NO: 23412 - DNA, 25 bp, Artificial
  probe
  misc_feature (1)..(25): SEQ ID NO: 4767; WAN0249IV_at; Start 73; Stop 97
tgtatcaacaatttttaaaaatgtc

SEQ ID NO: 23413 - DNA, 25 bp, Artificial
  probe
  misc_feature (1)..(25): SEQ ID NO: 4767; WAN0249IV_at; Start 45; Stop 69
gttcaagaaatgaggcaaacacaag

SEQ ID NO: 23414 - DNA, 25 bp, Artificial
  probe
  misc_feature (1)..(25): SEQ ID NO: 4767; WAN0249IV_at; Start 11; Stop 35
tctctctataatattctaatagtag

SEQ ID NO: 23415 - DNA, 25 bp, Artificial
  probe
  misc_feature (1)..(25): SEQ ID NO: 4767; WAN0249IV_at; Start 30; Stop 54
tagtagtataacaaagttcaagaaa

SEQ ID NO: 23416 - DNA, 25 bp, Artificial
  probe
  misc_feature (1)..(25): SEQ ID NO: 4767; WAN0249IV_at; Start 50; Stop 74
agaaatgaggcaaacacaagatatg

SEQ ID NO: 23417 - DNA, 25 bp, Artificial
  probe
  misc_feature (1)..(25): SEQ ID NO: 4767; WAN0249IV_at; Start 28; Stop 52
aatagtagtataacaaagttcaaga

SEQ ID NO: 23418 - DNA, 25 bp, Artificial
  probe
  misc_feature (1)..(25): SEQ ID NO: 4767; WAN0249IV_at; Start 37; Stop 61
ataacaaagttcaagaaatgaggca

SEQ ID NO: 23419 - DNA, 25 bp, Artificial
  probe
  misc_feature (1)..(25): SEQ ID NO: 4761; WAN0249IW_at; Start 264; Stop 288
gaatagtagactgtgacttctaaca

SEQ ID NO: 23420 - DNA, 25 bp, Artificial
  probe
  misc_feature (1)..(25): SEQ ID NO: 4761; WAN0249IW_at; Start 23; Stop 47
caagaaggtcccatctatgcttaaa

SEQ ID NO: 23421 - DNA, 25 bp, Artificial
  probe
  misc_feature (1)..(25): SEQ ID NO: 4761; WAN0249IW_at; Start 226; Stop 250
gagtcttttcttgtaacacatatag

SEQ ID NO: 23422 - DNA, 25 bp, Artificial
  probe
  misc_feature (1)..(25): SEQ ID NO: 4761; WAN0249IW_at; Start 133; Stop 157
agtaggtactgaaattgttcacctg

SEQ ID NO: 23423 - DNA, 25 bp, Artificial
  probe
  misc_feature (1)..(25): SEQ ID NO: 4761; WAN0249IW_at; Start 270; Stop 294
tagactgtgacttctaacaaattgc

SEQ ID NO: 23424 - DNA, 25 bp, Artificial
  probe
  misc_feature (1)..(25): SEQ ID NO: 4761; WAN0249IW_at; Start 203; Stop 227
tcttacactgacgagaagtttttga

SEQ ID NO: 23425 - DNA, 25 bp, Artificial
  probe
  misc_feature (1)..(25): SEQ ID NO: 4761; WAN0249IW_at; Start 211; Stop 235
tgacgagaagtttttgagtcttttc

SEQ ID NO: 23426 - DNA, 25 bp, Artificial
  probe
  misc_feature (1)..(25): SEQ ID NO: 4761; WAN0249IW_at; Start 121; Stop 145
tatagcttatagagtaggtactgaa

SEQ ID NO: 23427 - DNA, 25 bp, Artificial
  probe
  misc_feature (1)..(25): SEQ ID NO: 4761; WAN0249IW_at; Start 50; Stop 74
gtttctcttttctaaataagatggc

SEQ ID NO: 23428 - DNA, 25 bp, Artificial
  probe
  misc_feature (1)..(25): SEQ ID NO: 4761; WAN0249IW_at; Start 208; Stop 232
cactgacgagaagtttttgagtctt

SEQ ID NO: 23429 - DNA, 25 bp, Artificial
  probe
  misc_feature (1)..(25): SEQ ID NO: 4761; WAN0249IW_at; Start 107; Stop 131
gaaaaatatcttcgtatagcttata

SEQ ID NO: 23430 - DNA, 25 bp, Artificial
  probe
  misc_feature (1)..(25): SEQ ID NO: 4761; WAN0249IW_at; Start 233; Stop 257
ttcttgtaacacatatagtatactg

SEQ ID NO: 23431 - DNA, 25 bp, Artificial
  probe
  misc_feature (1)..(25): SEQ ID NO: 4761; WAN0249IW_at; Start 152; Stop 176
cacctgatctacttcttatagttat

SEQ ID NO: 23432 - DNA, 25 bp, Artificial
  probe
  misc_feature (1)..(25): SEQ ID NO: 4761; WAN0249IW_at; Start 293; Stop 317
gctagaaatgaatttcaatctccca

SEQ ID NO: 23433 - DNA, 25 bp, Artificial
  probe
  misc_feature (1)..(25): SEQ ID NO: 4761; WAN0249IW_at; Start 34; Stop 58
catctatgcttaaatggtttctctt

SEQ ID NO: 23434 - DNA, 25 bp, Artificial
  probe
  misc_feature (1)..(25): SEQ ID NO: 4761; WAN0249IW_at; Start 302; Stop 326
gaatttcaatctcccaatttatttg

SEQ ID NO: 23435 - DNA, 25 bp, Artificial
  probe
  misc_feature (1)..(25): SEQ ID NO: 4761; WAN0249IW_at; Start 206; Stop 230
tacactgacgagaagtttttgagtc

SEQ ID NO: 23436 - DNA, 25 bp, Artificial
  probe
  misc_feature (1)..(25): SEQ ID NO: 4761; WAN0249IW_at; Start 96; Stop 120
tccatcatgttgaaaaatatcttcg

SEQ ID NO: 23437 - DNA, 25 bp, Artificial
  probe
  misc_feature (1)..(25): SEQ ID NO: 4761; WAN0249IW_at; Start 26; Stop 50
gaaggtcccatctatgcttaaatgg

SEQ ID NO: 23438 - DNA, 25 bp, Artificial
  probe
  misc_feature (1)..(25): SEQ ID NO: 4761; WAN0249IW_at; Start 130; Stop 154
tagagtaggtactgaaattgttcac

SEQ ID NO: 23439 - DNA, 25 bp, Artificial
  probe
  misc_feature (1)..(25): SEQ ID NO: 4761; WAN0249IW_at; Start 20; Stop 44
gggcaagaaggtcccatctatgctt

SEQ ID NO: 23440 - DNA, 25 bp, Artificial
  probe
  misc_feature (1)..(25): SEQ ID NO: 4761; WAN0249IW_at; Start 259; Stop 283
ggttagaatagtagactgtgacttc

SEQ ID NO: 23441 - DNA, 25 bp, Artificial
  probe
  misc_feature (1)..(25): SEQ ID NO: 4761; WAN0249IW_at; Start 13; Stop 37
taaaacagggcaagaaggtcccatc

SEQ ID NO: 23442 - DNA, 25 bp, Artificial
  probe
  misc_feature (1)..(25): SEQ ID NO: 4761; WAN0249IW_at; Start 29; Stop 53
ggtcccatctatgcttaaatggttt

SEQ ID NO: 23443 - DNA, 25 bp, Artificial
  probe
  misc_feature (1)..(25): SEQ ID NO: 4761; WAN0249IW_at; Start 143; Stop 167
gaaattgttcacctgatctacttct

SEQ ID NO: 23444 - DNA, 25 bp, Artificial
  probe
  misc_feature (1)..(25): SEQ ID NO: 4761; WAN0249IW_at; Start 15; Stop 39
aaacagggcaagaaggtcccatcta

SEQ ID NO: 23445 - DNA, 25 bp, Artificial
  probe
  misc_feature (1)..(25): SEQ ID NO: 4761; WAN0249IW_at; Start 115; Stop 139
tcttcgtatagcttatagagtaggt

SEQ ID NO: 23446 - DNA, 25 bp, Artificial
  probe
  misc_feature (1)..(25): SEQ ID NO: 4761; WAN0249IW_at; Start 139; Stop 163
tactgaaattgttcacctgatctac

SEQ ID NO: 23447 - DNA, 25 bp, Artificial
  probe
  misc_feature (1)..(25): SEQ ID NO: 4761; WAN0249IW_at; Start 274; Stop 298
ctgtgacttctaacaaattgctaga

SEQ ID NO: 23448 - DNA, 25 bp, Artificial
  probe
  misc_feature (1)..(25): SEQ ID NO: 4761; WAN0249IW_at; Start 68; Stop 92
agatggctttaaaagagtgatcgtt

SEQ ID NO: 23449 - DNA, 25 bp, Artificial
  probe
  misc_feature (1)..(25): SEQ ID NO: 4761; WAN0249IW_at; Start 18; Stop 42
cagggcaagaaggtcccatctatgc

SEQ ID NO: 23450 - DNA, 25 bp, Artificial
  probe
  misc_feature (1)..(25): SEQ ID NO: 4761; WAN0249IW_at; Start 66; Stop 90
taagatggctttaaaagagtgatcg

SEQ ID NO: 23451 - DNA, 25 bp, Artificial
  probe
  misc_feature (1)..(25): SEQ ID NO: 4761; WAN0249IW_at; Start 148; Stop 172
tgttcacctgatctacttcttatag

SEQ ID NO: 23452 - DNA, 25 bp, Artificial
  probe
  misc_feature (1)..(25): SEQ ID NO: 4761; WAN0249IW_at; Start 278; Stop 302
gacttctaacaaattgctagaaatg

SEQ ID NO: 23453 - DNA, 25 bp, Artificial
  probe
  misc_feature (1)..(25): SEQ ID NO: 3288; WAN0249IX_at; Start 252; Stop 276
gaagtagatcaggtgaacaatttca

SEQ ID NO: 23454 - DNA, 25 bp, Artificial
  probe
  misc_feature (1)..(25): SEQ ID NO: 3288; WAN0249IX_at; Start 298; Stop 322
cgaagatatttttcaacatgatgga

SEQ ID NO: 23455 - DNA, 25 bp, Artificial
  probe
  misc_feature (1)..(25): SEQ ID NO: 3288; WAN0249IX_at; Start 289; Stop 313
taagctatacgaagatatttttcaa

SEQ ID NO: 23456 - DNA, 25 bp, Artificial
  probe
  misc_feature (1)..(25): SEQ ID NO: 3288; WAN0249IX_at; Start 362; Stop 386
gagaaaccatttaagcatagatggg

SEQ ID NO: 23457 - DNA, 25 bp, Artificial
  probe
  misc_feature (1)..(25): SEQ ID NO: 3288; WAN0249IX_at; Start 374; Stop 398
aagcatagatgggaccttcttgccc

SEQ ID NO: 23458 - DNA, 25 bp, Artificial
  probe
  misc_feature (1)..(25): SEQ ID NO: 3288; WAN0249IX_at; Start 188; Stop 212
gactcaaaaacttctcgtcagtgta

SEQ ID NO: 23459 - DNA, 25 bp, Artificial
  probe
  misc_feature (1)..(25): SEQ ID NO: 3288; WAN0249IX_at; Start 171; Stop 195
tatgtgttacaagaaaagactcaaa

SEQ ID NO: 23460 - DNA, 25 bp, Artificial
  probe
  misc_feature (1)..(25): SEQ ID NO: 3288; WAN0249IX_at; Start 122; Stop 146
tagcaatttgttagaagtcacagtc

SEQ ID NO: 23461 - DNA, 25 bp, Artificial
  probe
  misc_feature (1)..(25): SEQ ID NO: 3288; WAN0249IX_at; Start 258; Stop 282
gatcaggtgaacaatttcagtacct

SEQ ID NO: 23462 - DNA, 25 bp, Artificial
  probe
  misc_feature (1)..(25): SEQ ID NO: 3288; WAN0249IX_at; Start 161; Stop 185
cagtatactatatgtgttacaagaa

SEQ ID NO: 23463 - DNA, 25 bp, Artificial
  probe
  misc_feature (1)..(25): SEQ ID NO: 3288; WAN0249IX_at; Start 120; Stop 144
tctagcaatttgttagaagtcacag

SEQ ID NO: 23464 - DNA, 25 bp, Artificial
  probe
  misc_feature (1)..(25): SEQ ID NO: 3288; WAN0249IX_at; Start 125; Stop 149
caatttgttagaagtcacagtctac

SEQ ID NO: 23465 - DNA, 25 bp, Artificial
  probe
  misc_feature (1)..(25): SEQ ID NO: 3288; WAN0249IX_at; Start 357; Stop 381
gaaaagagaaaccatttaagcatag

SEQ ID NO: 23466 - DNA, 25 bp, Artificial
  probe
  misc_feature (1)..(25): SEQ ID NO: 3288; WAN0249IX_at; Start 275; Stop 299
cagtacctactctataagctatacg

SEQ ID NO: 23467 - DNA, 25 bp, Artificial
  probe
  misc_feature (1)..(25): SEQ ID NO: 3288; WAN0249IX_at; Start 346; Stop 370
catcttatttagaaaagagaaacca

SEQ ID NO: 23468 - DNA, 25 bp, Artificial
  probe
  misc_feature (1)..(25): SEQ ID NO: 3288; WAN0249IX_at; Start 192; Stop 216
caaaaacttctcgtcagtgtaagaa

SEQ ID NO: 23469 - DNA, 25 bp, Artificial
  probe
  misc_feature (1)..(25): SEQ ID NO: 3288; WAN0249IX_at; Start 381; Stop 405
gatgggaccttcttgccctgtttta

SEQ ID NO: 23470 - DNA, 25 bp, Artificial
  probe
  misc_feature (1)..(25): SEQ ID NO: 3288; WAN0249IX_at; Start 326; Stop 350
aacgatcactcttttaaagccatct

SEQ ID NO: 23471 - DNA, 25 bp, Artificial
  probe
  misc_feature (1)..(25): SEQ ID NO: 3288; WAN0249IX_at; Start 247; Stop 271
tataagaagtagatcaggtgaacaa

SEQ ID NO: 23472 - DNA, 25 bp, Artificial
  probe
  misc_feature (1)..(25): SEQ ID NO: 3288; WAN0249IX_at; Start 372; Stop 396
ttaagcatagatgggaccttcttgc

SEQ ID NO: 23473 - DNA, 25 bp, Artificial
  probe
  misc_feature (1)..(25): SEQ ID NO: 3288; WAN0249IX_at; Start 365; Stop 389
aaaccatttaagcatagatgggacc

SEQ ID NO: 23474 - DNA, 25 bp, Artificial
  probe
  misc_feature (1)..(25): SEQ ID NO: 3288; WAN0249IX_at; Start 130; Stop 154
tgttagaagtcacagtctactattc

SEQ ID NO: 23475 - DNA, 25 bp, Artificial
  probe
  misc_feature (1)..(25): SEQ ID NO: 3288; WAN0249IX_at; Start 135; Stop 159
gaagtcacagtctactattctaacc

SEQ ID NO: 23476 - DNA, 25 bp, Artificial
  probe
  misc_feature (1)..(25): SEQ ID NO: 3288; WAN0249IX_at; Start 184; Stop 208
aaaagactcaaaaacttctcgtcag

SEQ ID NO: 23477 - DNA, 25 bp, Artificial
  probe
  misc_feature (1)..(25): SEQ ID NO: 3288; WAN0249IX_at; Start 377; Stop 401
catagatgggaccttcttgccctgt

SEQ ID NO: 23478 - DNA, 25 bp, Artificial
  probe
  misc_feature (1)..(25): SEQ ID NO: 3288; WAN0249IX_at; Start 340; Stop 364
taaagccatcttatttagaaaagag

SEQ ID NO: 23479 - DNA, 25 bp, Artificial
  probe
  misc_feature (1)..(25): SEQ ID NO: 3288; WAN0249IX_at; Start 264; Stop 288
gtgaacaatttcagtacctactcta

SEQ ID NO: 23480 - DNA, 25 bp, Artificial
  probe
  misc_feature (1)..(25): SEQ ID NO: 3288; WAN0249IX_at; Start 180; Stop 204
caagaaaagactcaaaaacttctcg

SEQ ID NO: 23481 - DNA, 25 bp, Artificial
  probe
  misc_feature (1)..(25): SEQ ID NO: 3288; WAN0249IX_at; Start 102; Stop 126
gggagattgaaattcatttctagca

SEQ ID NO: 23482 - DNA, 25 bp, Artificial
  probe
  misc_feature (1)..(25): SEQ ID NO: 3288; WAN0249IX_at; Start 280; Stop 304
cctactctataagctatacgaagat

SEQ ID NO: 23483 - DNA, 25 bp, Artificial
  probe
  misc_feature (1)..(25): SEQ ID NO: 3288; WAN0249IX_at; Start 369; Stop 393
catttaagcatagatgggaccttct

SEQ ID NO: 23484 - DNA, 25 bp, Artificial
  probe
  misc_feature (1)..(25): SEQ ID NO: 3288; WAN0249IX_at; Start 88; Stop 112
tgaacaaataaattgggagattgaa

SEQ ID NO: 23485 - DNA, 25 bp, Artificial
  probe
  misc_feature (1)..(25): SEQ ID NO: 3288; WAN0249IX_at; Start 168; Stop 192
ctatatgtgttacaagaaaagactc

SEQ ID NO: 23486 - DNA, 25 bp, Artificial
  probe
  misc_feature (1)..(25): SEQ ID NO: 3288; WAN0249IX_at; Start 243; Stop 267
taactataagaagtagatcaggtga

SEQ ID NO: 23487 - DNA, 25 bp, Artificial
  probe
  misc_feature (1)..(25): SEQ ID NO: 3276; WAN0249IY_at; Start 34; Stop 58
agagtttgaaggctttatcaaaggt

SEQ ID NO: 23488 - DNA, 25 bp, Artificial
  probe
  misc_feature (1)..(25): SEQ ID NO: 3276; WAN0249IY_at; Start 32; Stop 56
agagagtttgaaggctttatcaaag

SEQ ID NO: 23489 - DNA, 25 bp, Artificial
  probe
  misc_feature (1)..(25): SEQ ID NO: 3276; WAN0249IY_at; Start 66; Stop 90
ggcataatgacttttcctcgtttcc

SEQ ID NO: 23490 - DNA, 25 bp, Artificial
  probe
  misc_feature (1)..(25): SEQ ID NO: 3276; WAN0249IY_at; Start 26; Stop 50
tacagcagagagtttgaaggcttta

SEQ ID NO: 23491 - DNA, 25 bp, Artificial
  probe
  misc_feature (1)..(25): SEQ ID NO: 3276; WAN0249IY_at; Start 67; Stop 91
gcataatgacttttcctcgtttcca

SEQ ID NO: 23492 - DNA, 25 bp, Artificial
  probe
  misc_feature (1)..(25): SEQ ID NO: 3276; WAN0249IY_at; Start 46; Stop 70
ctttatcaaaggtttttcttggcat

SEQ ID NO: 23493 - DNA, 25 bp, Artificial
  probe
  misc_feature (1)..(25): SEQ ID NO: 3276; WAN0249IY_at; Start 60; Stop 84
tttcttggcataatgacttttcctc

SEQ ID NO: 23494 - DNA, 25 bp, Artificial
  probe
  misc_feature (1)..(25): SEQ ID NO: 3276; WAN0249IY_at; Start 25; Stop 49
ttacagcagagagtttgaaggcttt

SEQ ID NO: 23495 - DNA, 25 bp, Artificial
  probe
  misc_feature (1)..(25): SEQ ID NO: 3276; WAN0249IY_at; Start 54; Stop 78
aaggtttttcttggcataatgactt

SEQ ID NO: 23496 - DNA, 25 bp, Artificial
  probe
  misc_feature (1)..(25): SEQ ID NO: 3276; WAN0249IY_at; Start 28; Stop 52
cagcagagagtttgaaggctttatc

SEQ ID NO: 23497 - DNA, 25 bp, Artificial
  probe
  misc_feature (1)..(25): SEQ ID NO: 3276; WAN0249IY_at; Start 61; Stop 85
ttcttggcataatgacttttcctcg

SEQ ID NO: 23498 - DNA, 25 bp, Artificial
  probe
  misc_feature (1)..(25): SEQ ID NO: 3276; WAN0249IY_at; Start 31; Stop 55
cagagagtttgaaggctttatcaaa

SEQ ID NO: 23499 - DNA, 25 bp, Artificial
  probe
  misc_feature (1)..(25): SEQ ID NO: 3276; WAN0249IY_at; Start 52; Stop 76
caaaggtttttcttggcataatgac

SEQ ID NO: 23500 - DNA, 25 bp, Artificial
  probe
  misc_feature (1)..(25): SEQ ID NO: 3276; WAN0249IY_at; Start 49; Stop 73
tatcaaaggtttttcttggcataat

SEQ ID NO: 23501 - DNA, 25 bp, Artificial
  probe
  misc_feature (1)..(25): SEQ ID NO: 3276; WAN0249IY_at; Start 119; Stop 143
caagtccacccttaagttagataat

SEQ ID NO: 23502 - DNA, 25 bp, Artificial
  probe
  misc_feature (1)..(25): SEQ ID NO: 3276; WAN0249IY_at; Start 88; Stop 112
tccacttaattttgtgtctacttta

SEQ ID NO: 23503 - DNA, 25 bp, Artificial
  probe
  misc_feature (1)..(25): SEQ ID NO: 3276; WAN0249IY_at; Start 100; Stop 124
tgtgtctactttattataccaagtc

SEQ ID NO: 23504 - DNA, 25 bp, Artificial
  probe
  misc_feature (1)..(25): SEQ ID NO: 3276; WAN0249IY_at; Start 102; Stop 126
tgtctactttattataccaagtcca

SEQ ID NO: 23505 - DNA, 25 bp, Artificial
  probe
  misc_feature (1)..(25): SEQ ID NO: 3276; WAN0249IY_at; Start 62; Stop 86
tcttggcataatgacttttcctcgt

SEQ ID NO: 23506 - DNA, 25 bp, Artificial
  probe
  misc_feature (1)..(25): SEQ ID NO: 3276; WAN0249IY_at; Start 29; Stop 53
agcagagagtttgaaggctttatca

SEQ ID NO: 23507 - DNA, 25 bp, Artificial
  probe
  misc_feature (1)..(25): SEQ ID NO: 3276; WAN0249IY_at; Start 58; Stop 82
tttttcttggcataatgacttttcc

SEQ ID NO: 23508 - DNA, 25 bp, Artificial
  probe
  misc_feature (1)..(25): SEQ ID NO: 3276; WAN0249IY_at; Start 45; Stop 69
gctttatcaaaggtttttcttggca

SEQ ID NO: 23509 - DNA, 25 bp, Artificial
  probe
  misc_feature (1)..(25): SEQ ID NO: 3276; WAN0249IY_at; Start 69; Stop 93
ataatgacttttcctcgtttccact

SEQ ID NO: 23510 - DNA, 25 bp, Artificial
  probe
  misc_feature (1)..(25): SEQ ID NO: 3276; WAN0249IY_at; Start 53; Stop 77
aaaggtttttcttggcataatgact

SEQ ID NO: 23511 - DNA, 25 bp, Artificial
  probe
  misc_feature (1)..(25): SEQ ID NO: 3276; WAN0249IY_at; Start 104; Stop 128
tctactttattataccaagtccacc

SEQ ID NO: 23512 - DNA, 25 bp, Artificial
  probe
  misc_feature (1)..(25): SEQ ID NO: 3276; WAN0249IY_at; Start 30; Stop 54
gcagagagtttgaaggctttatcaa

SEQ ID NO: 23513 - DNA, 25 bp, Artificial
  probe
  misc_feature (1)..(25): SEQ ID NO: 3276; WAN0249IY_at; Start 82; Stop 106
ctcgtttccacttaattttgtgtct

SEQ ID NO: 23514 - DNA, 25 bp, Artificial
  probe
  misc_feature (1)..(25): SEQ ID NO: 3276; WAN0249IY_at; Start 51; Stop 75
tcaaaggtttttcttggcataatga

SEQ ID NO: 23515 - DNA, 25 bp, Artificial
  probe
  misc_feature (1)..(25): SEQ ID NO: 3276; WAN0249IY_at; Start 68; Stop 92
cataatgacttttcctcgtttccac

SEQ ID NO: 23516 - DNA, 25 bp, Artificial
  probe
  misc_feature (1)..(25): SEQ ID NO: 3276; WAN0249IY_at; Start 63; Stop 87
cttggcataatgacttttcctcgtt

SEQ ID NO: 23517 - DNA, 25 bp, Artificial
  probe
  misc_feature (1)..(25): SEQ ID NO: 3276; WAN0249IY_at; Start 27; Stop 51
acagcagagagtttgaaggctttat

SEQ ID NO: 23518 - DNA, 25 bp, Artificial
  probe
  misc_feature (1)..(25): SEQ ID NO: 3276; WAN0249IY_at; Start 24; Stop 48
tttacagcagagagtttgaaggctt

SEQ ID NO: 23519 - DNA, 25 bp, Artificial
  probe
  misc_feature (1)..(25): SEQ ID NO: 3276; WAN0249IY_at; Start 64; Stop 88
ttggcataatgacttttcctcgttt

SEQ ID NO: 23520 - DNA, 25 bp, Artificial
  probe
  misc_feature (1)..(25): SEQ ID NO: 3276; WAN0249IY_at; Start 65; Stop 89
tggcataatgacttttcctcgtttc

SEQ ID NO: 23521 - DNA, 25 bp, Artificial
  probe
  misc_feature (1)..(25): SEQ ID NO: 3183; WAN0249IZ_at; Start 5; Stop 29
attatctaacttaagggtggacttg

SEQ ID NO: 23522 - DNA, 25 bp, Artificial
  probe
  misc_feature (1)..(25): SEQ ID NO: 3183; WAN0249IZ_at; Start 63; Stop 87
cgaggaaaagtcattatgccaagaa

SEQ ID NO: 23523 - DNA, 25 bp, Artificial
  probe
  misc_feature (1)..(25): SEQ ID NO: 3183; WAN0249IZ_at; Start 56; Stop 80
gtggaaacgaggaaaagtcattatg

SEQ ID NO: 23524 - DNA, 25 bp, Artificial
  probe
  misc_feature (1)..(25): SEQ ID NO: 3183; WAN0249IZ_at; Start 100; Stop 124
aagccttcaaactctctgctgtaaa

SEQ ID NO: 23525 - DNA, 25 bp, Artificial
  probe
  misc_feature (1)..(25): SEQ ID NO: 3183; WAN0249IZ_at; Start 93; Stop 117
tttgataaagccttcaaactctctg

SEQ ID NO: 23526 - DNA, 25 bp, Artificial
  probe
  misc_feature (1)..(25): SEQ ID NO: 3183; WAN0249IZ_at; Start 66; Stop 90
ggaaaagtcattatgccaagaaaaa

SEQ ID NO: 23527 - DNA, 25 bp, Artificial
  probe
  misc_feature (1)..(25): SEQ ID NO: 3183; WAN0249IZ_at; Start 95; Stop 119
tgataaagccttcaaactctctgct

SEQ ID NO: 23528 - DNA, 25 bp, Artificial
  probe
  misc_feature (1)..(25): SEQ ID NO: 3183; WAN0249IZ_at; Start 42; Stop 66
agacacaaaattaagtggaaacgag

SEQ ID NO: 23529 - DNA, 25 bp, Artificial
  probe
  misc_feature (1)..(25): SEQ ID NO: 3183; WAN0249IZ_at; Start 28; Stop 52
tggtataataaagtagacacaaaat

SEQ ID NO: 23530 - DNA, 25 bp, Artificial
  probe
  misc_feature (1)..(25): SEQ ID NO: 3183; WAN0249IZ_at; Start 36; Stop 60
taaagtagacacaaaattaagtgga

SEQ ID NO: 23531 - DNA, 25 bp, Artificial
  probe
  misc_feature (1)..(25): SEQ ID NO: 3183; WAN0249IZ_at; Start 22; Stop 46
tggacttggtataataaagtagaca

SEQ ID NO: 23532 - DNA, 25 bp, Artificial
  probe
  misc_feature (1)..(25): SEQ ID NO: 3183; WAN0249IZ_at; Start 60; Stop 84
aaacgaggaaaagtcattatgccaa

SEQ ID NO: 23533 - DNA, 25 bp, Artificial
  probe
  misc_feature (1)..(25): SEQ ID NO: 3183; WAN0249IZ_at; Start 20; Stop 44
ggtggacttggtataataaagtaga

SEQ ID NO: 23534 - DNA, 25 bp, Artificial
  probe
  misc_feature (1)..(25): SEQ ID NO: 3183; WAN0249IZ_at; Start 90; Stop 114
acctttgataaagccttcaaactct

SEQ ID NO: 23535 - DNA, 25 bp, Artificial
  probe
  misc_feature (1)..(25): SEQ ID NO: 3183; WAN0249IZ_at; Start 98; Stop 122
taaagccttcaaactctctgctgta

SEQ ID NO: 23536 - DNA, 25 bp, Artificial
  probe
  misc_feature (1)..(25): SEQ ID NO: 3183; WAN0249IZ_at; Start 67; Stop 91
gaaaagtcattatgccaagaaaaac

SEQ ID NO: 23537 - DNA, 25 bp, Artificial
  probe
  misc_feature (1)..(25): SEQ ID NO: 3183; WAN0249IZ_at; Start 64; Stop 88
gaggaaaagtcattatgccaagaaa

SEQ ID NO: 23538 - DNA, 25 bp, Artificial
  probe
  misc_feature (1)..(25): SEQ ID NO: 3183; WAN0249IZ_at; Start 55; Stop 79
agtggaaacgaggaaaagtcattat

SEQ ID NO: 23539 - DNA, 25 bp, Artificial
  probe
  misc_feature (1)..(25): SEQ ID NO: 3183; WAN0249IZ_at; Start 59; Stop 83
gaaacgaggaaaagtcattatgcca

SEQ ID NO: 23540 - DNA, 25 bp, Artificial
  probe
  misc_feature (1)..(25): SEQ ID NO: 3183; WAN0249IZ_at; Start 21; Stop 45
gtggacttggtataataaagtagac

SEQ ID NO: 23541 - DNA, 25 bp, Artificial
  probe
  misc_feature (1)..(25): SEQ ID NO: 3183; WAN0249IZ_at; Start 65; Stop 89
aggaaaagtcattatgccaagaaaa

SEQ ID NO: 23542 - DNA, 25 bp, Artificial
  probe
  misc_feature (1)..(25): SEQ ID NO: 3183; WAN0249IZ_at; Start 61; Stop 85
aacgaggaaaagtcattatgccaag

SEQ ID NO: 23543 - DNA, 25 bp, Artificial
  probe
  misc_feature (1)..(25): SEQ ID NO: 3183; WAN0249IZ_at; Start 94; Stop 118
ttgataaagccttcaaactctctgc

SEQ ID NO: 23544 - DNA, 25 bp, Artificial
  probe
  misc_feature (1)..(25): SEQ ID NO: 3183; WAN0249IZ_at; Start 26; Stop 50
cttggtataataaagtagacacaaa

SEQ ID NO: 23545 - DNA, 25 bp, Artificial
  probe
  misc_feature (1)..(25): SEQ ID NO: 3183; WAN0249IZ_at; Start 41; Stop 65
tagacacaaaattaagtggaaacga

SEQ ID NO: 23546 - DNA, 25 bp, Artificial
  probe
  misc_feature (1)..(25): SEQ ID NO: 3183; WAN0249IZ_at; Start 99; Stop 123
aaagccttcaaactctctgctgtaa

SEQ ID NO: 23547 - DNA, 25 bp, Artificial
  probe
  misc_feature (1)..(25): SEQ ID NO: 3183; WAN0249IZ_at; Start 57; Stop 81
tggaaacgaggaaaagtcattatgc

SEQ ID NO: 23548 - DNA, 25 bp, Artificial
  probe
  misc_feature (1)..(25): SEQ ID NO: 3183; WAN0249IZ_at; Start 58; Stop 82
ggaaacgaggaaaagtcattatgcc

SEQ ID NO: 23549 - DNA, 25 bp, Artificial
  probe
  misc_feature (1)..(25): SEQ ID NO: 3183; WAN0249IZ_at; Start 96; Stop 120
gataaagccttcaaactctctgctg

SEQ ID NO: 23550 - DNA, 25 bp, Artificial
  probe
  misc_feature (1)..(25): SEQ ID NO: 3183; WAN0249IZ_at; Start 92; Stop 116
ctttgataaagccttcaaactctct

SEQ ID NO: 23551 - DNA, 25 bp, Artificial
  probe
  misc_feature (1)..(25): SEQ ID NO: 3183; WAN0249IZ_at; Start 97; Stop 121
ataaagccttcaaactctctgctgt

SEQ ID NO: 23552 - DNA, 25 bp, Artificial
  probe
  misc_feature (1)..(25): SEQ ID NO: 3183; WAN0249IZ_at; Start 24; Stop 48
gacttggtataataaagtagacaca

SEQ ID NO: 23553 - DNA, 25 bp, Artificial
  probe
  misc_feature (1)..(25): SEQ ID NO: 3183; WAN0249IZ_at; Start 62; Stop 86
acgaggaaaagtcattatgccaaga

SEQ ID NO: 23554 - DNA, 25 bp, Artificial
  probe
  misc_feature (1)..(25): SEQ ID NO: 3183; WAN0249IZ_at; Start 23; Stop 47
ggacttggtataataaagtagacac

SEQ ID NO: 23555 - DNA, 25 bp, Artificial
  probe
  misc_feature (1)..(25): SEQ ID NO: 4443; WAN0249J2_at; Start 42; Stop 66
tagaaaaacaatggccatacttgca

SEQ ID NO: 23556 - DNA, 25 bp, Artificial
  probe
  misc_feature (1)..(25): SEQ ID NO: 4443; WAN0249J2_at; Start 40; Stop 64
catagaaaaacaatggccatacttg

SEQ ID NO: 23557 - DNA, 25 bp, Artificial
  probe
  misc_feature (1)..(25): SEQ ID NO: 4443; WAN0249J2_at; Start 47; Stop 71
aaacaatggccatacttgcaattca

SEQ ID NO: 23558 - DNA, 25 bp, Artificial
  probe
  misc_feature (1)..(25): SEQ ID NO: 4443; WAN0249J2_at; Start 79; Stop 103
tagttgtataataggtttgttgaaa

SEQ ID NO: 23559 - DNA, 25 bp, Artificial
  probe
  misc_feature (1)..(25): SEQ ID NO: 4443; WAN0249J2_at; Start 53; Stop 77
tggccatacttgcaattcaactcaa

SEQ ID NO: 23560 - DNA, 25 bp, Artificial
  probe
  misc_feature (1)..(25): SEQ ID NO: 4443; WAN0249J2_at; Start 43; Stop 67
agaaaaacaatggccatacttgcaa

SEQ ID NO: 23561 - DNA, 25 bp, Artificial
  probe
  misc_feature (1)..(25): SEQ ID NO: 4443; WAN0249J2_at; Start 52; Stop 76
atggccatacttgcaattcaactca

SEQ ID NO: 23562 - DNA, 25 bp, Artificial
  probe
  misc_feature (1)..(25): SEQ ID NO: 4443; WAN0249J2_at; Start 62; Stop 86
ttgcaattcaactcaaatagttgta

SEQ ID NO: 23563 - DNA, 25 bp, Artificial
  probe
  misc_feature (1)..(25): SEQ ID NO: 4443; WAN0249J2_at; Start 46; Stop 70
aaaacaatggccatacttgcaattc

SEQ ID NO: 23564 - DNA, 25 bp, Artificial
  probe
  misc_feature (1)..(25): SEQ ID NO: 4443; WAN0249J2_at; Start 45; Stop 69
aaaaacaatggccatacttgcaatt

SEQ ID NO: 23565 - DNA, 25 bp, Artificial
  probe
  misc_feature (1)..(25): SEQ ID NO: 4443; WAN0249J2_at; Start 49; Stop 73
acaatggccatacttgcaattcaac

SEQ ID NO: 23566 - DNA, 25 bp, Artificial
  probe
  misc_feature (1)..(25): SEQ ID NO: 4443; WAN0249J2_at; Start 70; Stop 94
caactcaaatagttgtataataggt

SEQ ID NO: 23567 - DNA, 25 bp, Artificial
  probe
  misc_feature (1)..(25): SEQ ID NO: 4443; WAN0249J2_at; Start 77; Stop 101
aatagttgtataataggtttgttga

SEQ ID NO: 23568 - DNA, 25 bp, Artificial
  probe
  misc_feature (1)..(25): SEQ ID NO: 4443; WAN0249J2_at; Start 72; Stop 96
actcaaatagttgtataataggttt

SEQ ID NO: 23569 - DNA, 25 bp, Artificial
  probe
  misc_feature (1)..(25): SEQ ID NO: 4443; WAN0249J2_at; Start 61; Stop 85
cttgcaattcaactcaaatagttgt

SEQ ID NO: 23570 - DNA, 25 bp, Artificial
  probe
  misc_feature (1)..(25): SEQ ID NO: 4443; WAN0249J2_at; Start 71; Stop 95
aactcaaatagttgtataataggtt

SEQ ID NO: 23571 - DNA, 25 bp, Artificial
  probe
  misc_feature (1)..(25): SEQ ID NO: 4443; WAN0249J2_at; Start 75; Stop 99
caaatagttgtataataggtttgtt

SEQ ID NO: 23572 - DNA, 25 bp, Artificial
  probe
  misc_feature (1)..(25): SEQ ID NO: 4443; WAN0249J2_at; Start 48; Stop 72
aacaatggccatacttgcaattcaa

SEQ ID NO: 23573 - DNA, 25 bp, Artificial
  probe
  misc_feature (1)..(25): SEQ ID NO: 4443; WAN0249J2_at; Start 69; Stop 93
tcaactcaaatagttgtataatagg

SEQ ID NO: 23574 - DNA, 25 bp, Artificial
  probe
  misc_feature (1)..(25): SEQ ID NO: 4443; WAN0249J2_at; Start 59; Stop 83
tacttgcaattcaactcaaatagtt

SEQ ID NO: 23575 - DNA, 25 bp, Artificial
  probe
  misc_feature (1)..(25): SEQ ID NO: 4443; WAN0249J2_at; Start 51; Stop 75
aatggccatacttgcaattcaactc

SEQ ID NO: 23576 - DNA, 25 bp, Artificial
  probe
  misc_feature (1)..(25): SEQ ID NO: 4443; WAN0249J2_at; Start 54; Stop 78
ggccatacttgcaattcaactcaaa

SEQ ID NO: 23577 - DNA, 25 bp, Artificial
  probe
  misc_feature (1)..(25): SEQ ID NO: 4443; WAN0249J2_at; Start 56; Stop 80
ccatacttgcaattcaactcaaata

SEQ ID NO: 23578 - DNA, 25 bp, Artificial
  probe
  misc_feature (1)..(25): SEQ ID NO: 4443; WAN0249J2_at; Start 58; Stop 82
atacttgcaattcaactcaaatagt

SEQ ID NO: 23579 - DNA, 25 bp, Artificial
  probe
  misc_feature (1)..(25): SEQ ID NO: 4443; WAN0249J2_at; Start 80; Stop 104
agttgtataataggtttgttgaaag

SEQ ID NO: 23580 - DNA, 25 bp, Artificial
  probe
  misc_feature (1)..(25): SEQ ID NO: 4443; WAN0249J2_at; Start 65; Stop 89
caattcaactcaaatagttgtataa

SEQ ID NO: 23581 - DNA, 25 bp, Artificial
  probe
  misc_feature (1)..(25): SEQ ID NO: 4443; WAN0249J2_at; Start 57; Stop 81
catacttgcaattcaactcaaatag

SEQ ID NO: 23582 - DNA, 25 bp, Artificial
  probe
  misc_feature (1)..(25): SEQ ID NO: 4443; WAN0249J2_at; Start 60; Stop 84
acttgcaattcaactcaaatagttg

SEQ ID NO: 23583 - DNA, 25 bp, Artificial
  probe
  misc_feature (1)..(25): SEQ ID NO: 4443; WAN0249J2_at; Start 41; Stop 65
atagaaaaacaatggccatacttgc

SEQ ID NO: 23584 - DNA, 25 bp, Artificial
  probe
  misc_feature (1)..(25): SEQ ID NO: 4443; WAN0249J2_at; Start 50; Stop 74
caatggccatacttgcaattcaact

SEQ ID NO: 23585 - DNA, 25 bp, Artificial
  probe
  misc_feature (1)..(25): SEQ ID NO: 4443; WAN0249J2_at; Start 73; Stop 97
ctcaaatagttgtataataggtttg

SEQ ID NO: 23586 - DNA, 25 bp, Artificial
  probe
  misc_feature (1)..(25): SEQ ID NO: 4443; WAN0249J2_at; Start 63; Stop 87
tgcaattcaactcaaatagttgtat

SEQ ID NO: 23587 - DNA, 25 bp, Artificial
  probe
  misc_feature (1)..(25): SEQ ID NO: 4443; WAN0249J2_at; Start 64; Stop 88
gcaattcaactcaaatagttgtata

SEQ ID NO: 23588 - DNA, 25 bp, Artificial
  probe
  misc_feature (1)..(25): SEQ ID NO: 4443; WAN0249J2_at; Start 55; Stop 79
gccatacttgcaattcaactcaaat

SEQ ID NO: 23589 - DNA, 25 bp, Artificial
  probe
  misc_feature (1)..(25): SEQ ID NO: 3503; WAN0249J3_at; Start 28; Stop 52
ttgagttgaattgcaagtatggcca

SEQ ID NO: 23590 - DNA, 25 bp, Artificial
  probe
  misc_feature (1)..(25): SEQ ID NO: 3503; WAN0249J3_at; Start 30; Stop 54
gagttgaattgcaagtatggccatt

SEQ ID NO: 23591 - DNA, 25 bp, Artificial
  probe
  misc_feature (1)..(25): SEQ ID NO: 3503; WAN0249J3_at; Start 20; Stop 44
acaactatttgagttgaattgcaag

SEQ ID NO: 23592 - DNA, 25 bp, Artificial
  probe
  misc_feature (1)..(25): SEQ ID NO: 3503; WAN0249J3_at; Start 27; Stop 51
tttgagttgaattgcaagtatggcc

SEQ ID NO: 23593 - DNA, 25 bp, Artificial
  probe
  misc_feature (1)..(25): SEQ ID NO: 3503; WAN0249J3_at; Start 21; Stop 45
caactatttgagttgaattgcaagt

SEQ ID NO: 23594 - DNA, 25 bp, Artificial
  probe
  misc_feature (1)..(25): SEQ ID NO: 3503; WAN0249J3_at; Start 8; Stop 32
caaacctattatacaactatttgag

SEQ ID NO: 23595 - DNA, 25 bp, Artificial
  probe
  misc_feature (1)..(25): SEQ ID NO: 3503; WAN0249J3_at; Start 9; Stop 33
aaacctattatacaactatttgagt

SEQ ID NO: 23596 - DNA, 25 bp, Artificial
  probe
  misc_feature (1)..(25): SEQ ID NO: 3503; WAN0249J3_at; Start 41; Stop 65
caagtatggccattgtttttctatg

SEQ ID NO: 23597 - DNA, 25 bp, Artificial
  probe
  misc_feature (1)..(25): SEQ ID NO: 3503; WAN0249J3_at; Start 39; Stop 63
tgcaagtatggccattgtttttcta

SEQ ID NO: 23598 - DNA, 25 bp, Artificial
  probe
  misc_feature (1)..(25): SEQ ID NO: 3503; WAN0249J3_at; Start 3; Stop 27
ttcaacaaacctattatacaactat

SEQ ID NO: 23599 - DNA, 25 bp, Artificial
  probe
  misc_feature (1)..(25): SEQ ID NO: 3503; WAN0249J3_at; Start 22; Stop 46
aactatttgagttgaattgcaagta

SEQ ID NO: 23600 - DNA, 25 bp, Artificial
  probe
  misc_feature (1)..(25): SEQ ID NO: 3503; WAN0249J3_at; Start 1; Stop 25
ctttcaacaaacctattatacaact

SEQ ID NO: 23601 - DNA, 25 bp, Artificial
  probe
  misc_feature (1)..(25): SEQ ID NO: 3503; WAN0249J3_at; Start 23; Stop 47
actatttgagttgaattgcaagtat

SEQ ID NO: 23602 - DNA, 25 bp, Artificial
  probe
  misc_feature (1)..(25): SEQ ID NO: 3503; WAN0249J3_at; Start 29; Stop 53
tgagttgaattgcaagtatggccat

SEQ ID NO: 23603 - DNA, 25 bp, Artificial
  probe
  misc_feature (1)..(25): SEQ ID NO: 3503; WAN0249J3_at; Start 6; Stop 30
aacaaacctattatacaactatttg

SEQ ID NO: 23604 - DNA, 25 bp, Artificial
  probe
  misc_feature (1)..(25): SEQ ID NO: 3503; WAN0249J3_at; Start 26; Stop 50
atttgagttgaattgcaagtatggc

SEQ ID NO: 23605 - DNA, 25 bp, Artificial
  probe
  misc_feature (1)..(25): SEQ ID NO: 3503; WAN0249J3_at; Start 13; Stop 37
ctattatacaactatttgagttgaa

SEQ ID NO: 23606 - DNA, 25 bp, Artificial
  probe
  misc_feature (1)..(25): SEQ ID NO: 3503; WAN0249J3_at; Start 40; Stop 64
gcaagtatggccattgtttttctat

SEQ ID NO: 23607 - DNA, 25 bp, Artificial
  probe
  misc_feature (1)..(25): SEQ ID NO: 3503; WAN0249J3_at; Start 35; Stop 59
gaattgcaagtatggccattgtttt

SEQ ID NO: 23608 - DNA, 25 bp, Artificial
  probe
  misc_feature (1)..(25): SEQ ID NO: 3503; WAN0249J3_at; Start 36; Stop 60
aattgcaagtatggccattgttttt

SEQ ID NO: 23609 - DNA, 25 bp, Artificial
  probe
  misc_feature (1)..(25): SEQ ID NO: 3503; WAN0249J3_at; Start 24; Stop 48
ctatttgagttgaattgcaagtatg

SEQ ID NO: 23610 - DNA, 25 bp, Artificial
  probe
  misc_feature (1)..(25): SEQ ID NO: 3503; WAN0249J3_at; Start 31; Stop 55
agttgaattgcaagtatggccattg

SEQ ID NO: 23611 - DNA, 25 bp, Artificial
  probe
  misc_feature (1)..(25): SEQ ID NO: 3503; WAN0249J3_at; Start 32; Stop 56
gttgaattgcaagtatggccattgt

SEQ ID NO: 23612 - DNA, 25 bp, Artificial
  probe
  misc_feature (1)..(25): SEQ ID NO: 3503; WAN0249J3_at; Start 19; Stop 43
tacaactatttgagttgaattgcaa

SEQ ID NO: 23613 - DNA, 25 bp, Artificial
  probe
  misc_feature (1)..(25): SEQ ID NO: 3503; WAN0249J3_at; Start 25; Stop 49
tatttgagttgaattgcaagtatgg

SEQ ID NO: 23614 - DNA, 25 bp, Artificial
  probe
  misc_feature (1)..(25): SEQ ID NO: 3503; WAN0249J3_at; Start 17; Stop 41
tatacaactatttgagttgaattgc

SEQ ID NO: 23615 - DNA, 25 bp, Artificial
  probe
  misc_feature (1)..(25): SEQ ID NO: 3503; WAN0249J3_at; Start 12; Stop 36
cctattatacaactatttgagttga

SEQ ID NO: 23616 - DNA, 25 bp, Artificial
  probe
  misc_feature (1)..(25): SEQ ID NO: 3503; WAN0249J3_at; Start 4; Stop 28
tcaacaaacctattatacaactatt

SEQ ID NO: 23617 - DNA, 25 bp, Artificial
  probe
  misc_feature (1)..(25): SEQ ID NO: 3503; WAN0249J3_at; Start 18; Stop 42
atacaactatttgagttgaattgca

SEQ ID NO: 23618 - DNA, 25 bp, Artificial
  probe
  misc_feature (1)..(25): SEQ ID NO: 3503; WAN0249J3_at; Start 10; Stop 34
aacctattatacaactatttgagtt

SEQ ID NO: 23619 - DNA, 25 bp, Artificial
  probe
  misc_feature (1)..(25): SEQ ID NO: 3503; WAN0249J3_at; Start 11; Stop 35
acctattatacaactatttgagttg

SEQ ID NO: 23620 - DNA, 25 bp, Artificial
  probe
  misc_feature (1)..(25): SEQ ID NO: 3503; WAN0249J3_at; Start 5; Stop 29
caacaaacctattatacaactattt

SEQ ID NO: 23621 - DNA, 25 bp, Artificial
  probe
  misc_feature (1)..(25): SEQ ID NO: 3503; WAN0249J3_at; Start 42; Stop 66
aagtatggccattgtttttctatgt

SEQ ID NO: 23622 - DNA, 25 bp, Artificial
  probe
  misc_feature (1)..(25): SEQ ID NO: 3503; WAN0249J3_at; Start 2; Stop 26
tttcaacaaacctattatacaacta

SEQ ID NO: 23623 - DNA, 25 bp, Artificial
  probe
  misc_feature (1)..(25): SEQ ID NO: 4856; WAN0249J4_at; Start 15; Stop 39
gaaagcaaggctttgtggtcttgct

SEQ ID NO: 23624 - DNA, 25 bp, Artificial
  probe
  misc_feature (1)..(25): SEQ ID NO: 4856; WAN0249J4_at; Start 5; Stop 29
tgagttgatagaaagcaaggctttg

SEQ ID NO: 23625 - DNA, 25 bp, Artificial
  probe
  misc_feature (1)..(25): SEQ ID NO: 4856; WAN0249J4_at; Start 30; Stop 54
tggtcttgcttttttatatggaaaa

SEQ ID NO: 23626 - DNA, 25 bp, Artificial
  probe
  misc_feature (1)..(25): SEQ ID NO: 4856; WAN0249J4_at; Start 39; Stop 63
ttttttatatggaaaaatggatgac

SEQ ID NO: 23627 - DNA, 25 bp, Artificial
  probe
  misc_feature (1)..(25): SEQ ID NO: 4856; WAN0249J4_at; Start 18; Stop 42
agcaaggctttgtggtcttgctttt

SEQ ID NO: 23628 - DNA, 25 bp, Artificial
  probe
  misc_feature (1)..(25): SEQ ID NO: 4856; WAN0249J4_at; Start 14; Stop 38
agaaagcaaggctttgtggtcttgc

SEQ ID NO: 23629 - DNA, 25 bp, Artificial
  probe
  misc_feature (1)..(25): SEQ ID NO: 4856; WAN0249J4_at; Start 23; Stop 47
ggctttgtggtcttgcttttttata

SEQ ID NO: 23630 - DNA, 25 bp, Artificial
  probe
  misc_feature (1)..(25): SEQ ID NO: 4856; WAN0249J4_at; Start 10; Stop 34
tgatagaaagcaaggctttgtggtc

SEQ ID NO: 23631 - DNA, 25 bp, Artificial
  probe
  misc_feature (1)..(25): SEQ ID NO: 4856; WAN0249J4_at; Start 7; Stop 31
agttgatagaaagcaaggctttgtg

SEQ ID NO: 23632 - DNA, 25 bp, Artificial
  probe
  misc_feature (1)..(25): SEQ ID NO: 4856; WAN0249J4_at; Start 40; Stop 64
tttttatatggaaaaatggatgaca

SEQ ID NO: 23633 - DNA, 25 bp, Artificial
  probe
  misc_feature (1)..(25): SEQ ID NO: 4856; WAN0249J4_at; Start 4; Stop 28
ttgagttgatagaaagcaaggcttt

SEQ ID NO: 23634 - DNA, 25 bp, Artificial
  probe
  misc_feature (1)..(25): SEQ ID NO: 4856; WAN0249J4_at; Start 42; Stop 66
tttatatggaaaaatggatgacacg

SEQ ID NO: 23635 - DNA, 25 bp, Artificial
  probe
  misc_feature (1)..(25): SEQ ID NO: 4856; WAN0249J4_at; Start 6; Stop 30
gagttgatagaaagcaaggctttgt

SEQ ID NO: 23636 - DNA, 25 bp, Artificial
  probe
  misc_feature (1)..(25): SEQ ID NO: 4856; WAN0249J4_at; Start 43; Stop 67
ttatatggaaaaatggatgacacga

SEQ ID NO: 23637 - DNA, 25 bp, Artificial
  probe
  misc_feature (1)..(25): SEQ ID NO: 4856; WAN0249J4_at; Start 1; Stop 25
ttcttgagttgatagaaagcaaggc

SEQ ID NO: 23638 - DNA, 25 bp, Artificial
  probe
  misc_feature (1)..(25): SEQ ID NO: 4856; WAN0249J4_at; Start 37; Stop 61
gcttttttatatggaaaaatggatg

SEQ ID NO: 23639 - DNA, 25 bp, Artificial
  probe
  misc_feature (1)..(25): SEQ ID NO: 4856; WAN0249J4_at; Start 34; Stop 58
cttgcttttttatatggaaaaatgg

SEQ ID NO: 23640 - DNA, 25 bp, Artificial
  probe
  misc_feature (1)..(25): SEQ ID NO: 4856; WAN0249J4_at; Start 11; Stop 35
gatagaaagcaaggctttgtggtct

SEQ ID NO: 23641 - DNA, 25 bp, Artificial
  probe
  misc_feature (1)..(25): SEQ ID NO: 4856; WAN0249J4_at; Start 3; Stop 27
cttgagttgatagaaagcaaggctt

SEQ ID NO: 23642 - DNA, 25 bp, Artificial
  probe
  misc_feature (1)..(25): SEQ ID NO: 4856; WAN0249J4_at; Start 20; Stop 44
caaggctttgtggtcttgctttttt

SEQ ID NO: 23643 - DNA, 25 bp, Artificial
  probe
  misc_feature (1)..(25): SEQ ID NO: 4856; WAN0249J4_at; Start 9; Stop 33
ttgatagaaagcaaggctttgtggt

SEQ ID NO: 23644 - DNA, 25 bp, Artificial
  probe
  misc_feature (1)..(25): SEQ ID NO: 4856; WAN0249J4_at; Start 41; Stop 65
ttttatatggaaaaatggatgacac

SEQ ID NO: 23645 - DNA, 25 bp, Artificial
  probe
  misc_feature (1)..(25): SEQ ID NO: 4856; WAN0249J4_at; Start 26; Stop 50
tttgtggtcttgcttttttatatgg

SEQ ID NO: 23646 - DNA, 25 bp, Artificial
  probe
  misc_feature (1)..(25): SEQ ID NO: 4856; WAN0249J4_at; Start 16; Stop 40
aaagcaaggctttgtggtcttgctt

SEQ ID NO: 23647 - DNA, 25 bp, Artificial
  probe
  misc_feature (1)..(25): SEQ ID NO: 4856; WAN0249J4_at; Start 22; Stop 46
aggctttgtggtcttgcttttttat

SEQ ID NO: 23648 - DNA, 25 bp, Artificial
  probe
  misc_feature (1)..(25): SEQ ID NO: 4856; WAN0249J4_at; Start 2; Stop 26
tcttgagttgatagaaagcaaggct

SEQ ID NO: 23649 - DNA, 25 bp, Artificial
  probe
  misc_feature (1)..(25): SEQ ID NO: 4856; WAN0249J4_at; Start 24; Stop 48
gctttgtggtcttgcttttttatat

SEQ ID NO: 23650 - DNA, 25 bp, Artificial
  probe
  misc_feature (1)..(25): SEQ ID NO: 4856; WAN0249J4_at; Start 13; Stop 37
tagaaagcaaggctttgtggtcttg

SEQ ID NO: 23651 - DNA, 25 bp, Artificial
  probe
  misc_feature (1)..(25): SEQ ID NO: 4856; WAN0249J4_at; Start 25; Stop 49
ctttgtggtcttgcttttttatatg

SEQ ID NO: 23652 - DNA, 25 bp, Artificial
  probe
  misc_feature (1)..(25): SEQ ID NO: 4856; WAN0249J4_at; Start 29; Stop 53
gtggtcttgcttttttatatggaaa

SEQ ID NO: 23653 - DNA, 25 bp, Artificial
  probe
  misc_feature (1)..(25): SEQ ID NO: 4856; WAN0249J4_at; Start 19; Stop 43
gcaaggctttgtggtcttgcttttt

SEQ ID NO: 23654 - DNA, 25 bp, Artificial
  probe
  misc_feature (1)..(25): SEQ ID NO: 4856; WAN0249J4_at; Start 28; Stop 52
tgtggtcttgcttttttatatggaa

SEQ ID NO: 23655 - DNA, 25 bp, Artificial
  probe
  misc_feature (1)..(25): SEQ ID NO: 4856; WAN0249J4_at; Start 27; Stop 51
ttgtggtcttgcttttttatatgga

SEQ ID NO: 23656 - DNA, 25 bp, Artificial
  probe
  misc_feature (1)..(25): SEQ ID NO: 4856; WAN0249J4_at; Start 17; Stop 41
aagcaaggctttgtggtcttgcttt

SEQ ID NO: 23657 - DNA, 25 bp, Artificial
  probe
  misc_feature (1)..(25): SEQ ID NO: 4637; WAN0249J5_at; Start 39; Stop 63
caaagccttgctttctatcaactca

SEQ ID NO: 23658 - DNA, 25 bp, Artificial
  probe
  misc_feature (1)..(25): SEQ ID NO: 4637; WAN0249J5_at; Start 42; Stop 66
agccttgctttctatcaactcaaga

SEQ ID NO: 23659 - DNA, 25 bp, Artificial
  probe
  misc_feature (1)..(25): SEQ ID NO: 4637; WAN0249J5_at; Start 41; Stop 65
aagccttgctttctatcaactcaag

SEQ ID NO: 23660 - DNA, 25 bp, Artificial
  probe
  misc_feature (1)..(25): SEQ ID NO: 4637; WAN0249J5_at; Start 20; Stop 44
atataaaaaagcaagaccacaaagc

SEQ ID NO: 23661 - DNA, 25 bp, Artificial
  probe
  misc_feature (1)..(25): SEQ ID NO: 4637; WAN0249J5_at; Start 30; Stop 54
gcaagaccacaaagccttgctttct

SEQ ID NO: 23662 - DNA, 25 bp, Artificial
  probe
  misc_feature (1)..(25): SEQ ID NO: 4637; WAN0249J5_at; Start 10; Stop 34
ccatttttccatataaaaaagcaag

SEQ ID NO: 23663 - DNA, 25 bp, Artificial
  probe
  misc_feature (1)..(25): SEQ ID NO: 4637; WAN0249J5_at; Start 25; Stop 49
aaaaagcaagaccacaaagccttgc

SEQ ID NO: 23664 - DNA, 25 bp, Artificial
  probe
  misc_feature (1)..(25): SEQ ID NO: 4637; WAN0249J5_at; Start 40; Stop 64
aaagccttgctttctatcaactcaa

SEQ ID NO: 23665 - DNA, 25 bp, Artificial
  probe
  misc_feature (1)..(25): SEQ ID NO: 4637; WAN0249J5_at; Start 29; Stop 53
agcaagaccacaaagccttgctttc

SEQ ID NO: 23666 - DNA, 25 bp, Artificial
  probe
  misc_feature (1)..(25): SEQ ID NO: 4637; WAN0249J5_at; Start 24; Stop 48
aaaaaagcaagaccacaaagccttg

SEQ ID NO: 23667 - DNA, 25 bp, Artificial
  probe
  misc_feature (1)..(25): SEQ ID NO: 4637; WAN0249J5_at; Start 7; Stop 31
catccatttttccatataaaaaagc

SEQ ID NO: 23668 - DNA, 25 bp, Artificial
  probe
  misc_feature (1)..(25): SEQ ID NO: 4637; WAN0249J5_at; Start 2; Stop 26
cgtgtcatccatttttccatataaa

SEQ ID NO: 23669 - DNA, 25 bp, Artificial
  probe
  misc_feature (1)..(25): SEQ ID NO: 4637; WAN0249J5_at; Start 1; Stop 25
tcgtgtcatccatttttccatataa

SEQ ID NO: 23670 - DNA, 25 bp, Artificial
  probe
  misc_feature (1)..(25): SEQ ID NO: 4637; WAN0249J5_at; Start 21; Stop 45
tataaaaaagcaagaccacaaagcc

SEQ ID NO: 23671 - DNA, 25 bp, Artificial
  probe
  misc_feature (1)..(25): SEQ ID NO: 4637; WAN0249J5_at; Start 31; Stop 55
caagaccacaaagccttgctttcta

SEQ ID NO: 23672 - DNA, 25 bp, Artificial
  probe
  misc_feature (1)..(25): SEQ ID NO: 4637; WAN0249J5_at; Start 33; Stop 57
agaccacaaagccttgctttctatc

SEQ ID NO: 23673 - DNA, 25 bp, Artificial
  probe
  misc_feature (1)..(25): SEQ ID NO: 4637; WAN0249J5_at; Start 22; Stop 46
ataaaaaagcaagaccacaaagcct

SEQ ID NO: 23674 - DNA, 25 bp, Artificial
  probe
  misc_feature (1)..(25): SEQ ID NO: 4637; WAN0249J5_at; Start 6; Stop 30
tcatccatttttccatataaaaaag

SEQ ID NO: 23675 - DNA, 25 bp, Artificial
  probe
  misc_feature (1)..(25): SEQ ID NO: 4637; WAN0249J5_at; Start 3; Stop 27
gtgtcatccatttttccatataaaa

SEQ ID NO: 23676 - DNA, 25 bp, Artificial
  probe
  misc_feature (1)..(25): SEQ ID NO: 4637; WAN0249J5_at; Start 35; Stop 59
accacaaagccttgctttctatcaa

SEQ ID NO: 23677 - DNA, 25 bp, Artificial
  probe
  misc_feature (1)..(25): SEQ ID NO: 4637; WAN0249J5_at; Start 16; Stop 40
ttccatataaaaaagcaagaccaca

SEQ ID NO: 23678 - DNA, 25 bp, Artificial
  probe
  misc_feature (1)..(25): SEQ ID NO: 4637; WAN0249J5_at; Start 28; Stop 52
aagcaagaccacaaagccttgcttt

SEQ ID NO: 23679 - DNA, 25 bp, Artificial
  probe
  misc_feature (1)..(25): SEQ ID NO: 4637; WAN0249J5_at; Start 18; Stop 42
ccatataaaaaagcaagaccacaaa

SEQ ID NO: 23680 - DNA, 25 bp, Artificial
  probe
  misc_feature (1)..(25): SEQ ID NO: 4637; WAN0249J5_at; Start 15; Stop 39
tttccatataaaaaagcaagaccac

SEQ ID NO: 23681 - DNA, 25 bp, Artificial
  probe
  misc_feature (1)..(25): SEQ ID NO: 4637; WAN0249J5_at; Start 38; Stop 62
acaaagccttgctttctatcaactc

SEQ ID NO: 23682 - DNA, 25 bp, Artificial
  probe
  misc_feature (1)..(25): SEQ ID NO: 4637; WAN0249J5_at; Start 19; Stop 43
catataaaaaagcaagaccacaaag

SEQ ID NO: 23683 - DNA, 25 bp, Artificial
  probe
  misc_feature (1)..(25): SEQ ID NO: 4637; WAN0249J5_at; Start 17; Stop 41
tccatataaaaaagcaagaccacaa

SEQ ID NO: 23684 - DNA, 25 bp, Artificial
  probe
  misc_feature (1)..(25): SEQ ID NO: 4637; WAN0249J5_at; Start 26; Stop 50
aaaagcaagaccacaaagccttgct

SEQ ID NO: 23685 - DNA, 25 bp, Artificial
  probe
  misc_feature (1)..(25): SEQ ID NO: 4637; WAN0249J5_at; Start 37; Stop 61
cacaaagccttgctttctatcaact

SEQ ID NO: 23686 - DNA, 25 bp, Artificial
  probe
  misc_feature (1)..(25): SEQ ID NO: 4637; WAN0249J5_at; Start 34; Stop 58
gaccacaaagccttgctttctatca

SEQ ID NO: 23687 - DNA, 25 bp, Artificial
  probe
  misc_feature (1)..(25): SEQ ID NO: 4637; WAN0249J5_at; Start 14; Stop 38
ttttccatataaaaaagcaagacca

SEQ ID NO: 23688 - DNA, 25 bp, Artificial
  probe
  misc_feature (1)..(25): SEQ ID NO: 4637; WAN0249J5_at; Start 43; Stop 67
gccttgctttctatcaactcaagaa

SEQ ID NO: 23689 - DNA, 25 bp, Artificial
  probe
  misc_feature (1)..(25): SEQ ID NO: 4637; WAN0249J5_at; Start 4; Stop 28
tgtcatccatttttccatataaaaa

SEQ ID NO: 23690 - DNA, 25 bp, Artificial
  probe
  misc_feature (1)..(25): SEQ ID NO: 4637; WAN0249J5_at; Start 27; Stop 51
aaagcaagaccacaaagccttgctt

SEQ ID NO: 23691 - DNA, 25 bp, Artificial
  probe
  misc_feature (1)..(25): SEQ ID NO: 328; WAN0249J6_at; Start 41; Stop 65
tagctaaattcttgtcttcctatga

SEQ ID NO: 23692 - DNA, 25 bp, Artificial
  probe
  misc_feature (1)..(25): SEQ ID NO: 328; WAN0249J6_at; Start 55; Stop 79
tcttcctatgatgaagatgataaaa

SEQ ID NO: 23693 - DNA, 25 bp, Artificial
  probe
  misc_feature (1)..(25): SEQ ID NO: 328; WAN0249J6_at; Start 20; Stop 44
aagccctatttggataggaaatagc

SEQ ID NO: 23694 - DNA, 25 bp, Artificial
  probe
  misc_feature (1)..(25): SEQ ID NO: 328; WAN0249J6_at; Start 36; Stop 60
ggaaatagctaaattcttgtcttcc

SEQ ID NO: 23695 - DNA, 25 bp, Artificial
  probe
  misc_feature (1)..(25): SEQ ID NO: 328; WAN0249J6_at; Start 23; Stop 47
ccctatttggataggaaatagctaa

SEQ ID NO: 23696 - DNA, 25 bp, Artificial
  probe
  misc_feature (1)..(25): SEQ ID NO: 328; WAN0249J6_at; Start 53; Stop 77
tgtcttcctatgatgaagatgataa

SEQ ID NO: 23697 - DNA, 25 bp, Artificial
  probe
  misc_feature (1)..(25): SEQ ID NO: 328; WAN0249J6_at; Start 2; Stop 26
cagatattgtaacaaaaaaagccct

SEQ ID NO: 23698 - DNA, 25 bp, Artificial
  probe
  misc_feature (1)..(25): SEQ ID NO: 328; WAN0249J6_at; Start 31; Stop 55
ggataggaaatagctaaattcttgt

SEQ ID NO: 23699 - DNA, 25 bp, Artificial
  probe
  misc_feature (1)..(25): SEQ ID NO: 328; WAN0249J6_at; Start 54; Stop 78
gtcttcctatgatgaagatgataaa

SEQ ID NO: 23700 - DNA, 25 bp, Artificial
  probe
  misc_feature (1)..(25): SEQ ID NO: 328; WAN0249J6_at; Start 59; Stop 83
cctatgatgaagatgataaaataaa

SEQ ID NO: 23701 - DNA, 25 bp, Artificial
  probe
  misc_feature (1)..(25): SEQ ID NO: 328; WAN0249J6_at; Start 62; Stop 86
atgatgaagatgataaaataaacgc

SEQ ID NO: 23702 - DNA, 25 bp, Artificial
  probe
  misc_feature (1)..(25): SEQ ID NO: 328; WAN0249J6_at; Start 21; Stop 45
agccctatttggataggaaatagct

SEQ ID NO: 23703 - DNA, 25 bp, Artificial
  probe
  misc_feature (1)..(25): SEQ ID NO: 328; WAN0249J6_at; Start 57; Stop 81
ttcctatgatgaagatgataaaata

SEQ ID NO: 23704 - DNA, 25 bp, Artificial
  probe
  misc_feature (1)..(25): SEQ ID NO: 328; WAN0249J6_at; Start 47; Stop 71
aattcttgtcttcctatgatgaaga

SEQ ID NO: 23705 - DNA, 25 bp, Artificial
  probe
  misc_feature (1)..(25): SEQ ID NO: 328; WAN0249J6_at; Start 60; Stop 84
ctatgatgaagatgataaaataaac

SEQ ID NO: 23706 - DNA, 25 bp, Artificial
  probe
  misc_feature (1)..(25): SEQ ID NO: 328; WAN0249J6_at; Start 56; Stop 80
cttcctatgatgaagatgataaaat

SEQ ID NO: 23707 - DNA, 25 bp, Artificial
  probe
  misc_feature (1)..(25): SEQ ID NO: 328; WAN0249J6_at; Start 43; Stop 67
gctaaattcttgtcttcctatgatg

SEQ ID NO: 23708 - DNA, 25 bp, Artificial
  probe
  misc_feature (1)..(25): SEQ ID NO: 328; WAN0249J6_at; Start 37; Stop 61
gaaatagctaaattcttgtcttcct

SEQ ID NO: 23709 - DNA, 25 bp, Artificial
  probe
  misc_feature (1)..(25): SEQ ID NO: 328; WAN0249J6_at; Start 50; Stop 74
tcttgtcttcctatgatgaagatga

SEQ ID NO: 23710 - DNA, 25 bp, Artificial
  probe
  misc_feature (1)..(25): SEQ ID NO: 328; WAN0249J6_at; Start 49; Stop 73
ttcttgtcttcctatgatgaagatg

SEQ ID NO: 23711 - DNA, 25 bp, Artificial
  probe
  misc_feature (1)..(25): SEQ ID NO: 328; WAN0249J6_at; Start 45; Stop 69
taaattcttgtcttcctatgatgaa

SEQ ID NO: 23712 - DNA, 25 bp, Artificial
  probe
  misc_feature (1)..(25): SEQ ID NO: 328; WAN0249J6_at; Start 28; Stop 52
tttggataggaaatagctaaattct

SEQ ID NO: 23713 - DNA, 25 bp, Artificial
  probe
  misc_feature (1)..(25): SEQ ID NO: 328; WAN0249J6_at; Start 30; Stop 54
tggataggaaatagctaaattcttg

SEQ ID NO: 23714 - DNA, 25 bp, Artificial
  probe
  misc_feature (1)..(25): SEQ ID NO: 328; WAN0249J6_at; Start 44; Stop 68
ctaaattcttgtcttcctatgatga

SEQ ID NO: 23715 - DNA, 25 bp, Artificial
  probe
  misc_feature (1)..(25): SEQ ID NO: 328; WAN0249J6_at; Start 35; Stop 59
aggaaatagctaaattcttgtcttc

SEQ ID NO: 23716 - DNA, 25 bp, Artificial
  probe
  misc_feature (1)..(25): SEQ ID NO: 328; WAN0249J6_at; Start 58; Stop 82
tcctatgatgaagatgataaaataa

SEQ ID NO: 23717 - DNA, 25 bp, Artificial
  probe
  misc_feature (1)..(25): SEQ ID NO: 328; WAN0249J6_at; Start 38; Stop 62
aaatagctaaattcttgtcttccta

SEQ ID NO: 23718 - DNA, 25 bp, Artificial
  probe
  misc_feature (1)..(25): SEQ ID NO: 328; WAN0249J6_at; Start 24; Stop 48
cctatttggataggaaatagctaaa

SEQ ID NO: 23719 - DNA, 25 bp, Artificial
  probe
  misc_feature (1)..(25): SEQ ID NO: 328; WAN0249J6_at; Start 22; Stop 46
gccctatttggataggaaatagcta

SEQ ID NO: 23720 - DNA, 25 bp, Artificial
  probe
  misc_feature (1)..(25): SEQ ID NO: 328; WAN0249J6_at; Start 46; Stop 70
aaattcttgtcttcctatgatgaag

SEQ ID NO: 23721 - DNA, 25 bp, Artificial
  probe
  misc_feature (1)..(25): SEQ ID NO: 328; WAN0249J6_at; Start 51; Stop 75
cttgtcttcctatgatgaagatgat

SEQ ID NO: 23722 - DNA, 25 bp, Artificial
  probe
  misc_feature (1)..(25): SEQ ID NO: 328; WAN0249J6_at; Start 34; Stop 58
taggaaatagctaaattcttgtctt

SEQ ID NO: 23723 - DNA, 25 bp, Artificial
  probe
  misc_feature (1)..(25): SEQ ID NO: 328; WAN0249J6_at; Start 32; Stop 56
gataggaaatagctaaattcttgtc

SEQ ID NO: 23724 - DNA, 25 bp, Artificial
  probe
  misc_feature (1)..(25): SEQ ID NO: 328; WAN0249J6_at; Start 19; Stop 43
aaagccctatttggataggaaatag

SEQ ID NO: 23725 - DNA, 25 bp, Artificial
  probe
  misc_feature (1)..(25): SEQ ID NO: 3696; WAN0249J7_at; Start 23; Stop 47
cataggaagacaagaatttagctat

SEQ ID NO: 23726 - DNA, 25 bp, Artificial
  probe
  misc_feature (1)..(25): SEQ ID NO: 3696; WAN0249J7_at; Start 29; Stop 53
aagacaagaatttagctatttccta

SEQ ID NO: 23727 - DNA, 25 bp, Artificial
  probe
  misc_feature (1)..(25): SEQ ID NO: 3696; WAN0249J7_at; Start 14; Stop 38
catcttcatcataggaagacaagaa

SEQ ID NO: 23728 - DNA, 25 bp, Artificial
  probe
  misc_feature (1)..(25): SEQ ID NO: 3696; WAN0249J7_at; Start 41; Stop 65
tagctatttcctatccaaatagggc

SEQ ID NO: 23729 - DNA, 25 bp, Artificial
  probe
  misc_feature (1)..(25): SEQ ID NO: 3696; WAN0249J7_at; Start 40; Stop 64
ttagctatttcctatccaaataggg

SEQ ID NO: 23730 - DNA, 25 bp, Artificial
  probe
  misc_feature (1)..(25): SEQ ID NO: 3696; WAN0249J7_at; Start 61; Stop 85
agggctttttttgttacaatatctg

SEQ ID NO: 23731 - DNA, 25 bp, Artificial
  probe
  misc_feature (1)..(25): SEQ ID NO: 3696; WAN0249J7_at; Start 16; Stop 40
tcttcatcataggaagacaagaatt

SEQ ID NO: 23732 - DNA, 25 bp, Artificial
  probe
  misc_feature (1)..(25): SEQ ID NO: 3696; WAN0249J7_at; Start 33; Stop 57
caagaatttagctatttcctatcca

SEQ ID NO: 23733 - DNA, 25 bp, Artificial
  probe
  misc_feature (1)..(25): SEQ ID NO: 3696; WAN0249J7_at; Start 7; Stop 31
attttatcatcttcatcataggaag

SEQ ID NO: 23734 - DNA, 25 bp, Artificial
  probe
  misc_feature (1)..(25): SEQ ID NO: 3696; WAN0249J7_at; Start 34; Stop 58
aagaatttagctatttcctatccaa

SEQ ID NO: 23735 - DNA, 25 bp, Artificial
  probe
  misc_feature (1)..(25): SEQ ID NO: 3696; WAN0249J7_at; Start 21; Stop 45
atcataggaagacaagaatttagct

SEQ ID NO: 23736 - DNA, 25 bp, Artificial
  probe
  misc_feature (1)..(25): SEQ ID NO: 3696; WAN0249J7_at; Start 9; Stop 33
tttatcatcttcatcataggaagac

SEQ ID NO: 23737 - DNA, 25 bp, Artificial
  probe
  misc_feature (1)..(25): SEQ ID NO: 3696; WAN0249J7_at; Start 17; Stop 41
cttcatcataggaagacaagaattt

SEQ ID NO: 23738 - DNA, 25 bp, Artificial
  probe
  misc_feature (1)..(25): SEQ ID NO: 3696; WAN0249J7_at; Start 31; Stop 55
gacaagaatttagctatttcctatc

SEQ ID NO: 23739 - DNA, 25 bp, Artificial
  probe
  misc_feature (1)..(25): SEQ ID NO: 3696; WAN0249J7_at; Start 13; Stop 37
tcatcttcatcataggaagacaaga

SEQ ID NO: 23740 - DNA, 25 bp, Artificial
  probe
  misc_feature (1)..(25): SEQ ID NO: 3696; WAN0249J7_at; Start 36; Stop 60
gaatttagctatttcctatccaaat

SEQ ID NO: 23741 - DNA, 25 bp, Artificial
  probe
  misc_feature (1)..(25): SEQ ID NO: 3696; WAN0249J7_at; Start 18; Stop 42
ttcatcataggaagacaagaattta

SEQ ID NO: 23742 - DNA, 25 bp, Artificial
  probe
  misc_feature (1)..(25): SEQ ID NO: 3696; WAN0249J7_at; Start 10; Stop 34
ttatcatcttcatcataggaagaca

SEQ ID NO: 23743 - DNA, 25 bp, Artificial
  probe
  misc_feature (1)..(25): SEQ ID NO: 3696; WAN0249J7_at; Start 32; Stop 56
acaagaatttagctatttcctatcc

SEQ ID NO: 23744 - DNA, 25 bp, Artificial
  probe
  misc_feature (1)..(25): SEQ ID NO: 3696; WAN0249J7_at; Start 1; Stop 25
gcgtttattttatcatcttcatcat

SEQ ID NO: 23745 - DNA, 25 bp, Artificial
  probe
  misc_feature (1)..(25): SEQ ID NO: 3696; WAN0249J7_at; Start 28; Stop 52
gaagacaagaatttagctatttcct

SEQ ID NO: 23746 - DNA, 25 bp, Artificial
  probe
  misc_feature (1)..(25): SEQ ID NO: 3696; WAN0249J7_at; Start 20; Stop 44
catcataggaagacaagaatttagc

SEQ ID NO: 23747 - DNA, 25 bp, Artificial
  probe
  misc_feature (1)..(25): SEQ ID NO: 3696; WAN0249J7_at; Start 6; Stop 30
tattttatcatcttcatcataggaa

SEQ ID NO: 23748 - DNA, 25 bp, Artificial
  probe
  misc_feature (1)..(25): SEQ ID NO: 3696; WAN0249J7_at; Start 19; Stop 43
tcatcataggaagacaagaatttag

SEQ ID NO: 23749 - DNA, 25 bp, Artificial
  probe
  misc_feature (1)..(25): SEQ ID NO: 3696; WAN0249J7_at; Start 43; Stop 67
gctatttcctatccaaatagggctt

SEQ ID NO: 23750 - DNA, 25 bp, Artificial
  probe
  misc_feature (1)..(25): SEQ ID NO: 3696; WAN0249J7_at; Start 44; Stop 68
ctatttcctatccaaatagggcttt

SEQ ID NO: 23751 - DNA, 25 bp, Artificial
  probe
  misc_feature (1)..(25): SEQ ID NO: 3696; WAN0249J7_at; Start 39; Stop 63
tttagctatttcctatccaaatagg

SEQ ID NO: 23752 - DNA, 25 bp, Artificial
  probe
  misc_feature (1)..(25): SEQ ID NO: 3696; WAN0249J7_at; Start 11; Stop 35
tatcatcttcatcataggaagacaa

SEQ ID NO: 23753 - DNA, 25 bp, Artificial
  probe
  misc_feature (1)..(25): SEQ ID NO: 3696; WAN0249J7_at; Start 25; Stop 49
taggaagacaagaatttagctattt

SEQ ID NO: 23754 - DNA, 25 bp, Artificial
  probe
  misc_feature (1)..(25): SEQ ID NO: 3696; WAN0249J7_at; Start 27; Stop 51
ggaagacaagaatttagctatttcc

SEQ ID NO: 23755 - DNA, 25 bp, Artificial
  probe
  misc_feature (1)..(25): SEQ ID NO: 3696; WAN0249J7_at; Start 22; Stop 46
tcataggaagacaagaatttagcta

SEQ ID NO: 23756 - DNA, 25 bp, Artificial
  probe
  misc_feature (1)..(25): SEQ ID NO: 3696; WAN0249J7_at; Start 35; Stop 59
agaatttagctatttcctatccaaa

SEQ ID NO: 23757 - DNA, 25 bp, Artificial
  probe
  misc_feature (1)..(25): SEQ ID NO: 3696; WAN0249J7_at; Start 12; Stop 36
atcatcttcatcataggaagacaag

SEQ ID NO: 23758 - DNA, 25 bp, Artificial
  probe
  misc_feature (1)..(25): SEQ ID NO: 3696; WAN0249J7_at; Start 42; Stop 66
agctatttcctatccaaatagggct

SEQ ID NO: 23759 - DNA, 25 bp, Artificial
  probe
  misc_feature (1)..(25): SEQ ID NO: 4678; WAN0249J8_at; Start 17; Stop 41
ttctttctattcgtaaaagacaaga

SEQ ID NO: 23760 - DNA, 25 bp, Artificial
  probe
  misc_feature (1)..(25): SEQ ID NO: 4678; WAN0249J8_at; Start 44; Stop 68
aataggtctggtttgtatcctaagt

SEQ ID NO: 23761 - DNA, 25 bp, Artificial
  probe
  misc_feature (1)..(25): SEQ ID NO: 4678; WAN0249J8_at; Start 34; Stop 58
agacaagaaaaataggtctggtttg

SEQ ID NO: 23762 - DNA, 25 bp, Artificial
  probe
  misc_feature (1)..(25): SEQ ID NO: 4678; WAN0249J8_at; Start 43; Stop 67
aaataggtctggtttgtatcctaag

SEQ ID NO: 23763 - DNA, 25 bp, Artificial
  probe
  misc_feature (1)..(25): SEQ ID NO: 4678; WAN0249J8_at; Start 37; Stop 61
caagaaaaataggtctggtttgtat

SEQ ID NO: 23764 - DNA, 25 bp, Artificial
  probe
  misc_feature (1)..(25): SEQ ID NO: 4678; WAN0249J8_at; Start 18; Stop 42
tctttctattcgtaaaagacaagaa

SEQ ID NO: 23765 - DNA, 25 bp, Artificial
  probe
  misc_feature (1)..(25): SEQ ID NO: 4678; WAN0249J8_at; Start 14; Stop 38
tctttctttctattcgtaaaagaca

SEQ ID NO: 23766 - DNA, 25 bp, Artificial
  probe
  misc_feature (1)..(25): SEQ ID NO: 4678; WAN0249J8_at; Start 1; Stop 25
tgaattcccctcctctttctttcta

SEQ ID NO: 23767 - DNA, 25 bp, Artificial
  probe
  misc_feature (1)..(25): SEQ ID NO: 3538; WAN0249J9_at; Start 38; Stop 62
tcttgtcttttacgaatagaaagaa

SEQ ID NO: 23768 - DNA, 25 bp, Artificial
  probe
  misc_feature (1)..(25): SEQ ID NO: 3538; WAN0249J9_at; Start 54; Stop 78
tagaaagaaagaggaggggaattca

SEQ ID NO: 23769 - DNA, 25 bp, Artificial
  probe
  misc_feature (1)..(25): SEQ ID NO: 3538; WAN0249J9_at; Start 11; Stop 35
acttaggatacaaaccagacctatt

SEQ ID NO: 23770 - DNA, 25 bp, Artificial
  probe
  misc_feature (1)..(25): SEQ ID NO: 3538; WAN0249J9_at; Start 41; Stop 65
tgtcttttacgaatagaaagaaaga

SEQ ID NO: 23771 - DNA, 25 bp, Artificial
  probe
  misc_feature (1)..(25): SEQ ID NO: 3538; WAN0249J9_at; Start 37; Stop 61
ttcttgtcttttacgaatagaaaga

SEQ ID NO: 23772 - DNA, 25 bp, Artificial
  probe
  misc_feature (1)..(25): SEQ ID NO: 3538; WAN0249J9_at; Start 12; Stop 36
cttaggatacaaaccagacctattt

SEQ ID NO: 23773 - DNA, 25 bp, Artificial
  probe
  misc_feature (1)..(25): SEQ ID NO: 3642; WAN0249JA_at; Start 1; Stop 25
gatgcttgtcaaagcctagctttct

SEQ ID NO: 23774 - DNA, 25 bp, Artificial
  probe
  misc_feature (1)..(25): SEQ ID NO: 3642; WAN0249JA_at; Start 23; Stop 47
tcttgttataatggataagatggag

SEQ ID NO: 23775 - DNA, 25 bp, Artificial
  probe
  misc_feature (1)..(25): SEQ ID NO: 3642; WAN0249JA_at; Start 25; Stop 49
ttgttataatggataagatggaggc

SEQ ID NO: 23776 - DNA, 25 bp, Artificial
  probe
  misc_feature (1)..(25): SEQ ID NO: 3642; WAN0249JA_at; Start 17; Stop 41
tagctttcttgttataatggataag

SEQ ID NO: 23777 - DNA, 25 bp, Artificial
  probe
  misc_feature (1)..(25): SEQ ID NO: 3642; WAN0249JA_at; Start 15; Stop 39
cctagctttcttgttataatggata

SEQ ID NO: 23778 - DNA, 25 bp, Artificial
  probe
  misc_feature (1)..(25): SEQ ID NO: 3642; WAN0249JA_at; Start 13; Stop 37
agcctagctttcttgttataatgga

SEQ ID NO: 23779 - DNA, 25 bp, Artificial
  probe
  misc_feature (1)..(25): SEQ ID NO: 3642; WAN0249JA_at; Start 19; Stop 43
gctttcttgttataatggataagat

SEQ ID NO: 23780 - DNA, 25 bp, Artificial
  probe
  misc_feature (1)..(25): SEQ ID NO: 3642; WAN0249JA_at; Start 5; Stop 29
cttgtcaaagcctagctttcttgtt

SEQ ID NO: 23781 - DNA, 25 bp, Artificial
  probe
  misc_feature (1)..(25): SEQ ID NO: 3642; WAN0249JA_at; Start 12; Stop 36
aagcctagctttcttgttataatgg

SEQ ID NO: 23782 - DNA, 25 bp, Artificial
  probe
  misc_feature (1)..(25): SEQ ID NO: 3642; WAN0249JA_at; Start 11; Stop 35
aaagcctagctttcttgttataatg

SEQ ID NO: 23783 - DNA, 25 bp, Artificial
  probe
  misc_feature (1)..(25): SEQ ID NO: 3642; WAN0249JA_at; Start 10; Stop 34
caaagcctagctttcttgttataat

SEQ ID NO: 23784 - DNA, 25 bp, Artificial
  probe
  misc_feature (1)..(25): SEQ ID NO: 3642; WAN0249JA_at; Start 27; Stop 51
gttataatggataagatggaggcgt

SEQ ID NO: 23785 - DNA, 25 bp, Artificial
  probe
  misc_feature (1)..(25): SEQ ID NO: 3642; WAN0249JA_at; Start 14; Stop 38
gcctagctttcttgttataatggat

SEQ ID NO: 23786 - DNA, 25 bp, Artificial
  probe
  misc_feature (1)..(25): SEQ ID NO: 3642; WAN0249JA_at; Start 2; Stop 26
atgcttgtcaaagcctagctttctt

SEQ ID NO: 23787 - DNA, 25 bp, Artificial
  probe
  misc_feature (1)..(25): SEQ ID NO: 3642; WAN0249JA_at; Start 9; Stop 33
tcaaagcctagctttcttgttataa

SEQ ID NO: 23788 - DNA, 25 bp, Artificial
  probe
  misc_feature (1)..(25): SEQ ID NO: 3642; WAN0249JA_at; Start 3; Stop 27
tgcttgtcaaagcctagctttcttg

SEQ ID NO: 23789 - DNA, 25 bp, Artificial
  probe
  misc_feature (1)..(25): SEQ ID NO: 3642; WAN0249JA_at; Start 22; Stop 46
ttcttgttataatggataagatgga

SEQ ID NO: 23790 - DNA, 25 bp, Artificial
  probe
  misc_feature (1)..(25): SEQ ID NO: 3642; WAN0249JA_at; Start 16; Stop 40
ctagctttcttgttataatggataa

SEQ ID NO: 23791 - DNA, 25 bp, Artificial
  probe
  misc_feature (1)..(25): SEQ ID NO: 3642; WAN0249JA_at; Start 28; Stop 52
ttataatggataagatggaggcgtt

SEQ ID NO: 23792 - DNA, 25 bp, Artificial
  probe
  misc_feature (1)..(25): SEQ ID NO: 3642; WAN0249JA_at; Start 6; Stop 30
ttgtcaaagcctagctttcttgtta

SEQ ID NO: 23793 - DNA, 25 bp, Artificial
  probe
  misc_feature (1)..(25): SEQ ID NO: 3642; WAN0249JA_at; Start 8; Stop 32
gtcaaagcctagctttcttgttata

SEQ ID NO: 23794 - DNA, 25 bp, Artificial
  probe
  misc_feature (1)..(25): SEQ ID NO: 3642; WAN0249JA_at; Start 4; Stop 28
gcttgtcaaagcctagctttcttgt

SEQ ID NO: 23795 - DNA, 25 bp, Artificial
  probe
  misc_feature (1)..(25): SEQ ID NO: 3642; WAN0249JA_at; Start 21; Stop 45
tttcttgttataatggataagatgg

SEQ ID NO: 23796 - DNA, 25 bp, Artificial
  probe
  misc_feature (1)..(25): SEQ ID NO: 3642; WAN0249JA_at; Start 20; Stop 44
ctttcttgttataatggataagatg

SEQ ID NO: 23797 - DNA, 25 bp, Artificial
  probe
  misc_feature (1)..(25): SEQ ID NO: 3642; WAN0249JA_at; Start 26; Stop 50
tgttataatggataagatggaggcg

SEQ ID NO: 23798 - DNA, 25 bp, Artificial
  probe
  misc_feature (1)..(25): SEQ ID NO: 3642; WAN0249JA_at; Start 18; Stop 42
agctttcttgttataatggataaga

SEQ ID NO: 23799 - DNA, 25 bp, Artificial
  probe
  misc_feature (1)..(25): SEQ ID NO: 3642; WAN0249JA_at; Start 24; Stop 48
cttgttataatggataagatggagg

SEQ ID NO: 23800 - DNA, 25 bp, Artificial
  probe
  misc_feature (1)..(25): SEQ ID NO: 3642; WAN0249JA_at; Start 7; Stop 31
tgtcaaagcctagctttcttgttat

SEQ ID NO: 23801 - DNA, 25 bp, Artificial
  probe
  misc_feature (1)..(25): SEQ ID NO: 200; WAN0249JB_at; Start 12; Stop 36
cttatccattataacaagaaagcta

SEQ ID NO: 23802 - DNA, 25 bp, Artificial
  probe
  misc_feature (1)..(25): SEQ ID NO: 200; WAN0249JB_at; Start 21; Stop 45
tataacaagaaagctaggctttgac

SEQ ID NO: 23803 - DNA, 25 bp, Artificial
  probe
  misc_feature (1)..(25): SEQ ID NO: 200; WAN0249JB_at; Start 18; Stop 42
cattataacaagaaagctaggcttt

SEQ ID NO: 23804 - DNA, 25 bp, Artificial
  probe
  misc_feature (1)..(25): SEQ ID NO: 200; WAN0249JB_at; Start 9; Stop 33
catcttatccattataacaagaaag

SEQ ID NO: 23805 - DNA, 25 bp, Artificial
  probe
  misc_feature (1)..(25): SEQ ID NO: 200; WAN0249JB_at; Start 17; Stop 41
ccattataacaagaaagctaggctt

SEQ ID NO: 23806 - DNA, 25 bp, Artificial
  probe
  misc_feature (1)..(25): SEQ ID NO: 200; WAN0249JB_at; Start 1; Stop 25
aacgcctccatcttatccattataa

SEQ ID NO: 23807 - DNA, 25 bp, Artificial
  probe
  misc_feature (1)..(25): SEQ ID NO: 200; WAN0249JB_at; Start 20; Stop 44
ttataacaagaaagctaggctttga

SEQ ID NO: 23808 - DNA, 25 bp, Artificial
  probe
  misc_feature (1)..(25): SEQ ID NO: 200; WAN0249JB_at; Start 19; Stop 43
attataacaagaaagctaggctttg

SEQ ID NO: 23809 - DNA, 25 bp, Artificial
  probe
  misc_feature (1)..(25): SEQ ID NO: 200; WAN0249JB_at; Start 15; Stop 39
atccattataacaagaaagctaggc

SEQ ID NO: 23810 - DNA, 25 bp, Artificial
  probe
  misc_feature (1)..(25): SEQ ID NO: 200; WAN0249JB_at; Start 2; Stop 26
acgcctccatcttatccattataac

SEQ ID NO: 23811 - DNA, 25 bp, Artificial
  probe
  misc_feature (1)..(25): SEQ ID NO: 200; WAN0249JB_at; Start 27; Stop 51
aagaaagctaggctttgacaagcat

SEQ ID NO: 23812 - DNA, 25 bp, Artificial
  probe
  misc_feature (1)..(25): SEQ ID NO: 200; WAN0249JB_at; Start 22; Stop 46
ataacaagaaagctaggctttgaca

SEQ ID NO: 23813 - DNA, 25 bp, Artificial
  probe
  misc_feature (1)..(25): SEQ ID NO: 200; WAN0249JB_at; Start 23; Stop 47
taacaagaaagctaggctttgacaa

SEQ ID NO: 23814 - DNA, 25 bp, Artificial
  probe
  misc_feature (1)..(25): SEQ ID NO: 200; WAN0249JB_at; Start 8; Stop 32
ccatcttatccattataacaagaaa

SEQ ID NO: 23815 - DNA, 25 bp, Artificial
  probe
  misc_feature (1)..(25): SEQ ID NO: 200; WAN0249JB_at; Start 28; Stop 52
agaaagctaggctttgacaagcatc

SEQ ID NO: 23816 - DNA, 25 bp, Artificial
  probe
  misc_feature (1)..(25): SEQ ID NO: 200; WAN0249JB_at; Start 11; Stop 35
tcttatccattataacaagaaagct

SEQ ID NO: 23817 - DNA, 25 bp, Artificial
  probe
  misc_feature (1)..(25): SEQ ID NO: 200; WAN0249JB_at; Start 14; Stop 38
tatccattataacaagaaagctagg

SEQ ID NO: 23818 - DNA, 25 bp, Artificial
  probe
  misc_feature (1)..(25): SEQ ID NO: 200; WAN0249JB_at; Start 10; Stop 34
atcttatccattataacaagaaagc

SEQ ID NO: 23819 - DNA, 25 bp, Artificial
  probe
  misc_feature (1)..(25): SEQ ID NO: 200; WAN0249JB_at; Start 5; Stop 29
cctccatcttatccattataacaag

SEQ ID NO: 23820 - DNA, 25 bp, Artificial
  probe
  misc_feature (1)..(25): SEQ ID NO: 200; WAN0249JB_at; Start 7; Stop 31
tccatcttatccattataacaagaa

SEQ ID NO: 23821 - DNA, 25 bp, Artificial
  probe
  misc_feature (1)..(25): SEQ ID NO: 200; WAN0249JB_at; Start 25; Stop 49
acaagaaagctaggctttgacaagc

SEQ ID NO: 23822 - DNA, 25 bp, Artificial
  probe
  misc_feature (1)..(25): SEQ ID NO: 200; WAN0249JB_at; Start 6; Stop 30
ctccatcttatccattataacaaga

SEQ ID NO: 23823 - DNA, 25 bp, Artificial
  probe
  misc_feature (1)..(25): SEQ ID NO: 200; WAN0249JB_at; Start 4; Stop 28
gcctccatcttatccattataacaa

SEQ ID NO: 23824 - DNA, 25 bp, Artificial
  probe
  misc_feature (1)..(25): SEQ ID NO: 200; WAN0249JB_at; Start 24; Stop 48
aacaagaaagctaggctttgacaag

SEQ ID NO: 23825 - DNA, 25 bp, Artificial
  probe
  misc_feature (1)..(25): SEQ ID NO: 200; WAN0249JB_at; Start 3; Stop 27
cgcctccatcttatccattataaca

SEQ ID NO: 23826 - DNA, 25 bp, Artificial
  probe
  misc_feature (1)..(25): SEQ ID NO: 200; WAN0249JB_at; Start 16; Stop 40
tccattataacaagaaagctaggct

SEQ ID NO: 23827 - DNA, 25 bp, Artificial
  probe
  misc_feature (1)..(25): SEQ ID NO: 200; WAN0249JB_at; Start 26; Stop 50
caagaaagctaggctttgacaagca

SEQ ID NO: 23828 - DNA, 25 bp, Artificial
  probe
  misc_feature (1)..(25): SEQ ID NO: 200; WAN0249JB_at; Start 13; Stop 37
ttatccattataacaagaaagctag

SEQ ID NO: 23829 - DNA, 25 bp, Artificial
  probe
  misc_feature (1)..(25): SEQ ID NO: 4828; WAN0249JC_at; Start 34; Stop 58
aaactagatattatatacattaaga

SEQ ID NO: 23830 - DNA, 25 bp, Artificial
  probe
  misc_feature (1)..(25): SEQ ID NO: 4828; WAN0249JC_at; Start 20; Stop 44
agtgtgtatttttaaaactagatat

SEQ ID NO: 23831 - DNA, 25 bp, Artificial
  probe
  misc_feature (1)..(25): SEQ ID NO: 4828; WAN0249JC_at; Start 36; Stop 60
actagatattatatacattaagagg

SEQ ID NO: 23832 - DNA, 25 bp, Artificial
  probe
  misc_feature (1)..(25): SEQ ID NO: 4828; WAN0249JC_at; Start 12; Stop 36
gatatgtgagtgtgtatttttaaaa

SEQ ID NO: 23833 - DNA, 25 bp, Artificial
  probe
  misc_feature (1)..(25): SEQ ID NO: 4828; WAN0249JC_at; Start 29; Stop 53
ttttaaaactagatattatatacat

SEQ ID NO: 23834 - DNA, 25 bp, Artificial
  probe
  misc_feature (1)..(25): SEQ ID NO: 4828; WAN0249JC_at; Start 5; Stop 29
ttacagagatatgtgagtgtgtatt

SEQ ID NO: 23835 - DNA, 25 bp, Artificial
  probe
  misc_feature (1)..(25): SEQ ID NO: 4828; WAN0249JC_at; Start 10; Stop 34
gagatatgtgagtgtgtatttttaa

SEQ ID NO: 23836 - DNA, 25 bp, Artificial
  probe
  misc_feature (1)..(25): SEQ ID NO: 4828; WAN0249JC_at; Start 42; Stop 66
tattatatacattaagagggaatca

SEQ ID NO: 23837 - DNA, 25 bp, Artificial
  probe
  misc_feature (1)..(25): SEQ ID NO: 4828; WAN0249JC_at; Start 8; Stop 32
cagagatatgtgagtgtgtattttt

SEQ ID NO: 23838 - DNA, 25 bp, Artificial
  probe
  misc_feature (1)..(25): SEQ ID NO: 4828; WAN0249JC_at; Start 6; Stop 30
tacagagatatgtgagtgtgtattt

SEQ ID NO: 23839 - DNA, 25 bp, Artificial
  probe
  misc_feature (1)..(25): SEQ ID NO: 4828; WAN0249JC_at; Start 39; Stop 63
agatattatatacattaagagggaa

SEQ ID NO: 23840 - DNA, 25 bp, Artificial
  probe
  misc_feature (1)..(25): SEQ ID NO: 4828; WAN0249JC_at; Start 3; Stop 27
cattacagagatatgtgagtgtgta

SEQ ID NO: 23841 - DNA, 25 bp, Artificial
  probe
  misc_feature (1)..(25): SEQ ID NO: 4828; WAN0249JC_at; Start 4; Stop 28
attacagagatatgtgagtgtgtat

SEQ ID NO: 23842 - DNA, 25 bp, Artificial
  probe
  misc_feature (1)..(25): SEQ ID NO: 4828; WAN0249JC_at; Start 37; Stop 61
ctagatattatatacattaagaggg

SEQ ID NO: 23843 - DNA, 25 bp, Artificial
  probe
  misc_feature (1)..(25): SEQ ID NO: 4828; WAN0249JC_at; Start 33; Stop 57
aaaactagatattatatacattaag

SEQ ID NO: 23844 - DNA, 25 bp, Artificial
  probe
  misc_feature (1)..(25): SEQ ID NO: 4828; WAN0249JC_at; Start 38; Stop 62
tagatattatatacattaagaggga

SEQ ID NO: 23845 - DNA, 25 bp, Artificial
  probe
  misc_feature (1)..(25): SEQ ID NO: 4828; WAN0249JC_at; Start 22; Stop 46
tgtgtatttttaaaactagatatta

SEQ ID NO: 23846 - DNA, 25 bp, Artificial
  probe
  misc_feature (1)..(25): SEQ ID NO: 4828; WAN0249JC_at; Start 7; Stop 31
acagagatatgtgagtgtgtatttt

SEQ ID NO: 23847 - DNA, 25 bp, Artificial
  probe
  misc_feature (1)..(25): SEQ ID NO: 4828; WAN0249JC_at; Start 44; Stop 68
ttatatacattaagagggaatcagt

SEQ ID NO: 23848 - DNA, 25 bp, Artificial
  probe
  misc_feature (1)..(25): SEQ ID NO: 4828; WAN0249JC_at; Start 16; Stop 40
tgtgagtgtgtatttttaaaactag

SEQ ID NO: 23849 - DNA, 25 bp, Artificial
  probe
  misc_feature (1)..(25): SEQ ID NO: 4828; WAN0249JC_at; Start 28; Stop 52
tttttaaaactagatattatataca

SEQ ID NO: 23850 - DNA, 25 bp, Artificial
  probe
  misc_feature (1)..(25): SEQ ID NO: 4828; WAN0249JC_at; Start 19; Stop 43
gagtgtgtatttttaaaactagata

SEQ ID NO: 23851 - DNA, 25 bp, Artificial
  probe
  misc_feature (1)..(25): SEQ ID NO: 4828; WAN0249JC_at; Start 18; Stop 42
tgagtgtgtatttttaaaactagat

SEQ ID NO: 23852 - DNA, 25 bp, Artificial
  probe
  misc_feature (1)..(25): SEQ ID NO: 4828; WAN0249JC_at; Start 13; Stop 37
atatgtgagtgtgtatttttaaaac

SEQ ID NO: 23853 - DNA, 25 bp, Artificial
  probe
  misc_feature (1)..(25): SEQ ID NO: 4828; WAN0249JC_at; Start 9; Stop 33
agagatatgtgagtgtgtattttta

SEQ ID NO: 23854 - DNA, 25 bp, Artificial
  probe
  misc_feature (1)..(25): SEQ ID NO: 4828; WAN0249JC_at; Start 11; Stop 35
agatatgtgagtgtgtatttttaaa

SEQ ID NO: 23855 - DNA, 25 bp, Artificial
  probe
  misc_feature (1)..(25): SEQ ID NO: 4828; WAN0249JC_at; Start 41; Stop 65
atattatatacattaagagggaatc

SEQ ID NO: 23856 - DNA, 25 bp, Artificial
  probe
  misc_feature (1)..(25): SEQ ID NO: 4828; WAN0249JC_at; Start 40; Stop 64
gatattatatacattaagagggaat

SEQ ID NO: 23857 - DNA, 25 bp, Artificial
  probe
  misc_feature (1)..(25): SEQ ID NO: 4828; WAN0249JC_at; Start 35; Stop 59
aactagatattatatacattaagag

SEQ ID NO: 23858 - DNA, 25 bp, Artificial
  probe
  misc_feature (1)..(25): SEQ ID NO: 4828; WAN0249JC_at; Start 1; Stop 25
ttcattacagagatatgtgagtgtg

SEQ ID NO: 23859 - DNA, 25 bp, Artificial
  probe
  misc_feature (1)..(25): SEQ ID NO: 4828; WAN0249JC_at; Start 2; Stop 26
tcattacagagatatgtgagtgtgt

SEQ ID NO: 23860 - DNA, 25 bp, Artificial
  probe
  misc_feature (1)..(25): SEQ ID NO: 4828; WAN0249JC_at; Start 17; Stop 41
gtgagtgtgtatttttaaaactaga

SEQ ID NO: 23861 - DNA, 25 bp, Artificial
  probe
  misc_feature (1)..(25): SEQ ID NO: 4828; WAN0249JC_at; Start 14; Stop 38
tatgtgagtgtgtatttttaaaact

SEQ ID NO: 23862 - DNA, 25 bp, Artificial
  probe
  misc_feature (1)..(25): SEQ ID NO: 4828; WAN0249JC_at; Start 43; Stop 67
attatatacattaagagggaatcag

SEQ ID NO: 23863 - DNA, 25 bp, Artificial
  probe
  misc_feature (1)..(25): SEQ ID NO: 384; WAN0249JD_at; Start 38; Stop 62
aaaatacacactcacatatctctgt

SEQ ID NO: 23864 - DNA, 25 bp, Artificial
  probe
  misc_feature (1)..(25): SEQ ID NO: 384; WAN0249JD_at; Start 40; Stop 64
aatacacactcacatatctctgtaa

SEQ ID NO: 23865 - DNA, 25 bp, Artificial
  probe
  misc_feature (1)..(25): SEQ ID NO: 384; WAN0249JD_at; Start 30; Stop 54
tagttttaaaaatacacactcacat

SEQ ID NO: 23866 - DNA, 25 bp, Artificial
  probe
  misc_feature (1)..(25): SEQ ID NO: 384; WAN0249JD_at; Start 7; Stop 31
tccctcttaatgtatataatatcta

SEQ ID NO: 23867 - DNA, 25 bp, Artificial
  probe
  misc_feature (1)..(25): SEQ ID NO: 384; WAN0249JD_at; Start 33; Stop 57
ttttaaaaatacacactcacatatc

SEQ ID NO: 23868 - DNA, 25 bp, Artificial
  probe
  misc_feature (1)..(25): SEQ ID NO: 384; WAN0249JD_at; Start 34; Stop 58
tttaaaaatacacactcacatatct

SEQ ID NO: 23869 - DNA, 25 bp, Artificial
  probe
  misc_feature (1)..(25): SEQ ID NO: 384; WAN0249JD_at; Start 43; Stop 67
acacactcacatatctctgtaatga

SEQ ID NO: 23870 - DNA, 25 bp, Artificial
  probe
  misc_feature (1)..(25): SEQ ID NO: 384; WAN0249JD_at; Start 9; Stop 33
cctcttaatgtatataatatctagt

SEQ ID NO: 23871 - DNA, 25 bp, Artificial
  probe
  misc_feature (1)..(25): SEQ ID NO: 384; WAN0249JD_at; Start 26; Stop 50
tatctagttttaaaaatacacactc

SEQ ID NO: 23872 - DNA, 25 bp, Artificial
  probe
  misc_feature (1)..(25): SEQ ID NO: 384; WAN0249JD_at; Start 28; Stop 52
tctagttttaaaaatacacactcac

SEQ ID NO: 23873 - DNA, 25 bp, Artificial
  probe
  misc_feature (1)..(25): SEQ ID NO: 384; WAN0249JD_at; Start 3; Stop 27
tgattccctcttaatgtatataata

SEQ ID NO: 23874 - DNA, 25 bp, Artificial
  probe
  misc_feature (1)..(25): SEQ ID NO: 384; WAN0249JD_at; Start 44; Stop 68
cacactcacatatctctgtaatgaa

SEQ ID NO: 23875 - DNA, 25 bp, Artificial
  probe
  misc_feature (1)..(25): SEQ ID NO: 384; WAN0249JD_at; Start 23; Stop 47
taatatctagttttaaaaatacaca

SEQ ID NO: 23876 - DNA, 25 bp, Artificial
  probe
  misc_feature (1)..(25): SEQ ID NO: 384; WAN0249JD_at; Start 32; Stop 56
gttttaaaaatacacactcacatat

SEQ ID NO: 23877 - DNA, 25 bp, Artificial
  probe
  misc_feature (1)..(25): SEQ ID NO: 384; WAN0249JD_at; Start 6; Stop 30
ttccctcttaatgtatataatatct

SEQ ID NO: 23878 - DNA, 25 bp, Artificial
  probe
  misc_feature (1)..(25): SEQ ID NO: 384; WAN0249JD_at; Start 8; Stop 32
ccctcttaatgtatataatatctag

SEQ ID NO: 23879 - DNA, 25 bp, Artificial
  probe
  misc_feature (1)..(25): SEQ ID NO: 384; WAN0249JD_at; Start 39; Stop 63
aaatacacactcacatatctctgta

SEQ ID NO: 23880 - DNA, 25 bp, Artificial
  probe
  misc_feature (1)..(25): SEQ ID NO: 384; WAN0249JD_at; Start 36; Stop 60
taaaaatacacactcacatatctct

SEQ ID NO: 23881 - DNA, 25 bp, Artificial
  probe
  misc_feature (1)..(25): SEQ ID NO: 384; WAN0249JD_at; Start 11; Stop 35
tcttaatgtatataatatctagttt

SEQ ID NO: 23882 - DNA, 25 bp, Artificial
  probe
  misc_feature (1)..(25): SEQ ID NO: 384; WAN0249JD_at; Start 5; Stop 29
attccctcttaatgtatataatatc

SEQ ID NO: 23883 - DNA, 25 bp, Artificial
  probe
  misc_feature (1)..(25): SEQ ID NO: 384; WAN0249JD_at; Start 27; Stop 51
atctagttttaaaaatacacactca

SEQ ID NO: 23884 - DNA, 25 bp, Artificial
  probe
  misc_feature (1)..(25): SEQ ID NO: 384; WAN0249JD_at; Start 31; Stop 55
agttttaaaaatacacactcacata

SEQ ID NO: 23885 - DNA, 25 bp, Artificial
  probe
  misc_feature (1)..(25): SEQ ID NO: 384; WAN0249JD_at; Start 25; Stop 49
atatctagttttaaaaatacacact

SEQ ID NO: 23886 - DNA, 25 bp, Artificial
  probe
  misc_feature (1)..(25): SEQ ID NO: 384; WAN0249JD_at; Start 37; Stop 61
aaaaatacacactcacatatctctg

SEQ ID NO: 23887 - DNA, 25 bp, Artificial
  probe
  misc_feature (1)..(25): SEQ ID NO: 384; WAN0249JD_at; Start 41; Stop 65
atacacactcacatatctctgtaat

SEQ ID NO: 23888 - DNA, 25 bp, Artificial
  probe
  misc_feature (1)..(25): SEQ ID NO: 384; WAN0249JD_at; Start 35; Stop 59
ttaaaaatacacactcacatatctc

SEQ ID NO: 23889 - DNA, 25 bp, Artificial
  probe
  misc_feature (1)..(25): SEQ ID NO: 384; WAN0249JD_at; Start 29; Stop 53
ctagttttaaaaatacacactcaca

SEQ ID NO: 23890 - DNA, 25 bp, Artificial
  probe
  misc_feature (1)..(25): SEQ ID NO: 384; WAN0249JD_at; Start 42; Stop 66
tacacactcacatatctctgtaatg

SEQ ID NO: 23891 - DNA, 25 bp, Artificial
  probe
  misc_feature (1)..(25): SEQ ID NO: 384; WAN0249JD_at; Start 2; Stop 26
ctgattccctcttaatgtatataat

SEQ ID NO: 23892 - DNA, 25 bp, Artificial
  probe
  misc_feature (1)..(25): SEQ ID NO: 384; WAN0249JD_at; Start 4; Stop 28
gattccctcttaatgtatataatat

SEQ ID NO: 23893 - DNA, 25 bp, Artificial
  probe
  misc_feature (1)..(25): SEQ ID NO: 384; WAN0249JD_at; Start 1; Stop 25
actgattccctcttaatgtatataa

SEQ ID NO: 23894 - DNA, 25 bp, Artificial
  probe
  misc_feature (1)..(25): SEQ ID NO: 384; WAN0249JD_at; Start 10; Stop 34
ctcttaatgtatataatatctagtt

SEQ ID NO: 23895 - DNA, 25 bp, Artificial
  probe
  misc_feature (1)..(25): SEQ ID NO: 384; WAN0249JD_at; Start 21; Stop 45
tataatatctagttttaaaaataca

SEQ ID NO: 23896 - DNA, 25 bp, Artificial
  probe
  misc_feature (1)..(25): SEQ ID NO: 4693; WAN0249JE_at; Start 4; Stop 28
tataatattttcatgaagactatgt

SEQ ID NO: 23897 - DNA, 25 bp, Artificial
  probe
  misc_feature (1)..(25): SEQ ID NO: 4693; WAN0249JE_at; Start 18; Stop 42
gaagactatgtgctaaaattgacgg

SEQ ID NO: 23898 - DNA, 25 bp, Artificial
  probe
  misc_feature (1)..(25): SEQ ID NO: 4693; WAN0249JE_at; Start 35; Stop 59
attgacggtagtgaatggaacaata

SEQ ID NO: 23899 - DNA, 25 bp, Artificial
  probe
  misc_feature (1)..(25): SEQ ID NO: 4693; WAN0249JE_at; Start 1; Stop 25
tgatataatattttcatgaagacta

SEQ ID NO: 23900 - DNA, 25 bp, Artificial
  probe
  misc_feature (1)..(25): SEQ ID NO: 4693; WAN0249JE_at; Start 31; Stop 55
taaaattgacggtagtgaatggaac

SEQ ID NO: 23901 - DNA, 25 bp, Artificial
  probe
  misc_feature (1)..(25): SEQ ID NO: 4693; WAN0249JE_at; Start 36; Stop 60
ttgacggtagtgaatggaacaatac

SEQ ID NO: 23902 - DNA, 25 bp, Artificial
  probe
  misc_feature (1)..(25): SEQ ID NO: 4693; WAN0249JE_at; Start 15; Stop 39
catgaagactatgtgctaaaattga

SEQ ID NO: 23903 - DNA, 25 bp, Artificial
  probe
  misc_feature (1)..(25): SEQ ID NO: 4693; WAN0249JE_at; Start 23; Stop 47
ctatgtgctaaaattgacggtagtg

SEQ ID NO: 23904 - DNA, 25 bp, Artificial
  probe
  misc_feature (1)..(25): SEQ ID NO: 4693; WAN0249JE_at; Start 16; Stop 40
atgaagactatgtgctaaaattgac

SEQ ID NO: 23905 - DNA, 25 bp, Artificial
  probe
  misc_feature (1)..(25): SEQ ID NO: 4693; WAN0249JE_at; Start 33; Stop 57
aaattgacggtagtgaatggaacaa

SEQ ID NO: 23906 - DNA, 25 bp, Artificial
  probe
  misc_feature (1)..(25): SEQ ID NO: 4693; WAN0249JE_at; Start 34; Stop 58
aattgacggtagtgaatggaacaat

SEQ ID NO: 23907 - DNA, 25 bp, Artificial
  probe
  misc_feature (1)..(25): SEQ ID NO: 4693; WAN0249JE_at; Start 20; Stop 44
agactatgtgctaaaattgacggta

SEQ ID NO: 23908 - DNA, 25 bp, Artificial
  probe
  misc_feature (1)..(25): SEQ ID NO: 4693; WAN0249JE_at; Start 2; Stop 26
gatataatattttcatgaagactat

SEQ ID NO: 23909 - DNA, 25 bp, Artificial
  probe
  misc_feature (1)..(25): SEQ ID NO: 4693; WAN0249JE_at; Start 28; Stop 52
tgctaaaattgacggtagtgaatgg

SEQ ID NO: 23910 - DNA, 25 bp, Artificial
  probe
  misc_feature (1)..(25): SEQ ID NO: 4693; WAN0249JE_at; Start 12; Stop 36
tttcatgaagactatgtgctaaaat

SEQ ID NO: 23911 - DNA, 25 bp, Artificial
  probe
  misc_feature (1)..(25): SEQ ID NO: 4693; WAN0249JE_at; Start 30; Stop 54
ctaaaattgacggtagtgaatggaa

SEQ ID NO: 23912 - DNA, 25 bp, Artificial
  probe
  misc_feature (1)..(25): SEQ ID NO: 4693; WAN0249JE_at; Start 14; Stop 38
tcatgaagactatgtgctaaaattg

SEQ ID NO: 23913 - DNA, 25 bp, Artificial
  probe
  misc_feature (1)..(25): SEQ ID NO: 4693; WAN0249JE_at; Start 11; Stop 35
ttttcatgaagactatgtgctaaaa

SEQ ID NO: 23914 - DNA, 25 bp, Artificial
  probe
  misc_feature (1)..(25): SEQ ID NO: 4693; WAN0249JE_at; Start 24; Stop 48
tatgtgctaaaattgacggtagtga

SEQ ID NO: 23915 - DNA, 25 bp, Artificial
  probe
  misc_feature (1)..(25): SEQ ID NO: 4693; WAN0249JE_at; Start 6; Stop 30
taatattttcatgaagactatgtgc

SEQ ID NO: 23916 - DNA, 25 bp, Artificial
  probe
  misc_feature (1)..(25): SEQ ID NO: 4693; WAN0249JE_at; Start 37; Stop 61
tgacggtagtgaatggaacaatacc

SEQ ID NO: 23917 - DNA, 25 bp, Artificial
  probe
  misc_feature (1)..(25): SEQ ID NO: 4693; WAN0249JE_at; Start 25; Stop 49
atgtgctaaaattgacggtagtgaa

SEQ ID NO: 23918 - DNA, 25 bp, Artificial
  probe
  misc_feature (1)..(25): SEQ ID NO: 4693; WAN0249JE_at; Start 26; Stop 50
tgtgctaaaattgacggtagtgaat

SEQ ID NO: 23919 - DNA, 25 bp, Artificial
  probe
  misc_feature (1)..(25): SEQ ID NO: 4693; WAN0249JE_at; Start 17; Stop 41
tgaagactatgtgctaaaattgacg

SEQ ID NO: 23920 - DNA, 25 bp, Artificial
  probe
  misc_feature (1)..(25): SEQ ID NO: 4693; WAN0249JE_at; Start 13; Stop 37
ttcatgaagactatgtgctaaaatt

SEQ ID NO: 23921 - DNA, 25 bp, Artificial
  probe
  misc_feature (1)..(25): SEQ ID NO: 4693; WAN0249JE_at; Start 8; Stop 32
atattttcatgaagactatgtgcta

SEQ ID NO: 23922 - DNA, 25 bp, Artificial
  probe
  misc_feature (1)..(25): SEQ ID NO: 4693; WAN0249JE_at; Start 22; Stop 46
actatgtgctaaaattgacggtagt

SEQ ID NO: 23923 - DNA, 25 bp, Artificial
  probe
  misc_feature (1)..(25): SEQ ID NO: 4693; WAN0249JE_at; Start 7; Stop 31
aatattttcatgaagactatgtgct

SEQ ID NO: 23924 - DNA, 25 bp, Artificial
  probe
  misc_feature (1)..(25): SEQ ID NO: 4693; WAN0249JE_at; Start 9; Stop 33
tattttcatgaagactatgtgctaa

SEQ ID NO: 23925 - DNA, 25 bp, Artificial
  probe
  misc_feature (1)..(25): SEQ ID NO: 4693; WAN0249JE_at; Start 27; Stop 51
gtgctaaaattgacggtagtgaatg

SEQ ID NO: 23926 - DNA, 25 bp, Artificial
  probe
  misc_feature (1)..(25): SEQ ID NO: 4693; WAN0249JE_at; Start 10; Stop 34
attttcatgaagactatgtgctaaa

SEQ ID NO: 23927 - DNA, 25 bp, Artificial
  probe
  misc_feature (1)..(25): SEQ ID NO: 4693; WAN0249JE_at; Start 21; Stop 45
gactatgtgctaaaattgacggtag

SEQ ID NO: 23928 - DNA, 25 bp, Artificial
  probe
  misc_feature (1)..(25): SEQ ID NO: 4693; WAN0249JE_at; Start 32; Stop 56
aaaattgacggtagtgaatggaaca

SEQ ID NO: 23929 - DNA, 25 bp, Artificial
  probe
  misc_feature (1)..(25): SEQ ID NO: 4693; WAN0249JE_at; Start 19; Stop 43
aagactatgtgctaaaattgacggt

SEQ ID NO: 23930 - DNA, 25 bp, Artificial
  probe
  misc_feature (1)..(25): SEQ ID NO: 3764; WAN0249JF_at; Start 29; Stop 53
ttagcacatagtcttcatgaaaata

SEQ ID NO: 23931 - DNA, 25 bp, Artificial
  probe
  misc_feature (1)..(25): SEQ ID NO: 3764; WAN0249JF_at; Start 23; Stop 47
tcaattttagcacatagtcttcatg

SEQ ID NO: 23932 - DNA, 25 bp, Artificial
  probe
  misc_feature (1)..(25): SEQ ID NO: 3764; WAN0249JF_at; Start 4; Stop 28
attgttccattcactaccgtcaatt

SEQ ID NO: 23933 - DNA, 25 bp, Artificial
  probe
  misc_feature (1)..(25): SEQ ID NO: 3764; WAN0249JF_at; Start 26; Stop 50
attttagcacatagtcttcatgaaa

SEQ ID NO: 23934 - DNA, 25 bp, Artificial
  probe
  misc_feature (1)..(25): SEQ ID NO: 3764; WAN0249JF_at; Start 8; Stop 32
ttccattcactaccgtcaattttag

SEQ ID NO: 23935 - DNA, 25 bp, Artificial
  probe
  misc_feature (1)..(25): SEQ ID NO: 3764; WAN0249JF_at; Start 37; Stop 61
tagtcttcatgaaaatattatatca

SEQ ID NO: 23936 - DNA, 25 bp, Artificial
  probe
  misc_feature (1)..(25): SEQ ID NO: 3764; WAN0249JF_at; Start 2; Stop 26
gtattgttccattcactaccgtcaa

SEQ ID NO: 23937 - DNA, 25 bp, Artificial
  probe
  misc_feature (1)..(25): SEQ ID NO: 3764; WAN0249JF_at; Start 18; Stop 42
taccgtcaattttagcacatagtct

SEQ ID NO: 23938 - DNA, 25 bp, Artificial
  probe
  misc_feature (1)..(25): SEQ ID NO: 3764; WAN0249JF_at; Start 22; Stop 46
gtcaattttagcacatagtcttcat

SEQ ID NO: 23939 - DNA, 25 bp, Artificial
  probe
  misc_feature (1)..(25): SEQ ID NO: 3764; WAN0249JF_at; Start 19; Stop 43
accgtcaattttagcacatagtctt

SEQ ID NO: 23940 - DNA, 25 bp, Artificial
  probe
  misc_feature (1)..(25): SEQ ID NO: 3764; WAN0249JF_at; Start 17; Stop 41
ctaccgtcaattttagcacatagtc

SEQ ID NO: 23941 - DNA, 25 bp, Artificial
  probe
  misc_feature (1)..(25): SEQ ID NO: 3764; WAN0249JF_at; Start 21; Stop 45
cgtcaattttagcacatagtcttca

SEQ ID NO: 23942 - DNA, 25 bp, Artificial
  probe
  misc_feature (1)..(25): SEQ ID NO: 3764; WAN0249JF_at; Start 33; Stop 57
cacatagtcttcatgaaaatattat

SEQ ID NO: 23943 - DNA, 25 bp, Artificial
  probe
  misc_feature (1)..(25): SEQ ID NO: 3764; WAN0249JF_at; Start 28; Stop 52
tttagcacatagtcttcatgaaaat

SEQ ID NO: 23944 - DNA, 25 bp, Artificial
  probe
  misc_feature (1)..(25): SEQ ID NO: 3764; WAN0249JF_at; Start 5; Stop 29
ttgttccattcactaccgtcaattt

SEQ ID NO: 23945 - DNA, 25 bp, Artificial
  probe
  misc_feature (1)..(25): SEQ ID NO: 3764; WAN0249JF_at; Start 20; Stop 44
ccgtcaattttagcacatagtcttc

SEQ ID NO: 23946 - DNA, 25 bp, Artificial
  probe
  misc_feature (1)..(25): SEQ ID NO: 3764; WAN0249JF_at; Start 10; Stop 34
ccattcactaccgtcaattttagca

SEQ ID NO: 23947 - DNA, 25 bp, Artificial
  probe
  misc_feature (1)..(25): SEQ ID NO: 3764; WAN0249JF_at; Start 13; Stop 37
ttcactaccgtcaattttagcacat

SEQ ID NO: 23948 - DNA, 25 bp, Artificial
  probe
  misc_feature (1)..(25): SEQ ID NO: 3764; WAN0249JF_at; Start 25; Stop 49
aattttagcacatagtcttcatgaa

SEQ ID NO: 23949 - DNA, 25 bp, Artificial
  probe
  misc_feature (1)..(25): SEQ ID NO: 3764; WAN0249JF_at; Start 24; Stop 48
caattttagcacatagtcttcatga

SEQ ID NO: 23950 - DNA, 25 bp, Artificial
  probe
  misc_feature (1)..(25): SEQ ID NO: 3764; WAN0249JF_at; Start 12; Stop 36
attcactaccgtcaattttagcaca

SEQ ID NO: 23951 - DNA, 25 bp, Artificial
  probe
  misc_feature (1)..(25): SEQ ID NO: 3764; WAN0249JF_at; Start 35; Stop 59
catagtcttcatgaaaatattatat

SEQ ID NO: 23952 - DNA, 25 bp, Artificial
  probe
  misc_feature (1)..(25): SEQ ID NO: 3764; WAN0249JF_at; Start 15; Stop 39
cactaccgtcaattttagcacatag

SEQ ID NO: 23953 - DNA, 25 bp, Artificial
  probe
  misc_feature (1)..(25): SEQ ID NO: 3764; WAN0249JF_at; Start 11; Stop 35
cattcactaccgtcaattttagcac

SEQ ID NO: 23954 - DNA, 25 bp, Artificial
  probe
  misc_feature (1)..(25): SEQ ID NO: 3764; WAN0249JF_at; Start 30; Stop 54
tagcacatagtcttcatgaaaatat

SEQ ID NO: 23955 - DNA, 25 bp, Artificial
  probe
  misc_feature (1)..(25): SEQ ID NO: 3764; WAN0249JF_at; Start 31; Stop 55
agcacatagtcttcatgaaaatatt

SEQ ID NO: 23956 - DNA, 25 bp, Artificial
  probe
  misc_feature (1)..(25): SEQ ID NO: 3764; WAN0249JF_at; Start 27; Stop 51
ttttagcacatagtcttcatgaaaa

SEQ ID NO: 23957 - DNA, 25 bp, Artificial
  probe
  misc_feature (1)..(25): SEQ ID NO: 3764; WAN0249JF_at; Start 14; Stop 38
tcactaccgtcaattttagcacata

SEQ ID NO: 23958 - DNA, 25 bp, Artificial
  probe
  misc_feature (1)..(25): SEQ ID NO: 3764; WAN0249JF_at; Start 1; Stop 25
ggtattgttccattcactaccgtca

SEQ ID NO: 23959 - DNA, 25 bp, Artificial
  probe
  misc_feature (1)..(25): SEQ ID NO: 3764; WAN0249JF_at; Start 7; Stop 31
gttccattcactaccgtcaatttta

SEQ ID NO: 23960 - DNA, 25 bp, Artificial
  probe
  misc_feature (1)..(25): SEQ ID NO: 3764; WAN0249JF_at; Start 16; Stop 40
actaccgtcaattttagcacatagt

SEQ ID NO: 23961 - DNA, 25 bp, Artificial
  probe
  misc_feature (1)..(25): SEQ ID NO: 3764; WAN0249JF_at; Start 32; Stop 56
gcacatagtcttcatgaaaatatta

SEQ ID NO: 23962 - DNA, 25 bp, Artificial
  probe
  misc_feature (1)..(25): SEQ ID NO: 3764; WAN0249JF_at; Start 6; Stop 30
tgttccattcactaccgtcaatttt

SEQ ID NO: 23963 - DNA, 25 bp, Artificial
  probe
  misc_feature (1)..(25): SEQ ID NO: 3764; WAN0249JF_at; Start 3; Stop 27
tattgttccattcactaccgtcaat

SEQ ID NO: 23964 - DNA, 25 bp, Artificial
  probe
  misc_feature (1)..(25): SEQ ID NO: 4666; WAN0249JG_at; Start 39; Stop 63
tacttacaaaagtgaagatgtgaaa

SEQ ID NO: 23965 - DNA, 25 bp, Artificial
  probe
  misc_feature (1)..(25): SEQ ID NO: 4666; WAN0249JG_at; Start 118; Stop 142
caagtgttttttgaagattgattga

SEQ ID NO: 23966 - DNA, 25 bp, Artificial
  probe
  misc_feature (1)..(25): SEQ ID NO: 4666; WAN0249JG_at; Start 1; Stop 25
tcttttacaagtagaggtactgatt

SEQ ID NO: 23967 - DNA, 25 bp, Artificial
  probe
  misc_feature (1)..(25): SEQ ID NO: 4666; WAN0249JG_at; Start 94; Stop 118
tctatcactaattgtaaacactttc

SEQ ID NO: 23968 - DNA, 25 bp, Artificial
  probe
  misc_feature (1)..(25): SEQ ID NO: 4666; WAN0249JG_at; Start 14; Stop 38
gaggtactgattgaagctctatatc

SEQ ID NO: 23969 - DNA, 25 bp, Artificial
  probe
  misc_feature (1)..(25): SEQ ID NO: 4666; WAN0249JG_at; Start 45; Stop 69
caaaagtgaagatgtgaaaatttcg

SEQ ID NO: 23970 - DNA, 25 bp, Artificial
  probe
  misc_feature (1)..(25): SEQ ID NO: 4666; WAN0249JG_at; Start 6; Stop 30
tacaagtagaggtactgattgaagc

SEQ ID NO: 23971 - DNA, 25 bp, Artificial
  probe
  misc_feature (1)..(25): SEQ ID NO: 4666; WAN0249JG_at; Start 168; Stop 192
tagctccttgctaccaccttagact

SEQ ID NO: 23972 - DNA, 25 bp, Artificial
  probe
  misc_feature (1)..(25): SEQ ID NO: 4666; WAN0249JG_at; Start 173; Stop 197
ccttgctaccaccttagactaaaca

SEQ ID NO: 23973 - DNA, 25 bp, Artificial
  probe
  misc_feature (1)..(25): SEQ ID NO: 4666; WAN0249JG_at; Start 22; Stop 46
gattgaagctctatatctacttaca

SEQ ID NO: 23974 - DNA, 25 bp, Artificial
  probe
  misc_feature (1)..(25): SEQ ID NO: 4666; WAN0249JG_at; Start 160; Stop 184
cctaggtttagctccttgctaccac

SEQ ID NO: 23975 - DNA, 25 bp, Artificial
  probe
  misc_feature (1)..(25): SEQ ID NO: 4666; WAN0249JG_at; Start 165; Stop 189
gtttagctccttgctaccaccttag

SEQ ID NO: 23976 - DNA, 25 bp, Artificial
  probe
  misc_feature (1)..(25): SEQ ID NO: 4666; WAN0249JG_at; Start 159; Stop 183
acctaggtttagctccttgctacca

SEQ ID NO: 23977 - DNA, 25 bp, Artificial
  probe
  misc_feature (1)..(25): SEQ ID NO: 4666; WAN0249JG_at; Start 176; Stop 200
tgctaccaccttagactaaacaaaa

SEQ ID NO: 23978 - DNA, 25 bp, Artificial
  probe
  misc_feature (1)..(25): SEQ ID NO: 4666; WAN0249JG_at; Start 151; Stop 175
catagaaaacctaggtttagctcct

SEQ ID NO: 23979 - DNA, 25 bp, Artificial
  probe
  misc_feature (1)..(25): SEQ ID NO: 4666; WAN0249JG_at; Start 150; Stop 174
tcatagaaaacctaggtttagctcc

SEQ ID NO: 23980 - DNA, 25 bp, Artificial
  probe
  misc_feature (1)..(25): SEQ ID NO: 4666; WAN0249JG_at; Start 99; Stop 123
cactaattgtaaacactttcaagtg

SEQ ID NO: 23981 - DNA, 25 bp, Artificial
  probe
  misc_feature (1)..(25): SEQ ID NO: 4666; WAN0249JG_at; Start 90; Stop 114
ccattctatcactaattgtaaacac

SEQ ID NO: 23982 - DNA, 25 bp, Artificial
  probe
  misc_feature (1)..(25): SEQ ID NO: 4666; WAN0249JG_at; Start 162; Stop 186
taggtttagctccttgctaccacct

SEQ ID NO: 23983 - DNA, 25 bp, Artificial
  probe
  misc_feature (1)..(25): SEQ ID NO: 4666; WAN0249JG_at; Start 29; Stop 53
gctctatatctacttacaaaagtga

SEQ ID NO: 23984 - DNA, 25 bp, Artificial
  probe
  misc_feature (1)..(25): SEQ ID NO: 4666; WAN0249JG_at; Start 8; Stop 32
caagtagaggtactgattgaagctc

SEQ ID NO: 23985 - DNA, 25 bp, Artificial
  probe
  misc_feature (1)..(25): SEQ ID NO: 4666; WAN0249JG_at; Start 16; Stop 40
ggtactgattgaagctctatatcta

SEQ ID NO: 23986 - DNA, 25 bp, Artificial
  probe
  misc_feature (1)..(25): SEQ ID NO: 4666; WAN0249JG_at; Start 52; Stop 76
gaagatgtgaaaatttcgttttcat

SEQ ID NO: 23987 - DNA, 25 bp, Artificial
  probe
  misc_feature (1)..(25): SEQ ID NO: 4666; WAN0249JG_at; Start 76; Stop 100
tatttctacttattccattctatca

SEQ ID NO: 23988 - DNA, 25 bp, Artificial
  probe
  misc_feature (1)..(25): SEQ ID NO: 4666; WAN0249JG_at; Start 68; Stop 92
cgttttcatatttctacttattcca

SEQ ID NO: 23989 - DNA, 25 bp, Artificial
  probe
  misc_feature (1)..(25): SEQ ID NO: 4666; WAN0249JG_at; Start 166; Stop 190
tttagctccttgctaccaccttaga

SEQ ID NO: 23990 - DNA, 25 bp, Artificial
  probe
  misc_feature (1)..(25): SEQ ID NO: 4666; WAN0249JG_at; Start 170; Stop 194
gctccttgctaccaccttagactaa

SEQ ID NO: 23991 - DNA, 25 bp, Artificial
  probe
  misc_feature (1)..(25): SEQ ID NO: 4666; WAN0249JG_at; Start 9; Stop 33
aagtagaggtactgattgaagctct

SEQ ID NO: 23992 - DNA, 25 bp, Artificial
  probe
  misc_feature (1)..(25): SEQ ID NO: 4666; WAN0249JG_at; Start 37; Stop 61
tctacttacaaaagtgaagatgtga

SEQ ID NO: 23993 - DNA, 25 bp, Artificial
  probe
  misc_feature (1)..(25): SEQ ID NO: 4666; WAN0249JG_at; Start 12; Stop 36
tagaggtactgattgaagctctata

SEQ ID NO: 23994 - DNA, 25 bp, Artificial
  probe
  misc_feature (1)..(25): SEQ ID NO: 4666; WAN0249JG_at; Start 31; Stop 55
tctatatctacttacaaaagtgaag

SEQ ID NO: 23995 - DNA, 25 bp, Artificial
  probe
  misc_feature (1)..(25): SEQ ID NO: 4666; WAN0249JG_at; Start 164; Stop 188
ggtttagctccttgctaccacctta

SEQ ID NO: 23996 - DNA, 25 bp, Artificial
  probe
  misc_feature (1)..(25): SEQ ID NO: 4666; WAN0249JG_at; Start 26; Stop 50
gaagctctatatctacttacaaaag

SEQ ID NO: 23997 - DNA, 25 bp, Artificial
  probe
  misc_feature (1)..(25): SEQ ID NO: 4666; WAN0249JG_at; Start 18; Stop 42
tactgattgaagctctatatctact

SEQ ID NO: 23998 - DNA, 25 bp, Artificial
  probe
  misc_feature (1)..(25): SEQ ID NO: 207; WAN0249JH_at; Start 167; Stop 191
tcacatcttcacttttgtaagtaga

SEQ ID NO: 23999 - DNA, 25 bp, Artificial
  probe
  misc_feature (1)..(25): SEQ ID NO: 207; WAN0249JH_at; Start 34; Stop 58
ttagtctaaggtggtagcaaggagc

SEQ ID NO: 24000 - DNA, 25 bp, Artificial
  probe
  misc_feature (1)..(25): SEQ ID NO: 207; WAN0249JH_at; Start 40; Stop 64
taaggtggtagcaaggagctaaacc

SEQ ID NO: 24001 - DNA, 25 bp, Artificial
  probe
  misc_feature (1)..(25): SEQ ID NO: 207; WAN0249JH_at; Start 28; Stop 52
ttttgtttagtctaaggtggtagca

SEQ ID NO: 24002 - DNA, 25 bp, Artificial
  probe
  misc_feature (1)..(25): SEQ ID NO: 207; WAN0249JH_at; Start 175; Stop 199
tcacttttgtaagtagatatagagc

SEQ ID NO: 24003 - DNA, 25 bp, Artificial
  probe
  misc_feature (1)..(25): SEQ ID NO: 207; WAN0249JH_at; Start 105; Stop 129
cacttgaaagtgtttacaattagtg

SEQ ID NO: 24004 - DNA, 25 bp, Artificial
  probe
  misc_feature (1)..(25): SEQ ID NO: 207; WAN0249JH_at; Start 203; Stop 227
aatcagtacctctacttgtaaaaga

SEQ ID NO: 24005 - DNA, 25 bp, Artificial
  probe
  misc_feature (1)..(25): SEQ ID NO: 207; WAN0249JH_at; Start 190; Stop 214
gatatagagcttcaatcagtacctc

SEQ ID NO: 24006 - DNA, 25 bp, Artificial
  probe
  misc_feature (1)..(25): SEQ ID NO: 207; WAN0249JH_at; Start 38; Stop 62
tctaaggtggtagcaaggagctaaa

SEQ ID NO: 24007 - DNA, 25 bp, Artificial
  probe
  misc_feature (1)..(25): SEQ ID NO: 207; WAN0249JH_at; Start 41; Stop 65
aaggtggtagcaaggagctaaacct

SEQ ID NO: 24008 - DNA, 25 bp, Artificial
  probe
  misc_feature (1)..(25): SEQ ID NO: 207; WAN0249JH_at; Start 110; Stop 134
gaaagtgtttacaattagtgataga

SEQ ID NO: 24009 - DNA, 25 bp, Artificial
  probe
  misc_feature (1)..(25): SEQ ID NO: 207; WAN0249JH_at; Start 138; Stop 162
gaataagtagaaatatgaaaacgaa

SEQ ID NO: 24010 - DNA, 25 bp, Artificial
  probe
  misc_feature (1)..(25): SEQ ID NO: 207; WAN0249JH_at; Start 154; Stop 178
gaaaacgaaattttcacatcttcac

SEQ ID NO: 24011 - DNA, 25 bp, Artificial
  probe
  misc_feature (1)..(25): SEQ ID NO: 207; WAN0249JH_at; Start 196; Stop 220
gagcttcaatcagtacctctacttg

SEQ ID NO: 24012 - DNA, 25 bp, Artificial
  probe
  misc_feature (1)..(25): SEQ ID NO: 207; WAN0249JH_at; Start 159; Stop 183
cgaaattttcacatcttcacttttg

SEQ ID NO: 24013 - DNA, 25 bp, Artificial
  probe
  misc_feature (1)..(25): SEQ ID NO: 207; WAN0249JH_at; Start 202; Stop 226
caatcagtacctctacttgtaaaag

SEQ ID NO: 24014 - DNA, 25 bp, Artificial
  probe
  misc_feature (1)..(25): SEQ ID NO: 207; WAN0249JH_at; Start 198; Stop 222
gcttcaatcagtacctctacttgta

SEQ ID NO: 24015 - DNA, 25 bp, Artificial
  probe
  misc_feature (1)..(25): SEQ ID NO: 207; WAN0249JH_at; Start 45; Stop 69
tggtagcaaggagctaaacctaggt

SEQ ID NO: 24016 - DNA, 25 bp, Artificial
  probe
  misc_feature (1)..(25): SEQ ID NO: 207; WAN0249JH_at; Start 115; Stop 139
tgtttacaattagtgatagaatgga

SEQ ID NO: 24017 - DNA, 25 bp, Artificial
  probe
  misc_feature (1)..(25): SEQ ID NO: 207; WAN0249JH_at; Start 39; Stop 63
ctaaggtggtagcaaggagctaaac

SEQ ID NO: 24018 - DNA, 25 bp, Artificial
  probe
  misc_feature (1)..(25): SEQ ID NO: 207; WAN0249JH_at; Start 125; Stop 149
tagtgatagaatggaataagtagaa

SEQ ID NO: 24019 - DNA, 25 bp, Artificial
  probe
  misc_feature (1)..(25): SEQ ID NO: 207; WAN0249JH_at; Start 178; Stop 202
cttttgtaagtagatatagagcttc

SEQ ID NO: 24020 - DNA, 25 bp, Artificial
  probe
  misc_feature (1)..(25): SEQ ID NO: 207; WAN0249JH_at; Start 36; Stop 60
agtctaaggtggtagcaaggagcta

SEQ ID NO: 24021 - DNA, 25 bp, Artificial
  probe
  misc_feature (1)..(25): SEQ ID NO: 207; WAN0249JH_at; Start 192; Stop 216
tatagagcttcaatcagtacctcta

SEQ ID NO: 24022 - DNA, 25 bp, Artificial
  probe
  misc_feature (1)..(25): SEQ ID NO: 207; WAN0249JH_at; Start 184; Stop 208
taagtagatatagagcttcaatcag

SEQ ID NO: 24023 - DNA, 25 bp, Artificial
  probe
  misc_feature (1)..(25): SEQ ID NO: 207; WAN0249JH_at; Start 182; Stop 206
tgtaagtagatatagagcttcaatc

SEQ ID NO: 24024 - DNA, 25 bp, Artificial
  probe
  misc_feature (1)..(25): SEQ ID NO: 207; WAN0249JH_at; Start 188; Stop 212
tagatatagagcttcaatcagtacc

SEQ ID NO: 24025 - DNA, 25 bp, Artificial
  probe
  misc_feature (1)..(25): SEQ ID NO: 207; WAN0249JH_at; Start 136; Stop 160
tggaataagtagaaatatgaaaacg

SEQ ID NO: 24026 - DNA, 25 bp, Artificial
  probe
  misc_feature (1)..(25): SEQ ID NO: 207; WAN0249JH_at; Start 43; Stop 67
ggtggtagcaaggagctaaacctag

SEQ ID NO: 24027 - DNA, 25 bp, Artificial
  probe
  misc_feature (1)..(25): SEQ ID NO: 207; WAN0249JH_at; Start 86; Stop 110
tcaatcaatcttcaaaaaacacttg

SEQ ID NO: 24028 - DNA, 25 bp, Artificial
  probe
  misc_feature (1)..(25): SEQ ID NO: 207; WAN0249JH_at; Start 121; Stop 145
caattagtgatagaatggaataagt

SEQ ID NO: 24029 - DNA, 25 bp, Artificial
  probe
  misc_feature (1)..(25): SEQ ID NO: 207; WAN0249JH_at; Start 31; Stop 55
tgtttagtctaaggtggtagcaagg

SEQ ID NO: 24030 - DNA, 25 bp, Artificial
  probe
  misc_feature (1)..(25): SEQ ID NO: 207; WAN0249JH_at; Start 35; Stop 59
tagtctaaggtggtagcaaggagct

SEQ ID NO: 24031 - DNA, 25 bp, Artificial
  probe
  misc_feature (1)..(25): SEQ ID NO: 207; WAN0249JH_at; Start 194; Stop 218
tagagcttcaatcagtacctctact

SEQ ID NO: 24032 - DNA, 25 bp, Artificial
  probe
  misc_feature (1)..(25): SEQ ID NO: 4557; WAN0249JI_at; Start 37; Stop 61
taattgatactagtataacgcaggt

SEQ ID NO: 24033 - DNA, 25 bp, Artificial
  probe
  misc_feature (1)..(25): SEQ ID NO: 4557; WAN0249JI_at; Start 1; Stop 25
tatcccctccttgatagtttgaatg

SEQ ID NO: 24034 - DNA, 25 bp, Artificial
  probe
  misc_feature (1)..(25): SEQ ID NO: 4557; WAN0249JI_at; Start 56; Stop 80
gcaggtattcggtagaaggcaagta

SEQ ID NO: 24035 - DNA, 25 bp, Artificial
  probe
  misc_feature (1)..(25): SEQ ID NO: 4557; WAN0249JI_at; Start 57; Stop 81
caggtattcggtagaaggcaagtat

SEQ ID NO: 24036 - DNA, 25 bp, Artificial
  probe
  misc_feature (1)..(25): SEQ ID NO: 4557; WAN0249JI_at; Start 9; Stop 33
ccttgatagtttgaatgctaaaaac

SEQ ID NO: 24037 - DNA, 25 bp, Artificial
  probe
  misc_feature (1)..(25): SEQ ID NO: 4557; WAN0249JI_at; Start 13; Stop 37
gatagtttgaatgctaaaaacaagt

SEQ ID NO: 24038 - DNA, 25 bp, Artificial
  probe
  misc_feature (1)..(25): SEQ ID NO: 4557; WAN0249JI_at; Start 43; Stop 67
atactagtataacgcaggtattcgg

SEQ ID NO: 24039 - DNA, 25 bp, Artificial
  probe
  misc_feature (1)..(25): SEQ ID NO: 4557; WAN0249JI_at; Start 47; Stop 71
tagtataacgcaggtattcggtaga

SEQ ID NO: 24040 - DNA, 25 bp, Artificial
  probe
  misc_feature (1)..(25): SEQ ID NO: 4557; WAN0249JI_at; Start 49; Stop 73
gtataacgcaggtattcggtagaag

SEQ ID NO: 24041 - DNA, 25 bp, Artificial
  probe
  misc_feature (1)..(25): SEQ ID NO: 4557; WAN0249JI_at; Start 18; Stop 42
tttgaatgctaaaaacaagtaattg

SEQ ID NO: 24042 - DNA, 25 bp, Artificial
  probe
  misc_feature (1)..(25): SEQ ID NO: 4557; WAN0249JI_at; Start 4; Stop 28
cccctccttgatagtttgaatgcta

SEQ ID NO: 24043 - DNA, 25 bp, Artificial
  probe
  misc_feature (1)..(25): SEQ ID NO: 4557; WAN0249JI_at; Start 110; Stop 134
aaggctgaaaaatccagccctttct

SEQ ID NO: 24044 - DNA, 25 bp, Artificial
  probe
  misc_feature (1)..(25): SEQ ID NO: 4557; WAN0249JI_at; Start 36; Stop 60
gtaattgatactagtataacgcagg

SEQ ID NO: 24045 - DNA, 25 bp, Artificial
  probe
  misc_feature (1)..(25): SEQ ID NO: 4557; WAN0249JI_at; Start 55; Stop 79
cgcaggtattcggtagaaggcaagt

SEQ ID NO: 24046 - DNA, 25 bp, Artificial
  probe
  misc_feature (1)..(25): SEQ ID NO: 4557; WAN0249JI_at; Start 20; Stop 44
tgaatgctaaaaacaagtaattgat

SEQ ID NO: 24047 - DNA, 25 bp, Artificial
  probe
  misc_feature (1)..(25): SEQ ID NO: 4557; WAN0249JI_at; Start 50; Stop 74
tataacgcaggtattcggtagaagg

SEQ ID NO: 24048 - DNA, 25 bp, Artificial
  probe
  misc_feature (1)..(25): SEQ ID NO: 4557; WAN0249JI_at; Start 118; Stop 142
aaaatccagccctttctacttgcat

SEQ ID NO: 24049 - DNA, 25 bp, Artificial
  probe
  misc_feature (1)..(25): SEQ ID NO: 4557; WAN0249JI_at; Start 38; Stop 62
aattgatactagtataacgcaggta

SEQ ID NO: 24050 - DNA, 25 bp, Artificial
  probe
  misc_feature (1)..(25): SEQ ID NO: 4557; WAN0249JI_at; Start 51; Stop 75
ataacgcaggtattcggtagaaggc

SEQ ID NO: 24051 - DNA, 25 bp, Artificial
  probe
  misc_feature (1)..(25): SEQ ID NO: 4557; WAN0249JI_at; Start 122; Stop 146
tccagccctttctacttgcatagtc

SEQ ID NO: 24052 - DNA, 25 bp, Artificial
  probe
  misc_feature (1)..(25): SEQ ID NO: 4557; WAN0249JI_at; Start 33; Stop 57
caagtaattgatactagtataacgc

SEQ ID NO: 24053 - DNA, 25 bp, Artificial
  probe
  misc_feature (1)..(25): SEQ ID NO: 4557; WAN0249JI_at; Start 113; Stop 137
gctgaaaaatccagccctttctact

SEQ ID NO: 24054 - DNA, 25 bp, Artificial
  probe
  misc_feature (1)..(25): SEQ ID NO: 4557; WAN0249JI_at; Start 5; Stop 29
ccctccttgatagtttgaatgctaa

SEQ ID NO: 24055 - DNA, 25 bp, Artificial
  probe
  misc_feature (1)..(25): SEQ ID NO: 4557; WAN0249JI_at; Start 42; Stop 66
gatactagtataacgcaggtattcg

SEQ ID NO: 24056 - DNA, 25 bp, Artificial
  probe
  misc_feature (1)..(25): SEQ ID NO: 4557; WAN0249JI_at; Start 117; Stop 141
aaaaatccagccctttctacttgca

SEQ ID NO: 24057 - DNA, 25 bp, Artificial
  probe
  misc_feature (1)..(25): SEQ ID NO: 4557; WAN0249JI_at; Start 6; Stop 30
cctccttgatagtttgaatgctaaa

SEQ ID NO: 24058 - DNA, 25 bp, Artificial
  probe
  misc_feature (1)..(25): SEQ ID NO: 4557; WAN0249JI_at; Start 52; Stop 76
taacgcaggtattcggtagaaggca

SEQ ID NO: 24059 - DNA, 25 bp, Artificial
  probe
  misc_feature (1)..(25): SEQ ID NO: 4557; WAN0249JI_at; Start 45; Stop 69
actagtataacgcaggtattcggta

SEQ ID NO: 24060 - DNA, 25 bp, Artificial
  probe
  misc_feature (1)..(25): SEQ ID NO: 4557; WAN0249JI_at; Start 48; Stop 72
agtataacgcaggtattcggtagaa

SEQ ID NO: 24061 - DNA, 25 bp, Artificial
  probe
  misc_feature (1)..(25): SEQ ID NO: 4557; WAN0249JI_at; Start 53; Stop 77
aacgcaggtattcggtagaaggcaa

SEQ ID NO: 24062 - DNA, 25 bp, Artificial
  probe
  misc_feature (1)..(25): SEQ ID NO: 4557; WAN0249JI_at; Start 25; Stop 49
gctaaaaacaagtaattgatactag

SEQ ID NO: 24063 - DNA, 25 bp, Artificial
  probe
  misc_feature (1)..(25): SEQ ID NO: 4557; WAN0249JI_at; Start 61; Stop 85
tattcggtagaaggcaagtatttat

SEQ ID NO: 24064 - DNA, 25 bp, Artificial
  probe
  misc_feature (1)..(25): SEQ ID NO: 4557; WAN0249JI_at; Start 3; Stop 27
tcccctccttgatagtttgaatgct

SEQ ID NO: 24065 - DNA, 25 bp, Artificial
  probe
  misc_feature (1)..(25): SEQ ID NO: 4557; WAN0249JI_at; Start 120; Stop 144
aatccagccctttctacttgcatag

SEQ ID NO: 24066 - DNA, 25 bp, Artificial
  probe
  misc_feature (1)..(25): SEQ ID NO: 3583; WAN0249JJ_at; Start 87; Stop 111
cctgcgttatactagtatcaattac

SEQ ID NO: 24067 - DNA, 25 bp, Artificial
  probe
  misc_feature (1)..(25): SEQ ID NO: 3583; WAN0249JJ_at; Start 62; Stop 86
ataaatacttgccttctaccgaata

SEQ ID NO: 24068 - DNA, 25 bp, Artificial
  probe
  misc_feature (1)..(25): SEQ ID NO: 3583; WAN0249JJ_at; Start 82; Stop 106
gaatacctgcgttatactagtatca

SEQ ID NO: 24069 - DNA, 25 bp, Artificial
  probe
  misc_feature (1)..(25): SEQ ID NO: 3583; WAN0249JJ_at; Start 65; Stop 89
aatacttgccttctaccgaatacct

SEQ ID NO: 24070 - DNA, 25 bp, Artificial
  probe
  misc_feature (1)..(25): SEQ ID NO: 3583; WAN0249JJ_at; Start 85; Stop 109
tacctgcgttatactagtatcaatt

SEQ ID NO: 24071 - DNA, 25 bp, Artificial
  probe
  misc_feature (1)..(25): SEQ ID NO: 3583; WAN0249JJ_at; Start 83; Stop 107
aatacctgcgttatactagtatcaa

SEQ ID NO: 24072 - DNA, 25 bp, Artificial
  probe
  misc_feature (1)..(25): SEQ ID NO: 3583; WAN0249JJ_at; Start 117; Stop 141
tttagcattcaaactatcaaggagg

SEQ ID NO: 24073 - DNA, 25 bp, Artificial
  probe
  misc_feature (1)..(25): SEQ ID NO: 3583; WAN0249JJ_at; Start 75; Stop 99
ttctaccgaatacctgcgttatact

SEQ ID NO: 24074 - DNA, 25 bp, Artificial
  probe
  misc_feature (1)..(25): SEQ ID NO: 3583; WAN0249JJ_at; Start 71; Stop 95
tgccttctaccgaatacctgcgtta

SEQ ID NO: 24075 - DNA, 25 bp, Artificial
  probe
  misc_feature (1)..(25): SEQ ID NO: 3583; WAN0249JJ_at; Start 1; Stop 25
gactatgcaagtagaaagggctgga

SEQ ID NO: 24076 - DNA, 25 bp, Artificial
  probe
  misc_feature (1)..(25): SEQ ID NO: 3583; WAN0249JJ_at; Start 105; Stop 129
caattacttgtttttagcattcaaa

SEQ ID NO: 24077 - DNA, 25 bp, Artificial
  probe
  misc_feature (1)..(25): SEQ ID NO: 3583; WAN0249JJ_at; Start 90; Stop 114
gcgttatactagtatcaattacttg

SEQ ID NO: 24078 - DNA, 25 bp, Artificial
  probe
  misc_feature (1)..(25): SEQ ID NO: 3583; WAN0249JJ_at; Start 10; Stop 34
agtagaaagggctggatttttcagc

SEQ ID NO: 24079 - DNA, 25 bp, Artificial
  probe
  misc_feature (1)..(25): SEQ ID NO: 3583; WAN0249JJ_at; Start 74; Stop 98
cttctaccgaatacctgcgttatac

SEQ ID NO: 24080 - DNA, 25 bp, Artificial
  probe
  misc_feature (1)..(25): SEQ ID NO: 3583; WAN0249JJ_at; Start 114; Stop 138
gtttttagcattcaaactatcaagg

SEQ ID NO: 24081 - DNA, 25 bp, Artificial
  probe
  misc_feature (1)..(25): SEQ ID NO: 3583; WAN0249JJ_at; Start 63; Stop 87
taaatacttgccttctaccgaatac

SEQ ID NO: 24082 - DNA, 25 bp, Artificial
  probe
  misc_feature (1)..(25): SEQ ID NO: 3583; WAN0249JJ_at; Start 118; Stop 142
ttagcattcaaactatcaaggaggg

SEQ ID NO: 24083 - DNA, 25 bp, Artificial
  probe
  misc_feature (1)..(25): SEQ ID NO: 3583; WAN0249JJ_at; Start 80; Stop 104
ccgaatacctgcgttatactagtat

SEQ ID NO: 24084 - DNA, 25 bp, Artificial
  probe
  misc_feature (1)..(25): SEQ ID NO: 3583; WAN0249JJ_at; Start 76; Stop 100
tctaccgaatacctgcgttatacta

SEQ ID NO: 24085 - DNA, 25 bp, Artificial
  probe
  misc_feature (1)..(25): SEQ ID NO: 3583; WAN0249JJ_at; Start 70; Stop 94
ttgccttctaccgaatacctgcgtt

SEQ ID NO: 24086 - DNA, 25 bp, Artificial
  probe
  misc_feature (1)..(25): SEQ ID NO: 3583; WAN0249JJ_at; Start 2; Stop 26
actatgcaagtagaaagggctggat

SEQ ID NO: 24087 - DNA, 25 bp, Artificial
  probe
  misc_feature (1)..(25): SEQ ID NO: 3583; WAN0249JJ_at; Start 12; Stop 36
tagaaagggctggatttttcagcct

SEQ ID NO: 24088 - DNA, 25 bp, Artificial
  probe
  misc_feature (1)..(25): SEQ ID NO: 3583; WAN0249JJ_at; Start 6; Stop 30
tgcaagtagaaagggctggattttt

SEQ ID NO: 24089 - DNA, 25 bp, Artificial
  probe
  misc_feature (1)..(25): SEQ ID NO: 3583; WAN0249JJ_at; Start 11; Stop 35
gtagaaagggctggatttttcagcc

SEQ ID NO: 24090 - DNA, 25 bp, Artificial
  probe
  misc_feature (1)..(25): SEQ ID NO: 3583; WAN0249JJ_at; Start 4; Stop 28
tatgcaagtagaaagggctggattt

SEQ ID NO: 24091 - DNA, 25 bp, Artificial
  probe
  misc_feature (1)..(25): SEQ ID NO: 3583; WAN0249JJ_at; Start 72; Stop 96
gccttctaccgaatacctgcgttat

SEQ ID NO: 24092 - DNA, 25 bp, Artificial
  probe
  misc_feature (1)..(25): SEQ ID NO: 3583; WAN0249JJ_at; Start 68; Stop 92
acttgccttctaccgaatacctgcg

SEQ ID NO: 24093 - DNA, 25 bp, Artificial
  probe
  misc_feature (1)..(25): SEQ ID NO: 3583; WAN0249JJ_at; Start 13; Stop 37
agaaagggctggatttttcagcctt

SEQ ID NO: 24094 - DNA, 25 bp, Artificial
  probe
  misc_feature (1)..(25): SEQ ID NO: 3583; WAN0249JJ_at; Start 78; Stop 102
taccgaatacctgcgttatactagt

SEQ ID NO: 24095 - DNA, 25 bp, Artificial
  probe
  misc_feature (1)..(25): SEQ ID NO: 3583; WAN0249JJ_at; Start 3; Stop 27
ctatgcaagtagaaagggctggatt

SEQ ID NO: 24096 - DNA, 25 bp, Artificial
  probe
  misc_feature (1)..(25): SEQ ID NO: 3583; WAN0249JJ_at; Start 73; Stop 97
ccttctaccgaatacctgcgttata

SEQ ID NO: 24097 - DNA, 25 bp, Artificial
  probe
  misc_feature (1)..(25): SEQ ID NO: 3583; WAN0249JJ_at; Start 122; Stop 146
cattcaaactatcaaggaggggata

SEQ ID NO: 24098 - DNA, 25 bp, Artificial
  probe
  misc_feature (1)..(25): SEQ ID NO: 3583; WAN0249JJ_at; Start 67; Stop 91
tacttgccttctaccgaatacctgc

SEQ ID NO: 24099 - DNA, 25 bp, Artificial
  probe
  misc_feature (1)..(25): SEQ ID NO: 3583; WAN0249JJ_at; Start 81; Stop 105
cgaatacctgcgttatactagtatc

SEQ ID NO: 24100 - DNA, 25 bp, Artificial
  probe
  misc_feature (1)..(25): SEQ ID NO: 550; WAN0249JK_at; Start 63; Stop 87
cctgaattgttaaaataccagcctc

SEQ ID NO: 24101 - DNA, 25 bp, Artificial
  probe
  misc_feature (1)..(25): SEQ ID NO: 550; WAN0249JK_at; Start 112; Stop 136
gacaaaatagaaacaaatttgctac

SEQ ID NO: 24102 - DNA, 25 bp, Artificial
  probe
  misc_feature (1)..(25): SEQ ID NO: 550; WAN0249JK_at; Start 118; Stop 142
atagaaacaaatttgctacctaaat

SEQ ID NO: 24103 - DNA, 25 bp, Artificial
  probe
  misc_feature (1)..(25): SEQ ID NO: 550; WAN0249JK_at; Start 58; Stop 82
caattcctgaattgttaaaatacca

SEQ ID NO: 24104 - DNA, 25 bp, Artificial
  probe
  misc_feature (1)..(25): SEQ ID NO: 550; WAN0249JK_at; Start 69; Stop 93
ttgttaaaataccagcctcaacaag

SEQ ID NO: 24105 - DNA, 25 bp, Artificial
  probe
  misc_feature (1)..(25): SEQ ID NO: 550; WAN0249JK_at; Start 48; Stop 72
cattcactatcaattcctgaattgt

SEQ ID NO: 24106 - DNA, 25 bp, Artificial
  probe
  misc_feature (1)..(25): SEQ ID NO: 550; WAN0249JK_at; Start 45; Stop 69
acacattcactatcaattcctgaat

SEQ ID NO: 24107 - DNA, 25 bp, Artificial
  probe
  misc_feature (1)..(25): SEQ ID NO: 550; WAN0249JK_at; Start 80; Stop 104
ccagcctcaacaagataaaaatagg

SEQ ID NO: 24108 - DNA, 25 bp, Artificial
  probe
  misc_feature (1)..(25): SEQ ID NO: 550; WAN0249JK_at; Start 78; Stop 102
taccagcctcaacaagataaaaata

SEQ ID NO: 24109 - DNA, 25 bp, Artificial
  probe
  misc_feature (1)..(25): SEQ ID NO: 550; WAN0249JK_at; Start 42; Stop 66
tttacacattcactatcaattcctg

SEQ ID NO: 24110 - DNA, 25 bp, Artificial
  probe
  misc_feature (1)..(25): SEQ ID NO: 550; WAN0249JK_at; Start 79; Stop 103
accagcctcaacaagataaaaatag

SEQ ID NO: 24111 - DNA, 25 bp, Artificial
  probe
  misc_feature (1)..(25): SEQ ID NO: 550; WAN0249JK_at; Start 82; Stop 106
agcctcaacaagataaaaataggaa

SEQ ID NO: 24112 - DNA, 25 bp, Artificial
  probe
  misc_feature (1)..(25): SEQ ID NO: 550; WAN0249JK_at; Start 77; Stop 101
ataccagcctcaacaagataaaaat

SEQ ID NO: 24113 - DNA, 25 bp, Artificial
  probe
  misc_feature (1)..(25): SEQ ID NO: 550; WAN0249JK_at; Start 60; Stop 84
attcctgaattgttaaaataccagc

SEQ ID NO: 24114 - DNA, 25 bp, Artificial
  probe
  misc_feature (1)..(25): SEQ ID NO: 550; WAN0249JK_at; Start 65; Stop 89
tgaattgttaaaataccagcctcaa

SEQ ID NO: 24115 - DNA, 25 bp, Artificial
  probe
  misc_feature (1)..(25): SEQ ID NO: 550; WAN0249JK_at; Start 81; Stop 105
cagcctcaacaagataaaaatagga

SEQ ID NO: 24116 - DNA, 25 bp, Artificial
  probe
  misc_feature (1)..(25): SEQ ID NO: 550; WAN0249JK_at; Start 52; Stop 76
cactatcaattcctgaattgttaaa

SEQ ID NO: 24117 - DNA, 25 bp, Artificial
  probe
  misc_feature (1)..(25): SEQ ID NO: 550; WAN0249JK_at; Start 59; Stop 83
aattcctgaattgttaaaataccag

SEQ ID NO: 24118 - DNA, 25 bp, Artificial
  probe
  misc_feature (1)..(25): SEQ ID NO: 550; WAN0249JK_at; Start 75; Stop 99
aaataccagcctcaacaagataaaa

SEQ ID NO: 24119 - DNA, 25 bp, Artificial
  probe
  misc_feature (1)..(25): SEQ ID NO: 550; WAN0249JK_at; Start 66; Stop 90
gaattgttaaaataccagcctcaac

SEQ ID NO: 24120 - DNA, 25 bp, Artificial
  probe
  misc_feature (1)..(25): SEQ ID NO: 550; WAN0249JK_at; Start 74; Stop 98
aaaataccagcctcaacaagataaa

SEQ ID NO: 24121 - DNA, 25 bp, Artificial
  probe
  misc_feature (1)..(25): SEQ ID NO: 550; WAN0249JK_at; Start 70; Stop 94
tgttaaaataccagcctcaacaaga

SEQ ID NO: 24122 - DNA, 25 bp, Artificial
  probe
  misc_feature (1)..(25): SEQ ID NO: 550; WAN0249JK_at; Start 73; Stop 97
taaaataccagcctcaacaagataa

SEQ ID NO: 24123 - DNA, 25 bp, Artificial
  probe
  misc_feature (1)..(25): SEQ ID NO: 550; WAN0249JK_at; Start 61; Stop 85
ttcctgaattgttaaaataccagcc

SEQ ID NO: 24124 - DNA, 25 bp, Artificial
  probe
  misc_feature (1)..(25): SEQ ID NO: 550; WAN0249JK_at; Start 64; Stop 88
ctgaattgttaaaataccagcctca

SEQ ID NO: 24125 - DNA, 25 bp, Artificial
  probe
  misc_feature (1)..(25): SEQ ID NO: 550; WAN0249JK_at; Start 114; Stop 138
caaaatagaaacaaatttgctacct

SEQ ID NO: 24126 - DNA, 25 bp, Artificial
  probe
  misc_feature (1)..(25): SEQ ID NO: 550; WAN0249JK_at; Start 109; Stop 133
gttgacaaaatagaaacaaatttgc

SEQ ID NO: 24127 - DNA, 25 bp, Artificial
  probe
  misc_feature (1)..(25): SEQ ID NO: 550; WAN0249JK_at; Start 85; Stop 109
ctcaacaagataaaaataggaaaag

SEQ ID NO: 24128 - DNA, 25 bp, Artificial
  probe
  misc_feature (1)..(25): SEQ ID NO: 550; WAN0249JK_at; Start 62; Stop 86
tcctgaattgttaaaataccagcct

SEQ ID NO: 24129 - DNA, 25 bp, Artificial
  probe
  misc_feature (1)..(25): SEQ ID NO: 550; WAN0249JK_at; Start 67; Stop 91
aattgttaaaataccagcctcaaca

SEQ ID NO: 24130 - DNA, 25 bp, Artificial
  probe
  misc_feature (1)..(25): SEQ ID NO: 550; WAN0249JK_at; Start 44; Stop 68
tacacattcactatcaattcctgaa

SEQ ID NO: 24131 - DNA, 25 bp, Artificial
  probe
  misc_feature (1)..(25): SEQ ID NO: 550; WAN0249JK_at; Start 43; Stop 67
ttacacattcactatcaattcctga

SEQ ID NO: 24132 - DNA, 25 bp, Artificial
  probe
  misc_feature (1)..(25): SEQ ID NO: 550; WAN0249JK_at; Start 71; Stop 95
gttaaaataccagcctcaacaagat

SEQ ID NO: 24133 - DNA, 25 bp, Artificial
  probe
  misc_feature (1)..(25): SEQ ID NO: 550; WAN0249JK_at; Start 76; Stop 100
aataccagcctcaacaagataaaaa

SEQ ID NO: 24134 - DNA, 25 bp, Artificial
  probe
  misc_feature (1)..(25): SEQ ID NO: 4529; WAN0249JL_at; Start 140; Stop 164
caggaattgatagtgaatgtgtaaa

SEQ ID NO: 24135 - DNA, 25 bp, Artificial
  probe
  misc_feature (1)..(25): SEQ ID NO: 4529; WAN0249JL_at; Start 116; Stop 140
gttgaggctggtattttaacaattc

SEQ ID NO: 24136 - DNA, 25 bp, Artificial
  probe
  misc_feature (1)..(25): SEQ ID NO: 4529; WAN0249JL_at; Start 112; Stop 136
tcttgttgaggctggtattttaaca

SEQ ID NO: 24137 - DNA, 25 bp, Artificial
  probe
  misc_feature (1)..(25): SEQ ID NO: 4529; WAN0249JL_at; Start 108; Stop 132
tttatcttgttgaggctggtatttt

SEQ ID NO: 24138 - DNA, 25 bp, Artificial
  probe
  misc_feature (1)..(25): SEQ ID NO: 4529; WAN0249JL_at; Start 117; Stop 141
ttgaggctggtattttaacaattca

SEQ ID NO: 24139 - DNA, 25 bp, Artificial
  probe
  misc_feature (1)..(25): SEQ ID NO: 4529; WAN0249JL_at; Start 142; Stop 166
ggaattgatagtgaatgtgtaaaat

SEQ ID NO: 24140 - DNA, 25 bp, Artificial
  probe
  misc_feature (1)..(25): SEQ ID NO: 4529; WAN0249JL_at; Start 125; Stop 149
ggtattttaacaattcaggaattga

SEQ ID NO: 24141 - DNA, 25 bp, Artificial
  probe
  misc_feature (1)..(25): SEQ ID NO: 4529; WAN0249JL_at; Start 136; Stop 160
aattcaggaattgatagtgaatgtg

SEQ ID NO: 24142 - DNA, 25 bp, Artificial
  probe
  misc_feature (1)..(25): SEQ ID NO: 4529; WAN0249JL_at; Start 132; Stop 156
taacaattcaggaattgatagtgaa

SEQ ID NO: 24143 - DNA, 25 bp, Artificial
  probe
  misc_feature (1)..(25): SEQ ID NO: 4529; WAN0249JL_at; Start 101; Stop 125
tcctatttttatcttgttgaggctg

SEQ ID NO: 24144 - DNA, 25 bp, Artificial
  probe
  misc_feature (1)..(25): SEQ ID NO: 4529; WAN0249JL_at; Start 111; Stop 135
atcttgttgaggctggtattttaac

SEQ ID NO: 24145 - DNA, 25 bp, Artificial
  probe
  misc_feature (1)..(25): SEQ ID NO: 4529; WAN0249JL_at; Start 123; Stop 147
ctggtattttaacaattcaggaatt

SEQ ID NO: 24146 - DNA, 25 bp, Artificial
  probe
  misc_feature (1)..(25): SEQ ID NO: 4529; WAN0249JL_at; Start 124; Stop 148
tggtattttaacaattcaggaattg

SEQ ID NO: 24147 - DNA, 25 bp, Artificial
  probe
  misc_feature (1)..(25): SEQ ID NO: 4529; WAN0249JL_at; Start 120; Stop 144
aggctggtattttaacaattcagga

SEQ ID NO: 24148 - DNA, 25 bp, Artificial
  probe
  misc_feature (1)..(25): SEQ ID NO: 4529; WAN0249JL_at; Start 139; Stop 163
tcaggaattgatagtgaatgtgtaa

SEQ ID NO: 24149 - DNA, 25 bp, Artificial
  probe
  misc_feature (1)..(25): SEQ ID NO: 4529; WAN0249JL_at; Start 64; Stop 88
atttaggtagcaaatttgtttctat

SEQ ID NO: 24150 - DNA, 25 bp, Artificial
  probe
  misc_feature (1)..(25): SEQ ID NO: 4529; WAN0249JL_at; Start 73; Stop 97
gcaaatttgtttctattttgtcaac

SEQ ID NO: 24151 - DNA, 25 bp, Artificial
  probe
  misc_feature (1)..(25): SEQ ID NO: 4529; WAN0249JL_at; Start 122; Stop 146
gctggtattttaacaattcaggaat

SEQ ID NO: 24152 - DNA, 25 bp, Artificial
  probe
  misc_feature (1)..(25): SEQ ID NO: 4529; WAN0249JL_at; Start 135; Stop 159
caattcaggaattgatagtgaatgt

SEQ ID NO: 24153 - DNA, 25 bp, Artificial
  probe
  misc_feature (1)..(25): SEQ ID NO: 4529; WAN0249JL_at; Start 121; Stop 145
ggctggtattttaacaattcaggaa

SEQ ID NO: 24154 - DNA, 25 bp, Artificial
  probe
  misc_feature (1)..(25): SEQ ID NO: 4529; WAN0249JL_at; Start 115; Stop 139
tgttgaggctggtattttaacaatt

SEQ ID NO: 24155 - DNA, 25 bp, Artificial
  probe
  misc_feature (1)..(25): SEQ ID NO: 4529; WAN0249JL_at; Start 103; Stop 127
ctatttttatcttgttgaggctggt

SEQ ID NO: 24156 - DNA, 25 bp, Artificial
  probe
  misc_feature (1)..(25): SEQ ID NO: 4529; WAN0249JL_at; Start 102; Stop 126
cctatttttatcttgttgaggctgg

SEQ ID NO: 24157 - DNA, 25 bp, Artificial
  probe
  misc_feature (1)..(25): SEQ ID NO: 4529; WAN0249JL_at; Start 119; Stop 143
gaggctggtattttaacaattcagg

SEQ ID NO: 24158 - DNA, 25 bp, Artificial
  probe
  misc_feature (1)..(25): SEQ ID NO: 4529; WAN0249JL_at; Start 134; Stop 158
acaattcaggaattgatagtgaatg

SEQ ID NO: 24159 - DNA, 25 bp, Artificial
  probe
  misc_feature (1)..(25): SEQ ID NO: 4529; WAN0249JL_at; Start 104; Stop 128
tatttttatcttgttgaggctggta

SEQ ID NO: 24160 - DNA, 25 bp, Artificial
  probe
  misc_feature (1)..(25): SEQ ID NO: 4529; WAN0249JL_at; Start 118; Stop 142
tgaggctggtattttaacaattcag

SEQ ID NO: 24161 - DNA, 25 bp, Artificial
  probe
  misc_feature (1)..(25): SEQ ID NO: 4529; WAN0249JL_at; Start 105; Stop 129
atttttatcttgttgaggctggtat

SEQ ID NO: 24162 - DNA, 25 bp, Artificial
  probe
  misc_feature (1)..(25): SEQ ID NO: 4529; WAN0249JL_at; Start 106; Stop 130
tttttatcttgttgaggctggtatt

SEQ ID NO: 24163 - DNA, 25 bp, Artificial
  probe
  misc_feature (1)..(25): SEQ ID NO: 4529; WAN0249JL_at; Start 107; Stop 131
ttttatcttgttgaggctggtattt

SEQ ID NO: 24164 - DNA, 25 bp, Artificial
  probe
  misc_feature (1)..(25): SEQ ID NO: 4529; WAN0249JL_at; Start 74; Stop 98
caaatttgtttctattttgtcaact

SEQ ID NO: 24165 - DNA, 25 bp, Artificial
  probe
  misc_feature (1)..(25): SEQ ID NO: 4529; WAN0249JL_at; Start 130; Stop 154
tttaacaattcaggaattgatagtg

SEQ ID NO: 24166 - DNA, 25 bp, Artificial
  probe
  misc_feature (1)..(25): SEQ ID NO: 4529; WAN0249JL_at; Start 113; Stop 137
cttgttgaggctggtattttaacaa

SEQ ID NO: 24167 - DNA, 25 bp, Artificial
  probe
  misc_feature (1)..(25): SEQ ID NO: 4529; WAN0249JL_at; Start 109; Stop 133
ttatcttgttgaggctggtatttta

SEQ ID NO: 24168 - DNA, 25 bp, Artificial
  probe
  misc_feature (1)..(25): SEQ ID NO: 60; WAN0249JM_at; Start 6; Stop 30
atcagggaatcgagaagatttcctg

SEQ ID NO: 24169 - DNA, 25 bp, Artificial
  probe
  misc_feature (1)..(25): SEQ ID NO: 60; WAN0249JM_at; Start 38; Stop 62
gctcttaaacaagagatgttgactt

SEQ ID NO: 24170 - DNA, 25 bp, Artificial
  probe
  misc_feature (1)..(25): SEQ ID NO: 60; WAN0249JM_at; Start 3; Stop 27
aaaatcagggaatcgagaagatttc

SEQ ID NO: 24171 - DNA, 25 bp, Artificial
  probe
  misc_feature (1)..(25): SEQ ID NO: 60; WAN0249JM_at; Start 4; Stop 28
aaatcagggaatcgagaagatttcc

SEQ ID NO: 24172 - DNA, 25 bp, Artificial
  probe
  misc_feature (1)..(25): SEQ ID NO: 60; WAN0249JM_at; Start 10; Stop 34
gggaatcgagaagatttcctgattt

SEQ ID NO: 24173 - DNA, 25 bp, Artificial
  probe
  misc_feature (1)..(25): SEQ ID NO: 60; WAN0249JM_at; Start 9; Stop 33
agggaatcgagaagatttcctgatt

SEQ ID NO: 24174 - DNA, 25 bp, Artificial
  probe
  misc_feature (1)..(25): SEQ ID NO: 60; WAN0249JM_at; Start 37; Stop 61
tgctcttaaacaagagatgttgact

SEQ ID NO: 24175 - DNA, 25 bp, Artificial
  probe
  misc_feature (1)..(25): SEQ ID NO: 60; WAN0249JM_at; Start 5; Stop 29
aatcagggaatcgagaagatttcct

SEQ ID NO: 24176 - DNA, 25 bp, Artificial
  probe
  misc_feature (1)..(25): SEQ ID NO: 60; WAN0249JM_at; Start 8; Stop 32
cagggaatcgagaagatttcctgat

SEQ ID NO: 24177 - DNA, 25 bp, Artificial
  probe
  misc_feature (1)..(25): SEQ ID NO: 60; WAN0249JM_at; Start 2; Stop 26
aaaaatcagggaatcgagaagattt

SEQ ID NO: 24178 - DNA, 25 bp, Artificial
  probe
  misc_feature (1)..(25): SEQ ID NO: 60; WAN0249JM_at; Start 1; Stop 25
aaaaaatcagggaatcgagaagatt

SEQ ID NO: 24179 - DNA, 25 bp, Artificial
  probe
  misc_feature (1)..(25): SEQ ID NO: 60; WAN0249JM_at; Start 7; Stop 31
tcagggaatcgagaagatttcctga

SEQ ID NO: 24180 - DNA, 25 bp, Artificial
  probe
  misc_feature (1)..(25): SEQ ID NO: 60; WAN0249JM_at; Start 36; Stop 60
gtgctcttaaacaagagatgttgac

SEQ ID NO: 24181 - DNA, 25 bp, Artificial
  probe
  misc_feature (1)..(25): SEQ ID NO: 4444; WAN0249JN_at; Start 32; Stop 56
atcaggaaatcttctcgattccctg

SEQ ID NO: 24182 - DNA, 25 bp, Artificial
  probe
  misc_feature (1)..(25): SEQ ID NO: 4444; WAN0249JN_at; Start 37; Stop 61
gaaatcttctcgattccctgatttt

SEQ ID NO: 24183 - DNA, 25 bp, Artificial
  probe
  misc_feature (1)..(25): SEQ ID NO: 4444; WAN0249JN_at; Start 2; Stop 26
aagtcaacatctcttgtttaagagc

SEQ ID NO: 24184 - DNA, 25 bp, Artificial
  probe
  misc_feature (1)..(25): SEQ ID NO: 4444; WAN0249JN_at; Start 34; Stop 58
caggaaatcttctcgattccctgat

SEQ ID NO: 24185 - DNA, 25 bp, Artificial
  probe
  misc_feature (1)..(25): SEQ ID NO: 4444; WAN0249JN_at; Start 39; Stop 63
aatcttctcgattccctgatttttt

SEQ ID NO: 24186 - DNA, 25 bp, Artificial
  probe
  misc_feature (1)..(25): SEQ ID NO: 4444; WAN0249JN_at; Start 30; Stop 54
aaatcaggaaatcttctcgattccc

SEQ ID NO: 24187 - DNA, 25 bp, Artificial
  probe
  misc_feature (1)..(25): SEQ ID NO: 4444; WAN0249JN_at; Start 36; Stop 60
ggaaatcttctcgattccctgattt

SEQ ID NO: 24188 - DNA, 25 bp, Artificial
  probe
  misc_feature (1)..(25): SEQ ID NO: 4444; WAN0249JN_at; Start 31; Stop 55
aatcaggaaatcttctcgattccct

SEQ ID NO: 24189 - DNA, 25 bp, Artificial
  probe
  misc_feature (1)..(25): SEQ ID NO: 4444; WAN0249JN_at; Start 38; Stop 62
aaatcttctcgattccctgattttt

SEQ ID NO: 24190 - DNA, 25 bp, Artificial
  probe
  misc_feature (1)..(25): SEQ ID NO: 4444; WAN0249JN_at; Start 3; Stop 27
agtcaacatctcttgtttaagagca

SEQ ID NO: 24191 - DNA, 25 bp, Artificial
  probe
  misc_feature (1)..(25): SEQ ID NO: 4444; WAN0249JN_at; Start 1; Stop 25
taagtcaacatctcttgtttaagag

SEQ ID NO: 24192 - DNA, 25 bp, Artificial
  probe
  misc_feature (1)..(25): SEQ ID NO: 4444; WAN0249JN_at; Start 4; Stop 28
gtcaacatctcttgtttaagagcac

SEQ ID NO: 24193 - DNA, 25 bp, Artificial
  probe
  misc_feature (1)..(25): SEQ ID NO: 4444; WAN0249JN_at; Start 33; Stop 57
tcaggaaatcttctcgattccctga

SEQ ID NO: 24194 - DNA, 25 bp, Artificial
  probe
  misc_feature (1)..(25): SEQ ID NO: 4444; WAN0249JN_at; Start 35; Stop 59
aggaaatcttctcgattccctgatt

SEQ ID NO: 24195 - DNA, 25 bp, Artificial
  probe
  misc_feature (1)..(25): SEQ ID NO: 3747; WAN0249JO_at; Start 99; Stop 123
ttatagccggctaaacgaatacaaa

SEQ ID NO: 24196 - DNA, 25 bp, Artificial
  probe
  misc_feature (1)..(25): SEQ ID NO: 3747; WAN0249JO_at; Start 112; Stop 136
aacgaatacaaaatctatgaggagg

SEQ ID NO: 24197 - DNA, 25 bp, Artificial
  probe
  misc_feature (1)..(25): SEQ ID NO: 3747; WAN0249JO_at; Start 87; Stop 111
taactgatcactttatagccggcta

SEQ ID NO: 24198 - DNA, 25 bp, Artificial
  probe
  misc_feature (1)..(25): SEQ ID NO: 3747; WAN0249JO_at; Start 88; Stop 112
aactgatcactttatagccggctaa

SEQ ID NO: 24199 - DNA, 25 bp, Artificial
  probe
  misc_feature (1)..(25): SEQ ID NO: 3747; WAN0249JO_at; Start 10; Stop 34
tcgaaaaagctggaaacatttgcct

SEQ ID NO: 24200 - DNA, 25 bp, Artificial
  probe
  misc_feature (1)..(25): SEQ ID NO: 3747; WAN0249JO_at; Start 108; Stop 132
gctaaacgaatacaaaatctatgag

SEQ ID NO: 24201 - DNA, 25 bp, Artificial
  probe
  misc_feature (1)..(25): SEQ ID NO: 3747; WAN0249JO_at; Start 12; Stop 36
gaaaaagctggaaacatttgcctag

SEQ ID NO: 24202 - DNA, 25 bp, Artificial
  probe
  misc_feature (1)..(25): SEQ ID NO: 3747; WAN0249JO_at; Start 100; Stop 124
tatagccggctaaacgaatacaaaa

SEQ ID NO: 24203 - DNA, 25 bp, Artificial
  probe
  misc_feature (1)..(25): SEQ ID NO: 3747; WAN0249JO_at; Start 3; Stop 27
cttgcattcgaaaaagctggaaaca

SEQ ID NO: 24204 - DNA, 25 bp, Artificial
  probe
  misc_feature (1)..(25): SEQ ID NO: 3747; WAN0249JO_at; Start 114; Stop 138
cgaatacaaaatctatgaggaggta

SEQ ID NO: 24205 - DNA, 25 bp, Artificial
  probe
  misc_feature (1)..(25): SEQ ID NO: 3747; WAN0249JO_at; Start 9; Stop 33
ttcgaaaaagctggaaacatttgcc

SEQ ID NO: 24206 - DNA, 25 bp, Artificial
  probe
  misc_feature (1)..(25): SEQ ID NO: 3747; WAN0249JO_at; Start 39; Stop 63
ctattgacaaaagtgaaagaatcag

SEQ ID NO: 24207 - DNA, 25 bp, Artificial
  probe
  misc_feature (1)..(25): SEQ ID NO: 3747; WAN0249JO_at; Start 92; Stop 116
gatcactttatagccggctaaacga

SEQ ID NO: 24208 - DNA, 25 bp, Artificial
  probe
  misc_feature (1)..(25): SEQ ID NO: 3747; WAN0249JO_at; Start 57; Stop 81
gaatcagatagaatagtaaagtatg

SEQ ID NO: 24209 - DNA, 25 bp, Artificial
  probe
  misc_feature (1)..(25): SEQ ID NO: 3747; WAN0249JO_at; Start 11; Stop 35
cgaaaaagctggaaacatttgccta

SEQ ID NO: 24210 - DNA, 25 bp, Artificial
  probe
  misc_feature (1)..(25): SEQ ID NO: 3747; WAN0249JO_at; Start 43; Stop 67
tgacaaaagtgaaagaatcagatag

SEQ ID NO: 24211 - DNA, 25 bp, Artificial
  probe
  misc_feature (1)..(25): SEQ ID NO: 3747; WAN0249JO_at; Start 85; Stop 109
agtaactgatcactttatagccggc

SEQ ID NO: 24212 - DNA, 25 bp, Artificial
  probe
  misc_feature (1)..(25): SEQ ID NO: 3747; WAN0249JO_at; Start 46; Stop 70
caaaagtgaaagaatcagatagaat

SEQ ID NO: 24213 - DNA, 25 bp, Artificial
  probe
  misc_feature (1)..(25): SEQ ID NO: 3747; WAN0249JO_at; Start 5; Stop 29
tgcattcgaaaaagctggaaacatt

SEQ ID NO: 24214 - DNA, 25 bp, Artificial
  probe
  misc_feature (1)..(25): SEQ ID NO: 3747; WAN0249JO_at; Start 89; Stop 113
actgatcactttatagccggctaaa

SEQ ID NO: 24215 - DNA, 25 bp, Artificial
  probe
  misc_feature (1)..(25): SEQ ID NO: 3747; WAN0249JO_at; Start 97; Stop 121
ctttatagccggctaaacgaataca

SEQ ID NO: 24216 - DNA, 25 bp, Artificial
  probe
  misc_feature (1)..(25): SEQ ID NO: 3747; WAN0249JO_at; Start 106; Stop 130
cggctaaacgaatacaaaatctatg

SEQ ID NO: 24217 - DNA, 25 bp, Artificial
  probe
  misc_feature (1)..(25): SEQ ID NO: 3747; WAN0249JO_at; Start 91; Stop 115
tgatcactttatagccggctaaacg

SEQ ID NO: 24218 - DNA, 25 bp, Artificial
  probe
  misc_feature (1)..(25): SEQ ID NO: 3747; WAN0249JO_at; Start 102; Stop 126
tagccggctaaacgaatacaaaatc

SEQ ID NO: 24219 - DNA, 25 bp, Artificial
  probe
  misc_feature (1)..(25): SEQ ID NO: 3747; WAN0249JO_at; Start 104; Stop 128
gccggctaaacgaatacaaaatcta

SEQ ID NO: 24220 - DNA, 25 bp, Artificial
  probe
  misc_feature (1)..(25): SEQ ID NO: 3747; WAN0249JO_at; Start 118; Stop 142
tacaaaatctatgaggaggtattca

SEQ ID NO: 24221 - DNA, 25 bp, Artificial
  probe
  misc_feature (1)..(25): SEQ ID NO: 3747; WAN0249JO_at; Start 7; Stop 31
cattcgaaaaagctggaaacatttg

SEQ ID NO: 24222 - DNA, 25 bp, Artificial
  probe
  misc_feature (1)..(25): SEQ ID NO: 3747; WAN0249JO_at; Start 53; Stop 77
gaaagaatcagatagaatagtaaag

SEQ ID NO: 24223 - DNA, 25 bp, Artificial
  probe
  misc_feature (1)..(25): SEQ ID NO: 3747; WAN0249JO_at; Start 120; Stop 144
caaaatctatgaggaggtattcatc

SEQ ID NO: 24224 - DNA, 25 bp, Artificial
  probe
  misc_feature (1)..(25): SEQ ID NO: 3747; WAN0249JO_at; Start 73; Stop 97
taaagtatgtttagtaactgatcac

SEQ ID NO: 24225 - DNA, 25 bp, Artificial
  probe
  misc_feature (1)..(25): SEQ ID NO: 3747; WAN0249JO_at; Start 2; Stop 26
gcttgcattcgaaaaagctggaaac

SEQ ID NO: 24226 - DNA, 25 bp, Artificial
  probe
  misc_feature (1)..(25): SEQ ID NO: 3747; WAN0249JO_at; Start 84; Stop 108
tagtaactgatcactttatagccgg

SEQ ID NO: 24227 - DNA, 25 bp, Artificial
  probe
  misc_feature (1)..(25): SEQ ID NO: 3747; WAN0249JO_at; Start 60; Stop 84
tcagatagaatagtaaagtatgttt

SEQ ID NO: 24228 - DNA, 25 bp, Artificial
  probe
  misc_feature (1)..(25): SEQ ID NO: 3747; WAN0249JO_at; Start 86; Stop 110
gtaactgatcactttatagccggct

SEQ ID NO: 24229 - DNA, 25 bp, Artificial
  probe
  misc_feature (1)..(25): SEQ ID NO: 3636; WAN0249JP_at; Start 36; Stop 60
gccggctataaagtgatcagttact

SEQ ID NO: 24230 - DNA, 25 bp, Artificial
  probe
  misc_feature (1)..(25): SEQ ID NO: 3636; WAN0249JP_at; Start 33; Stop 57
ttagccggctataaagtgatcagtt

SEQ ID NO: 24231 - DNA, 25 bp, Artificial
  probe
  misc_feature (1)..(25): SEQ ID NO: 3636; WAN0249JP_at; Start 31; Stop 55
gtttagccggctataaagtgatcag

SEQ ID NO: 24232 - DNA, 25 bp, Artificial
  probe
  misc_feature (1)..(25): SEQ ID NO: 3636; WAN0249JP_at; Start 71; Stop 95
tactattctatctgattctttcact

SEQ ID NO: 24233 - DNA, 25 bp, Artificial
  probe
  misc_feature (1)..(25): SEQ ID NO: 3636; WAN0249JP_at; Start 83; Stop 107
tgattctttcacttttgtcaatagc

SEQ ID NO: 24234 - DNA, 25 bp, Artificial
  probe
  misc_feature (1)..(25): SEQ ID NO: 3636; WAN0249JP_at; Start 40; Stop 64
gctataaagtgatcagttactaaac

SEQ ID NO: 24235 - DNA, 25 bp, Artificial
  probe
  misc_feature (1)..(25): SEQ ID NO: 3636; WAN0249JP_at; Start 64; Stop 88
catactttactattctatctgattc

SEQ ID NO: 24236 - DNA, 25 bp, Artificial
  probe
  misc_feature (1)..(25): SEQ ID NO: 3636; WAN0249JP_at; Start 118; Stop 142
tgtttccagctttttcgaatgcaag

SEQ ID NO: 24237 - DNA, 25 bp, Artificial
  probe
  misc_feature (1)..(25): SEQ ID NO: 3636; WAN0249JP_at; Start 60; Stop 84
taaacatactttactattctatctg

SEQ ID NO: 24238 - DNA, 25 bp, Artificial
  probe
  misc_feature (1)..(25): SEQ ID NO: 3636; WAN0249JP_at; Start 15; Stop 39
catagattttgtattcgtttagccg

SEQ ID NO: 24239 - DNA, 25 bp, Artificial
  probe
  misc_feature (1)..(25): SEQ ID NO: 3636; WAN0249JP_at; Start 79; Stop 103
tatctgattctttcacttttgtcaa

SEQ ID NO: 24240 - DNA, 25 bp, Artificial
  probe
  misc_feature (1)..(25): SEQ ID NO: 3636; WAN0249JP_at; Start 30; Stop 54
cgtttagccggctataaagtgatca

SEQ ID NO: 24241 - DNA, 25 bp, Artificial
  probe
  misc_feature (1)..(25): SEQ ID NO: 3636; WAN0249JP_at; Start 112; Stop 136
ggcaaatgtttccagctttttcgaa

SEQ ID NO: 24242 - DNA, 25 bp, Artificial
  probe
  misc_feature (1)..(25): SEQ ID NO: 3636; WAN0249JP_at; Start 21; Stop 45
ttttgtattcgtttagccggctata

SEQ ID NO: 24243 - DNA, 25 bp, Artificial
  probe
  misc_feature (1)..(25): SEQ ID NO: 3636; WAN0249JP_at; Start 37; Stop 61
ccggctataaagtgatcagttacta

SEQ ID NO: 24244 - DNA, 25 bp, Artificial
  probe
  misc_feature (1)..(25): SEQ ID NO: 3636; WAN0249JP_at; Start 32; Stop 56
tttagccggctataaagtgatcagt

SEQ ID NO: 24245 - DNA, 25 bp, Artificial
  probe
  misc_feature (1)..(25): SEQ ID NO: 3636; WAN0249JP_at; Start 110; Stop 134
taggcaaatgtttccagctttttcg

SEQ ID NO: 24246 - DNA, 25 bp, Artificial
  probe
  misc_feature (1)..(25): SEQ ID NO: 3636; WAN0249JP_at; Start 19; Stop 43
gattttgtattcgtttagccggcta

SEQ ID NO: 24247 - DNA, 25 bp, Artificial
  probe
  misc_feature (1)..(25): SEQ ID NO: 3636; WAN0249JP_at; Start 114; Stop 138
caaatgtttccagctttttcgaatg

SEQ ID NO: 24248 - DNA, 25 bp, Artificial
  probe
  misc_feature (1)..(25): SEQ ID NO: 3636; WAN0249JP_at; Start 34; Stop 58
tagccggctataaagtgatcagtta

SEQ ID NO: 24249 - DNA, 25 bp, Artificial
  probe
  misc_feature (1)..(25): SEQ ID NO: 3636; WAN0249JP_at; Start 44; Stop 68
taaagtgatcagttactaaacatac

SEQ ID NO: 24250 - DNA, 25 bp, Artificial
  probe
  misc_feature (1)..(25): SEQ ID NO: 3636; WAN0249JP_at; Start 120; Stop 144
tttccagctttttcgaatgcaagcc

SEQ ID NO: 24251 - DNA, 25 bp, Artificial
  probe
  misc_feature (1)..(25): SEQ ID NO: 3636; WAN0249JP_at; Start 22; Stop 46
tttgtattcgtttagccggctataa

SEQ ID NO: 24252 - DNA, 25 bp, Artificial
  probe
  misc_feature (1)..(25): SEQ ID NO: 3636; WAN0249JP_at; Start 17; Stop 41
tagattttgtattcgtttagccggc

SEQ ID NO: 24253 - DNA, 25 bp, Artificial
  probe
  misc_feature (1)..(25): SEQ ID NO: 3636; WAN0249JP_at; Start 24; Stop 48
tgtattcgtttagccggctataaag

SEQ ID NO: 24254 - DNA, 25 bp, Artificial
  probe
  misc_feature (1)..(25): SEQ ID NO: 3636; WAN0249JP_at; Start 7; Stop 31
tacctcctcatagattttgtattcg

SEQ ID NO: 24255 - DNA, 25 bp, Artificial
  probe
  misc_feature (1)..(25): SEQ ID NO: 3636; WAN0249JP_at; Start 9; Stop 33
cctcctcatagattttgtattcgtt

SEQ ID NO: 24256 - DNA, 25 bp, Artificial
  probe
  misc_feature (1)..(25): SEQ ID NO: 3636; WAN0249JP_at; Start 116; Stop 140
aatgtttccagctttttcgaatgca

SEQ ID NO: 24257 - DNA, 25 bp, Artificial
  probe
  misc_feature (1)..(25): SEQ ID NO: 3636; WAN0249JP_at; Start 1; Stop 25
gatgaatacctcctcatagattttg

SEQ ID NO: 24258 - DNA, 25 bp, Artificial
  probe
  misc_feature (1)..(25): SEQ ID NO: 3636; WAN0249JP_at; Start 29; Stop 53
tcgtttagccggctataaagtgatc

SEQ ID NO: 24259 - DNA, 25 bp, Artificial
  probe
  misc_feature (1)..(25): SEQ ID NO: 3636; WAN0249JP_at; Start 50; Stop 74
gatcagttactaaacatactttact

SEQ ID NO: 24260 - DNA, 25 bp, Artificial
  probe
  misc_feature (1)..(25): SEQ ID NO: 3636; WAN0249JP_at; Start 3; Stop 27
tgaatacctcctcatagattttgta

SEQ ID NO: 24261 - DNA, 25 bp, Artificial
  probe
  misc_feature (1)..(25): SEQ ID NO: 3636; WAN0249JP_at; Start 38; Stop 62
cggctataaagtgatcagttactaa

SEQ ID NO: 24262 - DNA, 25 bp, Artificial
  probe
  misc_feature (1)..(25): SEQ ID NO: 3636; WAN0249JP_at; Start 35; Stop 59
agccggctataaagtgatcagttac

SEQ ID NO: 24263 - DNA, 25 bp, Artificial
  probe
  misc_feature (1)..(25): SEQ ID NO: 3532; WAN0249JQ_at; Start 46; Stop 70
gaagcaggtagaagaggaggcgtct

SEQ ID NO: 24264 - DNA, 25 bp, Artificial
  probe
  misc_feature (1)..(25): SEQ ID NO: 3532; WAN0249JQ_at; Start 28; Stop 52
agtttcacagtatttttcgaagcag

SEQ ID NO: 24265 - DNA, 25 bp, Artificial
  probe
  misc_feature (1)..(25): SEQ ID NO: 3532; WAN0249JQ_at; Start 32; Stop 56
tcacagtatttttcgaagcaggtag

SEQ ID NO: 24266 - DNA, 25 bp, Artificial
  probe
  misc_feature (1)..(25): SEQ ID NO: 3532; WAN0249JQ_at; Start 45; Stop 69
cgaagcaggtagaagaggaggcgtc

SEQ ID NO: 24267 - DNA, 25 bp, Artificial
  probe
  misc_feature (1)..(25): SEQ ID NO: 3532; WAN0249JQ_at; Start 26; Stop 50
taagtttcacagtatttttcgaagc

SEQ ID NO: 24268 - DNA, 25 bp, Artificial
  probe
  misc_feature (1)..(25): SEQ ID NO: 3532; WAN0249JQ_at; Start 42; Stop 66
tttcgaagcaggtagaagaggaggc

SEQ ID NO: 24269 - DNA, 25 bp, Artificial
  probe
  misc_feature (1)..(25): SEQ ID NO: 3532; WAN0249JQ_at; Start 29; Stop 53
gtttcacagtatttttcgaagcagg

SEQ ID NO: 24270 - DNA, 25 bp, Artificial
  probe
  misc_feature (1)..(25): SEQ ID NO: 3532; WAN0249JQ_at; Start 47; Stop 71
aagcaggtagaagaggaggcgtctg

SEQ ID NO: 24271 - DNA, 25 bp, Artificial
  probe
  misc_feature (1)..(25): SEQ ID NO: 3532; WAN0249JQ_at; Start 40; Stop 64
tttttcgaagcaggtagaagaggag

SEQ ID NO: 24272 - DNA, 25 bp, Artificial
  probe
  misc_feature (1)..(25): SEQ ID NO: 3532; WAN0249JQ_at; Start 27; Stop 51
aagtttcacagtatttttcgaagca

SEQ ID NO: 24273 - DNA, 25 bp, Artificial
  probe
  misc_feature (1)..(25): SEQ ID NO: 3532; WAN0249JQ_at; Start 31; Stop 55
ttcacagtatttttcgaagcaggta

SEQ ID NO: 24274 - DNA, 25 bp, Artificial
  probe
  misc_feature (1)..(25): SEQ ID NO: 3532; WAN0249JQ_at; Start 33; Stop 57
cacagtatttttcgaagcaggtaga

SEQ ID NO: 24275 - DNA, 25 bp, Artificial
  probe
  misc_feature (1)..(25): SEQ ID NO: 3532; WAN0249JQ_at; Start 37; Stop 61
gtatttttcgaagcaggtagaagag

SEQ ID NO: 24276 - DNA, 25 bp, Artificial
  probe
  misc_feature (1)..(25): SEQ ID NO: 3532; WAN0249JQ_at; Start 39; Stop 63
atttttcgaagcaggtagaagagga

SEQ ID NO: 24277 - DNA, 25 bp, Artificial
  probe
  misc_feature (1)..(25): SEQ ID NO: 3532; WAN0249JQ_at; Start 41; Stop 65
ttttcgaagcaggtagaagaggagg

SEQ ID NO: 24278 - DNA, 25 bp, Artificial
  probe
  misc_feature (1)..(25): SEQ ID NO: 3532; WAN0249JQ_at; Start 38; Stop 62
tatttttcgaagcaggtagaagagg

SEQ ID NO: 24279 - DNA, 25 bp, Artificial
  probe
  misc_feature (1)..(25): SEQ ID NO: 3532; WAN0249JQ_at; Start 30; Stop 54
tttcacagtatttttcgaagcaggt

SEQ ID NO: 24280 - DNA, 25 bp, Artificial
  probe
  misc_feature (1)..(25): SEQ ID NO: 3532; WAN0249JQ_at; Start 36; Stop 60
agtatttttcgaagcaggtagaaga

SEQ ID NO: 24281 - DNA, 25 bp, Artificial
  probe
  misc_feature (1)..(25): SEQ ID NO: 3532; WAN0249JQ_at; Start 34; Stop 58
acagtatttttcgaagcaggtagaa

SEQ ID NO: 24282 - DNA, 25 bp, Artificial
  probe
  misc_feature (1)..(25): SEQ ID NO: 3532; WAN0249JQ_at; Start 43; Stop 67
ttcgaagcaggtagaagaggaggcg

SEQ ID NO: 24283 - DNA, 25 bp, Artificial
  probe
  misc_feature (1)..(25): SEQ ID NO: 3532; WAN0249JQ_at; Start 44; Stop 68
tcgaagcaggtagaagaggaggcgt

SEQ ID NO: 24284 - DNA, 25 bp, Artificial
  probe
  misc_feature (1)..(25): SEQ ID NO: 3532; WAN0249JQ_at; Start 35; Stop 59
cagtatttttcgaagcaggtagaag

SEQ ID NO: 24285 - DNA, 25 bp, Artificial
  probe
  misc_feature (1)..(25): SEQ ID NO: 3211; WAN0249JR_at; Start 11; Stop 35
ctcttctacctgcttcgaaaaatac

SEQ ID NO: 24286 - DNA, 25 bp, Artificial
  probe
  misc_feature (1)..(25): SEQ ID NO: 3211; WAN0249JR_at; Start 13; Stop 37
cttctacctgcttcgaaaaatactg

SEQ ID NO: 24287 - DNA, 25 bp, Artificial
  probe
  misc_feature (1)..(25): SEQ ID NO: 3211; WAN0249JR_at; Start 20; Stop 44
ctgcttcgaaaaatactgtgaaact

SEQ ID NO: 24288 - DNA, 25 bp, Artificial
  probe
  misc_feature (1)..(25): SEQ ID NO: 3211; WAN0249JR_at; Start 22; Stop 46
gcttcgaaaaatactgtgaaactta

SEQ ID NO: 24289 - DNA, 25 bp, Artificial
  probe
  misc_feature (1)..(25): SEQ ID NO: 3211; WAN0249JR_at; Start 14; Stop 38
ttctacctgcttcgaaaaatactgt

SEQ ID NO: 24290 - DNA, 25 bp, Artificial
  probe
  misc_feature (1)..(25): SEQ ID NO: 3211; WAN0249JR_at; Start 19; Stop 43
cctgcttcgaaaaatactgtgaaac

SEQ ID NO: 24291 - DNA, 25 bp, Artificial
  probe
  misc_feature (1)..(25): SEQ ID NO: 3211; WAN0249JR_at; Start 16; Stop 40
ctacctgcttcgaaaaatactgtga

SEQ ID NO: 24292 - DNA, 25 bp, Artificial
  probe
  misc_feature (1)..(25): SEQ ID NO: 3211; WAN0249JR_at; Start 4; Stop 28
acgcctcctcttctacctgcttcga

SEQ ID NO: 24293 - DNA, 25 bp, Artificial
  probe
  misc_feature (1)..(25): SEQ ID NO: 3211; WAN0249JR_at; Start 6; Stop 30
gcctcctcttctacctgcttcgaaa

SEQ ID NO: 24294 - DNA, 25 bp, Artificial
  probe
  misc_feature (1)..(25): SEQ ID NO: 3211; WAN0249JR_at; Start 7; Stop 31
cctcctcttctacctgcttcgaaaa

SEQ ID NO: 24295 - DNA, 25 bp, Artificial
  probe
  misc_feature (1)..(25): SEQ ID NO: 3211; WAN0249JR_at; Start 18; Stop 42
acctgcttcgaaaaatactgtgaaa

SEQ ID NO: 24296 - DNA, 25 bp, Artificial
  probe
  misc_feature (1)..(25): SEQ ID NO: 3211; WAN0249JR_at; Start 12; Stop 36
tcttctacctgcttcgaaaaatact

SEQ ID NO: 24297 - DNA, 25 bp, Artificial
  probe
  misc_feature (1)..(25): SEQ ID NO: 3211; WAN0249JR_at; Start 5; Stop 29
cgcctcctcttctacctgcttcgaa

SEQ ID NO: 24298 - DNA, 25 bp, Artificial
  probe
  misc_feature (1)..(25): SEQ ID NO: 3211; WAN0249JR_at; Start 3; Stop 27
gacgcctcctcttctacctgcttcg

SEQ ID NO: 24299 - DNA, 25 bp, Artificial
  probe
  misc_feature (1)..(25): SEQ ID NO: 3211; WAN0249JR_at; Start 2; Stop 26
agacgcctcctcttctacctgcttc

SEQ ID NO: 24300 - DNA, 25 bp, Artificial
  probe
  misc_feature (1)..(25): SEQ ID NO: 3211; WAN0249JR_at; Start 17; Stop 41
tacctgcttcgaaaaatactgtgaa

SEQ ID NO: 24301 - DNA, 25 bp, Artificial
  probe
  misc_feature (1)..(25): SEQ ID NO: 3211; WAN0249JR_at; Start 8; Stop 32
ctcctcttctacctgcttcgaaaaa

SEQ ID NO: 24302 - DNA, 25 bp, Artificial
  probe
  misc_feature (1)..(25): SEQ ID NO: 3211; WAN0249JR_at; Start 21; Stop 45
tgcttcgaaaaatactgtgaaactt

SEQ ID NO: 24303 - DNA, 25 bp, Artificial
  probe
  misc_feature (1)..(25): SEQ ID NO: 3211; WAN0249JR_at; Start 15; Stop 39
tctacctgcttcgaaaaatactgtg

SEQ ID NO: 24304 - DNA, 25 bp, Artificial
  probe
  misc_feature (1)..(25): SEQ ID NO: 3211; WAN0249JR_at; Start 1; Stop 25
cagacgcctcctcttctacctgctt

SEQ ID NO: 24305 - DNA, 25 bp, Artificial
  probe
  misc_feature (1)..(25): SEQ ID NO: 3211; WAN0249JR_at; Start 10; Stop 34
cctcttctacctgcttcgaaaaata

SEQ ID NO: 24306 - DNA, 25 bp, Artificial
  probe
  misc_feature (1)..(25): SEQ ID NO: 3211; WAN0249JR_at; Start 9; Stop 33
tcctcttctacctgcttcgaaaaat

SEQ ID NO: 24307 - DNA, 25 bp, Artificial
  probe
  misc_feature (1)..(25): SEQ ID NO: 336; WAN0249JS_at; Start 39; Stop 63
atcaaaacagttctaaagttcgtct

SEQ ID NO: 24308 - DNA, 25 bp, Artificial
  probe
  misc_feature (1)..(25): SEQ ID NO: 336; WAN0249JS_at; Start 198; Stop 222
aagcttcttaacatcgcagtgactg

SEQ ID NO: 24309 - DNA, 25 bp, Artificial
  probe
  misc_feature (1)..(25): SEQ ID NO: 336; WAN0249JS_at; Start 194; Stop 218
taataagcttcttaacatcgcagtg

SEQ ID NO: 24310 - DNA, 25 bp, Artificial
  probe
  misc_feature (1)..(25): SEQ ID NO: 336; WAN0249JS_at; Start 174; Stop 198
tgttgctagcagaaagaacttaata

SEQ ID NO: 24311 - DNA, 25 bp, Artificial
  probe
  misc_feature (1)..(25): SEQ ID NO: 336; WAN0249JS_at; Start 121; Stop 145
gacattgatgtccttgatagttctt

SEQ ID NO: 24312 - DNA, 25 bp, Artificial
  probe
  misc_feature (1)..(25): SEQ ID NO: 336; WAN0249JS_at; Start 136; Stop 160
gatagttcttgaaaaaacggatata

SEQ ID NO: 24313 - DNA, 25 bp, Artificial
  probe
  misc_feature (1)..(25): SEQ ID NO: 336; WAN0249JS_at; Start 213; Stop 237
gcagtgactgtggtcaccttctcac

SEQ ID NO: 24314 - DNA, 25 bp, Artificial
  probe
  misc_feature (1)..(25): SEQ ID NO: 336; WAN0249JS_at; Start 123; Stop 147
cattgatgtccttgatagttcttga

SEQ ID NO: 24315 - DNA, 25 bp, Artificial
  probe
  misc_feature (1)..(25): SEQ ID NO: 336; WAN0249JS_at; Start 108; Stop 132
gttagattttaaggacattgatgtc

SEQ ID NO: 24316 - DNA, 25 bp, Artificial
  probe
  misc_feature (1)..(25): SEQ ID NO: 336; WAN0249JS_at; Start 31; Stop 55
gtcctcgtatcaaaacagttctaaa

SEQ ID NO: 24317 - DNA, 25 bp, Artificial
  probe
  misc_feature (1)..(25): SEQ ID NO: 336; WAN0249JS_at; Start 211; Stop 235
tcgcagtgactgtggtcaccttctc

SEQ ID NO: 24318 - DNA, 25 bp, Artificial
  probe
  misc_feature (1)..(25): SEQ ID NO: 336; WAN0249JS_at; Start 177; Stop 201
tgctagcagaaagaacttaataagc

SEQ ID NO: 24319 - DNA, 25 bp, Artificial
  probe
  misc_feature (1)..(25): SEQ ID NO: 336; WAN0249JS_at; Start 127; Stop 151
gatgtccttgatagttcttgaaaaa

SEQ ID NO: 24320 - DNA, 25 bp, Artificial
  probe
  misc_feature (1)..(25): SEQ ID NO: 336; WAN0249JS_at; Start 205; Stop 229
ttaacatcgcagtgactgtggtcac

SEQ ID NO: 24321 - DNA, 25 bp, Artificial
  probe
  misc_feature (1)..(25): SEQ ID NO: 336; WAN0249JS_at; Start 139; Stop 163
agttcttgaaaaaacggatataatg

SEQ ID NO: 24322 - DNA, 25 bp, Artificial
  probe
  misc_feature (1)..(25): SEQ ID NO: 336; WAN0249JS_at; Start 159; Stop 183
taatgtatttgaagatgttgctagc

SEQ ID NO: 24323 - DNA, 25 bp, Artificial
  probe
  misc_feature (1)..(25): SEQ ID NO: 336; WAN0249JS_at; Start 36; Stop 60
cgtatcaaaacagttctaaagttcg

SEQ ID NO: 24324 - DNA, 25 bp, Artificial
  probe
  misc_feature (1)..(25): SEQ ID NO: 336; WAN0249JS_at; Start 200; Stop 224
gcttcttaacatcgcagtgactgtg

SEQ ID NO: 24325 - DNA, 25 bp, Artificial
  probe
  misc_feature (1)..(25): SEQ ID NO: 336; WAN0249JS_at; Start 203; Stop 227
tcttaacatcgcagtgactgtggtc

SEQ ID NO: 24326 - DNA, 25 bp, Artificial
  probe
  misc_feature (1)..(25): SEQ ID NO: 336; WAN0249JS_at; Start 209; Stop 233
catcgcagtgactgtggtcaccttc

SEQ ID NO: 24327 - DNA, 25 bp, Artificial
  probe
  misc_feature (1)..(25): SEQ ID NO: 336; WAN0249JS_at; Start 206; Stop 230
taacatcgcagtgactgtggtcacc

SEQ ID NO: 24328 - DNA, 25 bp, Artificial
  probe
  misc_feature (1)..(25): SEQ ID NO: 336; WAN0249JS_at; Start 38; Stop 62
tatcaaaacagttctaaagttcgtc

SEQ ID NO: 24329 - DNA, 25 bp, Artificial
  probe
  misc_feature (1)..(25): SEQ ID NO: 336; WAN0249JS_at; Start 162; Stop 186
tgtatttgaagatgttgctagcaga

SEQ ID NO: 24330 - DNA, 25 bp, Artificial
  probe
  misc_feature (1)..(25): SEQ ID NO: 336; WAN0249JS_at; Start 24; Stop 48
tgtccttgtcctcgtatcaaaacag

SEQ ID NO: 24331 - DNA, 25 bp, Artificial
  probe
  misc_feature (1)..(25): SEQ ID NO: 336; WAN0249JS_at; Start 168; Stop 192
tgaagatgttgctagcagaaagaac

SEQ ID NO: 24332 - DNA, 25 bp, Artificial
  probe
  misc_feature (1)..(25): SEQ ID NO: 336; WAN0249JS_at; Start 180; Stop 204
tagcagaaagaacttaataagcttc

SEQ ID NO: 24333 - DNA, 25 bp, Artificial
  probe
  misc_feature (1)..(25): SEQ ID NO: 336; WAN0249JS_at; Start 146; Stop 170
gaaaaaacggatataatgtatttga

SEQ ID NO: 24334 - DNA, 25 bp, Artificial
  probe
  misc_feature (1)..(25): SEQ ID NO: 336; WAN0249JS_at; Start 164; Stop 188
tatttgaagatgttgctagcagaaa

SEQ ID NO: 24335 - DNA, 25 bp, Artificial
  probe
  misc_feature (1)..(25): SEQ ID NO: 336; WAN0249JS_at; Start 133; Stop 157
cttgatagttcttgaaaaaacggat

SEQ ID NO: 24336 - DNA, 25 bp, Artificial
  probe
  misc_feature (1)..(25): SEQ ID NO: 336; WAN0249JS_at; Start 172; Stop 196
gatgttgctagcagaaagaacttaa

SEQ ID NO: 24337 - DNA, 25 bp, Artificial
  probe
  misc_feature (1)..(25): SEQ ID NO: 336; WAN0249JS_at; Start 195; Stop 219
aataagcttcttaacatcgcagtga

SEQ ID NO: 24338 - DNA, 25 bp, Artificial
  probe
  misc_feature (1)..(25): SEQ ID NO: 336; WAN0249JS_at; Start 169; Stop 193
gaagatgttgctagcagaaagaact

SEQ ID NO: 24339 - DNA, 25 bp, Artificial
  probe
  misc_feature (1)..(25): SEQ ID NO: 336; WAN0249JS_at; Start 197; Stop 221
taagcttcttaacatcgcagtgact

SEQ ID NO: 24340 - DNA, 25 bp, Artificial
  probe
  misc_feature (1)..(25): SEQ ID NO: 336; WAN0249JS_at; Start 27; Stop 51
ccttgtcctcgtatcaaaacagttc

SEQ ID NO: 24341 - DNA, 25 bp, Artificial
  probe
  misc_feature (1)..(25): SEQ ID NO: 4835; WAN0249JT_at; Start 123; Stop 147
gaactatcaaggacatcaatgtcct

SEQ ID NO: 24342 - DNA, 25 bp, Artificial
  probe
  misc_feature (1)..(25): SEQ ID NO: 4835; WAN0249JT_at; Start 207; Stop 231
gaactttagaactgttttgatacga

SEQ ID NO: 24343 - DNA, 25 bp, Artificial
  probe
  misc_feature (1)..(25): SEQ ID NO: 4835; WAN0249JT_at; Start 68; Stop 92
tattaagttctttctgctagcaaca

SEQ ID NO: 24344 - DNA, 25 bp, Artificial
  probe
  misc_feature (1)..(25): SEQ ID NO: 4835; WAN0249JT_at; Start 80; Stop 104
tctgctagcaacatcttcaaataca

SEQ ID NO: 24345 - DNA, 25 bp, Artificial
  probe
  misc_feature (1)..(25): SEQ ID NO: 4835; WAN0249JT_at; Start 36; Stop 60
ggtgaccacagtcactgcgatgtta

SEQ ID NO: 24346 - DNA, 25 bp, Artificial
  probe
  misc_feature (1)..(25): SEQ ID NO: 4835; WAN0249JT_at; Start 113; Stop 137
gttttttcaagaactatcaaggaca

SEQ ID NO: 24347 - DNA, 25 bp, Artificial
  probe
  misc_feature (1)..(25): SEQ ID NO: 4835; WAN0249JT_at; Start 116; Stop 140
ttttcaagaactatcaaggacatca

SEQ ID NO: 24348 - DNA, 25 bp, Artificial
  probe
  misc_feature (1)..(25): SEQ ID NO: 4835; WAN0249JT_at; Start 215; Stop 239
gaactgttttgatacgaggacaagg

SEQ ID NO: 24349 - DNA, 25 bp, Artificial
  probe
  misc_feature (1)..(25): SEQ ID NO: 4835; WAN0249JT_at; Start 71; Stop 95
taagttctttctgctagcaacatct

SEQ ID NO: 24350 - DNA, 25 bp, Artificial
  probe
  misc_feature (1)..(25): SEQ ID NO: 4835; WAN0249JT_at; Start 33; Stop 57
gaaggtgaccacagtcactgcgatg

SEQ ID NO: 24351 - DNA, 25 bp, Artificial
  probe
  misc_feature (1)..(25): SEQ ID NO: 4835; WAN0249JT_at; Start 46; Stop 70
gtcactgcgatgttaagaagcttat

SEQ ID NO: 24352 - DNA, 25 bp, Artificial
  probe
  misc_feature (1)..(25): SEQ ID NO: 4835; WAN0249JT_at; Start 83; Stop 107
gctagcaacatcttcaaatacatta

SEQ ID NO: 24353 - DNA, 25 bp, Artificial
  probe
  misc_feature (1)..(25): SEQ ID NO: 4835; WAN0249JT_at; Start 204; Stop 228
gacgaactttagaactgttttgata

SEQ ID NO: 24354 - DNA, 25 bp, Artificial
  probe
  misc_feature (1)..(25): SEQ ID NO: 4835; WAN0249JT_at; Start 219; Stop 243
tgttttgatacgaggacaaggacat

SEQ ID NO: 24355 - DNA, 25 bp, Artificial
  probe
  misc_feature (1)..(25): SEQ ID NO: 4835; WAN0249JT_at; Start 121; Stop 145
aagaactatcaaggacatcaatgtc

SEQ ID NO: 24356 - DNA, 25 bp, Artificial
  probe
  misc_feature (1)..(25): SEQ ID NO: 4835; WAN0249JT_at; Start 48; Stop 72
cactgcgatgttaagaagcttatta

SEQ ID NO: 24357 - DNA, 25 bp, Artificial
  probe
  misc_feature (1)..(25): SEQ ID NO: 4835; WAN0249JT_at; Start 91; Stop 115
catcttcaaatacattatatccgtt

SEQ ID NO: 24358 - DNA, 25 bp, Artificial
  probe
  misc_feature (1)..(25): SEQ ID NO: 4835; WAN0249JT_at; Start 62; Stop 86
gaagcttattaagttctttctgcta

SEQ ID NO: 24359 - DNA, 25 bp, Artificial
  probe
  misc_feature (1)..(25): SEQ ID NO: 4835; WAN0249JT_at; Start 30; Stop 54
tgagaaggtgaccacagtcactgcg

SEQ ID NO: 24360 - DNA, 25 bp, Artificial
  probe
  misc_feature (1)..(25): SEQ ID NO: 4835; WAN0249JT_at; Start 65; Stop 89
gcttattaagttctttctgctagca

SEQ ID NO: 24361 - DNA, 25 bp, Artificial
  probe
  misc_feature (1)..(25): SEQ ID NO: 4835; WAN0249JT_at; Start 39; Stop 63
gaccacagtcactgcgatgttaaga

SEQ ID NO: 24362 - DNA, 25 bp, Artificial
  probe
  misc_feature (1)..(25): SEQ ID NO: 4835; WAN0249JT_at; Start 109; Stop 133
atccgttttttcaagaactatcaag

SEQ ID NO: 24363 - DNA, 25 bp, Artificial
  probe
  misc_feature (1)..(25): SEQ ID NO: 4835; WAN0249JT_at; Start 134; Stop 158
gacatcaatgtccttaaaatctaac

SEQ ID NO: 24364 - DNA, 25 bp, Artificial
  probe
  misc_feature (1)..(25): SEQ ID NO: 4835; WAN0249JT_at; Start 119; Stop 143
tcaagaactatcaaggacatcaatg

SEQ ID NO: 24365 - DNA, 25 bp, Artificial
  probe
  misc_feature (1)..(25): SEQ ID NO: 4835; WAN0249JT_at; Start 217; Stop 241
actgttttgatacgaggacaaggac

SEQ ID NO: 24366 - DNA, 25 bp, Artificial
  probe
  misc_feature (1)..(25): SEQ ID NO: 4835; WAN0249JT_at; Start 103; Stop 127
cattatatccgttttttcaagaact

SEQ ID NO: 24367 - DNA, 25 bp, Artificial
  probe
  misc_feature (1)..(25): SEQ ID NO: 4835; WAN0249JT_at; Start 74; Stop 98
gttctttctgctagcaacatcttca

SEQ ID NO: 24368 - DNA, 25 bp, Artificial
  probe
  misc_feature (1)..(25): SEQ ID NO: 4835; WAN0249JT_at; Start 42; Stop 66
cacagtcactgcgatgttaagaagc

SEQ ID NO: 24369 - DNA, 25 bp, Artificial
  probe
  misc_feature (1)..(25): SEQ ID NO: 4835; WAN0249JT_at; Start 211; Stop 235
tttagaactgttttgatacgaggac

SEQ ID NO: 24370 - DNA, 25 bp, Artificial
  probe
  misc_feature (1)..(25): SEQ ID NO: 4835; WAN0249JT_at; Start 53; Stop 77
cgatgttaagaagcttattaagttc

SEQ ID NO: 24371 - DNA, 25 bp, Artificial
  probe
  misc_feature (1)..(25): SEQ ID NO: 4835; WAN0249JT_at; Start 76; Stop 100
tctttctgctagcaacatcttcaaa

SEQ ID NO: 24372 - DNA, 25 bp, Artificial
  probe
  misc_feature (1)..(25): SEQ ID NO: 4835; WAN0249JT_at; Start 213; Stop 237
tagaactgttttgatacgaggacaa

SEQ ID NO: 24373 - DNA, 25 bp, Artificial
  probe
  misc_feature (1)..(25): SEQ ID NO: 4835; WAN0249JT_at; Start 31; Stop 55
gagaaggtgaccacagtcactgcga

SEQ ID NO: 24374 - DNA, 25 bp, Artificial
  probe
  misc_feature (1)..(25): SEQ ID NO: 4835; WAN0249JT_at; Start 44; Stop 68
cagtcactgcgatgttaagaagctt

SEQ ID NO: 24375 - DNA, 25 bp, Artificial
  probe
  misc_feature (1)..(25): SEQ ID NO: 3594; WAN0249JU_at; Start 26; Stop 50
ttgtcccagcctttctttgcaaaca

SEQ ID NO: 24376 - DNA, 25 bp, Artificial
  probe
  misc_feature (1)..(25): SEQ ID NO: 3594; WAN0249JU_at; Start 4; Stop 28
atagaactaaaggttggaacgattg

SEQ ID NO: 24377 - DNA, 25 bp, Artificial
  probe
  misc_feature (1)..(25): SEQ ID NO: 3594; WAN0249JU_at; Start 1; Stop 25
gagatagaactaaaggttggaacga

SEQ ID NO: 24378 - DNA, 25 bp, Artificial
  probe
  misc_feature (1)..(25): SEQ ID NO: 3594; WAN0249JU_at; Start 32; Stop 56
cagcctttctttgcaaacagaatag

SEQ ID NO: 24379 - DNA, 25 bp, Artificial
  probe
  misc_feature (1)..(25): SEQ ID NO: 3594; WAN0249JU_at; Start 41; Stop 65
tttgcaaacagaatagaaggaagct

SEQ ID NO: 24380 - DNA, 25 bp, Artificial
  probe
  misc_feature (1)..(25): SEQ ID NO: 3594; WAN0249JU_at; Start 2; Stop 26
agatagaactaaaggttggaacgat

SEQ ID NO: 24381 - DNA, 25 bp, Artificial
  probe
  misc_feature (1)..(25): SEQ ID NO: 3594; WAN0249JU_at; Start 37; Stop 61
tttctttgcaaacagaatagaagga

SEQ ID NO: 24382 - DNA, 25 bp, Artificial
  probe
  misc_feature (1)..(25): SEQ ID NO: 3594; WAN0249JU_at; Start 22; Stop 46
acgattgtcccagcctttctttgca

SEQ ID NO: 24383 - DNA, 25 bp, Artificial
  probe
  misc_feature (1)..(25): SEQ ID NO: 3594; WAN0249JU_at; Start 31; Stop 55
ccagcctttctttgcaaacagaata

SEQ ID NO: 24384 - DNA, 25 bp, Artificial
  probe
  misc_feature (1)..(25): SEQ ID NO: 3594; WAN0249JU_at; Start 21; Stop 45
aacgattgtcccagcctttctttgc

SEQ ID NO: 24385 - DNA, 25 bp, Artificial
  probe
  misc_feature (1)..(25): SEQ ID NO: 3594; WAN0249JU_at; Start 29; Stop 53
tcccagcctttctttgcaaacagaa

SEQ ID NO: 24386 - DNA, 25 bp, Artificial
  probe
  misc_feature (1)..(25): SEQ ID NO: 3594; WAN0249JU_at; Start 34; Stop 58
gcctttctttgcaaacagaatagaa

SEQ ID NO: 24387 - DNA, 25 bp, Artificial
  probe
  misc_feature (1)..(25): SEQ ID NO: 3594; WAN0249JU_at; Start 17; Stop 41
ttggaacgattgtcccagcctttct

SEQ ID NO: 24388 - DNA, 25 bp, Artificial
  probe
  misc_feature (1)..(25): SEQ ID NO: 3594; WAN0249JU_at; Start 36; Stop 60
ctttctttgcaaacagaatagaagg

SEQ ID NO: 24389 - DNA, 25 bp, Artificial
  probe
  misc_feature (1)..(25): SEQ ID NO: 3594; WAN0249JU_at; Start 14; Stop 38
aggttggaacgattgtcccagcctt

SEQ ID NO: 24390 - DNA, 25 bp, Artificial
  probe
  misc_feature (1)..(25): SEQ ID NO: 3594; WAN0249JU_at; Start 24; Stop 48
gattgtcccagcctttctttgcaaa

SEQ ID NO: 24391 - DNA, 25 bp, Artificial
  probe
  misc_feature (1)..(25): SEQ ID NO: 3594; WAN0249JU_at; Start 30; Stop 54
cccagcctttctttgcaaacagaat

SEQ ID NO: 24392 - DNA, 25 bp, Artificial
  probe
  misc_feature (1)..(25): SEQ ID NO: 3594; WAN0249JU_at; Start 11; Stop 35
taaaggttggaacgattgtcccagc

SEQ ID NO: 24393 - DNA, 25 bp, Artificial
  probe
  misc_feature (1)..(25): SEQ ID NO: 3594; WAN0249JU_at; Start 18; Stop 42
tggaacgattgtcccagcctttctt

SEQ ID NO: 24394 - DNA, 25 bp, Artificial
  probe
  misc_feature (1)..(25): SEQ ID NO: 3594; WAN0249JU_at; Start 27; Stop 51
tgtcccagcctttctttgcaaacag

SEQ ID NO: 24395 - DNA, 25 bp, Artificial
  probe
  misc_feature (1)..(25): SEQ ID NO: 3594; WAN0249JU_at; Start 35; Stop 59
cctttctttgcaaacagaatagaag

SEQ ID NO: 24396 - DNA, 25 bp, Artificial
  probe
  misc_feature (1)..(25): SEQ ID NO: 3594; WAN0249JU_at; Start 40; Stop 64
ctttgcaaacagaatagaaggaagc

SEQ ID NO: 24397 - DNA, 25 bp, Artificial
  probe
  misc_feature (1)..(25): SEQ ID NO: 3594; WAN0249JU_at; Start 10; Stop 34
ctaaaggttggaacgattgtcccag

SEQ ID NO: 24398 - DNA, 25 bp, Artificial
  probe
  misc_feature (1)..(25): SEQ ID NO: 3594; WAN0249JU_at; Start 42; Stop 66
ttgcaaacagaatagaaggaagctt

SEQ ID NO: 24399 - DNA, 25 bp, Artificial
  probe
  misc_feature (1)..(25): SEQ ID NO: 3594; WAN0249JU_at; Start 28; Stop 52
gtcccagcctttctttgcaaacaga

SEQ ID NO: 24400 - DNA, 25 bp, Artificial
  probe
  misc_feature (1)..(25): SEQ ID NO: 3594; WAN0249JU_at; Start 16; Stop 40
gttggaacgattgtcccagcctttc

SEQ ID NO: 24401 - DNA, 25 bp, Artificial
  probe
  misc_feature (1)..(25): SEQ ID NO: 3594; WAN0249JU_at; Start 13; Stop 37
aaggttggaacgattgtcccagcct

SEQ ID NO: 24402 - DNA, 25 bp, Artificial
  probe
  misc_feature (1)..(25): SEQ ID NO: 3594; WAN0249JU_at; Start 33; Stop 57
agcctttctttgcaaacagaataga

SEQ ID NO: 24403 - DNA, 25 bp, Artificial
  probe
  misc_feature (1)..(25): SEQ ID NO: 3594; WAN0249JU_at; Start 20; Stop 44
gaacgattgtcccagcctttctttg

SEQ ID NO: 24404 - DNA, 25 bp, Artificial
  probe
  misc_feature (1)..(25): SEQ ID NO: 3594; WAN0249JU_at; Start 39; Stop 63
tctttgcaaacagaatagaaggaag

SEQ ID NO: 24405 - DNA, 25 bp, Artificial
  probe
  misc_feature (1)..(25): SEQ ID NO: 3594; WAN0249JU_at; Start 23; Stop 47
cgattgtcccagcctttctttgcaa

SEQ ID NO: 24406 - DNA, 25 bp, Artificial
  probe
  misc_feature (1)..(25): SEQ ID NO: 3594; WAN0249JU_at; Start 25; Stop 49
attgtcccagcctttctttgcaaac

SEQ ID NO: 24407 - DNA, 25 bp, Artificial
  probe
  misc_feature (1)..(25): SEQ ID NO: 3594; WAN0249JU_at; Start 38; Stop 62
ttctttgcaaacagaatagaaggaa

SEQ ID NO: 24408 - DNA, 25 bp, Artificial
  probe
  misc_feature (1)..(25): SEQ ID NO: 236; WAN0249JV_at; Start 39; Stop 63
caatcgttccaacctttagttctat

SEQ ID NO: 24409 - DNA, 25 bp, Artificial
  probe
  misc_feature (1)..(25): SEQ ID NO: 236; WAN0249JV_at; Start 20; Stop 44
ttgcaaagaaaggctgggacaatcg

SEQ ID NO: 24410 - DNA, 25 bp, Artificial
  probe
  misc_feature (1)..(25): SEQ ID NO: 236; WAN0249JV_at; Start 8; Stop 32
cttctattctgtttgcaaagaaagg

SEQ ID NO: 24411 - DNA, 25 bp, Artificial
  probe
  misc_feature (1)..(25): SEQ ID NO: 236; WAN0249JV_at; Start 9; Stop 33
ttctattctgtttgcaaagaaaggc

SEQ ID NO: 24412 - DNA, 25 bp, Artificial
  probe
  misc_feature (1)..(25): SEQ ID NO: 236; WAN0249JV_at; Start 4; Stop 28
cttccttctattctgtttgcaaaga

SEQ ID NO: 24413 - DNA, 25 bp, Artificial
  probe
  misc_feature (1)..(25): SEQ ID NO: 236; WAN0249JV_at; Start 5; Stop 29
ttccttctattctgtttgcaaagaa

SEQ ID NO: 24414 - DNA, 25 bp, Artificial
  probe
  misc_feature (1)..(25): SEQ ID NO: 236; WAN0249JV_at; Start 27; Stop 51
gaaaggctgggacaatcgttccaac

SEQ ID NO: 24415 - DNA, 25 bp, Artificial
  probe
  misc_feature (1)..(25): SEQ ID NO: 236; WAN0249JV_at; Start 6; Stop 30
tccttctattctgtttgcaaagaaa

SEQ ID NO: 24416 - DNA, 25 bp, Artificial
  probe
  misc_feature (1)..(25): SEQ ID NO: 236; WAN0249JV_at; Start 7; Stop 31
ccttctattctgtttgcaaagaaag

SEQ ID NO: 24417 - DNA, 25 bp, Artificial
  probe
  misc_feature (1)..(25): SEQ ID NO: 236; WAN0249JV_at; Start 2; Stop 26
agcttccttctattctgtttgcaaa

SEQ ID NO: 24418 - DNA, 25 bp, Artificial
  probe
  misc_feature (1)..(25): SEQ ID NO: 236; WAN0249JV_at; Start 12; Stop 36
tattctgtttgcaaagaaaggctgg

SEQ ID NO: 24419 - DNA, 25 bp, Artificial
  probe
  misc_feature (1)..(25): SEQ ID NO: 236; WAN0249JV_at; Start 29; Stop 53
aaggctgggacaatcgttccaacct

SEQ ID NO: 24420 - DNA, 25 bp, Artificial
  probe
  misc_feature (1)..(25): SEQ ID NO: 236; WAN0249JV_at; Start 41; Stop 65
atcgttccaacctttagttctatct

SEQ ID NO: 24421 - DNA, 25 bp, Artificial
  probe
  misc_feature (1)..(25): SEQ ID NO: 236; WAN0249JV_at; Start 15; Stop 39
tctgtttgcaaagaaaggctgggac

SEQ ID NO: 24422 - DNA, 25 bp, Artificial
  probe
  misc_feature (1)..(25): SEQ ID NO: 236; WAN0249JV_at; Start 18; Stop 42
gtttgcaaagaaaggctgggacaat

SEQ ID NO: 24423 - DNA, 25 bp, Artificial
  probe
  misc_feature (1)..(25): SEQ ID NO: 236; WAN0249JV_at; Start 26; Stop 50
agaaaggctgggacaatcgttccaa

SEQ ID NO: 24424 - DNA, 25 bp, Artificial
  probe
  misc_feature (1)..(25): SEQ ID NO: 236; WAN0249JV_at; Start 3; Stop 27
gcttccttctattctgtttgcaaag

SEQ ID NO: 24425 - DNA, 25 bp, Artificial
  probe
  misc_feature (1)..(25): SEQ ID NO: 236; WAN0249JV_at; Start 30; Stop 54
aggctgggacaatcgttccaacctt

SEQ ID NO: 24426 - DNA, 25 bp, Artificial
  probe
  misc_feature (1)..(25): SEQ ID NO: 236; WAN0249JV_at; Start 13; Stop 37
attctgtttgcaaagaaaggctggg

SEQ ID NO: 24427 - DNA, 25 bp, Artificial
  probe
  misc_feature (1)..(25): SEQ ID NO: 236; WAN0249JV_at; Start 25; Stop 49
aagaaaggctgggacaatcgttcca

SEQ ID NO: 24428 - DNA, 25 bp, Artificial
  probe
  misc_feature (1)..(25): SEQ ID NO: 236; WAN0249JV_at; Start 23; Stop 47
caaagaaaggctgggacaatcgttc

SEQ ID NO: 24429 - DNA, 25 bp, Artificial
  probe
  misc_feature (1)..(25): SEQ ID NO: 236; WAN0249JV_at; Start 10; Stop 34
tctattctgtttgcaaagaaaggct

SEQ ID NO: 24430 - DNA, 25 bp, Artificial
  probe
  misc_feature (1)..(25): SEQ ID NO: 236; WAN0249JV_at; Start 32; Stop 56
gctgggacaatcgttccaaccttta

SEQ ID NO: 24431 - DNA, 25 bp, Artificial
  probe
  misc_feature (1)..(25): SEQ ID NO: 236; WAN0249JV_at; Start 19; Stop 43
tttgcaaagaaaggctgggacaatc

SEQ ID NO: 24432 - DNA, 25 bp, Artificial
  probe
  misc_feature (1)..(25): SEQ ID NO: 236; WAN0249JV_at; Start 33; Stop 57
ctgggacaatcgttccaacctttag

SEQ ID NO: 24433 - DNA, 25 bp, Artificial
  probe
  misc_feature (1)..(25): SEQ ID NO: 236; WAN0249JV_at; Start 16; Stop 40
ctgtttgcaaagaaaggctgggaca

SEQ ID NO: 24434 - DNA, 25 bp, Artificial
  probe
  misc_feature (1)..(25): SEQ ID NO: 236; WAN0249JV_at; Start 42; Stop 66
tcgttccaacctttagttctatctc

SEQ ID NO: 24435 - DNA, 25 bp, Artificial
  probe
  misc_feature (1)..(25): SEQ ID NO: 236; WAN0249JV_at; Start 1; Stop 25
aagcttccttctattctgtttgcaa

SEQ ID NO: 24436 - DNA, 25 bp, Artificial
  probe
  misc_feature (1)..(25): SEQ ID NO: 236; WAN0249JV_at; Start 17; Stop 41
tgtttgcaaagaaaggctgggacaa

SEQ ID NO: 24437 - DNA, 25 bp, Artificial
  probe
  misc_feature (1)..(25): SEQ ID NO: 236; WAN0249JV_at; Start 14; Stop 38
ttctgtttgcaaagaaaggctggga

SEQ ID NO: 24438 - DNA, 25 bp, Artificial
  probe
  misc_feature (1)..(25): SEQ ID NO: 236; WAN0249JV_at; Start 11; Stop 35
ctattctgtttgcaaagaaaggctg

SEQ ID NO: 24439 - DNA, 25 bp, Artificial
  probe
  misc_feature (1)..(25): SEQ ID NO: 236; WAN0249JV_at; Start 21; Stop 45
tgcaaagaaaggctgggacaatcgt

SEQ ID NO: 24440 - DNA, 25 bp, Artificial
  probe
  misc_feature (1)..(25): SEQ ID NO: 236; WAN0249JV_at; Start 22; Stop 46
gcaaagaaaggctgggacaatcgtt

SEQ ID NO: 24441 - DNA, 25 bp, Artificial
  probe
  misc_feature (1)..(25): SEQ ID NO: 76; WAN0249JW_at; Start 38; Stop 62
caaaaagacttagcaaatcagctaa

SEQ ID NO: 24442 - DNA, 25 bp, Artificial
  probe
  misc_feature (1)..(25): SEQ ID NO: 76; WAN0249JW_at; Start 25; Stop 49
ggcttttgacttgcaaaaagactta

SEQ ID NO: 24443 - DNA, 25 bp, Artificial
  probe
  misc_feature (1)..(25): SEQ ID NO: 76; WAN0249JW_at; Start 4; Stop 28
agaagcctgatggaaacatcgggct

SEQ ID NO: 24444 - DNA, 25 bp, Artificial
  probe
  misc_feature (1)..(25): SEQ ID NO: 76; WAN0249JW_at; Start 1; Stop 25
aaaagaagcctgatggaaacatcgg

SEQ ID NO: 24445 - DNA, 25 bp, Artificial
  probe
  misc_feature (1)..(25): SEQ ID NO: 76; WAN0249JW_at; Start 47; Stop 71
ttagcaaatcagctaagcctttttc

SEQ ID NO: 24446 - DNA, 25 bp, Artificial
  probe
  misc_feature (1)..(25): SEQ ID NO: 76; WAN0249JW_at; Start 5; Stop 29
gaagcctgatggaaacatcgggctt

SEQ ID NO: 24447 - DNA, 25 bp, Artificial
  probe
  misc_feature (1)..(25): SEQ ID NO: 76; WAN0249JW_at; Start 22; Stop 46
tcgggcttttgacttgcaaaaagac

SEQ ID NO: 24448 - DNA, 25 bp, Artificial
  probe
  misc_feature (1)..(25): SEQ ID NO: 76; WAN0249JW_at; Start 23; Stop 47
cgggcttttgacttgcaaaaagact

SEQ ID NO: 24449 - DNA, 25 bp, Artificial
  probe
  misc_feature (1)..(25): SEQ ID NO: 76; WAN0249JW_at; Start 32; Stop 56
gacttgcaaaaagacttagcaaatc

SEQ ID NO: 24450 - DNA, 25 bp, Artificial
  probe
  misc_feature (1)..(25): SEQ ID NO: 76; WAN0249JW_at; Start 6; Stop 30
aagcctgatggaaacatcgggcttt

SEQ ID NO: 24451 - DNA, 25 bp, Artificial
  probe
  misc_feature (1)..(25): SEQ ID NO: 76; WAN0249JW_at; Start 7; Stop 31
agcctgatggaaacatcgggctttt

SEQ ID NO: 24452 - DNA, 25 bp, Artificial
  probe
  misc_feature (1)..(25): SEQ ID NO: 76; WAN0249JW_at; Start 16; Stop 40
gaaacatcgggcttttgacttgcaa

SEQ ID NO: 24453 - DNA, 25 bp, Artificial
  probe
  misc_feature (1)..(25): SEQ ID NO: 76; WAN0249JW_at; Start 27; Stop 51
cttttgacttgcaaaaagacttagc

SEQ ID NO: 24454 - DNA, 25 bp, Artificial
  probe
  misc_feature (1)..(25): SEQ ID NO: 76; WAN0249JW_at; Start 36; Stop 60
tgcaaaaagacttagcaaatcagct

SEQ ID NO: 24455 - DNA, 25 bp, Artificial
  probe
  misc_feature (1)..(25): SEQ ID NO: 76; WAN0249JW_at; Start 29; Stop 53
tttgacttgcaaaaagacttagcaa

SEQ ID NO: 24456 - DNA, 25 bp, Artificial
  probe
  misc_feature (1)..(25): SEQ ID NO: 76; WAN0249JW_at; Start 28; Stop 52
ttttgacttgcaaaaagacttagca

SEQ ID NO: 24457 - DNA, 25 bp, Artificial
  probe
  misc_feature (1)..(25): SEQ ID NO: 76; WAN0249JW_at; Start 30; Stop 54
ttgacttgcaaaaagacttagcaaa

SEQ ID NO: 24458 - DNA, 25 bp, Artificial
  probe
  misc_feature (1)..(25): SEQ ID NO: 76; WAN0249JW_at; Start 10; Stop 34
ctgatggaaacatcgggcttttgac

SEQ ID NO: 24459 - DNA, 25 bp, Artificial
  probe
  misc_feature (1)..(25): SEQ ID NO: 76; WAN0249JW_at; Start 34; Stop 58
cttgcaaaaagacttagcaaatcag

SEQ ID NO: 24460 - DNA, 25 bp, Artificial
  probe
  misc_feature (1)..(25): SEQ ID NO: 76; WAN0249JW_at; Start 2; Stop 26
aaagaagcctgatggaaacatcggg

SEQ ID NO: 24461 - DNA, 25 bp, Artificial
  probe
  misc_feature (1)..(25): SEQ ID NO: 76; WAN0249JW_at; Start 44; Stop 68
gacttagcaaatcagctaagccttt

SEQ ID NO: 24462 - DNA, 25 bp, Artificial
  probe
  misc_feature (1)..(25): SEQ ID NO: 76; WAN0249JW_at; Start 9; Stop 33
cctgatggaaacatcgggcttttga

SEQ ID NO: 24463 - DNA, 25 bp, Artificial
  probe
  misc_feature (1)..(25): SEQ ID NO: 76; WAN0249JW_at; Start 37; Stop 61
gcaaaaagacttagcaaatcagcta

SEQ ID NO: 24464 - DNA, 25 bp, Artificial
  probe
  misc_feature (1)..(25): SEQ ID NO: 76; WAN0249JW_at; Start 19; Stop 43
acatcgggcttttgacttgcaaaaa

SEQ ID NO: 24465 - DNA, 25 bp, Artificial
  probe
  misc_feature (1)..(25): SEQ ID NO: 76; WAN0249JW_at; Start 41; Stop 65
aaagacttagcaaatcagctaagcc

SEQ ID NO: 24466 - DNA, 25 bp, Artificial
  probe
  misc_feature (1)..(25): SEQ ID NO: 76; WAN0249JW_at; Start 50; Stop 74
gcaaatcagctaagcctttttcttc

SEQ ID NO: 24467 - DNA, 25 bp, Artificial
  probe
  misc_feature (1)..(25): SEQ ID NO: 76; WAN0249JW_at; Start 17; Stop 41
aaacatcgggcttttgacttgcaaa

SEQ ID NO: 24468 - DNA, 25 bp, Artificial
  probe
  misc_feature (1)..(25): SEQ ID NO: 76; WAN0249JW_at; Start 48; Stop 72
tagcaaatcagctaagcctttttct

SEQ ID NO: 24469 - DNA, 25 bp, Artificial
  probe
  misc_feature (1)..(25): SEQ ID NO: 76; WAN0249JW_at; Start 8; Stop 32
gcctgatggaaacatcgggcttttg

SEQ ID NO: 24470 - DNA, 25 bp, Artificial
  probe
  misc_feature (1)..(25): SEQ ID NO: 76; WAN0249JW_at; Start 3; Stop 27
aagaagcctgatggaaacatcgggc

SEQ ID NO: 24471 - DNA, 25 bp, Artificial
  probe
  misc_feature (1)..(25): SEQ ID NO: 76; WAN0249JW_at; Start 18; Stop 42
aacatcgggcttttgacttgcaaaa

SEQ ID NO: 24472 - DNA, 25 bp, Artificial
  probe
  misc_feature (1)..(25): SEQ ID NO: 76; WAN0249JW_at; Start 42; Stop 66
aagacttagcaaatcagctaagcct

SEQ ID NO: 24473 - DNA, 25 bp, Artificial
  probe
  misc_feature (1)..(25): SEQ ID NO: 76; WAN0249JW_at; Start 20; Stop 44
catcgggcttttgacttgcaaaaag

SEQ ID NO: 24474 - DNA, 25 bp, Artificial
  probe
  misc_feature (1)..(25): SEQ ID NO: 76; WAN0249JW_at; Start 26; Stop 50
gcttttgacttgcaaaaagacttag

SEQ ID NO: 24475 - DNA, 25 bp, Artificial
  probe
  misc_feature (1)..(25): SEQ ID NO: 3552; WAN0249JX_at; Start 44; Stop 68
aaaagcccgatgtttccatcaggct

SEQ ID NO: 24476 - DNA, 25 bp, Artificial
  probe
  misc_feature (1)..(25): SEQ ID NO: 3552; WAN0249JX_at; Start 36; Stop 60
tgcaagtcaaaagcccgatgtttcc

SEQ ID NO: 24477 - DNA, 25 bp, Artificial
  probe
  misc_feature (1)..(25): SEQ ID NO: 3552; WAN0249JX_at; Start 34; Stop 58
tttgcaagtcaaaagcccgatgttt

SEQ ID NO: 24478 - DNA, 25 bp, Artificial
  probe
  misc_feature (1)..(25): SEQ ID NO: 3552; WAN0249JX_at; Start 10; Stop 34
ggcttagctgatttgctaagtcttt

SEQ ID NO: 24479 - DNA, 25 bp, Artificial
  probe
  misc_feature (1)..(25): SEQ ID NO: 3552; WAN0249JX_at; Start 4; Stop 28
gaaaaaggcttagctgatttgctaa

SEQ ID NO: 24480 - DNA, 25 bp, Artificial
  probe
  misc_feature (1)..(25): SEQ ID NO: 3552; WAN0249JX_at; Start 30; Stop 54
tctttttgcaagtcaaaagcccgat

SEQ ID NO: 24481 - DNA, 25 bp, Artificial
  probe
  misc_feature (1)..(25): SEQ ID NO: 3552; WAN0249JX_at; Start 24; Stop 48
gctaagtctttttgcaagtcaaaag

SEQ ID NO: 24482 - DNA, 25 bp, Artificial
  probe
  misc_feature (1)..(25): SEQ ID NO: 3552; WAN0249JX_at; Start 28; Stop 52
agtctttttgcaagtcaaaagcccg

SEQ ID NO: 24483 - DNA, 25 bp, Artificial
  probe
  misc_feature (1)..(25): SEQ ID NO: 3552; WAN0249JX_at; Start 45; Stop 69
aaagcccgatgtttccatcaggctt

SEQ ID NO: 24484 - DNA, 25 bp, Artificial
  probe
  misc_feature (1)..(25): SEQ ID NO: 3552; WAN0249JX_at; Start 40; Stop 64
agtcaaaagcccgatgtttccatca

SEQ ID NO: 24485 - DNA, 25 bp, Artificial
  probe
  misc_feature (1)..(25): SEQ ID NO: 3552; WAN0249JX_at; Start 15; Stop 39
agctgatttgctaagtctttttgca

SEQ ID NO: 24486 - DNA, 25 bp, Artificial
  probe
  misc_feature (1)..(25): SEQ ID NO: 3552; WAN0249JX_at; Start 23; Stop 47
tgctaagtctttttgcaagtcaaaa

SEQ ID NO: 24487 - DNA, 25 bp, Artificial
  probe
  misc_feature (1)..(25): SEQ ID NO: 3552; WAN0249JX_at; Start 35; Stop 59
ttgcaagtcaaaagcccgatgtttc

SEQ ID NO: 24488 - DNA, 25 bp, Artificial
  probe
  misc_feature (1)..(25): SEQ ID NO: 3552; WAN0249JX_at; Start 50; Stop 74
ccgatgtttccatcaggcttctttt

SEQ ID NO: 24489 - DNA, 25 bp, Artificial
  probe
  misc_feature (1)..(25): SEQ ID NO: 3552; WAN0249JX_at; Start 46; Stop 70
aagcccgatgtttccatcaggcttc

SEQ ID NO: 24490 - DNA, 25 bp, Artificial
  probe
  misc_feature (1)..(25): SEQ ID NO: 3552; WAN0249JX_at; Start 43; Stop 67
caaaagcccgatgtttccatcaggc

SEQ ID NO: 24491 - DNA, 25 bp, Artificial
  probe
  misc_feature (1)..(25): SEQ ID NO: 3552; WAN0249JX_at; Start 21; Stop 45
tttgctaagtctttttgcaagtcaa

SEQ ID NO: 24492 - DNA, 25 bp, Artificial
  probe
  misc_feature (1)..(25): SEQ ID NO: 3552; WAN0249JX_at; Start 42; Stop 66
tcaaaagcccgatgtttccatcagg

SEQ ID NO: 24493 - DNA, 25 bp, Artificial
  probe
  misc_feature (1)..(25): SEQ ID NO: 3552; WAN0249JX_at; Start 26; Stop 50
taagtctttttgcaagtcaaaagcc

SEQ ID NO: 24494 - DNA, 25 bp, Artificial
  probe
  misc_feature (1)..(25): SEQ ID NO: 3552; WAN0249JX_at; Start 49; Stop 73
cccgatgtttccatcaggcttcttt

SEQ ID NO: 24495 - DNA, 25 bp, Artificial
  probe
  misc_feature (1)..(25): SEQ ID NO: 3552; WAN0249JX_at; Start 47; Stop 71
agcccgatgtttccatcaggcttct

SEQ ID NO: 24496 - DNA, 25 bp, Artificial
  probe
  misc_feature (1)..(25): SEQ ID NO: 3552; WAN0249JX_at; Start 19; Stop 43
gatttgctaagtctttttgcaagtc

SEQ ID NO: 24497 - DNA, 25 bp, Artificial
  probe
  misc_feature (1)..(25): SEQ ID NO: 3552; WAN0249JX_at; Start 7; Stop 31
aaaggcttagctgatttgctaagtc

SEQ ID NO: 24498 - DNA, 25 bp, Artificial
  probe
  misc_feature (1)..(25): SEQ ID NO: 3552; WAN0249JX_at; Start 2; Stop 26
aagaaaaaggcttagctgatttgct

SEQ ID NO: 24499 - DNA, 25 bp, Artificial
  probe
  misc_feature (1)..(25): SEQ ID NO: 3552; WAN0249JX_at; Start 41; Stop 65
gtcaaaagcccgatgtttccatcag

SEQ ID NO: 24500 - DNA, 25 bp, Artificial
  probe
  misc_feature (1)..(25): SEQ ID NO: 3552; WAN0249JX_at; Start 33; Stop 57
ttttgcaagtcaaaagcccgatgtt

SEQ ID NO: 24501 - DNA, 25 bp, Artificial
  probe
  misc_feature (1)..(25): SEQ ID NO: 3552; WAN0249JX_at; Start 48; Stop 72
gcccgatgtttccatcaggcttctt

SEQ ID NO: 24502 - DNA, 25 bp, Artificial
  probe
  misc_feature (1)..(25): SEQ ID NO: 3552; WAN0249JX_at; Start 14; Stop 38
tagctgatttgctaagtctttttgc

SEQ ID NO: 24503 - DNA, 25 bp, Artificial
  probe
  misc_feature (1)..(25): SEQ ID NO: 3552; WAN0249JX_at; Start 1; Stop 25
gaagaaaaaggcttagctgatttgc

SEQ ID NO: 24504 - DNA, 25 bp, Artificial
  probe
  misc_feature (1)..(25): SEQ ID NO: 3552; WAN0249JX_at; Start 8; Stop 32
aaggcttagctgatttgctaagtct

SEQ ID NO: 24505 - DNA, 25 bp, Artificial
  probe
  misc_feature (1)..(25): SEQ ID NO: 3552; WAN0249JX_at; Start 32; Stop 56
tttttgcaagtcaaaagcccgatgt

SEQ ID NO: 24506 - DNA, 25 bp, Artificial
  probe
  misc_feature (1)..(25): SEQ ID NO: 3552; WAN0249JX_at; Start 16; Stop 40
gctgatttgctaagtctttttgcaa

SEQ ID NO: 24507 - DNA, 25 bp, Artificial
  probe
  misc_feature (1)..(25): SEQ ID NO: 3552; WAN0249JX_at; Start 31; Stop 55
ctttttgcaagtcaaaagcccgatg

SEQ ID NO: 24508 - DNA, 25 bp, Artificial
  probe
  misc_feature (1)..(25): SEQ ID NO: 3552; WAN0249JX_at; Start 29; Stop 53
gtctttttgcaagtcaaaagcccga

SEQ ID NO: 24509 - DNA, 25 bp, Artificial
  probe
  misc_feature (1)..(25): SEQ ID NO: 4740; WAN0249JY_at; Start 52; Stop 76
acaaaatatacaatagttctggaga

SEQ ID NO: 24510 - DNA, 25 bp, Artificial
  probe
  misc_feature (1)..(25): SEQ ID NO: 4740; WAN0249JY_at; Start 51; Stop 75
tacaaaatatacaatagttctggag

SEQ ID NO: 24511 - DNA, 25 bp, Artificial
  probe
  misc_feature (1)..(25): SEQ ID NO: 4740; WAN0249JY_at; Start 53; Stop 77
caaaatatacaatagttctggagac

SEQ ID NO: 24512 - DNA, 25 bp, Artificial
  probe
  misc_feature (1)..(25): SEQ ID NO: 4740; WAN0249JY_at; Start 20; Stop 44
aaaattatacctttctattctactg

SEQ ID NO: 24513 - DNA, 25 bp, Artificial
  probe
  misc_feature (1)..(25): SEQ ID NO: 4740; WAN0249JY_at; Start 22; Stop 46
aattatacctttctattctactgtt

SEQ ID NO: 24514 - DNA, 25 bp, Artificial
  probe
  misc_feature (1)..(25): SEQ ID NO: 4740; WAN0249JY_at; Start 23; Stop 47
attatacctttctattctactgttt

SEQ ID NO: 24515 - DNA, 25 bp, Artificial
  probe
  misc_feature (1)..(25): SEQ ID NO: 4740; WAN0249JY_at; Start 50; Stop 74
ttacaaaatatacaatagttctgga

SEQ ID NO: 24516 - DNA, 25 bp, Artificial
  probe
  misc_feature (1)..(25): SEQ ID NO: 4740; WAN0249JY_at; Start 48; Stop 72
ttttacaaaatatacaatagttctg

SEQ ID NO: 24517 - DNA, 25 bp, Artificial
  probe
  misc_feature (1)..(25): SEQ ID NO: 4740; WAN0249JY_at; Start 49; Stop 73
tttacaaaatatacaatagttctgg

SEQ ID NO: 24518 - DNA, 25 bp, Artificial
  probe
  misc_feature (1)..(25): SEQ ID NO: 4740; WAN0249JY_at; Start 21; Stop 45
aaattatacctttctattctactgt

SEQ ID NO: 24519 - DNA, 25 bp, Artificial
  probe
  misc_feature (1)..(25): SEQ ID NO: 3826; WAN0249JZ_at; Start 3; Stop 27
ctccagaactattgtatattttgta

SEQ ID NO: 24520 - DNA, 25 bp, Artificial
  probe
  misc_feature (1)..(25): SEQ ID NO: 3826; WAN0249JZ_at; Start 33; Stop 57
acagtagaatagaaaggtataattt

SEQ ID NO: 24521 - DNA, 25 bp, Artificial
  probe
  misc_feature (1)..(25): SEQ ID NO: 3826; WAN0249JZ_at; Start 32; Stop 56
aacagtagaatagaaaggtataatt

SEQ ID NO: 24522 - DNA, 25 bp, Artificial
  probe
  misc_feature (1)..(25): SEQ ID NO: 3826; WAN0249JZ_at; Start 31; Stop 55
aaacagtagaatagaaaggtataat

SEQ ID NO: 24523 - DNA, 25 bp, Artificial
  probe
  misc_feature (1)..(25): SEQ ID NO: 3826; WAN0249JZ_at; Start 1; Stop 25
gtctccagaactattgtatattttg

SEQ ID NO: 24524 - DNA, 25 bp, Artificial
  probe
  misc_feature (1)..(25): SEQ ID NO: 3826; WAN0249JZ_at; Start 34; Stop 58
cagtagaatagaaaggtataatttt

SEQ ID NO: 24525 - DNA, 25 bp, Artificial
  probe
  misc_feature (1)..(25): SEQ ID NO: 3826; WAN0249JZ_at; Start 2; Stop 26
tctccagaactattgtatattttgt

SEQ ID NO: 24526 - DNA, 25 bp, Artificial
  probe
  misc_feature (1)..(25): SEQ ID NO: 3826; WAN0249JZ_at; Start 4; Stop 28
tccagaactattgtatattttgtaa

SEQ ID NO: 24527 - DNA, 25 bp, Artificial
  probe
  misc_feature (1)..(25): SEQ ID NO: 3826; WAN0249JZ_at; Start 6; Stop 30
cagaactattgtatattttgtaaaa

SEQ ID NO: 24528 - DNA, 25 bp, Artificial
  probe
  misc_feature (1)..(25): SEQ ID NO: 3826; WAN0249JZ_at; Start 5; Stop 29
ccagaactattgtatattttgtaaa

SEQ ID NO: 24529 - DNA, 25 bp, Artificial
  probe
  misc_feature (1)..(25): SEQ ID NO: 413; WAN0249K2_at; Start 33; Stop 57
ctttttgtctataatttggtataat

SEQ ID NO: 24530 - DNA, 25 bp, Artificial
  probe
  misc_feature (1)..(25): SEQ ID NO: 413; WAN0249K2_at; Start 39; Stop 63
gtctataatttggtataataaacag

SEQ ID NO: 24531 - DNA, 25 bp, Artificial
  probe
  misc_feature (1)..(25): SEQ ID NO: 413; WAN0249K2_at; Start 38; Stop 62
tgtctataatttggtataataaaca

SEQ ID NO: 24532 - DNA, 25 bp, Artificial
  probe
  misc_feature (1)..(25): SEQ ID NO: 413; WAN0249K2_at; Start 29; Stop 53
ttctctttttgtctataatttggta

SEQ ID NO: 24533 - DNA, 25 bp, Artificial
  probe
  misc_feature (1)..(25): SEQ ID NO: 413; WAN0249K2_at; Start 30; Stop 54
tctctttttgtctataatttggtat

SEQ ID NO: 24534 - DNA, 25 bp, Artificial
  probe
  misc_feature (1)..(25): SEQ ID NO: 413; WAN0249K2_at; Start 31; Stop 55
ctctttttgtctataatttggtata

SEQ ID NO: 24535 - DNA, 25 bp, Artificial
  probe
  misc_feature (1)..(25): SEQ ID NO: 413; WAN0249K2_at; Start 40; Stop 64
tctataatttggtataataaacagt

SEQ ID NO: 24536 - DNA, 25 bp, Artificial
  probe
  misc_feature (1)..(25): SEQ ID NO: 413; WAN0249K2_at; Start 27; Stop 51
ctttctctttttgtctataatttgg

SEQ ID NO: 24537 - DNA, 25 bp, Artificial
  probe
  misc_feature (1)..(25): SEQ ID NO: 413; WAN0249K2_at; Start 26; Stop 50
tctttctctttttgtctataatttg

SEQ ID NO: 24538 - DNA, 25 bp, Artificial
  probe
  misc_feature (1)..(25): SEQ ID NO: 413; WAN0249K2_at; Start 32; Stop 56
tctttttgtctataatttggtataa

SEQ ID NO: 24539 - DNA, 25 bp, Artificial
  probe
  misc_feature (1)..(25): SEQ ID NO: 388; WAN0249K3_at; Start 6; Stop 30
ttattataccaaattatagacaaaa

SEQ ID NO: 24540 - DNA, 25 bp, Artificial
  probe
  misc_feature (1)..(25): SEQ ID NO: 388; WAN0249K3_at; Start 10; Stop 34
tataccaaattatagacaaaaagag

SEQ ID NO: 24541 - DNA, 25 bp, Artificial
  probe
  misc_feature (1)..(25): SEQ ID NO: 388; WAN0249K3_at; Start 2; Stop 26
ctgtttattataccaaattatagac

SEQ ID NO: 24542 - DNA, 25 bp, Artificial
  probe
  misc_feature (1)..(25): SEQ ID NO: 388; WAN0249K3_at; Start 5; Stop 29
tttattataccaaattatagacaaa

SEQ ID NO: 24543 - DNA, 25 bp, Artificial
  probe
  misc_feature (1)..(25): SEQ ID NO: 388; WAN0249K3_at; Start 4; Stop 28
gtttattataccaaattatagacaa

SEQ ID NO: 24544 - DNA, 25 bp, Artificial
  probe
  misc_feature (1)..(25): SEQ ID NO: 388; WAN0249K3_at; Start 3; Stop 27
tgtttattataccaaattatagaca

SEQ ID NO: 24545 - DNA, 25 bp, Artificial
  probe
  misc_feature (1)..(25): SEQ ID NO: 388; WAN0249K3_at; Start 7; Stop 31
tattataccaaattatagacaaaaa

SEQ ID NO: 24546 - DNA, 25 bp, Artificial
  probe
  misc_feature (1)..(25): SEQ ID NO: 388; WAN0249K3_at; Start 11; Stop 35
ataccaaattatagacaaaaagaga

SEQ ID NO: 24547 - DNA, 25 bp, Artificial
  probe
  misc_feature (1)..(25): SEQ ID NO: 388; WAN0249K3_at; Start 9; Stop 33
ttataccaaattatagacaaaaaga

SEQ ID NO: 24548 - DNA, 25 bp, Artificial
  probe
  misc_feature (1)..(25): SEQ ID NO: 388; WAN0249K3_at; Start 8; Stop 32
attataccaaattatagacaaaaag

SEQ ID NO: 24549 - DNA, 25 bp, Artificial
  probe
  misc_feature (1)..(25): SEQ ID NO: 388; WAN0249K3_at; Start 1; Stop 25
actgtttattataccaaattataga

SEQ ID NO: 24550 - DNA, 25 bp, Artificial
  probe
  misc_feature (1)..(25): SEQ ID NO: 325; WAN0249K4_at; Start 115; Stop 139
ctatgaatattaacgtggagtaaaa

SEQ ID NO: 24551 - DNA, 25 bp, Artificial
  probe
  misc_feature (1)..(25): SEQ ID NO: 325; WAN0249K4_at; Start 20; Stop 44
gtccaatcaattatcgcattaaagt

SEQ ID NO: 24552 - DNA, 25 bp, Artificial
  probe
  misc_feature (1)..(25): SEQ ID NO: 325; WAN0249K4_at; Start 144; Stop 168
cactgaatgtcccaattcttcttta

SEQ ID NO: 24553 - DNA, 25 bp, Artificial
  probe
  misc_feature (1)..(25): SEQ ID NO: 325; WAN0249K4_at; Start 125; Stop 149
taacgtggagtaaaacatccactga

SEQ ID NO: 24554 - DNA, 25 bp, Artificial
  probe
  misc_feature (1)..(25): SEQ ID NO: 325; WAN0249K4_at; Start 15; Stop 39
caaaagtccaatcaattatcgcatt

SEQ ID NO: 24555 - DNA, 25 bp, Artificial
  probe
  misc_feature (1)..(25): SEQ ID NO: 325; WAN0249K4_at; Start 142; Stop 166
tccactgaatgtcccaattcttctt

SEQ ID NO: 24556 - DNA, 25 bp, Artificial
  probe
  misc_feature (1)..(25): SEQ ID NO: 325; WAN0249K4_at; Start 31; Stop 55
tatcgcattaaagtatggttactaa

SEQ ID NO: 24557 - DNA, 25 bp, Artificial
  probe
  misc_feature (1)..(25): SEQ ID NO: 325; WAN0249K4_at; Start 4; Stop 28
catctccttgacaaaagtccaatca

SEQ ID NO: 24558 - DNA, 25 bp, Artificial
  probe
  misc_feature (1)..(25): SEQ ID NO: 325; WAN0249K4_at; Start 17; Stop 41
aaagtccaatcaattatcgcattaa

SEQ ID NO: 24559 - DNA, 25 bp, Artificial
  probe
  misc_feature (1)..(25): SEQ ID NO: 325; WAN0249K4_at; Start 6; Stop 30
tctccttgacaaaagtccaatcaat

SEQ ID NO: 24560 - DNA, 25 bp, Artificial
  probe
  misc_feature (1)..(25): SEQ ID NO: 325; WAN0249K4_at; Start 12; Stop 36
tgacaaaagtccaatcaattatcgc

SEQ ID NO: 24561 - DNA, 25 bp, Artificial
  probe
  misc_feature (1)..(25): SEQ ID NO: 325; WAN0249K4_at; Start 1; Stop 25
acacatctccttgacaaaagtccaa

SEQ ID NO: 24562 - DNA, 25 bp, Artificial
  probe
  misc_feature (1)..(25): SEQ ID NO: 325; WAN0249K4_at; Start 9; Stop 33
ccttgacaaaagtccaatcaattat

SEQ ID NO: 24563 - DNA, 25 bp, Artificial
  probe
  misc_feature (1)..(25): SEQ ID NO: 325; WAN0249K4_at; Start 116; Stop 140
tatgaatattaacgtggagtaaaac

SEQ ID NO: 24564 - DNA, 25 bp, Artificial
  probe
  misc_feature (1)..(25): SEQ ID NO: 325; WAN0249K4_at; Start 79; Stop 103
tcccgacctcttacctggttagcta

SEQ ID NO: 24565 - DNA, 25 bp, Artificial
  probe
  misc_feature (1)..(25): SEQ ID NO: 325; WAN0249K4_at; Start 124; Stop 148
ttaacgtggagtaaaacatccactg

SEQ ID NO: 24566 - DNA, 25 bp, Artificial
  probe
  misc_feature (1)..(25): SEQ ID NO: 325; WAN0249K4_at; Start 135; Stop 159
taaaacatccactgaatgtcccaat

SEQ ID NO: 24567 - DNA, 25 bp, Artificial
  probe
  misc_feature (1)..(25): SEQ ID NO: 325; WAN0249K4_at; Start 28; Stop 52
aattatcgcattaaagtatggttac

SEQ ID NO: 24568 - DNA, 25 bp, Artificial
  probe
  misc_feature (1)..(25): SEQ ID NO: 325; WAN0249K4_at; Start 122; Stop 146
tattaacgtggagtaaaacatccac

SEQ ID NO: 24569 - DNA, 25 bp, Artificial
  probe
  misc_feature (1)..(25): SEQ ID NO: 325; WAN0249K4_at; Start 132; Stop 156
gagtaaaacatccactgaatgtccc

SEQ ID NO: 24570 - DNA, 25 bp, Artificial
  probe
  misc_feature (1)..(25): SEQ ID NO: 325; WAN0249K4_at; Start 34; Stop 58
cgcattaaagtatggttactaataa

SEQ ID NO: 24571 - DNA, 25 bp, Artificial
  probe
  misc_feature (1)..(25): SEQ ID NO: 325; WAN0249K4_at; Start 131; Stop 155
ggagtaaaacatccactgaatgtcc

SEQ ID NO: 24572 - DNA, 25 bp, Artificial
  probe
  misc_feature (1)..(25): SEQ ID NO: 325; WAN0249K4_at; Start 149; Stop 173
aatgtcccaattcttctttatttca

SEQ ID NO: 24573 - DNA, 25 bp, Artificial
  probe
  misc_feature (1)..(25): SEQ ID NO: 325; WAN0249K4_at; Start 138; Stop 162
aacatccactgaatgtcccaattct

SEQ ID NO: 24574 - DNA, 25 bp, Artificial
  probe
  misc_feature (1)..(25): SEQ ID NO: 325; WAN0249K4_at; Start 119; Stop 143
gaatattaacgtggagtaaaacatc

SEQ ID NO: 24575 - DNA, 25 bp, Artificial
  probe
  misc_feature (1)..(25): SEQ ID NO: 325; WAN0249K4_at; Start 13; Stop 37
gacaaaagtccaatcaattatcgca

SEQ ID NO: 24576 - DNA, 25 bp, Artificial
  probe
  misc_feature (1)..(25): SEQ ID NO: 325; WAN0249K4_at; Start 2; Stop 26
cacatctccttgacaaaagtccaat

SEQ ID NO: 24577 - DNA, 25 bp, Artificial
  probe
  misc_feature (1)..(25): SEQ ID NO: 325; WAN0249K4_at; Start 134; Stop 158
gtaaaacatccactgaatgtcccaa

SEQ ID NO: 24578 - DNA, 25 bp, Artificial
  probe
  misc_feature (1)..(25): SEQ ID NO: 325; WAN0249K4_at; Start 26; Stop 50
tcaattatcgcattaaagtatggtt

SEQ ID NO: 24579 - DNA, 25 bp, Artificial
  probe
  misc_feature (1)..(25): SEQ ID NO: 325; WAN0249K4_at; Start 128; Stop 152
cgtggagtaaaacatccactgaatg

SEQ ID NO: 24580 - DNA, 25 bp, Artificial
  probe
  misc_feature (1)..(25): SEQ ID NO: 325; WAN0249K4_at; Start 19; Stop 43
agtccaatcaattatcgcattaaag

SEQ ID NO: 24581 - DNA, 25 bp, Artificial
  probe
  misc_feature (1)..(25): SEQ ID NO: 325; WAN0249K4_at; Start 24; Stop 48
aatcaattatcgcattaaagtatgg

SEQ ID NO: 24582 - DNA, 25 bp, Artificial
  probe
  misc_feature (1)..(25): SEQ ID NO: 325; WAN0249K4_at; Start 81; Stop 105
ccgacctcttacctggttagctaat

SEQ ID NO: 24583 - DNA, 25 bp, Artificial
  probe
  misc_feature (1)..(25): SEQ ID NO: 325; WAN0249K4_at; Start 130; Stop 154
tggagtaaaacatccactgaatgtc

SEQ ID NO: 24584 - DNA, 25 bp, Artificial
  probe
  misc_feature (1)..(25): SEQ ID NO: 4673; WAN0249K5_at; Start 36; Stop 60
tttactccacgttaatattcatagt

SEQ ID NO: 24585 - DNA, 25 bp, Artificial
  probe
  misc_feature (1)..(25): SEQ ID NO: 4673; WAN0249K5_at; Start 20; Stop 44
gacattcagtggatgttttactcca

SEQ ID NO: 24586 - DNA, 25 bp, Artificial
  probe
  misc_feature (1)..(25): SEQ ID NO: 4673; WAN0249K5_at; Start 147; Stop 171
gattggacttttgtcaaggagatgt

SEQ ID NO: 24587 - DNA, 25 bp, Artificial
  probe
  misc_feature (1)..(25): SEQ ID NO: 4673; WAN0249K5_at; Start 4; Stop 28
aataaagaagaattgggacattcag

SEQ ID NO: 24588 - DNA, 25 bp, Artificial
  probe
  misc_feature (1)..(25): SEQ ID NO: 4673; WAN0249K5_at; Start 146; Stop 170
tgattggacttttgtcaaggagatg

SEQ ID NO: 24589 - DNA, 25 bp, Artificial
  probe
  misc_feature (1)..(25): SEQ ID NO: 4673; WAN0249K5_at; Start 138; Stop 162
gcgataattgattggacttttgtca

SEQ ID NO: 24590 - DNA, 25 bp, Artificial
  probe
  misc_feature (1)..(25): SEQ ID NO: 4673; WAN0249K5_at; Start 11; Stop 35
aagaattgggacattcagtggatgt

SEQ ID NO: 24591 - DNA, 25 bp, Artificial
  probe
  misc_feature (1)..(25): SEQ ID NO: 4673; WAN0249K5_at; Start 142; Stop 166
taattgattggacttttgtcaagga

SEQ ID NO: 24592 - DNA, 25 bp, Artificial
  probe
  misc_feature (1)..(25): SEQ ID NO: 4673; WAN0249K5_at; Start 149; Stop 173
ttggacttttgtcaaggagatgtgt

SEQ ID NO: 24593 - DNA, 25 bp, Artificial
  probe
  misc_feature (1)..(25): SEQ ID NO: 4673; WAN0249K5_at; Start 123; Stop 147
taaccatactttaatgcgataattg

SEQ ID NO: 24594 - DNA, 25 bp, Artificial
  probe
  misc_feature (1)..(25): SEQ ID NO: 4673; WAN0249K5_at; Start 26; Stop 50
cagtggatgttttactccacgttaa

SEQ ID NO: 24595 - DNA, 25 bp, Artificial
  probe
  misc_feature (1)..(25): SEQ ID NO: 4673; WAN0249K5_at; Start 28; Stop 52
gtggatgttttactccacgttaata

SEQ ID NO: 24596 - DNA, 25 bp, Artificial
  probe
  misc_feature (1)..(25): SEQ ID NO: 4673; WAN0249K5_at; Start 135; Stop 159
aatgcgataattgattggacttttg

SEQ ID NO: 24597 - DNA, 25 bp, Artificial
  probe
  misc_feature (1)..(25): SEQ ID NO: 4673; WAN0249K5_at; Start 131; Stop 155
ctttaatgcgataattgattggact

SEQ ID NO: 24598 - DNA, 25 bp, Artificial
  probe
  misc_feature (1)..(25): SEQ ID NO: 4673; WAN0249K5_at; Start 140; Stop 164
gataattgattggacttttgtcaag

SEQ ID NO: 24599 - DNA, 25 bp, Artificial
  probe
  misc_feature (1)..(25): SEQ ID NO: 4673; WAN0249K5_at; Start 143; Stop 167
aattgattggacttttgtcaaggag

SEQ ID NO: 24600 - DNA, 25 bp, Artificial
  probe
  misc_feature (1)..(25): SEQ ID NO: 4673; WAN0249K5_at; Start 18; Stop 42
gggacattcagtggatgttttactc

SEQ ID NO: 24601 - DNA, 25 bp, Artificial
  probe
  misc_feature (1)..(25): SEQ ID NO: 4673; WAN0249K5_at; Start 130; Stop 154
actttaatgcgataattgattggac

SEQ ID NO: 24602 - DNA, 25 bp, Artificial
  probe
  misc_feature (1)..(25): SEQ ID NO: 4673; WAN0249K5_at; Start 6; Stop 30
taaagaagaattgggacattcagtg

SEQ ID NO: 24603 - DNA, 25 bp, Artificial
  probe
  misc_feature (1)..(25): SEQ ID NO: 4673; WAN0249K5_at; Start 31; Stop 55
gatgttttactccacgttaatattc

SEQ ID NO: 24604 - DNA, 25 bp, Artificial
  probe
  misc_feature (1)..(25): SEQ ID NO: 4673; WAN0249K5_at; Start 117; Stop 141
tattagtaaccatactttaatgcga

SEQ ID NO: 24605 - DNA, 25 bp, Artificial
  probe
  misc_feature (1)..(25): SEQ ID NO: 4673; WAN0249K5_at; Start 9; Stop 33
agaagaattgggacattcagtggat

SEQ ID NO: 24606 - DNA, 25 bp, Artificial
  probe
  misc_feature (1)..(25): SEQ ID NO: 4673; WAN0249K5_at; Start 35; Stop 59
ttttactccacgttaatattcatag

SEQ ID NO: 24607 - DNA, 25 bp, Artificial
  probe
  misc_feature (1)..(25): SEQ ID NO: 4673; WAN0249K5_at; Start 16; Stop 40
ttgggacattcagtggatgttttac

SEQ ID NO: 24608 - DNA, 25 bp, Artificial
  probe
  misc_feature (1)..(25): SEQ ID NO: 4673; WAN0249K5_at; Start 124; Stop 148
aaccatactttaatgcgataattga

SEQ ID NO: 24609 - DNA, 25 bp, Artificial
  probe
  misc_feature (1)..(25): SEQ ID NO: 4673; WAN0249K5_at; Start 22; Stop 46
cattcagtggatgttttactccacg

SEQ ID NO: 24610 - DNA, 25 bp, Artificial
  probe
  misc_feature (1)..(25): SEQ ID NO: 4673; WAN0249K5_at; Start 8; Stop 32
aagaagaattgggacattcagtgga

SEQ ID NO: 24611 - DNA, 25 bp, Artificial
  probe
  misc_feature (1)..(25): SEQ ID NO: 4673; WAN0249K5_at; Start 13; Stop 37
gaattgggacattcagtggatgttt

SEQ ID NO: 24612 - DNA, 25 bp, Artificial
  probe
  misc_feature (1)..(25): SEQ ID NO: 4673; WAN0249K5_at; Start 137; Stop 161
tgcgataattgattggacttttgtc

SEQ ID NO: 24613 - DNA, 25 bp, Artificial
  probe
  misc_feature (1)..(25): SEQ ID NO: 4673; WAN0249K5_at; Start 1; Stop 25
tgaaataaagaagaattgggacatt

SEQ ID NO: 24614 - DNA, 25 bp, Artificial
  probe
  misc_feature (1)..(25): SEQ ID NO: 4673; WAN0249K5_at; Start 69; Stop 93
attagctaaccaggtaagaggtcgg

SEQ ID NO: 24615 - DNA, 25 bp, Artificial
  probe
  misc_feature (1)..(25): SEQ ID NO: 4673; WAN0249K5_at; Start 120; Stop 144
tagtaaccatactttaatgcgataa

SEQ ID NO: 24616 - DNA, 25 bp, Artificial
  probe
  misc_feature (1)..(25): SEQ ID NO: 4673; WAN0249K5_at; Start 71; Stop 95
tagctaaccaggtaagaggtcggga

SEQ ID NO: 24617 - DNA, 25 bp, Artificial
  probe
  misc_feature (1)..(25): SEQ ID NO: 4673; WAN0249K5_at; Start 126; Stop 150
ccatactttaatgcgataattgatt

SEQ ID NO: 24618 - DNA, 25 bp, Artificial
  probe
  misc_feature (1)..(25): SEQ ID NO: 370; WAN0249K6_at; Start 18; Stop 42
ccaggcgtgacgaagcttttttcaa

SEQ ID NO: 24619 - DNA, 25 bp, Artificial
  probe
  misc_feature (1)..(25): SEQ ID NO: 370; WAN0249K6_at; Start 5; Stop 29
gaggcttttgtcaccaggcgtgacg

SEQ ID NO: 24620 - DNA, 25 bp, Artificial
  probe
  misc_feature (1)..(25): SEQ ID NO: 370; WAN0249K6_at; Start 2; Stop 26
ctagaggcttttgtcaccaggcgtg

SEQ ID NO: 24621 - DNA, 25 bp, Artificial
  probe
  misc_feature (1)..(25): SEQ ID NO: 370; WAN0249K6_at; Start 16; Stop 40
caccaggcgtgacgaagcttttttc

SEQ ID NO: 24622 - DNA, 25 bp, Artificial
  probe
  misc_feature (1)..(25): SEQ ID NO: 370; WAN0249K6_at; Start 68; Stop 92
tggaaagaactctgccacaaactcg

SEQ ID NO: 24623 - DNA, 25 bp, Artificial
  probe
  misc_feature (1)..(25): SEQ ID NO: 370; WAN0249K6_at; Start 21; Stop 45
ggcgtgacgaagcttttttcaattg

SEQ ID NO: 24624 - DNA, 25 bp, Artificial
  probe
  misc_feature (1)..(25): SEQ ID NO: 370; WAN0249K6_at; Start 59; Stop 83
attatgccatggaaagaactctgcc

SEQ ID NO: 24625 - DNA, 25 bp, Artificial
  probe
  misc_feature (1)..(25): SEQ ID NO: 370; WAN0249K6_at; Start 23; Stop 47
cgtgacgaagcttttttcaattgat

SEQ ID NO: 24626 - DNA, 25 bp, Artificial
  probe
  misc_feature (1)..(25): SEQ ID NO: 370; WAN0249K6_at; Start 63; Stop 87
tgccatggaaagaactctgccacaa

SEQ ID NO: 24627 - DNA, 25 bp, Artificial
  probe
  misc_feature (1)..(25): SEQ ID NO: 370; WAN0249K6_at; Start 3; Stop 27
tagaggcttttgtcaccaggcgtga

SEQ ID NO: 24628 - DNA, 25 bp, Artificial
  probe
  misc_feature (1)..(25): SEQ ID NO: 370; WAN0249K6_at; Start 9; Stop 33
cttttgtcaccaggcgtgacgaagc

SEQ ID NO: 24629 - DNA, 25 bp, Artificial
  probe
  misc_feature (1)..(25): SEQ ID NO: 370; WAN0249K6_at; Start 1; Stop 25
actagaggcttttgtcaccaggcgt

SEQ ID NO: 24630 - DNA, 25 bp, Artificial
  probe
  misc_feature (1)..(25): SEQ ID NO: 370; WAN0249K6_at; Start 52; Stop 76
aaagggaattatgccatggaaagaa

SEQ ID NO: 24631 - DNA, 25 bp, Artificial
  probe
  misc_feature (1)..(25): SEQ ID NO: 370; WAN0249K6_at; Start 15; Stop 39
tcaccaggcgtgacgaagctttttt

SEQ ID NO: 24632 - DNA, 25 bp, Artificial
  probe
  misc_feature (1)..(25): SEQ ID NO: 370; WAN0249K6_at; Start 57; Stop 81
gaattatgccatggaaagaactctg

SEQ ID NO: 24633 - DNA, 25 bp, Artificial
  probe
  misc_feature (1)..(25): SEQ ID NO: 370; WAN0249K6_at; Start 55; Stop 79
gggaattatgccatggaaagaactc

SEQ ID NO: 24634 - DNA, 25 bp, Artificial
  probe
  misc_feature (1)..(25): SEQ ID NO: 370; WAN0249K6_at; Start 50; Stop 74
caaaagggaattatgccatggaaag

SEQ ID NO: 24635 - DNA, 25 bp, Artificial
  probe
  misc_feature (1)..(25): SEQ ID NO: 370; WAN0249K6_at; Start 47; Stop 71
tttcaaaagggaattatgccatgga

SEQ ID NO: 24636 - DNA, 25 bp, Artificial
  probe
  misc_feature (1)..(25): SEQ ID NO: 370; WAN0249K6_at; Start 29; Stop 53
gaagcttttttcaattgatttcaaa

SEQ ID NO: 24637 - DNA, 25 bp, Artificial
  probe
  misc_feature (1)..(25): SEQ ID NO: 370; WAN0249K6_at; Start 79; Stop 103
ctgccacaaactcgctccaaaagtt

SEQ ID NO: 24638 - DNA, 25 bp, Artificial
  probe
  misc_feature (1)..(25): SEQ ID NO: 370; WAN0249K6_at; Start 69; Stop 93
ggaaagaactctgccacaaactcgc

SEQ ID NO: 24639 - DNA, 25 bp, Artificial
  probe
  misc_feature (1)..(25): SEQ ID NO: 370; WAN0249K6_at; Start 45; Stop 69
gatttcaaaagggaattatgccatg

SEQ ID NO: 24640 - DNA, 25 bp, Artificial
  probe
  misc_feature (1)..(25): SEQ ID NO: 370; WAN0249K6_at; Start 42; Stop 66
attgatttcaaaagggaattatgcc

SEQ ID NO: 24641 - DNA, 25 bp, Artificial
  probe
  misc_feature (1)..(25): SEQ ID NO: 370; WAN0249K6_at; Start 26; Stop 50
gacgaagcttttttcaattgatttc

SEQ ID NO: 24642 - DNA, 25 bp, Artificial
  probe
  misc_feature (1)..(25): SEQ ID NO: 370; WAN0249K6_at; Start 19; Stop 43
caggcgtgacgaagcttttttcaat

SEQ ID NO: 24643 - DNA, 25 bp, Artificial
  probe
  misc_feature (1)..(25): SEQ ID NO: 370; WAN0249K6_at; Start 7; Stop 31
ggcttttgtcaccaggcgtgacgaa

SEQ ID NO: 24644 - DNA, 25 bp, Artificial
  probe
  misc_feature (1)..(25): SEQ ID NO: 370; WAN0249K6_at; Start 61; Stop 85
tatgccatggaaagaactctgccac

SEQ ID NO: 24645 - DNA, 25 bp, Artificial
  probe
  misc_feature (1)..(25): SEQ ID NO: 370; WAN0249K6_at; Start 66; Stop 90
catggaaagaactctgccacaaact

SEQ ID NO: 24646 - DNA, 25 bp, Artificial
  probe
  misc_feature (1)..(25): SEQ ID NO: 370; WAN0249K6_at; Start 60; Stop 84
ttatgccatggaaagaactctgcca

SEQ ID NO: 24647 - DNA, 25 bp, Artificial
  probe
  misc_feature (1)..(25): SEQ ID NO: 370; WAN0249K6_at; Start 58; Stop 82
aattatgccatggaaagaactctgc

SEQ ID NO: 24648 - DNA, 25 bp, Artificial
  probe
  misc_feature (1)..(25): SEQ ID NO: 370; WAN0249K6_at; Start 13; Stop 37
tgtcaccaggcgtgacgaagctttt

SEQ ID NO: 24649 - DNA, 25 bp, Artificial
  probe
  misc_feature (1)..(25): SEQ ID NO: 370; WAN0249K6_at; Start 71; Stop 95
aaagaactctgccacaaactcgctc

SEQ ID NO: 24650 - DNA, 25 bp, Artificial
  probe
  misc_feature (1)..(25): SEQ ID NO: 370; WAN0249K6_at; Start 78; Stop 102
tctgccacaaactcgctccaaaagt

SEQ ID NO: 24651 - DNA, 25 bp, Artificial
  probe
  misc_feature (1)..(25): SEQ ID NO: 370; WAN0249K6_at; Start 64; Stop 88
gccatggaaagaactctgccacaaa

SEQ ID NO: 24652 - DNA, 25 bp, Artificial
  probe
  misc_feature (1)..(25): SEQ ID NO: 549; WAN0249K7_at; Start 81; Stop 105
gaaaaaagcttcgtcacgcctggtg

SEQ ID NO: 24653 - DNA, 25 bp, Artificial
  probe
  misc_feature (1)..(25): SEQ ID NO: 549; WAN0249K7_at; Start 38; Stop 62
ggcagagttctttccatggcataat

SEQ ID NO: 24654 - DNA, 25 bp, Artificial
  probe
  misc_feature (1)..(25): SEQ ID NO: 549; WAN0249K7_at; Start 19; Stop 43
acttttggagcgagtttgtggcaga

SEQ ID NO: 24655 - DNA, 25 bp, Artificial
  probe
  misc_feature (1)..(25): SEQ ID NO: 549; WAN0249K7_at; Start 79; Stop 103
ttgaaaaaagcttcgtcacgcctgg

SEQ ID NO: 24656 - DNA, 25 bp, Artificial
  probe
  misc_feature (1)..(25): SEQ ID NO: 549; WAN0249K7_at; Start 52; Stop 76
catggcataattcccttttgaaatc

SEQ ID NO: 24657 - DNA, 25 bp, Artificial
  probe
  misc_feature (1)..(25): SEQ ID NO: 549; WAN0249K7_at; Start 71; Stop 95
gaaatcaattgaaaaaagcttcgtc

SEQ ID NO: 24658 - DNA, 25 bp, Artificial
  probe
  misc_feature (1)..(25): SEQ ID NO: 549; WAN0249K7_at; Start 29; Stop 53
cgagtttgtggcagagttctttcca

SEQ ID NO: 24659 - DNA, 25 bp, Artificial
  probe
  misc_feature (1)..(25): SEQ ID NO: 549; WAN0249K7_at; Start 75; Stop 99
tcaattgaaaaaagcttcgtcacgc

SEQ ID NO: 24660 - DNA, 25 bp, Artificial
  probe
  misc_feature (1)..(25): SEQ ID NO: 549; WAN0249K7_at; Start 26; Stop 50
gagcgagtttgtggcagagttcttt

SEQ ID NO: 24661 - DNA, 25 bp, Artificial
  probe
  misc_feature (1)..(25): SEQ ID NO: 549; WAN0249K7_at; Start 40; Stop 64
cagagttctttccatggcataattc

SEQ ID NO: 24662 - DNA, 25 bp, Artificial
  probe
  misc_feature (1)..(25): SEQ ID NO: 549; WAN0249K7_at; Start 47; Stop 71
ctttccatggcataattcccttttg

SEQ ID NO: 24663 - DNA, 25 bp, Artificial
  probe
  misc_feature (1)..(25): SEQ ID NO: 549; WAN0249K7_at; Start 96; Stop 120
acgcctggtgacaaaagcctctagt

SEQ ID NO: 24664 - DNA, 25 bp, Artificial
  probe
  misc_feature (1)..(25): SEQ ID NO: 549; WAN0249K7_at; Start 36; Stop 60
gtggcagagttctttccatggcata

SEQ ID NO: 24665 - DNA, 25 bp, Artificial
  probe
  misc_feature (1)..(25): SEQ ID NO: 549; WAN0249K7_at; Start 32; Stop 56
gtttgtggcagagttctttccatgg

SEQ ID NO: 24666 - DNA, 25 bp, Artificial
  probe
  misc_feature (1)..(25): SEQ ID NO: 549; WAN0249K7_at; Start 85; Stop 109
aaagcttcgtcacgcctggtgacaa

SEQ ID NO: 24667 - DNA, 25 bp, Artificial
  probe
  misc_feature (1)..(25): SEQ ID NO: 549; WAN0249K7_at; Start 82; Stop 106
aaaaaagcttcgtcacgcctggtga

SEQ ID NO: 24668 - DNA, 25 bp, Artificial
  probe
  misc_feature (1)..(25): SEQ ID NO: 549; WAN0249K7_at; Start 43; Stop 67
agttctttccatggcataattccct

SEQ ID NO: 24669 - DNA, 25 bp, Artificial
  probe
  misc_feature (1)..(25): SEQ ID NO: 549; WAN0249K7_at; Start 83; Stop 107
aaaaagcttcgtcacgcctggtgac

SEQ ID NO: 24670 - DNA, 25 bp, Artificial
  probe
  misc_feature (1)..(25): SEQ ID NO: 549; WAN0249K7_at; Start 91; Stop 115
tcgtcacgcctggtgacaaaagcct

SEQ ID NO: 24671 - DNA, 25 bp, Artificial
  probe
  misc_feature (1)..(25): SEQ ID NO: 549; WAN0249K7_at; Start 18; Stop 42
aacttttggagcgagtttgtggcag

SEQ ID NO: 24672 - DNA, 25 bp, Artificial
  probe
  misc_feature (1)..(25): SEQ ID NO: 549; WAN0249K7_at; Start 55; Stop 79
ggcataattcccttttgaaatcaat

SEQ ID NO: 24673 - DNA, 25 bp, Artificial
  probe
  misc_feature (1)..(25): SEQ ID NO: 549; WAN0249K7_at; Start 84; Stop 108
aaaagcttcgtcacgcctggtgaca

SEQ ID NO: 24674 - DNA, 25 bp, Artificial
  probe
  misc_feature (1)..(25): SEQ ID NO: 549; WAN0249K7_at; Start 42; Stop 66
gagttctttccatggcataattccc

SEQ ID NO: 24675 - DNA, 25 bp, Artificial
  probe
  misc_feature (1)..(25): SEQ ID NO: 549; WAN0249K7_at; Start 88; Stop 112
gcttcgtcacgcctggtgacaaaag

SEQ ID NO: 24676 - DNA, 25 bp, Artificial
  probe
  misc_feature (1)..(25): SEQ ID NO: 549; WAN0249K7_at; Start 28; Stop 52
gcgagtttgtggcagagttctttcc

SEQ ID NO: 24677 - DNA, 25 bp, Artificial
  probe
  misc_feature (1)..(25): SEQ ID NO: 549; WAN0249K7_at; Start 34; Stop 58
ttgtggcagagttctttccatggca

SEQ ID NO: 24678 - DNA, 25 bp, Artificial
  probe
  misc_feature (1)..(25): SEQ ID NO: 549; WAN0249K7_at; Start 69; Stop 93
ttgaaatcaattgaaaaaagcttcg

SEQ ID NO: 24679 - DNA, 25 bp, Artificial
  probe
  misc_feature (1)..(25): SEQ ID NO: 549; WAN0249K7_at; Start 95; Stop 119
cacgcctggtgacaaaagcctctag

SEQ ID NO: 24680 - DNA, 25 bp, Artificial
  probe
  misc_feature (1)..(25): SEQ ID NO: 549; WAN0249K7_at; Start 80; Stop 104
tgaaaaaagcttcgtcacgcctggt

SEQ ID NO: 24681 - DNA, 25 bp, Artificial
  probe
  misc_feature (1)..(25): SEQ ID NO: 549; WAN0249K7_at; Start 50; Stop 74
tccatggcataattcccttttgaaa

SEQ ID NO: 24682 - DNA, 25 bp, Artificial
  probe
  misc_feature (1)..(25): SEQ ID NO: 549; WAN0249K7_at; Start 77; Stop 101
aattgaaaaaagcttcgtcacgcct

SEQ ID NO: 24683 - DNA, 25 bp, Artificial
  probe
  misc_feature (1)..(25): SEQ ID NO: 549; WAN0249K7_at; Start 76; Stop 100
caattgaaaaaagcttcgtcacgcc

SEQ ID NO: 24684 - DNA, 25 bp, Artificial
  probe
  misc_feature (1)..(25): SEQ ID NO: 549; WAN0249K7_at; Start 94; Stop 118
tcacgcctggtgacaaaagcctcta

SEQ ID NO: 24685 - DNA, 25 bp, Artificial
  probe
  misc_feature (1)..(25): SEQ ID NO: 549; WAN0249K7_at; Start 59; Stop 83
taattcccttttgaaatcaattgaa

SEQ ID NO: 24686 - DNA, 25 bp, Artificial
  probe
  misc_feature (1)..(25): SEQ ID NO: 4758; WAN0249K8_at; Start 342; Stop 366
gggtttacaaccatatgacgattag

SEQ ID NO: 24687 - DNA, 25 bp, Artificial
  probe
  misc_feature (1)..(25): SEQ ID NO: 4758; WAN0249K8_at; Start 309; Stop 333
tctgaaaattcgtcaagaggacacg

SEQ ID NO: 24688 - DNA, 25 bp, Artificial
  probe
  misc_feature (1)..(25): SEQ ID NO: 4758; WAN0249K8_at; Start 59; Stop 83
tgtaccatagcgtgattcgaatgtg

SEQ ID NO: 24689 - DNA, 25 bp, Artificial
  probe
  misc_feature (1)..(25): SEQ ID NO: 4758; WAN0249K8_at; Start 281; Stop 305
tgagcatttgtaacagaggcttaaa

SEQ ID NO: 24690 - DNA, 25 bp, Artificial
  probe
  misc_feature (1)..(25): SEQ ID NO: 4758; WAN0249K8_at; Start 64; Stop 88
catagcgtgattcgaatgtgatgcc

SEQ ID NO: 24691 - DNA, 25 bp, Artificial
  probe
  misc_feature (1)..(25): SEQ ID NO: 4758; WAN0249K8_at; Start 289; Stop 313
tgtaacagaggcttaaagattctga

SEQ ID NO: 24692 - DNA, 25 bp, Artificial
  probe
  misc_feature (1)..(25): SEQ ID NO: 4758; WAN0249K8_at; Start 160; Stop 184
aatatgggtaatcatttgtcgtagg

SEQ ID NO: 24693 - DNA, 25 bp, Artificial
  probe
  misc_feature (1)..(25): SEQ ID NO: 4758; WAN0249K8_at; Start 233; Stop 257
tgaaaaagtcagatttagctgctct

SEQ ID NO: 24694 - DNA, 25 bp, Artificial
  probe
  misc_feature (1)..(25): SEQ ID NO: 4758; WAN0249K8_at; Start 125; Stop 149
tgaaaccccttgaaaaatctagcta

SEQ ID NO: 24695 - DNA, 25 bp, Artificial
  probe
  misc_feature (1)..(25): SEQ ID NO: 4758; WAN0249K8_at; Start 83; Stop 107
gatgccaagttttctatgggaaaaa

SEQ ID NO: 24696 - DNA, 25 bp, Artificial
  probe
  misc_feature (1)..(25): SEQ ID NO: 4758; WAN0249K8_at; Start 72; Stop 96
gattcgaatgtgatgccaagttttc

SEQ ID NO: 24697 - DNA, 25 bp, Artificial
  probe
  misc_feature (1)..(25): SEQ ID NO: 4758; WAN0249K8_at; Start 312; Stop 336
gaaaattcgtcaagaggacacggtg

SEQ ID NO: 24698 - DNA, 25 bp, Artificial
  probe
  misc_feature (1)..(25): SEQ ID NO: 4758; WAN0249K8_at; Start 206; Stop 230
gacaaggctcacagcagttaaatct

SEQ ID NO: 24699 - DNA, 25 bp, Artificial
  probe
  misc_feature (1)..(25): SEQ ID NO: 4758; WAN0249K8_at; Start 220; Stop 244
cagttaaatcttctgaaaaagtcag

SEQ ID NO: 24700 - DNA, 25 bp, Artificial
  probe
  misc_feature (1)..(25): SEQ ID NO: 4758; WAN0249K8_at; Start 349; Stop 373
caaccatatgacgattagaaaagcc

SEQ ID NO: 24701 - DNA, 25 bp, Artificial
  probe
  misc_feature (1)..(25): SEQ ID NO: 4758; WAN0249K8_at; Start 197; Stop 221
tattgtccagacaaggctcacagca

SEQ ID NO: 24702 - DNA, 25 bp, Artificial
  probe
  misc_feature (1)..(25): SEQ ID NO: 4758; WAN0249K8_at; Start 352; Stop 376
ccatatgacgattagaaaagcctga

SEQ ID NO: 24703 - DNA, 25 bp, Artificial
  probe
  misc_feature (1)..(25): SEQ ID NO: 4758; WAN0249K8_at; Start 77; Stop 101
gaatgtgatgccaagttttctatgg

SEQ ID NO: 24704 - DNA, 25 bp, Artificial
  probe
  misc_feature (1)..(25): SEQ ID NO: 4758; WAN0249K8_at; Start 5; Stop 29
cgtttattattataccttgaaaatg

SEQ ID NO: 24705 - DNA, 25 bp, Artificial
  probe
  misc_feature (1)..(25): SEQ ID NO: 4758; WAN0249K8_at; Start 211; Stop 235
ggctcacagcagttaaatcttctga

SEQ ID NO: 24706 - DNA, 25 bp, Artificial
  probe
  misc_feature (1)..(25): SEQ ID NO: 4758; WAN0249K8_at; Start 132; Stop 156
ccttgaaaaatctagctaaataggg

SEQ ID NO: 24707 - DNA, 25 bp, Artificial
  probe
  misc_feature (1)..(25): SEQ ID NO: 4758; WAN0249K8_at; Start 172; Stop 196
catttgtcgtaggttttgtctgaaa

SEQ ID NO: 24708 - DNA, 25 bp, Artificial
  probe
  misc_feature (1)..(25): SEQ ID NO: 4758; WAN0249K8_at; Start 180; Stop 204
gtaggttttgtctgaaatattgtcc

SEQ ID NO: 24709 - DNA, 25 bp, Artificial
  probe
  misc_feature (1)..(25): SEQ ID NO: 4758; WAN0249K8_at; Start 68; Stop 92
gcgtgattcgaatgtgatgccaagt

SEQ ID NO: 24710 - DNA, 25 bp, Artificial
  probe
  misc_feature (1)..(25): SEQ ID NO: 4758; WAN0249K8_at; Start 53; Stop 77
gttttttgtaccatagcgtgattcg

SEQ ID NO: 24711 - DNA, 25 bp, Artificial
  probe
  misc_feature (1)..(25): SEQ ID NO: 4758; WAN0249K8_at; Start 15; Stop 39
tataccttgaaaatgattttcagtc

SEQ ID NO: 24712 - DNA, 25 bp, Artificial
  probe
  misc_feature (1)..(25): SEQ ID NO: 4758; WAN0249K8_at; Start 317; Stop 341
ttcgtcaagaggacacggtgataag

SEQ ID NO: 24713 - DNA, 25 bp, Artificial
  probe
  misc_feature (1)..(25): SEQ ID NO: 4758; WAN0249K8_at; Start 29; Stop 53
gattttcagtcaatagttttttcag

SEQ ID NO: 24714 - DNA, 25 bp, Artificial
  probe
  misc_feature (1)..(25): SEQ ID NO: 4758; WAN0249K8_at; Start 242; Stop 266
cagatttagctgctctttttgtgct

SEQ ID NO: 24715 - DNA, 25 bp, Artificial
  probe
  misc_feature (1)..(25): SEQ ID NO: 4758; WAN0249K8_at; Start 146; Stop 170
gctaaatagggtataatatgggtaa

SEQ ID NO: 24716 - DNA, 25 bp, Artificial
  probe
  misc_feature (1)..(25): SEQ ID NO: 4758; WAN0249K8_at; Start 202; Stop 226
tccagacaaggctcacagcagttaa

SEQ ID NO: 24717 - DNA, 25 bp, Artificial
  probe
  misc_feature (1)..(25): SEQ ID NO: 4758; WAN0249K8_at; Start 190; Stop 214
tctgaaatattgtccagacaaggct

SEQ ID NO: 24718 - DNA, 25 bp, Artificial
  probe
  misc_feature (1)..(25): SEQ ID NO: 4758; WAN0249K8_at; Start 48; Stop 72
tttcagttttttgtaccatagcgtg

SEQ ID NO: 24719 - DNA, 25 bp, Artificial
  probe
  misc_feature (1)..(25): SEQ ID NO: 4758; WAN0249K8_at; Start 298; Stop 322
ggcttaaagattctgaaaattcgtc

SEQ ID NO: 24720 - DNA, 25 bp, Artificial
  probe
  misc_feature (1)..(25): SEQ ID NO: 4594; WAN0249K9_at; Start 4; Stop 28
ggcttttctaatcgtcatatggttg

SEQ ID NO: 24721 - DNA, 25 bp, Artificial
  probe
  misc_feature (1)..(25): SEQ ID NO: 4594; WAN0249K9_at; Start 222; Stop 246
cctatttagctagatttttcaaggg

SEQ ID NO: 24722 - DNA, 25 bp, Artificial
  probe
  misc_feature (1)..(25): SEQ ID NO: 4594; WAN0249K9_at; Start 113; Stop 137
cacaaaaagagcagctaaatctgac

SEQ ID NO: 24723 - DNA, 25 bp, Artificial
  probe
  misc_feature (1)..(25): SEQ ID NO: 4594; WAN0249K9_at; Start 65; Stop 89
cagaatctttaagcctctgttacaa

SEQ ID NO: 24724 - DNA, 25 bp, Artificial
  probe
  misc_feature (1)..(25): SEQ ID NO: 4594; WAN0249K9_at; Start 1; Stop 25
tcaggcttttctaatcgtcatatgg

SEQ ID NO: 24725 - DNA, 25 bp, Artificial
  probe
  misc_feature (1)..(25): SEQ ID NO: 4594; WAN0249K9_at; Start 121; Stop 145
gagcagctaaatctgactttttcag

SEQ ID NO: 24726 - DNA, 25 bp, Artificial
  probe
  misc_feature (1)..(25): SEQ ID NO: 4594; WAN0249K9_at; Start 126; Stop 150
gctaaatctgactttttcagaagat

SEQ ID NO: 24727 - DNA, 25 bp, Artificial
  probe
  misc_feature (1)..(25): SEQ ID NO: 4594; WAN0249K9_at; Start 186; Stop 210
gacaaaacctacgacaaatgattac

SEQ ID NO: 24728 - DNA, 25 bp, Artificial
  probe
  misc_feature (1)..(25): SEQ ID NO: 4594; WAN0249K9_at; Start 174; Stop 198
gacaatatttcagacaaaacctacg

SEQ ID NO: 24729 - DNA, 25 bp, Artificial
  probe
  misc_feature (1)..(25): SEQ ID NO: 4594; WAN0249K9_at; Start 19; Stop 43
catatggttgtaaaccccttatcac

SEQ ID NO: 24730 - DNA, 25 bp, Artificial
  probe
  misc_feature (1)..(25): SEQ ID NO: 4594; WAN0249K9_at; Start 211; Stop 235
ccatattataccctatttagctaga

SEQ ID NO: 24731 - DNA, 25 bp, Artificial
  probe
  misc_feature (1)..(25): SEQ ID NO: 4594; WAN0249K9_at; Start 106; Stop 130
aaaaaagcacaaaaagagcagctaa

SEQ ID NO: 24732 - DNA, 25 bp, Artificial
  probe
  misc_feature (1)..(25): SEQ ID NO: 4594; WAN0249K9_at; Start 156; Stop 180
tgctgtgagccttgtctggacaata

SEQ ID NO: 24733 - DNA, 25 bp, Artificial
  probe
  misc_feature (1)..(25): SEQ ID NO: 4594; WAN0249K9_at; Start 15; Stop 39
tcgtcatatggttgtaaacccctta

SEQ ID NO: 24734 - DNA, 25 bp, Artificial
  probe
  misc_feature (1)..(25): SEQ ID NO: 4594; WAN0249K9_at; Start 44; Stop 68
cgtgtcctcttgacgaattttcaga

SEQ ID NO: 24735 - DNA, 25 bp, Artificial
  probe
  misc_feature (1)..(25): SEQ ID NO: 4594; WAN0249K9_at; Start 301; Stop 325
gaatcacgctatggtacaaaaaact

SEQ ID NO: 24736 - DNA, 25 bp, Artificial
  probe
  misc_feature (1)..(25): SEQ ID NO: 4594; WAN0249K9_at; Start 152; Stop 176
taactgctgtgagccttgtctggac

SEQ ID NO: 24737 - DNA, 25 bp, Artificial
  probe
  misc_feature (1)..(25): SEQ ID NO: 4594; WAN0249K9_at; Start 55; Stop 79
gacgaattttcagaatctttaagcc

SEQ ID NO: 24738 - DNA, 25 bp, Artificial
  probe
  misc_feature (1)..(25): SEQ ID NO: 4594; WAN0249K9_at; Start 200; Stop 224
caaatgattacccatattataccct

SEQ ID NO: 24739 - DNA, 25 bp, Artificial
  probe
  misc_feature (1)..(25): SEQ ID NO: 4594; WAN0249K9_at; Start 36; Stop 60
cttatcaccgtgtcctcttgacgaa

SEQ ID NO: 24740 - DNA, 25 bp, Artificial
  probe
  misc_feature (1)..(25): SEQ ID NO: 4594; WAN0249K9_at; Start 305; Stop 329
cacgctatggtacaaaaaactgaaa

SEQ ID NO: 24741 - DNA, 25 bp, Artificial
  probe
  misc_feature (1)..(25): SEQ ID NO: 4594; WAN0249K9_at; Start 348; Stop 372
cattttcaaggtataataataaacg

SEQ ID NO: 24742 - DNA, 25 bp, Artificial
  probe
  misc_feature (1)..(25): SEQ ID NO: 4594; WAN0249K9_at; Start 294; Stop 318
cacattcgaatcacgctatggtaca

SEQ ID NO: 24743 - DNA, 25 bp, Artificial
  probe
  misc_feature (1)..(25): SEQ ID NO: 4594; WAN0249K9_at; Start 272; Stop 296
tttcccatagaaaacttggcatcac

SEQ ID NO: 24744 - DNA, 25 bp, Artificial
  probe
  misc_feature (1)..(25): SEQ ID NO: 4594; WAN0249K9_at; Start 72; Stop 96
tttaagcctctgttacaaatgctca

SEQ ID NO: 24745 - DNA, 25 bp, Artificial
  probe
  misc_feature (1)..(25): SEQ ID NO: 4594; WAN0249K9_at; Start 142; Stop 166
tcagaagatttaactgctgtgagcc

SEQ ID NO: 24746 - DNA, 25 bp, Artificial
  probe
  misc_feature (1)..(25): SEQ ID NO: 4594; WAN0249K9_at; Start 193; Stop 217
cctacgacaaatgattacccatatt

SEQ ID NO: 24747 - DNA, 25 bp, Artificial
  probe
  misc_feature (1)..(25): SEQ ID NO: 4594; WAN0249K9_at; Start 162; Stop 186
gagccttgtctggacaatatttcag

SEQ ID NO: 24748 - DNA, 25 bp, Artificial
  probe
  misc_feature (1)..(25): SEQ ID NO: 4594; WAN0249K9_at; Start 145; Stop 169
gaagatttaactgctgtgagccttg

SEQ ID NO: 24749 - DNA, 25 bp, Artificial
  probe
  misc_feature (1)..(25): SEQ ID NO: 4594; WAN0249K9_at; Start 12; Stop 36
taatcgtcatatggttgtaaacccc

SEQ ID NO: 24750 - DNA, 25 bp, Artificial
  probe
  misc_feature (1)..(25): SEQ ID NO: 4594; WAN0249K9_at; Start 181; Stop 205
tttcagacaaaacctacgacaaatg

SEQ ID NO: 24751 - DNA, 25 bp, Artificial
  probe
  misc_feature (1)..(25): SEQ ID NO: 4594; WAN0249K9_at; Start 270; Stop 294
tttttcccatagaaaacttggcatc

SEQ ID NO: 24752 - DNA, 25 bp, Artificial
  probe
  misc_feature (1)..(25): SEQ ID NO: 4594; WAN0249K9_at; Start 38; Stop 62
tatcaccgtgtcctcttgacgaatt

SEQ ID NO: 24753 - DNA, 25 bp, Artificial
  probe
  misc_feature (1)..(25): SEQ ID NO: 4594; WAN0249K9_at; Start 330; Stop 354
aaactattgactgaaaatcattttc

SEQ ID NO: 24754 - DNA, 25 bp, Artificial
  probe
  misc_feature (1)..(25): SEQ ID NO: 3612; WAN0249KA_at; Start 56; Stop 80
aattagtttaagacatgacgcatga

SEQ ID NO: 24755 - DNA, 25 bp, Artificial
  probe
  misc_feature (1)..(25): SEQ ID NO: 3612; WAN0249KA_at; Start 5; Stop 29
ggattggctcaatcaattggttaaa

SEQ ID NO: 24756 - DNA, 25 bp, Artificial
  probe
  misc_feature (1)..(25): SEQ ID NO: 3612; WAN0249KA_at; Start 61; Stop 85
gtttaagacatgacgcatgatatca

SEQ ID NO: 24757 - DNA, 25 bp, Artificial
  probe
  misc_feature (1)..(25): SEQ ID NO: 3612; WAN0249KA_at; Start 142; Stop 166
cgctccgttaggtgcgagacaaaaa

SEQ ID NO: 24758 - DNA, 25 bp, Artificial
  probe
  misc_feature (1)..(25): SEQ ID NO: 3612; WAN0249KA_at; Start 106; Stop 130
ggtgcgttttttgattaagtgacta

SEQ ID NO: 24759 - DNA, 25 bp, Artificial
  probe
  misc_feature (1)..(25): SEQ ID NO: 3612; WAN0249KA_at; Start 100; Stop 124
tgatatggtgcgttttttgattaag

SEQ ID NO: 24760 - DNA, 25 bp, Artificial
  probe
  misc_feature (1)..(25): SEQ ID NO: 3612; WAN0249KA_at; Start 143; Stop 167
gctccgttaggtgcgagacaaaaaa

SEQ ID NO: 24761 - DNA, 25 bp, Artificial
  probe
  misc_feature (1)..(25): SEQ ID NO: 3612; WAN0249KA_at; Start 23; Stop 47
ggttaaaagctcatttgaatagaaa

SEQ ID NO: 24762 - DNA, 25 bp, Artificial
  probe
  misc_feature (1)..(25): SEQ ID NO: 3612; WAN0249KA_at; Start 18; Stop 42
caattggttaaaagctcatttgaat

SEQ ID NO: 24763 - DNA, 25 bp, Artificial
  probe
  misc_feature (1)..(25): SEQ ID NO: 3612; WAN0249KA_at; Start 120; Stop 144
ttaagtgactattagtttgtctcgc

SEQ ID NO: 24764 - DNA, 25 bp, Artificial
  probe
  misc_feature (1)..(25): SEQ ID NO: 3612; WAN0249KA_at; Start 13; Stop 37
tcaatcaattggttaaaagctcatt

SEQ ID NO: 24765 - DNA, 25 bp, Artificial
  probe
  misc_feature (1)..(25): SEQ ID NO: 3612; WAN0249KA_at; Start 133; Stop 157
agtttgtctcgctccgttaggtgcg

SEQ ID NO: 24766 - DNA, 25 bp, Artificial
  probe
  misc_feature (1)..(25): SEQ ID NO: 3612; WAN0249KA_at; Start 132; Stop 156
tagtttgtctcgctccgttaggtgc

SEQ ID NO: 24767 - DNA, 25 bp, Artificial
  probe
  misc_feature (1)..(25): SEQ ID NO: 3612; WAN0249KA_at; Start 64; Stop 88
taagacatgacgcatgatatcaaac

SEQ ID NO: 24768 - DNA, 25 bp, Artificial
  probe
  misc_feature (1)..(25): SEQ ID NO: 3612; WAN0249KA_at; Start 51; Stop 75
tagtcaattagtttaagacatgacg

SEQ ID NO: 24769 - DNA, 25 bp, Artificial
  probe
  misc_feature (1)..(25): SEQ ID NO: 3612; WAN0249KA_at; Start 72; Stop 96
gacgcatgatatcaaactttttagt

SEQ ID NO: 24770 - DNA, 25 bp, Artificial
  probe
  misc_feature (1)..(25): SEQ ID NO: 3612; WAN0249KA_at; Start 55; Stop 79
caattagtttaagacatgacgcatg

SEQ ID NO: 24771 - DNA, 25 bp, Artificial
  probe
  misc_feature (1)..(25): SEQ ID NO: 3612; WAN0249KA_at; Start 31; Stop 55
gctcatttgaatagaaagtatagtc

SEQ ID NO: 24772 - DNA, 25 bp, Artificial
  probe
  misc_feature (1)..(25): SEQ ID NO: 3612; WAN0249KA_at; Start 38; Stop 62
tgaatagaaagtatagtcaattagt

SEQ ID NO: 24773 - DNA, 25 bp, Artificial
  probe
  misc_feature (1)..(25): SEQ ID NO: 3612; WAN0249KA_at; Start 69; Stop 93
catgacgcatgatatcaaacttttt

SEQ ID NO: 24774 - DNA, 25 bp, Artificial
  probe
  misc_feature (1)..(25): SEQ ID NO: 3612; WAN0249KA_at; Start 154; Stop 178
tgcgagacaaaaaaaacacccgcta

SEQ ID NO: 24775 - DNA, 25 bp, Artificial
  probe
  misc_feature (1)..(25): SEQ ID NO: 3612; WAN0249KA_at; Start 136; Stop 160
ttgtctcgctccgttaggtgcgaga

SEQ ID NO: 24776 - DNA, 25 bp, Artificial
  probe
  misc_feature (1)..(25): SEQ ID NO: 3612; WAN0249KA_at; Start 129; Stop 153
tattagtttgtctcgctccgttagg

SEQ ID NO: 24777 - DNA, 25 bp, Artificial
  probe
  misc_feature (1)..(25): SEQ ID NO: 3612; WAN0249KA_at; Start 1; Stop 25
gagtggattggctcaatcaattggt

SEQ ID NO: 24778 - DNA, 25 bp, Artificial
  probe
  misc_feature (1)..(25): SEQ ID NO: 3612; WAN0249KA_at; Start 59; Stop 83
tagtttaagacatgacgcatgatat

SEQ ID NO: 24779 - DNA, 25 bp, Artificial
  probe
  misc_feature (1)..(25): SEQ ID NO: 3612; WAN0249KA_at; Start 124; Stop 148
gtgactattagtttgtctcgctccg

SEQ ID NO: 24780 - DNA, 25 bp, Artificial
  probe
  misc_feature (1)..(25): SEQ ID NO: 3612; WAN0249KA_at; Start 139; Stop 163
tctcgctccgttaggtgcgagacaa

SEQ ID NO: 24781 - DNA, 25 bp, Artificial
  probe
  misc_feature (1)..(25): SEQ ID NO: 3612; WAN0249KA_at; Start 11; Stop 35
gctcaatcaattggttaaaagctca

SEQ ID NO: 24782 - DNA, 25 bp, Artificial
  probe
  misc_feature (1)..(25): SEQ ID NO: 3612; WAN0249KA_at; Start 67; Stop 91
gacatgacgcatgatatcaaacttt

SEQ ID NO: 24783 - DNA, 25 bp, Artificial
  probe
  misc_feature (1)..(25): SEQ ID NO: 3612; WAN0249KA_at; Start 141; Stop 165
tcgctccgttaggtgcgagacaaaa

SEQ ID NO: 24784 - DNA, 25 bp, Artificial
  probe
  misc_feature (1)..(25): SEQ ID NO: 3612; WAN0249KA_at; Start 126; Stop 150
gactattagtttgtctcgctccgtt

SEQ ID NO: 24785 - DNA, 25 bp, Artificial
  probe
  misc_feature (1)..(25): SEQ ID NO: 3612; WAN0249KA_at; Start 8; Stop 32
ttggctcaatcaattggttaaaagc

SEQ ID NO: 24786 - DNA, 25 bp, Artificial
  probe
  misc_feature (1)..(25): SEQ ID NO: 3612; WAN0249KA_at; Start 87; Stop 111
actttttagtttttgatatggtgcg

SEQ ID NO: 24787 - DNA, 25 bp, Artificial
  probe
  misc_feature (1)..(25): SEQ ID NO: 3612; WAN0249KA_at; Start 134; Stop 158
gtttgtctcgctccgttaggtgcga

SEQ ID NO: 24788 - DNA, 25 bp, Artificial
  probe
  misc_feature (1)..(25): SEQ ID NO: 4510; WAN0249KB_at; Start 111; Stop 135
tcttaaactaattgactatactttc

SEQ ID NO: 24789 - DNA, 25 bp, Artificial
  probe
  misc_feature (1)..(25): SEQ ID NO: 4510; WAN0249KB_at; Start 22; Stop 46
cgcacctaacggagcgagacaaact

SEQ ID NO: 24790 - DNA, 25 bp, Artificial
  probe
  misc_feature (1)..(25): SEQ ID NO: 4510; WAN0249KB_at; Start 37; Stop 61
gagacaaactaatagtcacttaatc

SEQ ID NO: 24791 - DNA, 25 bp, Artificial
  probe
  misc_feature (1)..(25): SEQ ID NO: 4510; WAN0249KB_at; Start 97; Stop 121
tatcatgcgtcatgtcttaaactaa

SEQ ID NO: 24792 - DNA, 25 bp, Artificial
  probe
  misc_feature (1)..(25): SEQ ID NO: 4510; WAN0249KB_at; Start 144; Stop 168
tgagcttttaaccaattgattgagc

SEQ ID NO: 24793 - DNA, 25 bp, Artificial
  probe
  misc_feature (1)..(25): SEQ ID NO: 4510; WAN0249KB_at; Start 100; Stop 124
catgcgtcatgtcttaaactaattg

SEQ ID NO: 24794 - DNA, 25 bp, Artificial
  probe
  misc_feature (1)..(25): SEQ ID NO: 4510; WAN0249KB_at; Start 134; Stop 158
tctattcaaatgagcttttaaccaa

SEQ ID NO: 24795 - DNA, 25 bp, Artificial
  probe
  misc_feature (1)..(25): SEQ ID NO: 4510; WAN0249KB_at; Start 150; Stop 174
tttaaccaattgattgagccaatcc

SEQ ID NO: 24796 - DNA, 25 bp, Artificial
  probe
  misc_feature (1)..(25): SEQ ID NO: 4510; WAN0249KB_at; Start 25; Stop 49
acctaacggagcgagacaaactaat

SEQ ID NO: 24797 - DNA, 25 bp, Artificial
  probe
  misc_feature (1)..(25): SEQ ID NO: 4510; WAN0249KB_at; Start 23; Stop 47
gcacctaacggagcgagacaaacta

SEQ ID NO: 24798 - DNA, 25 bp, Artificial
  probe
  misc_feature (1)..(25): SEQ ID NO: 4510; WAN0249KB_at; Start 33; Stop 57
gagcgagacaaactaatagtcactt

SEQ ID NO: 24799 - DNA, 25 bp, Artificial
  probe
  misc_feature (1)..(25): SEQ ID NO: 4510; WAN0249KB_at; Start 107; Stop 131
catgtcttaaactaattgactatac

SEQ ID NO: 24800 - DNA, 25 bp, Artificial
  probe
  misc_feature (1)..(25): SEQ ID NO: 4510; WAN0249KB_at; Start 86; Stop 110
aaaaagtttgatatcatgcgtcatg

SEQ ID NO: 24801 - DNA, 25 bp, Artificial
  probe
  misc_feature (1)..(25): SEQ ID NO: 4510; WAN0249KB_at; Start 1; Stop 25
tagcgggtgttttttttgtctcgca

SEQ ID NO: 24802 - DNA, 25 bp, Artificial
  probe
  misc_feature (1)..(25): SEQ ID NO: 4510; WAN0249KB_at; Start 124; Stop 148
gactatactttctattcaaatgagc

SEQ ID NO: 24803 - DNA, 25 bp, Artificial
  probe
  misc_feature (1)..(25): SEQ ID NO: 4510; WAN0249KB_at; Start 140; Stop 164
caaatgagcttttaaccaattgatt

SEQ ID NO: 24804 - DNA, 25 bp, Artificial
  probe
  misc_feature (1)..(25): SEQ ID NO: 4510; WAN0249KB_at; Start 84; Stop 108
ctaaaaagtttgatatcatgcgtca

SEQ ID NO: 24805 - DNA, 25 bp, Artificial
  probe
  misc_feature (1)..(25): SEQ ID NO: 4510; WAN0249KB_at; Start 154; Stop 178
accaattgattgagccaatccactc

SEQ ID NO: 24806 - DNA, 25 bp, Artificial
  probe
  misc_feature (1)..(25): SEQ ID NO: 4510; WAN0249KB_at; Start 35; Stop 59
gcgagacaaactaatagtcacttaa

SEQ ID NO: 24807 - DNA, 25 bp, Artificial
  probe
  misc_feature (1)..(25): SEQ ID NO: 4510; WAN0249KB_at; Start 26; Stop 50
cctaacggagcgagacaaactaata

SEQ ID NO: 24808 - DNA, 25 bp, Artificial
  probe
  misc_feature (1)..(25): SEQ ID NO: 4510; WAN0249KB_at; Start 147; Stop 171
gcttttaaccaattgattgagccaa

SEQ ID NO: 24809 - DNA, 25 bp, Artificial
  probe
  misc_feature (1)..(25): SEQ ID NO: 4510; WAN0249KB_at; Start 152; Stop 176
taaccaattgattgagccaatccac

SEQ ID NO: 24810 - DNA, 25 bp, Artificial
  probe
  misc_feature (1)..(25): SEQ ID NO: 4510; WAN0249KB_at; Start 31; Stop 55
cggagcgagacaaactaatagtcac

SEQ ID NO: 24811 - DNA, 25 bp, Artificial
  probe
  misc_feature (1)..(25): SEQ ID NO: 4510; WAN0249KB_at; Start 51; Stop 75
gtcacttaatcaaaaaacgcaccat

SEQ ID NO: 24812 - DNA, 25 bp, Artificial
  probe
  misc_feature (1)..(25): SEQ ID NO: 4510; WAN0249KB_at; Start 88; Stop 112
aaagtttgatatcatgcgtcatgtc

SEQ ID NO: 24813 - DNA, 25 bp, Artificial
  probe
  misc_feature (1)..(25): SEQ ID NO: 4510; WAN0249KB_at; Start 68; Stop 92
cgcaccatatcaaaaactaaaaagt

SEQ ID NO: 24814 - DNA, 25 bp, Artificial
  probe
  misc_feature (1)..(25): SEQ ID NO: 4510; WAN0249KB_at; Start 94; Stop 118
tgatatcatgcgtcatgtcttaaac

SEQ ID NO: 24815 - DNA, 25 bp, Artificial
  probe
  misc_feature (1)..(25): SEQ ID NO: 4510; WAN0249KB_at; Start 61; Stop 85
caaaaaacgcaccatatcaaaaact

SEQ ID NO: 24816 - DNA, 25 bp, Artificial
  probe
  misc_feature (1)..(25): SEQ ID NO: 4510; WAN0249KB_at; Start 55; Stop 79
cttaatcaaaaaacgcaccatatca

SEQ ID NO: 24817 - DNA, 25 bp, Artificial
  probe
  misc_feature (1)..(25): SEQ ID NO: 4510; WAN0249KB_at; Start 103; Stop 127
gcgtcatgtcttaaactaattgact

SEQ ID NO: 24818 - DNA, 25 bp, Artificial
  probe
  misc_feature (1)..(25): SEQ ID NO: 4510; WAN0249KB_at; Start 53; Stop 77
cacttaatcaaaaaacgcaccatat

SEQ ID NO: 24819 - DNA, 25 bp, Artificial
  probe
  misc_feature (1)..(25): SEQ ID NO: 4510; WAN0249KB_at; Start 28; Stop 52
taacggagcgagacaaactaatagt

SEQ ID NO: 24820 - DNA, 25 bp, Artificial
  probe
  misc_feature (1)..(25): SEQ ID NO: 4510; WAN0249KB_at; Start 49; Stop 73
tagtcacttaatcaaaaaacgcacc

SEQ ID NO: 24821 - DNA, 25 bp, Artificial
  probe
  misc_feature (1)..(25): SEQ ID NO: 4510; WAN0249KB_at; Start 29; Stop 53
aacggagcgagacaaactaatagtc

SEQ ID NO: 24822 - DNA, 25 bp, Artificial
  probe
  misc_feature (1)..(25): SEQ ID NO: 3551; WAN0249KC_at; Start 52; Stop 76
gaggcaatacgttttcaaagctact

SEQ ID NO: 24823 - DNA, 25 bp, Artificial
  probe
  misc_feature (1)..(25): SEQ ID NO: 3551; WAN0249KC_at; Start 28; Stop 52
aatcattatttaactaaatctttgg

SEQ ID NO: 24824 - DNA, 25 bp, Artificial
  probe
  misc_feature (1)..(25): SEQ ID NO: 3551; WAN0249KC_at; Start 51; Stop 75
ggaggcaatacgttttcaaagctac

SEQ ID NO: 24825 - DNA, 25 bp, Artificial
  probe
  misc_feature (1)..(25): SEQ ID NO: 3551; WAN0249KC_at; Start 47; Stop 71
ctttggaggcaatacgttttcaaag

SEQ ID NO: 24826 - DNA, 25 bp, Artificial
  probe
  misc_feature (1)..(25): SEQ ID NO: 3551; WAN0249KC_at; Start 49; Stop 73
ttggaggcaatacgttttcaaagct

SEQ ID NO: 24827 - DNA, 25 bp, Artificial
  probe
  misc_feature (1)..(25): SEQ ID NO: 3551; WAN0249KC_at; Start 89; Stop 113
gttttgagccttcaacacagattac

SEQ ID NO: 24828 - DNA, 25 bp, Artificial
  probe
  misc_feature (1)..(25): SEQ ID NO: 3551; WAN0249KC_at; Start 91; Stop 115
tttgagccttcaacacagattacta

SEQ ID NO: 24829 - DNA, 25 bp, Artificial
  probe
  misc_feature (1)..(25): SEQ ID NO: 3551; WAN0249KC_at; Start 90; Stop 114
ttttgagccttcaacacagattact

SEQ ID NO: 24830 - DNA, 25 bp, Artificial
  probe
  misc_feature (1)..(25): SEQ ID NO: 3551; WAN0249KC_at; Start 82; Stop 106
accataggttttgagccttcaacac

SEQ ID NO: 24831 - DNA, 25 bp, Artificial
  probe
  misc_feature (1)..(25): SEQ ID NO: 3551; WAN0249KC_at; Start 83; Stop 107
ccataggttttgagccttcaacaca

SEQ ID NO: 24832 - DNA, 25 bp, Artificial
  probe
  misc_feature (1)..(25): SEQ ID NO: 3551; WAN0249KC_at; Start 30; Stop 54
tcattatttaactaaatctttggag

SEQ ID NO: 24833 - DNA, 25 bp, Artificial
  probe
  misc_feature (1)..(25): SEQ ID NO: 3551; WAN0249KC_at; Start 78; Stop 102
ttttaccataggttttgagccttca

SEQ ID NO: 24834 - DNA, 25 bp, Artificial
  probe
  misc_feature (1)..(25): SEQ ID NO: 3551; WAN0249KC_at; Start 45; Stop 69
atctttggaggcaatacgttttcaa

SEQ ID NO: 24835 - DNA, 25 bp, Artificial
  probe
  misc_feature (1)..(25): SEQ ID NO: 3551; WAN0249KC_at; Start 53; Stop 77
aggcaatacgttttcaaagctactt

SEQ ID NO: 24836 - DNA, 25 bp, Artificial
  probe
  misc_feature (1)..(25): SEQ ID NO: 3551; WAN0249KC_at; Start 50; Stop 74
tggaggcaatacgttttcaaagcta

SEQ ID NO: 24837 - DNA, 25 bp, Artificial
  probe
  misc_feature (1)..(25): SEQ ID NO: 3551; WAN0249KC_at; Start 46; Stop 70
tctttggaggcaatacgttttcaaa

SEQ ID NO: 24838 - DNA, 25 bp, Artificial
  probe
  misc_feature (1)..(25): SEQ ID NO: 3551; WAN0249KC_at; Start 29; Stop 53
atcattatttaactaaatctttgga

SEQ ID NO: 24839 - DNA, 25 bp, Artificial
  probe
  misc_feature (1)..(25): SEQ ID NO: 3551; WAN0249KC_at; Start 33; Stop 57
ttatttaactaaatctttggaggca

SEQ ID NO: 24840 - DNA, 25 bp, Artificial
  probe
  misc_feature (1)..(25): SEQ ID NO: 3551; WAN0249KC_at; Start 79; Stop 103
tttaccataggttttgagccttcaa

SEQ ID NO: 24841 - DNA, 25 bp, Artificial
  probe
  misc_feature (1)..(25): SEQ ID NO: 3551; WAN0249KC_at; Start 27; Stop 51
aaatcattatttaactaaatctttg

SEQ ID NO: 24842 - DNA, 25 bp, Artificial
  probe
  misc_feature (1)..(25): SEQ ID NO: 3551; WAN0249KC_at; Start 31; Stop 55
cattatttaactaaatctttggagg

SEQ ID NO: 24843 - DNA, 25 bp, Artificial
  probe
  misc_feature (1)..(25): SEQ ID NO: 3551; WAN0249KC_at; Start 80; Stop 104
ttaccataggttttgagccttcaac

SEQ ID NO: 24844 - DNA, 25 bp, Artificial
  probe
  misc_feature (1)..(25): SEQ ID NO: 3551; WAN0249KC_at; Start 88; Stop 112
ggttttgagccttcaacacagatta

SEQ ID NO: 24845 - DNA, 25 bp, Artificial
  probe
  misc_feature (1)..(25): SEQ ID NO: 3551; WAN0249KC_at; Start 81; Stop 105
taccataggttttgagccttcaaca

SEQ ID NO: 24846 - DNA, 25 bp, Artificial
  probe
  misc_feature (1)..(25): SEQ ID NO: 3551; WAN0249KC_at; Start 85; Stop 109
ataggttttgagccttcaacacaga

SEQ ID NO: 24847 - DNA, 25 bp, Artificial
  probe
  misc_feature (1)..(25): SEQ ID NO: 3551; WAN0249KC_at; Start 48; Stop 72
tttggaggcaatacgttttcaaagc

SEQ ID NO: 24848 - DNA, 25 bp, Artificial
  probe
  misc_feature (1)..(25): SEQ ID NO: 3551; WAN0249KC_at; Start 87; Stop 111
aggttttgagccttcaacacagatt

SEQ ID NO: 24849 - DNA, 25 bp, Artificial
  probe
  misc_feature (1)..(25): SEQ ID NO: 3551; WAN0249KC_at; Start 84; Stop 108
cataggttttgagccttcaacacag

SEQ ID NO: 24850 - DNA, 25 bp, Artificial
  probe
  misc_feature (1)..(25): SEQ ID NO: 3551; WAN0249KC_at; Start 86; Stop 110
taggttttgagccttcaacacagat

SEQ ID NO: 24851 - DNA, 25 bp, Artificial
  probe
  misc_feature (1)..(25): SEQ ID NO: 4521; WAN0249KD_at; Start 46; Stop 70
tttgaaaacgtattgcctccaaaga

SEQ ID NO: 24852 - DNA, 25 bp, Artificial
  probe
  misc_feature (1)..(25): SEQ ID NO: 4521; WAN0249KD_at; Start 42; Stop 66
tagctttgaaaacgtattgcctcca

SEQ ID NO: 24853 - DNA, 25 bp, Artificial
  probe
  misc_feature (1)..(25): SEQ ID NO: 4521; WAN0249KD_at; Start 63; Stop 87
tccaaagatttagttaaataatgat

SEQ ID NO: 24854 - DNA, 25 bp, Artificial
  probe
  misc_feature (1)..(25): SEQ ID NO: 4521; WAN0249KD_at; Start 5; Stop 29
aatctgtgttgaaggctcaaaacct

SEQ ID NO: 24855 - DNA, 25 bp, Artificial
  probe
  misc_feature (1)..(25): SEQ ID NO: 4521; WAN0249KD_at; Start 7; Stop 31
tctgtgttgaaggctcaaaacctat

SEQ ID NO: 24856 - DNA, 25 bp, Artificial
  probe
  misc_feature (1)..(25): SEQ ID NO: 4521; WAN0249KD_at; Start 40; Stop 64
agtagctttgaaaacgtattgcctc

SEQ ID NO: 24857 - DNA, 25 bp, Artificial
  probe
  misc_feature (1)..(25): SEQ ID NO: 4521; WAN0249KD_at; Start 45; Stop 69
ctttgaaaacgtattgcctccaaag

SEQ ID NO: 24858 - DNA, 25 bp, Artificial
  probe
  misc_feature (1)..(25): SEQ ID NO: 4521; WAN0249KD_at; Start 77; Stop 101
taaataatgatttaacacaaaaaga

SEQ ID NO: 24859 - DNA, 25 bp, Artificial
  probe
  misc_feature (1)..(25): SEQ ID NO: 4521; WAN0249KD_at; Start 14; Stop 38
tgaaggctcaaaacctatggtaaaa

SEQ ID NO: 24860 - DNA, 25 bp, Artificial
  probe
  misc_feature (1)..(25): SEQ ID NO: 4521; WAN0249KD_at; Start 12; Stop 36
gttgaaggctcaaaacctatggtaa

SEQ ID NO: 24861 - DNA, 25 bp, Artificial
  probe
  misc_feature (1)..(25): SEQ ID NO: 4521; WAN0249KD_at; Start 1; Stop 25
tagtaatctgtgttgaaggctcaaa

SEQ ID NO: 24862 - DNA, 25 bp, Artificial
  probe
  misc_feature (1)..(25): SEQ ID NO: 4521; WAN0249KD_at; Start 10; Stop 34
gtgttgaaggctcaaaacctatggt

SEQ ID NO: 24863 - DNA, 25 bp, Artificial
  probe
  misc_feature (1)..(25): SEQ ID NO: 4521; WAN0249KD_at; Start 39; Stop 63
aagtagctttgaaaacgtattgcct

SEQ ID NO: 24864 - DNA, 25 bp, Artificial
  probe
  misc_feature (1)..(25): SEQ ID NO: 4521; WAN0249KD_at; Start 6; Stop 30
atctgtgttgaaggctcaaaaccta

SEQ ID NO: 24865 - DNA, 25 bp, Artificial
  probe
  misc_feature (1)..(25): SEQ ID NO: 4521; WAN0249KD_at; Start 8; Stop 32
ctgtgttgaaggctcaaaacctatg

SEQ ID NO: 24866 - DNA, 25 bp, Artificial
  probe
  misc_feature (1)..(25): SEQ ID NO: 4521; WAN0249KD_at; Start 4; Stop 28
taatctgtgttgaaggctcaaaacc

SEQ ID NO: 24867 - DNA, 25 bp, Artificial
  probe
  misc_feature (1)..(25): SEQ ID NO: 4521; WAN0249KD_at; Start 44; Stop 68
gctttgaaaacgtattgcctccaaa

SEQ ID NO: 24868 - DNA, 25 bp, Artificial
  probe
  misc_feature (1)..(25): SEQ ID NO: 4521; WAN0249KD_at; Start 80; Stop 104
ataatgatttaacacaaaaagaaat

SEQ ID NO: 24869 - DNA, 25 bp, Artificial
  probe
  misc_feature (1)..(25): SEQ ID NO: 4521; WAN0249KD_at; Start 13; Stop 37
ttgaaggctcaaaacctatggtaaa

SEQ ID NO: 24870 - DNA, 25 bp, Artificial
  probe
  misc_feature (1)..(25): SEQ ID NO: 4521; WAN0249KD_at; Start 11; Stop 35
tgttgaaggctcaaaacctatggta

SEQ ID NO: 24871 - DNA, 25 bp, Artificial
  probe
  misc_feature (1)..(25): SEQ ID NO: 4521; WAN0249KD_at; Start 64; Stop 88
ccaaagatttagttaaataatgatt

SEQ ID NO: 24872 - DNA, 25 bp, Artificial
  probe
  misc_feature (1)..(25): SEQ ID NO: 4521; WAN0249KD_at; Start 83; Stop 107
atgatttaacacaaaaagaaattat

SEQ ID NO: 24873 - DNA, 25 bp, Artificial
  probe
  misc_feature (1)..(25): SEQ ID NO: 4521; WAN0249KD_at; Start 43; Stop 67
agctttgaaaacgtattgcctccaa

SEQ ID NO: 24874 - DNA, 25 bp, Artificial
  probe
  misc_feature (1)..(25): SEQ ID NO: 4521; WAN0249KD_at; Start 65; Stop 89
caaagatttagttaaataatgattt

SEQ ID NO: 24875 - DNA, 25 bp, Artificial
  probe
  misc_feature (1)..(25): SEQ ID NO: 4521; WAN0249KD_at; Start 61; Stop 85
cctccaaagatttagttaaataatg

SEQ ID NO: 24876 - DNA, 25 bp, Artificial
  probe
  misc_feature (1)..(25): SEQ ID NO: 4521; WAN0249KD_at; Start 62; Stop 86
ctccaaagatttagttaaataatga

SEQ ID NO: 24877 - DNA, 25 bp, Artificial
  probe
  misc_feature (1)..(25): SEQ ID NO: 4521; WAN0249KD_at; Start 2; Stop 26
agtaatctgtgttgaaggctcaaaa

SEQ ID NO: 24878 - DNA, 25 bp, Artificial
  probe
  misc_feature (1)..(25): SEQ ID NO: 4521; WAN0249KD_at; Start 9; Stop 33
tgtgttgaaggctcaaaacctatgg

SEQ ID NO: 24879 - DNA, 25 bp, Artificial
  probe
  misc_feature (1)..(25): SEQ ID NO: 4521; WAN0249KD_at; Start 59; Stop 83
tgcctccaaagatttagttaaataa

SEQ ID NO: 24880 - DNA, 25 bp, Artificial
  probe
  misc_feature (1)..(25): SEQ ID NO: 4521; WAN0249KD_at; Start 41; Stop 65
gtagctttgaaaacgtattgcctcc

SEQ ID NO: 24881 - DNA, 25 bp, Artificial
  probe
  misc_feature (1)..(25): SEQ ID NO: 4521; WAN0249KD_at; Start 3; Stop 27
gtaatctgtgttgaaggctcaaaac

SEQ ID NO: 24882 - DNA, 25 bp, Artificial
  probe
  misc_feature (1)..(25): SEQ ID NO: 4521; WAN0249KD_at; Start 47; Stop 71
ttgaaaacgtattgcctccaaagat

SEQ ID NO: 24883 - DNA, 25 bp, Artificial
  probe
  misc_feature (1)..(25): SEQ ID NO: 4643; WAN0249KE_at; Start 32; Stop 56
tcaagaaaaagttacctcaatatta

SEQ ID NO: 24884 - DNA, 25 bp, Artificial
  probe
  misc_feature (1)..(25): SEQ ID NO: 4643; WAN0249KE_at; Start 128; Stop 152
aactcatcgtgcaattaaaaacaag

SEQ ID NO: 24885 - DNA, 25 bp, Artificial
  probe
  misc_feature (1)..(25): SEQ ID NO: 4643; WAN0249KE_at; Start 132; Stop 156
catcgtgcaattaaaaacaaggatt

SEQ ID NO: 24886 - DNA, 25 bp, Artificial
  probe
  misc_feature (1)..(25): SEQ ID NO: 4643; WAN0249KE_at; Start 103; Stop 127
tcttgattcatgataatatttcagt

SEQ ID NO: 24887 - DNA, 25 bp, Artificial
  probe
  misc_feature (1)..(25): SEQ ID NO: 4643; WAN0249KE_at; Start 76; Stop 100
taagtacaattctaaattaactcca

SEQ ID NO: 24888 - DNA, 25 bp, Artificial
  probe
  misc_feature (1)..(25): SEQ ID NO: 4643; WAN0249KE_at; Start 117; Stop 141
aatatttcagtaactcatcgtgcaa

SEQ ID NO: 24889 - DNA, 25 bp, Artificial
  probe
  misc_feature (1)..(25): SEQ ID NO: 4643; WAN0249KE_at; Start 130; Stop 154
ctcatcgtgcaattaaaaacaagga

SEQ ID NO: 24890 - DNA, 25 bp, Artificial
  probe
  misc_feature (1)..(25): SEQ ID NO: 4643; WAN0249KE_at; Start 42; Stop 66
gttacctcaatattaataaagtaca

SEQ ID NO: 24891 - DNA, 25 bp, Artificial
  probe
  misc_feature (1)..(25): SEQ ID NO: 4643; WAN0249KE_at; Start 88; Stop 112
taaattaactccaattcttgattca

SEQ ID NO: 24892 - DNA, 25 bp, Artificial
  probe
  misc_feature (1)..(25): SEQ ID NO: 4643; WAN0249KE_at; Start 129; Stop 153
actcatcgtgcaattaaaaacaagg

SEQ ID NO: 24893 - DNA, 25 bp, Artificial
  probe
  misc_feature (1)..(25): SEQ ID NO: 4643; WAN0249KE_at; Start 94; Stop 118
aactccaattcttgattcatgataa

SEQ ID NO: 24894 - DNA, 25 bp, Artificial
  probe
  misc_feature (1)..(25): SEQ ID NO: 4643; WAN0249KE_at; Start 29; Stop 53
ttatcaagaaaaagttacctcaata

SEQ ID NO: 24895 - DNA, 25 bp, Artificial
  probe
  misc_feature (1)..(25): SEQ ID NO: 4643; WAN0249KE_at; Start 131; Stop 155
tcatcgtgcaattaaaaacaaggat

SEQ ID NO: 24896 - DNA, 25 bp, Artificial
  probe
  misc_feature (1)..(25): SEQ ID NO: 4643; WAN0249KE_at; Start 90; Stop 114
aattaactccaattcttgattcatg

SEQ ID NO: 24897 - DNA, 25 bp, Artificial
  probe
  misc_feature (1)..(25): SEQ ID NO: 4643; WAN0249KE_at; Start 116; Stop 140
taatatttcagtaactcatcgtgca

SEQ ID NO: 24898 - DNA, 25 bp, Artificial
  probe
  misc_feature (1)..(25): SEQ ID NO: 4643; WAN0249KE_at; Start 124; Stop 148
cagtaactcatcgtgcaattaaaaa

SEQ ID NO: 24899 - DNA, 25 bp, Artificial
  probe
  misc_feature (1)..(25): SEQ ID NO: 4643; WAN0249KE_at; Start 127; Stop 151
taactcatcgtgcaattaaaaacaa

SEQ ID NO: 24900 - DNA, 25 bp, Artificial
  probe
  misc_feature (1)..(25): SEQ ID NO: 4643; WAN0249KE_at; Start 46; Stop 70
cctcaatattaataaagtacaattc

SEQ ID NO: 24901 - DNA, 25 bp, Artificial
  probe
  misc_feature (1)..(25): SEQ ID NO: 4643; WAN0249KE_at; Start 12; Stop 36
ctccattatttcttcctttatcaag

SEQ ID NO: 24902 - DNA, 25 bp, Artificial
  probe
  misc_feature (1)..(25): SEQ ID NO: 4643; WAN0249KE_at; Start 30; Stop 54
tatcaagaaaaagttacctcaatat

SEQ ID NO: 24903 - DNA, 25 bp, Artificial
  probe
  misc_feature (1)..(25): SEQ ID NO: 4643; WAN0249KE_at; Start 126; Stop 150
gtaactcatcgtgcaattaaaaaca

SEQ ID NO: 24904 - DNA, 25 bp, Artificial
  probe
  misc_feature (1)..(25): SEQ ID NO: 4643; WAN0249KE_at; Start 65; Stop 89
caattctaaattaagtacaattcta

SEQ ID NO: 24905 - DNA, 25 bp, Artificial
  probe
  misc_feature (1)..(25): SEQ ID NO: 4643; WAN0249KE_at; Start 3; Stop 27
taacttcctctccattatttcttcc

SEQ ID NO: 24906 - DNA, 25 bp, Artificial
  probe
  misc_feature (1)..(25): SEQ ID NO: 4643; WAN0249KE_at; Start 121; Stop 145
tttcagtaactcatcgtgcaattaa

SEQ ID NO: 24907 - DNA, 25 bp, Artificial
  probe
  misc_feature (1)..(25): SEQ ID NO: 4643; WAN0249KE_at; Start 119; Stop 143
tatttcagtaactcatcgtgcaatt

SEQ ID NO: 24908 - DNA, 25 bp, Artificial
  probe
  misc_feature (1)..(25): SEQ ID NO: 4643; WAN0249KE_at; Start 14; Stop 38
ccattatttcttcctttatcaagaa

SEQ ID NO: 24909 - DNA, 25 bp, Artificial
  probe
  misc_feature (1)..(25): SEQ ID NO: 4643; WAN0249KE_at; Start 123; Stop 147
tcagtaactcatcgtgcaattaaaa

SEQ ID NO: 24910 - DNA, 25 bp, Artificial
  probe
  misc_feature (1)..(25): SEQ ID NO: 4643; WAN0249KE_at; Start 93; Stop 117
taactccaattcttgattcatgata

SEQ ID NO: 24911 - DNA, 25 bp, Artificial
  probe
  misc_feature (1)..(25): SEQ ID NO: 4643; WAN0249KE_at; Start 133; Stop 157
atcgtgcaattaaaaacaaggattt

SEQ ID NO: 24912 - DNA, 25 bp, Artificial
  probe
  misc_feature (1)..(25): SEQ ID NO: 4643; WAN0249KE_at; Start 49; Stop 73
caatattaataaagtacaattctaa

SEQ ID NO: 24913 - DNA, 25 bp, Artificial
  probe
  misc_feature (1)..(25): SEQ ID NO: 4643; WAN0249KE_at; Start 122; Stop 146
ttcagtaactcatcgtgcaattaaa

SEQ ID NO: 24914 - DNA, 25 bp, Artificial
  probe
  misc_feature (1)..(25): SEQ ID NO: 4643; WAN0249KE_at; Start 83; Stop 107
aattctaaattaactccaattcttg

SEQ ID NO: 24915 - DNA, 25 bp, Artificial
  probe
  misc_feature (1)..(25): SEQ ID NO: 4643; WAN0249KE_at; Start 114; Stop 138
gataatatttcagtaactcatcgtg

SEQ ID NO: 24916 - DNA, 25 bp, Artificial
  probe
  misc_feature (1)..(25): SEQ ID NO: 4643; WAN0249KE_at; Start 96; Stop 120
ctccaattcttgattcatgataata

SEQ ID NO: 24917 - DNA, 25 bp, Artificial
  probe
  misc_feature (1)..(25): SEQ ID NO: 158; WAN0249KF_at; Start 11; Stop 35
ttttaattgcacgatgagttactga

SEQ ID NO: 24918 - DNA, 25 bp, Artificial
  probe
  misc_feature (1)..(25): SEQ ID NO: 158; WAN0249KF_at; Start 51; Stop 75
caagaattggagttaatttagaatt

SEQ ID NO: 24919 - DNA, 25 bp, Artificial
  probe
  misc_feature (1)..(25): SEQ ID NO: 158; WAN0249KF_at; Start 102; Stop 126
taatattgaggtaactttttcttga

SEQ ID NO: 24920 - DNA, 25 bp, Artificial
  probe
  misc_feature (1)..(25): SEQ ID NO: 158; WAN0249KF_at; Start 69; Stop 93
tagaattgtacttaatttagaattg

SEQ ID NO: 24921 - DNA, 25 bp, Artificial
  probe
  misc_feature (1)..(25): SEQ ID NO: 158; WAN0249KF_at; Start 132; Stop 156
gaagaaataatggagaggaagttag

SEQ ID NO: 24922 - DNA, 25 bp, Artificial
  probe
  misc_feature (1)..(25): SEQ ID NO: 158; WAN0249KF_at; Start 18; Stop 42
tgcacgatgagttactgaaatatta

SEQ ID NO: 24923 - DNA, 25 bp, Artificial
  probe
  misc_feature (1)..(25): SEQ ID NO: 158; WAN0249KF_at; Start 43; Stop 67
tcatgaatcaagaattggagttaat

SEQ ID NO: 24924 - DNA, 25 bp, Artificial
  probe
  misc_feature (1)..(25): SEQ ID NO: 158; WAN0249KF_at; Start 41; Stop 65
tatcatgaatcaagaattggagtta

SEQ ID NO: 24925 - DNA, 25 bp, Artificial
  probe
  misc_feature (1)..(25): SEQ ID NO: 158; WAN0249KF_at; Start 122; Stop 146
cttgataaaggaagaaataatggag

SEQ ID NO: 24926 - DNA, 25 bp, Artificial
  probe
  misc_feature (1)..(25): SEQ ID NO: 158; WAN0249KF_at; Start 10; Stop 34
tttttaattgcacgatgagttactg

SEQ ID NO: 24927 - DNA, 25 bp, Artificial
  probe
  misc_feature (1)..(25): SEQ ID NO: 158; WAN0249KF_at; Start 129; Stop 153
aaggaagaaataatggagaggaagt

SEQ ID NO: 24928 - DNA, 25 bp, Artificial
  probe
  misc_feature (1)..(25): SEQ ID NO: 158; WAN0249KF_at; Start 5; Stop 29
ccttgtttttaattgcacgatgagt

SEQ ID NO: 24929 - DNA, 25 bp, Artificial
  probe
  misc_feature (1)..(25): SEQ ID NO: 158; WAN0249KF_at; Start 58; Stop 82
tggagttaatttagaattgtactta

SEQ ID NO: 24930 - DNA, 25 bp, Artificial
  probe
  misc_feature (1)..(25): SEQ ID NO: 158; WAN0249KF_at; Start 8; Stop 32
tgtttttaattgcacgatgagttac

SEQ ID NO: 24931 - DNA, 25 bp, Artificial
  probe
  misc_feature (1)..(25): SEQ ID NO: 158; WAN0249KF_at; Start 1; Stop 25
aaatccttgtttttaattgcacgat

SEQ ID NO: 24932 - DNA, 25 bp, Artificial
  probe
  misc_feature (1)..(25): SEQ ID NO: 158; WAN0249KF_at; Start 20; Stop 44
cacgatgagttactgaaatattatc

SEQ ID NO: 24933 - DNA, 25 bp, Artificial
  probe
  misc_feature (1)..(25): SEQ ID NO: 158; WAN0249KF_at; Start 38; Stop 62
tattatcatgaatcaagaattggag

SEQ ID NO: 24934 - DNA, 25 bp, Artificial
  probe
  misc_feature (1)..(25): SEQ ID NO: 158; WAN0249KF_at; Start 25; Stop 49
tgagttactgaaatattatcatgaa

SEQ ID NO: 24935 - DNA, 25 bp, Artificial
  probe
  misc_feature (1)..(25): SEQ ID NO: 158; WAN0249KF_at; Start 125; Stop 149
gataaaggaagaaataatggagagg

SEQ ID NO: 24936 - DNA, 25 bp, Artificial
  probe
  misc_feature (1)..(25): SEQ ID NO: 158; WAN0249KF_at; Start 47; Stop 71
gaatcaagaattggagttaatttag

SEQ ID NO: 24937 - DNA, 25 bp, Artificial
  probe
  misc_feature (1)..(25): SEQ ID NO: 158; WAN0249KF_at; Start 127; Stop 151
taaaggaagaaataatggagaggaa

SEQ ID NO: 24938 - DNA, 25 bp, Artificial
  probe
  misc_feature (1)..(25): SEQ ID NO: 158; WAN0249KF_at; Start 13; Stop 37
ttaattgcacgatgagttactgaaa

SEQ ID NO: 24939 - DNA, 25 bp, Artificial
  probe
  misc_feature (1)..(25): SEQ ID NO: 158; WAN0249KF_at; Start 88; Stop 112
gaattgtactttattaatattgagg

SEQ ID NO: 24940 - DNA, 25 bp, Artificial
  probe
  misc_feature (1)..(25): SEQ ID NO: 158; WAN0249KF_at; Start 12; Stop 36
tttaattgcacgatgagttactgaa

SEQ ID NO: 24941 - DNA, 25 bp, Artificial
  probe
  misc_feature (1)..(25): SEQ ID NO: 158; WAN0249KF_at; Start 92; Stop 116
tgtactttattaatattgaggtaac

SEQ ID NO: 24942 - DNA, 25 bp, Artificial
  probe
  misc_feature (1)..(25): SEQ ID NO: 158; WAN0249KF_at; Start 15; Stop 39
aattgcacgatgagttactgaaata

SEQ ID NO: 24943 - DNA, 25 bp, Artificial
  probe
  misc_feature (1)..(25): SEQ ID NO: 158; WAN0249KF_at; Start 4; Stop 28
tccttgtttttaattgcacgatgag

SEQ ID NO: 24944 - DNA, 25 bp, Artificial
  probe
  misc_feature (1)..(25): SEQ ID NO: 158; WAN0249KF_at; Start 14; Stop 38
taattgcacgatgagttactgaaat

SEQ ID NO: 24945 - DNA, 25 bp, Artificial
  probe
  misc_feature (1)..(25): SEQ ID NO: 158; WAN0249KF_at; Start 105; Stop 129
tattgaggtaactttttcttgataa

SEQ ID NO: 24946 - DNA, 25 bp, Artificial
  probe
  misc_feature (1)..(25): SEQ ID NO: 158; WAN0249KF_at; Start 133; Stop 157
aagaaataatggagaggaagttaga

SEQ ID NO: 24947 - DNA, 25 bp, Artificial
  probe
  misc_feature (1)..(25): SEQ ID NO: 158; WAN0249KF_at; Start 30; Stop 54
tactgaaatattatcatgaatcaag

SEQ ID NO: 24948 - DNA, 25 bp, Artificial
  probe
  misc_feature (1)..(25): SEQ ID NO: 158; WAN0249KF_at; Start 17; Stop 41
ttgcacgatgagttactgaaatatt

SEQ ID NO: 24949 - DNA, 25 bp, Artificial
  probe
  misc_feature (1)..(25): SEQ ID NO: 158; WAN0249KF_at; Start 21; Stop 45
acgatgagttactgaaatattatca

SEQ ID NO: 24950 - DNA, 25 bp, Artificial
  probe
  misc_feature (1)..(25): SEQ ID NO: 158; WAN0249KF_at; Start 23; Stop 47
gatgagttactgaaatattatcatg

SEQ ID NO: 24951 - DNA, 25 bp, Artificial
  probe
  misc_feature (1)..(25): SEQ ID NO: 5895; WAN0249KG_at; Start 11; Stop 35
ctgtaggacttactttttcagaggg

SEQ ID NO: 24952 - DNA, 25 bp, Artificial
  probe
  misc_feature (1)..(25): SEQ ID NO: 5895; WAN0249KG_at; Start 6; Stop 30
ttgaactgtaggacttactttttca

SEQ ID NO: 24953 - DNA, 25 bp, Artificial
  probe
  misc_feature (1)..(25): SEQ ID NO: 5895; WAN0249KG_at; Start 19; Stop 43
cttactttttcagagggctccaaat

SEQ ID NO: 24954 - DNA, 25 bp, Artificial
  probe
  misc_feature (1)..(25): SEQ ID NO: 5895; WAN0249KG_at; Start 9; Stop 33
aactgtaggacttactttttcagag

SEQ ID NO: 24955 - DNA, 25 bp, Artificial
  probe
  misc_feature (1)..(25): SEQ ID NO: 5895; WAN0249KG_at; Start 16; Stop 40
ggacttactttttcagagggctcca

SEQ ID NO: 24956 - DNA, 25 bp, Artificial
  probe
  misc_feature (1)..(25): SEQ ID NO: 5895; WAN0249KG_at; Start 14; Stop 38
taggacttactttttcagagggctc

SEQ ID NO: 24957 - DNA, 25 bp, Artificial
  probe
  misc_feature (1)..(25): SEQ ID NO: 5895; WAN0249KG_at; Start 8; Stop 32
gaactgtaggacttactttttcaga

SEQ ID NO: 24958 - DNA, 25 bp, Artificial
  probe
  misc_feature (1)..(25): SEQ ID NO: 5895; WAN0249KG_at; Start 7; Stop 31
tgaactgtaggacttactttttcag

SEQ ID NO: 24959 - DNA, 25 bp, Artificial
  probe
  misc_feature (1)..(25): SEQ ID NO: 5895; WAN0249KG_at; Start 12; Stop 36
tgtaggacttactttttcagagggc

SEQ ID NO: 24960 - DNA, 25 bp, Artificial
  probe
  misc_feature (1)..(25): SEQ ID NO: 5895; WAN0249KG_at; Start 17; Stop 41
gacttactttttcagagggctccaa

SEQ ID NO: 24961 - DNA, 25 bp, Artificial
  probe
  misc_feature (1)..(25): SEQ ID NO: 5895; WAN0249KG_at; Start 10; Stop 34
actgtaggacttactttttcagagg

SEQ ID NO: 24962 - DNA, 25 bp, Artificial
  probe
  misc_feature (1)..(25): SEQ ID NO: 140; WAN0249KH_at; Start 11; Stop 35
tggagccctctgaaaaagtaagtcc

SEQ ID NO: 24963 - DNA, 25 bp, Artificial
  probe
  misc_feature (1)..(25): SEQ ID NO: 140; WAN0249KH_at; Start 15; Stop 39
gccctctgaaaaagtaagtcctaca

SEQ ID NO: 24964 - DNA, 25 bp, Artificial
  probe
  misc_feature (1)..(25): SEQ ID NO: 140; WAN0249KH_at; Start 13; Stop 37
gagccctctgaaaaagtaagtccta

SEQ ID NO: 24965 - DNA, 25 bp, Artificial
  probe
  misc_feature (1)..(25): SEQ ID NO: 140; WAN0249KH_at; Start 17; Stop 41
cctctgaaaaagtaagtcctacagt

SEQ ID NO: 24966 - DNA, 25 bp, Artificial
  probe
  misc_feature (1)..(25): SEQ ID NO: 140; WAN0249KH_at; Start 18; Stop 42
ctctgaaaaagtaagtcctacagtt

SEQ ID NO: 24967 - DNA, 25 bp, Artificial
  probe
  misc_feature (1)..(25): SEQ ID NO: 140; WAN0249KH_at; Start 19; Stop 43
tctgaaaaagtaagtcctacagttc

SEQ ID NO: 24968 - DNA, 25 bp, Artificial
  probe
  misc_feature (1)..(25): SEQ ID NO: 140; WAN0249KH_at; Start 20; Stop 44
ctgaaaaagtaagtcctacagttca

SEQ ID NO: 24969 - DNA, 25 bp, Artificial
  probe
  misc_feature (1)..(25): SEQ ID NO: 140; WAN0249KH_at; Start 21; Stop 45
tgaaaaagtaagtcctacagttcaa

SEQ ID NO: 24970 - DNA, 25 bp, Artificial
  probe
  misc_feature (1)..(25): SEQ ID NO: 140; WAN0249KH_at; Start 8; Stop 32
atttggagccctctgaaaaagtaag

SEQ ID NO: 24971 - DNA, 25 bp, Artificial
  probe
  misc_feature (1)..(25): SEQ ID NO: 140; WAN0249KH_at; Start 10; Stop 34
ttggagccctctgaaaaagtaagtc

SEQ ID NO: 24972 - DNA, 25 bp, Artificial
  probe
  misc_feature (1)..(25): SEQ ID NO: 140; WAN0249KH_at; Start 16; Stop 40
ccctctgaaaaagtaagtcctacag

SEQ ID NO: 24973 - DNA, 25 bp, Artificial
  probe
  misc_feature (1)..(25): SEQ ID NO: 5892; WAN0249KI_at; Start 214; Stop 238
tatattattatctcaacgaaaagct

SEQ ID NO: 24974 - DNA, 25 bp, Artificial
  probe
  misc_feature (1)..(25): SEQ ID NO: 5892; WAN0249KI_at; Start 84; Stop 108
tacatatgttttgtattaaaccaaa

SEQ ID NO: 24975 - DNA, 25 bp, Artificial
  probe
  misc_feature (1)..(25): SEQ ID NO: 5892; WAN0249KI_at; Start 62; Stop 86
gacttttgttgactcacattattac

SEQ ID NO: 24976 - DNA, 25 bp, Artificial
  probe
  misc_feature (1)..(25): SEQ ID NO: 5892; WAN0249KI_at; Start 8; Stop 32
catcctctcaatttgaatttagtag

SEQ ID NO: 24977 - DNA, 25 bp, Artificial
  probe
  misc_feature (1)..(25): SEQ ID NO: 5892; WAN0249KI_at; Start 265; Stop 289
tacatattaaactagtcaatcttgg

SEQ ID NO: 24978 - DNA, 25 bp, Artificial
  probe
  misc_feature (1)..(25): SEQ ID NO: 5892; WAN0249KI_at; Start 42; Stop 66
gatagtatggtacaaaaacagactt

SEQ ID NO: 24979 - DNA, 25 bp, Artificial
  probe
  misc_feature (1)..(25): SEQ ID NO: 5892; WAN0249KI_at; Start 167; Stop 191
gcatatacctcaagccgtttagcaa

SEQ ID NO: 24980 - DNA, 25 bp, Artificial
  probe
  misc_feature (1)..(25): SEQ ID NO: 5892; WAN0249KI_at; Start 58; Stop 82
aacagacttttgttgactcacatta

SEQ ID NO: 24981 - DNA, 25 bp, Artificial
  probe
  misc_feature (1)..(25): SEQ ID NO: 5892; WAN0249KI_at; Start 72; Stop 96
gactcacattattacatatgttttg

SEQ ID NO: 24982 - DNA, 25 bp, Artificial
  probe
  misc_feature (1)..(25): SEQ ID NO: 5892; WAN0249KI_at; Start 164; Stop 188
gtagcatatacctcaagccgtttag

SEQ ID NO: 24983 - DNA, 25 bp, Artificial
  probe
  misc_feature (1)..(25): SEQ ID NO: 5892; WAN0249KI_at; Start 105; Stop 129
caaaatcaatactatttttggagta

SEQ ID NO: 24984 - DNA, 25 bp, Artificial
  probe
  misc_feature (1)..(25): SEQ ID NO: 5892; WAN0249KI_at; Start 296; Stop 320
tatattgcttaatgagtggacacct

SEQ ID NO: 24985 - DNA, 25 bp, Artificial
  probe
  misc_feature (1)..(25): SEQ ID NO: 5892; WAN0249KI_at; Start 230; Stop 254
cgaaaagctacactattaaaaatat

SEQ ID NO: 24986 - DNA, 25 bp, Artificial
  probe
  misc_feature (1)..(25): SEQ ID NO: 5892; WAN0249KI_at; Start 162; Stop 186
cagtagcatatacctcaagccgttt

SEQ ID NO: 24987 - DNA, 25 bp, Artificial
  probe
  misc_feature (1)..(25): SEQ ID NO: 5892; WAN0249KI_at; Start 172; Stop 196
tacctcaagccgtttagcaattaga

SEQ ID NO: 24988 - DNA, 25 bp, Artificial
  probe
  misc_feature (1)..(25): SEQ ID NO: 5892; WAN0249KI_at; Start 309; Stop 333
gagtggacacctctattttagaaac

SEQ ID NO: 24989 - DNA, 25 bp, Artificial
  probe
  misc_feature (1)..(25): SEQ ID NO: 5892; WAN0249KI_at; Start 32; Stop 56
gatttttcaagatagtatggtacaa

SEQ ID NO: 24990 - DNA, 25 bp, Artificial
  probe
  misc_feature (1)..(25): SEQ ID NO: 5892; WAN0249KI_at; Start 267; Stop 291
catattaaactagtcaatcttggta

SEQ ID NO: 24991 - DNA, 25 bp, Artificial
  probe
  misc_feature (1)..(25): SEQ ID NO: 5892; WAN0249KI_at; Start 45; Stop 69
agtatggtacaaaaacagacttttg

SEQ ID NO: 24992 - DNA, 25 bp, Artificial
  probe
  misc_feature (1)..(25): SEQ ID NO: 5892; WAN0249KI_at; Start 27; Stop 51
tagtagatttttcaagatagtatgg

SEQ ID NO: 24993 - DNA, 25 bp, Artificial
  probe
  misc_feature (1)..(25): SEQ ID NO: 5892; WAN0249KI_at; Start 226; Stop 250
tcaacgaaaagctacactattaaaa

SEQ ID NO: 24994 - DNA, 25 bp, Artificial
  probe
  misc_feature (1)..(25): SEQ ID NO: 5892; WAN0249KI_at; Start 159; Stop 183
taacagtagcatatacctcaagccg

SEQ ID NO: 24995 - DNA, 25 bp, Artificial
  probe
  misc_feature (1)..(25): SEQ ID NO: 5892; WAN0249KI_at; Start 145; Stop 169
taaaatcatttctataacagtagca

SEQ ID NO: 24996 - DNA, 25 bp, Artificial
  probe
  misc_feature (1)..(25): SEQ ID NO: 5892; WAN0249KI_at; Start 281; Stop 305
caatcttggtatttttatattgctt

SEQ ID NO: 24997 - DNA, 25 bp, Artificial
  probe
  misc_feature (1)..(25): SEQ ID NO: 5892; WAN0249KI_at; Start 312; Stop 336
tggacacctctattttagaaacaaa

SEQ ID NO: 24998 - DNA, 25 bp, Artificial
  probe
  misc_feature (1)..(25): SEQ ID NO: 5892; WAN0249KI_at; Start 301; Stop 325
tgcttaatgagtggacacctctatt

SEQ ID NO: 24999 - DNA, 25 bp, Artificial
  probe
  misc_feature (1)..(25): SEQ ID NO: 5892; WAN0249KI_at; Start 55; Stop 79
aaaaacagacttttgttgactcaca

SEQ ID NO: 25000 - DNA, 25 bp, Artificial
  probe
  misc_feature (1)..(25): SEQ ID NO: 5892; WAN0249KI_at; Start 180; Stop 204
gccgtttagcaattagaatagaact

SEQ ID NO: 25001 - DNA, 25 bp, Artificial
  probe
  misc_feature (1)..(25): SEQ ID NO: 5892; WAN0249KI_at; Start 38; Stop 62
tcaagatagtatggtacaaaaacag

SEQ ID NO: 25002 - DNA, 25 bp, Artificial
  probe
  misc_feature (1)..(25): SEQ ID NO: 5892; WAN0249KI_at; Start 222; Stop 246
tatctcaacgaaaagctacactatt

SEQ ID NO: 25003 - DNA, 25 bp, Artificial
  probe
  misc_feature (1)..(25): SEQ ID NO: 5892; WAN0249KI_at; Start 186; Stop 210
tagcaattagaatagaacttttctt

SEQ ID NO: 25004 - DNA, 25 bp, Artificial
  probe
  misc_feature (1)..(25): SEQ ID NO: 5892; WAN0249KI_at; Start 177; Stop 201
caagccgtttagcaattagaataga

SEQ ID NO: 25005 - DNA, 25 bp, Artificial
  probe
  misc_feature (1)..(25): SEQ ID NO: 5892; WAN0249KI_at; Start 219; Stop 243
tattatctcaacgaaaagctacact

SEQ ID NO: 25006 - DNA, 25 bp, Artificial
  probe
  misc_feature (1)..(25): SEQ ID NO: 5892; WAN0249KI_at; Start 298; Stop 322
tattgcttaatgagtggacacctct

SEQ ID NO: 25007 - DNA, 25 bp, Artificial
  probe
  misc_feature (1)..(25): SEQ ID NO: 3477; WAN0249KJ_at; Start 27; Stop 51
tagaggtgtccactcattaagcaat

SEQ ID NO: 25008 - DNA, 25 bp, Artificial
  probe
  misc_feature (1)..(25): SEQ ID NO: 3477; WAN0249KJ_at; Start 221; Stop 245
tactccaaaaatagtattgattttg

SEQ ID NO: 25009 - DNA, 25 bp, Artificial
  probe
  misc_feature (1)..(25): SEQ ID NO: 3477; WAN0249KJ_at; Start 31; Stop 55
ggtgtccactcattaagcaatataa

SEQ ID NO: 25010 - DNA, 25 bp, Artificial
  probe
  misc_feature (1)..(25): SEQ ID NO: 3477; WAN0249KJ_at; Start 244; Stop 268
tggtttaatacaaaacatatgtaat

SEQ ID NO: 25011 - DNA, 25 bp, Artificial
  probe
  misc_feature (1)..(25): SEQ ID NO: 3477; WAN0249KJ_at; Start 300; Stop 324
catactatcttgaaaaatctactaa

SEQ ID NO: 25012 - DNA, 25 bp, Artificial
  probe
  misc_feature (1)..(25): SEQ ID NO: 3477; WAN0249KJ_at; Start 281; Stop 305
caaaagtctgtttttgtaccatact

SEQ ID NO: 25013 - DNA, 25 bp, Artificial
  probe
  misc_feature (1)..(25): SEQ ID NO: 3477; WAN0249KJ_at; Start 103; Stop 127
taatagtgtagcttttcgttgagat

SEQ ID NO: 25014 - DNA, 25 bp, Artificial
  probe
  misc_feature (1)..(25): SEQ ID NO: 3477; WAN0249KJ_at; Start 173; Stop 197
gaggtatatgctactgttatagaaa

SEQ ID NO: 25015 - DNA, 25 bp, Artificial
  probe
  misc_feature (1)..(25): SEQ ID NO: 3477; WAN0249KJ_at; Start 146; Stop 170
agttctattctaattgctaaacggc

SEQ ID NO: 25016 - DNA, 25 bp, Artificial
  probe
  misc_feature (1)..(25): SEQ ID NO: 3477; WAN0249KJ_at; Start 162; Stop 186
ctaaacggcttgaggtatatgctac

SEQ ID NO: 25017 - DNA, 25 bp, Artificial
  probe
  misc_feature (1)..(25): SEQ ID NO: 3477; WAN0249KJ_at; Start 61; Stop 85
ccaagattgactagtttaatatgta

SEQ ID NO: 25018 - DNA, 25 bp, Artificial
  probe
  misc_feature (1)..(25): SEQ ID NO: 3477; WAN0249KJ_at; Start 295; Stop 319
tgtaccatactatcttgaaaaatct

SEQ ID NO: 25019 - DNA, 25 bp, Artificial
  probe
  misc_feature (1)..(25): SEQ ID NO: 3477; WAN0249KJ_at; Start 138; Stop 162
taaagaaaagttctattctaattgc

SEQ ID NO: 25020 - DNA, 25 bp, Artificial
  probe
  misc_feature (1)..(25): SEQ ID NO: 3477; WAN0249KJ_at; Start 51; Stop 75
tataaaaataccaagattgactagt

SEQ ID NO: 25021 - DNA, 25 bp, Artificial
  probe
  misc_feature (1)..(25): SEQ ID NO: 3477; WAN0249KJ_at; Start 164; Stop 188
aaacggcttgaggtatatgctactg

SEQ ID NO: 25022 - DNA, 25 bp, Artificial
  probe
  misc_feature (1)..(25): SEQ ID NO: 3477; WAN0249KJ_at; Start 15; Stop 39
ttgtttctaaaatagaggtgtccac

SEQ ID NO: 25023 - DNA, 25 bp, Artificial
  probe
  misc_feature (1)..(25): SEQ ID NO: 3477; WAN0249KJ_at; Start 151; Stop 175
tattctaattgctaaacggcttgag

SEQ ID NO: 25024 - DNA, 25 bp, Artificial
  probe
  misc_feature (1)..(25): SEQ ID NO: 3477; WAN0249KJ_at; Start 177; Stop 201
tatatgctactgttatagaaatgat

SEQ ID NO: 25025 - DNA, 25 bp, Artificial
  probe
  misc_feature (1)..(25): SEQ ID NO: 3477; WAN0249KJ_at; Start 259; Stop 283
catatgtaataatgtgagtcaacaa

SEQ ID NO: 25026 - DNA, 25 bp, Artificial
  probe
  misc_feature (1)..(25): SEQ ID NO: 3477; WAN0249KJ_at; Start 254; Stop 278
caaaacatatgtaataatgtgagtc

SEQ ID NO: 25027 - DNA, 25 bp, Artificial
  probe
  misc_feature (1)..(25): SEQ ID NO: 3477; WAN0249KJ_at; Start 268; Stop 292
taatgtgagtcaacaaaagtctgtt

SEQ ID NO: 25028 - DNA, 25 bp, Artificial
  probe
  misc_feature (1)..(25): SEQ ID NO: 3477; WAN0249KJ_at; Start 315; Stop 339
aatctactaaattcaaattgagagg

SEQ ID NO: 25029 - DNA, 25 bp, Artificial
  probe
  misc_feature (1)..(25): SEQ ID NO: 3477; WAN0249KJ_at; Start 168; Stop 192
ggcttgaggtatatgctactgttat

SEQ ID NO: 25030 - DNA, 25 bp, Artificial
  probe
  misc_feature (1)..(25): SEQ ID NO: 3477; WAN0249KJ_at; Start 24; Stop 48
aaatagaggtgtccactcattaagc

SEQ ID NO: 25031 - DNA, 25 bp, Artificial
  probe
  misc_feature (1)..(25): SEQ ID NO: 3477; WAN0249KJ_at; Start 29; Stop 53
gaggtgtccactcattaagcaatat

SEQ ID NO: 25032 - DNA, 25 bp, Artificial
  probe
  misc_feature (1)..(25): SEQ ID NO: 3477; WAN0249KJ_at; Start 39; Stop 63
ctcattaagcaatataaaaatacca

SEQ ID NO: 25033 - DNA, 25 bp, Artificial
  probe
  misc_feature (1)..(25): SEQ ID NO: 3477; WAN0249KJ_at; Start 320; Stop 344
actaaattcaaattgagaggatgaa

SEQ ID NO: 25034 - DNA, 25 bp, Artificial
  probe
  misc_feature (1)..(25): SEQ ID NO: 3477; WAN0249KJ_at; Start 18; Stop 42
tttctaaaatagaggtgtccactca

SEQ ID NO: 25035 - DNA, 25 bp, Artificial
  probe
  misc_feature (1)..(25): SEQ ID NO: 3477; WAN0249KJ_at; Start 215; Stop 239
caaaattactccaaaaatagtattg

SEQ ID NO: 25036 - DNA, 25 bp, Artificial
  probe
  misc_feature (1)..(25): SEQ ID NO: 3477; WAN0249KJ_at; Start 155; Stop 179
ctaattgctaaacggcttgaggtat

SEQ ID NO: 25037 - DNA, 25 bp, Artificial
  probe
  misc_feature (1)..(25): SEQ ID NO: 3477; WAN0249KJ_at; Start 289; Stop 313
tgtttttgtaccatactatcttgaa

SEQ ID NO: 25038 - DNA, 25 bp, Artificial
  probe
  misc_feature (1)..(25): SEQ ID NO: 3477; WAN0249KJ_at; Start 113; Stop 137
gcttttcgttgagataataatataa

SEQ ID NO: 25039 - DNA, 25 bp, Artificial
  probe
  misc_feature (1)..(25): SEQ ID NO: 3477; WAN0249KJ_at; Start 106; Stop 130
tagtgtagcttttcgttgagataat

SEQ ID NO: 25040 - DNA, 25 bp, Artificial
  probe
  misc_feature (1)..(25): SEQ ID NO: 3477; WAN0249KJ_at; Start 160; Stop 184
tgctaaacggcttgaggtatatgct

SEQ ID NO: 25041 - DNA, 25 bp, Artificial
  probe
  misc_feature (1)..(25): SEQ ID NO: 4778; WAN0249KK_at; Start 47; Stop 71
cctctctcaaaattattagttacga

SEQ ID NO: 25042 - DNA, 25 bp, Artificial
  probe
  misc_feature (1)..(25): SEQ ID NO: 4778; WAN0249KK_at; Start 46; Stop 70
acctctctcaaaattattagttacg

SEQ ID NO: 25043 - DNA, 25 bp, Artificial
  probe
  misc_feature (1)..(25): SEQ ID NO: 4778; WAN0249KK_at; Start 67; Stop 91
tacgagagaggaaaataaagagcaa

SEQ ID NO: 25044 - DNA, 25 bp, Artificial
  probe
  misc_feature (1)..(25): SEQ ID NO: 4778; WAN0249KK_at; Start 66; Stop 90
ttacgagagaggaaaataaagagca

SEQ ID NO: 25045 - DNA, 25 bp, Artificial
  probe
  misc_feature (1)..(25): SEQ ID NO: 4778; WAN0249KK_at; Start 50; Stop 74
ctctcaaaattattagttacgagag

SEQ ID NO: 25046 - DNA, 25 bp, Artificial
  probe
  misc_feature (1)..(25): SEQ ID NO: 4778; WAN0249KK_at; Start 6; Stop 30
tacctcaaacctatacgacttacta

SEQ ID NO: 25047 - DNA, 25 bp, Artificial
  probe
  misc_feature (1)..(25): SEQ ID NO: 4778; WAN0249KK_at; Start 52; Stop 76
ctcaaaattattagttacgagagag

SEQ ID NO: 25048 - DNA, 25 bp, Artificial
  probe
  misc_feature (1)..(25): SEQ ID NO: 4778; WAN0249KK_at; Start 60; Stop 84
tattagttacgagagaggaaaataa

SEQ ID NO: 25049 - DNA, 25 bp, Artificial
  probe
  misc_feature (1)..(25): SEQ ID NO: 4778; WAN0249KK_at; Start 59; Stop 83
ttattagttacgagagaggaaaata

SEQ ID NO: 25050 - DNA, 25 bp, Artificial
  probe
  misc_feature (1)..(25): SEQ ID NO: 4778; WAN0249KK_at; Start 49; Stop 73
tctctcaaaattattagttacgaga

SEQ ID NO: 25051 - DNA, 25 bp, Artificial
  probe
  misc_feature (1)..(25): SEQ ID NO: 4778; WAN0249KK_at; Start 48; Stop 72
ctctctcaaaattattagttacgag

SEQ ID NO: 25052 - DNA, 25 bp, Artificial
  probe
  misc_feature (1)..(25): SEQ ID NO: 4778; WAN0249KK_at; Start 8; Stop 32
cctcaaacctatacgacttactatt

SEQ ID NO: 25053 - DNA, 25 bp, Artificial
  probe
  misc_feature (1)..(25): SEQ ID NO: 4778; WAN0249KK_at; Start 53; Stop 77
tcaaaattattagttacgagagagg

SEQ ID NO: 25054 - DNA, 25 bp, Artificial
  probe
  misc_feature (1)..(25): SEQ ID NO: 4778; WAN0249KK_at; Start 70; Stop 94
gagagaggaaaataaagagcaactt

SEQ ID NO: 25055 - DNA, 25 bp, Artificial
  probe
  misc_feature (1)..(25): SEQ ID NO: 4778; WAN0249KK_at; Start 69; Stop 93
cgagagaggaaaataaagagcaact

SEQ ID NO: 25056 - DNA, 25 bp, Artificial
  probe
  misc_feature (1)..(25): SEQ ID NO: 4778; WAN0249KK_at; Start 7; Stop 31
acctcaaacctatacgacttactat

SEQ ID NO: 25057 - DNA, 25 bp, Artificial
  probe
  misc_feature (1)..(25): SEQ ID NO: 4778; WAN0249KK_at; Start 54; Stop 78
caaaattattagttacgagagagga

SEQ ID NO: 25058 - DNA, 25 bp, Artificial
  probe
  misc_feature (1)..(25): SEQ ID NO: 4778; WAN0249KK_at; Start 11; Stop 35
caaacctatacgacttactattgtt

SEQ ID NO: 25059 - DNA, 25 bp, Artificial
  probe
  misc_feature (1)..(25): SEQ ID NO: 4778; WAN0249KK_at; Start 64; Stop 88
agttacgagagaggaaaataaagag

SEQ ID NO: 25060 - DNA, 25 bp, Artificial
  probe
  misc_feature (1)..(25): SEQ ID NO: 4778; WAN0249KK_at; Start 51; Stop 75
tctcaaaattattagttacgagaga

SEQ ID NO: 25061 - DNA, 25 bp, Artificial
  probe
  misc_feature (1)..(25): SEQ ID NO: 4778; WAN0249KK_at; Start 10; Stop 34
tcaaacctatacgacttactattgt

SEQ ID NO: 25062 - DNA, 25 bp, Artificial
  probe
  misc_feature (1)..(25): SEQ ID NO: 4778; WAN0249KK_at; Start 58; Stop 82
attattagttacgagagaggaaaat

SEQ ID NO: 25063 - DNA, 25 bp, Artificial
  probe
  misc_feature (1)..(25): SEQ ID NO: 4778; WAN0249KK_at; Start 63; Stop 87
tagttacgagagaggaaaataaaga

SEQ ID NO: 25064 - DNA, 25 bp, Artificial
  probe
  misc_feature (1)..(25): SEQ ID NO: 4778; WAN0249KK_at; Start 9; Stop 33
ctcaaacctatacgacttactattg

SEQ ID NO: 25065 - DNA, 25 bp, Artificial
  probe
  misc_feature (1)..(25): SEQ ID NO: 4778; WAN0249KK_at; Start 71; Stop 95
agagaggaaaataaagagcaacttt

SEQ ID NO: 25066 - DNA, 25 bp, Artificial
  probe
  misc_feature (1)..(25): SEQ ID NO: 4778; WAN0249KK_at; Start 65; Stop 89
gttacgagagaggaaaataaagagc

SEQ ID NO: 25067 - DNA, 25 bp, Artificial
  probe
  misc_feature (1)..(25): SEQ ID NO: 4778; WAN0249KK_at; Start 68; Stop 92
acgagagaggaaaataaagagcaac

SEQ ID NO: 25068 - DNA, 25 bp, Artificial
  probe
  misc_feature (1)..(25): SEQ ID NO: 272; WAN0249KL_at; Start 42; Stop 66
ctctcgtaactaataattttgagag

SEQ ID NO: 25069 - DNA, 25 bp, Artificial
  probe
  misc_feature (1)..(25): SEQ ID NO: 272; WAN0249KL_at; Start 28; Stop 52
ctctttattttcctctctcgtaact

SEQ ID NO: 25070 - DNA, 25 bp, Artificial
  probe
  misc_feature (1)..(25): SEQ ID NO: 272; WAN0249KL_at; Start 85; Stop 109
atagtaagtcgtataggtttgaggt

SEQ ID NO: 25071 - DNA, 25 bp, Artificial
  probe
  misc_feature (1)..(25): SEQ ID NO: 272; WAN0249KL_at; Start 44; Stop 68
ctcgtaactaataattttgagagag

SEQ ID NO: 25072 - DNA, 25 bp, Artificial
  probe
  misc_feature (1)..(25): SEQ ID NO: 272; WAN0249KL_at; Start 25; Stop 49
ttgctctttattttcctctctcgta

SEQ ID NO: 25073 - DNA, 25 bp, Artificial
  probe
  misc_feature (1)..(25): SEQ ID NO: 272; WAN0249KL_at; Start 81; Stop 105
aacaatagtaagtcgtataggtttg

SEQ ID NO: 25074 - DNA, 25 bp, Artificial
  probe
  misc_feature (1)..(25): SEQ ID NO: 272; WAN0249KL_at; Start 33; Stop 57
tattttcctctctcgtaactaataa

SEQ ID NO: 25075 - DNA, 25 bp, Artificial
  probe
  misc_feature (1)..(25): SEQ ID NO: 272; WAN0249KL_at; Start 84; Stop 108
aatagtaagtcgtataggtttgagg

SEQ ID NO: 25076 - DNA, 25 bp, Artificial
  probe
  misc_feature (1)..(25): SEQ ID NO: 272; WAN0249KL_at; Start 29; Stop 53
tctttattttcctctctcgtaacta

SEQ ID NO: 25077 - DNA, 25 bp, Artificial
  probe
  misc_feature (1)..(25): SEQ ID NO: 272; WAN0249KL_at; Start 22; Stop 46
aagttgctctttattttcctctctc

SEQ ID NO: 25078 - DNA, 25 bp, Artificial
  probe
  misc_feature (1)..(25): SEQ ID NO: 272; WAN0249KL_at; Start 86; Stop 110
tagtaagtcgtataggtttgaggta

SEQ ID NO: 25079 - DNA, 25 bp, Artificial
  probe
  misc_feature (1)..(25): SEQ ID NO: 272; WAN0249KL_at; Start 32; Stop 56
ttattttcctctctcgtaactaata

SEQ ID NO: 25080 - DNA, 25 bp, Artificial
  probe
  misc_feature (1)..(25): SEQ ID NO: 272; WAN0249KL_at; Start 43; Stop 67
tctcgtaactaataattttgagaga

SEQ ID NO: 25081 - DNA, 25 bp, Artificial
  probe
  misc_feature (1)..(25): SEQ ID NO: 272; WAN0249KL_at; Start 39; Stop 63
cctctctcgtaactaataattttga

SEQ ID NO: 25082 - DNA, 25 bp, Artificial
  probe
  misc_feature (1)..(25): SEQ ID NO: 272; WAN0249KL_at; Start 26; Stop 50
tgctctttattttcctctctcgtaa

SEQ ID NO: 25083 - DNA, 25 bp, Artificial
  probe
  misc_feature (1)..(25): SEQ ID NO: 272; WAN0249KL_at; Start 83; Stop 107
caatagtaagtcgtataggtttgag

SEQ ID NO: 25084 - DNA, 25 bp, Artificial
  probe
  misc_feature (1)..(25): SEQ ID NO: 272; WAN0249KL_at; Start 41; Stop 65
tctctcgtaactaataattttgaga

SEQ ID NO: 25085 - DNA, 25 bp, Artificial
  probe
  misc_feature (1)..(25): SEQ ID NO: 272; WAN0249KL_at; Start 45; Stop 69
tcgtaactaataattttgagagagg

SEQ ID NO: 25086 - DNA, 25 bp, Artificial
  probe
  misc_feature (1)..(25): SEQ ID NO: 272; WAN0249KL_at; Start 38; Stop 62
tcctctctcgtaactaataattttg

SEQ ID NO: 25087 - DNA, 25 bp, Artificial
  probe
  misc_feature (1)..(25): SEQ ID NO: 272; WAN0249KL_at; Start 23; Stop 47
agttgctctttattttcctctctcg

SEQ ID NO: 25088 - DNA, 25 bp, Artificial
  probe
  misc_feature (1)..(25): SEQ ID NO: 272; WAN0249KL_at; Start 21; Stop 45
aaagttgctctttattttcctctct

SEQ ID NO: 25089 - DNA, 25 bp, Artificial
  probe
  misc_feature (1)..(25): SEQ ID NO: 272; WAN0249KL_at; Start 46; Stop 70
cgtaactaataattttgagagaggt

SEQ ID NO: 25090 - DNA, 25 bp, Artificial
  probe
  misc_feature (1)..(25): SEQ ID NO: 272; WAN0249KL_at; Start 82; Stop 106
acaatagtaagtcgtataggtttga

SEQ ID NO: 25091 - DNA, 25 bp, Artificial
  probe
  misc_feature (1)..(25): SEQ ID NO: 272; WAN0249KL_at; Start 34; Stop 58
attttcctctctcgtaactaataat

SEQ ID NO: 25092 - DNA, 25 bp, Artificial
  probe
  misc_feature (1)..(25): SEQ ID NO: 272; WAN0249KL_at; Start 40; Stop 64
ctctctcgtaactaataattttgag

SEQ ID NO: 25093 - DNA, 25 bp, Artificial
  probe
  misc_feature (1)..(25): SEQ ID NO: 272; WAN0249KL_at; Start 24; Stop 48
gttgctctttattttcctctctcgt

SEQ ID NO: 25094 - DNA, 25 bp, Artificial
  probe
  misc_feature (1)..(25): SEQ ID NO: 272; WAN0249KL_at; Start 27; Stop 51
gctctttattttcctctctcgtaac

SEQ ID NO: 25095 - DNA, 25 bp, Artificial
  probe
  misc_feature (1)..(25): SEQ ID NO: 242; WAN0249KM_at; Start 23; Stop 47
aaagttaaataagttgctctatatt

SEQ ID NO: 25096 - DNA, 25 bp, Artificial
  probe
  misc_feature (1)..(25): SEQ ID NO: 242; WAN0249KM_at; Start 77; Stop 101
ctcattctcgtgcaaaatatcgggt

SEQ ID NO: 25097 - DNA, 25 bp, Artificial
  probe
  misc_feature (1)..(25): SEQ ID NO: 242; WAN0249KM_at; Start 75; Stop 99
ctctcattctcgtgcaaaatatcgg

SEQ ID NO: 25098 - DNA, 25 bp, Artificial
  probe
  misc_feature (1)..(25): SEQ ID NO: 242; WAN0249KM_at; Start 22; Stop 46
aaaagttaaataagttgctctatat

SEQ ID NO: 25099 - DNA, 25 bp, Artificial
  probe
  misc_feature (1)..(25): SEQ ID NO: 242; WAN0249KM_at; Start 65; Stop 89
aattataattctctcattctcgtgc

SEQ ID NO: 25100 - DNA, 25 bp, Artificial
  probe
  misc_feature (1)..(25): SEQ ID NO: 242; WAN0249KM_at; Start 24; Stop 48
aagttaaataagttgctctatattt

SEQ ID NO: 25101 - DNA, 25 bp, Artificial
  probe
  misc_feature (1)..(25): SEQ ID NO: 242; WAN0249KM_at; Start 40; Stop 64
tctatatttttcgttttttcagata

SEQ ID NO: 25102 - DNA, 25 bp, Artificial
  probe
  misc_feature (1)..(25): SEQ ID NO: 242; WAN0249KM_at; Start 67; Stop 91
ttataattctctcattctcgtgcaa

SEQ ID NO: 25103 - DNA, 25 bp, Artificial
  probe
  misc_feature (1)..(25): SEQ ID NO: 242; WAN0249KM_at; Start 39; Stop 63
ctctatatttttcgttttttcagat

SEQ ID NO: 25104 - DNA, 25 bp, Artificial
  probe
  misc_feature (1)..(25): SEQ ID NO: 242; WAN0249KM_at; Start 62; Stop 86
ataaattataattctctcattctcg

SEQ ID NO: 25105 - DNA, 25 bp, Artificial
  probe
  misc_feature (1)..(25): SEQ ID NO: 242; WAN0249KM_at; Start 70; Stop 94
taattctctcattctcgtgcaaaat

SEQ ID NO: 25106 - DNA, 25 bp, Artificial
  probe
  misc_feature (1)..(25): SEQ ID NO: 242; WAN0249KM_at; Start 61; Stop 85
gataaattataattctctcattctc

SEQ ID NO: 25107 - DNA, 25 bp, Artificial
  probe
  misc_feature (1)..(25): SEQ ID NO: 242; WAN0249KM_at; Start 72; Stop 96
attctctcattctcgtgcaaaatat

SEQ ID NO: 25108 - DNA, 25 bp, Artificial
  probe
  misc_feature (1)..(25): SEQ ID NO: 242; WAN0249KM_at; Start 30; Stop 54
aataagttgctctatatttttcgtt

SEQ ID NO: 25109 - DNA, 25 bp, Artificial
  probe
  misc_feature (1)..(25): SEQ ID NO: 242; WAN0249KM_at; Start 55; Stop 79
ttttcagataaattataattctctc

SEQ ID NO: 25110 - DNA, 25 bp, Artificial
  probe
  misc_feature (1)..(25): SEQ ID NO: 242; WAN0249KM_at; Start 59; Stop 83
cagataaattataattctctcattc

SEQ ID NO: 25111 - DNA, 25 bp, Artificial
  probe
  misc_feature (1)..(25): SEQ ID NO: 242; WAN0249KM_at; Start 31; Stop 55
ataagttgctctatatttttcgttt

SEQ ID NO: 25112 - DNA, 25 bp, Artificial
  probe
  misc_feature (1)..(25): SEQ ID NO: 242; WAN0249KM_at; Start 37; Stop 61
tgctctatatttttcgttttttcag

SEQ ID NO: 25113 - DNA, 25 bp, Artificial
  probe
  misc_feature (1)..(25): SEQ ID NO: 242; WAN0249KM_at; Start 69; Stop 93
ataattctctcattctcgtgcaaaa

SEQ ID NO: 25114 - DNA, 25 bp, Artificial
  probe
  misc_feature (1)..(25): SEQ ID NO: 242; WAN0249KM_at; Start 64; Stop 88
aaattataattctctcattctcgtg

SEQ ID NO: 25115 - DNA, 25 bp, Artificial
  probe
  misc_feature (1)..(25): SEQ ID NO: 242; WAN0249KM_at; Start 66; Stop 90
attataattctctcattctcgtgca

SEQ ID NO: 25116 - DNA, 25 bp, Artificial
  probe
  misc_feature (1)..(25): SEQ ID NO: 242; WAN0249KM_at; Start 58; Stop 82
tcagataaattataattctctcatt

SEQ ID NO: 25117 - DNA, 25 bp, Artificial
  probe
  misc_feature (1)..(25): SEQ ID NO: 242; WAN0249KM_at; Start 74; Stop 98
tctctcattctcgtgcaaaatatcg

SEQ ID NO: 25118 - DNA, 25 bp, Artificial
  probe
  misc_feature (1)..(25): SEQ ID NO: 242; WAN0249KM_at; Start 76; Stop 100
tctcattctcgtgcaaaatatcggg

SEQ ID NO: 25119 - DNA, 25 bp, Artificial
  probe
  misc_feature (1)..(25): SEQ ID NO: 242; WAN0249KM_at; Start 68; Stop 92
tataattctctcattctcgtgcaaa

SEQ ID NO: 25120 - DNA, 25 bp, Artificial
  probe
  misc_feature (1)..(25): SEQ ID NO: 242; WAN0249KM_at; Start 28; Stop 52
taaataagttgctctatatttttcg

SEQ ID NO: 25121 - DNA, 25 bp, Artificial
  probe
  misc_feature (1)..(25): SEQ ID NO: 242; WAN0249KM_at; Start 38; Stop 62
gctctatatttttcgttttttcaga

SEQ ID NO: 25122 - DNA, 25 bp, Artificial
  probe
  misc_feature (1)..(25): SEQ ID NO: 242; WAN0249KM_at; Start 29; Stop 53
aaataagttgctctatatttttcgt

SEQ ID NO: 25123 - DNA, 25 bp, Artificial
  probe
  misc_feature (1)..(25): SEQ ID NO: 242; WAN0249KM_at; Start 63; Stop 87
taaattataattctctcattctcgt

SEQ ID NO: 25124 - DNA, 25 bp, Artificial
  probe
  misc_feature (1)..(25): SEQ ID NO: 242; WAN0249KM_at; Start 71; Stop 95
aattctctcattctcgtgcaaaata

SEQ ID NO: 25125 - DNA, 25 bp, Artificial
  probe
  misc_feature (1)..(25): SEQ ID NO: 242; WAN0249KM_at; Start 73; Stop 97
ttctctcattctcgtgcaaaatatc

SEQ ID NO: 25126 - DNA, 25 bp, Artificial
  probe
  misc_feature (1)..(25): SEQ ID NO: 242; WAN0249KM_at; Start 78; Stop 102
tcattctcgtgcaaaatatcgggtt

SEQ ID NO: 25127 - DNA, 25 bp, Artificial
  probe
  misc_feature (1)..(25): SEQ ID NO: 242; WAN0249KM_at; Start 56; Stop 80
tttcagataaattataattctctca

SEQ ID NO: 25128 - DNA, 25 bp, Artificial
  probe
  misc_feature (1)..(25): SEQ ID NO: 242; WAN0249KM_at; Start 57; Stop 81
ttcagataaattataattctctcat

SEQ ID NO: 25129 - DNA, 25 bp, Artificial
  probe
  misc_feature (1)..(25): SEQ ID NO: 197; WAN0249KN_at; Start 52; Stop 76
gaaaaatatagagcaacttatttaa

SEQ ID NO: 25130 - DNA, 25 bp, Artificial
  probe
  misc_feature (1)..(25): SEQ ID NO: 197; WAN0249KN_at; Start 21; Stop 45
aatgagagaattataatttatctga

SEQ ID NO: 25131 - DNA, 25 bp, Artificial
  probe
  misc_feature (1)..(25): SEQ ID NO: 197; WAN0249KN_at; Start 15; Stop 39
cacgagaatgagagaattataattt

SEQ ID NO: 25132 - DNA, 25 bp, Artificial
  probe
  misc_feature (1)..(25): SEQ ID NO: 197; WAN0249KN_at; Start 6; Stop 30
gatattttgcacgagaatgagagaa

SEQ ID NO: 25133 - DNA, 25 bp, Artificial
  probe
  misc_feature (1)..(25): SEQ ID NO: 197; WAN0249KN_at; Start 7; Stop 31
atattttgcacgagaatgagagaat

SEQ ID NO: 25134 - DNA, 25 bp, Artificial
  probe
  misc_feature (1)..(25): SEQ ID NO: 197; WAN0249KN_at; Start 49; Stop 73
aacgaaaaatatagagcaacttatt

SEQ ID NO: 25135 - DNA, 25 bp, Artificial
  probe
  misc_feature (1)..(25): SEQ ID NO: 197; WAN0249KN_at; Start 57; Stop 81
atatagagcaacttatttaactttt

SEQ ID NO: 25136 - DNA, 25 bp, Artificial
  probe
  misc_feature (1)..(25): SEQ ID NO: 197; WAN0249KN_at; Start 43; Stop 67
tgaaaaaacgaaaaatatagagcaa

SEQ ID NO: 25137 - DNA, 25 bp, Artificial
  probe
  misc_feature (1)..(25): SEQ ID NO: 197; WAN0249KN_at; Start 2; Stop 26
acccgatattttgcacgagaatgag

SEQ ID NO: 25138 - DNA, 25 bp, Artificial
  probe
  misc_feature (1)..(25): SEQ ID NO: 197; WAN0249KN_at; Start 4; Stop 28
ccgatattttgcacgagaatgagag

SEQ ID NO: 25139 - DNA, 25 bp, Artificial
  probe
  misc_feature (1)..(25): SEQ ID NO: 197; WAN0249KN_at; Start 16; Stop 40
acgagaatgagagaattataattta

SEQ ID NO: 25140 - DNA, 25 bp, Artificial
  probe
  misc_feature (1)..(25): SEQ ID NO: 197; WAN0249KN_at; Start 23; Stop 47
tgagagaattataatttatctgaaa

SEQ ID NO: 25141 - DNA, 25 bp, Artificial
  probe
  misc_feature (1)..(25): SEQ ID NO: 197; WAN0249KN_at; Start 48; Stop 72
aaacgaaaaatatagagcaacttat

SEQ ID NO: 25142 - DNA, 25 bp, Artificial
  probe
  misc_feature (1)..(25): SEQ ID NO: 197; WAN0249KN_at; Start 10; Stop 34
ttttgcacgagaatgagagaattat

SEQ ID NO: 25143 - DNA, 25 bp, Artificial
  probe
  misc_feature (1)..(25): SEQ ID NO: 197; WAN0249KN_at; Start 12; Stop 36
ttgcacgagaatgagagaattataa

SEQ ID NO: 25144 - DNA, 25 bp, Artificial
  probe
  misc_feature (1)..(25): SEQ ID NO: 197; WAN0249KN_at; Start 42; Stop 66
ctgaaaaaacgaaaaatatagagca

SEQ ID NO: 25145 - DNA, 25 bp, Artificial
  probe
  misc_feature (1)..(25): SEQ ID NO: 197; WAN0249KN_at; Start 18; Stop 42
gagaatgagagaattataatttatc

SEQ ID NO: 25146 - DNA, 25 bp, Artificial
  probe
  misc_feature (1)..(25): SEQ ID NO: 197; WAN0249KN_at; Start 20; Stop 44
gaatgagagaattataatttatctg

SEQ ID NO: 25147 - DNA, 25 bp, Artificial
  probe
  misc_feature (1)..(25): SEQ ID NO: 197; WAN0249KN_at; Start 1; Stop 25
aacccgatattttgcacgagaatga

SEQ ID NO: 25148 - DNA, 25 bp, Artificial
  probe
  misc_feature (1)..(25): SEQ ID NO: 197; WAN0249KN_at; Start 26; Stop 50
gagaattataatttatctgaaaaaa

SEQ ID NO: 25149 - DNA, 25 bp, Artificial
  probe
  misc_feature (1)..(25): SEQ ID NO: 197; WAN0249KN_at; Start 24; Stop 48
gagagaattataatttatctgaaaa

SEQ ID NO: 25150 - DNA, 25 bp, Artificial
  probe
  misc_feature (1)..(25): SEQ ID NO: 197; WAN0249KN_at; Start 56; Stop 80
aatatagagcaacttatttaacttt

SEQ ID NO: 25151 - DNA, 25 bp, Artificial
  probe
  misc_feature (1)..(25): SEQ ID NO: 197; WAN0249KN_at; Start 11; Stop 35
tttgcacgagaatgagagaattata

SEQ ID NO: 25152 - DNA, 25 bp, Artificial
  probe
  misc_feature (1)..(25): SEQ ID NO: 197; WAN0249KN_at; Start 51; Stop 75
cgaaaaatatagagcaacttattta

SEQ ID NO: 25153 - DNA, 25 bp, Artificial
  probe
  misc_feature (1)..(25): SEQ ID NO: 197; WAN0249KN_at; Start 5; Stop 29
cgatattttgcacgagaatgagaga

SEQ ID NO: 25154 - DNA, 25 bp, Artificial
  probe
  misc_feature (1)..(25): SEQ ID NO: 197; WAN0249KN_at; Start 9; Stop 33
attttgcacgagaatgagagaatta

SEQ ID NO: 25155 - DNA, 25 bp, Artificial
  probe
  misc_feature (1)..(25): SEQ ID NO: 197; WAN0249KN_at; Start 8; Stop 32
tattttgcacgagaatgagagaatt

SEQ ID NO: 25156 - DNA, 25 bp, Artificial
  probe
  misc_feature (1)..(25): SEQ ID NO: 197; WAN0249KN_at; Start 13; Stop 37
tgcacgagaatgagagaattataat

SEQ ID NO: 25157 - DNA, 25 bp, Artificial
  probe
  misc_feature (1)..(25): SEQ ID NO: 197; WAN0249KN_at; Start 50; Stop 74
acgaaaaatatagagcaacttattt

SEQ ID NO: 25158 - DNA, 25 bp, Artificial
  probe
  misc_feature (1)..(25): SEQ ID NO: 197; WAN0249KN_at; Start 54; Stop 78
aaaatatagagcaacttatttaact

SEQ ID NO: 25159 - DNA, 25 bp, Artificial
  probe
  misc_feature (1)..(25): SEQ ID NO: 197; WAN0249KN_at; Start 17; Stop 41
cgagaatgagagaattataatttat

SEQ ID NO: 25160 - DNA, 25 bp, Artificial
  probe
  misc_feature (1)..(25): SEQ ID NO: 197; WAN0249KN_at; Start 14; Stop 38
gcacgagaatgagagaattataatt

SEQ ID NO: 25161 - DNA, 25 bp, Artificial
  probe
  misc_feature (1)..(25): SEQ ID NO: 197; WAN0249KN_at; Start 3; Stop 27
cccgatattttgcacgagaatgaga

SEQ ID NO: 25162 - DNA, 25 bp, Artificial
  probe
  misc_feature (1)..(25): SEQ ID NO: 197; WAN0249KN_at; Start 41; Stop 65
tctgaaaaaacgaaaaatatagagc

SEQ ID NO: 25163 - DNA, 25 bp, Artificial
  probe
  misc_feature (1)..(25): SEQ ID NO: 3671; WAN0249KO_at; Start 36; Stop 60
ctaacagatatattttatttagtca

SEQ ID NO: 25164 - DNA, 25 bp, Artificial
  probe
  misc_feature (1)..(25): SEQ ID NO: 3671; WAN0249KO_at; Start 163; Stop 187
taagcaaataggaaggtttattatc

SEQ ID NO: 25165 - DNA, 25 bp, Artificial
  probe
  misc_feature (1)..(25): SEQ ID NO: 3671; WAN0249KO_at; Start 42; Stop 66
gatatattttatttagtcaagtatt

SEQ ID NO: 25166 - DNA, 25 bp, Artificial
  probe
  misc_feature (1)..(25): SEQ ID NO: 3671; WAN0249KO_at; Start 24; Stop 48
cttgtttttattctaacagatatat

SEQ ID NO: 25167 - DNA, 25 bp, Artificial
  probe
  misc_feature (1)..(25): SEQ ID NO: 3671; WAN0249KO_at; Start 152; Stop 176
tataatgaaattaagcaaataggaa

SEQ ID NO: 25168 - DNA, 25 bp, Artificial
  probe
  misc_feature (1)..(25): SEQ ID NO: 3671; WAN0249KO_at; Start 35; Stop 59
tctaacagatatattttatttagtc

SEQ ID NO: 25169 - DNA, 25 bp, Artificial
  probe
  misc_feature (1)..(25): SEQ ID NO: 3671; WAN0249KO_at; Start 155; Stop 179
aatgaaattaagcaaataggaaggt

SEQ ID NO: 25170 - DNA, 25 bp, Artificial
  probe
  misc_feature (1)..(25): SEQ ID NO: 3671; WAN0249KO_at; Start 39; Stop 63
acagatatattttatttagtcaagt

SEQ ID NO: 25171 - DNA, 25 bp, Artificial
  probe
  misc_feature (1)..(25): SEQ ID NO: 3671; WAN0249KO_at; Start 97; Stop 121
tattaccataaagaattatttattc

SEQ ID NO: 25172 - DNA, 25 bp, Artificial
  probe
  misc_feature (1)..(25): SEQ ID NO: 3671; WAN0249KO_at; Start 38; Stop 62
aacagatatattttatttagtcaag

SEQ ID NO: 25173 - DNA, 25 bp, Artificial
  probe
  misc_feature (1)..(25): SEQ ID NO: 3671; WAN0249KO_at; Start 21; Stop 45
ttccttgtttttattctaacagata

SEQ ID NO: 25174 - DNA, 25 bp, Artificial
  probe
  misc_feature (1)..(25): SEQ ID NO: 3671; WAN0249KO_at; Start 165; Stop 189
agcaaataggaaggtttattatctt

SEQ ID NO: 25175 - DNA, 25 bp, Artificial
  probe
  misc_feature (1)..(25): SEQ ID NO: 3671; WAN0249KO_at; Start 111; Stop 135
attatttattcctttaacttgctat

SEQ ID NO: 25176 - DNA, 25 bp, Artificial
  probe
  misc_feature (1)..(25): SEQ ID NO: 3671; WAN0249KO_at; Start 153; Stop 177
ataatgaaattaagcaaataggaag

SEQ ID NO: 25177 - DNA, 25 bp, Artificial
  probe
  misc_feature (1)..(25): SEQ ID NO: 3671; WAN0249KO_at; Start 116; Stop 140
ttattcctttaacttgctattttga

SEQ ID NO: 25178 - DNA, 25 bp, Artificial
  probe
  misc_feature (1)..(25): SEQ ID NO: 3671; WAN0249KO_at; Start 151; Stop 175
ttataatgaaattaagcaaatagga

SEQ ID NO: 25179 - DNA, 25 bp, Artificial
  probe
  misc_feature (1)..(25): SEQ ID NO: 3671; WAN0249KO_at; Start 117; Stop 141
tattcctttaacttgctattttgaa

SEQ ID NO: 25180 - DNA, 25 bp, Artificial
  probe
  misc_feature (1)..(25): SEQ ID NO: 3671; WAN0249KO_at; Start 51; Stop 75
tatttagtcaagtatttttatgtaa

SEQ ID NO: 25181 - DNA, 25 bp, Artificial
  probe
  misc_feature (1)..(25): SEQ ID NO: 3671; WAN0249KO_at; Start 154; Stop 178
taatgaaattaagcaaataggaagg

SEQ ID NO: 25182 - DNA, 25 bp, Artificial
  probe
  misc_feature (1)..(25): SEQ ID NO: 3671; WAN0249KO_at; Start 147; Stop 171
aactttataatgaaattaagcaaat

SEQ ID NO: 25183 - DNA, 25 bp, Artificial
  probe
  misc_feature (1)..(25): SEQ ID NO: 3671; WAN0249KO_at; Start 50; Stop 74
ttatttagtcaagtatttttatgta

SEQ ID NO: 25184 - DNA, 25 bp, Artificial
  probe
  misc_feature (1)..(25): SEQ ID NO: 3671; WAN0249KO_at; Start 37; Stop 61
taacagatatattttatttagtcaa

SEQ ID NO: 25185 - DNA, 25 bp, Artificial
  probe
  misc_feature (1)..(25): SEQ ID NO: 3671; WAN0249KO_at; Start 40; Stop 64
cagatatattttatttagtcaagta

SEQ ID NO: 25186 - DNA, 25 bp, Artificial
  probe
  misc_feature (1)..(25): SEQ ID NO: 3671; WAN0249KO_at; Start 164; Stop 188
aagcaaataggaaggtttattatct

SEQ ID NO: 25187 - DNA, 25 bp, Artificial
  probe
  misc_feature (1)..(25): SEQ ID NO: 3671; WAN0249KO_at; Start 120; Stop 144
tcctttaacttgctattttgaacta

SEQ ID NO: 25188 - DNA, 25 bp, Artificial
  probe
  misc_feature (1)..(25): SEQ ID NO: 3671; WAN0249KO_at; Start 22; Stop 46
tccttgtttttattctaacagatat

SEQ ID NO: 25189 - DNA, 25 bp, Artificial
  probe
  misc_feature (1)..(25): SEQ ID NO: 3671; WAN0249KO_at; Start 41; Stop 65
agatatattttatttagtcaagtat

SEQ ID NO: 25190 - DNA, 25 bp, Artificial
  probe
  misc_feature (1)..(25): SEQ ID NO: 3671; WAN0249KO_at; Start 156; Stop 180
atgaaattaagcaaataggaaggtt

SEQ ID NO: 25191 - DNA, 25 bp, Artificial
  probe
  misc_feature (1)..(25): SEQ ID NO: 3671; WAN0249KO_at; Start 23; Stop 47
ccttgtttttattctaacagatata

SEQ ID NO: 25192 - DNA, 25 bp, Artificial
  probe
  misc_feature (1)..(25): SEQ ID NO: 4414; WAN0249KP_at; Start 133; Stop 157
gactaaataaaatatatctgttaga

SEQ ID NO: 25193 - DNA, 25 bp, Artificial
  probe
  misc_feature (1)..(25): SEQ ID NO: 4414; WAN0249KP_at; Start 57; Stop 81
atagcaagttaaaggaataaataat

SEQ ID NO: 25194 - DNA, 25 bp, Artificial
  probe
  misc_feature (1)..(25): SEQ ID NO: 4414; WAN0249KP_at; Start 3; Stop 27
aagataataaaccttcctatttgct

SEQ ID NO: 25195 - DNA, 25 bp, Artificial
  probe
  misc_feature (1)..(25): SEQ ID NO: 4414; WAN0249KP_at; Start 12; Stop 36
aaccttcctatttgcttaatttcat

SEQ ID NO: 25196 - DNA, 25 bp, Artificial
  probe
  misc_feature (1)..(25): SEQ ID NO: 4414; WAN0249KP_at; Start 71; Stop 95
gaataaataattctttatggtaata

SEQ ID NO: 25197 - DNA, 25 bp, Artificial
  probe
  misc_feature (1)..(25): SEQ ID NO: 4414; WAN0249KP_at; Start 130; Stop 154
cttgactaaataaaatatatctgtt

SEQ ID NO: 25198 - DNA, 25 bp, Artificial
  probe
  misc_feature (1)..(25): SEQ ID NO: 4414; WAN0249KP_at; Start 136; Stop 160
taaataaaatatatctgttagaata

SEQ ID NO: 25199 - DNA, 25 bp, Artificial
  probe
  misc_feature (1)..(25): SEQ ID NO: 4414; WAN0249KP_at; Start 134; Stop 158
actaaataaaatatatctgttagaa

SEQ ID NO: 25200 - DNA, 25 bp, Artificial
  probe
  misc_feature (1)..(25): SEQ ID NO: 4414; WAN0249KP_at; Start 142; Stop 166
aaatatatctgttagaataaaaaca

SEQ ID NO: 25201 - DNA, 25 bp, Artificial
  probe
  misc_feature (1)..(25): SEQ ID NO: 4414; WAN0249KP_at; Start 117; Stop 141
ttacataaaaatacttgactaaata

SEQ ID NO: 25202 - DNA, 25 bp, Artificial
  probe
  misc_feature (1)..(25): SEQ ID NO: 4414; WAN0249KP_at; Start 52; Stop 76
tcaaaatagcaagttaaaggaataa

SEQ ID NO: 25203 - DNA, 25 bp, Artificial
  probe
  misc_feature (1)..(25): SEQ ID NO: 4414; WAN0249KP_at; Start 144; Stop 168
atatatctgttagaataaaaacaag

SEQ ID NO: 25204 - DNA, 25 bp, Artificial
  probe
  misc_feature (1)..(25): SEQ ID NO: 4414; WAN0249KP_at; Start 146; Stop 170
atatctgttagaataaaaacaagga

SEQ ID NO: 25205 - DNA, 25 bp, Artificial
  probe
  misc_feature (1)..(25): SEQ ID NO: 4414; WAN0249KP_at; Start 48; Stop 72
tagttcaaaatagcaagttaaagga

SEQ ID NO: 25206 - DNA, 25 bp, Artificial
  probe
  misc_feature (1)..(25): SEQ ID NO: 4414; WAN0249KP_at; Start 132; Stop 156
tgactaaataaaatatatctgttag

SEQ ID NO: 25207 - DNA, 25 bp, Artificial
  probe
  misc_feature (1)..(25): SEQ ID NO: 4414; WAN0249KP_at; Start 147; Stop 171
tatctgttagaataaaaacaaggaa

SEQ ID NO: 25208 - DNA, 25 bp, Artificial
  probe
  misc_feature (1)..(25): SEQ ID NO: 4414; WAN0249KP_at; Start 14; Stop 38
ccttcctatttgcttaatttcatta

SEQ ID NO: 25209 - DNA, 25 bp, Artificial
  probe
  misc_feature (1)..(25): SEQ ID NO: 4414; WAN0249KP_at; Start 129; Stop 153
acttgactaaataaaatatatctgt

SEQ ID NO: 25210 - DNA, 25 bp, Artificial
  probe
  misc_feature (1)..(25): SEQ ID NO: 4414; WAN0249KP_at; Start 140; Stop 164
taaaatatatctgttagaataaaaa

SEQ ID NO: 25211 - DNA, 25 bp, Artificial
  probe
  misc_feature (1)..(25): SEQ ID NO: 4414; WAN0249KP_at; Start 4; Stop 28
agataataaaccttcctatttgctt

SEQ ID NO: 25212 - DNA, 25 bp, Artificial
  probe
  misc_feature (1)..(25): SEQ ID NO: 4414; WAN0249KP_at; Start 118; Stop 142
tacataaaaatacttgactaaataa

SEQ ID NO: 25213 - DNA, 25 bp, Artificial
  probe
  misc_feature (1)..(25): SEQ ID NO: 4414; WAN0249KP_at; Start 18; Stop 42
cctatttgcttaatttcattataaa

SEQ ID NO: 25214 - DNA, 25 bp, Artificial
  probe
  misc_feature (1)..(25): SEQ ID NO: 4414; WAN0249KP_at; Start 51; Stop 75
ttcaaaatagcaagttaaaggaata

SEQ ID NO: 25215 - DNA, 25 bp, Artificial
  probe
  misc_feature (1)..(25): SEQ ID NO: 4414; WAN0249KP_at; Start 13; Stop 37
accttcctatttgcttaatttcatt

SEQ ID NO: 25216 - DNA, 25 bp, Artificial
  probe
  misc_feature (1)..(25): SEQ ID NO: 4414; WAN0249KP_at; Start 17; Stop 41
tcctatttgcttaatttcattataa

SEQ ID NO: 25217 - DNA, 25 bp, Artificial
  probe
  misc_feature (1)..(25): SEQ ID NO: 4414; WAN0249KP_at; Start 5; Stop 29
gataataaaccttcctatttgctta

SEQ ID NO: 25218 - DNA, 25 bp, Artificial
  probe
  misc_feature (1)..(25): SEQ ID NO: 4414; WAN0249KP_at; Start 20; Stop 44
tatttgcttaatttcattataaagt

SEQ ID NO: 25219 - DNA, 25 bp, Artificial
  probe
  misc_feature (1)..(25): SEQ ID NO: 4414; WAN0249KP_at; Start 145; Stop 169
tatatctgttagaataaaaacaagg

SEQ ID NO: 25220 - DNA, 25 bp, Artificial
  probe
  misc_feature (1)..(25): SEQ ID NO: 4414; WAN0249KP_at; Start 131; Stop 155
ttgactaaataaaatatatctgtta

SEQ ID NO: 25221 - DNA, 25 bp, Artificial
  probe
  misc_feature (1)..(25): SEQ ID NO: 4414; WAN0249KP_at; Start 19; Stop 43
ctatttgcttaatttcattataaag

SEQ ID NO: 25222 - DNA, 25 bp, Artificial
  probe
  misc_feature (1)..(25): SEQ ID NO: 4414; WAN0249KP_at; Start 15; Stop 39
cttcctatttgcttaatttcattat

SEQ ID NO: 25223 - DNA, 25 bp, Artificial
  probe
  misc_feature (1)..(25): SEQ ID NO: 4414; WAN0249KP_at; Start 135; Stop 159
ctaaataaaatatatctgttagaat

SEQ ID NO: 25224 - DNA, 25 bp, Artificial
  probe
  misc_feature (1)..(25): SEQ ID NO: 4414; WAN0249KP_at; Start 16; Stop 40
ttcctatttgcttaatttcattata

SEQ ID NO: 25225 - DNA, 25 bp, Artificial
  probe
  misc_feature (1)..(25): SEQ ID NO: 4414; WAN0249KP_at; Start 143; Stop 167
aatatatctgttagaataaaaacaa

SEQ ID NO: 25226 - DNA, 25 bp, Artificial
  probe
  misc_feature (1)..(25): SEQ ID NO: 4642; WAN0249KQ_at; Start 8; Stop 32
ccctctttccttagaatagtaccat

SEQ ID NO: 25227 - DNA, 25 bp, Artificial
  probe
  misc_feature (1)..(25): SEQ ID NO: 4642; WAN0249KQ_at; Start 27; Stop 51
taccattatagcataattccttacc

SEQ ID NO: 25228 - DNA, 25 bp, Artificial
  probe
  misc_feature (1)..(25): SEQ ID NO: 4642; WAN0249KQ_at; Start 37; Stop 61
gcataattccttaccttctacaatt

SEQ ID NO: 25229 - DNA, 25 bp, Artificial
  probe
  misc_feature (1)..(25): SEQ ID NO: 4642; WAN0249KQ_at; Start 44; Stop 68
tccttaccttctacaattcaggcag

SEQ ID NO: 25230 - DNA, 25 bp, Artificial
  probe
  misc_feature (1)..(25): SEQ ID NO: 4642; WAN0249KQ_at; Start 45; Stop 69
ccttaccttctacaattcaggcagt

SEQ ID NO: 25231 - DNA, 25 bp, Artificial
  probe
  misc_feature (1)..(25): SEQ ID NO: 4642; WAN0249KQ_at; Start 49; Stop 73
accttctacaattcaggcagtctat

SEQ ID NO: 25232 - DNA, 25 bp, Artificial
  probe
  misc_feature (1)..(25): SEQ ID NO: 4642; WAN0249KQ_at; Start 21; Stop 45
gaatagtaccattatagcataattc

SEQ ID NO: 25233 - DNA, 25 bp, Artificial
  probe
  misc_feature (1)..(25): SEQ ID NO: 4642; WAN0249KQ_at; Start 12; Stop 36
ctttccttagaatagtaccattata

SEQ ID NO: 25234 - DNA, 25 bp, Artificial
  probe
  misc_feature (1)..(25): SEQ ID NO: 4642; WAN0249KQ_at; Start 36; Stop 60
agcataattccttaccttctacaat

SEQ ID NO: 25235 - DNA, 25 bp, Artificial
  probe
  misc_feature (1)..(25): SEQ ID NO: 4642; WAN0249KQ_at; Start 33; Stop 57
tatagcataattccttaccttctac

SEQ ID NO: 25236 - DNA, 25 bp, Artificial
  probe
  misc_feature (1)..(25): SEQ ID NO: 4642; WAN0249KQ_at; Start 60; Stop 84
ttcaggcagtctatttatttggatt

SEQ ID NO: 25237 - DNA, 25 bp, Artificial
  probe
  misc_feature (1)..(25): SEQ ID NO: 4642; WAN0249KQ_at; Start 48; Stop 72
taccttctacaattcaggcagtcta

SEQ ID NO: 25238 - DNA, 25 bp, Artificial
  probe
  misc_feature (1)..(25): SEQ ID NO: 4642; WAN0249KQ_at; Start 51; Stop 75
cttctacaattcaggcagtctattt

SEQ ID NO: 25239 - DNA, 25 bp, Artificial
  probe
  misc_feature (1)..(25): SEQ ID NO: 4642; WAN0249KQ_at; Start 15; Stop 39
tccttagaatagtaccattatagca

SEQ ID NO: 25240 - DNA, 25 bp, Artificial
  probe
  misc_feature (1)..(25): SEQ ID NO: 4642; WAN0249KQ_at; Start 62; Stop 86
caggcagtctatttatttggatttt

SEQ ID NO: 25241 - DNA, 25 bp, Artificial
  probe
  misc_feature (1)..(25): SEQ ID NO: 4642; WAN0249KQ_at; Start 58; Stop 82
aattcaggcagtctatttatttgga

SEQ ID NO: 25242 - DNA, 25 bp, Artificial
  probe
  misc_feature (1)..(25): SEQ ID NO: 4642; WAN0249KQ_at; Start 41; Stop 65
aattccttaccttctacaattcagg

SEQ ID NO: 25243 - DNA, 25 bp, Artificial
  probe
  misc_feature (1)..(25): SEQ ID NO: 4642; WAN0249KQ_at; Start 35; Stop 59
tagcataattccttaccttctacaa

SEQ ID NO: 25244 - DNA, 25 bp, Artificial
  probe
  misc_feature (1)..(25): SEQ ID NO: 4642; WAN0249KQ_at; Start 42; Stop 66
attccttaccttctacaattcaggc

SEQ ID NO: 25245 - DNA, 25 bp, Artificial
  probe
  misc_feature (1)..(25): SEQ ID NO: 4642; WAN0249KQ_at; Start 14; Stop 38
ttccttagaatagtaccattatagc

SEQ ID NO: 25246 - DNA, 25 bp, Artificial
  probe
  misc_feature (1)..(25): SEQ ID NO: 4642; WAN0249KQ_at; Start 61; Stop 85
tcaggcagtctatttatttggattt

SEQ ID NO: 25247 - DNA, 25 bp, Artificial
  probe
  misc_feature (1)..(25): SEQ ID NO: 4642; WAN0249KQ_at; Start 57; Stop 81
caattcaggcagtctatttatttgg

SEQ ID NO: 25248 - DNA, 25 bp, Artificial
  probe
  misc_feature (1)..(25): SEQ ID NO: 4642; WAN0249KQ_at; Start 16; Stop 40
ccttagaatagtaccattatagcat

SEQ ID NO: 25249 - DNA, 25 bp, Artificial
  probe
  misc_feature (1)..(25): SEQ ID NO: 4642; WAN0249KQ_at; Start 19; Stop 43
tagaatagtaccattatagcataat

SEQ ID NO: 25250 - DNA, 25 bp, Artificial
  probe
  misc_feature (1)..(25): SEQ ID NO: 4642; WAN0249KQ_at; Start 24; Stop 48
tagtaccattatagcataattcctt

SEQ ID NO: 25251 - DNA, 25 bp, Artificial
  probe
  misc_feature (1)..(25): SEQ ID NO: 4642; WAN0249KQ_at; Start 54; Stop 78
ctacaattcaggcagtctatttatt

SEQ ID NO: 25252 - DNA, 25 bp, Artificial
  probe
  misc_feature (1)..(25): SEQ ID NO: 4642; WAN0249KQ_at; Start 11; Stop 35
tctttccttagaatagtaccattat

SEQ ID NO: 25253 - DNA, 25 bp, Artificial
  probe
  misc_feature (1)..(25): SEQ ID NO: 4642; WAN0249KQ_at; Start 30; Stop 54
cattatagcataattccttaccttc

SEQ ID NO: 25254 - DNA, 25 bp, Artificial
  probe
  misc_feature (1)..(25): SEQ ID NO: 4642; WAN0249KQ_at; Start 46; Stop 70
cttaccttctacaattcaggcagtc

SEQ ID NO: 25255 - DNA, 25 bp, Artificial
  probe
  misc_feature (1)..(25): SEQ ID NO: 4642; WAN0249KQ_at; Start 47; Stop 71
ttaccttctacaattcaggcagtct

SEQ ID NO: 25256 - DNA, 25 bp, Artificial
  probe
  misc_feature (1)..(25): SEQ ID NO: 4642; WAN0249KQ_at; Start 17; Stop 41
cttagaatagtaccattatagcata

SEQ ID NO: 25257 - DNA, 25 bp, Artificial
  probe
  misc_feature (1)..(25): SEQ ID NO: 4642; WAN0249KQ_at; Start 50; Stop 74
ccttctacaattcaggcagtctatt

SEQ ID NO: 25258 - DNA, 25 bp, Artificial
  probe
  misc_feature (1)..(25): SEQ ID NO: 4642; WAN0249KQ_at; Start 9; Stop 33
cctctttccttagaatagtaccatt

SEQ ID NO: 25259 - DNA, 25 bp, Artificial
  probe
  misc_feature (1)..(25): SEQ ID NO: 4642; WAN0249KQ_at; Start 52; Stop 76
ttctacaattcaggcagtctattta

SEQ ID NO: 25260 - DNA, 25 bp, Artificial
  probe
  misc_feature (1)..(25): SEQ ID NO: 90; WAN0249KR_at; Start 26; Stop 50
aattgtagaaggtaaggaattatgc

SEQ ID NO: 25261 - DNA, 25 bp, Artificial
  probe
  misc_feature (1)..(25): SEQ ID NO: 90; WAN0249KR_at; Start 54; Stop 78
aatggtactattctaaggaaagagg

SEQ ID NO: 25262 - DNA, 25 bp, Artificial
  probe
  misc_feature (1)..(25): SEQ ID NO: 90; WAN0249KR_at; Start 27; Stop 51
attgtagaaggtaaggaattatgct

SEQ ID NO: 25263 - DNA, 25 bp, Artificial
  probe
  misc_feature (1)..(25): SEQ ID NO: 90; WAN0249KR_at; Start 14; Stop 38
atagactgcctgaattgtagaaggt

SEQ ID NO: 25264 - DNA, 25 bp, Artificial
  probe
  misc_feature (1)..(25): SEQ ID NO: 90; WAN0249KR_at; Start 18; Stop 42
actgcctgaattgtagaaggtaagg

SEQ ID NO: 25265 - DNA, 25 bp, Artificial
  probe
  misc_feature (1)..(25): SEQ ID NO: 90; WAN0249KR_at; Start 9; Stop 33
aataaatagactgcctgaattgtag

SEQ ID NO: 25266 - DNA, 25 bp, Artificial
  probe
  misc_feature (1)..(25): SEQ ID NO: 90; WAN0249KR_at; Start 13; Stop 37
aatagactgcctgaattgtagaagg

SEQ ID NO: 25267 - DNA, 25 bp, Artificial
  probe
  misc_feature (1)..(25): SEQ ID NO: 90; WAN0249KR_at; Start 21; Stop 45
gcctgaattgtagaaggtaaggaat

SEQ ID NO: 25268 - DNA, 25 bp, Artificial
  probe
  misc_feature (1)..(25): SEQ ID NO: 90; WAN0249KR_at; Start 31; Stop 55
tagaaggtaaggaattatgctataa

SEQ ID NO: 25269 - DNA, 25 bp, Artificial
  probe
  misc_feature (1)..(25): SEQ ID NO: 90; WAN0249KR_at; Start 2; Stop 26
aaatccaaataaatagactgcctga

SEQ ID NO: 25270 - DNA, 25 bp, Artificial
  probe
  misc_feature (1)..(25): SEQ ID NO: 90; WAN0249KR_at; Start 16; Stop 40
agactgcctgaattgtagaaggtaa

SEQ ID NO: 25271 - DNA, 25 bp, Artificial
  probe
  misc_feature (1)..(25): SEQ ID NO: 90; WAN0249KR_at; Start 11; Stop 35
taaatagactgcctgaattgtagaa

SEQ ID NO: 25272 - DNA, 25 bp, Artificial
  probe
  misc_feature (1)..(25): SEQ ID NO: 90; WAN0249KR_at; Start 61; Stop 85
ctattctaaggaaagagggtgttag

SEQ ID NO: 25273 - DNA, 25 bp, Artificial
  probe
  misc_feature (1)..(25): SEQ ID NO: 90; WAN0249KR_at; Start 7; Stop 31
caaataaatagactgcctgaattgt

SEQ ID NO: 25274 - DNA, 25 bp, Artificial
  probe
  misc_feature (1)..(25): SEQ ID NO: 90; WAN0249KR_at; Start 15; Stop 39
tagactgcctgaattgtagaaggta

SEQ ID NO: 25275 - DNA, 25 bp, Artificial
  probe
  misc_feature (1)..(25): SEQ ID NO: 90; WAN0249KR_at; Start 3; Stop 27
aatccaaataaatagactgcctgaa

SEQ ID NO: 25276 - DNA, 25 bp, Artificial
  probe
  misc_feature (1)..(25): SEQ ID NO: 90; WAN0249KR_at; Start 5; Stop 29
tccaaataaatagactgcctgaatt

SEQ ID NO: 25277 - DNA, 25 bp, Artificial
  probe
  misc_feature (1)..(25): SEQ ID NO: 90; WAN0249KR_at; Start 33; Stop 57
gaaggtaaggaattatgctataatg

SEQ ID NO: 25278 - DNA, 25 bp, Artificial
  probe
  misc_feature (1)..(25): SEQ ID NO: 90; WAN0249KR_at; Start 19; Stop 43
ctgcctgaattgtagaaggtaagga

SEQ ID NO: 25279 - DNA, 25 bp, Artificial
  probe
  misc_feature (1)..(25): SEQ ID NO: 90; WAN0249KR_at; Start 22; Stop 46
cctgaattgtagaaggtaaggaatt

SEQ ID NO: 25280 - DNA, 25 bp, Artificial
  probe
  misc_feature (1)..(25): SEQ ID NO: 90; WAN0249KR_at; Start 38; Stop 62
taaggaattatgctataatggtact

SEQ ID NO: 25281 - DNA, 25 bp, Artificial
  probe
  misc_feature (1)..(25): SEQ ID NO: 90; WAN0249KR_at; Start 6; Stop 30
ccaaataaatagactgcctgaattg

SEQ ID NO: 25282 - DNA, 25 bp, Artificial
  probe
  misc_feature (1)..(25): SEQ ID NO: 90; WAN0249KR_at; Start 20; Stop 44
tgcctgaattgtagaaggtaaggaa

SEQ ID NO: 25283 - DNA, 25 bp, Artificial
  probe
  misc_feature (1)..(25): SEQ ID NO: 90; WAN0249KR_at; Start 53; Stop 77
taatggtactattctaaggaaagag

SEQ ID NO: 25284 - DNA, 25 bp, Artificial
  probe
  misc_feature (1)..(25): SEQ ID NO: 90; WAN0249KR_at; Start 51; Stop 75
tataatggtactattctaaggaaag

SEQ ID NO: 25285 - DNA, 25 bp, Artificial
  probe
  misc_feature (1)..(25): SEQ ID NO: 90; WAN0249KR_at; Start 17; Stop 41
gactgcctgaattgtagaaggtaag

SEQ ID NO: 25286 - DNA, 25 bp, Artificial
  probe
  misc_feature (1)..(25): SEQ ID NO: 90; WAN0249KR_at; Start 29; Stop 53
tgtagaaggtaaggaattatgctat

SEQ ID NO: 25287 - DNA, 25 bp, Artificial
  probe
  misc_feature (1)..(25): SEQ ID NO: 90; WAN0249KR_at; Start 1; Stop 25
aaaatccaaataaatagactgcctg

SEQ ID NO: 25288 - DNA, 25 bp, Artificial
  probe
  misc_feature (1)..(25): SEQ ID NO: 90; WAN0249KR_at; Start 62; Stop 86
tattctaaggaaagagggtgttaga

SEQ ID NO: 25289 - DNA, 25 bp, Artificial
  probe
  misc_feature (1)..(25): SEQ ID NO: 90; WAN0249KR_at; Start 48; Stop 72
tgctataatggtactattctaagga

SEQ ID NO: 25290 - DNA, 25 bp, Artificial
  probe
  misc_feature (1)..(25): SEQ ID NO: 90; WAN0249KR_at; Start 49; Stop 73
gctataatggtactattctaaggaa

SEQ ID NO: 25291 - DNA, 25 bp, Artificial
  probe
  misc_feature (1)..(25): SEQ ID NO: 90; WAN0249KR_at; Start 46; Stop 70
tatgctataatggtactattctaag

SEQ ID NO: 25292 - DNA, 25 bp, Artificial
  probe
  misc_feature (1)..(25): SEQ ID NO: 90; WAN0249KR_at; Start 12; Stop 36
aaatagactgcctgaattgtagaag

SEQ ID NO: 25293 - DNA, 25 bp, Artificial
  probe
  misc_feature (1)..(25): SEQ ID NO: 90; WAN0249KR_at; Start 55; Stop 79
atggtactattctaaggaaagaggg

SEQ ID NO: 25294 - DNA, 25 bp, Artificial
  probe
  misc_feature (1)..(25): SEQ ID NO: 4768; WAN0249KS_at; Start 51; Stop 75
gatagttagattaatactatcagcc

SEQ ID NO: 25295 - DNA, 25 bp, Artificial
  probe
  misc_feature (1)..(25): SEQ ID NO: 4768; WAN0249KS_at; Start 37; Stop 61
taacctgtaaggctgatagttagat

SEQ ID NO: 25296 - DNA, 25 bp, Artificial
  probe
  misc_feature (1)..(25): SEQ ID NO: 4768; WAN0249KS_at; Start 38; Stop 62
aacctgtaaggctgatagttagatt

SEQ ID NO: 25297 - DNA, 25 bp, Artificial
  probe
  misc_feature (1)..(25): SEQ ID NO: 4768; WAN0249KS_at; Start 2; Stop 26
taatcttgacattatagtttttctg

SEQ ID NO: 25298 - DNA, 25 bp, Artificial
  probe
  misc_feature (1)..(25): SEQ ID NO: 4768; WAN0249KS_at; Start 4; Stop 28
atcttgacattatagtttttctgaa

SEQ ID NO: 25299 - DNA, 25 bp, Artificial
  probe
  misc_feature (1)..(25): SEQ ID NO: 4768; WAN0249KS_at; Start 6; Stop 30
cttgacattatagtttttctgaaac

SEQ ID NO: 25300 - DNA, 25 bp, Artificial
  probe
  misc_feature (1)..(25): SEQ ID NO: 4768; WAN0249KS_at; Start 47; Stop 71
ggctgatagttagattaatactatc

SEQ ID NO: 25301 - DNA, 25 bp, Artificial
  probe
  misc_feature (1)..(25): SEQ ID NO: 4768; WAN0249KS_at; Start 35; Stop 59
aataacctgtaaggctgatagttag

SEQ ID NO: 25302 - DNA, 25 bp, Artificial
  probe
  misc_feature (1)..(25): SEQ ID NO: 4768; WAN0249KS_at; Start 59; Stop 83
gattaatactatcagccttataatt

SEQ ID NO: 25303 - DNA, 25 bp, Artificial
  probe
  misc_feature (1)..(25): SEQ ID NO: 4768; WAN0249KS_at; Start 7; Stop 31
ttgacattatagtttttctgaaacg

SEQ ID NO: 25304 - DNA, 25 bp, Artificial
  probe
  misc_feature (1)..(25): SEQ ID NO: 4768; WAN0249KS_at; Start 53; Stop 77
tagttagattaatactatcagcctt

SEQ ID NO: 25305 - DNA, 25 bp, Artificial
  probe
  misc_feature (1)..(25): SEQ ID NO: 4768; WAN0249KS_at; Start 8; Stop 32
tgacattatagtttttctgaaacgt

SEQ ID NO: 25306 - DNA, 25 bp, Artificial
  probe
  misc_feature (1)..(25): SEQ ID NO: 4768; WAN0249KS_at; Start 58; Stop 82
agattaatactatcagccttataat

SEQ ID NO: 25307 - DNA, 25 bp, Artificial
  probe
  misc_feature (1)..(25): SEQ ID NO: 4768; WAN0249KS_at; Start 34; Stop 58
aaataacctgtaaggctgatagtta

SEQ ID NO: 25308 - DNA, 25 bp, Artificial
  probe
  misc_feature (1)..(25): SEQ ID NO: 4768; WAN0249KS_at; Start 41; Stop 65
ctgtaaggctgatagttagattaat

SEQ ID NO: 25309 - DNA, 25 bp, Artificial
  probe
  misc_feature (1)..(25): SEQ ID NO: 4768; WAN0249KS_at; Start 56; Stop 80
ttagattaatactatcagccttata

SEQ ID NO: 25310 - DNA, 25 bp, Artificial
  probe
  misc_feature (1)..(25): SEQ ID NO: 4768; WAN0249KS_at; Start 30; Stop 54
cgttaaataacctgtaaggctgata

SEQ ID NO: 25311 - DNA, 25 bp, Artificial
  probe
  misc_feature (1)..(25): SEQ ID NO: 4768; WAN0249KS_at; Start 3; Stop 27
aatcttgacattatagtttttctga

SEQ ID NO: 25312 - DNA, 25 bp, Artificial
  probe
  misc_feature (1)..(25): SEQ ID NO: 4768; WAN0249KS_at; Start 40; Stop 64
cctgtaaggctgatagttagattaa

SEQ ID NO: 25313 - DNA, 25 bp, Artificial
  probe
  misc_feature (1)..(25): SEQ ID NO: 4768; WAN0249KS_at; Start 33; Stop 57
taaataacctgtaaggctgatagtt

SEQ ID NO: 25314 - DNA, 25 bp, Artificial
  probe
  misc_feature (1)..(25): SEQ ID NO: 4768; WAN0249KS_at; Start 32; Stop 56
ttaaataacctgtaaggctgatagt

SEQ ID NO: 25315 - DNA, 25 bp, Artificial
  probe
  misc_feature (1)..(25): SEQ ID NO: 4768; WAN0249KS_at; Start 42; Stop 66
tgtaaggctgatagttagattaata

SEQ ID NO: 25316 - DNA, 25 bp, Artificial
  probe
  misc_feature (1)..(25): SEQ ID NO: 4768; WAN0249KS_at; Start 57; Stop 81
tagattaatactatcagccttataa

SEQ ID NO: 25317 - DNA, 25 bp, Artificial
  probe
  misc_feature (1)..(25): SEQ ID NO: 4768; WAN0249KS_at; Start 43; Stop 67
gtaaggctgatagttagattaatac

SEQ ID NO: 25318 - DNA, 25 bp, Artificial
  probe
  misc_feature (1)..(25): SEQ ID NO: 4768; WAN0249KS_at; Start 39; Stop 63
acctgtaaggctgatagttagatta

SEQ ID NO: 25319 - DNA, 25 bp, Artificial
  probe
  misc_feature (1)..(25): SEQ ID NO: 4768; WAN0249KS_at; Start 45; Stop 69
aaggctgatagttagattaatacta

SEQ ID NO: 25320 - DNA, 25 bp, Artificial
  probe
  misc_feature (1)..(25): SEQ ID NO: 4768; WAN0249KS_at; Start 31; Stop 55
gttaaataacctgtaaggctgatag

SEQ ID NO: 25321 - DNA, 25 bp, Artificial
  probe
  misc_feature (1)..(25): SEQ ID NO: 4768; WAN0249KS_at; Start 55; Stop 79
gttagattaatactatcagccttat

SEQ ID NO: 25322 - DNA, 25 bp, Artificial
  probe
  misc_feature (1)..(25): SEQ ID NO: 4768; WAN0249KS_at; Start 29; Stop 53
acgttaaataacctgtaaggctgat

SEQ ID NO: 25323 - DNA, 25 bp, Artificial
  probe
  misc_feature (1)..(25): SEQ ID NO: 4768; WAN0249KS_at; Start 52; Stop 76
atagttagattaatactatcagcct

SEQ ID NO: 25324 - DNA, 25 bp, Artificial
  probe
  misc_feature (1)..(25): SEQ ID NO: 4768; WAN0249KS_at; Start 5; Stop 29
tcttgacattatagtttttctgaaa

SEQ ID NO: 25325 - DNA, 25 bp, Artificial
  probe
  misc_feature (1)..(25): SEQ ID NO: 4768; WAN0249KS_at; Start 60; Stop 84
attaatactatcagccttataatta

SEQ ID NO: 25326 - DNA, 25 bp, Artificial
  probe
  misc_feature (1)..(25): SEQ ID NO: 4768; WAN0249KS_at; Start 54; Stop 78
agttagattaatactatcagcctta

SEQ ID NO: 25327 - DNA, 25 bp, Artificial
  probe
  misc_feature (1)..(25): SEQ ID NO: 4768; WAN0249KS_at; Start 44; Stop 68
taaggctgatagttagattaatact

SEQ ID NO: 25328 - DNA, 25 bp, Artificial
  probe
  misc_feature (1)..(25): SEQ ID NO: 4452; WAN0249KT_at; Start 10; Stop 34
ggctgatagtattaatctaactatc

SEQ ID NO: 25329 - DNA, 25 bp, Artificial
  probe
  misc_feature (1)..(25): SEQ ID NO: 4452; WAN0249KT_at; Start 60; Stop 84
agaaaaactataatgtcaagattaa

SEQ ID NO: 25330 - DNA, 25 bp, Artificial
  probe
  misc_feature (1)..(25): SEQ ID NO: 4452; WAN0249KT_at; Start 2; Stop 26
aattataaggctgatagtattaatc

SEQ ID NO: 25331 - DNA, 25 bp, Artificial
  probe
  misc_feature (1)..(25): SEQ ID NO: 4452; WAN0249KT_at; Start 55; Stop 79
gtttcagaaaaactataatgtcaag

SEQ ID NO: 25332 - DNA, 25 bp, Artificial
  probe
  misc_feature (1)..(25): SEQ ID NO: 4452; WAN0249KT_at; Start 28; Stop 52
aactatcagccttacaggttattta

SEQ ID NO: 25333 - DNA, 25 bp, Artificial
  probe
  misc_feature (1)..(25): SEQ ID NO: 4452; WAN0249KT_at; Start 14; Stop 38
gatagtattaatctaactatcagcc

SEQ ID NO: 25334 - DNA, 25 bp, Artificial
  probe
  misc_feature (1)..(25): SEQ ID NO: 4452; WAN0249KT_at; Start 27; Stop 51
taactatcagccttacaggttattt

SEQ ID NO: 25335 - DNA, 25 bp, Artificial
  probe
  misc_feature (1)..(25): SEQ ID NO: 4452; WAN0249KT_at; Start 26; Stop 50
ctaactatcagccttacaggttatt

SEQ ID NO: 25336 - DNA, 25 bp, Artificial
  probe
  misc_feature (1)..(25): SEQ ID NO: 4452; WAN0249KT_at; Start 29; Stop 53
actatcagccttacaggttatttaa

SEQ ID NO: 25337 - DNA, 25 bp, Artificial
  probe
  misc_feature (1)..(25): SEQ ID NO: 4452; WAN0249KT_at; Start 4; Stop 28
ttataaggctgatagtattaatcta

SEQ ID NO: 25338 - DNA, 25 bp, Artificial
  probe
  misc_feature (1)..(25): SEQ ID NO: 4452; WAN0249KT_at; Start 31; Stop 55
tatcagccttacaggttatttaacg

SEQ ID NO: 25339 - DNA, 25 bp, Artificial
  probe
  misc_feature (1)..(25): SEQ ID NO: 4452; WAN0249KT_at; Start 9; Stop 33
aggctgatagtattaatctaactat

SEQ ID NO: 25340 - DNA, 25 bp, Artificial
  probe
  misc_feature (1)..(25): SEQ ID NO: 4452; WAN0249KT_at; Start 24; Stop 48
atctaactatcagccttacaggtta

SEQ ID NO: 25341 - DNA, 25 bp, Artificial
  probe
  misc_feature (1)..(25): SEQ ID NO: 4452; WAN0249KT_at; Start 54; Stop 78
cgtttcagaaaaactataatgtcaa

SEQ ID NO: 25342 - DNA, 25 bp, Artificial
  probe
  misc_feature (1)..(25): SEQ ID NO: 4452; WAN0249KT_at; Start 30; Stop 54
ctatcagccttacaggttatttaac

SEQ ID NO: 25343 - DNA, 25 bp, Artificial
  probe
  misc_feature (1)..(25): SEQ ID NO: 4452; WAN0249KT_at; Start 58; Stop 82
tcagaaaaactataatgtcaagatt

SEQ ID NO: 25344 - DNA, 25 bp, Artificial
  probe
  misc_feature (1)..(25): SEQ ID NO: 4452; WAN0249KT_at; Start 20; Stop 44
attaatctaactatcagccttacag

SEQ ID NO: 25345 - DNA, 25 bp, Artificial
  probe
  misc_feature (1)..(25): SEQ ID NO: 4452; WAN0249KT_at; Start 32; Stop 56
atcagccttacaggttatttaacgt

SEQ ID NO: 25346 - DNA, 25 bp, Artificial
  probe
  misc_feature (1)..(25): SEQ ID NO: 4452; WAN0249KT_at; Start 53; Stop 77
acgtttcagaaaaactataatgtca

SEQ ID NO: 25347 - DNA, 25 bp, Artificial
  probe
  misc_feature (1)..(25): SEQ ID NO: 4452; WAN0249KT_at; Start 5; Stop 29
tataaggctgatagtattaatctaa

SEQ ID NO: 25348 - DNA, 25 bp, Artificial
  probe
  misc_feature (1)..(25): SEQ ID NO: 4452; WAN0249KT_at; Start 59; Stop 83
cagaaaaactataatgtcaagatta

SEQ ID NO: 25349 - DNA, 25 bp, Artificial
  probe
  misc_feature (1)..(25): SEQ ID NO: 4452; WAN0249KT_at; Start 22; Stop 46
taatctaactatcagccttacaggt

SEQ ID NO: 25350 - DNA, 25 bp, Artificial
  probe
  misc_feature (1)..(25): SEQ ID NO: 4452; WAN0249KT_at; Start 21; Stop 45
ttaatctaactatcagccttacagg

SEQ ID NO: 25351 - DNA, 25 bp, Artificial
  probe
  misc_feature (1)..(25): SEQ ID NO: 4452; WAN0249KT_at; Start 16; Stop 40
tagtattaatctaactatcagcctt

SEQ ID NO: 25352 - DNA, 25 bp, Artificial
  probe
  misc_feature (1)..(25): SEQ ID NO: 4452; WAN0249KT_at; Start 18; Stop 42
gtattaatctaactatcagccttac

SEQ ID NO: 25353 - DNA, 25 bp, Artificial
  probe
  misc_feature (1)..(25): SEQ ID NO: 4452; WAN0249KT_at; Start 23; Stop 47
aatctaactatcagccttacaggtt

SEQ ID NO: 25354 - DNA, 25 bp, Artificial
  probe
  misc_feature (1)..(25): SEQ ID NO: 4452; WAN0249KT_at; Start 6; Stop 30
ataaggctgatagtattaatctaac

SEQ ID NO: 25355 - DNA, 25 bp, Artificial
  probe
  misc_feature (1)..(25): SEQ ID NO: 4452; WAN0249KT_at; Start 19; Stop 43
tattaatctaactatcagccttaca

SEQ ID NO: 25356 - DNA, 25 bp, Artificial
  probe
  misc_feature (1)..(25): SEQ ID NO: 4452; WAN0249KT_at; Start 8; Stop 32
aaggctgatagtattaatctaacta

SEQ ID NO: 25357 - DNA, 25 bp, Artificial
  probe
  misc_feature (1)..(25): SEQ ID NO: 4452; WAN0249KT_at; Start 57; Stop 81
ttcagaaaaactataatgtcaagat

SEQ ID NO: 25358 - DNA, 25 bp, Artificial
  probe
  misc_feature (1)..(25): SEQ ID NO: 4452; WAN0249KT_at; Start 15; Stop 39
atagtattaatctaactatcagcct

SEQ ID NO: 25359 - DNA, 25 bp, Artificial
  probe
  misc_feature (1)..(25): SEQ ID NO: 4452; WAN0249KT_at; Start 17; Stop 41
agtattaatctaactatcagcctta

SEQ ID NO: 25360 - DNA, 25 bp, Artificial
  probe
  misc_feature (1)..(25): SEQ ID NO: 4452; WAN0249KT_at; Start 7; Stop 31
taaggctgatagtattaatctaact

SEQ ID NO: 25361 - DNA, 25 bp, Artificial
  probe
  misc_feature (1)..(25): SEQ ID NO: 4452; WAN0249KT_at; Start 56; Stop 80
tttcagaaaaactataatgtcaaga

SEQ ID NO: 25362 - DNA, 25 bp, Artificial
  probe
  misc_feature (1)..(25): SEQ ID NO: 4792; WAN0249KU_at; Start 40; Stop 64
tgagaagattagaaacagttctctc

SEQ ID NO: 25363 - DNA, 25 bp, Artificial
  probe
  misc_feature (1)..(25): SEQ ID NO: 4792; WAN0249KU_at; Start 66; Stop 90
tttctcctagtataatgattggtag

SEQ ID NO: 25364 - DNA, 25 bp, Artificial
  probe
  misc_feature (1)..(25): SEQ ID NO: 4792; WAN0249KU_at; Start 19; Stop 43
ttagcgtcttaaagagacatttgag

SEQ ID NO: 25365 - DNA, 25 bp, Artificial
  probe
  misc_feature (1)..(25): SEQ ID NO: 4792; WAN0249KU_at; Start 56; Stop 80
agttctctcttttctcctagtataa

SEQ ID NO: 25366 - DNA, 25 bp, Artificial
  probe
  misc_feature (1)..(25): SEQ ID NO: 4792; WAN0249KU_at; Start 45; Stop 69
agattagaaacagttctctcttttc

SEQ ID NO: 25367 - DNA, 25 bp, Artificial
  probe
  misc_feature (1)..(25): SEQ ID NO: 4792; WAN0249KU_at; Start 32; Stop 56
gagacatttgagaagattagaaaca

SEQ ID NO: 25368 - DNA, 25 bp, Artificial
  probe
  misc_feature (1)..(25): SEQ ID NO: 4792; WAN0249KU_at; Start 17; Stop 41
gtttagcgtcttaaagagacatttg

SEQ ID NO: 25369 - DNA, 25 bp, Artificial
  probe
  misc_feature (1)..(25): SEQ ID NO: 4792; WAN0249KU_at; Start 22; Stop 46
gcgtcttaaagagacatttgagaag

SEQ ID NO: 25370 - DNA, 25 bp, Artificial
  probe
  misc_feature (1)..(25): SEQ ID NO: 4792; WAN0249KU_at; Start 63; Stop 87
tcttttctcctagtataatgattgg

SEQ ID NO: 25371 - DNA, 25 bp, Artificial
  probe
  misc_feature (1)..(25): SEQ ID NO: 4792; WAN0249KU_at; Start 23; Stop 47
cgtcttaaagagacatttgagaaga

SEQ ID NO: 25372 - DNA, 25 bp, Artificial
  probe
  misc_feature (1)..(25): SEQ ID NO: 4792; WAN0249KU_at; Start 5; Stop 29
tctctagtgtttgtttagcgtctta

SEQ ID NO: 25373 - DNA, 25 bp, Artificial
  probe
  misc_feature (1)..(25): SEQ ID NO: 4792; WAN0249KU_at; Start 20; Stop 44
tagcgtcttaaagagacatttgaga

SEQ ID NO: 25374 - DNA, 25 bp, Artificial
  probe
  misc_feature (1)..(25): SEQ ID NO: 4792; WAN0249KU_at; Start 38; Stop 62
tttgagaagattagaaacagttctc

SEQ ID NO: 25375 - DNA, 25 bp, Artificial
  probe
  misc_feature (1)..(25): SEQ ID NO: 4792; WAN0249KU_at; Start 51; Stop 75
gaaacagttctctcttttctcctag

SEQ ID NO: 25376 - DNA, 25 bp, Artificial
  probe
  misc_feature (1)..(25): SEQ ID NO: 4792; WAN0249KU_at; Start 43; Stop 67
gaagattagaaacagttctctcttt

SEQ ID NO: 25377 - DNA, 25 bp, Artificial
  probe
  misc_feature (1)..(25): SEQ ID NO: 4792; WAN0249KU_at; Start 12; Stop 36
tgtttgtttagcgtcttaaagagac

SEQ ID NO: 25378 - DNA, 25 bp, Artificial
  probe
  misc_feature (1)..(25): SEQ ID NO: 4792; WAN0249KU_at; Start 53; Stop 77
aacagttctctcttttctcctagta

SEQ ID NO: 25379 - DNA, 25 bp, Artificial
  probe
  misc_feature (1)..(25): SEQ ID NO: 4792; WAN0249KU_at; Start 34; Stop 58
gacatttgagaagattagaaacagt

SEQ ID NO: 25380 - DNA, 25 bp, Artificial
  probe
  misc_feature (1)..(25): SEQ ID NO: 4792; WAN0249KU_at; Start 55; Stop 79
cagttctctcttttctcctagtata

SEQ ID NO: 25381 - DNA, 25 bp, Artificial
  probe
  misc_feature (1)..(25): SEQ ID NO: 4792; WAN0249KU_at; Start 36; Stop 60
catttgagaagattagaaacagttc

SEQ ID NO: 25382 - DNA, 25 bp, Artificial
  probe
  misc_feature (1)..(25): SEQ ID NO: 4792; WAN0249KU_at; Start 8; Stop 32
ctagtgtttgtttagcgtcttaaag

SEQ ID NO: 25383 - DNA, 25 bp, Artificial
  probe
  misc_feature (1)..(25): SEQ ID NO: 4792; WAN0249KU_at; Start 71; Stop 95
cctagtataatgattggtaggaagg

SEQ ID NO: 25384 - DNA, 25 bp, Artificial
  probe
  misc_feature (1)..(25): SEQ ID NO: 4792; WAN0249KU_at; Start 68; Stop 92
tctcctagtataatgattggtagga

SEQ ID NO: 25385 - DNA, 25 bp, Artificial
  probe
  misc_feature (1)..(25): SEQ ID NO: 4792; WAN0249KU_at; Start 73; Stop 97
tagtataatgattggtaggaaggga

SEQ ID NO: 25386 - DNA, 25 bp, Artificial
  probe
  misc_feature (1)..(25): SEQ ID NO: 4792; WAN0249KU_at; Start 2; Stop 26
tagtctctagtgtttgtttagcgtc

SEQ ID NO: 25387 - DNA, 25 bp, Artificial
  probe
  misc_feature (1)..(25): SEQ ID NO: 4792; WAN0249KU_at; Start 59; Stop 83
tctctcttttctcctagtataatga

SEQ ID NO: 25388 - DNA, 25 bp, Artificial
  probe
  misc_feature (1)..(25): SEQ ID NO: 4792; WAN0249KU_at; Start 26; Stop 50
cttaaagagacatttgagaagatta

SEQ ID NO: 25389 - DNA, 25 bp, Artificial
  probe
  misc_feature (1)..(25): SEQ ID NO: 4792; WAN0249KU_at; Start 41; Stop 65
gagaagattagaaacagttctctct

SEQ ID NO: 25390 - DNA, 25 bp, Artificial
  probe
  misc_feature (1)..(25): SEQ ID NO: 4792; WAN0249KU_at; Start 10; Stop 34
agtgtttgtttagcgtcttaaagag

SEQ ID NO: 25391 - DNA, 25 bp, Artificial
  probe
  misc_feature (1)..(25): SEQ ID NO: 4792; WAN0249KU_at; Start 14; Stop 38
tttgtttagcgtcttaaagagacat

SEQ ID NO: 25392 - DNA, 25 bp, Artificial
  probe
  misc_feature (1)..(25): SEQ ID NO: 4792; WAN0249KU_at; Start 6; Stop 30
ctctagtgtttgtttagcgtcttaa

SEQ ID NO: 25393 - DNA, 25 bp, Artificial
  probe
  misc_feature (1)..(25): SEQ ID NO: 4792; WAN0249KU_at; Start 3; Stop 27
agtctctagtgtttgtttagcgtct

SEQ ID NO: 25394 - DNA, 25 bp, Artificial
  probe
  misc_feature (1)..(25): SEQ ID NO: 4792; WAN0249KU_at; Start 13; Stop 37
gtttgtttagcgtcttaaagagaca

SEQ ID NO: 25395 - DNA, 25 bp, Artificial
  probe
  misc_feature (1)..(25): SEQ ID NO: 4792; WAN0249KU_at; Start 28; Stop 52
taaagagacatttgagaagattaga

SEQ ID NO: 25396 - DNA, 25 bp, Artificial
  probe
  misc_feature (1)..(25): SEQ ID NO: 3494; WAN0249KV_at; Start 19; Stop 43
ccaatcattatactaggagaaaaga

SEQ ID NO: 25397 - DNA, 25 bp, Artificial
  probe
  misc_feature (1)..(25): SEQ ID NO: 3494; WAN0249KV_at; Start 23; Stop 47
tcattatactaggagaaaagagaga

SEQ ID NO: 25398 - DNA, 25 bp, Artificial
  probe
  misc_feature (1)..(25): SEQ ID NO: 3494; WAN0249KV_at; Start 26; Stop 50
ttatactaggagaaaagagagaact

SEQ ID NO: 25399 - DNA, 25 bp, Artificial
  probe
  misc_feature (1)..(25): SEQ ID NO: 3494; WAN0249KV_at; Start 27; Stop 51
tatactaggagaaaagagagaactg

SEQ ID NO: 25400 - DNA, 25 bp, Artificial
  probe
  misc_feature (1)..(25): SEQ ID NO: 3494; WAN0249KV_at; Start 78; Stop 102
aagacgctaaacaaacactagagac

SEQ ID NO: 25401 - DNA, 25 bp, Artificial
  probe
  misc_feature (1)..(25): SEQ ID NO: 3494; WAN0249KV_at; Start 1; Stop 25
cttctctctcccttcctaccaatca

SEQ ID NO: 25402 - DNA, 25 bp, Artificial
  probe
  misc_feature (1)..(25): SEQ ID NO: 3494; WAN0249KV_at; Start 62; Stop 86
tctcaaatgtctctttaagacgcta

SEQ ID NO: 25403 - DNA, 25 bp, Artificial
  probe
  misc_feature (1)..(25): SEQ ID NO: 3494; WAN0249KV_at; Start 56; Stop 80
taatcttctcaaatgtctctttaag

SEQ ID NO: 25404 - DNA, 25 bp, Artificial
  probe
  misc_feature (1)..(25): SEQ ID NO: 3494; WAN0249KV_at; Start 46; Stop 70
gaactgtttctaatcttctcaaatg

SEQ ID NO: 25405 - DNA, 25 bp, Artificial
  probe
  misc_feature (1)..(25): SEQ ID NO: 3494; WAN0249KV_at; Start 65; Stop 89
caaatgtctctttaagacgctaaac

SEQ ID NO: 25406 - DNA, 25 bp, Artificial
  probe
  misc_feature (1)..(25): SEQ ID NO: 3494; WAN0249KV_at; Start 42; Stop 66
gagagaactgtttctaatcttctca

SEQ ID NO: 25407 - DNA, 25 bp, Artificial
  probe
  misc_feature (1)..(25): SEQ ID NO: 3494; WAN0249KV_at; Start 11; Stop 35
ccttcctaccaatcattatactagg

SEQ ID NO: 25408 - DNA, 25 bp, Artificial
  probe
  misc_feature (1)..(25): SEQ ID NO: 3494; WAN0249KV_at; Start 24; Stop 48
cattatactaggagaaaagagagaa

SEQ ID NO: 25409 - DNA, 25 bp, Artificial
  probe
  misc_feature (1)..(25): SEQ ID NO: 3494; WAN0249KV_at; Start 59; Stop 83
tcttctcaaatgtctctttaagacg

SEQ ID NO: 25410 - DNA, 25 bp, Artificial
  probe
  misc_feature (1)..(25): SEQ ID NO: 3494; WAN0249KV_at; Start 70; Stop 94
gtctctttaagacgctaaacaaaca

SEQ ID NO: 25411 - DNA, 25 bp, Artificial
  probe
  misc_feature (1)..(25): SEQ ID NO: 3494; WAN0249KV_at; Start 67; Stop 91
aatgtctctttaagacgctaaacaa

SEQ ID NO: 25412 - DNA, 25 bp, Artificial
  probe
  misc_feature (1)..(25): SEQ ID NO: 3494; WAN0249KV_at; Start 69; Stop 93
tgtctctttaagacgctaaacaaac

SEQ ID NO: 25413 - DNA, 25 bp, Artificial
  probe
  misc_feature (1)..(25): SEQ ID NO: 3494; WAN0249KV_at; Start 34; Stop 58
ggagaaaagagagaactgtttctaa

SEQ ID NO: 25414 - DNA, 25 bp, Artificial
  probe
  misc_feature (1)..(25): SEQ ID NO: 3494; WAN0249KV_at; Start 74; Stop 98
ctttaagacgctaaacaaacactag

SEQ ID NO: 25415 - DNA, 25 bp, Artificial
  probe
  misc_feature (1)..(25): SEQ ID NO: 3494; WAN0249KV_at; Start 50; Stop 74
tgtttctaatcttctcaaatgtctc

SEQ ID NO: 25416 - DNA, 25 bp, Artificial
  probe
  misc_feature (1)..(25): SEQ ID NO: 3494; WAN0249KV_at; Start 39; Stop 63
aaagagagaactgtttctaatcttc

SEQ ID NO: 25417 - DNA, 25 bp, Artificial
  probe
  misc_feature (1)..(25): SEQ ID NO: 3494; WAN0249KV_at; Start 72; Stop 96
ctctttaagacgctaaacaaacact

SEQ ID NO: 25418 - DNA, 25 bp, Artificial
  probe
  misc_feature (1)..(25): SEQ ID NO: 3494; WAN0249KV_at; Start 32; Stop 56
taggagaaaagagagaactgtttct

SEQ ID NO: 25419 - DNA, 25 bp, Artificial
  probe
  misc_feature (1)..(25): SEQ ID NO: 3494; WAN0249KV_at; Start 37; Stop 61
gaaaagagagaactgtttctaatct

SEQ ID NO: 25420 - DNA, 25 bp, Artificial
  probe
  misc_feature (1)..(25): SEQ ID NO: 3494; WAN0249KV_at; Start 81; Stop 105
acgctaaacaaacactagagactaa

SEQ ID NO: 25421 - DNA, 25 bp, Artificial
  probe
  misc_feature (1)..(25): SEQ ID NO: 3494; WAN0249KV_at; Start 29; Stop 53
tactaggagaaaagagagaactgtt

SEQ ID NO: 25422 - DNA, 25 bp, Artificial
  probe
  misc_feature (1)..(25): SEQ ID NO: 3494; WAN0249KV_at; Start 13; Stop 37
ttcctaccaatcattatactaggag

SEQ ID NO: 25423 - DNA, 25 bp, Artificial
  probe
  misc_feature (1)..(25): SEQ ID NO: 3494; WAN0249KV_at; Start 20; Stop 44
caatcattatactaggagaaaagag

SEQ ID NO: 25424 - DNA, 25 bp, Artificial
  probe
  misc_feature (1)..(25): SEQ ID NO: 3494; WAN0249KV_at; Start 31; Stop 55
ctaggagaaaagagagaactgtttc

SEQ ID NO: 25425 - DNA, 25 bp, Artificial
  probe
  misc_feature (1)..(25): SEQ ID NO: 3494; WAN0249KV_at; Start 77; Stop 101
taagacgctaaacaaacactagaga

SEQ ID NO: 25426 - DNA, 25 bp, Artificial
  probe
  misc_feature (1)..(25): SEQ ID NO: 3494; WAN0249KV_at; Start 15; Stop 39
cctaccaatcattatactaggagaa

SEQ ID NO: 25427 - DNA, 25 bp, Artificial
  probe
  misc_feature (1)..(25): SEQ ID NO: 3494; WAN0249KV_at; Start 76; Stop 100
ttaagacgctaaacaaacactagag

SEQ ID NO: 25428 - DNA, 25 bp, Artificial
  probe
  misc_feature (1)..(25): SEQ ID NO: 3494; WAN0249KV_at; Start 80; Stop 104
gacgctaaacaaacactagagacta

SEQ ID NO: 25429 - DNA, 25 bp, Artificial
  probe
  misc_feature (1)..(25): SEQ ID NO: 3494; WAN0249KV_at; Start 17; Stop 41
taccaatcattatactaggagaaaa

SEQ ID NO: 25430 - DNA, 25 bp, Artificial
  probe
  misc_feature (1)..(25): SEQ ID NO: 3511; WAN0249KW_at; Start 57; Stop 81
aaatacgaatagataggtaggagga

SEQ ID NO: 25431 - DNA, 25 bp, Artificial
  probe
  misc_feature (1)..(25): SEQ ID NO: 3511; WAN0249KW_at; Start 4; Stop 28
ttgatacaaataaaaaaatcaatcg

SEQ ID NO: 25432 - DNA, 25 bp, Artificial
  probe
  misc_feature (1)..(25): SEQ ID NO: 3511; WAN0249KW_at; Start 23; Stop 47
caatcgtaggaaaattcctgcgatt

SEQ ID NO: 25433 - DNA, 25 bp, Artificial
  probe
  misc_feature (1)..(25): SEQ ID NO: 3511; WAN0249KW_at; Start 22; Stop 46
tcaatcgtaggaaaattcctgcgat

SEQ ID NO: 25434 - DNA, 25 bp, Artificial
  probe
  misc_feature (1)..(25): SEQ ID NO: 3511; WAN0249KW_at; Start 3; Stop 27
tttgatacaaataaaaaaatcaatc

SEQ ID NO: 25435 - DNA, 25 bp, Artificial
  probe
  misc_feature (1)..(25): SEQ ID NO: 3511; WAN0249KW_at; Start 5; Stop 29
tgatacaaataaaaaaatcaatcgt

SEQ ID NO: 25436 - DNA, 25 bp, Artificial
  probe
  misc_feature (1)..(25): SEQ ID NO: 3511; WAN0249KW_at; Start 52; Stop 76
caaaaaaatacgaatagataggtag

SEQ ID NO: 25437 - DNA, 25 bp, Artificial
  probe
  misc_feature (1)..(25): SEQ ID NO: 3511; WAN0249KW_at; Start 58; Stop 82
aatacgaatagataggtaggaggaa

SEQ ID NO: 25438 - DNA, 25 bp, Artificial
  probe
  misc_feature (1)..(25): SEQ ID NO: 3511; WAN0249KW_at; Start 20; Stop 44
aatcaatcgtaggaaaattcctgcg

SEQ ID NO: 25439 - DNA, 25 bp, Artificial
  probe
  misc_feature (1)..(25): SEQ ID NO: 3511; WAN0249KW_at; Start 60; Stop 84
tacgaatagataggtaggaggaaac

SEQ ID NO: 25440 - DNA, 25 bp, Artificial
  probe
  misc_feature (1)..(25): SEQ ID NO: 3511; WAN0249KW_at; Start 21; Stop 45
atcaatcgtaggaaaattcctgcga

SEQ ID NO: 25441 - DNA, 25 bp, Artificial
  probe
  misc_feature (1)..(25): SEQ ID NO: 3511; WAN0249KW_at; Start 6; Stop 30
gatacaaataaaaaaatcaatcgta

SEQ ID NO: 25442 - DNA, 25 bp, Artificial
  probe
  misc_feature (1)..(25): SEQ ID NO: 3511; WAN0249KW_at; Start 19; Stop 43
aaatcaatcgtaggaaaattcctgc

SEQ ID NO: 25443 - DNA, 25 bp, Artificial
  probe
  misc_feature (1)..(25): SEQ ID NO: 3511; WAN0249KW_at; Start 18; Stop 42
aaaatcaatcgtaggaaaattcctg

SEQ ID NO: 25444 - DNA, 25 bp, Artificial
  probe
  misc_feature (1)..(25): SEQ ID NO: 3511; WAN0249KW_at; Start 7; Stop 31
atacaaataaaaaaatcaatcgtag

SEQ ID NO: 25445 - DNA, 25 bp, Artificial
  probe
  misc_feature (1)..(25): SEQ ID NO: 3511; WAN0249KW_at; Start 29; Stop 53
taggaaaattcctgcgattttttca

SEQ ID NO: 25446 - DNA, 25 bp, Artificial
  probe
  misc_feature (1)..(25): SEQ ID NO: 3511; WAN0249KW_at; Start 25; Stop 49
atcgtaggaaaattcctgcgatttt

SEQ ID NO: 25447 - DNA, 25 bp, Artificial
  probe
  misc_feature (1)..(25): SEQ ID NO: 3511; WAN0249KW_at; Start 51; Stop 75
tcaaaaaaatacgaatagataggta

SEQ ID NO: 25448 - DNA, 25 bp, Artificial
  probe
  misc_feature (1)..(25): SEQ ID NO: 3511; WAN0249KW_at; Start 59; Stop 83
atacgaatagataggtaggaggaaa

SEQ ID NO: 25449 - DNA, 25 bp, Artificial
  probe
  misc_feature (1)..(25): SEQ ID NO: 3511; WAN0249KW_at; Start 56; Stop 80
aaaatacgaatagataggtaggagg

SEQ ID NO: 25450 - DNA, 25 bp, Artificial
  probe
  misc_feature (1)..(25): SEQ ID NO: 3511; WAN0249KW_at; Start 55; Stop 79
aaaaatacgaatagataggtaggag

SEQ ID NO: 25451 - DNA, 25 bp, Artificial
  probe
  misc_feature (1)..(25): SEQ ID NO: 3511; WAN0249KW_at; Start 24; Stop 48
aatcgtaggaaaattcctgcgattt

SEQ ID NO: 25452 - DNA, 25 bp, Artificial
  probe
  misc_feature (1)..(25): SEQ ID NO: 4355; WAN0249KX_at; Start 40; Stop 64
tcgcaggaattttcctacgattgat

SEQ ID NO: 25453 - DNA, 25 bp, Artificial
  probe
  misc_feature (1)..(25): SEQ ID NO: 4355; WAN0249KX_at; Start 36; Stop 60
aaaatcgcaggaattttcctacgat

SEQ ID NO: 25454 - DNA, 25 bp, Artificial
  probe
  misc_feature (1)..(25): SEQ ID NO: 4355; WAN0249KX_at; Start 38; Stop 62
aatcgcaggaattttcctacgattg

SEQ ID NO: 25455 - DNA, 25 bp, Artificial
  probe
  misc_feature (1)..(25): SEQ ID NO: 4355; WAN0249KX_at; Start 43; Stop 67
caggaattttcctacgattgatttt

SEQ ID NO: 25456 - DNA, 25 bp, Artificial
  probe
  misc_feature (1)..(25): SEQ ID NO: 4355; WAN0249KX_at; Start 32; Stop 56
tgaaaaaatcgcaggaattttccta

SEQ ID NO: 25457 - DNA, 25 bp, Artificial
  probe
  misc_feature (1)..(25): SEQ ID NO: 4355; WAN0249KX_at; Start 57; Stop 81
cgattgatttttttatttgtatcaa

SEQ ID NO: 25458 - DNA, 25 bp, Artificial
  probe
  misc_feature (1)..(25): SEQ ID NO: 4355; WAN0249KX_at; Start 37; Stop 61
aaatcgcaggaattttcctacgatt

SEQ ID NO: 25459 - DNA, 25 bp, Artificial
  probe
  misc_feature (1)..(25): SEQ ID NO: 4355; WAN0249KX_at; Start 9; Stop 33
ctacctatctattcgtatttttttg

SEQ ID NO: 25460 - DNA, 25 bp, Artificial
  probe
  misc_feature (1)..(25): SEQ ID NO: 4355; WAN0249KX_at; Start 6; Stop 30
ctcctacctatctattcgtattttt

SEQ ID NO: 25461 - DNA, 25 bp, Artificial
  probe
  misc_feature (1)..(25): SEQ ID NO: 4355; WAN0249KX_at; Start 56; Stop 80
acgattgatttttttatttgtatca

SEQ ID NO: 25462 - DNA, 25 bp, Artificial
  probe
  misc_feature (1)..(25): SEQ ID NO: 4355; WAN0249KX_at; Start 10; Stop 34
tacctatctattcgtatttttttga

SEQ ID NO: 25463 - DNA, 25 bp, Artificial
  probe
  misc_feature (1)..(25): SEQ ID NO: 4355; WAN0249KX_at; Start 41; Stop 65
cgcaggaattttcctacgattgatt

SEQ ID NO: 25464 - DNA, 25 bp, Artificial
  probe
  misc_feature (1)..(25): SEQ ID NO: 4355; WAN0249KX_at; Start 39; Stop 63
atcgcaggaattttcctacgattga

SEQ ID NO: 25465 - DNA, 25 bp, Artificial
  probe
  misc_feature (1)..(25): SEQ ID NO: 4355; WAN0249KX_at; Start 42; Stop 66
gcaggaattttcctacgattgattt

SEQ ID NO: 25466 - DNA, 25 bp, Artificial
  probe
  misc_feature (1)..(25): SEQ ID NO: 4355; WAN0249KX_at; Start 55; Stop 79
tacgattgatttttttatttgtatc

SEQ ID NO: 25467 - DNA, 25 bp, Artificial
  probe
  misc_feature (1)..(25): SEQ ID NO: 3534; WAN0249KY_at; Start 17; Stop 41
tggttctggattgtaaaaaatgagt

SEQ ID NO: 25468 - DNA, 25 bp, Artificial
  probe
  misc_feature (1)..(25): SEQ ID NO: 3534; WAN0249KY_at; Start 35; Stop 59
aatgagttgttttaattgataagga

SEQ ID NO: 25469 - DNA, 25 bp, Artificial
  probe
  misc_feature (1)..(25): SEQ ID NO: 3534; WAN0249KY_at; Start 14; Stop 38
ttctggttctggattgtaaaaaatg

SEQ ID NO: 25470 - DNA, 25 bp, Artificial
  probe
  misc_feature (1)..(25): SEQ ID NO: 3534; WAN0249KY_at; Start 5; Stop 29
taaaggagtttctggttctggattg

SEQ ID NO: 25471 - DNA, 25 bp, Artificial
  probe
  misc_feature (1)..(25): SEQ ID NO: 3534; WAN0249KY_at; Start 19; Stop 43
gttctggattgtaaaaaatgagttg

SEQ ID NO: 25472 - DNA, 25 bp, Artificial
  probe
  misc_feature (1)..(25): SEQ ID NO: 3534; WAN0249KY_at; Start 10; Stop 34
gagtttctggttctggattgtaaaa

SEQ ID NO: 25473 - DNA, 25 bp, Artificial
  probe
  misc_feature (1)..(25): SEQ ID NO: 3534; WAN0249KY_at; Start 39; Stop 63
agttgttttaattgataaggagtag

SEQ ID NO: 25474 - DNA, 25 bp, Artificial
  probe
  misc_feature (1)..(25): SEQ ID NO: 3534; WAN0249KY_at; Start 36; Stop 60
atgagttgttttaattgataaggag

SEQ ID NO: 25475 - DNA, 25 bp, Artificial
  probe
  misc_feature (1)..(25): SEQ ID NO: 3534; WAN0249KY_at; Start 9; Stop 33
ggagtttctggttctggattgtaaa

SEQ ID NO: 25476 - DNA, 25 bp, Artificial
  probe
  misc_feature (1)..(25): SEQ ID NO: 3534; WAN0249KY_at; Start 3; Stop 27
aataaaggagtttctggttctggat

SEQ ID NO: 25477 - DNA, 25 bp, Artificial
  probe
  misc_feature (1)..(25): SEQ ID NO: 3534; WAN0249KY_at; Start 15; Stop 39
tctggttctggattgtaaaaaatga

SEQ ID NO: 25478 - DNA, 25 bp, Artificial
  probe
  misc_feature (1)..(25): SEQ ID NO: 3534; WAN0249KY_at; Start 6; Stop 30
aaaggagtttctggttctggattgt

SEQ ID NO: 25479 - DNA, 25 bp, Artificial
  probe
  misc_feature (1)..(25): SEQ ID NO: 3534; WAN0249KY_at; Start 4; Stop 28
ataaaggagtttctggttctggatt

SEQ ID NO: 25480 - DNA, 25 bp, Artificial
  probe
  misc_feature (1)..(25): SEQ ID NO: 3534; WAN0249KY_at; Start 42; Stop 66
tgttttaattgataaggagtagaat

SEQ ID NO: 25481 - DNA, 25 bp, Artificial
  probe
  misc_feature (1)..(25): SEQ ID NO: 3534; WAN0249KY_at; Start 41; Stop 65
ttgttttaattgataaggagtagaa

SEQ ID NO: 25482 - DNA, 25 bp, Artificial
  probe
  misc_feature (1)..(25): SEQ ID NO: 3534; WAN0249KY_at; Start 34; Stop 58
aaatgagttgttttaattgataagg

SEQ ID NO: 25483 - DNA, 25 bp, Artificial
  probe
  misc_feature (1)..(25): SEQ ID NO: 3534; WAN0249KY_at; Start 20; Stop 44
ttctggattgtaaaaaatgagttgt

SEQ ID NO: 25484 - DNA, 25 bp, Artificial
  probe
  misc_feature (1)..(25): SEQ ID NO: 3534; WAN0249KY_at; Start 37; Stop 61
tgagttgttttaattgataaggagt

SEQ ID NO: 25485 - DNA, 25 bp, Artificial
  probe
  misc_feature (1)..(25): SEQ ID NO: 3534; WAN0249KY_at; Start 21; Stop 45
tctggattgtaaaaaatgagttgtt

SEQ ID NO: 25486 - DNA, 25 bp, Artificial
  probe
  misc_feature (1)..(25): SEQ ID NO: 3534; WAN0249KY_at; Start 38; Stop 62
gagttgttttaattgataaggagta

SEQ ID NO: 25487 - DNA, 25 bp, Artificial
  probe
  misc_feature (1)..(25): SEQ ID NO: 3534; WAN0249KY_at; Start 16; Stop 40
ctggttctggattgtaaaaaatgag

SEQ ID NO: 25488 - DNA, 25 bp, Artificial
  probe
  misc_feature (1)..(25): SEQ ID NO: 3534; WAN0249KY_at; Start 22; Stop 46
ctggattgtaaaaaatgagttgttt

SEQ ID NO: 25489 - DNA, 25 bp, Artificial
  probe
  misc_feature (1)..(25): SEQ ID NO: 3534; WAN0249KY_at; Start 40; Stop 64
gttgttttaattgataaggagtaga

SEQ ID NO: 25490 - DNA, 25 bp, Artificial
  probe
  misc_feature (1)..(25): SEQ ID NO: 3534; WAN0249KY_at; Start 8; Stop 32
aggagtttctggttctggattgtaa

SEQ ID NO: 25491 - DNA, 25 bp, Artificial
  probe
  misc_feature (1)..(25): SEQ ID NO: 3534; WAN0249KY_at; Start 33; Stop 57
aaaatgagttgttttaattgataag

SEQ ID NO: 25492 - DNA, 25 bp, Artificial
  probe
  misc_feature (1)..(25): SEQ ID NO: 3534; WAN0249KY_at; Start 7; Stop 31
aaggagtttctggttctggattgta

SEQ ID NO: 25493 - DNA, 25 bp, Artificial
  probe
  misc_feature (1)..(25): SEQ ID NO: 3153; WAN0249KZ_at; Start 29; Stop 53
cattttttacaatccagaaccagaa

SEQ ID NO: 25494 - DNA, 25 bp, Artificial
  probe
  misc_feature (1)..(25): SEQ ID NO: 3153; WAN0249KZ_at; Start 2; Stop 26
ttctactccttatcaattaaaacaa

SEQ ID NO: 25495 - DNA, 25 bp, Artificial
  probe
  misc_feature (1)..(25): SEQ ID NO: 3153; WAN0249KZ_at; Start 6; Stop 30
actccttatcaattaaaacaactca

SEQ ID NO: 25496 - DNA, 25 bp, Artificial
  probe
  misc_feature (1)..(25): SEQ ID NO: 3153; WAN0249KZ_at; Start 28; Stop 52
tcattttttacaatccagaaccaga

SEQ ID NO: 25497 - DNA, 25 bp, Artificial
  probe
  misc_feature (1)..(25): SEQ ID NO: 3153; WAN0249KZ_at; Start 33; Stop 57
ttttacaatccagaaccagaaactc

SEQ ID NO: 25498 - DNA, 25 bp, Artificial
  probe
  misc_feature (1)..(25): SEQ ID NO: 3153; WAN0249KZ_at; Start 27; Stop 51
ctcattttttacaatccagaaccag

SEQ ID NO: 25499 - DNA, 25 bp, Artificial
  probe
  misc_feature (1)..(25): SEQ ID NO: 3153; WAN0249KZ_at; Start 9; Stop 33
ccttatcaattaaaacaactcattt

SEQ ID NO: 25500 - DNA, 25 bp, Artificial
  probe
  misc_feature (1)..(25): SEQ ID NO: 3153; WAN0249KZ_at; Start 21; Stop 45
aaacaactcattttttacaatccag

SEQ ID NO: 25501 - DNA, 25 bp, Artificial
  probe
  misc_feature (1)..(25): SEQ ID NO: 3153; WAN0249KZ_at; Start 36; Stop 60
tacaatccagaaccagaaactcctt

SEQ ID NO: 25502 - DNA, 25 bp, Artificial
  probe
  misc_feature (1)..(25): SEQ ID NO: 3153; WAN0249KZ_at; Start 40; Stop 64
atccagaaccagaaactcctttatt

SEQ ID NO: 25503 - DNA, 25 bp, Artificial
  probe
  misc_feature (1)..(25): SEQ ID NO: 3153; WAN0249KZ_at; Start 24; Stop 48
caactcattttttacaatccagaac

SEQ ID NO: 25504 - DNA, 25 bp, Artificial
  probe
  misc_feature (1)..(25): SEQ ID NO: 3153; WAN0249KZ_at; Start 1; Stop 25
attctactccttatcaattaaaaca

SEQ ID NO: 25505 - DNA, 25 bp, Artificial
  probe
  misc_feature (1)..(25): SEQ ID NO: 3153; WAN0249KZ_at; Start 8; Stop 32
tccttatcaattaaaacaactcatt

SEQ ID NO: 25506 - DNA, 25 bp, Artificial
  probe
  misc_feature (1)..(25): SEQ ID NO: 3153; WAN0249KZ_at; Start 10; Stop 34
cttatcaattaaaacaactcatttt

SEQ ID NO: 25507 - DNA, 25 bp, Artificial
  probe
  misc_feature (1)..(25): SEQ ID NO: 3153; WAN0249KZ_at; Start 23; Stop 47
acaactcattttttacaatccagaa

SEQ ID NO: 25508 - DNA, 25 bp, Artificial
  probe
  misc_feature (1)..(25): SEQ ID NO: 3153; WAN0249KZ_at; Start 35; Stop 59
ttacaatccagaaccagaaactcct

SEQ ID NO: 25509 - DNA, 25 bp, Artificial
  probe
  misc_feature (1)..(25): SEQ ID NO: 3153; WAN0249KZ_at; Start 4; Stop 28
ctactccttatcaattaaaacaact

SEQ ID NO: 25510 - DNA, 25 bp, Artificial
  probe
  misc_feature (1)..(25): SEQ ID NO: 3153; WAN0249KZ_at; Start 37; Stop 61
acaatccagaaccagaaactccttt

SEQ ID NO: 25511 - DNA, 25 bp, Artificial
  probe
  misc_feature (1)..(25): SEQ ID NO: 3153; WAN0249KZ_at; Start 5; Stop 29
tactccttatcaattaaaacaactc

SEQ ID NO: 25512 - DNA, 25 bp, Artificial
  probe
  misc_feature (1)..(25): SEQ ID NO: 3153; WAN0249KZ_at; Start 7; Stop 31
ctccttatcaattaaaacaactcat

SEQ ID NO: 25513 - DNA, 25 bp, Artificial
  probe
  misc_feature (1)..(25): SEQ ID NO: 3153; WAN0249KZ_at; Start 22; Stop 46
aacaactcattttttacaatccaga

SEQ ID NO: 25514 - DNA, 25 bp, Artificial
  probe
  misc_feature (1)..(25): SEQ ID NO: 3153; WAN0249KZ_at; Start 26; Stop 50
actcattttttacaatccagaacca

SEQ ID NO: 25515 - DNA, 25 bp, Artificial
  probe
  misc_feature (1)..(25): SEQ ID NO: 3153; WAN0249KZ_at; Start 3; Stop 27
tctactccttatcaattaaaacaac

SEQ ID NO: 25516 - DNA, 25 bp, Artificial
  probe
  misc_feature (1)..(25): SEQ ID NO: 3153; WAN0249KZ_at; Start 38; Stop 62
caatccagaaccagaaactccttta

SEQ ID NO: 25517 - DNA, 25 bp, Artificial
  probe
  misc_feature (1)..(25): SEQ ID NO: 3153; WAN0249KZ_at; Start 34; Stop 58
tttacaatccagaaccagaaactcc

SEQ ID NO: 25518 - DNA, 25 bp, Artificial
  probe
  misc_feature (1)..(25): SEQ ID NO: 3153; WAN0249KZ_at; Start 39; Stop 63
aatccagaaccagaaactcctttat

SEQ ID NO: 25519 - DNA, 25 bp, Artificial
  probe
  misc_feature (1)..(25): SEQ ID NO: 4799; WAN0249L2_at; Start 11; Stop 35
catacacctctcataaaaagaatag

SEQ ID NO: 25520 - DNA, 25 bp, Artificial
  probe
  misc_feature (1)..(25): SEQ ID NO: 4799; WAN0249L2_at; Start 84; Stop 108
gaagcaatttattgatgctgcttaa

SEQ ID NO: 25521 - DNA, 25 bp, Artificial
  probe
  misc_feature (1)..(25): SEQ ID NO: 4799; WAN0249L2_at; Start 204; Stop 228
attttatttgagcataactttctag

SEQ ID NO: 25522 - DNA, 25 bp, Artificial
  probe
  misc_feature (1)..(25): SEQ ID NO: 4799; WAN0249L2_at; Start 124; Stop 148
gagttcctatcaaaaatcgtatctt

SEQ ID NO: 25523 - DNA, 25 bp, Artificial
  probe
  misc_feature (1)..(25): SEQ ID NO: 4799; WAN0249L2_at; Start 173; Stop 197
tatccgactcggtttacattgtcaa

SEQ ID NO: 25524 - DNA, 25 bp, Artificial
  probe
  misc_feature (1)..(25): SEQ ID NO: 4799; WAN0249L2_at; Start 13; Stop 37
tacacctctcataaaaagaatagca

SEQ ID NO: 25525 - DNA, 25 bp, Artificial
  probe
  misc_feature (1)..(25): SEQ ID NO: 4799; WAN0249L2_at; Start 154; Stop 178
tcaaaacagtacttaaagctatccg

SEQ ID NO: 25526 - DNA, 25 bp, Artificial
  probe
  misc_feature (1)..(25): SEQ ID NO: 4799; WAN0249L2_at; Start 80; Stop 104
caaggaagcaatttattgatgctgc

SEQ ID NO: 25527 - DNA, 25 bp, Artificial
  probe
  misc_feature (1)..(25): SEQ ID NO: 4799; WAN0249L2_at; Start 131; Stop 155
tatcaaaaatcgtatcttcaacctc

SEQ ID NO: 25528 - DNA, 25 bp, Artificial
  probe
  misc_feature (1)..(25): SEQ ID NO: 4799; WAN0249L2_at; Start 87; Stop 111
gcaatttattgatgctgcttaaaaa

SEQ ID NO: 25529 - DNA, 25 bp, Artificial
  probe
  misc_feature (1)..(25): SEQ ID NO: 4799; WAN0249L2_at; Start 201; Stop 225
tagattttatttgagcataactttc

SEQ ID NO: 25530 - DNA, 25 bp, Artificial
  probe
  misc_feature (1)..(25): SEQ ID NO: 4799; WAN0249L2_at; Start 175; Stop 199
tccgactcggtttacattgtcaaat

SEQ ID NO: 25531 - DNA, 25 bp, Artificial
  probe
  misc_feature (1)..(25): SEQ ID NO: 4799; WAN0249L2_at; Start 7; Stop 31
tattcatacacctctcataaaaaga

SEQ ID NO: 25532 - DNA, 25 bp, Artificial
  probe
  misc_feature (1)..(25): SEQ ID NO: 4799; WAN0249L2_at; Start 152; Stop 176
cctcaaaacagtacttaaagctatc

SEQ ID NO: 25533 - DNA, 25 bp, Artificial
  probe
  misc_feature (1)..(25): SEQ ID NO: 4799; WAN0249L2_at; Start 169; Stop 193
aagctatccgactcggtttacattg

SEQ ID NO: 25534 - DNA, 25 bp, Artificial
  probe
  misc_feature (1)..(25): SEQ ID NO: 4799; WAN0249L2_at; Start 161; Stop 185
agtacttaaagctatccgactcggt

SEQ ID NO: 25535 - DNA, 25 bp, Artificial
  probe
  misc_feature (1)..(25): SEQ ID NO: 4799; WAN0249L2_at; Start 93; Stop 117
tattgatgctgcttaaaaatctaaa

SEQ ID NO: 25536 - DNA, 25 bp, Artificial
  probe
  misc_feature (1)..(25): SEQ ID NO: 4799; WAN0249L2_at; Start 182; Stop 206
cggtttacattgtcaaatttagatt

SEQ ID NO: 25537 - DNA, 25 bp, Artificial
  probe
  misc_feature (1)..(25): SEQ ID NO: 4799; WAN0249L2_at; Start 106; Stop 130
taaaaatctaaaattgatgagttcc

SEQ ID NO: 25538 - DNA, 25 bp, Artificial
  probe
  misc_feature (1)..(25): SEQ ID NO: 4799; WAN0249L2_at; Start 178; Stop 202
gactcggtttacattgtcaaattta

SEQ ID NO: 25539 - DNA, 25 bp, Artificial
  probe
  misc_feature (1)..(25): SEQ ID NO: 4799; WAN0249L2_at; Start 69; Stop 93
ttatgacaaaacaaggaagcaattt

SEQ ID NO: 25540 - DNA, 25 bp, Artificial
  probe
  misc_feature (1)..(25): SEQ ID NO: 4799; WAN0249L2_at; Start 110; Stop 134
aatctaaaattgatgagttcctatc

SEQ ID NO: 25541 - DNA, 25 bp, Artificial
  probe
  misc_feature (1)..(25): SEQ ID NO: 4799; WAN0249L2_at; Start 134; Stop 158
caaaaatcgtatcttcaacctcaaa

SEQ ID NO: 25542 - DNA, 25 bp, Artificial
  probe
  misc_feature (1)..(25): SEQ ID NO: 4799; WAN0249L2_at; Start 2; Stop 26
tatcatattcatacacctctcataa

SEQ ID NO: 25543 - DNA, 25 bp, Artificial
  probe
  misc_feature (1)..(25): SEQ ID NO: 4799; WAN0249L2_at; Start 126; Stop 150
gttcctatcaaaaatcgtatcttca

SEQ ID NO: 25544 - DNA, 25 bp, Artificial
  probe
  misc_feature (1)..(25): SEQ ID NO: 4799; WAN0249L2_at; Start 155; Stop 179
caaaacagtacttaaagctatccga

SEQ ID NO: 25545 - DNA, 25 bp, Artificial
  probe
  misc_feature (1)..(25): SEQ ID NO: 4799; WAN0249L2_at; Start 160; Stop 184
cagtacttaaagctatccgactcgg

SEQ ID NO: 25546 - DNA, 25 bp, Artificial
  probe
  misc_feature (1)..(25): SEQ ID NO: 4799; WAN0249L2_at; Start 17; Stop 41
cctctcataaaaagaatagcacact

SEQ ID NO: 25547 - DNA, 25 bp, Artificial
  probe
  misc_feature (1)..(25): SEQ ID NO: 4799; WAN0249L2_at; Start 167; Stop 191
taaagctatccgactcggtttacat

SEQ ID NO: 25548 - DNA, 25 bp, Artificial
  probe
  misc_feature (1)..(25): SEQ ID NO: 4799; WAN0249L2_at; Start 121; Stop 145
gatgagttcctatcaaaaatcgtat

SEQ ID NO: 25549 - DNA, 25 bp, Artificial
  probe
  misc_feature (1)..(25): SEQ ID NO: 4799; WAN0249L2_at; Start 100; Stop 124
gctgcttaaaaatctaaaattgatg

SEQ ID NO: 25550 - DNA, 25 bp, Artificial
  probe
  misc_feature (1)..(25): SEQ ID NO: 4799; WAN0249L2_at; Start 67; Stop 91
aattatgacaaaacaaggaagcaat

SEQ ID NO: 25551 - DNA, 25 bp, Artificial
  probe
  misc_feature (1)..(25): SEQ ID NO: 4799; WAN0249L2_at; Start 97; Stop 121
gatgctgcttaaaaatctaaaattg

SEQ ID NO: 25552 - DNA, 25 bp, Artificial
  probe
  misc_feature (1)..(25): SEQ ID NO: 4799; WAN0249L2_at; Start 73; Stop 97
gacaaaacaaggaagcaatttattg

SEQ ID NO: 25553 - DNA, 25 bp, Artificial
  probe
  misc_feature (1)..(25): SEQ ID NO: 3279; WAN0249L3_at; Start 108; Stop 132
caattttagatttttaagcagcatc

SEQ ID NO: 25554 - DNA, 25 bp, Artificial
  probe
  misc_feature (1)..(25): SEQ ID NO: 3279; WAN0249L3_at; Start 36; Stop 60
caatgtaaaccgagtcggatagctt

SEQ ID NO: 25555 - DNA, 25 bp, Artificial
  probe
  misc_feature (1)..(25): SEQ ID NO: 3279; WAN0249L3_at; Start 27; Stop 51
taaatttgacaatgtaaaccgagtc

SEQ ID NO: 25556 - DNA, 25 bp, Artificial
  probe
  misc_feature (1)..(25): SEQ ID NO: 3279; WAN0249L3_at; Start 1; Stop 25
ctagaaagttatgctcaaataaaat

SEQ ID NO: 25557 - DNA, 25 bp, Artificial
  probe
  misc_feature (1)..(25): SEQ ID NO: 3279; WAN0249L3_at; Start 87; Stop 111
cgatttttgataggaactcatcaat

SEQ ID NO: 25558 - DNA, 25 bp, Artificial
  probe
  misc_feature (1)..(25): SEQ ID NO: 3279; WAN0249L3_at; Start 192; Stop 216
tgctattctttttatgagaggtgta

SEQ ID NO: 25559 - DNA, 25 bp, Artificial
  probe
  misc_feature (1)..(25): SEQ ID NO: 3279; WAN0249L3_at; Start 39; Stop 63
tgtaaaccgagtcggatagctttaa

SEQ ID NO: 25560 - DNA, 25 bp, Artificial
  probe
  misc_feature (1)..(25): SEQ ID NO: 3279; WAN0249L3_at; Start 118; Stop 142
tttttaagcagcatcaataaattgc

SEQ ID NO: 25561 - DNA, 25 bp, Artificial
  probe
  misc_feature (1)..(25): SEQ ID NO: 3279; WAN0249L3_at; Start 198; Stop 222
tctttttatgagaggtgtatgaata

SEQ ID NO: 25562 - DNA, 25 bp, Artificial
  probe
  misc_feature (1)..(25): SEQ ID NO: 3279; WAN0249L3_at; Start 10; Stop 34
tatgctcaaataaaatctaaatttg

SEQ ID NO: 25563 - DNA, 25 bp, Artificial
  probe
  misc_feature (1)..(25): SEQ ID NO: 3279; WAN0249L3_at; Start 81; Stop 105
aagatacgatttttgataggaactc

SEQ ID NO: 25564 - DNA, 25 bp, Artificial
  probe
  misc_feature (1)..(25): SEQ ID NO: 3279; WAN0249L3_at; Start 122; Stop 146
taagcagcatcaataaattgcttcc

SEQ ID NO: 25565 - DNA, 25 bp, Artificial
  probe
  misc_feature (1)..(25): SEQ ID NO: 3279; WAN0249L3_at; Start 114; Stop 138
tagatttttaagcagcatcaataaa

SEQ ID NO: 25566 - DNA, 25 bp, Artificial
  probe
  misc_feature (1)..(25): SEQ ID NO: 3279; WAN0249L3_at; Start 31; Stop 55
tttgacaatgtaaaccgagtcggat

SEQ ID NO: 25567 - DNA, 25 bp, Artificial
  probe
  misc_feature (1)..(25): SEQ ID NO: 3279; WAN0249L3_at; Start 53; Stop 77
gatagctttaagtactgttttgagg

SEQ ID NO: 25568 - DNA, 25 bp, Artificial
  probe
  misc_feature (1)..(25): SEQ ID NO: 3279; WAN0249L3_at; Start 132; Stop 156
caataaattgcttccttgttttgtc

SEQ ID NO: 25569 - DNA, 25 bp, Artificial
  probe
  misc_feature (1)..(25): SEQ ID NO: 3279; WAN0249L3_at; Start 136; Stop 160
aaattgcttccttgttttgtcataa

SEQ ID NO: 25570 - DNA, 25 bp, Artificial
  probe
  misc_feature (1)..(25): SEQ ID NO: 3279; WAN0249L3_at; Start 45; Stop 69
ccgagtcggatagctttaagtactg

SEQ ID NO: 25571 - DNA, 25 bp, Artificial
  probe
  misc_feature (1)..(25): SEQ ID NO: 3279; WAN0249L3_at; Start 204; Stop 228
tatgagaggtgtatgaatatgataa

SEQ ID NO: 25572 - DNA, 25 bp, Artificial
  probe
  misc_feature (1)..(25): SEQ ID NO: 3279; WAN0249L3_at; Start 25; Stop 49
tctaaatttgacaatgtaaaccgag

SEQ ID NO: 25573 - DNA, 25 bp, Artificial
  probe
  misc_feature (1)..(25): SEQ ID NO: 3279; WAN0249L3_at; Start 44; Stop 68
accgagtcggatagctttaagtact

SEQ ID NO: 25574 - DNA, 25 bp, Artificial
  probe
  misc_feature (1)..(25): SEQ ID NO: 3279; WAN0249L3_at; Start 74; Stop 98
gaggttgaagatacgatttttgata

SEQ ID NO: 25575 - DNA, 25 bp, Artificial
  probe
  misc_feature (1)..(25): SEQ ID NO: 3279; WAN0249L3_at; Start 47; Stop 71
gagtcggatagctttaagtactgtt

SEQ ID NO: 25576 - DNA, 25 bp, Artificial
  probe
  misc_feature (1)..(25): SEQ ID NO: 3279; WAN0249L3_at; Start 71; Stop 95
tttgaggttgaagatacgatttttg

SEQ ID NO: 25577 - DNA, 25 bp, Artificial
  probe
  misc_feature (1)..(25): SEQ ID NO: 3279; WAN0249L3_at; Start 79; Stop 103
tgaagatacgatttttgataggaac

SEQ ID NO: 25578 - DNA, 25 bp, Artificial
  probe
  misc_feature (1)..(25): SEQ ID NO: 3279; WAN0249L3_at; Start 33; Stop 57
tgacaatgtaaaccgagtcggatag

SEQ ID NO: 25579 - DNA, 25 bp, Artificial
  probe
  misc_feature (1)..(25): SEQ ID NO: 3279; WAN0249L3_at; Start 66; Stop 90
actgttttgaggttgaagatacgat

SEQ ID NO: 25580 - DNA, 25 bp, Artificial
  probe
  misc_feature (1)..(25): SEQ ID NO: 3279; WAN0249L3_at; Start 4; Stop 28
gaaagttatgctcaaataaaatcta

SEQ ID NO: 25581 - DNA, 25 bp, Artificial
  probe
  misc_feature (1)..(25): SEQ ID NO: 3279; WAN0249L3_at; Start 29; Stop 53
aatttgacaatgtaaaccgagtcgg

SEQ ID NO: 25582 - DNA, 25 bp, Artificial
  probe
  misc_feature (1)..(25): SEQ ID NO: 3279; WAN0249L3_at; Start 85; Stop 109
tacgatttttgataggaactcatca

SEQ ID NO: 25583 - DNA, 25 bp, Artificial
  probe
  misc_feature (1)..(25): SEQ ID NO: 3279; WAN0249L3_at; Start 125; Stop 149
gcagcatcaataaattgcttccttg

SEQ ID NO: 25584 - DNA, 25 bp, Artificial
  probe
  misc_feature (1)..(25): SEQ ID NO: 3279; WAN0249L3_at; Start 105; Stop 129
catcaattttagatttttaagcagc

SEQ ID NO: 25585 - DNA, 25 bp, Artificial
  probe
  misc_feature (1)..(25): SEQ ID NO: 3279; WAN0249L3_at; Start 95; Stop 119
gataggaactcatcaattttagatt

SEQ ID NO: 25586 - DNA, 25 bp, Artificial
  probe
  misc_feature (1)..(25): SEQ ID NO: 3279; WAN0249L3_at; Start 188; Stop 212
agtgtgctattctttttatgagagg

SEQ ID NO: 25587 - DNA, 25 bp, Artificial
  probe
  misc_feature (1)..(25): SEQ ID NO: 4551; WAN0249L4_at; Start 31; Stop 55
aataacagaatttcgcaagggaagt

SEQ ID NO: 25588 - DNA, 25 bp, Artificial
  probe
  misc_feature (1)..(25): SEQ ID NO: 4551; WAN0249L4_at; Start 44; Stop 68
cgcaagggaagtatgaggaactgtt

SEQ ID NO: 25589 - DNA, 25 bp, Artificial
  probe
  misc_feature (1)..(25): SEQ ID NO: 4551; WAN0249L4_at; Start 80; Stop 104
tcagatatgatattgtatatgggct

SEQ ID NO: 25590 - DNA, 25 bp, Artificial
  probe
  misc_feature (1)..(25): SEQ ID NO: 4551; WAN0249L4_at; Start 32; Stop 56
ataacagaatttcgcaagggaagta

SEQ ID NO: 25591 - DNA, 25 bp, Artificial
  probe
  misc_feature (1)..(25): SEQ ID NO: 4551; WAN0249L4_at; Start 49; Stop 73
gggaagtatgaggaactgttactag

SEQ ID NO: 25592 - DNA, 25 bp, Artificial
  probe
  misc_feature (1)..(25): SEQ ID NO: 4551; WAN0249L4_at; Start 92; Stop 116
ttgtatatgggctagatgaagaggg

SEQ ID NO: 25593 - DNA, 25 bp, Artificial
  probe
  misc_feature (1)..(25): SEQ ID NO: 4551; WAN0249L4_at; Start 55; Stop 79
tatgaggaactgttactagatgctt

SEQ ID NO: 25594 - DNA, 25 bp, Artificial
  probe
  misc_feature (1)..(25): SEQ ID NO: 4551; WAN0249L4_at; Start 43; Stop 67
tcgcaagggaagtatgaggaactgt

SEQ ID NO: 25595 - DNA, 25 bp, Artificial
  probe
  misc_feature (1)..(25): SEQ ID NO: 4551; WAN0249L4_at; Start 65; Stop 89
tgttactagatgctttcagatatga

SEQ ID NO: 25596 - DNA, 25 bp, Artificial
  probe
  misc_feature (1)..(25): SEQ ID NO: 4551; WAN0249L4_at; Start 10; Stop 34
tcaactgaacaacttttagaaaata

SEQ ID NO: 25597 - DNA, 25 bp, Artificial
  probe
  misc_feature (1)..(25): SEQ ID NO: 4551; WAN0249L4_at; Start 66; Stop 90
gttactagatgctttcagatatgat

SEQ ID NO: 25598 - DNA, 25 bp, Artificial
  probe
  misc_feature (1)..(25): SEQ ID NO: 4551; WAN0249L4_at; Start 46; Stop 70
caagggaagtatgaggaactgttac

SEQ ID NO: 25599 - DNA, 25 bp, Artificial
  probe
  misc_feature (1)..(25): SEQ ID NO: 4551; WAN0249L4_at; Start 58; Stop 82
gaggaactgttactagatgctttca

SEQ ID NO: 25600 - DNA, 25 bp, Artificial
  probe
  misc_feature (1)..(25): SEQ ID NO: 4551; WAN0249L4_at; Start 68; Stop 92
tactagatgctttcagatatgatat

SEQ ID NO: 25601 - DNA, 25 bp, Artificial
  probe
  misc_feature (1)..(25): SEQ ID NO: 4551; WAN0249L4_at; Start 71; Stop 95
tagatgctttcagatatgatattgt

SEQ ID NO: 25602 - DNA, 25 bp, Artificial
  probe
  misc_feature (1)..(25): SEQ ID NO: 4551; WAN0249L4_at; Start 40; Stop 64
atttcgcaagggaagtatgaggaac

SEQ ID NO: 25603 - DNA, 25 bp, Artificial
  probe
  misc_feature (1)..(25): SEQ ID NO: 4551; WAN0249L4_at; Start 37; Stop 61
agaatttcgcaagggaagtatgagg

SEQ ID NO: 25604 - DNA, 25 bp, Artificial
  probe
  misc_feature (1)..(25): SEQ ID NO: 4551; WAN0249L4_at; Start 53; Stop 77
agtatgaggaactgttactagatgc

SEQ ID NO: 25605 - DNA, 25 bp, Artificial
  probe
  misc_feature (1)..(25): SEQ ID NO: 4551; WAN0249L4_at; Start 30; Stop 54
aaataacagaatttcgcaagggaag

SEQ ID NO: 25606 - DNA, 25 bp, Artificial
  probe
  misc_feature (1)..(25): SEQ ID NO: 4551; WAN0249L4_at; Start 61; Stop 85
gaactgttactagatgctttcagat

SEQ ID NO: 25607 - DNA, 25 bp, Artificial
  probe
  misc_feature (1)..(25): SEQ ID NO: 4551; WAN0249L4_at; Start 83; Stop 107
gatatgatattgtatatgggctaga

SEQ ID NO: 25608 - DNA, 25 bp, Artificial
  probe
  misc_feature (1)..(25): SEQ ID NO: 4551; WAN0249L4_at; Start 39; Stop 63
aatttcgcaagggaagtatgaggaa

SEQ ID NO: 25609 - DNA, 25 bp, Artificial
  probe
  misc_feature (1)..(25): SEQ ID NO: 4551; WAN0249L4_at; Start 36; Stop 60
cagaatttcgcaagggaagtatgag

SEQ ID NO: 25610 - DNA, 25 bp, Artificial
  probe
  misc_feature (1)..(25): SEQ ID NO: 4551; WAN0249L4_at; Start 60; Stop 84
ggaactgttactagatgctttcaga

SEQ ID NO: 25611 - DNA, 25 bp, Artificial
  probe
  misc_feature (1)..(25): SEQ ID NO: 4551; WAN0249L4_at; Start 50; Stop 74
ggaagtatgaggaactgttactaga

SEQ ID NO: 25612 - DNA, 25 bp, Artificial
  probe
  misc_feature (1)..(25): SEQ ID NO: 4551; WAN0249L4_at; Start 57; Stop 81
tgaggaactgttactagatgctttc

SEQ ID NO: 25613 - DNA, 25 bp, Artificial
  probe
  misc_feature (1)..(25): SEQ ID NO: 4551; WAN0249L4_at; Start 26; Stop 50
tagaaaataacagaatttcgcaagg

SEQ ID NO: 25614 - DNA, 25 bp, Artificial
  probe
  misc_feature (1)..(25): SEQ ID NO: 4551; WAN0249L4_at; Start 42; Stop 66
ttcgcaagggaagtatgaggaactg

SEQ ID NO: 25615 - DNA, 25 bp, Artificial
  probe
  misc_feature (1)..(25): SEQ ID NO: 4551; WAN0249L4_at; Start 6; Stop 30
taattcaactgaacaacttttagaa

SEQ ID NO: 25616 - DNA, 25 bp, Artificial
  probe
  misc_feature (1)..(25): SEQ ID NO: 4551; WAN0249L4_at; Start 34; Stop 58
aacagaatttcgcaagggaagtatg

SEQ ID NO: 25617 - DNA, 25 bp, Artificial
  probe
  misc_feature (1)..(25): SEQ ID NO: 4551; WAN0249L4_at; Start 88; Stop 112
gatattgtatatgggctagatgaag

SEQ ID NO: 25618 - DNA, 25 bp, Artificial
  probe
  misc_feature (1)..(25): SEQ ID NO: 4551; WAN0249L4_at; Start 28; Stop 52
gaaaataacagaatttcgcaaggga

SEQ ID NO: 25619 - DNA, 25 bp, Artificial
  probe
  misc_feature (1)..(25): SEQ ID NO: 4551; WAN0249L4_at; Start 15; Stop 39
tgaacaacttttagaaaataacaga

SEQ ID NO: 25620 - DNA, 25 bp, Artificial
  probe
  misc_feature (1)..(25): SEQ ID NO: 4551; WAN0249L4_at; Start 41; Stop 65
tttcgcaagggaagtatgaggaact

SEQ ID NO: 25621 - DNA, 25 bp, Artificial
  probe
  misc_feature (1)..(25): SEQ ID NO: 359; WAN0249L5_at; Start 75; Stop 99
cttcccttgcgaaattctgttattt

SEQ ID NO: 25622 - DNA, 25 bp, Artificial
  probe
  misc_feature (1)..(25): SEQ ID NO: 359; WAN0249L5_at; Start 69; Stop 93
ctcatacttcccttgcgaaattctg

SEQ ID NO: 25623 - DNA, 25 bp, Artificial
  probe
  misc_feature (1)..(25): SEQ ID NO: 359; WAN0249L5_at; Start 95; Stop 119
tattttctaaaagttgttcagttga

SEQ ID NO: 25624 - DNA, 25 bp, Artificial
  probe
  misc_feature (1)..(25): SEQ ID NO: 359; WAN0249L5_at; Start 52; Stop 76
gcatctagtaacagttcctcatact

SEQ ID NO: 25625 - DNA, 25 bp, Artificial
  probe
  misc_feature (1)..(25): SEQ ID NO: 359; WAN0249L5_at; Start 59; Stop 83
gtaacagttcctcatacttcccttg

SEQ ID NO: 25626 - DNA, 25 bp, Artificial
  probe
  misc_feature (1)..(25): SEQ ID NO: 359; WAN0249L5_at; Start 43; Stop 67
tatctgaaagcatctagtaacagtt

SEQ ID NO: 25627 - DNA, 25 bp, Artificial
  probe
  misc_feature (1)..(25): SEQ ID NO: 359; WAN0249L5_at; Start 35; Stop 59
caatatcatatctgaaagcatctag

SEQ ID NO: 25628 - DNA, 25 bp, Artificial
  probe
  misc_feature (1)..(25): SEQ ID NO: 359; WAN0249L5_at; Start 49; Stop 73
aaagcatctagtaacagttcctcat

SEQ ID NO: 25629 - DNA, 25 bp, Artificial
  probe
  misc_feature (1)..(25): SEQ ID NO: 359; WAN0249L5_at; Start 62; Stop 86
acagttcctcatacttcccttgcga

SEQ ID NO: 25630 - DNA, 25 bp, Artificial
  probe
  misc_feature (1)..(25): SEQ ID NO: 359; WAN0249L5_at; Start 20; Stop 44
catctagcccatatacaatatcata

SEQ ID NO: 25631 - DNA, 25 bp, Artificial
  probe
  misc_feature (1)..(25): SEQ ID NO: 359; WAN0249L5_at; Start 41; Stop 65
catatctgaaagcatctagtaacag

SEQ ID NO: 25632 - DNA, 25 bp, Artificial
  probe
  misc_feature (1)..(25): SEQ ID NO: 359; WAN0249L5_at; Start 57; Stop 81
tagtaacagttcctcatacttccct

SEQ ID NO: 25633 - DNA, 25 bp, Artificial
  probe
  misc_feature (1)..(25): SEQ ID NO: 359; WAN0249L5_at; Start 50; Stop 74
aagcatctagtaacagttcctcata

SEQ ID NO: 25634 - DNA, 25 bp, Artificial
  probe
  misc_feature (1)..(25): SEQ ID NO: 359; WAN0249L5_at; Start 82; Stop 106
tgcgaaattctgttattttctaaaa

SEQ ID NO: 25635 - DNA, 25 bp, Artificial
  probe
  misc_feature (1)..(25): SEQ ID NO: 359; WAN0249L5_at; Start 64; Stop 88
agttcctcatacttcccttgcgaaa

SEQ ID NO: 25636 - DNA, 25 bp, Artificial
  probe
  misc_feature (1)..(25): SEQ ID NO: 359; WAN0249L5_at; Start 63; Stop 87
cagttcctcatacttcccttgcgaa

SEQ ID NO: 25637 - DNA, 25 bp, Artificial
  probe
  misc_feature (1)..(25): SEQ ID NO: 359; WAN0249L5_at; Start 45; Stop 69
tctgaaagcatctagtaacagttcc

SEQ ID NO: 25638 - DNA, 25 bp, Artificial
  probe
  misc_feature (1)..(25): SEQ ID NO: 359; WAN0249L5_at; Start 17; Stop 41
cttcatctagcccatatacaatatc

SEQ ID NO: 25639 - DNA, 25 bp, Artificial
  probe
  misc_feature (1)..(25): SEQ ID NO: 359; WAN0249L5_at; Start 73; Stop 97
tacttcccttgcgaaattctgttat

SEQ ID NO: 25640 - DNA, 25 bp, Artificial
  probe
  misc_feature (1)..(25): SEQ ID NO: 359; WAN0249L5_at; Start 48; Stop 72
gaaagcatctagtaacagttcctca

SEQ ID NO: 25641 - DNA, 25 bp, Artificial
  probe
  misc_feature (1)..(25): SEQ ID NO: 359; WAN0249L5_at; Start 100; Stop 124
tctaaaagttgttcagttgaattaa

SEQ ID NO: 25642 - DNA, 25 bp, Artificial
  probe
  misc_feature (1)..(25): SEQ ID NO: 359; WAN0249L5_at; Start 61; Stop 85
aacagttcctcatacttcccttgcg

SEQ ID NO: 25643 - DNA, 25 bp, Artificial
  probe
  misc_feature (1)..(25): SEQ ID NO: 359; WAN0249L5_at; Start 38; Stop 62
tatcatatctgaaagcatctagtaa

SEQ ID NO: 25644 - DNA, 25 bp, Artificial
  probe
  misc_feature (1)..(25): SEQ ID NO: 359; WAN0249L5_at; Start 78; Stop 102
cccttgcgaaattctgttattttct

SEQ ID NO: 25645 - DNA, 25 bp, Artificial
  probe
  misc_feature (1)..(25): SEQ ID NO: 359; WAN0249L5_at; Start 46; Stop 70
ctgaaagcatctagtaacagttcct

SEQ ID NO: 25646 - DNA, 25 bp, Artificial
  probe
  misc_feature (1)..(25): SEQ ID NO: 359; WAN0249L5_at; Start 40; Stop 64
tcatatctgaaagcatctagtaaca

SEQ ID NO: 25647 - DNA, 25 bp, Artificial
  probe
  misc_feature (1)..(25): SEQ ID NO: 359; WAN0249L5_at; Start 26; Stop 50
gcccatatacaatatcatatctgaa

SEQ ID NO: 25648 - DNA, 25 bp, Artificial
  probe
  misc_feature (1)..(25): SEQ ID NO: 359; WAN0249L5_at; Start 33; Stop 57
tacaatatcatatctgaaagcatct

SEQ ID NO: 25649 - DNA, 25 bp, Artificial
  probe
  misc_feature (1)..(25): SEQ ID NO: 359; WAN0249L5_at; Start 55; Stop 79
tctagtaacagttcctcatacttcc

SEQ ID NO: 25650 - DNA, 25 bp, Artificial
  probe
  misc_feature (1)..(25): SEQ ID NO: 359; WAN0249L5_at; Start 71; Stop 95
catacttcccttgcgaaattctgtt

SEQ ID NO: 25651 - DNA, 25 bp, Artificial
  probe
  misc_feature (1)..(25): SEQ ID NO: 359; WAN0249L5_at; Start 24; Stop 48
tagcccatatacaatatcatatctg

SEQ ID NO: 25652 - DNA, 25 bp, Artificial
  probe
  misc_feature (1)..(25): SEQ ID NO: 359; WAN0249L5_at; Start 47; Stop 71
tgaaagcatctagtaacagttcctc

SEQ ID NO: 25653 - DNA, 25 bp, Artificial
  probe
  misc_feature (1)..(25): SEQ ID NO: 359; WAN0249L5_at; Start 70; Stop 94
tcatacttcccttgcgaaattctgt

SEQ ID NO: 25654 - DNA, 25 bp, Artificial
  probe
  misc_feature (1)..(25): SEQ ID NO: 359; WAN0249L5_at; Start 65; Stop 89
gttcctcatacttcccttgcgaaat

SEQ ID NO: 25655 - DNA, 25 bp, Artificial
  probe
  misc_feature (1)..(25): SEQ ID NO: 530; WAN0249L6_at; Start 146; Stop 170
tgaactatcagtcgcatgtcaaacg

SEQ ID NO: 25656 - DNA, 25 bp, Artificial
  probe
  misc_feature (1)..(25): SEQ ID NO: 530; WAN0249L6_at; Start 151; Stop 175
tatcagtcgcatgtcaaacgatatg

SEQ ID NO: 25657 - DNA, 25 bp, Artificial
  probe
  misc_feature (1)..(25): SEQ ID NO: 530; WAN0249L6_at; Start 23; Stop 47
cactattcaggaggcatatgagcaa

SEQ ID NO: 25658 - DNA, 25 bp, Artificial
  probe
  misc_feature (1)..(25): SEQ ID NO: 530; WAN0249L6_at; Start 2; Stop 26
taaatttggataaatcgaactcact

SEQ ID NO: 25659 - DNA, 25 bp, Artificial
  probe
  misc_feature (1)..(25): SEQ ID NO: 530; WAN0249L6_at; Start 165; Stop 189
caaacgatatgtagggtaatgtgag

SEQ ID NO: 25660 - DNA, 25 bp, Artificial
  probe
  misc_feature (1)..(25): SEQ ID NO: 530; WAN0249L6_at; Start 44; Stop 68
gcaattcgaaaaagaaaagtgtcaa

SEQ ID NO: 25661 - DNA, 25 bp, Artificial
  probe
  misc_feature (1)..(25): SEQ ID NO: 530; WAN0249L6_at; Start 159; Stop 183
gcatgtcaaacgatatgtagggtaa

SEQ ID NO: 25662 - DNA, 25 bp, Artificial
  probe
  misc_feature (1)..(25): SEQ ID NO: 530; WAN0249L6_at; Start 71; Stop 95
tgagcctataggagtagaagtgaaa

SEQ ID NO: 25663 - DNA, 25 bp, Artificial
  probe
  misc_feature (1)..(25): SEQ ID NO: 530; WAN0249L6_at; Start 18; Stop 42
gaactcactattcaggaggcatatg

SEQ ID NO: 25664 - DNA, 25 bp, Artificial
  probe
  misc_feature (1)..(25): SEQ ID NO: 530; WAN0249L6_at; Start 91; Stop 115
tgaaatagtaagtcctgcatagtgg

SEQ ID NO: 25665 - DNA, 25 bp, Artificial
  probe
  misc_feature (1)..(25): SEQ ID NO: 530; WAN0249L6_at; Start 139; Stop 163
gttttcctgaactatcagtcgcatg

SEQ ID NO: 25666 - DNA, 25 bp, Artificial
  probe
  misc_feature (1)..(25): SEQ ID NO: 530; WAN0249L6_at; Start 104; Stop 128
cctgcatagtggatgagagaaaagt

SEQ ID NO: 25667 - DNA, 25 bp, Artificial
  probe
  misc_feature (1)..(25): SEQ ID NO: 530; WAN0249L6_at; Start 99; Stop 123
taagtcctgcatagtggatgagaga

SEQ ID NO: 25668 - DNA, 25 bp, Artificial
  probe
  misc_feature (1)..(25): SEQ ID NO: 530; WAN0249L6_at; Start 35; Stop 59
ggcatatgagcaattcgaaaaagaa

SEQ ID NO: 25669 - DNA, 25 bp, Artificial
  probe
  misc_feature (1)..(25): SEQ ID NO: 530; WAN0249L6_at; Start 129; Stop 153
tctccttgaagttttcctgaactat

SEQ ID NO: 25670 - DNA, 25 bp, Artificial
  probe
  misc_feature (1)..(25): SEQ ID NO: 530; WAN0249L6_at; Start 57; Stop 81
gaaaagtgtcaaattgagcctatag

SEQ ID NO: 25671 - DNA, 25 bp, Artificial
  probe
  misc_feature (1)..(25): SEQ ID NO: 530; WAN0249L6_at; Start 75; Stop 99
cctataggagtagaagtgaaatagt

SEQ ID NO: 25672 - DNA, 25 bp, Artificial
  probe
  misc_feature (1)..(25): SEQ ID NO: 530; WAN0249L6_at; Start 12; Stop 36
taaatcgaactcactattcaggagg

SEQ ID NO: 25673 - DNA, 25 bp, Artificial
  probe
  misc_feature (1)..(25): SEQ ID NO: 530; WAN0249L6_at; Start 117; Stop 141
tgagagaaaagttctccttgaagtt

SEQ ID NO: 25674 - DNA, 25 bp, Artificial
  probe
  misc_feature (1)..(25): SEQ ID NO: 530; WAN0249L6_at; Start 84; Stop 108
gtagaagtgaaatagtaagtcctgc

SEQ ID NO: 25675 - DNA, 25 bp, Artificial
  probe
  misc_feature (1)..(25): SEQ ID NO: 530; WAN0249L6_at; Start 53; Stop 77
aaaagaaaagtgtcaaattgagcct

SEQ ID NO: 25676 - DNA, 25 bp, Artificial
  probe
  misc_feature (1)..(25): SEQ ID NO: 530; WAN0249L6_at; Start 9; Stop 33
ggataaatcgaactcactattcagg

SEQ ID NO: 25677 - DNA, 25 bp, Artificial
  probe
  misc_feature (1)..(25): SEQ ID NO: 530; WAN0249L6_at; Start 30; Stop 54
caggaggcatatgagcaattcgaaa

SEQ ID NO: 25678 - DNA, 25 bp, Artificial
  probe
  misc_feature (1)..(25): SEQ ID NO: 530; WAN0249L6_at; Start 39; Stop 63
tatgagcaattcgaaaaagaaaagt

SEQ ID NO: 25679 - DNA, 25 bp, Artificial
  probe
  misc_feature (1)..(25): SEQ ID NO: 530; WAN0249L6_at; Start 33; Stop 57
gaggcatatgagcaattcgaaaaag

SEQ ID NO: 25680 - DNA, 25 bp, Artificial
  probe
  misc_feature (1)..(25): SEQ ID NO: 530; WAN0249L6_at; Start 16; Stop 40
tcgaactcactattcaggaggcata

SEQ ID NO: 25681 - DNA, 25 bp, Artificial
  probe
  misc_feature (1)..(25): SEQ ID NO: 530; WAN0249L6_at; Start 66; Stop 90
caaattgagcctataggagtagaag

SEQ ID NO: 25682 - DNA, 25 bp, Artificial
  probe
  misc_feature (1)..(25): SEQ ID NO: 530; WAN0249L6_at; Start 157; Stop 181
tcgcatgtcaaacgatatgtagggt

SEQ ID NO: 25683 - DNA, 25 bp, Artificial
  probe
  misc_feature (1)..(25): SEQ ID NO: 530; WAN0249L6_at; Start 136; Stop 160
gaagttttcctgaactatcagtcgc

SEQ ID NO: 25684 - DNA, 25 bp, Artificial
  probe
  misc_feature (1)..(25): SEQ ID NO: 530; WAN0249L6_at; Start 26; Stop 50
tattcaggaggcatatgagcaattc

SEQ ID NO: 25685 - DNA, 25 bp, Artificial
  probe
  misc_feature (1)..(25): SEQ ID NO: 530; WAN0249L6_at; Start 96; Stop 120
tagtaagtcctgcatagtggatgag

SEQ ID NO: 25686 - DNA, 25 bp, Artificial
  probe
  misc_feature (1)..(25): SEQ ID NO: 530; WAN0249L6_at; Start 87; Stop 111
gaagtgaaatagtaagtcctgcata

SEQ ID NO: 25687 - DNA, 25 bp, Artificial
  probe
  misc_feature (1)..(25): SEQ ID NO: 530; WAN0249L6_at; Start 154; Stop 178
cagtcgcatgtcaaacgatatgtag

SEQ ID NO: 25688 - DNA, 25 bp, Artificial
  probe
  misc_feature (1)..(25): SEQ ID NO: 530; WAN0249L6_at; Start 62; Stop 86
gtgtcaaattgagcctataggagta

SEQ ID NO: 25689 - DNA, 25 bp, Artificial
  probe
  misc_feature (1)..(25): SEQ ID NO: 4634; WAN0249L7_at; Start 203; Stop 227
tgctcatatgcctcctgaatagtga

SEQ ID NO: 25690 - DNA, 25 bp, Artificial
  probe
  misc_feature (1)..(25): SEQ ID NO: 4634; WAN0249L7_at; Start 183; Stop 207
gacacttttctttttcgaattgctc

SEQ ID NO: 25691 - DNA, 25 bp, Artificial
  probe
  misc_feature (1)..(25): SEQ ID NO: 4634; WAN0249L7_at; Start 219; Stop 243
gaatagtgagttcgatttatccaaa

SEQ ID NO: 25692 - DNA, 25 bp, Artificial
  probe
  misc_feature (1)..(25): SEQ ID NO: 4634; WAN0249L7_at; Start 39; Stop 63
aaaaactactcgctatcccctctca

SEQ ID NO: 25693 - DNA, 25 bp, Artificial
  probe
  misc_feature (1)..(25): SEQ ID NO: 4634; WAN0249L7_at; Start 128; Stop 152
tctcatccactatgcaggacttact

SEQ ID NO: 25694 - DNA, 25 bp, Artificial
  probe
  misc_feature (1)..(25): SEQ ID NO: 4634; WAN0249L7_at; Start 169; Stop 193
tataggctcaatttgacacttttct

SEQ ID NO: 25695 - DNA, 25 bp, Artificial
  probe
  misc_feature (1)..(25): SEQ ID NO: 4634; WAN0249L7_at; Start 209; Stop 233
tatgcctcctgaatagtgagttcga

SEQ ID NO: 25696 - DNA, 25 bp, Artificial
  probe
  misc_feature (1)..(25): SEQ ID NO: 4634; WAN0249L7_at; Start 223; Stop 247
agtgagttcgatttatccaaattta

SEQ ID NO: 25697 - DNA, 25 bp, Artificial
  probe
  misc_feature (1)..(25): SEQ ID NO: 4634; WAN0249L7_at; Start 135; Stop 159
cactatgcaggacttactatttcac

SEQ ID NO: 25698 - DNA, 25 bp, Artificial
  probe
  misc_feature (1)..(25): SEQ ID NO: 4634; WAN0249L7_at; Start 195; Stop 219
tttcgaattgctcatatgcctcctg

SEQ ID NO: 25699 - DNA, 25 bp, Artificial
  probe
  misc_feature (1)..(25): SEQ ID NO: 4634; WAN0249L7_at; Start 72; Stop 96
tacatatcgtttgacatgcgactga

SEQ ID NO: 25700 - DNA, 25 bp, Artificial
  probe
  misc_feature (1)..(25): SEQ ID NO: 4634; WAN0249L7_at; Start 74; Stop 98
catatcgtttgacatgcgactgata

SEQ ID NO: 25701 - DNA, 25 bp, Artificial
  probe
  misc_feature (1)..(25): SEQ ID NO: 4634; WAN0249L7_at; Start 97; Stop 121
tagttcaggaaaacttcaaggagaa

SEQ ID NO: 25702 - DNA, 25 bp, Artificial
  probe
  misc_feature (1)..(25): SEQ ID NO: 4634; WAN0249L7_at; Start 95; Stop 119
gatagttcaggaaaacttcaaggag

SEQ ID NO: 25703 - DNA, 25 bp, Artificial
  probe
  misc_feature (1)..(25): SEQ ID NO: 4634; WAN0249L7_at; Start 108; Stop 132
aacttcaaggagaacttttctctca

SEQ ID NO: 25704 - DNA, 25 bp, Artificial
  probe
  misc_feature (1)..(25): SEQ ID NO: 4634; WAN0249L7_at; Start 119; Stop 143
gaacttttctctcatccactatgca

SEQ ID NO: 25705 - DNA, 25 bp, Artificial
  probe
  misc_feature (1)..(25): SEQ ID NO: 4634; WAN0249L7_at; Start 86; Stop 110
catgcgactgatagttcaggaaaac

SEQ ID NO: 25706 - DNA, 25 bp, Artificial
  probe
  misc_feature (1)..(25): SEQ ID NO: 4634; WAN0249L7_at; Start 190; Stop 214
ttctttttcgaattgctcatatgcc

SEQ ID NO: 25707 - DNA, 25 bp, Artificial
  probe
  misc_feature (1)..(25): SEQ ID NO: 4634; WAN0249L7_at; Start 207; Stop 231
catatgcctcctgaatagtgagttc

SEQ ID NO: 25708 - DNA, 25 bp, Artificial
  probe
  misc_feature (1)..(25): SEQ ID NO: 4634; WAN0249L7_at; Start 83; Stop 107
tgacatgcgactgatagttcaggaa

SEQ ID NO: 25709 - DNA, 25 bp, Artificial
  probe
  misc_feature (1)..(25): SEQ ID NO: 4634; WAN0249L7_at; Start 163; Stop 187
tactcctataggctcaatttgacac

SEQ ID NO: 25710 - DNA, 25 bp, Artificial
  probe
  misc_feature (1)..(25): SEQ ID NO: 4634; WAN0249L7_at; Start 216; Stop 240
cctgaatagtgagttcgatttatcc

SEQ ID NO: 25711 - DNA, 25 bp, Artificial
  probe
  misc_feature (1)..(25): SEQ ID NO: 4634; WAN0249L7_at; Start 212; Stop 236
gcctcctgaatagtgagttcgattt

SEQ ID NO: 25712 - DNA, 25 bp, Artificial
  probe
  misc_feature (1)..(25): SEQ ID NO: 4634; WAN0249L7_at; Start 89; Stop 113
gcgactgatagttcaggaaaacttc

SEQ ID NO: 25713 - DNA, 25 bp, Artificial
  probe
  misc_feature (1)..(25): SEQ ID NO: 4634; WAN0249L7_at; Start 141; Stop 165
gcaggacttactatttcacttctac

SEQ ID NO: 25714 - DNA, 25 bp, Artificial
  probe
  misc_feature (1)..(25): SEQ ID NO: 4634; WAN0249L7_at; Start 62; Stop 86
cacattaccctacatatcgtttgac

SEQ ID NO: 25715 - DNA, 25 bp, Artificial
  probe
  misc_feature (1)..(25): SEQ ID NO: 4634; WAN0249L7_at; Start 79; Stop 103
cgtttgacatgcgactgatagttca

SEQ ID NO: 25716 - DNA, 25 bp, Artificial
  probe
  misc_feature (1)..(25): SEQ ID NO: 4634; WAN0249L7_at; Start 123; Stop 147
ttttctctcatccactatgcaggac

SEQ ID NO: 25717 - DNA, 25 bp, Artificial
  probe
  misc_feature (1)..(25): SEQ ID NO: 4634; WAN0249L7_at; Start 70; Stop 94
cctacatatcgtttgacatgcgact

SEQ ID NO: 25718 - DNA, 25 bp, Artificial
  probe
  misc_feature (1)..(25): SEQ ID NO: 4634; WAN0249L7_at; Start 199; Stop 223
gaattgctcatatgcctcctgaata

SEQ ID NO: 25719 - DNA, 25 bp, Artificial
  probe
  misc_feature (1)..(25): SEQ ID NO: 4634; WAN0249L7_at; Start 113; Stop 137
caaggagaacttttctctcatccac

SEQ ID NO: 25720 - DNA, 25 bp, Artificial
  probe
  misc_feature (1)..(25): SEQ ID NO: 4634; WAN0249L7_at; Start 138; Stop 162
tatgcaggacttactatttcacttc

SEQ ID NO: 25721 - DNA, 25 bp, Artificial
  probe
  misc_feature (1)..(25): SEQ ID NO: 4634; WAN0249L7_at; Start 152; Stop 176
tatttcacttctactcctataggct

SEQ ID NO: 25722 - DNA, 25 bp, Artificial
  probe
  misc_feature (1)..(25): SEQ ID NO: 4634; WAN0249L7_at; Start 67; Stop 91
taccctacatatcgtttgacatgcg

SEQ ID NO: 25723 - DNA, 25 bp, Artificial
  probe
  misc_feature (1)..(25): SEQ ID NO: 4796; WAN0249L8_at; Start 43; Stop 67
tttgtagtataatagtacagtgtga

SEQ ID NO: 25724 - DNA, 25 bp, Artificial
  probe
  misc_feature (1)..(25): SEQ ID NO: 4796; WAN0249L8_at; Start 59; Stop 83
acagtgtgaaaaaatctgaaaaatg

SEQ ID NO: 25725 - DNA, 25 bp, Artificial
  probe
  misc_feature (1)..(25): SEQ ID NO: 4796; WAN0249L8_at; Start 58; Stop 82
tacagtgtgaaaaaatctgaaaaat

SEQ ID NO: 25726 - DNA, 25 bp, Artificial
  probe
  misc_feature (1)..(25): SEQ ID NO: 4796; WAN0249L8_at; Start 1; Stop 25
ttataccaaaaaaagtgagattcta

SEQ ID NO: 25727 - DNA, 25 bp, Artificial
  probe
  misc_feature (1)..(25): SEQ ID NO: 4796; WAN0249L8_at; Start 71; Stop 95
aatctgaaaaatgagaaaggataag

SEQ ID NO: 25728 - DNA, 25 bp, Artificial
  probe
  misc_feature (1)..(25): SEQ ID NO: 4796; WAN0249L8_at; Start 54; Stop 78
atagtacagtgtgaaaaaatctgaa

SEQ ID NO: 25729 - DNA, 25 bp, Artificial
  probe
  misc_feature (1)..(25): SEQ ID NO: 4796; WAN0249L8_at; Start 69; Stop 93
aaaatctgaaaaatgagaaaggata

SEQ ID NO: 25730 - DNA, 25 bp, Artificial
  probe
  misc_feature (1)..(25): SEQ ID NO: 4796; WAN0249L8_at; Start 74; Stop 98
ctgaaaaatgagaaaggataaggga

SEQ ID NO: 25731 - DNA, 25 bp, Artificial
  probe
  misc_feature (1)..(25): SEQ ID NO: 4796; WAN0249L8_at; Start 50; Stop 74
tataatagtacagtgtgaaaaaatc

SEQ ID NO: 25732 - DNA, 25 bp, Artificial
  probe
  misc_feature (1)..(25): SEQ ID NO: 4796; WAN0249L8_at; Start 44; Stop 68
ttgtagtataatagtacagtgtgaa

SEQ ID NO: 25733 - DNA, 25 bp, Artificial
  probe
  misc_feature (1)..(25): SEQ ID NO: 4796; WAN0249L8_at; Start 18; Stop 42
agattctattacccaaaaggccgat

SEQ ID NO: 25734 - DNA, 25 bp, Artificial
  probe
  misc_feature (1)..(25): SEQ ID NO: 4796; WAN0249L8_at; Start 75; Stop 99
tgaaaaatgagaaaggataagggat

SEQ ID NO: 25735 - DNA, 25 bp, Artificial
  probe
  misc_feature (1)..(25): SEQ ID NO: 4796; WAN0249L8_at; Start 55; Stop 79
tagtacagtgtgaaaaaatctgaaa

SEQ ID NO: 25736 - DNA, 25 bp, Artificial
  probe
  misc_feature (1)..(25): SEQ ID NO: 4796; WAN0249L8_at; Start 53; Stop 77
aatagtacagtgtgaaaaaatctga

SEQ ID NO: 25737 - DNA, 25 bp, Artificial
  probe
  misc_feature (1)..(25): SEQ ID NO: 4796; WAN0249L8_at; Start 60; Stop 84
cagtgtgaaaaaatctgaaaaatga

SEQ ID NO: 25738 - DNA, 25 bp, Artificial
  probe
  misc_feature (1)..(25): SEQ ID NO: 4796; WAN0249L8_at; Start 14; Stop 38
agtgagattctattacccaaaaggc

SEQ ID NO: 25739 - DNA, 25 bp, Artificial
  probe
  misc_feature (1)..(25): SEQ ID NO: 4796; WAN0249L8_at; Start 12; Stop 36
aaagtgagattctattacccaaaag

SEQ ID NO: 25740 - DNA, 25 bp, Artificial
  probe
  misc_feature (1)..(25): SEQ ID NO: 4796; WAN0249L8_at; Start 17; Stop 41
gagattctattacccaaaaggccga

SEQ ID NO: 25741 - DNA, 25 bp, Artificial
  probe
  misc_feature (1)..(25): SEQ ID NO: 4796; WAN0249L8_at; Start 68; Stop 92
aaaaatctgaaaaatgagaaaggat

SEQ ID NO: 25742 - DNA, 25 bp, Artificial
  probe
  misc_feature (1)..(25): SEQ ID NO: 4796; WAN0249L8_at; Start 16; Stop 40
tgagattctattacccaaaaggccg

SEQ ID NO: 25743 - DNA, 25 bp, Artificial
  probe
  misc_feature (1)..(25): SEQ ID NO: 4796; WAN0249L8_at; Start 15; Stop 39
gtgagattctattacccaaaaggcc

SEQ ID NO: 25744 - DNA, 25 bp, Artificial
  probe
  misc_feature (1)..(25): SEQ ID NO: 4796; WAN0249L8_at; Start 13; Stop 37
aagtgagattctattacccaaaagg

SEQ ID NO: 25745 - DNA, 25 bp, Artificial
  probe
  misc_feature (1)..(25): SEQ ID NO: 4796; WAN0249L8_at; Start 63; Stop 87
tgtgaaaaaatctgaaaaatgagaa

SEQ ID NO: 25746 - DNA, 25 bp, Artificial
  probe
  misc_feature (1)..(25): SEQ ID NO: 4796; WAN0249L8_at; Start 65; Stop 89
tgaaaaaatctgaaaaatgagaaag

SEQ ID NO: 25747 - DNA, 25 bp, Artificial
  probe
  misc_feature (1)..(25): SEQ ID NO: 4796; WAN0249L8_at; Start 57; Stop 81
gtacagtgtgaaaaaatctgaaaaa

SEQ ID NO: 25748 - DNA, 25 bp, Artificial
  probe
  misc_feature (1)..(25): SEQ ID NO: 4796; WAN0249L8_at; Start 45; Stop 69
tgtagtataatagtacagtgtgaaa

SEQ ID NO: 25749 - DNA, 25 bp, Artificial
  probe
  misc_feature (1)..(25): SEQ ID NO: 4796; WAN0249L8_at; Start 73; Stop 97
tctgaaaaatgagaaaggataaggg

SEQ ID NO: 25750 - DNA, 25 bp, Artificial
  probe
  misc_feature (1)..(25): SEQ ID NO: 4796; WAN0249L8_at; Start 31; Stop 55
caaaaggccgattttgtagtataat

SEQ ID NO: 25751 - DNA, 25 bp, Artificial
  probe
  misc_feature (1)..(25): SEQ ID NO: 4796; WAN0249L8_at; Start 62; Stop 86
gtgtgaaaaaatctgaaaaatgaga

SEQ ID NO: 25752 - DNA, 25 bp, Artificial
  probe
  misc_feature (1)..(25): SEQ ID NO: 4796; WAN0249L8_at; Start 52; Stop 76
taatagtacagtgtgaaaaaatctg

SEQ ID NO: 25753 - DNA, 25 bp, Artificial
  probe
  misc_feature (1)..(25): SEQ ID NO: 4796; WAN0249L8_at; Start 46; Stop 70
gtagtataatagtacagtgtgaaaa

SEQ ID NO: 25754 - DNA, 25 bp, Artificial
  probe
  misc_feature (1)..(25): SEQ ID NO: 4796; WAN0249L8_at; Start 72; Stop 96
atctgaaaaatgagaaaggataagg

SEQ ID NO: 25755 - DNA, 25 bp, Artificial
  probe
  misc_feature (1)..(25): SEQ ID NO: 4796; WAN0249L8_at; Start 56; Stop 80
agtacagtgtgaaaaaatctgaaaa

SEQ ID NO: 25756 - DNA, 25 bp, Artificial
  probe
  misc_feature (1)..(25): SEQ ID NO: 4796; WAN0249L8_at; Start 47; Stop 71
tagtataatagtacagtgtgaaaaa

SEQ ID NO: 25757 - DNA, 25 bp, Artificial
  probe
  misc_feature (1)..(25): SEQ ID NO: 581; WAN0249L9_at; Start 60; Stop 84
cggccttttgggtaatagaatctca

SEQ ID NO: 25758 - DNA, 25 bp, Artificial
  probe
  misc_feature (1)..(25): SEQ ID NO: 581; WAN0249L9_at; Start 30; Stop 54
ttttcacactgtactattatactac

SEQ ID NO: 25759 - DNA, 25 bp, Artificial
  probe
  misc_feature (1)..(25): SEQ ID NO: 581; WAN0249L9_at; Start 20; Stop 44
ttttcagattttttcacactgtact

SEQ ID NO: 25760 - DNA, 25 bp, Artificial
  probe
  misc_feature (1)..(25): SEQ ID NO: 581; WAN0249L9_at; Start 4; Stop 28
ccttatcctttctcatttttcagat

SEQ ID NO: 25761 - DNA, 25 bp, Artificial
  probe
  misc_feature (1)..(25): SEQ ID NO: 581; WAN0249L9_at; Start 2; Stop 26
tcccttatcctttctcatttttcag

SEQ ID NO: 25762 - DNA, 25 bp, Artificial
  probe
  misc_feature (1)..(25): SEQ ID NO: 581; WAN0249L9_at; Start 45; Stop 69
attatactacaaaatcggccttttg

SEQ ID NO: 25763 - DNA, 25 bp, Artificial
  probe
  misc_feature (1)..(25): SEQ ID NO: 581; WAN0249L9_at; Start 62; Stop 86
gccttttgggtaatagaatctcact

SEQ ID NO: 25764 - DNA, 25 bp, Artificial
  probe
  misc_feature (1)..(25): SEQ ID NO: 581; WAN0249L9_at; Start 61; Stop 85
ggccttttgggtaatagaatctcac

SEQ ID NO: 25765 - DNA, 25 bp, Artificial
  probe
  misc_feature (1)..(25): SEQ ID NO: 581; WAN0249L9_at; Start 72; Stop 96
taatagaatctcactttttttggta

SEQ ID NO: 25766 - DNA, 25 bp, Artificial
  probe
  misc_feature (1)..(25): SEQ ID NO: 581; WAN0249L9_at; Start 23; Stop 47
tcagattttttcacactgtactatt

SEQ ID NO: 25767 - DNA, 25 bp, Artificial
  probe
  misc_feature (1)..(25): SEQ ID NO: 581; WAN0249L9_at; Start 24; Stop 48
cagattttttcacactgtactatta

SEQ ID NO: 25768 - DNA, 25 bp, Artificial
  probe
  misc_feature (1)..(25): SEQ ID NO: 581; WAN0249L9_at; Start 14; Stop 38
tctcatttttcagattttttcacac

SEQ ID NO: 25769 - DNA, 25 bp, Artificial
  probe
  misc_feature (1)..(25): SEQ ID NO: 581; WAN0249L9_at; Start 59; Stop 83
tcggccttttgggtaatagaatctc

SEQ ID NO: 25770 - DNA, 25 bp, Artificial
  probe
  misc_feature (1)..(25): SEQ ID NO: 581; WAN0249L9_at; Start 7; Stop 31
tatcctttctcatttttcagatttt

SEQ ID NO: 25771 - DNA, 25 bp, Artificial
  probe
  misc_feature (1)..(25): SEQ ID NO: 581; WAN0249L9_at; Start 6; Stop 30
ttatcctttctcatttttcagattt

SEQ ID NO: 25772 - DNA, 25 bp, Artificial
  probe
  misc_feature (1)..(25): SEQ ID NO: 581; WAN0249L9_at; Start 26; Stop 50
gattttttcacactgtactattata

SEQ ID NO: 25773 - DNA, 25 bp, Artificial
  probe
  misc_feature (1)..(25): SEQ ID NO: 581; WAN0249L9_at; Start 5; Stop 29
cttatcctttctcatttttcagatt

SEQ ID NO: 25774 - DNA, 25 bp, Artificial
  probe
  misc_feature (1)..(25): SEQ ID NO: 581; WAN0249L9_at; Start 63; Stop 87
ccttttgggtaatagaatctcactt

SEQ ID NO: 25775 - DNA, 25 bp, Artificial
  probe
  misc_feature (1)..(25): SEQ ID NO: 581; WAN0249L9_at; Start 21; Stop 45
tttcagattttttcacactgtacta

SEQ ID NO: 25776 - DNA, 25 bp, Artificial
  probe
  misc_feature (1)..(25): SEQ ID NO: 581; WAN0249L9_at; Start 22; Stop 46
ttcagattttttcacactgtactat

SEQ ID NO: 25777 - DNA, 25 bp, Artificial
  probe
  misc_feature (1)..(25): SEQ ID NO: 581; WAN0249L9_at; Start 28; Stop 52
ttttttcacactgtactattatact

SEQ ID NO: 25778 - DNA, 25 bp, Artificial
  probe
  misc_feature (1)..(25): SEQ ID NO: 581; WAN0249L9_at; Start 73; Stop 97
aatagaatctcactttttttggtat

SEQ ID NO: 25779 - DNA, 25 bp, Artificial
  probe
  misc_feature (1)..(25): SEQ ID NO: 581; WAN0249L9_at; Start 27; Stop 51
attttttcacactgtactattatac

SEQ ID NO: 25780 - DNA, 25 bp, Artificial
  probe
  misc_feature (1)..(25): SEQ ID NO: 581; WAN0249L9_at; Start 16; Stop 40
tcatttttcagattttttcacactg

SEQ ID NO: 25781 - DNA, 25 bp, Artificial
  probe
  misc_feature (1)..(25): SEQ ID NO: 581; WAN0249L9_at; Start 74; Stop 98
atagaatctcactttttttggtata

SEQ ID NO: 25782 - DNA, 25 bp, Artificial
  probe
  misc_feature (1)..(25): SEQ ID NO: 581; WAN0249L9_at; Start 3; Stop 27
cccttatcctttctcatttttcaga

SEQ ID NO: 25783 - DNA, 25 bp, Artificial
  probe
  misc_feature (1)..(25): SEQ ID NO: 581; WAN0249L9_at; Start 18; Stop 42
atttttcagattttttcacactgta

SEQ ID NO: 25784 - DNA, 25 bp, Artificial
  probe
  misc_feature (1)..(25): SEQ ID NO: 581; WAN0249L9_at; Start 75; Stop 99
tagaatctcactttttttggtataa

SEQ ID NO: 25785 - DNA, 25 bp, Artificial
  probe
  misc_feature (1)..(25): SEQ ID NO: 581; WAN0249L9_at; Start 17; Stop 41
catttttcagattttttcacactgt

SEQ ID NO: 25786 - DNA, 25 bp, Artificial
  probe
  misc_feature (1)..(25): SEQ ID NO: 581; WAN0249L9_at; Start 29; Stop 53
tttttcacactgtactattatacta

SEQ ID NO: 25787 - DNA, 25 bp, Artificial
  probe
  misc_feature (1)..(25): SEQ ID NO: 581; WAN0249L9_at; Start 25; Stop 49
agattttttcacactgtactattat

SEQ ID NO: 25788 - DNA, 25 bp, Artificial
  probe
  misc_feature (1)..(25): SEQ ID NO: 581; WAN0249L9_at; Start 19; Stop 43
tttttcagattttttcacactgtac

SEQ ID NO: 25789 - DNA, 25 bp, Artificial
  probe
  misc_feature (1)..(25): SEQ ID NO: 581; WAN0249L9_at; Start 31; Stop 55
tttcacactgtactattatactaca

SEQ ID NO: 25790 - DNA, 25 bp, Artificial
  probe
  misc_feature (1)..(25): SEQ ID NO: 581; WAN0249L9_at; Start 64; Stop 88
cttttgggtaatagaatctcacttt

SEQ ID NO: 25791 - DNA, 25 bp, Artificial
  probe
  misc_feature (1)..(25): SEQ ID NO: 7365; WAN0249LA_at; Start 231; Stop 255
gaaggctgtatcaaaaagatttcat

SEQ ID NO: 25792 - DNA, 25 bp, Artificial
  probe
  misc_feature (1)..(25): SEQ ID NO: 7365; WAN0249LA_at; Start 207; Stop 231
aactgctgtctctctatgtaaaaag

SEQ ID NO: 25793 - DNA, 25 bp, Artificial
  probe
  misc_feature (1)..(25): SEQ ID NO: 7365; WAN0249LA_at; Start 204; Stop 228
cataactgctgtctctctatgtaaa

SEQ ID NO: 25794 - DNA, 25 bp, Artificial
  probe
  misc_feature (1)..(25): SEQ ID NO: 7365; WAN0249LA_at; Start 205; Stop 229
ataactgctgtctctctatgtaaaa

SEQ ID NO: 25795 - DNA, 25 bp, Artificial
  probe
  misc_feature (1)..(25): SEQ ID NO: 7365; WAN0249LA_at; Start 227; Stop 251
aaaagaaggctgtatcaaaaagatt

SEQ ID NO: 25796 - DNA, 25 bp, Artificial
  probe
  misc_feature (1)..(25): SEQ ID NO: 7365; WAN0249LA_at; Start 210; Stop 234
tgctgtctctctatgtaaaaagaag

SEQ ID NO: 25797 - DNA, 25 bp, Artificial
  probe
  misc_feature (1)..(25): SEQ ID NO: 7365; WAN0249LA_at; Start 228; Stop 252
aaagaaggctgtatcaaaaagattt

SEQ ID NO: 25798 - DNA, 25 bp, Artificial
  probe
  misc_feature (1)..(25): SEQ ID NO: 7365; WAN0249LA_at; Start 220; Stop 244
ctatgtaaaaagaaggctgtatcaa

SEQ ID NO: 25799 - DNA, 25 bp, Artificial
  probe
  misc_feature (1)..(25): SEQ ID NO: 7365; WAN0249LA_at; Start 213; Stop 237
tgtctctctatgtaaaaagaaggct

SEQ ID NO: 25800 - DNA, 25 bp, Artificial
  probe
  misc_feature (1)..(25): SEQ ID NO: 7365; WAN0249LA_at; Start 230; Stop 254
agaaggctgtatcaaaaagatttca

SEQ ID NO: 25801 - DNA, 25 bp, Artificial
  probe
  misc_feature (1)..(25): SEQ ID NO: 7365; WAN0249LA_at; Start 225; Stop 249
taaaaagaaggctgtatcaaaaaga

SEQ ID NO: 25802 - DNA, 25 bp, Artificial
  probe
  misc_feature (1)..(25): SEQ ID NO: 7365; WAN0249LA_at; Start 211; Stop 235
gctgtctctctatgtaaaaagaagg

SEQ ID NO: 25803 - DNA, 25 bp, Artificial
  probe
  misc_feature (1)..(25): SEQ ID NO: 7365; WAN0249LA_at; Start 203; Stop 227
tcataactgctgtctctctatgtaa

SEQ ID NO: 25804 - DNA, 25 bp, Artificial
  probe
  misc_feature (1)..(25): SEQ ID NO: 7365; WAN0249LA_at; Start 212; Stop 236
ctgtctctctatgtaaaaagaaggc

SEQ ID NO: 25805 - DNA, 25 bp, Artificial
  probe
  misc_feature (1)..(25): SEQ ID NO: 7365; WAN0249LA_at; Start 218; Stop 242
ctctatgtaaaaagaaggctgtatc

SEQ ID NO: 25806 - DNA, 25 bp, Artificial
  probe
  misc_feature (1)..(25): SEQ ID NO: 7365; WAN0249LA_at; Start 219; Stop 243
tctatgtaaaaagaaggctgtatca

SEQ ID NO: 25807 - DNA, 25 bp, Artificial
  probe
  misc_feature (1)..(25): SEQ ID NO: 7365; WAN0249LA_at; Start 200; Stop 224
atatcataactgctgtctctctatg

SEQ ID NO: 25808 - DNA, 25 bp, Artificial
  probe
  misc_feature (1)..(25): SEQ ID NO: 7365; WAN0249LA_at; Start 202; Stop 226
atcataactgctgtctctctatgta

SEQ ID NO: 25809 - DNA, 25 bp, Artificial
  probe
  misc_feature (1)..(25): SEQ ID NO: 7365; WAN0249LA_at; Start 208; Stop 232
actgctgtctctctatgtaaaaaga

SEQ ID NO: 25810 - DNA, 25 bp, Artificial
  probe
  misc_feature (1)..(25): SEQ ID NO: 7365; WAN0249LA_at; Start 201; Stop 225
tatcataactgctgtctctctatgt

SEQ ID NO: 25811 - DNA, 25 bp, Artificial
  probe
  misc_feature (1)..(25): SEQ ID NO: 7365; WAN0249LA_at; Start 222; Stop 246
atgtaaaaagaaggctgtatcaaaa

SEQ ID NO: 25812 - DNA, 25 bp, Artificial
  probe
  misc_feature (1)..(25): SEQ ID NO: 7365; WAN0249LA_at; Start 216; Stop 240
ctctctatgtaaaaagaaggctgta

SEQ ID NO: 25813 - DNA, 25 bp, Artificial
  probe
  misc_feature (1)..(25): SEQ ID NO: 7365; WAN0249LA_at; Start 226; Stop 250
aaaaagaaggctgtatcaaaaagat

SEQ ID NO: 25814 - DNA, 25 bp, Artificial
  probe
  misc_feature (1)..(25): SEQ ID NO: 7365; WAN0249LA_at; Start 221; Stop 245
tatgtaaaaagaaggctgtatcaaa

SEQ ID NO: 25815 - DNA, 25 bp, Artificial
  probe
  misc_feature (1)..(25): SEQ ID NO: 7365; WAN0249LA_at; Start 206; Stop 230
taactgctgtctctctatgtaaaaa

SEQ ID NO: 25816 - DNA, 25 bp, Artificial
  probe
  misc_feature (1)..(25): SEQ ID NO: 7365; WAN0249LA_at; Start 214; Stop 238
gtctctctatgtaaaaagaaggctg

SEQ ID NO: 25817 - DNA, 25 bp, Artificial
  probe
  misc_feature (1)..(25): SEQ ID NO: 7365; WAN0249LA_at; Start 199; Stop 223
tatatcataactgctgtctctctat

SEQ ID NO: 25818 - DNA, 25 bp, Artificial
  probe
  misc_feature (1)..(25): SEQ ID NO: 7365; WAN0249LA_at; Start 209; Stop 233
ctgctgtctctctatgtaaaaagaa

SEQ ID NO: 25819 - DNA, 25 bp, Artificial
  probe
  misc_feature (1)..(25): SEQ ID NO: 7365; WAN0249LA_at; Start 229; Stop 253
aagaaggctgtatcaaaaagatttc

SEQ ID NO: 25820 - DNA, 25 bp, Artificial
  probe
  misc_feature (1)..(25): SEQ ID NO: 7365; WAN0249LA_at; Start 217; Stop 241
tctctatgtaaaaagaaggctgtat

SEQ ID NO: 25821 - DNA, 25 bp, Artificial
  probe
  misc_feature (1)..(25): SEQ ID NO: 7365; WAN0249LA_at; Start 223; Stop 247
tgtaaaaagaaggctgtatcaaaaa

SEQ ID NO: 25822 - DNA, 25 bp, Artificial
  probe
  misc_feature (1)..(25): SEQ ID NO: 7365; WAN0249LA_at; Start 215; Stop 239
tctctctatgtaaaaagaaggctgt

SEQ ID NO: 25823 - DNA, 25 bp, Artificial
  probe
  misc_feature (1)..(25): SEQ ID NO: 7075; WAN0249LB_at; Start 198; Stop 222
atcataactgctatctcaaaaagat

SEQ ID NO: 25824 - DNA, 25 bp, Artificial
  probe
  misc_feature (1)..(25): SEQ ID NO: 7075; WAN0249LB_at; Start 203; Stop 227
aactgctatctcaaaaagatttcat

SEQ ID NO: 25825 - DNA, 25 bp, Artificial
  probe
  misc_feature (1)..(25): SEQ ID NO: 7075; WAN0249LB_at; Start 200; Stop 224
cataactgctatctcaaaaagattt

SEQ ID NO: 25826 - DNA, 25 bp, Artificial
  probe
  misc_feature (1)..(25): SEQ ID NO: 7075; WAN0249LB_at; Start 196; Stop 220
atatcataactgctatctcaaaaag

SEQ ID NO: 25827 - DNA, 25 bp, Artificial
  probe
  misc_feature (1)..(25): SEQ ID NO: 7075; WAN0249LB_at; Start 199; Stop 223
tcataactgctatctcaaaaagatt

SEQ ID NO: 25828 - DNA, 25 bp, Artificial
  probe
  misc_feature (1)..(25): SEQ ID NO: 7075; WAN0249LB_at; Start 197; Stop 221
tatcataactgctatctcaaaaaga

SEQ ID NO: 25829 - DNA, 25 bp, Artificial
  probe
  misc_feature (1)..(25): SEQ ID NO: 7075; WAN0249LB_at; Start 201; Stop 225
ataactgctatctcaaaaagatttc

SEQ ID NO: 25830 - DNA, 25 bp, Artificial
  probe
  misc_feature (1)..(25): SEQ ID NO: 7075; WAN0249LB_at; Start 195; Stop 219
tatatcataactgctatctcaaaaa

SEQ ID NO: 25831 - DNA, 25 bp, Artificial
  probe
  misc_feature (1)..(25): SEQ ID NO: 7075; WAN0249LB_at; Start 202; Stop 226
taactgctatctcaaaaagatttca

SEQ ID NO: 25832 - DNA, 25 bp, Artificial
  probe
  misc_feature (1)..(25): SEQ ID NO: 7735; WAN0249LC_at; Start 42; Stop 66
ctttttgagatagcagttatgatat

SEQ ID NO: 25833 - DNA, 25 bp, Artificial
  probe
  misc_feature (1)..(25): SEQ ID NO: 7735; WAN0249LC_at; Start 37; Stop 61
gaaatctttttgagatagcagttat

SEQ ID NO: 25834 - DNA, 25 bp, Artificial
  probe
  misc_feature (1)..(25): SEQ ID NO: 7735; WAN0249LC_at; Start 41; Stop 65
tctttttgagatagcagttatgata

SEQ ID NO: 25835 - DNA, 25 bp, Artificial
  probe
  misc_feature (1)..(25): SEQ ID NO: 7735; WAN0249LC_at; Start 40; Stop 64
atctttttgagatagcagttatgat

SEQ ID NO: 25836 - DNA, 25 bp, Artificial
  probe
  misc_feature (1)..(25): SEQ ID NO: 7735; WAN0249LC_at; Start 35; Stop 59
atgaaatctttttgagatagcagtt

SEQ ID NO: 25837 - DNA, 25 bp, Artificial
  probe
  misc_feature (1)..(25): SEQ ID NO: 7735; WAN0249LC_at; Start 39; Stop 63
aatctttttgagatagcagttatga

SEQ ID NO: 25838 - DNA, 25 bp, Artificial
  probe
  misc_feature (1)..(25): SEQ ID NO: 7735; WAN0249LC_at; Start 38; Stop 62
aaatctttttgagatagcagttatg

SEQ ID NO: 25839 - DNA, 25 bp, Artificial
  probe
  misc_feature (1)..(25): SEQ ID NO: 7735; WAN0249LC_at; Start 36; Stop 60
tgaaatctttttgagatagcagtta

SEQ ID NO: 25840 - DNA, 25 bp, Artificial
  probe
  misc_feature (1)..(25): SEQ ID NO: 7735; WAN0249LC_at; Start 43; Stop 67
tttttgagatagcagttatgatata

SEQ ID NO: 25841 - DNA, 25 bp, Artificial
  probe
  misc_feature (1)..(25): SEQ ID NO: 7734; WAN0249LD_at; Start 64; Stop 88
tttacatagagagacagcagttatg

SEQ ID NO: 25842 - DNA, 25 bp, Artificial
  probe
  misc_feature (1)..(25): SEQ ID NO: 7734; WAN0249LD_at; Start 48; Stop 72
ttgatacagccttctttttacatag

SEQ ID NO: 25843 - DNA, 25 bp, Artificial
  probe
  misc_feature (1)..(25): SEQ ID NO: 7734; WAN0249LD_at; Start 56; Stop 80
gccttctttttacatagagagacag

SEQ ID NO: 25844 - DNA, 25 bp, Artificial
  probe
  misc_feature (1)..(25): SEQ ID NO: 7734; WAN0249LD_at; Start 55; Stop 79
agccttctttttacatagagagaca

SEQ ID NO: 25845 - DNA, 25 bp, Artificial
  probe
  misc_feature (1)..(25): SEQ ID NO: 7734; WAN0249LD_at; Start 60; Stop 84
tctttttacatagagagacagcagt

SEQ ID NO: 25846 - DNA, 25 bp, Artificial
  probe
  misc_feature (1)..(25): SEQ ID NO: 7734; WAN0249LD_at; Start 69; Stop 93
atagagagacagcagttatgatata

SEQ ID NO: 25847 - DNA, 25 bp, Artificial
  probe
  misc_feature (1)..(25): SEQ ID NO: 7734; WAN0249LD_at; Start 52; Stop 76
tacagccttctttttacatagagag

SEQ ID NO: 25848 - DNA, 25 bp, Artificial
  probe
  misc_feature (1)..(25): SEQ ID NO: 7734; WAN0249LD_at; Start 39; Stop 63
gaaatctttttgatacagccttctt

SEQ ID NO: 25849 - DNA, 25 bp, Artificial
  probe
  misc_feature (1)..(25): SEQ ID NO: 7734; WAN0249LD_at; Start 54; Stop 78
cagccttctttttacatagagagac

SEQ ID NO: 25850 - DNA, 25 bp, Artificial
  probe
  misc_feature (1)..(25): SEQ ID NO: 7734; WAN0249LD_at; Start 51; Stop 75
atacagccttctttttacatagaga

SEQ ID NO: 25851 - DNA, 25 bp, Artificial
  probe
  misc_feature (1)..(25): SEQ ID NO: 7734; WAN0249LD_at; Start 61; Stop 85
ctttttacatagagagacagcagtt

SEQ ID NO: 25852 - DNA, 25 bp, Artificial
  probe
  misc_feature (1)..(25): SEQ ID NO: 7734; WAN0249LD_at; Start 46; Stop 70
ttttgatacagccttctttttacat

SEQ ID NO: 25853 - DNA, 25 bp, Artificial
  probe
  misc_feature (1)..(25): SEQ ID NO: 7734; WAN0249LD_at; Start 58; Stop 82
cttctttttacatagagagacagca

SEQ ID NO: 25854 - DNA, 25 bp, Artificial
  probe
  misc_feature (1)..(25): SEQ ID NO: 7734; WAN0249LD_at; Start 63; Stop 87
ttttacatagagagacagcagttat

SEQ ID NO: 25855 - DNA, 25 bp, Artificial
  probe
  misc_feature (1)..(25): SEQ ID NO: 7734; WAN0249LD_at; Start 42; Stop 66
atctttttgatacagccttcttttt

SEQ ID NO: 25856 - DNA, 25 bp, Artificial
  probe
  misc_feature (1)..(25): SEQ ID NO: 7734; WAN0249LD_at; Start 47; Stop 71
tttgatacagccttctttttacata

SEQ ID NO: 25857 - DNA, 25 bp, Artificial
  probe
  misc_feature (1)..(25): SEQ ID NO: 7734; WAN0249LD_at; Start 68; Stop 92
catagagagacagcagttatgatat

SEQ ID NO: 25858 - DNA, 25 bp, Artificial
  probe
  misc_feature (1)..(25): SEQ ID NO: 7734; WAN0249LD_at; Start 37; Stop 61
atgaaatctttttgatacagccttc

SEQ ID NO: 25859 - DNA, 25 bp, Artificial
  probe
  misc_feature (1)..(25): SEQ ID NO: 7734; WAN0249LD_at; Start 65; Stop 89
ttacatagagagacagcagttatga

SEQ ID NO: 25860 - DNA, 25 bp, Artificial
  probe
  misc_feature (1)..(25): SEQ ID NO: 7734; WAN0249LD_at; Start 67; Stop 91
acatagagagacagcagttatgata

SEQ ID NO: 25861 - DNA, 25 bp, Artificial
  probe
  misc_feature (1)..(25): SEQ ID NO: 7734; WAN0249LD_at; Start 41; Stop 65
aatctttttgatacagccttctttt

SEQ ID NO: 25862 - DNA, 25 bp, Artificial
  probe
  misc_feature (1)..(25): SEQ ID NO: 7734; WAN0249LD_at; Start 53; Stop 77
acagccttctttttacatagagaga

SEQ ID NO: 25863 - DNA, 25 bp, Artificial
  probe
  misc_feature (1)..(25): SEQ ID NO: 7734; WAN0249LD_at; Start 40; Stop 64
aaatctttttgatacagccttcttt

SEQ ID NO: 25864 - DNA, 25 bp, Artificial
  probe
  misc_feature (1)..(25): SEQ ID NO: 7734; WAN0249LD_at; Start 59; Stop 83
ttctttttacatagagagacagcag

SEQ ID NO: 25865 - DNA, 25 bp, Artificial
  probe
  misc_feature (1)..(25): SEQ ID NO: 7734; WAN0249LD_at; Start 38; Stop 62
tgaaatctttttgatacagccttct

SEQ ID NO: 25866 - DNA, 25 bp, Artificial
  probe
  misc_feature (1)..(25): SEQ ID NO: 7734; WAN0249LD_at; Start 49; Stop 73
tgatacagccttctttttacataga

SEQ ID NO: 25867 - DNA, 25 bp, Artificial
  probe
  misc_feature (1)..(25): SEQ ID NO: 7734; WAN0249LD_at; Start 57; Stop 81
ccttctttttacatagagagacagc

SEQ ID NO: 25868 - DNA, 25 bp, Artificial
  probe
  misc_feature (1)..(25): SEQ ID NO: 7734; WAN0249LD_at; Start 66; Stop 90
tacatagagagacagcagttatgat

SEQ ID NO: 25869 - DNA, 25 bp, Artificial
  probe
  misc_feature (1)..(25): SEQ ID NO: 7734; WAN0249LD_at; Start 62; Stop 86
tttttacatagagagacagcagtta

SEQ ID NO: 25870 - DNA, 25 bp, Artificial
  probe
  misc_feature (1)..(25): SEQ ID NO: 7734; WAN0249LD_at; Start 45; Stop 69
tttttgatacagccttctttttaca

SEQ ID NO: 25871 - DNA, 25 bp, Artificial
  probe
  misc_feature (1)..(25): SEQ ID NO: 7734; WAN0249LD_at; Start 43; Stop 67
tctttttgatacagccttcttttta

SEQ ID NO: 25872 - DNA, 25 bp, Artificial
  probe
  misc_feature (1)..(25): SEQ ID NO: 7734; WAN0249LD_at; Start 50; Stop 74
gatacagccttctttttacatagag

SEQ ID NO: 25873 - DNA, 25 bp, Artificial
  probe
  misc_feature (1)..(25): SEQ ID NO: 4364; WAN0249LE_at; Start 7; Stop 31
actatactttgatattcaaatatgt

SEQ ID NO: 25874 - DNA, 25 bp, Artificial
  probe
  misc_feature (1)..(25): SEQ ID NO: 4364; WAN0249LE_at; Start 11; Stop 35
tactttgatattcaaatatgttata

SEQ ID NO: 25875 - DNA, 25 bp, Artificial
  probe
  misc_feature (1)..(25): SEQ ID NO: 4364; WAN0249LE_at; Start 13; Stop 37
ctttgatattcaaatatgttatact

SEQ ID NO: 25876 - DNA, 25 bp, Artificial
  probe
  misc_feature (1)..(25): SEQ ID NO: 4364; WAN0249LE_at; Start 14; Stop 38
tttgatattcaaatatgttatacta

SEQ ID NO: 25877 - DNA, 25 bp, Artificial
  probe
  misc_feature (1)..(25): SEQ ID NO: 4364; WAN0249LE_at; Start 15; Stop 39
ttgatattcaaatatgttatactat

SEQ ID NO: 25878 - DNA, 25 bp, Artificial
  probe
  misc_feature (1)..(25): SEQ ID NO: 4364; WAN0249LE_at; Start 9; Stop 33
tatactttgatattcaaatatgtta

SEQ ID NO: 25879 - DNA, 25 bp, Artificial
  probe
  misc_feature (1)..(25): SEQ ID NO: 4364; WAN0249LE_at; Start 6; Stop 30
tactatactttgatattcaaatatg

SEQ ID NO: 25880 - DNA, 25 bp, Artificial
  probe
  misc_feature (1)..(25): SEQ ID NO: 4364; WAN0249LE_at; Start 12; Stop 36
actttgatattcaaatatgttatac

SEQ ID NO: 25881 - DNA, 25 bp, Artificial
  probe
  misc_feature (1)..(25): SEQ ID NO: 4364; WAN0249LE_at; Start 1; Stop 25
gtttttactatactttgatattcaa

SEQ ID NO: 25882 - DNA, 25 bp, Artificial
  probe
  misc_feature (1)..(25): SEQ ID NO: 4364; WAN0249LE_at; Start 2; Stop 26
tttttactatactttgatattcaaa

SEQ ID NO: 25883 - DNA, 25 bp, Artificial
  probe
  misc_feature (1)..(25): SEQ ID NO: 4364; WAN0249LE_at; Start 16; Stop 40
tgatattcaaatatgttatactatg

SEQ ID NO: 25884 - DNA, 25 bp, Artificial
  probe
  misc_feature (1)..(25): SEQ ID NO: 4364; WAN0249LE_at; Start 8; Stop 32
ctatactttgatattcaaatatgtt

SEQ ID NO: 25885 - DNA, 25 bp, Artificial
  probe
  misc_feature (1)..(25): SEQ ID NO: 4364; WAN0249LE_at; Start 4; Stop 28
tttactatactttgatattcaaata

SEQ ID NO: 25886 - DNA, 25 bp, Artificial
  probe
  misc_feature (1)..(25): SEQ ID NO: 4780; WAN0249LF_at; Start 26; Stop 50
tatttgaatatcaaagtatagtaaa

SEQ ID NO: 25887 - DNA, 25 bp, Artificial
  probe
  misc_feature (1)..(25): SEQ ID NO: 4780; WAN0249LF_at; Start 24; Stop 48
catatttgaatatcaaagtatagta

SEQ ID NO: 25888 - DNA, 25 bp, Artificial
  probe
  misc_feature (1)..(25): SEQ ID NO: 4780; WAN0249LF_at; Start 22; Stop 46
aacatatttgaatatcaaagtatag

SEQ ID NO: 25889 - DNA, 25 bp, Artificial
  probe
  misc_feature (1)..(25): SEQ ID NO: 4780; WAN0249LF_at; Start 29; Stop 53
ttgaatatcaaagtatagtaaaaac

SEQ ID NO: 25890 - DNA, 25 bp, Artificial
  probe
  misc_feature (1)..(25): SEQ ID NO: 4780; WAN0249LF_at; Start 16; Stop 40
tagtataacatatttgaatatcaaa

SEQ ID NO: 25891 - DNA, 25 bp, Artificial
  probe
  misc_feature (1)..(25): SEQ ID NO: 4780; WAN0249LF_at; Start 21; Stop 45
taacatatttgaatatcaaagtata

SEQ ID NO: 25892 - DNA, 25 bp, Artificial
  probe
  misc_feature (1)..(25): SEQ ID NO: 4780; WAN0249LF_at; Start 28; Stop 52
tttgaatatcaaagtatagtaaaaa

SEQ ID NO: 25893 - DNA, 25 bp, Artificial
  probe
  misc_feature (1)..(25): SEQ ID NO: 4780; WAN0249LF_at; Start 23; Stop 47
acatatttgaatatcaaagtatagt

SEQ ID NO: 25894 - DNA, 25 bp, Artificial
  probe
  misc_feature (1)..(25): SEQ ID NO: 4780; WAN0249LF_at; Start 17; Stop 41
agtataacatatttgaatatcaaag

SEQ ID NO: 25895 - DNA, 25 bp, Artificial
  probe
  misc_feature (1)..(25): SEQ ID NO: 4780; WAN0249LF_at; Start 19; Stop 43
tataacatatttgaatatcaaagta

SEQ ID NO: 25896 - DNA, 25 bp, Artificial
  probe
  misc_feature (1)..(25): SEQ ID NO: 4780; WAN0249LF_at; Start 27; Stop 51
atttgaatatcaaagtatagtaaaa

SEQ ID NO: 25897 - DNA, 25 bp, Artificial
  probe
  misc_feature (1)..(25): SEQ ID NO: 4780; WAN0249LF_at; Start 14; Stop 38
catagtataacatatttgaatatca

SEQ ID NO: 25898 - DNA, 25 bp, Artificial
  probe
  misc_feature (1)..(25): SEQ ID NO: 4780; WAN0249LF_at; Start 18; Stop 42
gtataacatatttgaatatcaaagt

SEQ ID NO: 25899 - DNA, 25 bp, Artificial
  probe
  misc_feature (1)..(25): SEQ ID NO: 4780; WAN0249LF_at; Start 25; Stop 49
atatttgaatatcaaagtatagtaa

SEQ ID NO: 25900 - DNA, 25 bp, Artificial
  probe
  misc_feature (1)..(25): SEQ ID NO: 4780; WAN0249LF_at; Start 15; Stop 39
atagtataacatatttgaatatcaa

SEQ ID NO: 25901 - DNA, 25 bp, Artificial
  probe
  misc_feature (1)..(25): SEQ ID NO: 3592; WAN0249LG_at; Start 26; Stop 50
gaggcgatgatctctctgcggatat

SEQ ID NO: 25902 - DNA, 25 bp, Artificial
  probe
  misc_feature (1)..(25): SEQ ID NO: 3592; WAN0249LG_at; Start 56; Stop 80
agtttatctcttgcctagcgatttc

SEQ ID NO: 25903 - DNA, 25 bp, Artificial
  probe
  misc_feature (1)..(25): SEQ ID NO: 3592; WAN0249LG_at; Start 14; Stop 38
ttgcgacaaaaagaggcgatgatct

SEQ ID NO: 25904 - DNA, 25 bp, Artificial
  probe
  misc_feature (1)..(25): SEQ ID NO: 3592; WAN0249LG_at; Start 50; Stop 74
tctgaaagtttatctcttgcctagc

SEQ ID NO: 25905 - DNA, 25 bp, Artificial
  probe
  misc_feature (1)..(25): SEQ ID NO: 3592; WAN0249LG_at; Start 36; Stop 60
tctctctgcggatatctgaaagttt

SEQ ID NO: 25906 - DNA, 25 bp, Artificial
  probe
  misc_feature (1)..(25): SEQ ID NO: 3592; WAN0249LG_at; Start 23; Stop 47
aaagaggcgatgatctctctgcgga

SEQ ID NO: 25907 - DNA, 25 bp, Artificial
  probe
  misc_feature (1)..(25): SEQ ID NO: 3592; WAN0249LG_at; Start 28; Stop 52
ggcgatgatctctctgcggatatct

SEQ ID NO: 25908 - DNA, 25 bp, Artificial
  probe
  misc_feature (1)..(25): SEQ ID NO: 3592; WAN0249LG_at; Start 11; Stop 35
tgcttgcgacaaaaagaggcgatga

SEQ ID NO: 25909 - DNA, 25 bp, Artificial
  probe
  misc_feature (1)..(25): SEQ ID NO: 3592; WAN0249LG_at; Start 40; Stop 64
tctgcggatatctgaaagtttatct

SEQ ID NO: 25910 - DNA, 25 bp, Artificial
  probe
  misc_feature (1)..(25): SEQ ID NO: 3592; WAN0249LG_at; Start 16; Stop 40
gcgacaaaaagaggcgatgatctct

SEQ ID NO: 25911 - DNA, 25 bp, Artificial
  probe
  misc_feature (1)..(25): SEQ ID NO: 3592; WAN0249LG_at; Start 53; Stop 77
gaaagtttatctcttgcctagcgat

SEQ ID NO: 25912 - DNA, 25 bp, Artificial
  probe
  misc_feature (1)..(25): SEQ ID NO: 3592; WAN0249LG_at; Start 38; Stop 62
tctctgcggatatctgaaagtttat

SEQ ID NO: 25913 - DNA, 25 bp, Artificial
  probe
  misc_feature (1)..(25): SEQ ID NO: 3592; WAN0249LG_at; Start 7; Stop 31
agaatgcttgcgacaaaaagaggcg

SEQ ID NO: 25914 - DNA, 25 bp, Artificial
  probe
  misc_feature (1)..(25): SEQ ID NO: 3592; WAN0249LG_at; Start 9; Stop 33
aatgcttgcgacaaaaagaggcgat

SEQ ID NO: 25915 - DNA, 25 bp, Artificial
  probe
  misc_feature (1)..(25): SEQ ID NO: 3592; WAN0249LG_at; Start 24; Stop 48
aagaggcgatgatctctctgcggat

SEQ ID NO: 25916 - DNA, 25 bp, Artificial
  probe
  misc_feature (1)..(25): SEQ ID NO: 3592; WAN0249LG_at; Start 34; Stop 58
gatctctctgcggatatctgaaagt

SEQ ID NO: 25917 - DNA, 25 bp, Artificial
  probe
  misc_feature (1)..(25): SEQ ID NO: 3592; WAN0249LG_at; Start 3; Stop 27
gaggagaatgcttgcgacaaaaaga

SEQ ID NO: 25918 - DNA, 25 bp, Artificial
  probe
  misc_feature (1)..(25): SEQ ID NO: 3592; WAN0249LG_at; Start 8; Stop 32
gaatgcttgcgacaaaaagaggcga

SEQ ID NO: 25919 - DNA, 25 bp, Artificial
  probe
  misc_feature (1)..(25): SEQ ID NO: 3592; WAN0249LG_at; Start 22; Stop 46
aaaagaggcgatgatctctctgcgg

SEQ ID NO: 25920 - DNA, 25 bp, Artificial
  probe
  misc_feature (1)..(25): SEQ ID NO: 3592; WAN0249LG_at; Start 58; Stop 82
tttatctcttgcctagcgatttcca

SEQ ID NO: 25921 - DNA, 25 bp, Artificial
  probe
  misc_feature (1)..(25): SEQ ID NO: 3592; WAN0249LG_at; Start 12; Stop 36
gcttgcgacaaaaagaggcgatgat

SEQ ID NO: 25922 - DNA, 25 bp, Artificial
  probe
  misc_feature (1)..(25): SEQ ID NO: 3592; WAN0249LG_at; Start 54; Stop 78
aaagtttatctcttgcctagcgatt

SEQ ID NO: 25923 - DNA, 25 bp, Artificial
  probe
  misc_feature (1)..(25): SEQ ID NO: 3592; WAN0249LG_at; Start 37; Stop 61
ctctctgcggatatctgaaagttta

SEQ ID NO: 25924 - DNA, 25 bp, Artificial
  probe
  misc_feature (1)..(25): SEQ ID NO: 3592; WAN0249LG_at; Start 20; Stop 44
caaaaagaggcgatgatctctctgc

SEQ ID NO: 25925 - DNA, 25 bp, Artificial
  probe
  misc_feature (1)..(25): SEQ ID NO: 3592; WAN0249LG_at; Start 6; Stop 30
gagaatgcttgcgacaaaaagaggc

SEQ ID NO: 25926 - DNA, 25 bp, Artificial
  probe
  misc_feature (1)..(25): SEQ ID NO: 3592; WAN0249LG_at; Start 42; Stop 66
tgcggatatctgaaagtttatctct

SEQ ID NO: 25927 - DNA, 25 bp, Artificial
  probe
  misc_feature (1)..(25): SEQ ID NO: 3592; WAN0249LG_at; Start 29; Stop 53
gcgatgatctctctgcggatatctg

SEQ ID NO: 25928 - DNA, 25 bp, Artificial
  probe
  misc_feature (1)..(25): SEQ ID NO: 3592; WAN0249LG_at; Start 31; Stop 55
gatgatctctctgcggatatctgaa

SEQ ID NO: 25929 - DNA, 25 bp, Artificial
  probe
  misc_feature (1)..(25): SEQ ID NO: 3592; WAN0249LG_at; Start 52; Stop 76
tgaaagtttatctcttgcctagcga

SEQ ID NO: 25930 - DNA, 25 bp, Artificial
  probe
  misc_feature (1)..(25): SEQ ID NO: 3592; WAN0249LG_at; Start 46; Stop 70
gatatctgaaagtttatctcttgcc

SEQ ID NO: 25931 - DNA, 25 bp, Artificial
  probe
  misc_feature (1)..(25): SEQ ID NO: 3592; WAN0249LG_at; Start 15; Stop 39
tgcgacaaaaagaggcgatgatctc

SEQ ID NO: 25932 - DNA, 25 bp, Artificial
  probe
  misc_feature (1)..(25): SEQ ID NO: 3592; WAN0249LG_at; Start 13; Stop 37
cttgcgacaaaaagaggcgatgatc

SEQ ID NO: 25933 - DNA, 25 bp, Artificial
  probe
  misc_feature (1)..(25): SEQ ID NO: 3592; WAN0249LG_at; Start 1; Stop 25
gagaggagaatgcttgcgacaaaaa

SEQ ID NO: 25934 - DNA, 25 bp, Artificial
  probe
  misc_feature (1)..(25): SEQ ID NO: 3592; WAN0249LG_at; Start 21; Stop 45
aaaaagaggcgatgatctctctgcg

SEQ ID NO: 25935 - DNA, 25 bp, Artificial
  probe
  misc_feature (1)..(25): SEQ ID NO: 4706; WAN0249LH_at; Start 23; Stop 47
aaactttcagatatccgcagagaga

SEQ ID NO: 25936 - DNA, 25 bp, Artificial
  probe
  misc_feature (1)..(25): SEQ ID NO: 4706; WAN0249LH_at; Start 11; Stop 35
taggcaagagataaactttcagata

SEQ ID NO: 25937 - DNA, 25 bp, Artificial
  probe
  misc_feature (1)..(25): SEQ ID NO: 4706; WAN0249LH_at; Start 30; Stop 54
cagatatccgcagagagatcatcgc

SEQ ID NO: 25938 - DNA, 25 bp, Artificial
  probe
  misc_feature (1)..(25): SEQ ID NO: 4706; WAN0249LH_at; Start 7; Stop 31
tcgctaggcaagagataaactttca

SEQ ID NO: 25939 - DNA, 25 bp, Artificial
  probe
  misc_feature (1)..(25): SEQ ID NO: 4706; WAN0249LH_at; Start 37; Stop 61
ccgcagagagatcatcgcctctttt

SEQ ID NO: 25940 - DNA, 25 bp, Artificial
  probe
  misc_feature (1)..(25): SEQ ID NO: 4706; WAN0249LH_at; Start 28; Stop 52
ttcagatatccgcagagagatcatc

SEQ ID NO: 25941 - DNA, 25 bp, Artificial
  probe
  misc_feature (1)..(25): SEQ ID NO: 4706; WAN0249LH_at; Start 20; Stop 44
gataaactttcagatatccgcagag

SEQ ID NO: 25942 - DNA, 25 bp, Artificial
  probe
  misc_feature (1)..(25): SEQ ID NO: 4706; WAN0249LH_at; Start 31; Stop 55
agatatccgcagagagatcatcgcc

SEQ ID NO: 25943 - DNA, 25 bp, Artificial
  probe
  misc_feature (1)..(25): SEQ ID NO: 4706; WAN0249LH_at; Start 5; Stop 29
aatcgctaggcaagagataaacttt

SEQ ID NO: 25944 - DNA, 25 bp, Artificial
  probe
  misc_feature (1)..(25): SEQ ID NO: 4706; WAN0249LH_at; Start 48; Stop 72
tcatcgcctctttttgtcgcaagca

SEQ ID NO: 25945 - DNA, 25 bp, Artificial
  probe
  misc_feature (1)..(25): SEQ ID NO: 4706; WAN0249LH_at; Start 18; Stop 42
gagataaactttcagatatccgcag

SEQ ID NO: 25946 - DNA, 25 bp, Artificial
  probe
  misc_feature (1)..(25): SEQ ID NO: 4706; WAN0249LH_at; Start 56; Stop 80
tctttttgtcgcaagcattctcctc

SEQ ID NO: 25947 - DNA, 25 bp, Artificial
  probe
  misc_feature (1)..(25): SEQ ID NO: 4706; WAN0249LH_at; Start 13; Stop 37
ggcaagagataaactttcagatatc

SEQ ID NO: 25948 - DNA, 25 bp, Artificial
  probe
  misc_feature (1)..(25): SEQ ID NO: 4706; WAN0249LH_at; Start 24; Stop 48
aactttcagatatccgcagagagat

SEQ ID NO: 25949 - DNA, 25 bp, Artificial
  probe
  misc_feature (1)..(25): SEQ ID NO: 4706; WAN0249LH_at; Start 34; Stop 58
tatccgcagagagatcatcgcctct

SEQ ID NO: 25950 - DNA, 25 bp, Artificial
  probe
  misc_feature (1)..(25): SEQ ID NO: 4706; WAN0249LH_at; Start 8; Stop 32
cgctaggcaagagataaactttcag

SEQ ID NO: 25951 - DNA, 25 bp, Artificial
  probe
  misc_feature (1)..(25): SEQ ID NO: 4706; WAN0249LH_at; Start 15; Stop 39
caagagataaactttcagatatccg

SEQ ID NO: 25952 - DNA, 25 bp, Artificial
  probe
  misc_feature (1)..(25): SEQ ID NO: 4706; WAN0249LH_at; Start 39; Stop 63
gcagagagatcatcgcctctttttg

SEQ ID NO: 25953 - DNA, 25 bp, Artificial
  probe
  misc_feature (1)..(25): SEQ ID NO: 4706; WAN0249LH_at; Start 40; Stop 64
cagagagatcatcgcctctttttgt

SEQ ID NO: 25954 - DNA, 25 bp, Artificial
  probe
  misc_feature (1)..(25): SEQ ID NO: 4706; WAN0249LH_at; Start 49; Stop 73
catcgcctctttttgtcgcaagcat

SEQ ID NO: 25955 - DNA, 25 bp, Artificial
  probe
  misc_feature (1)..(25): SEQ ID NO: 4706; WAN0249LH_at; Start 1; Stop 25
tggaaatcgctaggcaagagataaa

SEQ ID NO: 25956 - DNA, 25 bp, Artificial
  probe
  misc_feature (1)..(25): SEQ ID NO: 4706; WAN0249LH_at; Start 44; Stop 68
gagatcatcgcctctttttgtcgca

SEQ ID NO: 25957 - DNA, 25 bp, Artificial
  probe
  misc_feature (1)..(25): SEQ ID NO: 4706; WAN0249LH_at; Start 3; Stop 27
gaaatcgctaggcaagagataaact

SEQ ID NO: 25958 - DNA, 25 bp, Artificial
  probe
  misc_feature (1)..(25): SEQ ID NO: 4706; WAN0249LH_at; Start 46; Stop 70
gatcatcgcctctttttgtcgcaag

SEQ ID NO: 25959 - DNA, 25 bp, Artificial
  probe
  misc_feature (1)..(25): SEQ ID NO: 4706; WAN0249LH_at; Start 58; Stop 82
tttttgtcgcaagcattctcctctc

SEQ ID NO: 25960 - DNA, 25 bp, Artificial
  probe
  misc_feature (1)..(25): SEQ ID NO: 4706; WAN0249LH_at; Start 25; Stop 49
actttcagatatccgcagagagatc

SEQ ID NO: 25961 - DNA, 25 bp, Artificial
  probe
  misc_feature (1)..(25): SEQ ID NO: 4706; WAN0249LH_at; Start 51; Stop 75
tcgcctctttttgtcgcaagcattc

SEQ ID NO: 25962 - DNA, 25 bp, Artificial
  probe
  misc_feature (1)..(25): SEQ ID NO: 4706; WAN0249LH_at; Start 32; Stop 56
gatatccgcagagagatcatcgcct

SEQ ID NO: 25963 - DNA, 25 bp, Artificial
  probe
  misc_feature (1)..(25): SEQ ID NO: 4706; WAN0249LH_at; Start 33; Stop 57
atatccgcagagagatcatcgcctc

SEQ ID NO: 25964 - DNA, 25 bp, Artificial
  probe
  misc_feature (1)..(25): SEQ ID NO: 4706; WAN0249LH_at; Start 29; Stop 53
tcagatatccgcagagagatcatcg

SEQ ID NO: 25965 - DNA, 25 bp, Artificial
  probe
  misc_feature (1)..(25): SEQ ID NO: 4706; WAN0249LH_at; Start 53; Stop 77
gcctctttttgtcgcaagcattctc

SEQ ID NO: 25966 - DNA, 25 bp, Artificial
  probe
  misc_feature (1)..(25): SEQ ID NO: 4706; WAN0249LH_at; Start 9; Stop 33
gctaggcaagagataaactttcaga

SEQ ID NO: 25967 - DNA, 25 bp, Artificial
  probe
  misc_feature (1)..(25): SEQ ID NO: 4706; WAN0249LH_at; Start 22; Stop 46
taaactttcagatatccgcagagag

SEQ ID NO: 25968 - DNA, 25 bp, Artificial
  probe
  misc_feature (1)..(25): SEQ ID NO: 4706; WAN0249LH_at; Start 36; Stop 60
tccgcagagagatcatcgcctcttt

SEQ ID NO: 25969 - DNA, 25 bp, Artificial
  probe
  misc_feature (1)..(25): SEQ ID NO: 3224; WAN0249LI_at; Start 77; Stop 101
cttagctttgatatagtagagtcag

SEQ ID NO: 25970 - DNA, 25 bp, Artificial
  probe
  misc_feature (1)..(25): SEQ ID NO: 3224; WAN0249LI_at; Start 27; Stop 51
cacttactgcttcaaattgaccact

SEQ ID NO: 25971 - DNA, 25 bp, Artificial
  probe
  misc_feature (1)..(25): SEQ ID NO: 3224; WAN0249LI_at; Start 21; Stop 45
tacaaccacttactgcttcaaattg

SEQ ID NO: 25972 - DNA, 25 bp, Artificial
  probe
  misc_feature (1)..(25): SEQ ID NO: 3224; WAN0249LI_at; Start 75; Stop 99
aacttagctttgatatagtagagtc

SEQ ID NO: 25973 - DNA, 25 bp, Artificial
  probe
  misc_feature (1)..(25): SEQ ID NO: 3224; WAN0249LI_at; Start 4; Stop 28
gtaagttaagctagtcctacaacca

SEQ ID NO: 25974 - DNA, 25 bp, Artificial
  probe
  misc_feature (1)..(25): SEQ ID NO: 3224; WAN0249LI_at; Start 48; Stop 72
cacttgcttttttgcccttgtattc

SEQ ID NO: 25975 - DNA, 25 bp, Artificial
  probe
  misc_feature (1)..(25): SEQ ID NO: 3224; WAN0249LI_at; Start 43; Stop 67
ttgaccacttgcttttttgcccttg

SEQ ID NO: 25976 - DNA, 25 bp, Artificial
  probe
  misc_feature (1)..(25): SEQ ID NO: 3224; WAN0249LI_at; Start 58; Stop 82
tttgcccttgtattcctaacttagc

SEQ ID NO: 25977 - DNA, 25 bp, Artificial
  probe
  misc_feature (1)..(25): SEQ ID NO: 3224; WAN0249LI_at; Start 41; Stop 65
aattgaccacttgcttttttgccct

SEQ ID NO: 25978 - DNA, 25 bp, Artificial
  probe
  misc_feature (1)..(25): SEQ ID NO: 3224; WAN0249LI_at; Start 31; Stop 55
tactgcttcaaattgaccacttgct

SEQ ID NO: 25979 - DNA, 25 bp, Artificial
  probe
  misc_feature (1)..(25): SEQ ID NO: 3224; WAN0249LI_at; Start 45; Stop 69
gaccacttgcttttttgcccttgta

SEQ ID NO: 25980 - DNA, 25 bp, Artificial
  probe
  misc_feature (1)..(25): SEQ ID NO: 3224; WAN0249LI_at; Start 25; Stop 49
accacttactgcttcaaattgacca

SEQ ID NO: 25981 - DNA, 25 bp, Artificial
  probe
  misc_feature (1)..(25): SEQ ID NO: 3224; WAN0249LI_at; Start 39; Stop 63
caaattgaccacttgcttttttgcc

SEQ ID NO: 25982 - DNA, 25 bp, Artificial
  probe
  misc_feature (1)..(25): SEQ ID NO: 3224; WAN0249LI_at; Start 63; Stop 87
ccttgtattcctaacttagctttga

SEQ ID NO: 25983 - DNA, 25 bp, Artificial
  probe
  misc_feature (1)..(25): SEQ ID NO: 3224; WAN0249LI_at; Start 86; Stop 110
gatatagtagagtcagaaaggagat

SEQ ID NO: 25984 - DNA, 25 bp, Artificial
  probe
  misc_feature (1)..(25): SEQ ID NO: 3224; WAN0249LI_at; Start 72; Stop 96
cctaacttagctttgatatagtaga

SEQ ID NO: 25985 - DNA, 25 bp, Artificial
  probe
  misc_feature (1)..(25): SEQ ID NO: 3224; WAN0249LI_at; Start 19; Stop 43
cctacaaccacttactgcttcaaat

SEQ ID NO: 25986 - DNA, 25 bp, Artificial
  probe
  misc_feature (1)..(25): SEQ ID NO: 3224; WAN0249LI_at; Start 17; Stop 41
gtcctacaaccacttactgcttcaa

SEQ ID NO: 25987 - DNA, 25 bp, Artificial
  probe
  misc_feature (1)..(25): SEQ ID NO: 3224; WAN0249LI_at; Start 52; Stop 76
tgcttttttgcccttgtattcctaa

SEQ ID NO: 25988 - DNA, 25 bp, Artificial
  probe
  misc_feature (1)..(25): SEQ ID NO: 3224; WAN0249LI_at; Start 24; Stop 48
aaccacttactgcttcaaattgacc

SEQ ID NO: 25989 - DNA, 25 bp, Artificial
  probe
  misc_feature (1)..(25): SEQ ID NO: 3224; WAN0249LI_at; Start 34; Stop 58
tgcttcaaattgaccacttgctttt

SEQ ID NO: 25990 - DNA, 25 bp, Artificial
  probe
  misc_feature (1)..(25): SEQ ID NO: 3224; WAN0249LI_at; Start 23; Stop 47
caaccacttactgcttcaaattgac

SEQ ID NO: 25991 - DNA, 25 bp, Artificial
  probe
  misc_feature (1)..(25): SEQ ID NO: 3224; WAN0249LI_at; Start 30; Stop 54
ttactgcttcaaattgaccacttgc

SEQ ID NO: 25992 - DNA, 25 bp, Artificial
  probe
  misc_feature (1)..(25): SEQ ID NO: 3224; WAN0249LI_at; Start 6; Stop 30
aagttaagctagtcctacaaccact

SEQ ID NO: 25993 - DNA, 25 bp, Artificial
  probe
  misc_feature (1)..(25): SEQ ID NO: 3224; WAN0249LI_at; Start 26; Stop 50
ccacttactgcttcaaattgaccac

SEQ ID NO: 25994 - DNA, 25 bp, Artificial
  probe
  misc_feature (1)..(25): SEQ ID NO: 3224; WAN0249LI_at; Start 81; Stop 105
gctttgatatagtagagtcagaaag

SEQ ID NO: 25995 - DNA, 25 bp, Artificial
  probe
  misc_feature (1)..(25): SEQ ID NO: 3224; WAN0249LI_at; Start 35; Stop 59
gcttcaaattgaccacttgcttttt

SEQ ID NO: 25996 - DNA, 25 bp, Artificial
  probe
  misc_feature (1)..(25): SEQ ID NO: 3224; WAN0249LI_at; Start 71; Stop 95
tcctaacttagctttgatatagtag

SEQ ID NO: 25997 - DNA, 25 bp, Artificial
  probe
  misc_feature (1)..(25): SEQ ID NO: 3224; WAN0249LI_at; Start 1; Stop 25
catgtaagttaagctagtcctacaa

SEQ ID NO: 25998 - DNA, 25 bp, Artificial
  probe
  misc_feature (1)..(25): SEQ ID NO: 3224; WAN0249LI_at; Start 85; Stop 109
tgatatagtagagtcagaaaggaga

SEQ ID NO: 25999 - DNA, 25 bp, Artificial
  probe
  misc_feature (1)..(25): SEQ ID NO: 3224; WAN0249LI_at; Start 60; Stop 84
tgcccttgtattcctaacttagctt

SEQ ID NO: 26000 - DNA, 25 bp, Artificial
  probe
  misc_feature (1)..(25): SEQ ID NO: 3224; WAN0249LI_at; Start 5; Stop 29
taagttaagctagtcctacaaccac

SEQ ID NO: 26001 - DNA, 25 bp, Artificial
  probe
  misc_feature (1)..(25): SEQ ID NO: 3224; WAN0249LI_at; Start 3; Stop 27
tgtaagttaagctagtcctacaacc

SEQ ID NO: 26002 - DNA, 25 bp, Artificial
  probe
  misc_feature (1)..(25): SEQ ID NO: 3224; WAN0249LI_at; Start 79; Stop 103
tagctttgatatagtagagtcagaa

SEQ ID NO: 26003 - DNA, 25 bp, Artificial
  probe
  misc_feature (1)..(25): SEQ ID NO: 593; WAN0249LJ_at; Start 42; Stop 66
tacaagggcaaaaaagcaagtggtc

SEQ ID NO: 26004 - DNA, 25 bp, Artificial
  probe
  misc_feature (1)..(25): SEQ ID NO: 593; WAN0249LJ_at; Start 45; Stop 69
aagggcaaaaaagcaagtggtcaat

SEQ ID NO: 26005 - DNA, 25 bp, Artificial
  probe
  misc_feature (1)..(25): SEQ ID NO: 593; WAN0249LJ_at; Start 83; Stop 107
tggttgtaggactagcttaacttac

SEQ ID NO: 26006 - DNA, 25 bp, Artificial
  probe
  misc_feature (1)..(25): SEQ ID NO: 593; WAN0249LJ_at; Start 35; Stop 59
ttaggaatacaagggcaaaaaagca

SEQ ID NO: 26007 - DNA, 25 bp, Artificial
  probe
  misc_feature (1)..(25): SEQ ID NO: 593; WAN0249LJ_at; Start 70; Stop 94
ttgaagcagtaagtggttgtaggac

SEQ ID NO: 26008 - DNA, 25 bp, Artificial
  probe
  misc_feature (1)..(25): SEQ ID NO: 593; WAN0249LJ_at; Start 7; Stop 31
tttctgactctactatatcaaagct

SEQ ID NO: 26009 - DNA, 25 bp, Artificial
  probe
  misc_feature (1)..(25): SEQ ID NO: 593; WAN0249LJ_at; Start 2; Stop 26
tctcctttctgactctactatatca

SEQ ID NO: 26010 - DNA, 25 bp, Artificial
  probe
  misc_feature (1)..(25): SEQ ID NO: 593; WAN0249LJ_at; Start 39; Stop 63
gaatacaagggcaaaaaagcaagtg

SEQ ID NO: 26011 - DNA, 25 bp, Artificial
  probe
  misc_feature (1)..(25): SEQ ID NO: 593; WAN0249LJ_at; Start 62; Stop 86
tggtcaatttgaagcagtaagtggt

SEQ ID NO: 26012 - DNA, 25 bp, Artificial
  probe
  misc_feature (1)..(25): SEQ ID NO: 593; WAN0249LJ_at; Start 46; Stop 70
agggcaaaaaagcaagtggtcaatt

SEQ ID NO: 26013 - DNA, 25 bp, Artificial
  probe
  misc_feature (1)..(25): SEQ ID NO: 593; WAN0249LJ_at; Start 53; Stop 77
aaaagcaagtggtcaatttgaagca

SEQ ID NO: 26014 - DNA, 25 bp, Artificial
  probe
  misc_feature (1)..(25): SEQ ID NO: 593; WAN0249LJ_at; Start 27; Stop 51
aagctaagttaggaatacaagggca

SEQ ID NO: 26015 - DNA, 25 bp, Artificial
  probe
  misc_feature (1)..(25): SEQ ID NO: 593; WAN0249LJ_at; Start 10; Stop 34
ctgactctactatatcaaagctaag

SEQ ID NO: 26016 - DNA, 25 bp, Artificial
  probe
  misc_feature (1)..(25): SEQ ID NO: 593; WAN0249LJ_at; Start 54; Stop 78
aaagcaagtggtcaatttgaagcag

SEQ ID NO: 26017 - DNA, 25 bp, Artificial
  probe
  misc_feature (1)..(25): SEQ ID NO: 593; WAN0249LJ_at; Start 17; Stop 41
tactatatcaaagctaagttaggaa

SEQ ID NO: 26018 - DNA, 25 bp, Artificial
  probe
  misc_feature (1)..(25): SEQ ID NO: 593; WAN0249LJ_at; Start 12; Stop 36
gactctactatatcaaagctaagtt

SEQ ID NO: 26019 - DNA, 25 bp, Artificial
  probe
  misc_feature (1)..(25): SEQ ID NO: 593; WAN0249LJ_at; Start 25; Stop 49
caaagctaagttaggaatacaaggg

SEQ ID NO: 26020 - DNA, 25 bp, Artificial
  probe
  misc_feature (1)..(25): SEQ ID NO: 593; WAN0249LJ_at; Start 43; Stop 67
acaagggcaaaaaagcaagtggtca

SEQ ID NO: 26021 - DNA, 25 bp, Artificial
  probe
  misc_feature (1)..(25): SEQ ID NO: 593; WAN0249LJ_at; Start 63; Stop 87
ggtcaatttgaagcagtaagtggtt

SEQ ID NO: 26022 - DNA, 25 bp, Artificial
  probe
  misc_feature (1)..(25): SEQ ID NO: 593; WAN0249LJ_at; Start 57; Stop 81
gcaagtggtcaatttgaagcagtaa

SEQ ID NO: 26023 - DNA, 25 bp, Artificial
  probe
  misc_feature (1)..(25): SEQ ID NO: 593; WAN0249LJ_at; Start 49; Stop 73
gcaaaaaagcaagtggtcaatttga

SEQ ID NO: 26024 - DNA, 25 bp, Artificial
  probe
  misc_feature (1)..(25): SEQ ID NO: 593; WAN0249LJ_at; Start 29; Stop 53
gctaagttaggaatacaagggcaaa

SEQ ID NO: 26025 - DNA, 25 bp, Artificial
  probe
  misc_feature (1)..(25): SEQ ID NO: 593; WAN0249LJ_at; Start 81; Stop 105
agtggttgtaggactagcttaactt

SEQ ID NO: 26026 - DNA, 25 bp, Artificial
  probe
  misc_feature (1)..(25): SEQ ID NO: 593; WAN0249LJ_at; Start 84; Stop 108
ggttgtaggactagcttaacttaca

SEQ ID NO: 26027 - DNA, 25 bp, Artificial
  probe
  misc_feature (1)..(25): SEQ ID NO: 593; WAN0249LJ_at; Start 24; Stop 48
tcaaagctaagttaggaatacaagg

SEQ ID NO: 26028 - DNA, 25 bp, Artificial
  probe
  misc_feature (1)..(25): SEQ ID NO: 593; WAN0249LJ_at; Start 40; Stop 64
aatacaagggcaaaaaagcaagtgg

SEQ ID NO: 26029 - DNA, 25 bp, Artificial
  probe
  misc_feature (1)..(25): SEQ ID NO: 593; WAN0249LJ_at; Start 86; Stop 110
ttgtaggactagcttaacttacatg

SEQ ID NO: 26030 - DNA, 25 bp, Artificial
  probe
  misc_feature (1)..(25): SEQ ID NO: 593; WAN0249LJ_at; Start 44; Stop 68
caagggcaaaaaagcaagtggtcaa

SEQ ID NO: 26031 - DNA, 25 bp, Artificial
  probe
  misc_feature (1)..(25): SEQ ID NO: 593; WAN0249LJ_at; Start 15; Stop 39
tctactatatcaaagctaagttagg

SEQ ID NO: 26032 - DNA, 25 bp, Artificial
  probe
  misc_feature (1)..(25): SEQ ID NO: 593; WAN0249LJ_at; Start 58; Stop 82
caagtggtcaatttgaagcagtaag

SEQ ID NO: 26033 - DNA, 25 bp, Artificial
  probe
  misc_feature (1)..(25): SEQ ID NO: 593; WAN0249LJ_at; Start 65; Stop 89
tcaatttgaagcagtaagtggttgt

SEQ ID NO: 26034 - DNA, 25 bp, Artificial
  probe
  misc_feature (1)..(25): SEQ ID NO: 593; WAN0249LJ_at; Start 67; Stop 91
aatttgaagcagtaagtggttgtag

SEQ ID NO: 26035 - DNA, 25 bp, Artificial
  probe
  misc_feature (1)..(25): SEQ ID NO: 593; WAN0249LJ_at; Start 52; Stop 76
aaaaagcaagtggtcaatttgaagc

SEQ ID NO: 26036 - DNA, 25 bp, Artificial
  probe
  misc_feature (1)..(25): SEQ ID NO: 593; WAN0249LJ_at; Start 28; Stop 52
agctaagttaggaatacaagggcaa

SEQ ID NO: 26037 - DNA, 25 bp, Artificial
  probe
  misc_feature (1)..(25): SEQ ID NO: 69; WAN0249LK_at; Start 54; Stop 78
gccttgctctgatttcagttctatg

SEQ ID NO: 26038 - DNA, 25 bp, Artificial
  probe
  misc_feature (1)..(25): SEQ ID NO: 69; WAN0249LK_at; Start 12; Stop 36
cttcaaccatcaaaatagacgtact

SEQ ID NO: 26039 - DNA, 25 bp, Artificial
  probe
  misc_feature (1)..(25): SEQ ID NO: 69; WAN0249LK_at; Start 99; Stop 123
gaaatgctgcctttaaaagttgtat

SEQ ID NO: 26040 - DNA, 25 bp, Artificial
  probe
  misc_feature (1)..(25): SEQ ID NO: 69; WAN0249LK_at; Start 51; Stop 75
gatgccttgctctgatttcagttct

SEQ ID NO: 26041 - DNA, 25 bp, Artificial
  probe
  misc_feature (1)..(25): SEQ ID NO: 69; WAN0249LK_at; Start 47; Stop 71
aattgatgccttgctctgatttcag

SEQ ID NO: 26042 - DNA, 25 bp, Artificial
  probe
  misc_feature (1)..(25): SEQ ID NO: 69; WAN0249LK_at; Start 88; Stop 112
ctttaaaaaatgaaatgctgccttt

SEQ ID NO: 26043 - DNA, 25 bp, Artificial
  probe
  misc_feature (1)..(25): SEQ ID NO: 69; WAN0249LK_at; Start 31; Stop 55
cgtactaagagtaggaaattgatgc

SEQ ID NO: 26044 - DNA, 25 bp, Artificial
  probe
  misc_feature (1)..(25): SEQ ID NO: 69; WAN0249LK_at; Start 32; Stop 56
gtactaagagtaggaaattgatgcc

SEQ ID NO: 26045 - DNA, 25 bp, Artificial
  probe
  misc_feature (1)..(25): SEQ ID NO: 69; WAN0249LK_at; Start 22; Stop 46
caaaatagacgtactaagagtagga

SEQ ID NO: 26046 - DNA, 25 bp, Artificial
  probe
  misc_feature (1)..(25): SEQ ID NO: 69; WAN0249LK_at; Start 8; Stop 32
ttcacttcaaccatcaaaatagacg

SEQ ID NO: 26047 - DNA, 25 bp, Artificial
  probe
  misc_feature (1)..(25): SEQ ID NO: 69; WAN0249LK_at; Start 69; Stop 93
cagttctatggttgttagactttaa

SEQ ID NO: 26048 - DNA, 25 bp, Artificial
  probe
  misc_feature (1)..(25): SEQ ID NO: 69; WAN0249LK_at; Start 64; Stop 88
gatttcagttctatggttgttagac

SEQ ID NO: 26049 - DNA, 25 bp, Artificial
  probe
  misc_feature (1)..(25): SEQ ID NO: 69; WAN0249LK_at; Start 41; Stop 65
gtaggaaattgatgccttgctctga

SEQ ID NO: 26050 - DNA, 25 bp, Artificial
  probe
  misc_feature (1)..(25): SEQ ID NO: 69; WAN0249LK_at; Start 18; Stop 42
ccatcaaaatagacgtactaagagt

SEQ ID NO: 26051 - DNA, 25 bp, Artificial
  probe
  misc_feature (1)..(25): SEQ ID NO: 69; WAN0249LK_at; Start 9; Stop 33
tcacttcaaccatcaaaatagacgt

SEQ ID NO: 26052 - DNA, 25 bp, Artificial
  probe
  misc_feature (1)..(25): SEQ ID NO: 69; WAN0249LK_at; Start 15; Stop 39
caaccatcaaaatagacgtactaag

SEQ ID NO: 26053 - DNA, 25 bp, Artificial
  probe
  misc_feature (1)..(25): SEQ ID NO: 69; WAN0249LK_at; Start 36; Stop 60
taagagtaggaaattgatgccttgc

SEQ ID NO: 26054 - DNA, 25 bp, Artificial
  probe
  misc_feature (1)..(25): SEQ ID NO: 69; WAN0249LK_at; Start 1; Stop 25
aaaaatcttcacttcaaccatcaaa

SEQ ID NO: 26055 - DNA, 25 bp, Artificial
  probe
  misc_feature (1)..(25): SEQ ID NO: 69; WAN0249LK_at; Start 21; Stop 45
tcaaaatagacgtactaagagtagg

SEQ ID NO: 26056 - DNA, 25 bp, Artificial
  probe
  misc_feature (1)..(25): SEQ ID NO: 69; WAN0249LK_at; Start 10; Stop 34
cacttcaaccatcaaaatagacgta

SEQ ID NO: 26057 - DNA, 25 bp, Artificial
  probe
  misc_feature (1)..(25): SEQ ID NO: 69; WAN0249LK_at; Start 93; Stop 117
aaaaatgaaatgctgcctttaaaag

SEQ ID NO: 26058 - DNA, 25 bp, Artificial
  probe
  misc_feature (1)..(25): SEQ ID NO: 69; WAN0249LK_at; Start 50; Stop 74
tgatgccttgctctgatttcagttc

SEQ ID NO: 26059 - DNA, 25 bp, Artificial
  probe
  misc_feature (1)..(25): SEQ ID NO: 69; WAN0249LK_at; Start 58; Stop 82
tgctctgatttcagttctatggttg

SEQ ID NO: 26060 - DNA, 25 bp, Artificial
  probe
  misc_feature (1)..(25): SEQ ID NO: 69; WAN0249LK_at; Start 84; Stop 108
tagactttaaaaaatgaaatgctgc

SEQ ID NO: 26061 - DNA, 25 bp, Artificial
  probe
  misc_feature (1)..(25): SEQ ID NO: 69; WAN0249LK_at; Start 97; Stop 121
atgaaatgctgcctttaaaagttgt

SEQ ID NO: 26062 - DNA, 25 bp, Artificial
  probe
  misc_feature (1)..(25): SEQ ID NO: 69; WAN0249LK_at; Start 42; Stop 66
taggaaattgatgccttgctctgat

SEQ ID NO: 26063 - DNA, 25 bp, Artificial
  probe
  misc_feature (1)..(25): SEQ ID NO: 69; WAN0249LK_at; Start 61; Stop 85
tctgatttcagttctatggttgtta

SEQ ID NO: 26064 - DNA, 25 bp, Artificial
  probe
  misc_feature (1)..(25): SEQ ID NO: 69; WAN0249LK_at; Start 38; Stop 62
agagtaggaaattgatgccttgctc

SEQ ID NO: 26065 - DNA, 25 bp, Artificial
  probe
  misc_feature (1)..(25): SEQ ID NO: 69; WAN0249LK_at; Start 27; Stop 51
tagacgtactaagagtaggaaattg

SEQ ID NO: 26066 - DNA, 25 bp, Artificial
  probe
  misc_feature (1)..(25): SEQ ID NO: 69; WAN0249LK_at; Start 85; Stop 109
agactttaaaaaatgaaatgctgcc

SEQ ID NO: 26067 - DNA, 25 bp, Artificial
  probe
  misc_feature (1)..(25): SEQ ID NO: 69; WAN0249LK_at; Start 103; Stop 127
tgctgcctttaaaagttgtatattt

SEQ ID NO: 26068 - DNA, 25 bp, Artificial
  probe
  misc_feature (1)..(25): SEQ ID NO: 69; WAN0249LK_at; Start 33; Stop 57
tactaagagtaggaaattgatgcct

SEQ ID NO: 26069 - DNA, 25 bp, Artificial
  probe
  misc_feature (1)..(25): SEQ ID NO: 69; WAN0249LK_at; Start 39; Stop 63
gagtaggaaattgatgccttgctct

SEQ ID NO: 26070 - DNA, 25 bp, Artificial
  probe
  misc_feature (1)..(25): SEQ ID NO: 69; WAN0249LK_at; Start 44; Stop 68
ggaaattgatgccttgctctgattt

SEQ ID NO: 26071 - DNA, 25 bp, Artificial
  probe
  misc_feature (1)..(25): SEQ ID NO: 270; WAN0249LL_at; Start 82; Stop 106
gcatcaatttcctactcttagtacg

SEQ ID NO: 26072 - DNA, 25 bp, Artificial
  probe
  misc_feature (1)..(25): SEQ ID NO: 270; WAN0249LL_at; Start 64; Stop 88
aactgaaatcagagcaaggcatcaa

SEQ ID NO: 26073 - DNA, 25 bp, Artificial
  probe
  misc_feature (1)..(25): SEQ ID NO: 270; WAN0249LL_at; Start 108; Stop 132
ctattttgatggttgaagtgaagat

SEQ ID NO: 26074 - DNA, 25 bp, Artificial
  probe
  misc_feature (1)..(25): SEQ ID NO: 270; WAN0249LL_at; Start 13; Stop 37
tatacaacttttaaaggcagcattt

SEQ ID NO: 26075 - DNA, 25 bp, Artificial
  probe
  misc_feature (1)..(25): SEQ ID NO: 270; WAN0249LL_at; Start 63; Stop 87
gaactgaaatcagagcaaggcatca

SEQ ID NO: 26076 - DNA, 25 bp, Artificial
  probe
  misc_feature (1)..(25): SEQ ID NO: 270; WAN0249LL_at; Start 105; Stop 129
cgtctattttgatggttgaagtgaa

SEQ ID NO: 26077 - DNA, 25 bp, Artificial
  probe
  misc_feature (1)..(25): SEQ ID NO: 270; WAN0249LL_at; Start 61; Stop 85
tagaactgaaatcagagcaaggcat

SEQ ID NO: 26078 - DNA, 25 bp, Artificial
  probe
  misc_feature (1)..(25): SEQ ID NO: 270; WAN0249LL_at; Start 16; Stop 40
acaacttttaaaggcagcatttcat

SEQ ID NO: 26079 - DNA, 25 bp, Artificial
  probe
  misc_feature (1)..(25): SEQ ID NO: 270; WAN0249LL_at; Start 103; Stop 127
tacgtctattttgatggttgaagtg

SEQ ID NO: 26080 - DNA, 25 bp, Artificial
  probe
  misc_feature (1)..(25): SEQ ID NO: 270; WAN0249LL_at; Start 49; Stop 73
gtctaacaaccatagaactgaaatc

SEQ ID NO: 26081 - DNA, 25 bp, Artificial
  probe
  misc_feature (1)..(25): SEQ ID NO: 270; WAN0249LL_at; Start 28; Stop 52
ggcagcatttcattttttaaagtct

SEQ ID NO: 26082 - DNA, 25 bp, Artificial
  probe
  misc_feature (1)..(25): SEQ ID NO: 270; WAN0249LL_at; Start 10; Stop 34
aaatatacaacttttaaaggcagca

SEQ ID NO: 26083 - DNA, 25 bp, Artificial
  probe
  misc_feature (1)..(25): SEQ ID NO: 270; WAN0249LL_at; Start 112; Stop 136
tttgatggttgaagtgaagattttt

SEQ ID NO: 26084 - DNA, 25 bp, Artificial
  probe
  misc_feature (1)..(25): SEQ ID NO: 270; WAN0249LL_at; Start 59; Stop 83
catagaactgaaatcagagcaaggc

SEQ ID NO: 26085 - DNA, 25 bp, Artificial
  probe
  misc_feature (1)..(25): SEQ ID NO: 270; WAN0249LL_at; Start 55; Stop 79
caaccatagaactgaaatcagagca

SEQ ID NO: 26086 - DNA, 25 bp, Artificial
  probe
  misc_feature (1)..(25): SEQ ID NO: 270; WAN0249LL_at; Start 75; Stop 99
gagcaaggcatcaatttcctactct

SEQ ID NO: 26087 - DNA, 25 bp, Artificial
  probe
  misc_feature (1)..(25): SEQ ID NO: 270; WAN0249LL_at; Start 46; Stop 70
aaagtctaacaaccatagaactgaa

SEQ ID NO: 26088 - DNA, 25 bp, Artificial
  probe
  misc_feature (1)..(25): SEQ ID NO: 270; WAN0249LL_at; Start 79; Stop 103
aaggcatcaatttcctactcttagt

SEQ ID NO: 26089 - DNA, 25 bp, Artificial
  probe
  misc_feature (1)..(25): SEQ ID NO: 270; WAN0249LL_at; Start 77; Stop 101
gcaaggcatcaatttcctactctta

SEQ ID NO: 26090 - DNA, 25 bp, Artificial
  probe
  misc_feature (1)..(25): SEQ ID NO: 270; WAN0249LL_at; Start 53; Stop 77
aacaaccatagaactgaaatcagag

SEQ ID NO: 26091 - DNA, 25 bp, Artificial
  probe
  misc_feature (1)..(25): SEQ ID NO: 270; WAN0249LL_at; Start 44; Stop 68
ttaaagtctaacaaccatagaactg

SEQ ID NO: 26092 - DNA, 25 bp, Artificial
  probe
  misc_feature (1)..(25): SEQ ID NO: 270; WAN0249LL_at; Start 72; Stop 96
tcagagcaaggcatcaatttcctac

SEQ ID NO: 26093 - DNA, 25 bp, Artificial
  probe
  misc_feature (1)..(25): SEQ ID NO: 270; WAN0249LL_at; Start 69; Stop 93
aaatcagagcaaggcatcaatttcc

SEQ ID NO: 26094 - DNA, 25 bp, Artificial
  probe
  misc_feature (1)..(25): SEQ ID NO: 270; WAN0249LL_at; Start 52; Stop 76
taacaaccatagaactgaaatcaga

SEQ ID NO: 26095 - DNA, 25 bp, Artificial
  probe
  misc_feature (1)..(25): SEQ ID NO: 270; WAN0249LL_at; Start 66; Stop 90
ctgaaatcagagcaaggcatcaatt

SEQ ID NO: 26096 - DNA, 25 bp, Artificial
  probe
  misc_feature (1)..(25): SEQ ID NO: 270; WAN0249LL_at; Start 19; Stop 43
acttttaaaggcagcatttcatttt

SEQ ID NO: 26097 - DNA, 25 bp, Artificial
  probe
  misc_feature (1)..(25): SEQ ID NO: 270; WAN0249LL_at; Start 25; Stop 49
aaaggcagcatttcattttttaaag

SEQ ID NO: 26098 - DNA, 25 bp, Artificial
  probe
  misc_feature (1)..(25): SEQ ID NO: 270; WAN0249LL_at; Start 92; Stop 116
cctactcttagtacgtctattttga

SEQ ID NO: 26099 - DNA, 25 bp, Artificial
  probe
  misc_feature (1)..(25): SEQ ID NO: 270; WAN0249LL_at; Start 67; Stop 91
tgaaatcagagcaaggcatcaattt

SEQ ID NO: 26100 - DNA, 25 bp, Artificial
  probe
  misc_feature (1)..(25): SEQ ID NO: 270; WAN0249LL_at; Start 73; Stop 97
cagagcaaggcatcaatttcctact

SEQ ID NO: 26101 - DNA, 25 bp, Artificial
  probe
  misc_feature (1)..(25): SEQ ID NO: 270; WAN0249LL_at; Start 100; Stop 124
tagtacgtctattttgatggttgaa

SEQ ID NO: 26102 - DNA, 25 bp, Artificial
  probe
  misc_feature (1)..(25): SEQ ID NO: 270; WAN0249LL_at; Start 32; Stop 56
gcatttcattttttaaagtctaaca

SEQ ID NO: 26103 - DNA, 25 bp, Artificial
  probe
  misc_feature (1)..(25): SEQ ID NO: 270; WAN0249LL_at; Start 86; Stop 110
caatttcctactcttagtacgtcta

SEQ ID NO: 26104 - DNA, 25 bp, Artificial
  probe
  misc_feature (1)..(25): SEQ ID NO: 270; WAN0249LL_at; Start 95; Stop 119
actcttagtacgtctattttgatgg

SEQ ID NO: 26105 - DNA, 25 bp, Artificial
  probe
  misc_feature (1)..(25): SEQ ID NO: 414; WAN0249LM_at; Start 3; Stop 27
aattaaaaagtctgagttggtctca

SEQ ID NO: 26106 - DNA, 25 bp, Artificial
  probe
  misc_feature (1)..(25): SEQ ID NO: 414; WAN0249LM_at; Start 37; Stop 61
tcttgagaaagtcagacttttttct

SEQ ID NO: 26107 - DNA, 25 bp, Artificial
  probe
  misc_feature (1)..(25): SEQ ID NO: 414; WAN0249LM_at; Start 12; Stop 36
gtctgagttggtctcaggcttttta

SEQ ID NO: 26108 - DNA, 25 bp, Artificial
  probe
  misc_feature (1)..(25): SEQ ID NO: 414; WAN0249LM_at; Start 40; Stop 64
tgagaaagtcagacttttttcttga

SEQ ID NO: 26109 - DNA, 25 bp, Artificial
  probe
  misc_feature (1)..(25): SEQ ID NO: 414; WAN0249LM_at; Start 28; Stop 52
ggctttttatcttgagaaagtcaga

SEQ ID NO: 26110 - DNA, 25 bp, Artificial
  probe
  misc_feature (1)..(25): SEQ ID NO: 414; WAN0249LM_at; Start 2; Stop 26
gaattaaaaagtctgagttggtctc

SEQ ID NO: 26111 - DNA, 25 bp, Artificial
  probe
  misc_feature (1)..(25): SEQ ID NO: 414; WAN0249LM_at; Start 7; Stop 31
aaaaagtctgagttggtctcaggct

SEQ ID NO: 26112 - DNA, 25 bp, Artificial
  probe
  misc_feature (1)..(25): SEQ ID NO: 414; WAN0249LM_at; Start 111; Stop 135
gttcaaagagtgctaataatatcta

SEQ ID NO: 26113 - DNA, 25 bp, Artificial
  probe
  misc_feature (1)..(25): SEQ ID NO: 414; WAN0249LM_at; Start 33; Stop 57
tttatcttgagaaagtcagactttt

SEQ ID NO: 26114 - DNA, 25 bp, Artificial
  probe
  misc_feature (1)..(25): SEQ ID NO: 414; WAN0249LM_at; Start 23; Stop 47
tctcaggctttttatcttgagaaag

SEQ ID NO: 26115 - DNA, 25 bp, Artificial
  probe
  misc_feature (1)..(25): SEQ ID NO: 414; WAN0249LM_at; Start 9; Stop 33
aaagtctgagttggtctcaggcttt

SEQ ID NO: 26116 - DNA, 25 bp, Artificial
  probe
  misc_feature (1)..(25): SEQ ID NO: 414; WAN0249LM_at; Start 113; Stop 137
tcaaagagtgctaataatatctatc

SEQ ID NO: 26117 - DNA, 25 bp, Artificial
  probe
  misc_feature (1)..(25): SEQ ID NO: 414; WAN0249LM_at; Start 130; Stop 154
tatctatctcattatggaggaaatc

SEQ ID NO: 26118 - DNA, 25 bp, Artificial
  probe
  misc_feature (1)..(25): SEQ ID NO: 414; WAN0249LM_at; Start 15; Stop 39
tgagttggtctcaggctttttatct

SEQ ID NO: 26119 - DNA, 25 bp, Artificial
  probe
  misc_feature (1)..(25): SEQ ID NO: 414; WAN0249LM_at; Start 116; Stop 140
aagagtgctaataatatctatctca

SEQ ID NO: 26120 - DNA, 25 bp, Artificial
  probe
  misc_feature (1)..(25): SEQ ID NO: 414; WAN0249LM_at; Start 66; Stop 90
tatttctgaccaagtgatacaatag

SEQ ID NO: 26121 - DNA, 25 bp, Artificial
  probe
  misc_feature (1)..(25): SEQ ID NO: 414; WAN0249LM_at; Start 20; Stop 44
tggtctcaggctttttatcttgaga

SEQ ID NO: 26122 - DNA, 25 bp, Artificial
  probe
  misc_feature (1)..(25): SEQ ID NO: 414; WAN0249LM_at; Start 32; Stop 56
ttttatcttgagaaagtcagacttt

SEQ ID NO: 26123 - DNA, 25 bp, Artificial
  probe
  misc_feature (1)..(25): SEQ ID NO: 414; WAN0249LM_at; Start 18; Stop 42
gttggtctcaggctttttatcttga

SEQ ID NO: 26124 - DNA, 25 bp, Artificial
  probe
  misc_feature (1)..(25): SEQ ID NO: 414; WAN0249LM_at; Start 21; Stop 45
ggtctcaggctttttatcttgagaa

SEQ ID NO: 26125 - DNA, 25 bp, Artificial
  probe
  misc_feature (1)..(25): SEQ ID NO: 414; WAN0249LM_at; Start 30; Stop 54
ctttttatcttgagaaagtcagact

SEQ ID NO: 26126 - DNA, 25 bp, Artificial
  probe
  misc_feature (1)..(25): SEQ ID NO: 414; WAN0249LM_at; Start 118; Stop 142
gagtgctaataatatctatctcatt

SEQ ID NO: 26127 - DNA, 25 bp, Artificial
  probe
  misc_feature (1)..(25): SEQ ID NO: 414; WAN0249LM_at; Start 125; Stop 149
aataatatctatctcattatggagg

SEQ ID NO: 26128 - DNA, 25 bp, Artificial
  probe
  misc_feature (1)..(25): SEQ ID NO: 414; WAN0249LM_at; Start 16; Stop 40
gagttggtctcaggctttttatctt

SEQ ID NO: 26129 - DNA, 25 bp, Artificial
  probe
  misc_feature (1)..(25): SEQ ID NO: 414; WAN0249LM_at; Start 25; Stop 49
tcaggctttttatcttgagaaagtc

SEQ ID NO: 26130 - DNA, 25 bp, Artificial
  probe
  misc_feature (1)..(25): SEQ ID NO: 414; WAN0249LM_at; Start 127; Stop 151
taatatctatctcattatggaggaa

SEQ ID NO: 26131 - DNA, 25 bp, Artificial
  probe
  misc_feature (1)..(25): SEQ ID NO: 414; WAN0249LM_at; Start 8; Stop 32
aaaagtctgagttggtctcaggctt

SEQ ID NO: 26132 - DNA, 25 bp, Artificial
  probe
  misc_feature (1)..(25): SEQ ID NO: 414; WAN0249LM_at; Start 26; Stop 50
caggctttttatcttgagaaagtca

SEQ ID NO: 26133 - DNA, 25 bp, Artificial
  probe
  misc_feature (1)..(25): SEQ ID NO: 414; WAN0249LM_at; Start 6; Stop 30
taaaaagtctgagttggtctcaggc

SEQ ID NO: 26134 - DNA, 25 bp, Artificial
  probe
  misc_feature (1)..(25): SEQ ID NO: 414; WAN0249LM_at; Start 132; Stop 156
tctatctcattatggaggaaatcag

SEQ ID NO: 26135 - DNA, 25 bp, Artificial
  probe
  misc_feature (1)..(25): SEQ ID NO: 414; WAN0249LM_at; Start 10; Stop 34
aagtctgagttggtctcaggctttt

SEQ ID NO: 26136 - DNA, 25 bp, Artificial
  probe
  misc_feature (1)..(25): SEQ ID NO: 414; WAN0249LM_at; Start 68; Stop 92
tttctgaccaagtgatacaatagaa

SEQ ID NO: 26137 - DNA, 25 bp, Artificial
  probe
  misc_feature (1)..(25): SEQ ID NO: 414; WAN0249LM_at; Start 114; Stop 138
caaagagtgctaataatatctatct

SEQ ID NO: 26138 - DNA, 25 bp, Artificial
  probe
  misc_feature (1)..(25): SEQ ID NO: 414; WAN0249LM_at; Start 29; Stop 53
gctttttatcttgagaaagtcagac

SEQ ID NO: 26139 - DNA, 25 bp, Artificial
  probe
  misc_feature (1)..(25): SEQ ID NO: 3375; WAN0249LN_at; Start 105; Stop 129
tctgactttctcaagataaaaagcc

SEQ ID NO: 26140 - DNA, 25 bp, Artificial
  probe
  misc_feature (1)..(25): SEQ ID NO: 3375; WAN0249LN_at; Start 17; Stop 41
tgagatagatattattagcactctt

SEQ ID NO: 26141 - DNA, 25 bp, Artificial
  probe
  misc_feature (1)..(25): SEQ ID NO: 3375; WAN0249LN_at; Start 93; Stop 117
tcaagaaaaaagtctgactttctca

SEQ ID NO: 26142 - DNA, 25 bp, Artificial
  probe
  misc_feature (1)..(25): SEQ ID NO: 3375; WAN0249LN_at; Start 132; Stop 156
agaccaactcagactttttaattct

SEQ ID NO: 26143 - DNA, 25 bp, Artificial
  probe
  misc_feature (1)..(25): SEQ ID NO: 3375; WAN0249LN_at; Start 65; Stop 89
ttctattgtatcacttggtcagaaa

SEQ ID NO: 26144 - DNA, 25 bp, Artificial
  probe
  misc_feature (1)..(25): SEQ ID NO: 3375; WAN0249LN_at; Start 117; Stop 141
aagataaaaagcctgagaccaactc

SEQ ID NO: 26145 - DNA, 25 bp, Artificial
  probe
  misc_feature (1)..(25): SEQ ID NO: 3375; WAN0249LN_at; Start 20; Stop 44
gatagatattattagcactctttga

SEQ ID NO: 26146 - DNA, 25 bp, Artificial
  probe
  misc_feature (1)..(25): SEQ ID NO: 3375; WAN0249LN_at; Start 22; Stop 46
tagatattattagcactctttgaac

SEQ ID NO: 26147 - DNA, 25 bp, Artificial
  probe
  misc_feature (1)..(25): SEQ ID NO: 3375; WAN0249LN_at; Start 15; Stop 39
aatgagatagatattattagcactc

SEQ ID NO: 26148 - DNA, 25 bp, Artificial
  probe
  misc_feature (1)..(25): SEQ ID NO: 3375; WAN0249LN_at; Start 67; Stop 91
ctattgtatcacttggtcagaaata

SEQ ID NO: 26149 - DNA, 25 bp, Artificial
  probe
  misc_feature (1)..(25): SEQ ID NO: 3375; WAN0249LN_at; Start 123; Stop 147
aaaagcctgagaccaactcagactt

SEQ ID NO: 26150 - DNA, 25 bp, Artificial
  probe
  misc_feature (1)..(25): SEQ ID NO: 3375; WAN0249LN_at; Start 108; Stop 132
gactttctcaagataaaaagcctga

SEQ ID NO: 26151 - DNA, 25 bp, Artificial
  probe
  misc_feature (1)..(25): SEQ ID NO: 3375; WAN0249LN_at; Start 97; Stop 121
gaaaaaagtctgactttctcaagat

SEQ ID NO: 26152 - DNA, 25 bp, Artificial
  probe
  misc_feature (1)..(25): SEQ ID NO: 3375; WAN0249LN_at; Start 118; Stop 142
agataaaaagcctgagaccaactca

SEQ ID NO: 26153 - DNA, 25 bp, Artificial
  probe
  misc_feature (1)..(25): SEQ ID NO: 3375; WAN0249LN_at; Start 100; Stop 124
aaaagtctgactttctcaagataaa

SEQ ID NO: 26154 - DNA, 25 bp, Artificial
  probe
  misc_feature (1)..(25): SEQ ID NO: 3375; WAN0249LN_at; Start 125; Stop 149
aagcctgagaccaactcagactttt

SEQ ID NO: 26155 - DNA, 25 bp, Artificial
  probe
  misc_feature (1)..(25): SEQ ID NO: 3375; WAN0249LN_at; Start 119; Stop 143
gataaaaagcctgagaccaactcag

SEQ ID NO: 26156 - DNA, 25 bp, Artificial
  probe
  misc_feature (1)..(25): SEQ ID NO: 3375; WAN0249LN_at; Start 101; Stop 125
aaagtctgactttctcaagataaaa

SEQ ID NO: 26157 - DNA, 25 bp, Artificial
  probe
  misc_feature (1)..(25): SEQ ID NO: 3375; WAN0249LN_at; Start 131; Stop 155
gagaccaactcagactttttaattc

SEQ ID NO: 26158 - DNA, 25 bp, Artificial
  probe
  misc_feature (1)..(25): SEQ ID NO: 3375; WAN0249LN_at; Start 1; Stop 25
ctgatttcctccataatgagataga

SEQ ID NO: 26159 - DNA, 25 bp, Artificial
  probe
  misc_feature (1)..(25): SEQ ID NO: 3375; WAN0249LN_at; Start 121; Stop 145
taaaaagcctgagaccaactcagac

SEQ ID NO: 26160 - DNA, 25 bp, Artificial
  probe
  misc_feature (1)..(25): SEQ ID NO: 3375; WAN0249LN_at; Start 107; Stop 131
tgactttctcaagataaaaagcctg

SEQ ID NO: 26161 - DNA, 25 bp, Artificial
  probe
  misc_feature (1)..(25): SEQ ID NO: 3375; WAN0249LN_at; Start 113; Stop 137
tctcaagataaaaagcctgagacca

SEQ ID NO: 26162 - DNA, 25 bp, Artificial
  probe
  misc_feature (1)..(25): SEQ ID NO: 3375; WAN0249LN_at; Start 115; Stop 139
tcaagataaaaagcctgagaccaac

SEQ ID NO: 26163 - DNA, 25 bp, Artificial
  probe
  misc_feature (1)..(25): SEQ ID NO: 3375; WAN0249LN_at; Start 3; Stop 27
gatttcctccataatgagatagata

SEQ ID NO: 26164 - DNA, 25 bp, Artificial
  probe
  misc_feature (1)..(25): SEQ ID NO: 3375; WAN0249LN_at; Start 23; Stop 47
agatattattagcactctttgaact

SEQ ID NO: 26165 - DNA, 25 bp, Artificial
  probe
  misc_feature (1)..(25): SEQ ID NO: 3375; WAN0249LN_at; Start 111; Stop 135
tttctcaagataaaaagcctgagac

SEQ ID NO: 26166 - DNA, 25 bp, Artificial
  probe
  misc_feature (1)..(25): SEQ ID NO: 3375; WAN0249LN_at; Start 103; Stop 127
agtctgactttctcaagataaaaag

SEQ ID NO: 26167 - DNA, 25 bp, Artificial
  probe
  misc_feature (1)..(25): SEQ ID NO: 3375; WAN0249LN_at; Start 66; Stop 90
tctattgtatcacttggtcagaaat

SEQ ID NO: 26168 - DNA, 25 bp, Artificial
  probe
  misc_feature (1)..(25): SEQ ID NO: 3375; WAN0249LN_at; Start 122; Stop 146
aaaaagcctgagaccaactcagact

SEQ ID NO: 26169 - DNA, 25 bp, Artificial
  probe
  misc_feature (1)..(25): SEQ ID NO: 3375; WAN0249LN_at; Start 112; Stop 136
ttctcaagataaaaagcctgagacc

SEQ ID NO: 26170 - DNA, 25 bp, Artificial
  probe
  misc_feature (1)..(25): SEQ ID NO: 3375; WAN0249LN_at; Start 128; Stop 152
cctgagaccaactcagactttttaa

SEQ ID NO: 26171 - DNA, 25 bp, Artificial
  probe
  misc_feature (1)..(25): SEQ ID NO: 3375; WAN0249LN_at; Start 110; Stop 134
ctttctcaagataaaaagcctgaga

SEQ ID NO: 26172 - DNA, 25 bp, Artificial
  probe
  misc_feature (1)..(25): SEQ ID NO: 3375; WAN0249LN_at; Start 127; Stop 151
gcctgagaccaactcagacttttta

SEQ ID NO: 26173 - DNA, 25 bp, Artificial
  probe
  misc_feature (1)..(25): SEQ ID NO: 561; WAN0249LQ_at; Start 41; Stop 65
tactaaatgattgatgctatgtgga

SEQ ID NO: 26174 - DNA, 25 bp, Artificial
  probe
  misc_feature (1)..(25): SEQ ID NO: 561; WAN0249LQ_at; Start 84; Stop 108
tgatacgaagttgacctgtattttt

SEQ ID NO: 26175 - DNA, 25 bp, Artificial
  probe
  misc_feature (1)..(25): SEQ ID NO: 561; WAN0249LQ_at; Start 232; Stop 256
taaatctctttctagtaatgtgttg

SEQ ID NO: 26176 - DNA, 25 bp, Artificial
  probe
  misc_feature (1)..(25): SEQ ID NO: 561; WAN0249LQ_at; Start 79; Stop 103
gtttttgatacgaagttgacctgta

SEQ ID NO: 26177 - DNA, 25 bp, Artificial
  probe
  misc_feature (1)..(25): SEQ ID NO: 561; WAN0249LQ_at; Start 241; Stop 265
ttctagtaatgtgttgtaactctgc

SEQ ID NO: 26178 - DNA, 25 bp, Artificial
  probe
  misc_feature (1)..(25): SEQ ID NO: 561; WAN0249LQ_at; Start 95; Stop 119
tgacctgtattttttatactaatca

SEQ ID NO: 26179 - DNA, 25 bp, Artificial
  probe
  misc_feature (1)..(25): SEQ ID NO: 561; WAN0249LQ_at; Start 258; Stop 282
aactctgctataatagatttattcc

SEQ ID NO: 26180 - DNA, 25 bp, Artificial
  probe
  misc_feature (1)..(25): SEQ ID NO: 561; WAN0249LQ_at; Start 34; Stop 58
aatattgtactaaatgattgatgct

SEQ ID NO: 26181 - DNA, 25 bp, Artificial
  probe
  misc_feature (1)..(25): SEQ ID NO: 561; WAN0249LQ_at; Start 253; Stop 277
gttgtaactctgctataatagattt

SEQ ID NO: 26182 - DNA, 25 bp, Artificial
  probe
  misc_feature (1)..(25): SEQ ID NO: 561; WAN0249LQ_at; Start 52; Stop 76
tgatgctatgtggaaatacaaaaaa

SEQ ID NO: 26183 - DNA, 25 bp, Artificial
  probe
  misc_feature (1)..(25): SEQ ID NO: 561; WAN0249LQ_at; Start 156; Stop 180
tgtaaacttacaaggaataaagaca

SEQ ID NO: 26184 - DNA, 25 bp, Artificial
  probe
  misc_feature (1)..(25): SEQ ID NO: 561; WAN0249LQ_at; Start 56; Stop 80
gctatgtggaaatacaaaaaaatgt

SEQ ID NO: 26185 - DNA, 25 bp, Artificial
  probe
  misc_feature (1)..(25): SEQ ID NO: 561; WAN0249LQ_at; Start 81; Stop 105
ttttgatacgaagttgacctgtatt

SEQ ID NO: 26186 - DNA, 25 bp, Artificial
  probe
  misc_feature (1)..(25): SEQ ID NO: 561; WAN0249LQ_at; Start 243; Stop 267
ctagtaatgtgttgtaactctgcta

SEQ ID NO: 26187 - DNA, 25 bp, Artificial
  probe
  misc_feature (1)..(25): SEQ ID NO: 561; WAN0249LQ_at; Start 176; Stop 200
agacattaaaaaataacagtatatc

SEQ ID NO: 26188 - DNA, 25 bp, Artificial
  probe
  misc_feature (1)..(25): SEQ ID NO: 561; WAN0249LQ_at; Start 78; Stop 102
tgtttttgatacgaagttgacctgt

SEQ ID NO: 26189 - DNA, 25 bp, Artificial
  probe
  misc_feature (1)..(25): SEQ ID NO: 561; WAN0249LQ_at; Start 329; Stop 353
attttgttcctgacctttgacaact

SEQ ID NO: 26190 - DNA, 25 bp, Artificial
  probe
  misc_feature (1)..(25): SEQ ID NO: 561; WAN0249LQ_at; Start 49; Stop 73
gattgatgctatgtggaaatacaaa

SEQ ID NO: 26191 - DNA, 25 bp, Artificial
  probe
  misc_feature (1)..(25): SEQ ID NO: 561; WAN0249LQ_at; Start 43; Stop 67
ctaaatgattgatgctatgtggaaa

SEQ ID NO: 26192 - DNA, 25 bp, Artificial
  probe
  misc_feature (1)..(25): SEQ ID NO: 561; WAN0249LQ_at; Start 250; Stop 274
tgtgttgtaactctgctataataga

SEQ ID NO: 26193 - DNA, 25 bp, Artificial
  probe
  misc_feature (1)..(25): SEQ ID NO: 561; WAN0249LQ_at; Start 133; Stop 157
tgtattaaacgatataagtttgttg

SEQ ID NO: 26194 - DNA, 25 bp, Artificial
  probe
  misc_feature (1)..(25): SEQ ID NO: 561; WAN0249LQ_at; Start 261; Stop 285
tctgctataatagatttattccttt

SEQ ID NO: 26195 - DNA, 25 bp, Artificial
  probe
  misc_feature (1)..(25): SEQ ID NO: 561; WAN0249LQ_at; Start 236; Stop 260
tctctttctagtaatgtgttgtaac

SEQ ID NO: 26196 - DNA, 25 bp, Artificial
  probe
  misc_feature (1)..(25): SEQ ID NO: 561; WAN0249LQ_at; Start 328; Stop 352
gattttgttcctgacctttgacaac

SEQ ID NO: 26197 - DNA, 25 bp, Artificial
  probe
  misc_feature (1)..(25): SEQ ID NO: 561; WAN0249LQ_at; Start 229; Stop 253
gcataaatctctttctagtaatgtg

SEQ ID NO: 26198 - DNA, 25 bp, Artificial
  probe
  misc_feature (1)..(25): SEQ ID NO: 561; WAN0249LQ_at; Start 46; Stop 70
aatgattgatgctatgtggaaatac

SEQ ID NO: 26199 - DNA, 25 bp, Artificial
  probe
  misc_feature (1)..(25): SEQ ID NO: 561; WAN0249LQ_at; Start 327; Stop 351
ggattttgttcctgacctttgacaa

SEQ ID NO: 26200 - DNA, 25 bp, Artificial
  probe
  misc_feature (1)..(25): SEQ ID NO: 561; WAN0249LQ_at; Start 143; Stop 167
gatataagtttgttgtaaacttaca

SEQ ID NO: 26201 - DNA, 25 bp, Artificial
  probe
  misc_feature (1)..(25): SEQ ID NO: 561; WAN0249LQ_at; Start 325; Stop 349
caggattttgttcctgacctttgac

SEQ ID NO: 26202 - DNA, 25 bp, Artificial
  probe
  misc_feature (1)..(25): SEQ ID NO: 561; WAN0249LQ_at; Start 238; Stop 262
tctttctagtaatgtgttgtaactc

SEQ ID NO: 26203 - DNA, 25 bp, Artificial
  probe
  misc_feature (1)..(25): SEQ ID NO: 561; WAN0249LQ_at; Start 293; Stop 317
tacacaatttattttatactaccaa

SEQ ID NO: 26204 - DNA, 25 bp, Artificial
  probe
  misc_feature (1)..(25): SEQ ID NO: 561; WAN0249LQ_at; Start 76; Stop 100
aatgtttttgatacgaagttgacct

SEQ ID NO: 26205 - DNA, 25 bp, Artificial
  probe
  misc_feature (1)..(25): SEQ ID NO: 561; WAN0249LQ_at; Start 246; Stop 270
gtaatgtgttgtaactctgctataa

SEQ ID NO: 26206 - DNA, 25 bp, Artificial
  probe
  misc_feature (1)..(25): SEQ ID NO: 561; WAN0249LQ_at; Start 39; Stop 63
tgtactaaatgattgatgctatgtg

SEQ ID NO: 26207 - DNA, 25 bp, Artificial
  probe
  misc_feature (1)..(25): SEQ ID NO: 502; WAN0249LR_at; Start 7; Stop 31
caaaggtcaggaacaaaatcctgac

SEQ ID NO: 26208 - DNA, 25 bp, Artificial
  probe
  misc_feature (1)..(25): SEQ ID NO: 502; WAN0249LR_at; Start 43; Stop 67
gtataaaataaattgtgtaaacaca

SEQ ID NO: 26209 - DNA, 25 bp, Artificial
  probe
  misc_feature (1)..(25): SEQ ID NO: 502; WAN0249LR_at; Start 82; Stop 106
tattatagcagagttacaacacatt

SEQ ID NO: 26210 - DNA, 25 bp, Artificial
  probe
  misc_feature (1)..(25): SEQ ID NO: 502; WAN0249LR_at; Start 87; Stop 111
tagcagagttacaacacattactag

SEQ ID NO: 26211 - DNA, 25 bp, Artificial
  probe
  misc_feature (1)..(25): SEQ ID NO: 502; WAN0249LR_at; Start 84; Stop 108
ttatagcagagttacaacacattac

SEQ ID NO: 26212 - DNA, 25 bp, Artificial
  probe
  misc_feature (1)..(25): SEQ ID NO: 502; WAN0249LR_at; Start 96; Stop 120
tacaacacattactagaaagagatt

SEQ ID NO: 26213 - DNA, 25 bp, Artificial
  probe
  misc_feature (1)..(25): SEQ ID NO: 502; WAN0249LR_at; Start 4; Stop 28
tgtcaaaggtcaggaacaaaatcct

SEQ ID NO: 26214 - DNA, 25 bp, Artificial
  probe
  misc_feature (1)..(25): SEQ ID NO: 502; WAN0249LR_at; Start 220; Stop 244
caaaaaatacgaaaatgattagtat

SEQ ID NO: 26215 - DNA, 25 bp, Artificial
  probe
  misc_feature (1)..(25): SEQ ID NO: 502; WAN0249LR_at; Start 289; Stop 313
tccacatagcatcaatcatttagta

SEQ ID NO: 26216 - DNA, 25 bp, Artificial
  probe
  misc_feature (1)..(25): SEQ ID NO: 502; WAN0249LR_at; Start 77; Stop 101
aaatctattatagcagagttacaac

SEQ ID NO: 26217 - DNA, 25 bp, Artificial
  probe
  misc_feature (1)..(25): SEQ ID NO: 502; WAN0249LR_at; Start 3; Stop 27
ttgtcaaaggtcaggaacaaaatcc

SEQ ID NO: 26218 - DNA, 25 bp, Artificial
  probe
  misc_feature (1)..(25): SEQ ID NO: 502; WAN0249LR_at; Start 80; Stop 104
tctattatagcagagttacaacaca

SEQ ID NO: 26219 - DNA, 25 bp, Artificial
  probe
  misc_feature (1)..(25): SEQ ID NO: 502; WAN0249LR_at; Start 278; Stop 302
ttttttgtatttccacatagcatca

SEQ ID NO: 26220 - DNA, 25 bp, Artificial
  probe
  misc_feature (1)..(25): SEQ ID NO: 502; WAN0249LR_at; Start 5; Stop 29
gtcaaaggtcaggaacaaaatcctg

SEQ ID NO: 26221 - DNA, 25 bp, Artificial
  probe
  misc_feature (1)..(25): SEQ ID NO: 502; WAN0249LR_at; Start 282; Stop 306
ttgtatttccacatagcatcaatca

SEQ ID NO: 26222 - DNA, 25 bp, Artificial
  probe
  misc_feature (1)..(25): SEQ ID NO: 502; WAN0249LR_at; Start 10; Stop 34
aggtcaggaacaaaatcctgacctt

SEQ ID NO: 26223 - DNA, 25 bp, Artificial
  probe
  misc_feature (1)..(25): SEQ ID NO: 502; WAN0249LR_at; Start 102; Stop 126
acattactagaaagagatttatgca

SEQ ID NO: 26224 - DNA, 25 bp, Artificial
  probe
  misc_feature (1)..(25): SEQ ID NO: 502; WAN0249LR_at; Start 101; Stop 125
cacattactagaaagagatttatgc

SEQ ID NO: 26225 - DNA, 25 bp, Artificial
  probe
  misc_feature (1)..(25): SEQ ID NO: 502; WAN0249LR_at; Start 287; Stop 311
tttccacatagcatcaatcatttag

SEQ ID NO: 26226 - DNA, 25 bp, Artificial
  probe
  misc_feature (1)..(25): SEQ ID NO: 502; WAN0249LR_at; Start 284; Stop 308
gtatttccacatagcatcaatcatt

SEQ ID NO: 26227 - DNA, 25 bp, Artificial
  probe
  misc_feature (1)..(25): SEQ ID NO: 502; WAN0249LR_at; Start 187; Stop 211
tgtaagtttacaacaaacttatatc

SEQ ID NO: 26228 - DNA, 25 bp, Artificial
  probe
  misc_feature (1)..(25): SEQ ID NO: 502; WAN0249LR_at; Start 174; Stop 198
tgtctttattccttgtaagtttaca

SEQ ID NO: 26229 - DNA, 25 bp, Artificial
  probe
  misc_feature (1)..(25): SEQ ID NO: 502; WAN0249LR_at; Start 94; Stop 118
gttacaacacattactagaaagaga

SEQ ID NO: 26230 - DNA, 25 bp, Artificial
  probe
  misc_feature (1)..(25): SEQ ID NO: 502; WAN0249LR_at; Start 197; Stop 221
caacaaacttatatcgtttaataca

SEQ ID NO: 26231 - DNA, 25 bp, Artificial
  probe
  misc_feature (1)..(25): SEQ ID NO: 502; WAN0249LR_at; Start 89; Stop 113
gcagagttacaacacattactagaa

SEQ ID NO: 26232 - DNA, 25 bp, Artificial
  probe
  misc_feature (1)..(25): SEQ ID NO: 502; WAN0249LR_at; Start 297; Stop 321
gcatcaatcatttagtacaatattt

SEQ ID NO: 26233 - DNA, 25 bp, Artificial
  probe
  misc_feature (1)..(25): SEQ ID NO: 502; WAN0249LR_at; Start 291; Stop 315
cacatagcatcaatcatttagtaca

SEQ ID NO: 26234 - DNA, 25 bp, Artificial
  probe
  misc_feature (1)..(25): SEQ ID NO: 502; WAN0249LR_at; Start 98; Stop 122
caacacattactagaaagagattta

SEQ ID NO: 26235 - DNA, 25 bp, Artificial
  probe
  misc_feature (1)..(25): SEQ ID NO: 502; WAN0249LR_at; Start 92; Stop 116
gagttacaacacattactagaaaga

SEQ ID NO: 26236 - DNA, 25 bp, Artificial
  probe
  misc_feature (1)..(25): SEQ ID NO: 502; WAN0249LR_at; Start 293; Stop 317
catagcatcaatcatttagtacaat

SEQ ID NO: 26237 - DNA, 25 bp, Artificial
  probe
  misc_feature (1)..(25): SEQ ID NO: 502; WAN0249LR_at; Start 154; Stop 178
gatatactgttattttttaatgtct

SEQ ID NO: 26238 - DNA, 25 bp, Artificial
  probe
  misc_feature (1)..(25): SEQ ID NO: 502; WAN0249LR_at; Start 236; Stop 260
gattagtataaaaaatacaggtcaa

SEQ ID NO: 26239 - DNA, 25 bp, Artificial
  probe
  misc_feature (1)..(25): SEQ ID NO: 502; WAN0249LR_at; Start 139; Stop 163
tatataaaacaaatagatatactgt

SEQ ID NO: 26240 - DNA, 25 bp, Artificial
  probe
  misc_feature (1)..(25): SEQ ID NO: 502; WAN0249LR_at; Start 70; Stop 94
aaggaataaatctattatagcagag

SEQ ID NO: 26241 - DNA, 25 bp, Artificial
  probe
  misc_feature (1)..(25): SEQ ID NO: 203; WAN0249LS_at; Start 23; Stop 47
tataagtttatcatttactattgta

SEQ ID NO: 26242 - DNA, 25 bp, Artificial
  probe
  misc_feature (1)..(25): SEQ ID NO: 203; WAN0249LS_at; Start 31; Stop 55
tatcatttactattgtaccataaaa

SEQ ID NO: 26243 - DNA, 25 bp, Artificial
  probe
  misc_feature (1)..(25): SEQ ID NO: 203; WAN0249LS_at; Start 27; Stop 51
agtttatcatttactattgtaccat

SEQ ID NO: 26244 - DNA, 25 bp, Artificial
  probe
  misc_feature (1)..(25): SEQ ID NO: 203; WAN0249LS_at; Start 22; Stop 46
ttataagtttatcatttactattgt

SEQ ID NO: 26245 - DNA, 25 bp, Artificial
  probe
  misc_feature (1)..(25): SEQ ID NO: 203; WAN0249LS_at; Start 30; Stop 54
ttatcatttactattgtaccataaa

SEQ ID NO: 26246 - DNA, 25 bp, Artificial
  probe
  misc_feature (1)..(25): SEQ ID NO: 203; WAN0249LS_at; Start 24; Stop 48
ataagtttatcatttactattgtac

SEQ ID NO: 26247 - DNA, 25 bp, Artificial
  probe
  misc_feature (1)..(25): SEQ ID NO: 203; WAN0249LS_at; Start 32; Stop 56
atcatttactattgtaccataaaat

SEQ ID NO: 26248 - DNA, 25 bp, Artificial
  probe
  misc_feature (1)..(25): SEQ ID NO: 203; WAN0249LS_at; Start 26; Stop 50
aagtttatcatttactattgtacca

SEQ ID NO: 26249 - DNA, 25 bp, Artificial
  probe
  misc_feature (1)..(25): SEQ ID NO: 203; WAN0249LS_at; Start 64; Stop 88
aatctgtgaatttcacttggaaata

SEQ ID NO: 26250 - DNA, 25 bp, Artificial
  probe
  misc_feature (1)..(25): SEQ ID NO: 203; WAN0249LS_at; Start 17; Stop 41
acaatttataagtttatcatttact

SEQ ID NO: 26251 - DNA, 25 bp, Artificial
  probe
  misc_feature (1)..(25): SEQ ID NO: 203; WAN0249LS_at; Start 33; Stop 57
tcatttactattgtaccataaaatt

SEQ ID NO: 26252 - DNA, 25 bp, Artificial
  probe
  misc_feature (1)..(25): SEQ ID NO: 203; WAN0249LS_at; Start 14; Stop 38
tctacaatttataagtttatcattt

SEQ ID NO: 26253 - DNA, 25 bp, Artificial
  probe
  misc_feature (1)..(25): SEQ ID NO: 203; WAN0249LS_at; Start 25; Stop 49
taagtttatcatttactattgtacc

SEQ ID NO: 26254 - DNA, 25 bp, Artificial
  probe
  misc_feature (1)..(25): SEQ ID NO: 203; WAN0249LS_at; Start 18; Stop 42
caatttataagtttatcatttacta

SEQ ID NO: 26255 - DNA, 25 bp, Artificial
  probe
  misc_feature (1)..(25): SEQ ID NO: 203; WAN0249LS_at; Start 29; Stop 53
tttatcatttactattgtaccataa

SEQ ID NO: 26256 - DNA, 25 bp, Artificial
  probe
  misc_feature (1)..(25): SEQ ID NO: 203; WAN0249LS_at; Start 11; Stop 35
ctttctacaatttataagtttatca

SEQ ID NO: 26257 - DNA, 25 bp, Artificial
  probe
  misc_feature (1)..(25): SEQ ID NO: 203; WAN0249LS_at; Start 28; Stop 52
gtttatcatttactattgtaccata

SEQ ID NO: 26258 - DNA, 25 bp, Artificial
  probe
  misc_feature (1)..(25): SEQ ID NO: 203; WAN0249LS_at; Start 16; Stop 40
tacaatttataagtttatcatttac

SEQ ID NO: 26259 - DNA, 25 bp, Artificial
  probe
  misc_feature (1)..(25): SEQ ID NO: 203; WAN0249LS_at; Start 12; Stop 36
tttctacaatttataagtttatcat

SEQ ID NO: 26260 - DNA, 25 bp, Artificial
  probe
  misc_feature (1)..(25): SEQ ID NO: 203; WAN0249LS_at; Start 21; Stop 45
tttataagtttatcatttactattg

SEQ ID NO: 26261 - DNA, 25 bp, Artificial
  probe
  misc_feature (1)..(25): SEQ ID NO: 203; WAN0249LS_at; Start 63; Stop 87
aaatctgtgaatttcacttggaaat

SEQ ID NO: 26262 - DNA, 25 bp, Artificial
  probe
  misc_feature (1)..(25): SEQ ID NO: 203; WAN0249LS_at; Start 34; Stop 58
catttactattgtaccataaaatta

SEQ ID NO: 26263 - DNA, 25 bp, Artificial
  probe
  misc_feature (1)..(25): SEQ ID NO: 203; WAN0249LS_at; Start 62; Stop 86
aaaatctgtgaatttcacttggaaa

SEQ ID NO: 26264 - DNA, 25 bp, Artificial
  probe
  misc_feature (1)..(25): SEQ ID NO: 203; WAN0249LS_at; Start 13; Stop 37
ttctacaatttataagtttatcatt

SEQ ID NO: 26265 - DNA, 25 bp, Artificial
  probe
  misc_feature (1)..(25): SEQ ID NO: 4573; WAN0249LT_at; Start 47; Stop 71
tagtaaatgataaacttataaattg

SEQ ID NO: 26266 - DNA, 25 bp, Artificial
  probe
  misc_feature (1)..(25): SEQ ID NO: 4573; WAN0249LT_at; Start 37; Stop 61
tatggtacaatagtaaatgataaac

SEQ ID NO: 26267 - DNA, 25 bp, Artificial
  probe
  misc_feature (1)..(25): SEQ ID NO: 4573; WAN0249LT_at; Start 2; Stop 26
atttccaagtgaaattcacagattt

SEQ ID NO: 26268 - DNA, 25 bp, Artificial
  probe
  misc_feature (1)..(25): SEQ ID NO: 4573; WAN0249LT_at; Start 38; Stop 62
atggtacaatagtaaatgataaact

SEQ ID NO: 26269 - DNA, 25 bp, Artificial
  probe
  misc_feature (1)..(25): SEQ ID NO: 4573; WAN0249LT_at; Start 32; Stop 56
aattttatggtacaatagtaaatga

SEQ ID NO: 26270 - DNA, 25 bp, Artificial
  probe
  misc_feature (1)..(25): SEQ ID NO: 4573; WAN0249LT_at; Start 53; Stop 77
atgataaacttataaattgtagaaa

SEQ ID NO: 26271 - DNA, 25 bp, Artificial
  probe
  misc_feature (1)..(25): SEQ ID NO: 4573; WAN0249LT_at; Start 41; Stop 65
gtacaatagtaaatgataaacttat

SEQ ID NO: 26272 - DNA, 25 bp, Artificial
  probe
  misc_feature (1)..(25): SEQ ID NO: 4573; WAN0249LT_at; Start 34; Stop 58
ttttatggtacaatagtaaatgata

SEQ ID NO: 26273 - DNA, 25 bp, Artificial
  probe
  misc_feature (1)..(25): SEQ ID NO: 4573; WAN0249LT_at; Start 51; Stop 75
aaatgataaacttataaattgtaga

SEQ ID NO: 26274 - DNA, 25 bp, Artificial
  probe
  misc_feature (1)..(25): SEQ ID NO: 4573; WAN0249LT_at; Start 44; Stop 68
caatagtaaatgataaacttataaa

SEQ ID NO: 26275 - DNA, 25 bp, Artificial
  probe
  misc_feature (1)..(25): SEQ ID NO: 4573; WAN0249LT_at; Start 48; Stop 72
agtaaatgataaacttataaattgt

SEQ ID NO: 26276 - DNA, 25 bp, Artificial
  probe
  misc_feature (1)..(25): SEQ ID NO: 4573; WAN0249LT_at; Start 42; Stop 66
tacaatagtaaatgataaacttata

SEQ ID NO: 26277 - DNA, 25 bp, Artificial
  probe
  misc_feature (1)..(25): SEQ ID NO: 4573; WAN0249LT_at; Start 40; Stop 64
ggtacaatagtaaatgataaactta

SEQ ID NO: 26278 - DNA, 25 bp, Artificial
  probe
  misc_feature (1)..(25): SEQ ID NO: 4573; WAN0249LT_at; Start 3; Stop 27
tttccaagtgaaattcacagatttt

SEQ ID NO: 26279 - DNA, 25 bp, Artificial
  probe
  misc_feature (1)..(25): SEQ ID NO: 4573; WAN0249LT_at; Start 54; Stop 78
tgataaacttataaattgtagaaag

SEQ ID NO: 26280 - DNA, 25 bp, Artificial
  probe
  misc_feature (1)..(25): SEQ ID NO: 4573; WAN0249LT_at; Start 35; Stop 59
tttatggtacaatagtaaatgataa

SEQ ID NO: 26281 - DNA, 25 bp, Artificial
  probe
  misc_feature (1)..(25): SEQ ID NO: 4573; WAN0249LT_at; Start 49; Stop 73
gtaaatgataaacttataaattgta

SEQ ID NO: 26282 - DNA, 25 bp, Artificial
  probe
  misc_feature (1)..(25): SEQ ID NO: 4573; WAN0249LT_at; Start 50; Stop 74
taaatgataaacttataaattgtag

SEQ ID NO: 26283 - DNA, 25 bp, Artificial
  probe
  misc_feature (1)..(25): SEQ ID NO: 4573; WAN0249LT_at; Start 43; Stop 67
acaatagtaaatgataaacttataa

SEQ ID NO: 26284 - DNA, 25 bp, Artificial
  probe
  misc_feature (1)..(25): SEQ ID NO: 4573; WAN0249LT_at; Start 39; Stop 63
tggtacaatagtaaatgataaactt

SEQ ID NO: 26285 - DNA, 25 bp, Artificial
  probe
  misc_feature (1)..(25): SEQ ID NO: 4573; WAN0249LT_at; Start 1; Stop 25
tatttccaagtgaaattcacagatt

SEQ ID NO: 26286 - DNA, 25 bp, Artificial
  probe
  misc_feature (1)..(25): SEQ ID NO: 4573; WAN0249LT_at; Start 36; Stop 60
ttatggtacaatagtaaatgataaa

SEQ ID NO: 26287 - DNA, 25 bp, Artificial
  probe
  misc_feature (1)..(25): SEQ ID NO: 4573; WAN0249LT_at; Start 33; Stop 57
attttatggtacaatagtaaatgat

SEQ ID NO: 26288 - DNA, 25 bp, Artificial
  probe
  misc_feature (1)..(25): SEQ ID NO: 4573; WAN0249LT_at; Start 52; Stop 76
aatgataaacttataaattgtagaa

SEQ ID NO: 26289 - DNA, 25 bp, Artificial
  probe
  misc_feature (1)..(25): SEQ ID NO: 4573; WAN0249LT_at; Start 31; Stop 55
taattttatggtacaatagtaaatg

SEQ ID NO: 26290 - DNA, 25 bp, Artificial
  probe
  misc_feature (1)..(25): SEQ ID NO: 3219; WAN0249LU_at; Start 19; Stop 43
tttgtgataaaataggctcaatcta

SEQ ID NO: 26291 - DNA, 25 bp, Artificial
  probe
  misc_feature (1)..(25): SEQ ID NO: 3219; WAN0249LU_at; Start 16; Stop 40
tattttgtgataaaataggctcaat

SEQ ID NO: 26292 - DNA, 25 bp, Artificial
  probe
  misc_feature (1)..(25): SEQ ID NO: 3219; WAN0249LU_at; Start 4; Stop 28
agctttctcttatattttgtgataa

SEQ ID NO: 26293 - DNA, 25 bp, Artificial
  probe
  misc_feature (1)..(25): SEQ ID NO: 3219; WAN0249LU_at; Start 12; Stop 36
cttatattttgtgataaaataggct

SEQ ID NO: 26294 - DNA, 25 bp, Artificial
  probe
  misc_feature (1)..(25): SEQ ID NO: 3219; WAN0249LU_at; Start 17; Stop 41
attttgtgataaaataggctcaatc

SEQ ID NO: 26295 - DNA, 25 bp, Artificial
  probe
  misc_feature (1)..(25): SEQ ID NO: 3219; WAN0249LU_at; Start 34; Stop 58
gctcaatctatttctaggaggatga

SEQ ID NO: 26296 - DNA, 25 bp, Artificial
  probe
  misc_feature (1)..(25): SEQ ID NO: 3219; WAN0249LU_at; Start 24; Stop 48
gataaaataggctcaatctatttct

SEQ ID NO: 26297 - DNA, 25 bp, Artificial
  probe
  misc_feature (1)..(25): SEQ ID NO: 3219; WAN0249LU_at; Start 2; Stop 26
atagctttctcttatattttgtgat

SEQ ID NO: 26298 - DNA, 25 bp, Artificial
  probe
  misc_feature (1)..(25): SEQ ID NO: 3219; WAN0249LU_at; Start 5; Stop 29
gctttctcttatattttgtgataaa

SEQ ID NO: 26299 - DNA, 25 bp, Artificial
  probe
  misc_feature (1)..(25): SEQ ID NO: 3219; WAN0249LU_at; Start 15; Stop 39
atattttgtgataaaataggctcaa

SEQ ID NO: 26300 - DNA, 25 bp, Artificial
  probe
  misc_feature (1)..(25): SEQ ID NO: 3219; WAN0249LU_at; Start 10; Stop 34
ctcttatattttgtgataaaatagg

SEQ ID NO: 26301 - DNA, 25 bp, Artificial
  probe
  misc_feature (1)..(25): SEQ ID NO: 3219; WAN0249LU_at; Start 37; Stop 61
caatctatttctaggaggatgagat

SEQ ID NO: 26302 - DNA, 25 bp, Artificial
  probe
  misc_feature (1)..(25): SEQ ID NO: 3219; WAN0249LU_at; Start 21; Stop 45
tgtgataaaataggctcaatctatt

SEQ ID NO: 26303 - DNA, 25 bp, Artificial
  probe
  misc_feature (1)..(25): SEQ ID NO: 3219; WAN0249LU_at; Start 25; Stop 49
ataaaataggctcaatctatttcta

SEQ ID NO: 26304 - DNA, 25 bp, Artificial
  probe
  misc_feature (1)..(25): SEQ ID NO: 3219; WAN0249LU_at; Start 29; Stop 53
aataggctcaatctatttctaggag

SEQ ID NO: 26305 - DNA, 25 bp, Artificial
  probe
  misc_feature (1)..(25): SEQ ID NO: 3219; WAN0249LU_at; Start 33; Stop 57
ggctcaatctatttctaggaggatg

SEQ ID NO: 26306 - DNA, 25 bp, Artificial
  probe
  misc_feature (1)..(25): SEQ ID NO: 3219; WAN0249LU_at; Start 20; Stop 44
ttgtgataaaataggctcaatctat

SEQ ID NO: 26307 - DNA, 25 bp, Artificial
  probe
  misc_feature (1)..(25): SEQ ID NO: 3219; WAN0249LU_at; Start 28; Stop 52
aaataggctcaatctatttctagga

SEQ ID NO: 26308 - DNA, 25 bp, Artificial
  probe
  misc_feature (1)..(25): SEQ ID NO: 3219; WAN0249LU_at; Start 1; Stop 25
catagctttctcttatattttgtga

SEQ ID NO: 26309 - DNA, 25 bp, Artificial
  probe
  misc_feature (1)..(25): SEQ ID NO: 3219; WAN0249LU_at; Start 30; Stop 54
ataggctcaatctatttctaggagg

SEQ ID NO: 26310 - DNA, 25 bp, Artificial
  probe
  misc_feature (1)..(25): SEQ ID NO: 3219; WAN0249LU_at; Start 18; Stop 42
ttttgtgataaaataggctcaatct

SEQ ID NO: 26311 - DNA, 25 bp, Artificial
  probe
  misc_feature (1)..(25): SEQ ID NO: 3219; WAN0249LU_at; Start 32; Stop 56
aggctcaatctatttctaggaggat

SEQ ID NO: 26312 - DNA, 25 bp, Artificial
  probe
  misc_feature (1)..(25): SEQ ID NO: 3219; WAN0249LU_at; Start 3; Stop 27
tagctttctcttatattttgtgata

SEQ ID NO: 26313 - DNA, 25 bp, Artificial
  probe
  misc_feature (1)..(25): SEQ ID NO: 3219; WAN0249LU_at; Start 26; Stop 50
taaaataggctcaatctatttctag

SEQ ID NO: 26314 - DNA, 25 bp, Artificial
  probe
  misc_feature (1)..(25): SEQ ID NO: 3219; WAN0249LU_at; Start 13; Stop 37
ttatattttgtgataaaataggctc

SEQ ID NO: 26315 - DNA, 25 bp, Artificial
  probe
  misc_feature (1)..(25): SEQ ID NO: 3219; WAN0249LU_at; Start 6; Stop 30
ctttctcttatattttgtgataaaa

SEQ ID NO: 26316 - DNA, 25 bp, Artificial
  probe
  misc_feature (1)..(25): SEQ ID NO: 3219; WAN0249LU_at; Start 27; Stop 51
aaaataggctcaatctatttctagg

SEQ ID NO: 26317 - DNA, 25 bp, Artificial
  probe
  misc_feature (1)..(25): SEQ ID NO: 3219; WAN0249LU_at; Start 14; Stop 38
tatattttgtgataaaataggctca

SEQ ID NO: 26318 - DNA, 25 bp, Artificial
  probe
  misc_feature (1)..(25): SEQ ID NO: 3219; WAN0249LU_at; Start 11; Stop 35
tcttatattttgtgataaaataggc

SEQ ID NO: 26319 - DNA, 25 bp, Artificial
  probe
  misc_feature (1)..(25): SEQ ID NO: 3219; WAN0249LU_at; Start 9; Stop 33
tctcttatattttgtgataaaatag

SEQ ID NO: 26320 - DNA, 25 bp, Artificial
  probe
  misc_feature (1)..(25): SEQ ID NO: 3219; WAN0249LU_at; Start 35; Stop 59
ctcaatctatttctaggaggatgag

SEQ ID NO: 26321 - DNA, 25 bp, Artificial
  probe
  misc_feature (1)..(25): SEQ ID NO: 3219; WAN0249LU_at; Start 36; Stop 60
tcaatctatttctaggaggatgaga

SEQ ID NO: 26322 - DNA, 25 bp, Artificial
  probe
  misc_feature (1)..(25): SEQ ID NO: 3219; WAN0249LU_at; Start 23; Stop 47
tgataaaataggctcaatctatttc

SEQ ID NO: 26323 - DNA, 25 bp, Artificial
  probe
  misc_feature (1)..(25): SEQ ID NO: 3219; WAN0249LU_at; Start 31; Stop 55
taggctcaatctatttctaggagga

SEQ ID NO: 26324 - DNA, 25 bp, Artificial
  probe
  misc_feature (1)..(25): SEQ ID NO: 592; WAN0249LV_at; Start 12; Stop 36
ctagaaatagattgagcctatttta

SEQ ID NO: 26325 - DNA, 25 bp, Artificial
  probe
  misc_feature (1)..(25): SEQ ID NO: 592; WAN0249LV_at; Start 18; Stop 42
atagattgagcctattttatcacaa

SEQ ID NO: 26326 - DNA, 25 bp, Artificial
  probe
  misc_feature (1)..(25): SEQ ID NO: 592; WAN0249LV_at; Start 33; Stop 57
tttatcacaaaatataagagaaagc

SEQ ID NO: 26327 - DNA, 25 bp, Artificial
  probe
  misc_feature (1)..(25): SEQ ID NO: 592; WAN0249LV_at; Start 22; Stop 46
attgagcctattttatcacaaaata

SEQ ID NO: 26328 - DNA, 25 bp, Artificial
  probe
  misc_feature (1)..(25): SEQ ID NO: 592; WAN0249LV_at; Start 1; Stop 25
atctcatcctcctagaaatagattg

SEQ ID NO: 26329 - DNA, 25 bp, Artificial
  probe
  misc_feature (1)..(25): SEQ ID NO: 592; WAN0249LV_at; Start 25; Stop 49
gagcctattttatcacaaaatataa

SEQ ID NO: 26330 - DNA, 25 bp, Artificial
  probe
  misc_feature (1)..(25): SEQ ID NO: 592; WAN0249LV_at; Start 3; Stop 27
ctcatcctcctagaaatagattgag

SEQ ID NO: 26331 - DNA, 25 bp, Artificial
  probe
  misc_feature (1)..(25): SEQ ID NO: 592; WAN0249LV_at; Start 17; Stop 41
aatagattgagcctattttatcaca

SEQ ID NO: 26332 - DNA, 25 bp, Artificial
  probe
  misc_feature (1)..(25): SEQ ID NO: 592; WAN0249LV_at; Start 24; Stop 48
tgagcctattttatcacaaaatata

SEQ ID NO: 26333 - DNA, 25 bp, Artificial
  probe
  misc_feature (1)..(25): SEQ ID NO: 592; WAN0249LV_at; Start 14; Stop 38
agaaatagattgagcctattttatc

SEQ ID NO: 26334 - DNA, 25 bp, Artificial
  probe
  misc_feature (1)..(25): SEQ ID NO: 592; WAN0249LV_at; Start 5; Stop 29
catcctcctagaaatagattgagcc

SEQ ID NO: 26335 - DNA, 25 bp, Artificial
  probe
  misc_feature (1)..(25): SEQ ID NO: 592; WAN0249LV_at; Start 7; Stop 31
tcctcctagaaatagattgagccta

SEQ ID NO: 26336 - DNA, 25 bp, Artificial
  probe
  misc_feature (1)..(25): SEQ ID NO: 592; WAN0249LV_at; Start 2; Stop 26
tctcatcctcctagaaatagattga

SEQ ID NO: 26337 - DNA, 25 bp, Artificial
  probe
  misc_feature (1)..(25): SEQ ID NO: 592; WAN0249LV_at; Start 9; Stop 33
ctcctagaaatagattgagcctatt

SEQ ID NO: 26338 - DNA, 25 bp, Artificial
  probe
  misc_feature (1)..(25): SEQ ID NO: 592; WAN0249LV_at; Start 27; Stop 51
gcctattttatcacaaaatataaga

SEQ ID NO: 26339 - DNA, 25 bp, Artificial
  probe
  misc_feature (1)..(25): SEQ ID NO: 592; WAN0249LV_at; Start 21; Stop 45
gattgagcctattttatcacaaaat

SEQ ID NO: 26340 - DNA, 25 bp, Artificial
  probe
  misc_feature (1)..(25): SEQ ID NO: 592; WAN0249LV_at; Start 13; Stop 37
tagaaatagattgagcctattttat

SEQ ID NO: 26341 - DNA, 25 bp, Artificial
  probe
  misc_feature (1)..(25): SEQ ID NO: 592; WAN0249LV_at; Start 10; Stop 34
tcctagaaatagattgagcctattt

SEQ ID NO: 26342 - DNA, 25 bp, Artificial
  probe
  misc_feature (1)..(25): SEQ ID NO: 592; WAN0249LV_at; Start 35; Stop 59
tatcacaaaatataagagaaagcta

SEQ ID NO: 26343 - DNA, 25 bp, Artificial
  probe
  misc_feature (1)..(25): SEQ ID NO: 592; WAN0249LV_at; Start 32; Stop 56
ttttatcacaaaatataagagaaag

SEQ ID NO: 26344 - DNA, 25 bp, Artificial
  probe
  misc_feature (1)..(25): SEQ ID NO: 592; WAN0249LV_at; Start 37; Stop 61
tcacaaaatataagagaaagctatg

SEQ ID NO: 26345 - DNA, 25 bp, Artificial
  probe
  misc_feature (1)..(25): SEQ ID NO: 592; WAN0249LV_at; Start 36; Stop 60
atcacaaaatataagagaaagctat

SEQ ID NO: 26346 - DNA, 25 bp, Artificial
  probe
  misc_feature (1)..(25): SEQ ID NO: 592; WAN0249LV_at; Start 20; Stop 44
agattgagcctattttatcacaaaa

SEQ ID NO: 26347 - DNA, 25 bp, Artificial
  probe
  misc_feature (1)..(25): SEQ ID NO: 592; WAN0249LV_at; Start 6; Stop 30
atcctcctagaaatagattgagcct

SEQ ID NO: 26348 - DNA, 25 bp, Artificial
  probe
  misc_feature (1)..(25): SEQ ID NO: 592; WAN0249LV_at; Start 11; Stop 35
cctagaaatagattgagcctatttt

SEQ ID NO: 26349 - DNA, 25 bp, Artificial
  probe
  misc_feature (1)..(25): SEQ ID NO: 592; WAN0249LV_at; Start 34; Stop 58
ttatcacaaaatataagagaaagct

SEQ ID NO: 26350 - DNA, 25 bp, Artificial
  probe
  misc_feature (1)..(25): SEQ ID NO: 592; WAN0249LV_at; Start 28; Stop 52
cctattttatcacaaaatataagag

SEQ ID NO: 26351 - DNA, 25 bp, Artificial
  probe
  misc_feature (1)..(25): SEQ ID NO: 592; WAN0249LV_at; Start 29; Stop 53
ctattttatcacaaaatataagaga

SEQ ID NO: 26352 - DNA, 25 bp, Artificial
  probe
  misc_feature (1)..(25): SEQ ID NO: 592; WAN0249LV_at; Start 15; Stop 39
gaaatagattgagcctattttatca

SEQ ID NO: 26353 - DNA, 25 bp, Artificial
  probe
  misc_feature (1)..(25): SEQ ID NO: 592; WAN0249LV_at; Start 23; Stop 47
ttgagcctattttatcacaaaatat

SEQ ID NO: 26354 - DNA, 25 bp, Artificial
  probe
  misc_feature (1)..(25): SEQ ID NO: 592; WAN0249LV_at; Start 8; Stop 32
cctcctagaaatagattgagcctat

SEQ ID NO: 26355 - DNA, 25 bp, Artificial
  probe
  misc_feature (1)..(25): SEQ ID NO: 592; WAN0249LV_at; Start 26; Stop 50
agcctattttatcacaaaatataag

SEQ ID NO: 26356 - DNA, 25 bp, Artificial
  probe
  misc_feature (1)..(25): SEQ ID NO: 592; WAN0249LV_at; Start 19; Stop 43
tagattgagcctattttatcacaaa

SEQ ID NO: 26357 - DNA, 25 bp, Artificial
  probe
  misc_feature (1)..(25): SEQ ID NO: 592; WAN0249LV_at; Start 4; Stop 28
tcatcctcctagaaatagattgagc

SEQ ID NO: 26358 - DNA, 25 bp, Artificial
  probe
  misc_feature (1)..(25): SEQ ID NO: 5930; WAN0249LW_at; Start 82; Stop 106
atctgaagttatttttatatcgttt

SEQ ID NO: 26359 - DNA, 25 bp, Artificial
  probe
  misc_feature (1)..(25): SEQ ID NO: 5930; WAN0249LW_at; Start 52; Stop 76
tcagatccgtaaaacttaattgaat

SEQ ID NO: 26360 - DNA, 25 bp, Artificial
  probe
  misc_feature (1)..(25): SEQ ID NO: 5930; WAN0249LW_at; Start 71; Stop 95
ttgaattactaatctgaagttattt

SEQ ID NO: 26361 - DNA, 25 bp, Artificial
  probe
  misc_feature (1)..(25): SEQ ID NO: 5930; WAN0249LW_at; Start 80; Stop 104
taatctgaagttatttttatatcgt

SEQ ID NO: 26362 - DNA, 25 bp, Artificial
  probe
  misc_feature (1)..(25): SEQ ID NO: 5930; WAN0249LW_at; Start 50; Stop 74
cttcagatccgtaaaacttaattga

SEQ ID NO: 26363 - DNA, 25 bp, Artificial
  probe
  misc_feature (1)..(25): SEQ ID NO: 5930; WAN0249LW_at; Start 51; Stop 75
ttcagatccgtaaaacttaattgaa

SEQ ID NO: 26364 - DNA, 25 bp, Artificial
  probe
  misc_feature (1)..(25): SEQ ID NO: 5930; WAN0249LW_at; Start 63; Stop 87
aaacttaattgaattactaatctga

SEQ ID NO: 26365 - DNA, 25 bp, Artificial
  probe
  misc_feature (1)..(25): SEQ ID NO: 5930; WAN0249LW_at; Start 53; Stop 77
cagatccgtaaaacttaattgaatt

SEQ ID NO: 26366 - DNA, 25 bp, Artificial
  probe
  misc_feature (1)..(25): SEQ ID NO: 5930; WAN0249LW_at; Start 65; Stop 89
acttaattgaattactaatctgaag

SEQ ID NO: 26367 - DNA, 25 bp, Artificial
  probe
  misc_feature (1)..(25): SEQ ID NO: 5930; WAN0249LW_at; Start 64; Stop 88
aacttaattgaattactaatctgaa

SEQ ID NO: 26368 - DNA, 25 bp, Artificial
  probe
  misc_feature (1)..(25): SEQ ID NO: 5930; WAN0249LW_at; Start 85; Stop 109
tgaagttatttttatatcgtttata

SEQ ID NO: 26369 - DNA, 25 bp, Artificial
  probe
  misc_feature (1)..(25): SEQ ID NO: 5930; WAN0249LW_at; Start 77; Stop 101
tactaatctgaagttatttttatat

SEQ ID NO: 26370 - DNA, 25 bp, Artificial
  probe
  misc_feature (1)..(25): SEQ ID NO: 5930; WAN0249LW_at; Start 69; Stop 93
aattgaattactaatctgaagttat

SEQ ID NO: 26371 - DNA, 25 bp, Artificial
  probe
  misc_feature (1)..(25): SEQ ID NO: 5930; WAN0249LW_at; Start 79; Stop 103
ctaatctgaagttatttttatatcg

SEQ ID NO: 26372 - DNA, 25 bp, Artificial
  probe
  misc_feature (1)..(25): SEQ ID NO: 5930; WAN0249LW_at; Start 66; Stop 90
cttaattgaattactaatctgaagt

SEQ ID NO: 26373 - DNA, 25 bp, Artificial
  probe
  misc_feature (1)..(25): SEQ ID NO: 5930; WAN0249LW_at; Start 81; Stop 105
aatctgaagttatttttatatcgtt

SEQ ID NO: 26374 - DNA, 25 bp, Artificial
  probe
  misc_feature (1)..(25): SEQ ID NO: 5930; WAN0249LW_at; Start 76; Stop 100
ttactaatctgaagttatttttata

SEQ ID NO: 26375 - DNA, 25 bp, Artificial
  probe
  misc_feature (1)..(25): SEQ ID NO: 5930; WAN0249LW_at; Start 72; Stop 96
tgaattactaatctgaagttatttt

SEQ ID NO: 26376 - DNA, 25 bp, Artificial
  probe
  misc_feature (1)..(25): SEQ ID NO: 5930; WAN0249LW_at; Start 67; Stop 91
ttaattgaattactaatctgaagtt

SEQ ID NO: 26377 - DNA, 25 bp, Artificial
  probe
  misc_feature (1)..(25): SEQ ID NO: 5930; WAN0249LW_at; Start 62; Stop 86
aaaacttaattgaattactaatctg

SEQ ID NO: 26378 - DNA, 25 bp, Artificial
  probe
  misc_feature (1)..(25): SEQ ID NO: 5930; WAN0249LW_at; Start 68; Stop 92
taattgaattactaatctgaagtta

SEQ ID NO: 26379 - DNA, 25 bp, Artificial
  probe
  misc_feature (1)..(25): SEQ ID NO: 5930; WAN0249LW_at; Start 83; Stop 107
tctgaagttatttttatatcgttta

SEQ ID NO: 26380 - DNA, 25 bp, Artificial
  probe
  misc_feature (1)..(25): SEQ ID NO: 5930; WAN0249LW_at; Start 78; Stop 102
actaatctgaagttatttttatatc

SEQ ID NO: 26381 - DNA, 25 bp, Artificial
  probe
  misc_feature (1)..(25): SEQ ID NO: 5930; WAN0249LW_at; Start 70; Stop 94
attgaattactaatctgaagttatt

SEQ ID NO: 26382 - DNA, 25 bp, Artificial
  probe
  misc_feature (1)..(25): SEQ ID NO: 5930; WAN0249LW_at; Start 84; Stop 108
ctgaagttatttttatatcgtttat

SEQ ID NO: 26383 - DNA, 25 bp, Artificial
  probe
  misc_feature (1)..(25): SEQ ID NO: 255; WAN0249LX_at; Start 21; Stop 45
aacgatataaaaataacttcagatt

SEQ ID NO: 26384 - DNA, 25 bp, Artificial
  probe
  misc_feature (1)..(25): SEQ ID NO: 255; WAN0249LX_at; Start 24; Stop 48
gatataaaaataacttcagattagt

SEQ ID NO: 26385 - DNA, 25 bp, Artificial
  probe
  misc_feature (1)..(25): SEQ ID NO: 255; WAN0249LX_at; Start 2; Stop 26
ataacacaattataatataaacgat

SEQ ID NO: 26386 - DNA, 25 bp, Artificial
  probe
  misc_feature (1)..(25): SEQ ID NO: 255; WAN0249LX_at; Start 23; Stop 47
cgatataaaaataacttcagattag

SEQ ID NO: 26387 - DNA, 25 bp, Artificial
  probe
  misc_feature (1)..(25): SEQ ID NO: 255; WAN0249LX_at; Start 25; Stop 49
atataaaaataacttcagattagta

SEQ ID NO: 26388 - DNA, 25 bp, Artificial
  probe
  misc_feature (1)..(25): SEQ ID NO: 255; WAN0249LX_at; Start 4; Stop 28
aacacaattataatataaacgatat

SEQ ID NO: 26389 - DNA, 25 bp, Artificial
  probe
  misc_feature (1)..(25): SEQ ID NO: 255; WAN0249LX_at; Start 52; Stop 76
tcaattaagttttacggatctgaag

SEQ ID NO: 26390 - DNA, 25 bp, Artificial
  probe
  misc_feature (1)..(25): SEQ ID NO: 255; WAN0249LX_at; Start 31; Stop 55
aaataacttcagattagtaattcaa

SEQ ID NO: 26391 - DNA, 25 bp, Artificial
  probe
  misc_feature (1)..(25): SEQ ID NO: 255; WAN0249LX_at; Start 51; Stop 75
ttcaattaagttttacggatctgaa

SEQ ID NO: 26392 - DNA, 25 bp, Artificial
  probe
  misc_feature (1)..(25): SEQ ID NO: 255; WAN0249LX_at; Start 33; Stop 57
ataacttcagattagtaattcaatt

SEQ ID NO: 26393 - DNA, 25 bp, Artificial
  probe
  misc_feature (1)..(25): SEQ ID NO: 255; WAN0249LX_at; Start 30; Stop 54
aaaataacttcagattagtaattca

SEQ ID NO: 26394 - DNA, 25 bp, Artificial
  probe
  misc_feature (1)..(25): SEQ ID NO: 255; WAN0249LX_at; Start 17; Stop 41
tataaacgatataaaaataacttca

SEQ ID NO: 26395 - DNA, 25 bp, Artificial
  probe
  misc_feature (1)..(25): SEQ ID NO: 255; WAN0249LX_at; Start 49; Stop 73
aattcaattaagttttacggatctg

SEQ ID NO: 26396 - DNA, 25 bp, Artificial
  probe
  misc_feature (1)..(25): SEQ ID NO: 255; WAN0249LX_at; Start 50; Stop 74
attcaattaagttttacggatctga

SEQ ID NO: 26397 - DNA, 25 bp, Artificial
  probe
  misc_feature (1)..(25): SEQ ID NO: 255; WAN0249LX_at; Start 32; Stop 56
aataacttcagattagtaattcaat

SEQ ID NO: 26398 - DNA, 25 bp, Artificial
  probe
  misc_feature (1)..(25): SEQ ID NO: 255; WAN0249LX_at; Start 5; Stop 29
acacaattataatataaacgatata

SEQ ID NO: 26399 - DNA, 25 bp, Artificial
  probe
  misc_feature (1)..(25): SEQ ID NO: 255; WAN0249LX_at; Start 20; Stop 44
aaacgatataaaaataacttcagat

SEQ ID NO: 26400 - DNA, 25 bp, Artificial
  probe
  misc_feature (1)..(25): SEQ ID NO: 255; WAN0249LX_at; Start 6; Stop 30
cacaattataatataaacgatataa

SEQ ID NO: 26401 - DNA, 25 bp, Artificial
  probe
  misc_feature (1)..(25): SEQ ID NO: 255; WAN0249LX_at; Start 22; Stop 46
acgatataaaaataacttcagatta

SEQ ID NO: 26402 - DNA, 25 bp, Artificial
  probe
  misc_feature (1)..(25): SEQ ID NO: 255; WAN0249LX_at; Start 26; Stop 50
tataaaaataacttcagattagtaa

SEQ ID NO: 26403 - DNA, 25 bp, Artificial
  probe
  misc_feature (1)..(25): SEQ ID NO: 255; WAN0249LX_at; Start 1; Stop 25
aataacacaattataatataaacga

SEQ ID NO: 26404 - DNA, 25 bp, Artificial
  probe
  misc_feature (1)..(25): SEQ ID NO: 255; WAN0249LX_at; Start 3; Stop 27
taacacaattataatataaacgata

SEQ ID NO: 26405 - DNA, 25 bp, Artificial
  probe
  misc_feature (1)..(25): SEQ ID NO: 255; WAN0249LX_at; Start 19; Stop 43
taaacgatataaaaataacttcaga

SEQ ID NO: 26406 - DNA, 25 bp, Artificial
  probe
  misc_feature (1)..(25): SEQ ID NO: 255; WAN0249LX_at; Start 27; Stop 51
ataaaaataacttcagattagtaat

SEQ ID NO: 26407 - DNA, 25 bp, Artificial
  probe
  misc_feature (1)..(25): SEQ ID NO: 255; WAN0249LX_at; Start 18; Stop 42
ataaacgatataaaaataacttcag

SEQ ID NO: 26408 - DNA, 25 bp, Artificial
  probe
  misc_feature (1)..(25): SEQ ID NO: 4085; WAN0249LY_at; Start 46; Stop 70
tctattttggaaagcgatttcaggt

SEQ ID NO: 26409 - DNA, 25 bp, Artificial
  probe
  misc_feature (1)..(25): SEQ ID NO: 4085; WAN0249LY_at; Start 61; Stop 85
gatttcaggtgataaaatataatca

SEQ ID NO: 26410 - DNA, 25 bp, Artificial
  probe
  misc_feature (1)..(25): SEQ ID NO: 4085; WAN0249LY_at; Start 43; Stop 67
ttttctattttggaaagcgatttca

SEQ ID NO: 26411 - DNA, 25 bp, Artificial
  probe
  misc_feature (1)..(25): SEQ ID NO: 4085; WAN0249LY_at; Start 24; Stop 48
taccatattcttgagacatttttct

SEQ ID NO: 26412 - DNA, 25 bp, Artificial
  probe
  misc_feature (1)..(25): SEQ ID NO: 4085; WAN0249LY_at; Start 83; Stop 107
tcaataaagtgatgaggtgaagtaa

SEQ ID NO: 26413 - DNA, 25 bp, Artificial
  probe
  misc_feature (1)..(25): SEQ ID NO: 4085; WAN0249LY_at; Start 57; Stop 81
aagcgatttcaggtgataaaatata

SEQ ID NO: 26414 - DNA, 25 bp, Artificial
  probe
  misc_feature (1)..(25): SEQ ID NO: 4085; WAN0249LY_at; Start 63; Stop 87
tttcaggtgataaaatataatcaat

SEQ ID NO: 26415 - DNA, 25 bp, Artificial
  probe
  misc_feature (1)..(25): SEQ ID NO: 4085; WAN0249LY_at; Start 47; Stop 71
ctattttggaaagcgatttcaggtg

SEQ ID NO: 26416 - DNA, 25 bp, Artificial
  probe
  misc_feature (1)..(25): SEQ ID NO: 4085; WAN0249LY_at; Start 40; Stop 64
catttttctattttggaaagcgatt

SEQ ID NO: 26417 - DNA, 25 bp, Artificial
  probe
  misc_feature (1)..(25): SEQ ID NO: 4085; WAN0249LY_at; Start 17; Stop 41
aacattttaccatattcttgagaca

SEQ ID NO: 26418 - DNA, 25 bp, Artificial
  probe
  misc_feature (1)..(25): SEQ ID NO: 4085; WAN0249LY_at; Start 50; Stop 74
ttttggaaagcgatttcaggtgata

SEQ ID NO: 26419 - DNA, 25 bp, Artificial
  probe
  misc_feature (1)..(25): SEQ ID NO: 4085; WAN0249LY_at; Start 12; Stop 36
tacctaacattttaccatattcttg

SEQ ID NO: 26420 - DNA, 25 bp, Artificial
  probe
  misc_feature (1)..(25): SEQ ID NO: 4085; WAN0249LY_at; Start 38; Stop 62
gacatttttctattttggaaagcga

SEQ ID NO: 26421 - DNA, 25 bp, Artificial
  probe
  misc_feature (1)..(25): SEQ ID NO: 4085; WAN0249LY_at; Start 33; Stop 57
cttgagacatttttctattttggaa

SEQ ID NO: 26422 - DNA, 25 bp, Artificial
  probe
  misc_feature (1)..(25): SEQ ID NO: 4085; WAN0249LY_at; Start 78; Stop 102
tataatcaataaagtgatgaggtga

SEQ ID NO: 26423 - DNA, 25 bp, Artificial
  probe
  misc_feature (1)..(25): SEQ ID NO: 4085; WAN0249LY_at; Start 19; Stop 43
cattttaccatattcttgagacatt

SEQ ID NO: 26424 - DNA, 25 bp, Artificial
  probe
  misc_feature (1)..(25): SEQ ID NO: 4085; WAN0249LY_at; Start 80; Stop 104
taatcaataaagtgatgaggtgaag

SEQ ID NO: 26425 - DNA, 25 bp, Artificial
  probe
  misc_feature (1)..(25): SEQ ID NO: 4085; WAN0249LY_at; Start 16; Stop 40
taacattttaccatattcttgagac

SEQ ID NO: 26426 - DNA, 25 bp, Artificial
  probe
  misc_feature (1)..(25): SEQ ID NO: 4085; WAN0249LY_at; Start 2; Stop 26
tgctacctcctacctaacattttac

SEQ ID NO: 26427 - DNA, 25 bp, Artificial
  probe
  misc_feature (1)..(25): SEQ ID NO: 4085; WAN0249LY_at; Start 59; Stop 83
gcgatttcaggtgataaaatataat

SEQ ID NO: 26428 - DNA, 25 bp, Artificial
  probe
  misc_feature (1)..(25): SEQ ID NO: 4085; WAN0249LY_at; Start 53; Stop 77
tggaaagcgatttcaggtgataaaa

SEQ ID NO: 26429 - DNA, 25 bp, Artificial
  probe
  misc_feature (1)..(25): SEQ ID NO: 4085; WAN0249LY_at; Start 55; Stop 79
gaaagcgatttcaggtgataaaata

SEQ ID NO: 26430 - DNA, 25 bp, Artificial
  probe
  misc_feature (1)..(25): SEQ ID NO: 4085; WAN0249LY_at; Start 36; Stop 60
gagacatttttctattttggaaagc

SEQ ID NO: 26431 - DNA, 25 bp, Artificial
  probe
  misc_feature (1)..(25): SEQ ID NO: 4085; WAN0249LY_at; Start 18; Stop 42
acattttaccatattcttgagacat

SEQ ID NO: 26432 - DNA, 25 bp, Artificial
  probe
  misc_feature (1)..(25): SEQ ID NO: 4085; WAN0249LY_at; Start 45; Stop 69
ttctattttggaaagcgatttcagg

SEQ ID NO: 26433 - DNA, 25 bp, Artificial
  probe
  misc_feature (1)..(25): SEQ ID NO: 4085; WAN0249LY_at; Start 14; Stop 38
cctaacattttaccatattcttgag

SEQ ID NO: 26434 - DNA, 25 bp, Artificial
  probe
  misc_feature (1)..(25): SEQ ID NO: 4085; WAN0249LY_at; Start 54; Stop 78
ggaaagcgatttcaggtgataaaat

SEQ ID NO: 26435 - DNA, 25 bp, Artificial
  probe
  misc_feature (1)..(25): SEQ ID NO: 4085; WAN0249LY_at; Start 1; Stop 25
gtgctacctcctacctaacatttta

SEQ ID NO: 26436 - DNA, 25 bp, Artificial
  probe
  misc_feature (1)..(25): SEQ ID NO: 4085; WAN0249LY_at; Start 52; Stop 76
ttggaaagcgatttcaggtgataaa

SEQ ID NO: 26437 - DNA, 25 bp, Artificial
  probe
  misc_feature (1)..(25): SEQ ID NO: 4085; WAN0249LY_at; Start 49; Stop 73
attttggaaagcgatttcaggtgat

SEQ ID NO: 26438 - DNA, 25 bp, Artificial
  probe
  misc_feature (1)..(25): SEQ ID NO: 4085; WAN0249LY_at; Start 26; Stop 50
ccatattcttgagacatttttctat

SEQ ID NO: 26439 - DNA, 25 bp, Artificial
  probe
  misc_feature (1)..(25): SEQ ID NO: 4085; WAN0249LY_at; Start 60; Stop 84
cgatttcaggtgataaaatataatc

SEQ ID NO: 26440 - DNA, 25 bp, Artificial
  probe
  misc_feature (1)..(25): SEQ ID NO: 4085; WAN0249LY_at; Start 7; Stop 31
cctcctacctaacattttaccatat

SEQ ID NO: 26441 - DNA, 25 bp, Artificial
  probe
  misc_feature (1)..(25): SEQ ID NO: 4085; WAN0249LY_at; Start 51; Stop 75
tttggaaagcgatttcaggtgataa

SEQ ID NO: 26442 - DNA, 25 bp, Artificial
  probe
  misc_feature (1)..(25): SEQ ID NO: 4779; WAN0249LZ_at; Start 1; Stop 25
ttacttcacctcatcactttattga

SEQ ID NO: 26443 - DNA, 25 bp, Artificial
  probe
  misc_feature (1)..(25): SEQ ID NO: 4779; WAN0249LZ_at; Start 46; Stop 70
tcgctttccaaaatagaaaaatgtc

SEQ ID NO: 26444 - DNA, 25 bp, Artificial
  probe
  misc_feature (1)..(25): SEQ ID NO: 4779; WAN0249LZ_at; Start 7; Stop 31
cacctcatcactttattgattatat

SEQ ID NO: 26445 - DNA, 25 bp, Artificial
  probe
  misc_feature (1)..(25): SEQ ID NO: 4779; WAN0249LZ_at; Start 40; Stop 64
ctgaaatcgctttccaaaatagaaa

SEQ ID NO: 26446 - DNA, 25 bp, Artificial
  probe
  misc_feature (1)..(25): SEQ ID NO: 4779; WAN0249LZ_at; Start 48; Stop 72
gctttccaaaatagaaaaatgtctc

SEQ ID NO: 26447 - DNA, 25 bp, Artificial
  probe
  misc_feature (1)..(25): SEQ ID NO: 4779; WAN0249LZ_at; Start 33; Stop 57
ttatcacctgaaatcgctttccaaa

SEQ ID NO: 26448 - DNA, 25 bp, Artificial
  probe
  misc_feature (1)..(25): SEQ ID NO: 4779; WAN0249LZ_at; Start 52; Stop 76
tccaaaatagaaaaatgtctcaaga

SEQ ID NO: 26449 - DNA, 25 bp, Artificial
  probe
  misc_feature (1)..(25): SEQ ID NO: 4779; WAN0249LZ_at; Start 41; Stop 65
tgaaatcgctttccaaaatagaaaa

SEQ ID NO: 26450 - DNA, 25 bp, Artificial
  probe
  misc_feature (1)..(25): SEQ ID NO: 4779; WAN0249LZ_at; Start 65; Stop 89
aatgtctcaagaatatggtaaaatg

SEQ ID NO: 26451 - DNA, 25 bp, Artificial
  probe
  misc_feature (1)..(25): SEQ ID NO: 4779; WAN0249LZ_at; Start 70; Stop 94
ctcaagaatatggtaaaatgttagg

SEQ ID NO: 26452 - DNA, 25 bp, Artificial
  probe
  misc_feature (1)..(25): SEQ ID NO: 4779; WAN0249LZ_at; Start 24; Stop 48
gattatattttatcacctgaaatcg

SEQ ID NO: 26453 - DNA, 25 bp, Artificial
  probe
  misc_feature (1)..(25): SEQ ID NO: 4779; WAN0249LZ_at; Start 67; Stop 91
tgtctcaagaatatggtaaaatgtt

SEQ ID NO: 26454 - DNA, 25 bp, Artificial
  probe
  misc_feature (1)..(25): SEQ ID NO: 4779; WAN0249LZ_at; Start 49; Stop 73
ctttccaaaatagaaaaatgtctca

SEQ ID NO: 26455 - DNA, 25 bp, Artificial
  probe
  misc_feature (1)..(25): SEQ ID NO: 4779; WAN0249LZ_at; Start 53; Stop 77
ccaaaatagaaaaatgtctcaagaa

SEQ ID NO: 26456 - DNA, 25 bp, Artificial
  probe
  misc_feature (1)..(25): SEQ ID NO: 4779; WAN0249LZ_at; Start 47; Stop 71
cgctttccaaaatagaaaaatgtct

SEQ ID NO: 26457 - DNA, 25 bp, Artificial
  probe
  misc_feature (1)..(25): SEQ ID NO: 4779; WAN0249LZ_at; Start 44; Stop 68
aatcgctttccaaaatagaaaaatg

SEQ ID NO: 26458 - DNA, 25 bp, Artificial
  probe
  misc_feature (1)..(25): SEQ ID NO: 4779; WAN0249LZ_at; Start 61; Stop 85
gaaaaatgtctcaagaatatggtaa

SEQ ID NO: 26459 - DNA, 25 bp, Artificial
  probe
  misc_feature (1)..(25): SEQ ID NO: 4779; WAN0249LZ_at; Start 32; Stop 56
tttatcacctgaaatcgctttccaa

SEQ ID NO: 26460 - DNA, 25 bp, Artificial
  probe
  misc_feature (1)..(25): SEQ ID NO: 4779; WAN0249LZ_at; Start 37; Stop 61
cacctgaaatcgctttccaaaatag

SEQ ID NO: 26461 - DNA, 25 bp, Artificial
  probe
  misc_feature (1)..(25): SEQ ID NO: 4779; WAN0249LZ_at; Start 31; Stop 55
ttttatcacctgaaatcgctttcca

SEQ ID NO: 26462 - DNA, 25 bp, Artificial
  probe
  misc_feature (1)..(25): SEQ ID NO: 4779; WAN0249LZ_at; Start 39; Stop 63
cctgaaatcgctttccaaaatagaa

SEQ ID NO: 26463 - DNA, 25 bp, Artificial
  probe
  misc_feature (1)..(25): SEQ ID NO: 4779; WAN0249LZ_at; Start 75; Stop 99
gaatatggtaaaatgttaggtagga

SEQ ID NO: 26464 - DNA, 25 bp, Artificial
  probe
  misc_feature (1)..(25): SEQ ID NO: 4779; WAN0249LZ_at; Start 29; Stop 53
tattttatcacctgaaatcgctttc

SEQ ID NO: 26465 - DNA, 25 bp, Artificial
  probe
  misc_feature (1)..(25): SEQ ID NO: 4779; WAN0249LZ_at; Start 51; Stop 75
ttccaaaatagaaaaatgtctcaag

SEQ ID NO: 26466 - DNA, 25 bp, Artificial
  probe
  misc_feature (1)..(25): SEQ ID NO: 4779; WAN0249LZ_at; Start 59; Stop 83
tagaaaaatgtctcaagaatatggt

SEQ ID NO: 26467 - DNA, 25 bp, Artificial
  probe
  misc_feature (1)..(25): SEQ ID NO: 4779; WAN0249LZ_at; Start 2; Stop 26
tacttcacctcatcactttattgat

SEQ ID NO: 26468 - DNA, 25 bp, Artificial
  probe
  misc_feature (1)..(25): SEQ ID NO: 4779; WAN0249LZ_at; Start 68; Stop 92
gtctcaagaatatggtaaaatgtta

SEQ ID NO: 26469 - DNA, 25 bp, Artificial
  probe
  misc_feature (1)..(25): SEQ ID NO: 4779; WAN0249LZ_at; Start 30; Stop 54
attttatcacctgaaatcgctttcc

SEQ ID NO: 26470 - DNA, 25 bp, Artificial
  probe
  misc_feature (1)..(25): SEQ ID NO: 4779; WAN0249LZ_at; Start 72; Stop 96
caagaatatggtaaaatgttaggta

SEQ ID NO: 26471 - DNA, 25 bp, Artificial
  probe
  misc_feature (1)..(25): SEQ ID NO: 4779; WAN0249LZ_at; Start 26; Stop 50
ttatattttatcacctgaaatcgct

SEQ ID NO: 26472 - DNA, 25 bp, Artificial
  probe
  misc_feature (1)..(25): SEQ ID NO: 4779; WAN0249LZ_at; Start 34; Stop 58
tatcacctgaaatcgctttccaaaa

SEQ ID NO: 26473 - DNA, 25 bp, Artificial
  probe
  misc_feature (1)..(25): SEQ ID NO: 4779; WAN0249LZ_at; Start 27; Stop 51
tatattttatcacctgaaatcgctt

SEQ ID NO: 26474 - DNA, 25 bp, Artificial
  probe
  misc_feature (1)..(25): SEQ ID NO: 4779; WAN0249LZ_at; Start 83; Stop 107
taaaatgttaggtaggaggtagcac

SEQ ID NO: 26475 - DNA, 25 bp, Artificial
  probe
  misc_feature (1)..(25): SEQ ID NO: 4779; WAN0249LZ_at; Start 38; Stop 62
acctgaaatcgctttccaaaataga

SEQ ID NO: 26476 - DNA, 25 bp, Artificial
  probe
  misc_feature (1)..(25): SEQ ID NO: 409; WAN0249M2_at; Start 91; Stop 115
gtttatcacagtctatattagtacg

SEQ ID NO: 26477 - DNA, 25 bp, Artificial
  probe
  misc_feature (1)..(25): SEQ ID NO: 409; WAN0249M2_at; Start 112; Stop 136
tacgagtttgatgataaatagagat

SEQ ID NO: 26478 - DNA, 25 bp, Artificial
  probe
  misc_feature (1)..(25): SEQ ID NO: 409; WAN0249M2_at; Start 87; Stop 111
ctttgtttatcacagtctatattag

SEQ ID NO: 26479 - DNA, 25 bp, Artificial
  probe
  misc_feature (1)..(25): SEQ ID NO: 409; WAN0249M2_at; Start 10; Stop 34
catggaatctatagtctttgacaca

SEQ ID NO: 26480 - DNA, 25 bp, Artificial
  probe
  misc_feature (1)..(25): SEQ ID NO: 409; WAN0249M2_at; Start 94; Stop 118
tatcacagtctatattagtacgagt

SEQ ID NO: 26481 - DNA, 25 bp, Artificial
  probe
  misc_feature (1)..(25): SEQ ID NO: 409; WAN0249M2_at; Start 103; Stop 127
ctatattagtacgagtttgatgata

SEQ ID NO: 26482 - DNA, 25 bp, Artificial
  probe
  misc_feature (1)..(25): SEQ ID NO: 409; WAN0249M2_at; Start 12; Stop 36
tggaatctatagtctttgacacaga

SEQ ID NO: 26483 - DNA, 25 bp, Artificial
  probe
  misc_feature (1)..(25): SEQ ID NO: 409; WAN0249M2_at; Start 1; Stop 25
agaagagctcatggaatctatagtc

SEQ ID NO: 26484 - DNA, 25 bp, Artificial
  probe
  misc_feature (1)..(25): SEQ ID NO: 409; WAN0249M2_at; Start 7; Stop 31
gctcatggaatctatagtctttgac

SEQ ID NO: 26485 - DNA, 25 bp, Artificial
  probe
  misc_feature (1)..(25): SEQ ID NO: 409; WAN0249M2_at; Start 83; Stop 107
agtactttgtttatcacagtctata

SEQ ID NO: 26486 - DNA, 25 bp, Artificial
  probe
  misc_feature (1)..(25): SEQ ID NO: 409; WAN0249M2_at; Start 8; Stop 32
ctcatggaatctatagtctttgaca

SEQ ID NO: 26487 - DNA, 25 bp, Artificial
  probe
  misc_feature (1)..(25): SEQ ID NO: 409; WAN0249M2_at; Start 101; Stop 125
gtctatattagtacgagtttgatga

SEQ ID NO: 26488 - DNA, 25 bp, Artificial
  probe
  misc_feature (1)..(25): SEQ ID NO: 409; WAN0249M2_at; Start 2; Stop 26
gaagagctcatggaatctatagtct

SEQ ID NO: 26489 - DNA, 25 bp, Artificial
  probe
  misc_feature (1)..(25): SEQ ID NO: 409; WAN0249M2_at; Start 9; Stop 33
tcatggaatctatagtctttgacac

SEQ ID NO: 26490 - DNA, 25 bp, Artificial
  probe
  misc_feature (1)..(25): SEQ ID NO: 409; WAN0249M2_at; Start 19; Stop 43
tatagtctttgacacagaggaagag

SEQ ID NO: 26491 - DNA, 25 bp, Artificial
  probe
  misc_feature (1)..(25): SEQ ID NO: 409; WAN0249M2_at; Start 97; Stop 121
cacagtctatattagtacgagtttg

SEQ ID NO: 26492 - DNA, 25 bp, Artificial
  probe
  misc_feature (1)..(25): SEQ ID NO: 409; WAN0249M2_at; Start 16; Stop 40
atctatagtctttgacacagaggaa

SEQ ID NO: 26493 - DNA, 25 bp, Artificial
  probe
  misc_feature (1)..(25): SEQ ID NO: 409; WAN0249M2_at; Start 15; Stop 39
aatctatagtctttgacacagagga

SEQ ID NO: 26494 - DNA, 25 bp, Artificial
  probe
  misc_feature (1)..(25): SEQ ID NO: 409; WAN0249M2_at; Start 5; Stop 29
gagctcatggaatctatagtctttg

SEQ ID NO: 26495 - DNA, 25 bp, Artificial
  probe
  misc_feature (1)..(25): SEQ ID NO: 409; WAN0249M2_at; Start 79; Stop 103
aagtagtactttgtttatcacagtc

SEQ ID NO: 26496 - DNA, 25 bp, Artificial
  probe
  misc_feature (1)..(25): SEQ ID NO: 409; WAN0249M2_at; Start 99; Stop 123
cagtctatattagtacgagtttgat

SEQ ID NO: 26497 - DNA, 25 bp, Artificial
  probe
  misc_feature (1)..(25): SEQ ID NO: 409; WAN0249M2_at; Start 110; Stop 134
agtacgagtttgatgataaatagag

SEQ ID NO: 26498 - DNA, 25 bp, Artificial
  probe
  misc_feature (1)..(25): SEQ ID NO: 409; WAN0249M2_at; Start 108; Stop 132
ttagtacgagtttgatgataaatag

SEQ ID NO: 26499 - DNA, 25 bp, Artificial
  probe
  misc_feature (1)..(25): SEQ ID NO: 409; WAN0249M2_at; Start 17; Stop 41
tctatagtctttgacacagaggaag

SEQ ID NO: 26500 - DNA, 25 bp, Artificial
  probe
  misc_feature (1)..(25): SEQ ID NO: 409; WAN0249M2_at; Start 77; Stop 101
gaaagtagtactttgtttatcacag

SEQ ID NO: 26501 - DNA, 25 bp, Artificial
  probe
  misc_feature (1)..(25): SEQ ID NO: 409; WAN0249M2_at; Start 81; Stop 105
gtagtactttgtttatcacagtcta

SEQ ID NO: 26502 - DNA, 25 bp, Artificial
  probe
  misc_feature (1)..(25): SEQ ID NO: 409; WAN0249M2_at; Start 93; Stop 117
ttatcacagtctatattagtacgag

SEQ ID NO: 26503 - DNA, 25 bp, Artificial
  probe
  misc_feature (1)..(25): SEQ ID NO: 409; WAN0249M2_at; Start 6; Stop 30
agctcatggaatctatagtctttga

SEQ ID NO: 26504 - DNA, 25 bp, Artificial
  probe
  misc_feature (1)..(25): SEQ ID NO: 409; WAN0249M2_at; Start 14; Stop 38
gaatctatagtctttgacacagagg

SEQ ID NO: 26505 - DNA, 25 bp, Artificial
  probe
  misc_feature (1)..(25): SEQ ID NO: 409; WAN0249M2_at; Start 96; Stop 120
tcacagtctatattagtacgagttt

SEQ ID NO: 26506 - DNA, 25 bp, Artificial
  probe
  misc_feature (1)..(25): SEQ ID NO: 409; WAN0249M2_at; Start 13; Stop 37
ggaatctatagtctttgacacagag

SEQ ID NO: 26507 - DNA, 25 bp, Artificial
  probe
  misc_feature (1)..(25): SEQ ID NO: 409; WAN0249M2_at; Start 18; Stop 42
ctatagtctttgacacagaggaaga

SEQ ID NO: 26508 - DNA, 25 bp, Artificial
  probe
  misc_feature (1)..(25): SEQ ID NO: 409; WAN0249M2_at; Start 21; Stop 45
tagtctttgacacagaggaagagtt

SEQ ID NO: 26509 - DNA, 25 bp, Artificial
  probe
  misc_feature (1)..(25): SEQ ID NO: 409; WAN0249M2_at; Start 114; Stop 138
cgagtttgatgataaatagagattt

SEQ ID NO: 26510 - DNA, 25 bp, Artificial
  probe
  misc_feature (1)..(25): SEQ ID NO: 5887; WAN0249M3_at; Start 25; Stop 49
ctcgtactaatatagactgtgataa

SEQ ID NO: 26511 - DNA, 25 bp, Artificial
  probe
  misc_feature (1)..(25): SEQ ID NO: 5887; WAN0249M3_at; Start 29; Stop 53
tactaatatagactgtgataaacaa

SEQ ID NO: 26512 - DNA, 25 bp, Artificial
  probe
  misc_feature (1)..(25): SEQ ID NO: 5887; WAN0249M3_at; Start 18; Stop 42
catcaaactcgtactaatatagact

SEQ ID NO: 26513 - DNA, 25 bp, Artificial
  probe
  misc_feature (1)..(25): SEQ ID NO: 5887; WAN0249M3_at; Start 7; Stop 31
tctctatttatcatcaaactcgtac

SEQ ID NO: 26514 - DNA, 25 bp, Artificial
  probe
  misc_feature (1)..(25): SEQ ID NO: 5887; WAN0249M3_at; Start 17; Stop 41
tcatcaaactcgtactaatatagac

SEQ ID NO: 26515 - DNA, 25 bp, Artificial
  probe
  misc_feature (1)..(25): SEQ ID NO: 5887; WAN0249M3_at; Start 97; Stop 121
aactcttcctctgtgtcaaagacta

SEQ ID NO: 26516 - DNA, 25 bp, Artificial
  probe
  misc_feature (1)..(25): SEQ ID NO: 5887; WAN0249M3_at; Start 111; Stop 135
gtcaaagactatagattccatgagc

SEQ ID NO: 26517 - DNA, 25 bp, Artificial
  probe
  misc_feature (1)..(25): SEQ ID NO: 5887; WAN0249M3_at; Start 101; Stop 125
cttcctctgtgtcaaagactataga

SEQ ID NO: 26518 - DNA, 25 bp, Artificial
  probe
  misc_feature (1)..(25): SEQ ID NO: 5887; WAN0249M3_at; Start 22; Stop 46
aaactcgtactaatatagactgtga

SEQ ID NO: 26519 - DNA, 25 bp, Artificial
  probe
  misc_feature (1)..(25): SEQ ID NO: 5887; WAN0249M3_at; Start 100; Stop 124
tcttcctctgtgtcaaagactatag

SEQ ID NO: 26520 - DNA, 25 bp, Artificial
  probe
  misc_feature (1)..(25): SEQ ID NO: 5887; WAN0249M3_at; Start 4; Stop 28
aaatctctatttatcatcaaactcg

SEQ ID NO: 26521 - DNA, 25 bp, Artificial
  probe
  misc_feature (1)..(25): SEQ ID NO: 5887; WAN0249M3_at; Start 105; Stop 129
ctctgtgtcaaagactatagattcc

SEQ ID NO: 26522 - DNA, 25 bp, Artificial
  probe
  misc_feature (1)..(25): SEQ ID NO: 5887; WAN0249M3_at; Start 32; Stop 56
taatatagactgtgataaacaaagt

SEQ ID NO: 26523 - DNA, 25 bp, Artificial
  probe
  misc_feature (1)..(25): SEQ ID NO: 5887; WAN0249M3_at; Start 37; Stop 61
tagactgtgataaacaaagtactac

SEQ ID NO: 26524 - DNA, 25 bp, Artificial
  probe
  misc_feature (1)..(25): SEQ ID NO: 5887; WAN0249M3_at; Start 42; Stop 66
tgtgataaacaaagtactactttct

SEQ ID NO: 26525 - DNA, 25 bp, Artificial
  probe
  misc_feature (1)..(25): SEQ ID NO: 5887; WAN0249M3_at; Start 103; Stop 127
tcctctgtgtcaaagactatagatt

SEQ ID NO: 26526 - DNA, 25 bp, Artificial
  probe
  misc_feature (1)..(25): SEQ ID NO: 5887; WAN0249M3_at; Start 108; Stop 132
tgtgtcaaagactatagattccatg

SEQ ID NO: 26527 - DNA, 25 bp, Artificial
  probe
  misc_feature (1)..(25): SEQ ID NO: 5887; WAN0249M3_at; Start 104; Stop 128
cctctgtgtcaaagactatagattc

SEQ ID NO: 26528 - DNA, 25 bp, Artificial
  probe
  misc_feature (1)..(25): SEQ ID NO: 5887; WAN0249M3_at; Start 112; Stop 136
tcaaagactatagattccatgagct

SEQ ID NO: 26529 - DNA, 25 bp, Artificial
  probe
  misc_feature (1)..(25): SEQ ID NO: 5887; WAN0249M3_at; Start 44; Stop 68
tgataaacaaagtactactttcttg

SEQ ID NO: 26530 - DNA, 25 bp, Artificial
  probe
  misc_feature (1)..(25): SEQ ID NO: 5887; WAN0249M3_at; Start 10; Stop 34
ctatttatcatcaaactcgtactaa

SEQ ID NO: 26531 - DNA, 25 bp, Artificial
  probe
  misc_feature (1)..(25): SEQ ID NO: 5887; WAN0249M3_at; Start 39; Stop 63
gactgtgataaacaaagtactactt

SEQ ID NO: 26532 - DNA, 25 bp, Artificial
  probe
  misc_feature (1)..(25): SEQ ID NO: 5887; WAN0249M3_at; Start 113; Stop 137
caaagactatagattccatgagctc

SEQ ID NO: 26533 - DNA, 25 bp, Artificial
  probe
  misc_feature (1)..(25): SEQ ID NO: 5887; WAN0249M3_at; Start 20; Stop 44
tcaaactcgtactaatatagactgt

SEQ ID NO: 26534 - DNA, 25 bp, Artificial
  probe
  misc_feature (1)..(25): SEQ ID NO: 5887; WAN0249M3_at; Start 35; Stop 59
tatagactgtgataaacaaagtact

SEQ ID NO: 26535 - DNA, 25 bp, Artificial
  probe
  misc_feature (1)..(25): SEQ ID NO: 5887; WAN0249M3_at; Start 106; Stop 130
tctgtgtcaaagactatagattcca

SEQ ID NO: 26536 - DNA, 25 bp, Artificial
  probe
  misc_feature (1)..(25): SEQ ID NO: 5887; WAN0249M3_at; Start 110; Stop 134
tgtcaaagactatagattccatgag

SEQ ID NO: 26537 - DNA, 25 bp, Artificial
  probe
  misc_feature (1)..(25): SEQ ID NO: 5887; WAN0249M3_at; Start 116; Stop 140
agactatagattccatgagctcttc

SEQ ID NO: 26538 - DNA, 25 bp, Artificial
  probe
  misc_feature (1)..(25): SEQ ID NO: 5887; WAN0249M3_at; Start 21; Stop 45
caaactcgtactaatatagactgtg

SEQ ID NO: 26539 - DNA, 25 bp, Artificial
  probe
  misc_feature (1)..(25): SEQ ID NO: 5887; WAN0249M3_at; Start 117; Stop 141
gactatagattccatgagctcttct

SEQ ID NO: 26540 - DNA, 25 bp, Artificial
  probe
  misc_feature (1)..(25): SEQ ID NO: 5887; WAN0249M3_at; Start 41; Stop 65
ctgtgataaacaaagtactactttc

SEQ ID NO: 26541 - DNA, 25 bp, Artificial
  probe
  misc_feature (1)..(25): SEQ ID NO: 5887; WAN0249M3_at; Start 27; Stop 51
cgtactaatatagactgtgataaac

SEQ ID NO: 26542 - DNA, 25 bp, Artificial
  probe
  misc_feature (1)..(25): SEQ ID NO: 5887; WAN0249M3_at; Start 114; Stop 138
aaagactatagattccatgagctct

SEQ ID NO: 26543 - DNA, 25 bp, Artificial
  probe
  misc_feature (1)..(25): SEQ ID NO: 5887; WAN0249M3_at; Start 15; Stop 39
tatcatcaaactcgtactaatatag

SEQ ID NO: 26544 - DNA, 25 bp, Artificial
  probe
  misc_feature (1)..(25): SEQ ID NO: 539; WAN0249M4_at; Start 27; Stop 51
atgaggagaaggttcttttgggatt

SEQ ID NO: 26545 - DNA, 25 bp, Artificial
  probe
  misc_feature (1)..(25): SEQ ID NO: 539; WAN0249M4_at; Start 25; Stop 49
ccatgaggagaaggttcttttggga

SEQ ID NO: 26546 - DNA, 25 bp, Artificial
  probe
  misc_feature (1)..(25): SEQ ID NO: 539; WAN0249M4_at; Start 15; Stop 39
aactttctctccatgaggagaaggt

SEQ ID NO: 26547 - DNA, 25 bp, Artificial
  probe
  misc_feature (1)..(25): SEQ ID NO: 539; WAN0249M4_at; Start 24; Stop 48
tccatgaggagaaggttcttttggg

SEQ ID NO: 26548 - DNA, 25 bp, Artificial
  probe
  misc_feature (1)..(25): SEQ ID NO: 539; WAN0249M4_at; Start 18; Stop 42
tttctctccatgaggagaaggttct

SEQ ID NO: 26549 - DNA, 25 bp, Artificial
  probe
  misc_feature (1)..(25): SEQ ID NO: 539; WAN0249M4_at; Start 5; Stop 29
tttctaatagaactttctctccatg

SEQ ID NO: 26550 - DNA, 25 bp, Artificial
  probe
  misc_feature (1)..(25): SEQ ID NO: 539; WAN0249M4_at; Start 22; Stop 46
tctccatgaggagaaggttcttttg

SEQ ID NO: 26551 - DNA, 25 bp, Artificial
  probe
  misc_feature (1)..(25): SEQ ID NO: 539; WAN0249M4_at; Start 11; Stop 35
atagaactttctctccatgaggaga

SEQ ID NO: 26552 - DNA, 25 bp, Artificial
  probe
  misc_feature (1)..(25): SEQ ID NO: 539; WAN0249M4_at; Start 3; Stop 27
aatttctaatagaactttctctcca

SEQ ID NO: 26553 - DNA, 25 bp, Artificial
  probe
  misc_feature (1)..(25): SEQ ID NO: 539; WAN0249M4_at; Start 4; Stop 28
atttctaatagaactttctctccat

SEQ ID NO: 26554 - DNA, 25 bp, Artificial
  probe
  misc_feature (1)..(25): SEQ ID NO: 539; WAN0249M4_at; Start 10; Stop 34
aatagaactttctctccatgaggag

SEQ ID NO: 26555 - DNA, 25 bp, Artificial
  probe
  misc_feature (1)..(25): SEQ ID NO: 539; WAN0249M4_at; Start 9; Stop 33
taatagaactttctctccatgagga

SEQ ID NO: 26556 - DNA, 25 bp, Artificial
  probe
  misc_feature (1)..(25): SEQ ID NO: 539; WAN0249M4_at; Start 26; Stop 50
catgaggagaaggttcttttgggat

SEQ ID NO: 26557 - DNA, 25 bp, Artificial
  probe
  misc_feature (1)..(25): SEQ ID NO: 539; WAN0249M4_at; Start 2; Stop 26
taatttctaatagaactttctctcc

SEQ ID NO: 26558 - DNA, 25 bp, Artificial
  probe
  misc_feature (1)..(25): SEQ ID NO: 539; WAN0249M4_at; Start 12; Stop 36
tagaactttctctccatgaggagaa

SEQ ID NO: 26559 - DNA, 25 bp, Artificial
  probe
  misc_feature (1)..(25): SEQ ID NO: 539; WAN0249M4_at; Start 23; Stop 47
ctccatgaggagaaggttcttttgg

SEQ ID NO: 26560 - DNA, 25 bp, Artificial
  probe
  misc_feature (1)..(25): SEQ ID NO: 539; WAN0249M4_at; Start 8; Stop 32
ctaatagaactttctctccatgagg

SEQ ID NO: 26561 - DNA, 25 bp, Artificial
  probe
  misc_feature (1)..(25): SEQ ID NO: 539; WAN0249M4_at; Start 1; Stop 25
ataatttctaatagaactttctctc

SEQ ID NO: 26562 - DNA, 25 bp, Artificial
  probe
  misc_feature (1)..(25): SEQ ID NO: 539; WAN0249M4_at; Start 16; Stop 40
actttctctccatgaggagaaggtt

SEQ ID NO: 26563 - DNA, 25 bp, Artificial
  probe
  misc_feature (1)..(25): SEQ ID NO: 539; WAN0249M4_at; Start 20; Stop 44
tctctccatgaggagaaggttcttt

SEQ ID NO: 26564 - DNA, 25 bp, Artificial
  probe
  misc_feature (1)..(25): SEQ ID NO: 539; WAN0249M4_at; Start 17; Stop 41
ctttctctccatgaggagaaggttc

SEQ ID NO: 26565 - DNA, 25 bp, Artificial
  probe
  misc_feature (1)..(25): SEQ ID NO: 539; WAN0249M4_at; Start 6; Stop 30
ttctaatagaactttctctccatga

SEQ ID NO: 26566 - DNA, 25 bp, Artificial
  probe
  misc_feature (1)..(25): SEQ ID NO: 539; WAN0249M4_at; Start 19; Stop 43
ttctctccatgaggagaaggttctt

SEQ ID NO: 26567 - DNA, 25 bp, Artificial
  probe
  misc_feature (1)..(25): SEQ ID NO: 539; WAN0249M4_at; Start 13; Stop 37
agaactttctctccatgaggagaag

SEQ ID NO: 26568 - DNA, 25 bp, Artificial
  probe
  misc_feature (1)..(25): SEQ ID NO: 539; WAN0249M4_at; Start 21; Stop 45
ctctccatgaggagaaggttctttt

SEQ ID NO: 26569 - DNA, 25 bp, Artificial
  probe
  misc_feature (1)..(25): SEQ ID NO: 539; WAN0249M4_at; Start 7; Stop 31
tctaatagaactttctctccatgag

SEQ ID NO: 26570 - DNA, 25 bp, Artificial
  probe
  misc_feature (1)..(25): SEQ ID NO: 539; WAN0249M4_at; Start 14; Stop 38
gaactttctctccatgaggagaagg

SEQ ID NO: 26571 - DNA, 25 bp, Artificial
  probe
  misc_feature (1)..(25): SEQ ID NO: 3143; WAN0249M5_at; Start 16; Stop 40
aatcccaaaagaaccttctcctcat

SEQ ID NO: 26572 - DNA, 25 bp, Artificial
  probe
  misc_feature (1)..(25): SEQ ID NO: 3143; WAN0249M5_at; Start 25; Stop 49
agaaccttctcctcatggagagaaa

SEQ ID NO: 26573 - DNA, 25 bp, Artificial
  probe
  misc_feature (1)..(25): SEQ ID NO: 3143; WAN0249M5_at; Start 39; Stop 63
atggagagaaagttctattagaaat

SEQ ID NO: 26574 - DNA, 25 bp, Artificial
  probe
  misc_feature (1)..(25): SEQ ID NO: 3143; WAN0249M5_at; Start 35; Stop 59
cctcatggagagaaagttctattag

SEQ ID NO: 26575 - DNA, 25 bp, Artificial
  probe
  misc_feature (1)..(25): SEQ ID NO: 3143; WAN0249M5_at; Start 27; Stop 51
aaccttctcctcatggagagaaagt

SEQ ID NO: 26576 - DNA, 25 bp, Artificial
  probe
  misc_feature (1)..(25): SEQ ID NO: 3143; WAN0249M5_at; Start 17; Stop 41
atcccaaaagaaccttctcctcatg

SEQ ID NO: 26577 - DNA, 25 bp, Artificial
  probe
  misc_feature (1)..(25): SEQ ID NO: 3143; WAN0249M5_at; Start 23; Stop 47
aaagaaccttctcctcatggagaga

SEQ ID NO: 26578 - DNA, 25 bp, Artificial
  probe
  misc_feature (1)..(25): SEQ ID NO: 3143; WAN0249M5_at; Start 34; Stop 58
tcctcatggagagaaagttctatta

SEQ ID NO: 26579 - DNA, 25 bp, Artificial
  probe
  misc_feature (1)..(25): SEQ ID NO: 3143; WAN0249M5_at; Start 36; Stop 60
ctcatggagagaaagttctattaga

SEQ ID NO: 26580 - DNA, 25 bp, Artificial
  probe
  misc_feature (1)..(25): SEQ ID NO: 3143; WAN0249M5_at; Start 32; Stop 56
tctcctcatggagagaaagttctat

SEQ ID NO: 26581 - DNA, 25 bp, Artificial
  probe
  misc_feature (1)..(25): SEQ ID NO: 3143; WAN0249M5_at; Start 20; Stop 44
ccaaaagaaccttctcctcatggag

SEQ ID NO: 26582 - DNA, 25 bp, Artificial
  probe
  misc_feature (1)..(25): SEQ ID NO: 3143; WAN0249M5_at; Start 26; Stop 50
gaaccttctcctcatggagagaaag

SEQ ID NO: 26583 - DNA, 25 bp, Artificial
  probe
  misc_feature (1)..(25): SEQ ID NO: 3143; WAN0249M5_at; Start 40; Stop 64
tggagagaaagttctattagaaatt

SEQ ID NO: 26584 - DNA, 25 bp, Artificial
  probe
  misc_feature (1)..(25): SEQ ID NO: 3143; WAN0249M5_at; Start 42; Stop 66
gagagaaagttctattagaaattat

SEQ ID NO: 26585 - DNA, 25 bp, Artificial
  probe
  misc_feature (1)..(25): SEQ ID NO: 3143; WAN0249M5_at; Start 18; Stop 42
tcccaaaagaaccttctcctcatgg

SEQ ID NO: 26586 - DNA, 25 bp, Artificial
  probe
  misc_feature (1)..(25): SEQ ID NO: 3143; WAN0249M5_at; Start 24; Stop 48
aagaaccttctcctcatggagagaa

SEQ ID NO: 26587 - DNA, 25 bp, Artificial
  probe
  misc_feature (1)..(25): SEQ ID NO: 3143; WAN0249M5_at; Start 29; Stop 53
ccttctcctcatggagagaaagttc

SEQ ID NO: 26588 - DNA, 25 bp, Artificial
  probe
  misc_feature (1)..(25): SEQ ID NO: 3143; WAN0249M5_at; Start 38; Stop 62
catggagagaaagttctattagaaa

SEQ ID NO: 26589 - DNA, 25 bp, Artificial
  probe
  misc_feature (1)..(25): SEQ ID NO: 3143; WAN0249M5_at; Start 31; Stop 55
ttctcctcatggagagaaagttcta

SEQ ID NO: 26590 - DNA, 25 bp, Artificial
  probe
  misc_feature (1)..(25): SEQ ID NO: 3143; WAN0249M5_at; Start 21; Stop 45
caaaagaaccttctcctcatggaga

SEQ ID NO: 26591 - DNA, 25 bp, Artificial
  probe
  misc_feature (1)..(25): SEQ ID NO: 3143; WAN0249M5_at; Start 41; Stop 65
ggagagaaagttctattagaaatta

SEQ ID NO: 26592 - DNA, 25 bp, Artificial
  probe
  misc_feature (1)..(25): SEQ ID NO: 3143; WAN0249M5_at; Start 28; Stop 52
accttctcctcatggagagaaagtt

SEQ ID NO: 26593 - DNA, 25 bp, Artificial
  probe
  misc_feature (1)..(25): SEQ ID NO: 3143; WAN0249M5_at; Start 30; Stop 54
cttctcctcatggagagaaagttct

SEQ ID NO: 26594 - DNA, 25 bp, Artificial
  probe
  misc_feature (1)..(25): SEQ ID NO: 3143; WAN0249M5_at; Start 22; Stop 46
aaaagaaccttctcctcatggagag

SEQ ID NO: 26595 - DNA, 25 bp, Artificial
  probe
  misc_feature (1)..(25): SEQ ID NO: 3143; WAN0249M5_at; Start 33; Stop 57
ctcctcatggagagaaagttctatt

SEQ ID NO: 26596 - DNA, 25 bp, Artificial
  probe
  misc_feature (1)..(25): SEQ ID NO: 3143; WAN0249M5_at; Start 37; Stop 61
tcatggagagaaagttctattagaa

SEQ ID NO: 26597 - DNA, 25 bp, Artificial
  probe
  misc_feature (1)..(25): SEQ ID NO: 3143; WAN0249M5_at; Start 19; Stop 43
cccaaaagaaccttctcctcatgga

SEQ ID NO: 26598 - DNA, 25 bp, Artificial
  probe
  misc_feature (1)..(25): SEQ ID NO: 455; WAN0249M6_at; Start 1; Stop 25
agctgggaaaagtttctcagctttt

SEQ ID NO: 26599 - DNA, 25 bp, Artificial
  probe
  misc_feature (1)..(25): SEQ ID NO: 455; WAN0249M6_at; Start 39; Stop 63
tactggcattttcatcacatattac

SEQ ID NO: 26600 - DNA, 25 bp, Artificial
  probe
  misc_feature (1)..(25): SEQ ID NO: 455; WAN0249M6_at; Start 37; Stop 61
attactggcattttcatcacatatt

SEQ ID NO: 26601 - DNA, 25 bp, Artificial
  probe
  misc_feature (1)..(25): SEQ ID NO: 455; WAN0249M6_at; Start 42; Stop 66
tggcattttcatcacatattacagc

SEQ ID NO: 26602 - DNA, 25 bp, Artificial
  probe
  misc_feature (1)..(25): SEQ ID NO: 455; WAN0249M6_at; Start 43; Stop 67
ggcattttcatcacatattacagca

SEQ ID NO: 26603 - DNA, 25 bp, Artificial
  probe
  misc_feature (1)..(25): SEQ ID NO: 455; WAN0249M6_at; Start 40; Stop 64
actggcattttcatcacatattaca

SEQ ID NO: 26604 - DNA, 25 bp, Artificial
  probe
  misc_feature (1)..(25): SEQ ID NO: 455; WAN0249M6_at; Start 41; Stop 65
ctggcattttcatcacatattacag

SEQ ID NO: 26605 - DNA, 25 bp, Artificial
  probe
  misc_feature (1)..(25): SEQ ID NO: 455; WAN0249M6_at; Start 38; Stop 62
ttactggcattttcatcacatatta

SEQ ID NO: 26606 - DNA, 25 bp, Artificial
  probe
  misc_feature (1)..(25): SEQ ID NO: 455; WAN0249M6_at; Start 44; Stop 68
gcattttcatcacatattacagcaa

SEQ ID NO: 26607 - DNA, 25 bp, Artificial
  probe
  misc_feature (1)..(25): SEQ ID NO: 455; WAN0249M6_at; Start 11; Stop 35
agtttctcagcttttttctcggtat

SEQ ID NO: 26608 - DNA, 25 bp, Artificial
  probe
  misc_feature (1)..(25): SEQ ID NO: 5409; WAN0249M7_at; Start 4; Stop 28
ctgtaatatgtgatgaaaatgccag

SEQ ID NO: 26609 - DNA, 25 bp, Artificial
  probe
  misc_feature (1)..(25): SEQ ID NO: 5409; WAN0249M7_at; Start 5; Stop 29
tgtaatatgtgatgaaaatgccagt

SEQ ID NO: 26610 - DNA, 25 bp, Artificial
  probe
  misc_feature (1)..(25): SEQ ID NO: 5409; WAN0249M7_at; Start 8; Stop 32
aatatgtgatgaaaatgccagtaat

SEQ ID NO: 26611 - DNA, 25 bp, Artificial
  probe
  misc_feature (1)..(25): SEQ ID NO: 5409; WAN0249M7_at; Start 7; Stop 31
taatatgtgatgaaaatgccagtaa

SEQ ID NO: 26612 - DNA, 25 bp, Artificial
  probe
  misc_feature (1)..(25): SEQ ID NO: 5409; WAN0249M7_at; Start 2; Stop 26
tgctgtaatatgtgatgaaaatgcc

SEQ ID NO: 26613 - DNA, 25 bp, Artificial
  probe
  misc_feature (1)..(25): SEQ ID NO: 5409; WAN0249M7_at; Start 44; Stop 68
aaaagctgagaaacttttcccagct

SEQ ID NO: 26614 - DNA, 25 bp, Artificial
  probe
  misc_feature (1)..(25): SEQ ID NO: 5409; WAN0249M7_at; Start 1; Stop 25
ttgctgtaatatgtgatgaaaatgc

SEQ ID NO: 26615 - DNA, 25 bp, Artificial
  probe
  misc_feature (1)..(25): SEQ ID NO: 5409; WAN0249M7_at; Start 3; Stop 27
gctgtaatatgtgatgaaaatgcca

SEQ ID NO: 26616 - DNA, 25 bp, Artificial
  probe
  misc_feature (1)..(25): SEQ ID NO: 5409; WAN0249M7_at; Start 6; Stop 30
gtaatatgtgatgaaaatgccagta

SEQ ID NO: 26617 - DNA, 25 bp, Artificial
  probe
  misc_feature (1)..(25): SEQ ID NO: 3291; WAN0249M8_at; Start 86; Stop 110
tctatcaagctgtcggtcagttcgt

SEQ ID NO: 26618 - DNA, 25 bp, Artificial
  probe
  misc_feature (1)..(25): SEQ ID NO: 3291; WAN0249M8_at; Start 92; Stop 116
aagctgtcggtcagttcgttcagta

SEQ ID NO: 26619 - DNA, 25 bp, Artificial
  probe
  misc_feature (1)..(25): SEQ ID NO: 3291; WAN0249M8_at; Start 22; Stop 46
gatgagactttttccttgcattcta

SEQ ID NO: 26620 - DNA, 25 bp, Artificial
  probe
  misc_feature (1)..(25): SEQ ID NO: 3291; WAN0249M8_at; Start 59; Stop 83
tatgattaagagagaggtagttgac

SEQ ID NO: 26621 - DNA, 25 bp, Artificial
  probe
  misc_feature (1)..(25): SEQ ID NO: 3291; WAN0249M8_at; Start 34; Stop 58
tccttgcattctattgatatttgat

SEQ ID NO: 26622 - DNA, 25 bp, Artificial
  probe
  misc_feature (1)..(25): SEQ ID NO: 3291; WAN0249M8_at; Start 72; Stop 96
gaggtagttgacattctatcaagct

SEQ ID NO: 26623 - DNA, 25 bp, Artificial
  probe
  misc_feature (1)..(25): SEQ ID NO: 3291; WAN0249M8_at; Start 61; Stop 85
tgattaagagagaggtagttgacat

SEQ ID NO: 26624 - DNA, 25 bp, Artificial
  probe
  misc_feature (1)..(25): SEQ ID NO: 3291; WAN0249M8_at; Start 16; Stop 40
tttagggatgagactttttccttgc

SEQ ID NO: 26625 - DNA, 25 bp, Artificial
  probe
  misc_feature (1)..(25): SEQ ID NO: 3291; WAN0249M8_at; Start 78; Stop 102
gttgacattctatcaagctgtcggt

SEQ ID NO: 26626 - DNA, 25 bp, Artificial
  probe
  misc_feature (1)..(25): SEQ ID NO: 3291; WAN0249M8_at; Start 85; Stop 109
ttctatcaagctgtcggtcagttcg

SEQ ID NO: 26627 - DNA, 25 bp, Artificial
  probe
  misc_feature (1)..(25): SEQ ID NO: 3291; WAN0249M8_at; Start 94; Stop 118
gctgtcggtcagttcgttcagtaca

SEQ ID NO: 26628 - DNA, 25 bp, Artificial
  probe
  misc_feature (1)..(25): SEQ ID NO: 3291; WAN0249M8_at; Start 83; Stop 107
cattctatcaagctgtcggtcagtt

SEQ ID NO: 26629 - DNA, 25 bp, Artificial
  probe
  misc_feature (1)..(25): SEQ ID NO: 3291; WAN0249M8_at; Start 18; Stop 42
tagggatgagactttttccttgcat

SEQ ID NO: 26630 - DNA, 25 bp, Artificial
  probe
  misc_feature (1)..(25): SEQ ID NO: 3291; WAN0249M8_at; Start 96; Stop 120
tgtcggtcagttcgttcagtacaag

SEQ ID NO: 26631 - DNA, 25 bp, Artificial
  probe
  misc_feature (1)..(25): SEQ ID NO: 3291; WAN0249M8_at; Start 91; Stop 115
caagctgtcggtcagttcgttcagt

SEQ ID NO: 26632 - DNA, 25 bp, Artificial
  probe
  misc_feature (1)..(25): SEQ ID NO: 3291; WAN0249M8_at; Start 27; Stop 51
gactttttccttgcattctattgat

SEQ ID NO: 26633 - DNA, 25 bp, Artificial
  probe
  misc_feature (1)..(25): SEQ ID NO: 3291; WAN0249M8_at; Start 76; Stop 100
tagttgacattctatcaagctgtcg

SEQ ID NO: 26634 - DNA, 25 bp, Artificial
  probe
  misc_feature (1)..(25): SEQ ID NO: 3291; WAN0249M8_at; Start 63; Stop 87
attaagagagaggtagttgacattc

SEQ ID NO: 26635 - DNA, 25 bp, Artificial
  probe
  misc_feature (1)..(25): SEQ ID NO: 3291; WAN0249M8_at; Start 25; Stop 49
gagactttttccttgcattctattg

SEQ ID NO: 26636 - DNA, 25 bp, Artificial
  probe
  misc_feature (1)..(25): SEQ ID NO: 3291; WAN0249M8_at; Start 90; Stop 114
tcaagctgtcggtcagttcgttcag

SEQ ID NO: 26637 - DNA, 25 bp, Artificial
  probe
  misc_feature (1)..(25): SEQ ID NO: 3291; WAN0249M8_at; Start 99; Stop 123
cggtcagttcgttcagtacaaggaa

SEQ ID NO: 26638 - DNA, 25 bp, Artificial
  probe
  misc_feature (1)..(25): SEQ ID NO: 3291; WAN0249M8_at; Start 81; Stop 105
gacattctatcaagctgtcggtcag

SEQ ID NO: 26639 - DNA, 25 bp, Artificial
  probe
  misc_feature (1)..(25): SEQ ID NO: 3291; WAN0249M8_at; Start 6; Stop 30
ttggttatggtttagggatgagact

SEQ ID NO: 26640 - DNA, 25 bp, Artificial
  probe
  misc_feature (1)..(25): SEQ ID NO: 3291; WAN0249M8_at; Start 51; Stop 75
tatttgattatgattaagagagagg

SEQ ID NO: 26641 - DNA, 25 bp, Artificial
  probe
  misc_feature (1)..(25): SEQ ID NO: 3291; WAN0249M8_at; Start 11; Stop 35
tatggtttagggatgagactttttc

SEQ ID NO: 26642 - DNA, 25 bp, Artificial
  probe
  misc_feature (1)..(25): SEQ ID NO: 3291; WAN0249M8_at; Start 70; Stop 94
gagaggtagttgacattctatcaag

SEQ ID NO: 26643 - DNA, 25 bp, Artificial
  probe
  misc_feature (1)..(25): SEQ ID NO: 3291; WAN0249M8_at; Start 87; Stop 111
ctatcaagctgtcggtcagttcgtt

SEQ ID NO: 26644 - DNA, 25 bp, Artificial
  probe
  misc_feature (1)..(25): SEQ ID NO: 3291; WAN0249M8_at; Start 97; Stop 121
gtcggtcagttcgttcagtacaagg

SEQ ID NO: 26645 - DNA, 25 bp, Artificial
  probe
  misc_feature (1)..(25): SEQ ID NO: 3291; WAN0249M8_at; Start 65; Stop 89
taagagagaggtagttgacattcta

SEQ ID NO: 26646 - DNA, 25 bp, Artificial
  probe
  misc_feature (1)..(25): SEQ ID NO: 3291; WAN0249M8_at; Start 68; Stop 92
gagagaggtagttgacattctatca

SEQ ID NO: 26647 - DNA, 25 bp, Artificial
  probe
  misc_feature (1)..(25): SEQ ID NO: 3291; WAN0249M8_at; Start 74; Stop 98
ggtagttgacattctatcaagctgt

SEQ ID NO: 26648 - DNA, 25 bp, Artificial
  probe
  misc_feature (1)..(25): SEQ ID NO: 3291; WAN0249M8_at; Start 20; Stop 44
gggatgagactttttccttgcattc

SEQ ID NO: 26649 - DNA, 25 bp, Artificial
  probe
  misc_feature (1)..(25): SEQ ID NO: 3291; WAN0249M8_at; Start 98; Stop 122
tcggtcagttcgttcagtacaagga

SEQ ID NO: 26650 - DNA, 25 bp, Artificial
  probe
  misc_feature (1)..(25): SEQ ID NO: 3291; WAN0249M8_at; Start 2; Stop 26
tatgttggttatggtttagggatga

SEQ ID NO: 26651 - DNA, 25 bp, Artificial
  probe
  misc_feature (1)..(25): SEQ ID NO: 4839; WAN0249M9_at; Start 27; Stop 51
cagcttgatagaatgtcaactacct

SEQ ID NO: 26652 - DNA, 25 bp, Artificial
  probe
  misc_feature (1)..(25): SEQ ID NO: 4839; WAN0249M9_at; Start 78; Stop 102
tagaatgcaaggaaaaagtctcatc

SEQ ID NO: 26653 - DNA, 25 bp, Artificial
  probe
  misc_feature (1)..(25): SEQ ID NO: 4839; WAN0249M9_at; Start 99; Stop 123
catccctaaaccataaccaacatag

SEQ ID NO: 26654 - DNA, 25 bp, Artificial
  probe
  misc_feature (1)..(25): SEQ ID NO: 4839; WAN0249M9_at; Start 23; Stop 47
ccgacagcttgatagaatgtcaact

SEQ ID NO: 26655 - DNA, 25 bp, Artificial
  probe
  misc_feature (1)..(25): SEQ ID NO: 4839; WAN0249M9_at; Start 8; Stop 32
tactgaacgaactgaccgacagctt

SEQ ID NO: 26656 - DNA, 25 bp, Artificial
  probe
  misc_feature (1)..(25): SEQ ID NO: 4839; WAN0249M9_at; Start 80; Stop 104
gaatgcaaggaaaaagtctcatccc

SEQ ID NO: 26657 - DNA, 25 bp, Artificial
  probe
  misc_feature (1)..(25): SEQ ID NO: 4839; WAN0249M9_at; Start 9; Stop 33
actgaacgaactgaccgacagcttg

SEQ ID NO: 26658 - DNA, 25 bp, Artificial
  probe
  misc_feature (1)..(25): SEQ ID NO: 4839; WAN0249M9_at; Start 6; Stop 30
tgtactgaacgaactgaccgacagc

SEQ ID NO: 26659 - DNA, 25 bp, Artificial
  probe
  misc_feature (1)..(25): SEQ ID NO: 4839; WAN0249M9_at; Start 3; Stop 27
ccttgtactgaacgaactgaccgac

SEQ ID NO: 26660 - DNA, 25 bp, Artificial
  probe
  misc_feature (1)..(25): SEQ ID NO: 4839; WAN0249M9_at; Start 20; Stop 44
tgaccgacagcttgatagaatgtca

SEQ ID NO: 26661 - DNA, 25 bp, Artificial
  probe
  misc_feature (1)..(25): SEQ ID NO: 4839; WAN0249M9_at; Start 84; Stop 108
gcaaggaaaaagtctcatccctaaa

SEQ ID NO: 26662 - DNA, 25 bp, Artificial
  probe
  misc_feature (1)..(25): SEQ ID NO: 4839; WAN0249M9_at; Start 11; Stop 35
tgaacgaactgaccgacagcttgat

SEQ ID NO: 26663 - DNA, 25 bp, Artificial
  probe
  misc_feature (1)..(25): SEQ ID NO: 4839; WAN0249M9_at; Start 21; Stop 45
gaccgacagcttgatagaatgtcaa

SEQ ID NO: 26664 - DNA, 25 bp, Artificial
  probe
  misc_feature (1)..(25): SEQ ID NO: 4839; WAN0249M9_at; Start 33; Stop 57
gatagaatgtcaactacctctctct

SEQ ID NO: 26665 - DNA, 25 bp, Artificial
  probe
  misc_feature (1)..(25): SEQ ID NO: 4839; WAN0249M9_at; Start 13; Stop 37
aacgaactgaccgacagcttgatag

SEQ ID NO: 26666 - DNA, 25 bp, Artificial
  probe
  misc_feature (1)..(25): SEQ ID NO: 4839; WAN0249M9_at; Start 25; Stop 49
gacagcttgatagaatgtcaactac

SEQ ID NO: 26667 - DNA, 25 bp, Artificial
  probe
  misc_feature (1)..(25): SEQ ID NO: 4839; WAN0249M9_at; Start 61; Stop 85
tcataatcaaatatcaatagaatgc

SEQ ID NO: 26668 - DNA, 25 bp, Artificial
  probe
  misc_feature (1)..(25): SEQ ID NO: 4839; WAN0249M9_at; Start 47; Stop 71
tacctctctcttaatcataatcaaa

SEQ ID NO: 26669 - DNA, 25 bp, Artificial
  probe
  misc_feature (1)..(25): SEQ ID NO: 4839; WAN0249M9_at; Start 41; Stop 65
gtcaactacctctctcttaatcata

SEQ ID NO: 26670 - DNA, 25 bp, Artificial
  probe
  misc_feature (1)..(25): SEQ ID NO: 4839; WAN0249M9_at; Start 7; Stop 31
gtactgaacgaactgaccgacagct

SEQ ID NO: 26671 - DNA, 25 bp, Artificial
  probe
  misc_feature (1)..(25): SEQ ID NO: 4839; WAN0249M9_at; Start 18; Stop 42
actgaccgacagcttgatagaatgt

SEQ ID NO: 26672 - DNA, 25 bp, Artificial
  probe
  misc_feature (1)..(25): SEQ ID NO: 4839; WAN0249M9_at; Start 15; Stop 39
cgaactgaccgacagcttgatagaa

SEQ ID NO: 26673 - DNA, 25 bp, Artificial
  probe
  misc_feature (1)..(25): SEQ ID NO: 4839; WAN0249M9_at; Start 16; Stop 40
gaactgaccgacagcttgatagaat

SEQ ID NO: 26674 - DNA, 25 bp, Artificial
  probe
  misc_feature (1)..(25): SEQ ID NO: 4839; WAN0249M9_at; Start 75; Stop 99
caatagaatgcaaggaaaaagtctc

SEQ ID NO: 26675 - DNA, 25 bp, Artificial
  probe
  misc_feature (1)..(25): SEQ ID NO: 4839; WAN0249M9_at; Start 1; Stop 25
ttccttgtactgaacgaactgaccg

SEQ ID NO: 26676 - DNA, 25 bp, Artificial
  probe
  misc_feature (1)..(25): SEQ ID NO: 4839; WAN0249M9_at; Start 89; Stop 113
gaaaaagtctcatccctaaaccata

SEQ ID NO: 26677 - DNA, 25 bp, Artificial
  probe
  misc_feature (1)..(25): SEQ ID NO: 4839; WAN0249M9_at; Start 4; Stop 28
cttgtactgaacgaactgaccgaca

SEQ ID NO: 26678 - DNA, 25 bp, Artificial
  probe
  misc_feature (1)..(25): SEQ ID NO: 4839; WAN0249M9_at; Start 37; Stop 61
gaatgtcaactacctctctcttaat

SEQ ID NO: 26679 - DNA, 25 bp, Artificial
  probe
  misc_feature (1)..(25): SEQ ID NO: 4839; WAN0249M9_at; Start 83; Stop 107
tgcaaggaaaaagtctcatccctaa

SEQ ID NO: 26680 - DNA, 25 bp, Artificial
  probe
  misc_feature (1)..(25): SEQ ID NO: 4839; WAN0249M9_at; Start 93; Stop 117
aagtctcatccctaaaccataacca

SEQ ID NO: 26681 - DNA, 25 bp, Artificial
  probe
  misc_feature (1)..(25): SEQ ID NO: 4839; WAN0249M9_at; Start 5; Stop 29
ttgtactgaacgaactgaccgacag

SEQ ID NO: 26682 - DNA, 25 bp, Artificial
  probe
  misc_feature (1)..(25): SEQ ID NO: 4839; WAN0249M9_at; Start 29; Stop 53
gcttgatagaatgtcaactacctct

SEQ ID NO: 26683 - DNA, 25 bp, Artificial
  probe
  misc_feature (1)..(25): SEQ ID NO: 4839; WAN0249M9_at; Start 2; Stop 26
tccttgtactgaacgaactgaccga

SEQ ID NO: 26684 - DNA, 25 bp, Artificial
  probe
  misc_feature (1)..(25): SEQ ID NO: 4839; WAN0249M9_at; Start 67; Stop 91
tcaaatatcaatagaatgcaaggaa

SEQ ID NO: 26685 - DNA, 25 bp, Artificial
  probe
  misc_feature (1)..(25): SEQ ID NO: 307; WAN0249MA_at; Start 34; Stop 58
gggagtctcttaatcttattgacta

SEQ ID NO: 26686 - DNA, 25 bp, Artificial
  probe
  misc_feature (1)..(25): SEQ ID NO: 307; WAN0249MA_at; Start 25; Stop 49
aacgatttagggagtctcttaatct

SEQ ID NO: 26687 - DNA, 25 bp, Artificial
  probe
  misc_feature (1)..(25): SEQ ID NO: 307; WAN0249MA_at; Start 61; Stop 85
agactgaaggttctctaacttgagc

SEQ ID NO: 26688 - DNA, 25 bp, Artificial
  probe
  misc_feature (1)..(25): SEQ ID NO: 307; WAN0249MA_at; Start 36; Stop 60
gagtctcttaatcttattgactaag

SEQ ID NO: 26689 - DNA, 25 bp, Artificial
  probe
  misc_feature (1)..(25): SEQ ID NO: 307; WAN0249MA_at; Start 56; Stop 80
ctaagagactgaaggttctctaact

SEQ ID NO: 26690 - DNA, 25 bp, Artificial
  probe
  misc_feature (1)..(25): SEQ ID NO: 307; WAN0249MA_at; Start 62; Stop 86
gactgaaggttctctaacttgagct

SEQ ID NO: 26691 - DNA, 25 bp, Artificial
  probe
  misc_feature (1)..(25): SEQ ID NO: 307; WAN0249MA_at; Start 51; Stop 75
attgactaagagactgaaggttctc

SEQ ID NO: 26692 - DNA, 25 bp, Artificial
  probe
  misc_feature (1)..(25): SEQ ID NO: 307; WAN0249MA_at; Start 22; Stop 46
gataacgatttagggagtctcttaa

SEQ ID NO: 26693 - DNA, 25 bp, Artificial
  probe
  misc_feature (1)..(25): SEQ ID NO: 307; WAN0249MA_at; Start 63; Stop 87
actgaaggttctctaacttgagctt

SEQ ID NO: 26694 - DNA, 25 bp, Artificial
  probe
  misc_feature (1)..(25): SEQ ID NO: 307; WAN0249MA_at; Start 19; Stop 43
tgtgataacgatttagggagtctct

SEQ ID NO: 26695 - DNA, 25 bp, Artificial
  probe
  misc_feature (1)..(25): SEQ ID NO: 307; WAN0249MA_at; Start 16; Stop 40
aaatgtgataacgatttagggagtc

SEQ ID NO: 26696 - DNA, 25 bp, Artificial
  probe
  misc_feature (1)..(25): SEQ ID NO: 307; WAN0249MA_at; Start 21; Stop 45
tgataacgatttagggagtctctta

SEQ ID NO: 26697 - DNA, 25 bp, Artificial
  probe
  misc_feature (1)..(25): SEQ ID NO: 307; WAN0249MA_at; Start 69; Stop 93
ggttctctaacttgagcttttatgt

SEQ ID NO: 26698 - DNA, 25 bp, Artificial
  probe
  misc_feature (1)..(25): SEQ ID NO: 307; WAN0249MA_at; Start 14; Stop 38
taaaatgtgataacgatttagggag

SEQ ID NO: 26699 - DNA, 25 bp, Artificial
  probe
  misc_feature (1)..(25): SEQ ID NO: 307; WAN0249MA_at; Start 27; Stop 51
cgatttagggagtctcttaatctta

SEQ ID NO: 26700 - DNA, 25 bp, Artificial
  probe
  misc_feature (1)..(25): SEQ ID NO: 307; WAN0249MA_at; Start 64; Stop 88
ctgaaggttctctaacttgagcttt

SEQ ID NO: 26701 - DNA, 25 bp, Artificial
  probe
  misc_feature (1)..(25): SEQ ID NO: 307; WAN0249MA_at; Start 32; Stop 56
tagggagtctcttaatcttattgac

SEQ ID NO: 26702 - DNA, 25 bp, Artificial
  probe
  misc_feature (1)..(25): SEQ ID NO: 307; WAN0249MA_at; Start 44; Stop 68
taatcttattgactaagagactgaa

SEQ ID NO: 26703 - DNA, 25 bp, Artificial
  probe
  misc_feature (1)..(25): SEQ ID NO: 307; WAN0249MA_at; Start 66; Stop 90
gaaggttctctaacttgagctttta

SEQ ID NO: 26704 - DNA, 25 bp, Artificial
  probe
  misc_feature (1)..(25): SEQ ID NO: 307; WAN0249MA_at; Start 57; Stop 81
taagagactgaaggttctctaactt

SEQ ID NO: 26705 - DNA, 25 bp, Artificial
  probe
  misc_feature (1)..(25): SEQ ID NO: 307; WAN0249MA_at; Start 47; Stop 71
tcttattgactaagagactgaaggt

SEQ ID NO: 26706 - DNA, 25 bp, Artificial
  probe
  misc_feature (1)..(25): SEQ ID NO: 307; WAN0249MA_at; Start 55; Stop 79
actaagagactgaaggttctctaac

SEQ ID NO: 26707 - DNA, 25 bp, Artificial
  probe
  misc_feature (1)..(25): SEQ ID NO: 307; WAN0249MA_at; Start 24; Stop 48
taacgatttagggagtctcttaatc

SEQ ID NO: 26708 - DNA, 25 bp, Artificial
  probe
  misc_feature (1)..(25): SEQ ID NO: 307; WAN0249MA_at; Start 54; Stop 78
gactaagagactgaaggttctctaa

SEQ ID NO: 26709 - DNA, 25 bp, Artificial
  probe
  misc_feature (1)..(25): SEQ ID NO: 307; WAN0249MA_at; Start 49; Stop 73
ttattgactaagagactgaaggttc

SEQ ID NO: 26710 - DNA, 25 bp, Artificial
  probe
  misc_feature (1)..(25): SEQ ID NO: 307; WAN0249MA_at; Start 53; Stop 77
tgactaagagactgaaggttctcta

SEQ ID NO: 26711 - DNA, 25 bp, Artificial
  probe
  misc_feature (1)..(25): SEQ ID NO: 307; WAN0249MA_at; Start 18; Stop 42
atgtgataacgatttagggagtctc

SEQ ID NO: 26712 - DNA, 25 bp, Artificial
  probe
  misc_feature (1)..(25): SEQ ID NO: 307; WAN0249MA_at; Start 71; Stop 95
ttctctaacttgagcttttatgtta

SEQ ID NO: 26713 - DNA, 25 bp, Artificial
  probe
  misc_feature (1)..(25): SEQ ID NO: 307; WAN0249MA_at; Start 60; Stop 84
gagactgaaggttctctaacttgag

SEQ ID NO: 26714 - DNA, 25 bp, Artificial
  probe
  misc_feature (1)..(25): SEQ ID NO: 307; WAN0249MA_at; Start 42; Stop 66
cttaatcttattgactaagagactg

SEQ ID NO: 26715 - DNA, 25 bp, Artificial
  probe
  misc_feature (1)..(25): SEQ ID NO: 307; WAN0249MA_at; Start 52; Stop 76
ttgactaagagactgaaggttctct

SEQ ID NO: 26716 - DNA, 25 bp, Artificial
  probe
  misc_feature (1)..(25): SEQ ID NO: 307; WAN0249MA_at; Start 6; Stop 30
ctcctttttaaaatgtgataacgat

SEQ ID NO: 26717 - DNA, 25 bp, Artificial
  probe
  misc_feature (1)..(25): SEQ ID NO: 307; WAN0249MA_at; Start 50; Stop 74
tattgactaagagactgaaggttct

SEQ ID NO: 26718 - DNA, 25 bp, Artificial
  probe
  misc_feature (1)..(25): SEQ ID NO: 307; WAN0249MA_at; Start 20; Stop 44
gtgataacgatttagggagtctctt

SEQ ID NO: 26719 - DNA, 25 bp, Artificial
  probe
  misc_feature (1)..(25): SEQ ID NO: 4427; WAN0249MB_at; Start 16; Stop 40
agttagagaaccttcagtctcttag

SEQ ID NO: 26720 - DNA, 25 bp, Artificial
  probe
  misc_feature (1)..(25): SEQ ID NO: 4427; WAN0249MB_at; Start 6; Stop 30
taaaagctcaagttagagaaccttc

SEQ ID NO: 26721 - DNA, 25 bp, Artificial
  probe
  misc_feature (1)..(25): SEQ ID NO: 4427; WAN0249MB_at; Start 51; Stop 75
taagagactccctaaatcgttatca

SEQ ID NO: 26722 - DNA, 25 bp, Artificial
  probe
  misc_feature (1)..(25): SEQ ID NO: 4427; WAN0249MB_at; Start 13; Stop 37
tcaagttagagaaccttcagtctct

SEQ ID NO: 26723 - DNA, 25 bp, Artificial
  probe
  misc_feature (1)..(25): SEQ ID NO: 4427; WAN0249MB_at; Start 21; Stop 45
gagaaccttcagtctcttagtcaat

SEQ ID NO: 26724 - DNA, 25 bp, Artificial
  probe
  misc_feature (1)..(25): SEQ ID NO: 4427; WAN0249MB_at; Start 10; Stop 34
agctcaagttagagaaccttcagtc

SEQ ID NO: 26725 - DNA, 25 bp, Artificial
  probe
  misc_feature (1)..(25): SEQ ID NO: 4427; WAN0249MB_at; Start 56; Stop 80
gactccctaaatcgttatcacattt

SEQ ID NO: 26726 - DNA, 25 bp, Artificial
  probe
  misc_feature (1)..(25): SEQ ID NO: 4427; WAN0249MB_at; Start 19; Stop 43
tagagaaccttcagtctcttagtca

SEQ ID NO: 26727 - DNA, 25 bp, Artificial
  probe
  misc_feature (1)..(25): SEQ ID NO: 4427; WAN0249MB_at; Start 7; Stop 31
aaaagctcaagttagagaaccttca

SEQ ID NO: 26728 - DNA, 25 bp, Artificial
  probe
  misc_feature (1)..(25): SEQ ID NO: 4427; WAN0249MB_at; Start 23; Stop 47
gaaccttcagtctcttagtcaataa

SEQ ID NO: 26729 - DNA, 25 bp, Artificial
  probe
  misc_feature (1)..(25): SEQ ID NO: 4427; WAN0249MB_at; Start 41; Stop 65
tcaataagattaagagactccctaa

SEQ ID NO: 26730 - DNA, 25 bp, Artificial
  probe
  misc_feature (1)..(25): SEQ ID NO: 4427; WAN0249MB_at; Start 1; Stop 25
taacataaaagctcaagttagagaa

SEQ ID NO: 26731 - DNA, 25 bp, Artificial
  probe
  misc_feature (1)..(25): SEQ ID NO: 4427; WAN0249MB_at; Start 42; Stop 66
caataagattaagagactccctaaa

SEQ ID NO: 26732 - DNA, 25 bp, Artificial
  probe
  misc_feature (1)..(25): SEQ ID NO: 4427; WAN0249MB_at; Start 53; Stop 77
agagactccctaaatcgttatcaca

SEQ ID NO: 26733 - DNA, 25 bp, Artificial
  probe
  misc_feature (1)..(25): SEQ ID NO: 4427; WAN0249MB_at; Start 8; Stop 32
aaagctcaagttagagaaccttcag

SEQ ID NO: 26734 - DNA, 25 bp, Artificial
  probe
  misc_feature (1)..(25): SEQ ID NO: 4427; WAN0249MB_at; Start 54; Stop 78
gagactccctaaatcgttatcacat

SEQ ID NO: 26735 - DNA, 25 bp, Artificial
  probe
  misc_feature (1)..(25): SEQ ID NO: 4427; WAN0249MB_at; Start 24; Stop 48
aaccttcagtctcttagtcaataag

SEQ ID NO: 26736 - DNA, 25 bp, Artificial
  probe
  misc_feature (1)..(25): SEQ ID NO: 4427; WAN0249MB_at; Start 48; Stop 72
gattaagagactccctaaatcgtta

SEQ ID NO: 26737 - DNA, 25 bp, Artificial
  probe
  misc_feature (1)..(25): SEQ ID NO: 4427; WAN0249MB_at; Start 3; Stop 27
acataaaagctcaagttagagaacc

SEQ ID NO: 26738 - DNA, 25 bp, Artificial
  probe
  misc_feature (1)..(25): SEQ ID NO: 4427; WAN0249MB_at; Start 40; Stop 64
gtcaataagattaagagactcccta

SEQ ID NO: 26739 - DNA, 25 bp, Artificial
  probe
  misc_feature (1)..(25): SEQ ID NO: 4427; WAN0249MB_at; Start 12; Stop 36
ctcaagttagagaaccttcagtctc

SEQ ID NO: 26740 - DNA, 25 bp, Artificial
  probe
  misc_feature (1)..(25): SEQ ID NO: 4427; WAN0249MB_at; Start 11; Stop 35
gctcaagttagagaaccttcagtct

SEQ ID NO: 26741 - DNA, 25 bp, Artificial
  probe
  misc_feature (1)..(25): SEQ ID NO: 4427; WAN0249MB_at; Start 38; Stop 62
tagtcaataagattaagagactccc

SEQ ID NO: 26742 - DNA, 25 bp, Artificial
  probe
  misc_feature (1)..(25): SEQ ID NO: 4427; WAN0249MB_at; Start 14; Stop 38
caagttagagaaccttcagtctctt

SEQ ID NO: 26743 - DNA, 25 bp, Artificial
  probe
  misc_feature (1)..(25): SEQ ID NO: 4427; WAN0249MB_at; Start 9; Stop 33
aagctcaagttagagaaccttcagt

SEQ ID NO: 26744 - DNA, 25 bp, Artificial
  probe
  misc_feature (1)..(25): SEQ ID NO: 4427; WAN0249MB_at; Start 30; Stop 54
cagtctcttagtcaataagattaag

SEQ ID NO: 26745 - DNA, 25 bp, Artificial
  probe
  misc_feature (1)..(25): SEQ ID NO: 4427; WAN0249MB_at; Start 67; Stop 91
tcgttatcacattttaaaaaggaga

SEQ ID NO: 26746 - DNA, 25 bp, Artificial
  probe
  misc_feature (1)..(25): SEQ ID NO: 4427; WAN0249MB_at; Start 50; Stop 74
ttaagagactccctaaatcgttatc

SEQ ID NO: 26747 - DNA, 25 bp, Artificial
  probe
  misc_feature (1)..(25): SEQ ID NO: 4427; WAN0249MB_at; Start 45; Stop 69
taagattaagagactccctaaatcg

SEQ ID NO: 26748 - DNA, 25 bp, Artificial
  probe
  misc_feature (1)..(25): SEQ ID NO: 4427; WAN0249MB_at; Start 66; Stop 90
atcgttatcacattttaaaaaggag

SEQ ID NO: 26749 - DNA, 25 bp, Artificial
  probe
  misc_feature (1)..(25): SEQ ID NO: 4427; WAN0249MB_at; Start 26; Stop 50
ccttcagtctcttagtcaataagat

SEQ ID NO: 26750 - DNA, 25 bp, Artificial
  probe
  misc_feature (1)..(25): SEQ ID NO: 4427; WAN0249MB_at; Start 4; Stop 28
cataaaagctcaagttagagaacct

SEQ ID NO: 26751 - DNA, 25 bp, Artificial
  probe
  misc_feature (1)..(25): SEQ ID NO: 4427; WAN0249MB_at; Start 52; Stop 76
aagagactccctaaatcgttatcac

SEQ ID NO: 26752 - DNA, 25 bp, Artificial
  probe
  misc_feature (1)..(25): SEQ ID NO: 4427; WAN0249MB_at; Start 17; Stop 41
gttagagaaccttcagtctcttagt

SEQ ID NO: 26753 - DNA, 25 bp, Artificial
  probe
  misc_feature (1)..(25): SEQ ID NO: 3796; WAN0249MC_at; Start 76; Stop 100
caatttaataaatacaacaaggaga

SEQ ID NO: 26754 - DNA, 25 bp, Artificial
  probe
  misc_feature (1)..(25): SEQ ID NO: 3796; WAN0249MC_at; Start 81; Stop 105
taataaatacaacaaggagagagca

SEQ ID NO: 26755 - DNA, 25 bp, Artificial
  probe
  misc_feature (1)..(25): SEQ ID NO: 3796; WAN0249MC_at; Start 89; Stop 113
acaacaaggagagagcaacaagact

SEQ ID NO: 26756 - DNA, 25 bp, Artificial
  probe
  misc_feature (1)..(25): SEQ ID NO: 3796; WAN0249MC_at; Start 88; Stop 112
tacaacaaggagagagcaacaagac

SEQ ID NO: 26757 - DNA, 25 bp, Artificial
  probe
  misc_feature (1)..(25): SEQ ID NO: 3796; WAN0249MC_at; Start 107; Stop 131
caagactttctcctttgttatccta

SEQ ID NO: 26758 - DNA, 25 bp, Artificial
  probe
  misc_feature (1)..(25): SEQ ID NO: 3796; WAN0249MC_at; Start 100; Stop 124
agagcaacaagactttctcctttgt

SEQ ID NO: 26759 - DNA, 25 bp, Artificial
  probe
  misc_feature (1)..(25): SEQ ID NO: 3796; WAN0249MC_at; Start 24; Stop 48
ctgcggatataaatgtaacattatt

SEQ ID NO: 26760 - DNA, 25 bp, Artificial
  probe
  misc_feature (1)..(25): SEQ ID NO: 3796; WAN0249MC_at; Start 93; Stop 117
caaggagagagcaacaagactttct

SEQ ID NO: 26761 - DNA, 25 bp, Artificial
  probe
  misc_feature (1)..(25): SEQ ID NO: 3796; WAN0249MC_at; Start 90; Stop 114
caacaaggagagagcaacaagactt

SEQ ID NO: 26762 - DNA, 25 bp, Artificial
  probe
  misc_feature (1)..(25): SEQ ID NO: 3796; WAN0249MC_at; Start 53; Stop 77
taatctgtcaataaaatttctgaca

SEQ ID NO: 26763 - DNA, 25 bp, Artificial
  probe
  misc_feature (1)..(25): SEQ ID NO: 3796; WAN0249MC_at; Start 56; Stop 80
tctgtcaataaaatttctgacaatt

SEQ ID NO: 26764 - DNA, 25 bp, Artificial
  probe
  misc_feature (1)..(25): SEQ ID NO: 3796; WAN0249MC_at; Start 73; Stop 97
tgacaatttaataaatacaacaagg

SEQ ID NO: 26765 - DNA, 25 bp, Artificial
  probe
  misc_feature (1)..(25): SEQ ID NO: 3796; WAN0249MC_at; Start 85; Stop 109
aaatacaacaaggagagagcaacaa

SEQ ID NO: 26766 - DNA, 25 bp, Artificial
  probe
  misc_feature (1)..(25): SEQ ID NO: 3796; WAN0249MC_at; Start 41; Stop 65
acattatttttctaatctgtcaata

SEQ ID NO: 26767 - DNA, 25 bp, Artificial
  probe
  misc_feature (1)..(25): SEQ ID NO: 3796; WAN0249MC_at; Start 91; Stop 115
aacaaggagagagcaacaagacttt

SEQ ID NO: 26768 - DNA, 25 bp, Artificial
  probe
  misc_feature (1)..(25): SEQ ID NO: 3796; WAN0249MC_at; Start 77; Stop 101
aatttaataaatacaacaaggagag

SEQ ID NO: 26769 - DNA, 25 bp, Artificial
  probe
  misc_feature (1)..(25): SEQ ID NO: 3796; WAN0249MC_at; Start 87; Stop 111
atacaacaaggagagagcaacaaga

SEQ ID NO: 26770 - DNA, 25 bp, Artificial
  probe
  misc_feature (1)..(25): SEQ ID NO: 3796; WAN0249MC_at; Start 94; Stop 118
aaggagagagcaacaagactttctc

SEQ ID NO: 26771 - DNA, 25 bp, Artificial
  probe
  misc_feature (1)..(25): SEQ ID NO: 3796; WAN0249MC_at; Start 86; Stop 110
aatacaacaaggagagagcaacaag

SEQ ID NO: 26772 - DNA, 25 bp, Artificial
  probe
  misc_feature (1)..(25): SEQ ID NO: 3796; WAN0249MC_at; Start 51; Stop 75
tctaatctgtcaataaaatttctga

SEQ ID NO: 26773 - DNA, 25 bp, Artificial
  probe
  misc_feature (1)..(25): SEQ ID NO: 3796; WAN0249MC_at; Start 101; Stop 125
gagcaacaagactttctcctttgtt

SEQ ID NO: 26774 - DNA, 25 bp, Artificial
  probe
  misc_feature (1)..(25): SEQ ID NO: 3796; WAN0249MC_at; Start 110; Stop 134
gactttctcctttgttatcctattc

SEQ ID NO: 26775 - DNA, 25 bp, Artificial
  probe
  misc_feature (1)..(25): SEQ ID NO: 3796; WAN0249MC_at; Start 103; Stop 127
gcaacaagactttctcctttgttat

SEQ ID NO: 26776 - DNA, 25 bp, Artificial
  probe
  misc_feature (1)..(25): SEQ ID NO: 3796; WAN0249MC_at; Start 99; Stop 123
gagagcaacaagactttctcctttg

SEQ ID NO: 26777 - DNA, 25 bp, Artificial
  probe
  misc_feature (1)..(25): SEQ ID NO: 3796; WAN0249MC_at; Start 79; Stop 103
tttaataaatacaacaaggagagag

SEQ ID NO: 26778 - DNA, 25 bp, Artificial
  probe
  misc_feature (1)..(25): SEQ ID NO: 3796; WAN0249MC_at; Start 92; Stop 116
acaaggagagagcaacaagactttc

SEQ ID NO: 26779 - DNA, 25 bp, Artificial
  probe
  misc_feature (1)..(25): SEQ ID NO: 3796; WAN0249MC_at; Start 80; Stop 104
ttaataaatacaacaaggagagagc

SEQ ID NO: 26780 - DNA, 25 bp, Artificial
  probe
  misc_feature (1)..(25): SEQ ID NO: 3796; WAN0249MC_at; Start 84; Stop 108
taaatacaacaaggagagagcaaca

SEQ ID NO: 26781 - DNA, 25 bp, Artificial
  probe
  misc_feature (1)..(25): SEQ ID NO: 3796; WAN0249MC_at; Start 112; Stop 136
ctttctcctttgttatcctattcta

SEQ ID NO: 26782 - DNA, 25 bp, Artificial
  probe
  misc_feature (1)..(25): SEQ ID NO: 3796; WAN0249MC_at; Start 95; Stop 119
aggagagagcaacaagactttctcc

SEQ ID NO: 26783 - DNA, 25 bp, Artificial
  probe
  misc_feature (1)..(25): SEQ ID NO: 3796; WAN0249MC_at; Start 82; Stop 106
aataaatacaacaaggagagagcaa

SEQ ID NO: 26784 - DNA, 25 bp, Artificial
  probe
  misc_feature (1)..(25): SEQ ID NO: 3796; WAN0249MC_at; Start 83; Stop 107
ataaatacaacaaggagagagcaac

SEQ ID NO: 26785 - DNA, 25 bp, Artificial
  probe
  misc_feature (1)..(25): SEQ ID NO: 3796; WAN0249MC_at; Start 97; Stop 121
gagagagcaacaagactttctcctt

SEQ ID NO: 26786 - DNA, 25 bp, Artificial
  probe
  misc_feature (1)..(25): SEQ ID NO: 3796; WAN0249MC_at; Start 96; Stop 120
ggagagagcaacaagactttctcct

SEQ ID NO: 26787 - DNA, 25 bp, Artificial
  probe
  misc_feature (1)..(25): SEQ ID NO: 4486; WAN0249MD_at; Start 11; Stop 35
taacaaaggagaaagtcttgttgct

SEQ ID NO: 26788 - DNA, 25 bp, Artificial
  probe
  misc_feature (1)..(25): SEQ ID NO: 4486; WAN0249MD_at; Start 33; Stop 57
gctctctccttgttgtatttattaa

SEQ ID NO: 26789 - DNA, 25 bp, Artificial
  probe
  misc_feature (1)..(25): SEQ ID NO: 4486; WAN0249MD_at; Start 89; Stop 113
aataatgttacatttatatccgcag

SEQ ID NO: 26790 - DNA, 25 bp, Artificial
  probe
  misc_feature (1)..(25): SEQ ID NO: 4486; WAN0249MD_at; Start 20; Stop 44
agaaagtcttgttgctctctccttg

SEQ ID NO: 26791 - DNA, 25 bp, Artificial
  probe
  misc_feature (1)..(25): SEQ ID NO: 4486; WAN0249MD_at; Start 27; Stop 51
cttgttgctctctccttgttgtatt

SEQ ID NO: 26792 - DNA, 25 bp, Artificial
  probe
  misc_feature (1)..(25): SEQ ID NO: 4486; WAN0249MD_at; Start 22; Stop 46
aaagtcttgttgctctctccttgtt

SEQ ID NO: 26793 - DNA, 25 bp, Artificial
  probe
  misc_feature (1)..(25): SEQ ID NO: 4486; WAN0249MD_at; Start 25; Stop 49
gtcttgttgctctctccttgttgta

SEQ ID NO: 26794 - DNA, 25 bp, Artificial
  probe
  misc_feature (1)..(25): SEQ ID NO: 4486; WAN0249MD_at; Start 3; Stop 27
gaataggataacaaaggagaaagtc

SEQ ID NO: 26795 - DNA, 25 bp, Artificial
  probe
  misc_feature (1)..(25): SEQ ID NO: 4486; WAN0249MD_at; Start 1; Stop 25
tagaataggataacaaaggagaaag

SEQ ID NO: 26796 - DNA, 25 bp, Artificial
  probe
  misc_feature (1)..(25): SEQ ID NO: 4486; WAN0249MD_at; Start 16; Stop 40
aaggagaaagtcttgttgctctctc

SEQ ID NO: 26797 - DNA, 25 bp, Artificial
  probe
  misc_feature (1)..(25): SEQ ID NO: 4486; WAN0249MD_at; Start 14; Stop 38
caaaggagaaagtcttgttgctctc

SEQ ID NO: 26798 - DNA, 25 bp, Artificial
  probe
  misc_feature (1)..(25): SEQ ID NO: 4486; WAN0249MD_at; Start 29; Stop 53
tgttgctctctccttgttgtattta

SEQ ID NO: 26799 - DNA, 25 bp, Artificial
  probe
  misc_feature (1)..(25): SEQ ID NO: 4486; WAN0249MD_at; Start 76; Stop 100
gacagattagaaaaataatgttaca

SEQ ID NO: 26800 - DNA, 25 bp, Artificial
  probe
  misc_feature (1)..(25): SEQ ID NO: 4486; WAN0249MD_at; Start 63; Stop 87
cagaaattttattgacagattagaa

SEQ ID NO: 26801 - DNA, 25 bp, Artificial
  probe
  misc_feature (1)..(25): SEQ ID NO: 4486; WAN0249MD_at; Start 18; Stop 42
ggagaaagtcttgttgctctctcct

SEQ ID NO: 26802 - DNA, 25 bp, Artificial
  probe
  misc_feature (1)..(25): SEQ ID NO: 4486; WAN0249MD_at; Start 62; Stop 86
tcagaaattttattgacagattaga

SEQ ID NO: 26803 - DNA, 25 bp, Artificial
  probe
  misc_feature (1)..(25): SEQ ID NO: 4486; WAN0249MD_at; Start 72; Stop 96
tattgacagattagaaaaataatgt

SEQ ID NO: 26804 - DNA, 25 bp, Artificial
  probe
  misc_feature (1)..(25): SEQ ID NO: 4486; WAN0249MD_at; Start 4; Stop 28
aataggataacaaaggagaaagtct

SEQ ID NO: 26805 - DNA, 25 bp, Artificial
  probe
  misc_feature (1)..(25): SEQ ID NO: 4486; WAN0249MD_at; Start 7; Stop 31
aggataacaaaggagaaagtcttgt

SEQ ID NO: 26806 - DNA, 25 bp, Artificial
  probe
  misc_feature (1)..(25): SEQ ID NO: 4486; WAN0249MD_at; Start 23; Stop 47
aagtcttgttgctctctccttgttg

SEQ ID NO: 26807 - DNA, 25 bp, Artificial
  probe
  misc_feature (1)..(25): SEQ ID NO: 4486; WAN0249MD_at; Start 9; Stop 33
gataacaaaggagaaagtcttgttg

SEQ ID NO: 26808 - DNA, 25 bp, Artificial
  probe
  misc_feature (1)..(25): SEQ ID NO: 4486; WAN0249MD_at; Start 6; Stop 30
taggataacaaaggagaaagtcttg

SEQ ID NO: 26809 - DNA, 25 bp, Artificial
  probe
  misc_feature (1)..(25): SEQ ID NO: 4486; WAN0249MD_at; Start 30; Stop 54
gttgctctctccttgttgtatttat

SEQ ID NO: 26810 - DNA, 25 bp, Artificial
  probe
  misc_feature (1)..(25): SEQ ID NO: 4486; WAN0249MD_at; Start 17; Stop 41
aggagaaagtcttgttgctctctcc

SEQ ID NO: 26811 - DNA, 25 bp, Artificial
  probe
  misc_feature (1)..(25): SEQ ID NO: 4486; WAN0249MD_at; Start 35; Stop 59
tctctccttgttgtatttattaaat

SEQ ID NO: 26812 - DNA, 25 bp, Artificial
  probe
  misc_feature (1)..(25): SEQ ID NO: 4486; WAN0249MD_at; Start 12; Stop 36
aacaaaggagaaagtcttgttgctc

SEQ ID NO: 26813 - DNA, 25 bp, Artificial
  probe
  misc_feature (1)..(25): SEQ ID NO: 4486; WAN0249MD_at; Start 13; Stop 37
acaaaggagaaagtcttgttgctct

SEQ ID NO: 26814 - DNA, 25 bp, Artificial
  probe
  misc_feature (1)..(25): SEQ ID NO: 4486; WAN0249MD_at; Start 56; Stop 80
aaattgtcagaaattttattgacag

SEQ ID NO: 26815 - DNA, 25 bp, Artificial
  probe
  misc_feature (1)..(25): SEQ ID NO: 4486; WAN0249MD_at; Start 26; Stop 50
tcttgttgctctctccttgttgtat

SEQ ID NO: 26816 - DNA, 25 bp, Artificial
  probe
  misc_feature (1)..(25): SEQ ID NO: 4486; WAN0249MD_at; Start 15; Stop 39
aaaggagaaagtcttgttgctctct

SEQ ID NO: 26817 - DNA, 25 bp, Artificial
  probe
  misc_feature (1)..(25): SEQ ID NO: 4486; WAN0249MD_at; Start 19; Stop 43
gagaaagtcttgttgctctctcctt

SEQ ID NO: 26818 - DNA, 25 bp, Artificial
  probe
  misc_feature (1)..(25): SEQ ID NO: 4486; WAN0249MD_at; Start 24; Stop 48
agtcttgttgctctctccttgttgt

SEQ ID NO: 26819 - DNA, 25 bp, Artificial
  probe
  misc_feature (1)..(25): SEQ ID NO: 4486; WAN0249MD_at; Start 40; Stop 64
ccttgttgtatttattaaattgtca

SEQ ID NO: 26820 - DNA, 25 bp, Artificial
  probe
  misc_feature (1)..(25): SEQ ID NO: 4486; WAN0249MD_at; Start 21; Stop 45
gaaagtcttgttgctctctccttgt

SEQ ID NO: 26821 - DNA, 25 bp, Artificial
  probe
  misc_feature (1)..(25): SEQ ID NO: 421; WAN0249ME_at; Start 66; Stop 90
actatccttctcctataaaaagtgg

SEQ ID NO: 26822 - DNA, 25 bp, Artificial
  probe
  misc_feature (1)..(25): SEQ ID NO: 421; WAN0249ME_at; Start 49; Stop 73
tagaaatccaccttcccactatcct

SEQ ID NO: 26823 - DNA, 25 bp, Artificial
  probe
  misc_feature (1)..(25): SEQ ID NO: 421; WAN0249ME_at; Start 23; Stop 47
gatagagcaggactaagatactaac

SEQ ID NO: 26824 - DNA, 25 bp, Artificial
  probe
  misc_feature (1)..(25): SEQ ID NO: 421; WAN0249ME_at; Start 15; Stop 39
ttttctaagatagagcaggactaag

SEQ ID NO: 26825 - DNA, 25 bp, Artificial
  probe
  misc_feature (1)..(25): SEQ ID NO: 421; WAN0249ME_at; Start 68; Stop 92
tatccttctcctataaaaagtggta

SEQ ID NO: 26826 - DNA, 25 bp, Artificial
  probe
  misc_feature (1)..(25): SEQ ID NO: 421; WAN0249ME_at; Start 17; Stop 41
ttctaagatagagcaggactaagat

SEQ ID NO: 26827 - DNA, 25 bp, Artificial
  probe
  misc_feature (1)..(25): SEQ ID NO: 421; WAN0249ME_at; Start 94; Stop 118
aatggatgaaagaaagaaggaactg

SEQ ID NO: 26828 - DNA, 25 bp, Artificial
  probe
  misc_feature (1)..(25): SEQ ID NO: 421; WAN0249ME_at; Start 78; Stop 102
ctataaaaagtggtaaaatggatga

SEQ ID NO: 26829 - DNA, 25 bp, Artificial
  probe
  misc_feature (1)..(25): SEQ ID NO: 421; WAN0249ME_at; Start 10; Stop 34
tatccttttctaagatagagcagga

SEQ ID NO: 26830 - DNA, 25 bp, Artificial
  probe
  misc_feature (1)..(25): SEQ ID NO: 421; WAN0249ME_at; Start 19; Stop 43
ctaagatagagcaggactaagatac

SEQ ID NO: 26831 - DNA, 25 bp, Artificial
  probe
  misc_feature (1)..(25): SEQ ID NO: 421; WAN0249ME_at; Start 63; Stop 87
cccactatccttctcctataaaaag

SEQ ID NO: 26832 - DNA, 25 bp, Artificial
  probe
  misc_feature (1)..(25): SEQ ID NO: 421; WAN0249ME_at; Start 96; Stop 120
tggatgaaagaaagaaggaactgaa

SEQ ID NO: 26833 - DNA, 25 bp, Artificial
  probe
  misc_feature (1)..(25): SEQ ID NO: 421; WAN0249ME_at; Start 9; Stop 33
ctatccttttctaagatagagcagg

SEQ ID NO: 26834 - DNA, 25 bp, Artificial
  probe
  misc_feature (1)..(25): SEQ ID NO: 421; WAN0249ME_at; Start 67; Stop 91
ctatccttctcctataaaaagtggt

SEQ ID NO: 26835 - DNA, 25 bp, Artificial
  probe
  misc_feature (1)..(25): SEQ ID NO: 421; WAN0249ME_at; Start 36; Stop 60
taagatactaacttagaaatccacc

SEQ ID NO: 26836 - DNA, 25 bp, Artificial
  probe
  misc_feature (1)..(25): SEQ ID NO: 421; WAN0249ME_at; Start 29; Stop 53
gcaggactaagatactaacttagaa

SEQ ID NO: 26837 - DNA, 25 bp, Artificial
  probe
  misc_feature (1)..(25): SEQ ID NO: 421; WAN0249ME_at; Start 39; Stop 63
gatactaacttagaaatccaccttc

SEQ ID NO: 26838 - DNA, 25 bp, Artificial
  probe
  misc_feature (1)..(25): SEQ ID NO: 421; WAN0249ME_at; Start 77; Stop 101
cctataaaaagtggtaaaatggatg

SEQ ID NO: 26839 - DNA, 25 bp, Artificial
  probe
  misc_feature (1)..(25): SEQ ID NO: 421; WAN0249ME_at; Start 12; Stop 36
tccttttctaagatagagcaggact

SEQ ID NO: 26840 - DNA, 25 bp, Artificial
  probe
  misc_feature (1)..(25): SEQ ID NO: 421; WAN0249ME_at; Start 21; Stop 45
aagatagagcaggactaagatacta

SEQ ID NO: 26841 - DNA, 25 bp, Artificial
  probe
  misc_feature (1)..(25): SEQ ID NO: 421; WAN0249ME_at; Start 7; Stop 31
tactatccttttctaagatagagca

SEQ ID NO: 26842 - DNA, 25 bp, Artificial
  probe
  misc_feature (1)..(25): SEQ ID NO: 421; WAN0249ME_at; Start 14; Stop 38
cttttctaagatagagcaggactaa

SEQ ID NO: 26843 - DNA, 25 bp, Artificial
  probe
  misc_feature (1)..(25): SEQ ID NO: 421; WAN0249ME_at; Start 46; Stop 70
acttagaaatccaccttcccactat

SEQ ID NO: 26844 - DNA, 25 bp, Artificial
  probe
  misc_feature (1)..(25): SEQ ID NO: 421; WAN0249ME_at; Start 16; Stop 40
tttctaagatagagcaggactaaga

SEQ ID NO: 26845 - DNA, 25 bp, Artificial
  probe
  misc_feature (1)..(25): SEQ ID NO: 421; WAN0249ME_at; Start 2; Stop 26
gagaatactatccttttctaagata

SEQ ID NO: 26846 - DNA, 25 bp, Artificial
  probe
  misc_feature (1)..(25): SEQ ID NO: 421; WAN0249ME_at; Start 27; Stop 51
gagcaggactaagatactaacttag

SEQ ID NO: 26847 - DNA, 25 bp, Artificial
  probe
  misc_feature (1)..(25): SEQ ID NO: 421; WAN0249ME_at; Start 79; Stop 103
tataaaaagtggtaaaatggatgaa

SEQ ID NO: 26848 - DNA, 25 bp, Artificial
  probe
  misc_feature (1)..(25): SEQ ID NO: 421; WAN0249ME_at; Start 30; Stop 54
caggactaagatactaacttagaaa

SEQ ID NO: 26849 - DNA, 25 bp, Artificial
  probe
  misc_feature (1)..(25): SEQ ID NO: 421; WAN0249ME_at; Start 11; Stop 35
atccttttctaagatagagcaggac

SEQ ID NO: 26850 - DNA, 25 bp, Artificial
  probe
  misc_feature (1)..(25): SEQ ID NO: 421; WAN0249ME_at; Start 33; Stop 57
gactaagatactaacttagaaatcc

SEQ ID NO: 26851 - DNA, 25 bp, Artificial
  probe
  misc_feature (1)..(25): SEQ ID NO: 421; WAN0249ME_at; Start 13; Stop 37
ccttttctaagatagagcaggacta

SEQ ID NO: 26852 - DNA, 25 bp, Artificial
  probe
  misc_feature (1)..(25): SEQ ID NO: 421; WAN0249ME_at; Start 18; Stop 42
tctaagatagagcaggactaagata

SEQ ID NO: 26853 - DNA, 25 bp, Artificial
  probe
  misc_feature (1)..(25): SEQ ID NO: 421; WAN0249ME_at; Start 25; Stop 49
tagagcaggactaagatactaactt

SEQ ID NO: 26854 - DNA, 25 bp, Artificial
  probe
  misc_feature (1)..(25): SEQ ID NO: 421; WAN0249ME_at; Start 20; Stop 44
taagatagagcaggactaagatact

SEQ ID NO: 26855 - DNA, 25 bp, Artificial
  probe
  misc_feature (1)..(25): SEQ ID NO: 4823; WAN0249MF_at; Start 83; Stop 107
ttagtcctgctctatcttagaaaag

SEQ ID NO: 26856 - DNA, 25 bp, Artificial
  probe
  misc_feature (1)..(25): SEQ ID NO: 4823; WAN0249MF_at; Start 96; Stop 120
atcttagaaaaggatagtattctct

SEQ ID NO: 26857 - DNA, 25 bp, Artificial
  probe
  misc_feature (1)..(25): SEQ ID NO: 4823; WAN0249MF_at; Start 72; Stop 96
aagttagtatcttagtcctgctcta

SEQ ID NO: 26858 - DNA, 25 bp, Artificial
  probe
  misc_feature (1)..(25): SEQ ID NO: 4823; WAN0249MF_at; Start 7; Stop 31
tccttctttctttcatccattttac

SEQ ID NO: 26859 - DNA, 25 bp, Artificial
  probe
  misc_feature (1)..(25): SEQ ID NO: 4823; WAN0249MF_at; Start 79; Stop 103
tatcttagtcctgctctatcttaga

SEQ ID NO: 26860 - DNA, 25 bp, Artificial
  probe
  misc_feature (1)..(25): SEQ ID NO: 4823; WAN0249MF_at; Start 84; Stop 108
tagtcctgctctatcttagaaaagg

SEQ ID NO: 26861 - DNA, 25 bp, Artificial
  probe
  misc_feature (1)..(25): SEQ ID NO: 4823; WAN0249MF_at; Start 90; Stop 114
tgctctatcttagaaaaggatagta

SEQ ID NO: 26862 - DNA, 25 bp, Artificial
  probe
  misc_feature (1)..(25): SEQ ID NO: 4823; WAN0249MF_at; Start 58; Stop 82
gaaggtggatttctaagttagtatc

SEQ ID NO: 26863 - DNA, 25 bp, Artificial
  probe
  misc_feature (1)..(25): SEQ ID NO: 4823; WAN0249MF_at; Start 69; Stop 93
tctaagttagtatcttagtcctgct

SEQ ID NO: 26864 - DNA, 25 bp, Artificial
  probe
  misc_feature (1)..(25): SEQ ID NO: 4823; WAN0249MF_at; Start 91; Stop 115
gctctatcttagaaaaggatagtat

SEQ ID NO: 26865 - DNA, 25 bp, Artificial
  probe
  misc_feature (1)..(25): SEQ ID NO: 4823; WAN0249MF_at; Start 20; Stop 44
catccattttaccactttttatagg

SEQ ID NO: 26866 - DNA, 25 bp, Artificial
  probe
  misc_feature (1)..(25): SEQ ID NO: 4823; WAN0249MF_at; Start 2; Stop 26
tcagttccttctttctttcatccat

SEQ ID NO: 26867 - DNA, 25 bp, Artificial
  probe
  misc_feature (1)..(25): SEQ ID NO: 4823; WAN0249MF_at; Start 29; Stop 53
taccactttttataggagaaggata

SEQ ID NO: 26868 - DNA, 25 bp, Artificial
  probe
  misc_feature (1)..(25): SEQ ID NO: 4823; WAN0249MF_at; Start 76; Stop 100
tagtatcttagtcctgctctatctt

SEQ ID NO: 26869 - DNA, 25 bp, Artificial
  probe
  misc_feature (1)..(25): SEQ ID NO: 4823; WAN0249MF_at; Start 71; Stop 95
taagttagtatcttagtcctgctct

SEQ ID NO: 26870 - DNA, 25 bp, Artificial
  probe
  misc_feature (1)..(25): SEQ ID NO: 4823; WAN0249MF_at; Start 3; Stop 27
cagttccttctttctttcatccatt

SEQ ID NO: 26871 - DNA, 25 bp, Artificial
  probe
  misc_feature (1)..(25): SEQ ID NO: 4823; WAN0249MF_at; Start 78; Stop 102
gtatcttagtcctgctctatcttag

SEQ ID NO: 26872 - DNA, 25 bp, Artificial
  probe
  misc_feature (1)..(25): SEQ ID NO: 4823; WAN0249MF_at; Start 88; Stop 112
cctgctctatcttagaaaaggatag

SEQ ID NO: 26873 - DNA, 25 bp, Artificial
  probe
  misc_feature (1)..(25): SEQ ID NO: 4823; WAN0249MF_at; Start 51; Stop 75
atagtgggaaggtggatttctaagt

SEQ ID NO: 26874 - DNA, 25 bp, Artificial
  probe
  misc_feature (1)..(25): SEQ ID NO: 4823; WAN0249MF_at; Start 86; Stop 110
gtcctgctctatcttagaaaaggat

SEQ ID NO: 26875 - DNA, 25 bp, Artificial
  probe
  misc_feature (1)..(25): SEQ ID NO: 4823; WAN0249MF_at; Start 32; Stop 56
cactttttataggagaaggatagtg

SEQ ID NO: 26876 - DNA, 25 bp, Artificial
  probe
  misc_feature (1)..(25): SEQ ID NO: 4823; WAN0249MF_at; Start 31; Stop 55
ccactttttataggagaaggatagt

SEQ ID NO: 26877 - DNA, 25 bp, Artificial
  probe
  misc_feature (1)..(25): SEQ ID NO: 4823; WAN0249MF_at; Start 87; Stop 111
tcctgctctatcttagaaaaggata

SEQ ID NO: 26878 - DNA, 25 bp, Artificial
  probe
  misc_feature (1)..(25): SEQ ID NO: 4823; WAN0249MF_at; Start 68; Stop 92
ttctaagttagtatcttagtcctgc

SEQ ID NO: 26879 - DNA, 25 bp, Artificial
  probe
  misc_feature (1)..(25): SEQ ID NO: 4823; WAN0249MF_at; Start 36; Stop 60
ttttataggagaaggatagtgggaa

SEQ ID NO: 26880 - DNA, 25 bp, Artificial
  probe
  misc_feature (1)..(25): SEQ ID NO: 4823; WAN0249MF_at; Start 34; Stop 58
ctttttataggagaaggatagtggg

SEQ ID NO: 26881 - DNA, 25 bp, Artificial
  probe
  misc_feature (1)..(25): SEQ ID NO: 4823; WAN0249MF_at; Start 61; Stop 85
ggtggatttctaagttagtatctta

SEQ ID NO: 26882 - DNA, 25 bp, Artificial
  probe
  misc_feature (1)..(25): SEQ ID NO: 4823; WAN0249MF_at; Start 85; Stop 109
agtcctgctctatcttagaaaagga

SEQ ID NO: 26883 - DNA, 25 bp, Artificial
  probe
  misc_feature (1)..(25): SEQ ID NO: 4823; WAN0249MF_at; Start 30; Stop 54
accactttttataggagaaggatag

SEQ ID NO: 26884 - DNA, 25 bp, Artificial
  probe
  misc_feature (1)..(25): SEQ ID NO: 4823; WAN0249MF_at; Start 74; Stop 98
gttagtatcttagtcctgctctatc

SEQ ID NO: 26885 - DNA, 25 bp, Artificial
  probe
  misc_feature (1)..(25): SEQ ID NO: 4823; WAN0249MF_at; Start 81; Stop 105
tcttagtcctgctctatcttagaaa

SEQ ID NO: 26886 - DNA, 25 bp, Artificial
  probe
  misc_feature (1)..(25): SEQ ID NO: 4823; WAN0249MF_at; Start 70; Stop 94
ctaagttagtatcttagtcctgctc

SEQ ID NO: 26887 - DNA, 25 bp, Artificial
  probe
  misc_feature (1)..(25): SEQ ID NO: 4823; WAN0249MF_at; Start 11; Stop 35
tctttctttcatccattttaccact

SEQ ID NO: 26888 - DNA, 25 bp, Artificial
  probe
  misc_feature (1)..(25): SEQ ID NO: 4823; WAN0249MF_at; Start 95; Stop 119
tatcttagaaaaggatagtattctc

SEQ ID NO: 26889 - DNA, 25 bp, Artificial
  probe
  misc_feature (1)..(25): SEQ ID NO: 4556; WAN0249MG_at; Start 19; Stop 43
tacagtgctctagtctaacttcaat

SEQ ID NO: 26890 - DNA, 25 bp, Artificial
  probe
  misc_feature (1)..(25): SEQ ID NO: 4556; WAN0249MG_at; Start 153; Stop 177
aaggcttttgtagactggaggacga

SEQ ID NO: 26891 - DNA, 25 bp, Artificial
  probe
  misc_feature (1)..(25): SEQ ID NO: 4556; WAN0249MG_at; Start 9; Stop 33
ttttagaagatacagtgctctagtc

SEQ ID NO: 26892 - DNA, 25 bp, Artificial
  probe
  misc_feature (1)..(25): SEQ ID NO: 4556; WAN0249MG_at; Start 134; Stop 158
tataggatagtacgaatggaaggct

SEQ ID NO: 26893 - DNA, 25 bp, Artificial
  probe
  misc_feature (1)..(25): SEQ ID NO: 4556; WAN0249MG_at; Start 64; Stop 88
gaagcaattatgatttacttctatc

SEQ ID NO: 26894 - DNA, 25 bp, Artificial
  probe
  misc_feature (1)..(25): SEQ ID NO: 4556; WAN0249MG_at; Start 88; Stop 112
ctttaaaataaatggtctgatagga

SEQ ID NO: 26895 - DNA, 25 bp, Artificial
  probe
  misc_feature (1)..(25): SEQ ID NO: 4556; WAN0249MG_at; Start 45; Stop 69
tactataaaagaacagatggaagca

SEQ ID NO: 26896 - DNA, 25 bp, Artificial
  probe
  misc_feature (1)..(25): SEQ ID NO: 4556; WAN0249MG_at; Start 101; Stop 125
ggtctgataggaaaaatgtgtcccc

SEQ ID NO: 26897 - DNA, 25 bp, Artificial
  probe
  misc_feature (1)..(25): SEQ ID NO: 4556; WAN0249MG_at; Start 117; Stop 141
tgtgtcccctcataaaatataggat

SEQ ID NO: 26898 - DNA, 25 bp, Artificial
  probe
  misc_feature (1)..(25): SEQ ID NO: 4556; WAN0249MG_at; Start 25; Stop 49
gctctagtctaacttcaatatacta

SEQ ID NO: 26899 - DNA, 25 bp, Artificial
  probe
  misc_feature (1)..(25): SEQ ID NO: 4556; WAN0249MG_at; Start 148; Stop 172
aatggaaggcttttgtagactggag

SEQ ID NO: 26900 - DNA, 25 bp, Artificial
  probe
  misc_feature (1)..(25): SEQ ID NO: 4556; WAN0249MG_at; Start 146; Stop 170
cgaatggaaggcttttgtagactgg

SEQ ID NO: 26901 - DNA, 25 bp, Artificial
  probe
  misc_feature (1)..(25): SEQ ID NO: 4556; WAN0249MG_at; Start 48; Stop 72
tataaaagaacagatggaagcaatt

SEQ ID NO: 26902 - DNA, 25 bp, Artificial
  probe
  misc_feature (1)..(25): SEQ ID NO: 4556; WAN0249MG_at; Start 157; Stop 181
cttttgtagactggaggacgaagga

SEQ ID NO: 26903 - DNA, 25 bp, Artificial
  probe
  misc_feature (1)..(25): SEQ ID NO: 4556; WAN0249MG_at; Start 103; Stop 127
tctgataggaaaaatgtgtcccctc

SEQ ID NO: 26904 - DNA, 25 bp, Artificial
  probe
  misc_feature (1)..(25): SEQ ID NO: 4556; WAN0249MG_at; Start 58; Stop 82
cagatggaagcaattatgatttact

SEQ ID NO: 26905 - DNA, 25 bp, Artificial
  probe
  misc_feature (1)..(25): SEQ ID NO: 4556; WAN0249MG_at; Start 106; Stop 130
gataggaaaaatgtgtcccctcata

SEQ ID NO: 26906 - DNA, 25 bp, Artificial
  probe
  misc_feature (1)..(25): SEQ ID NO: 4556; WAN0249MG_at; Start 100; Stop 124
tggtctgataggaaaaatgtgtccc

SEQ ID NO: 26907 - DNA, 25 bp, Artificial
  probe
  misc_feature (1)..(25): SEQ ID NO: 4556; WAN0249MG_at; Start 14; Stop 38
gaagatacagtgctctagtctaact

SEQ ID NO: 26908 - DNA, 25 bp, Artificial
  probe
  misc_feature (1)..(25): SEQ ID NO: 4556; WAN0249MG_at; Start 161; Stop 185
tgtagactggaggacgaaggagttt

SEQ ID NO: 26909 - DNA, 25 bp, Artificial
  probe
  misc_feature (1)..(25): SEQ ID NO: 4556; WAN0249MG_at; Start 154; Stop 178
aggcttttgtagactggaggacgaa

SEQ ID NO: 26910 - DNA, 25 bp, Artificial
  probe
  misc_feature (1)..(25): SEQ ID NO: 4556; WAN0249MG_at; Start 4; Stop 28
caatgttttagaagatacagtgctc

SEQ ID NO: 26911 - DNA, 25 bp, Artificial
  probe
  misc_feature (1)..(25): SEQ ID NO: 4556; WAN0249MG_at; Start 21; Stop 45
cagtgctctagtctaacttcaatat

SEQ ID NO: 26912 - DNA, 25 bp, Artificial
  probe
  misc_feature (1)..(25): SEQ ID NO: 4556; WAN0249MG_at; Start 7; Stop 31
tgttttagaagatacagtgctctag

SEQ ID NO: 26913 - DNA, 25 bp, Artificial
  probe
  misc_feature (1)..(25): SEQ ID NO: 4556; WAN0249MG_at; Start 17; Stop 41
gatacagtgctctagtctaacttca

SEQ ID NO: 26914 - DNA, 25 bp, Artificial
  probe
  misc_feature (1)..(25): SEQ ID NO: 4556; WAN0249MG_at; Start 52; Stop 76
aaagaacagatggaagcaattatga

SEQ ID NO: 26915 - DNA, 25 bp, Artificial
  probe
  misc_feature (1)..(25): SEQ ID NO: 4556; WAN0249MG_at; Start 108; Stop 132
taggaaaaatgtgtcccctcataaa

SEQ ID NO: 26916 - DNA, 25 bp, Artificial
  probe
  misc_feature (1)..(25): SEQ ID NO: 4556; WAN0249MG_at; Start 139; Stop 163
gatagtacgaatggaaggcttttgt

SEQ ID NO: 26917 - DNA, 25 bp, Artificial
  probe
  misc_feature (1)..(25): SEQ ID NO: 4556; WAN0249MG_at; Start 83; Stop 107
tctatctttaaaataaatggtctga

SEQ ID NO: 26918 - DNA, 25 bp, Artificial
  probe
  misc_feature (1)..(25): SEQ ID NO: 4556; WAN0249MG_at; Start 115; Stop 139
aatgtgtcccctcataaaatatagg

SEQ ID NO: 26919 - DNA, 25 bp, Artificial
  probe
  misc_feature (1)..(25): SEQ ID NO: 4556; WAN0249MG_at; Start 119; Stop 143
tgtcccctcataaaatataggatag

SEQ ID NO: 26920 - DNA, 25 bp, Artificial
  probe
  misc_feature (1)..(25): SEQ ID NO: 4556; WAN0249MG_at; Start 136; Stop 160
taggatagtacgaatggaaggcttt

SEQ ID NO: 26921 - DNA, 25 bp, Artificial
  probe
  misc_feature (1)..(25): SEQ ID NO: 4556; WAN0249MG_at; Start 55; Stop 79
gaacagatggaagcaattatgattt

SEQ ID NO: 26922 - DNA, 25 bp, Artificial
  probe
  misc_feature (1)..(25): SEQ ID NO: 4556; WAN0249MG_at; Start 123; Stop 147
ccctcataaaatataggatagtacg

SEQ ID NO: 26923 - DNA, 25 bp, Artificial
  probe
  misc_feature (1)..(25): SEQ ID NO: 4410; WAN0249MH_at; Start 75; Stop 99
tcctatcagaccatttattttaaag

SEQ ID NO: 26924 - DNA, 25 bp, Artificial
  probe
  misc_feature (1)..(25): SEQ ID NO: 4410; WAN0249MH_at; Start 65; Stop 89
gacacatttttcctatcagaccatt

SEQ ID NO: 26925 - DNA, 25 bp, Artificial
  probe
  misc_feature (1)..(25): SEQ ID NO: 4410; WAN0249MH_at; Start 9; Stop 33
ttcgtcctccagtctacaaaagcct

SEQ ID NO: 26926 - DNA, 25 bp, Artificial
  probe
  misc_feature (1)..(25): SEQ ID NO: 4410; WAN0249MH_at; Start 159; Stop 183
gagcactgtatcttctaaaacattg

SEQ ID NO: 26927 - DNA, 25 bp, Artificial
  probe
  misc_feature (1)..(25): SEQ ID NO: 4410; WAN0249MH_at; Start 152; Stop 176
tagactagagcactgtatcttctaa

SEQ ID NO: 26928 - DNA, 25 bp, Artificial
  probe
  misc_feature (1)..(25): SEQ ID NO: 4410; WAN0249MH_at; Start 146; Stop 170
tgaagttagactagagcactgtatc

SEQ ID NO: 26929 - DNA, 25 bp, Artificial
  probe
  misc_feature (1)..(25): SEQ ID NO: 4410; WAN0249MH_at; Start 103; Stop 127
gaagtaaatcataattgcttccatc

SEQ ID NO: 26930 - DNA, 25 bp, Artificial
  probe
  misc_feature (1)..(25): SEQ ID NO: 4410; WAN0249MH_at; Start 138; Stop 162
tagtatattgaagttagactagagc

SEQ ID NO: 26931 - DNA, 25 bp, Artificial
  probe
  misc_feature (1)..(25): SEQ ID NO: 4410; WAN0249MH_at; Start 143; Stop 167
tattgaagttagactagagcactgt

SEQ ID NO: 26932 - DNA, 25 bp, Artificial
  probe
  misc_feature (1)..(25): SEQ ID NO: 4410; WAN0249MH_at; Start 161; Stop 185
gcactgtatcttctaaaacattgat

SEQ ID NO: 26933 - DNA, 25 bp, Artificial
  probe
  misc_feature (1)..(25): SEQ ID NO: 4410; WAN0249MH_at; Start 141; Stop 165
tatattgaagttagactagagcact

SEQ ID NO: 26934 - DNA, 25 bp, Artificial
  probe
  misc_feature (1)..(25): SEQ ID NO: 4410; WAN0249MH_at; Start 147; Stop 171
gaagttagactagagcactgtatct

SEQ ID NO: 26935 - DNA, 25 bp, Artificial
  probe
  misc_feature (1)..(25): SEQ ID NO: 4410; WAN0249MH_at; Start 48; Stop 72
cctatattttatgaggggacacatt

SEQ ID NO: 26936 - DNA, 25 bp, Artificial
  probe
  misc_feature (1)..(25): SEQ ID NO: 4410; WAN0249MH_at; Start 40; Stop 64
cgtactatcctatattttatgaggg

SEQ ID NO: 26937 - DNA, 25 bp, Artificial
  probe
  misc_feature (1)..(25): SEQ ID NO: 4410; WAN0249MH_at; Start 63; Stop 87
gggacacatttttcctatcagacca

SEQ ID NO: 26938 - DNA, 25 bp, Artificial
  probe
  misc_feature (1)..(25): SEQ ID NO: 4410; WAN0249MH_at; Start 106; Stop 130
gtaaatcataattgcttccatctgt

SEQ ID NO: 26939 - DNA, 25 bp, Artificial
  probe
  misc_feature (1)..(25): SEQ ID NO: 4410; WAN0249MH_at; Start 18; Stop 42
cagtctacaaaagccttccattcgt

SEQ ID NO: 26940 - DNA, 25 bp, Artificial
  probe
  misc_feature (1)..(25): SEQ ID NO: 4410; WAN0249MH_at; Start 123; Stop 147
ccatctgttcttttatagtatattg

SEQ ID NO: 26941 - DNA, 25 bp, Artificial
  probe
  misc_feature (1)..(25): SEQ ID NO: 4410; WAN0249MH_at; Start 154; Stop 178
gactagagcactgtatcttctaaaa

SEQ ID NO: 26942 - DNA, 25 bp, Artificial
  probe
  misc_feature (1)..(25): SEQ ID NO: 4410; WAN0249MH_at; Start 30; Stop 54
gccttccattcgtactatcctatat

SEQ ID NO: 26943 - DNA, 25 bp, Artificial
  probe
  misc_feature (1)..(25): SEQ ID NO: 4410; WAN0249MH_at; Start 10; Stop 34
tcgtcctccagtctacaaaagcctt

SEQ ID NO: 26944 - DNA, 25 bp, Artificial
  probe
  misc_feature (1)..(25): SEQ ID NO: 4410; WAN0249MH_at; Start 27; Stop 51
aaagccttccattcgtactatccta

SEQ ID NO: 26945 - DNA, 25 bp, Artificial
  probe
  misc_feature (1)..(25): SEQ ID NO: 4410; WAN0249MH_at; Start 25; Stop 49
caaaagccttccattcgtactatcc

SEQ ID NO: 26946 - DNA, 25 bp, Artificial
  probe
  misc_feature (1)..(25): SEQ ID NO: 4410; WAN0249MH_at; Start 119; Stop 143
gcttccatctgttcttttatagtat

SEQ ID NO: 26947 - DNA, 25 bp, Artificial
  probe
  misc_feature (1)..(25): SEQ ID NO: 4410; WAN0249MH_at; Start 150; Stop 174
gttagactagagcactgtatcttct

SEQ ID NO: 26948 - DNA, 25 bp, Artificial
  probe
  misc_feature (1)..(25): SEQ ID NO: 4410; WAN0249MH_at; Start 23; Stop 47
tacaaaagccttccattcgtactat

SEQ ID NO: 26949 - DNA, 25 bp, Artificial
  probe
  misc_feature (1)..(25): SEQ ID NO: 4410; WAN0249MH_at; Start 81; Stop 105
cagaccatttattttaaagatagaa

SEQ ID NO: 26950 - DNA, 25 bp, Artificial
  probe
  misc_feature (1)..(25): SEQ ID NO: 4410; WAN0249MH_at; Start 111; Stop 135
tcataattgcttccatctgttcttt

SEQ ID NO: 26951 - DNA, 25 bp, Artificial
  probe
  misc_feature (1)..(25): SEQ ID NO: 4410; WAN0249MH_at; Start 15; Stop 39
ctccagtctacaaaagccttccatt

SEQ ID NO: 26952 - DNA, 25 bp, Artificial
  probe
  misc_feature (1)..(25): SEQ ID NO: 4410; WAN0249MH_at; Start 6; Stop 30
tccttcgtcctccagtctacaaaag

SEQ ID NO: 26953 - DNA, 25 bp, Artificial
  probe
  misc_feature (1)..(25): SEQ ID NO: 4410; WAN0249MH_at; Start 67; Stop 91
cacatttttcctatcagaccattta

SEQ ID NO: 26954 - DNA, 25 bp, Artificial
  probe
  misc_feature (1)..(25): SEQ ID NO: 4410; WAN0249MH_at; Start 156; Stop 180
ctagagcactgtatcttctaaaaca

SEQ ID NO: 26955 - DNA, 25 bp, Artificial
  probe
  misc_feature (1)..(25): SEQ ID NO: 4410; WAN0249MH_at; Start 108; Stop 132
aaatcataattgcttccatctgttc

SEQ ID NO: 26956 - DNA, 25 bp, Artificial
  probe
  misc_feature (1)..(25): SEQ ID NO: 4410; WAN0249MH_at; Start 96; Stop 120
aaagatagaagtaaatcataattgc

SEQ ID NO: 26957 - DNA, 25 bp, Artificial
  probe
  misc_feature (1)..(25): SEQ ID NO: 4713; WAN0249MI_at; Start 75; Stop 99
tctgggcttttttgatgtgagaatg

SEQ ID NO: 26958 - DNA, 25 bp, Artificial
  probe
  misc_feature (1)..(25): SEQ ID NO: 4713; WAN0249MI_at; Start 226; Stop 250
ggtttcagctcatgtcgactaaggt

SEQ ID NO: 26959 - DNA, 25 bp, Artificial
  probe
  misc_feature (1)..(25): SEQ ID NO: 4713; WAN0249MI_at; Start 1; Stop 25
tgggacagagactttaaacatactg

SEQ ID NO: 26960 - DNA, 25 bp, Artificial
  probe
  misc_feature (1)..(25): SEQ ID NO: 4713; WAN0249MI_at; Start 277; Stop 301
ttatctaatagagcgttgcgtccga

SEQ ID NO: 26961 - DNA, 25 bp, Artificial
  probe
  misc_feature (1)..(25): SEQ ID NO: 4713; WAN0249MI_at; Start 41; Stop 65
aacgactagataaaagaatgctcag

SEQ ID NO: 26962 - DNA, 25 bp, Artificial
  probe
  misc_feature (1)..(25): SEQ ID NO: 4713; WAN0249MI_at; Start 280; Stop 304
tctaatagagcgttgcgtccgaaag

SEQ ID NO: 26963 - DNA, 25 bp, Artificial
  probe
  misc_feature (1)..(25): SEQ ID NO: 4713; WAN0249MI_at; Start 118; Stop 142
tggaaagaaagagaaaattttcatg

SEQ ID NO: 26964 - DNA, 25 bp, Artificial
  probe
  misc_feature (1)..(25): SEQ ID NO: 4713; WAN0249MI_at; Start 282; Stop 306
taatagagcgttgcgtccgaaagtc

SEQ ID NO: 26965 - DNA, 25 bp, Artificial
  probe
  misc_feature (1)..(25): SEQ ID NO: 4713; WAN0249MI_at; Start 221; Stop 245
taagaggtttcagctcatgtcgact

SEQ ID NO: 26966 - DNA, 25 bp, Artificial
  probe
  misc_feature (1)..(25): SEQ ID NO: 4713; WAN0249MI_at; Start 39; Stop 63
taaacgactagataaaagaatgctc

SEQ ID NO: 26967 - DNA, 25 bp, Artificial
  probe
  misc_feature (1)..(25): SEQ ID NO: 4713; WAN0249MI_at; Start 231; Stop 255
cagctcatgtcgactaaggttagaa

SEQ ID NO: 26968 - DNA, 25 bp, Artificial
  probe
  misc_feature (1)..(25): SEQ ID NO: 4713; WAN0249MI_at; Start 300; Stop 324
gaaagtctatccagacacggctctt

SEQ ID NO: 26969 - DNA, 25 bp, Artificial
  probe
  misc_feature (1)..(25): SEQ ID NO: 4713; WAN0249MI_at; Start 210; Stop 234
tacttaacaaataagaggtttcagc

SEQ ID NO: 26970 - DNA, 25 bp, Artificial
  probe
  misc_feature (1)..(25): SEQ ID NO: 4713; WAN0249MI_at; Start 297; Stop 321
tccgaaagtctatccagacacggct

SEQ ID NO: 26971 - DNA, 25 bp, Artificial
  probe
  misc_feature (1)..(25): SEQ ID NO: 4713; WAN0249MI_at; Start 235; Stop 259
tcatgtcgactaaggttagaaatct

SEQ ID NO: 26972 - DNA, 25 bp, Artificial
  probe
  misc_feature (1)..(25): SEQ ID NO: 4713; WAN0249MI_at; Start 258; Stop 282
cttgtgtataggcagttcattatct

SEQ ID NO: 26973 - DNA, 25 bp, Artificial
  probe
  misc_feature (1)..(25): SEQ ID NO: 4713; WAN0249MI_at; Start 152; Stop 176
aattttactgtaaagacagttgact

SEQ ID NO: 26974 - DNA, 25 bp, Artificial
  probe
  misc_feature (1)..(25): SEQ ID NO: 4713; WAN0249MI_at; Start 203; Stop 227
tgtgaactacttaacaaataagagg

SEQ ID NO: 26975 - DNA, 25 bp, Artificial
  probe
  misc_feature (1)..(25): SEQ ID NO: 4713; WAN0249MI_at; Start 106; Stop 130
tgtcacttaaaatggaaagaaagag

SEQ ID NO: 26976 - DNA, 25 bp, Artificial
  probe
  misc_feature (1)..(25): SEQ ID NO: 4713; WAN0249MI_at; Start 10; Stop 34
gactttaaacatactgaactcaact

SEQ ID NO: 26977 - DNA, 25 bp, Artificial
  probe
  misc_feature (1)..(25): SEQ ID NO: 4713; WAN0249MI_at; Start 159; Stop 183
ctgtaaagacagttgactattcata

SEQ ID NO: 26978 - DNA, 25 bp, Artificial
  probe
  misc_feature (1)..(25): SEQ ID NO: 4713; WAN0249MI_at; Start 251; Stop 275
tagaaatcttgtgtataggcagttc

SEQ ID NO: 26979 - DNA, 25 bp, Artificial
  probe
  misc_feature (1)..(25): SEQ ID NO: 4713; WAN0249MI_at; Start 286; Stop 310
agagcgttgcgtccgaaagtctatc

SEQ ID NO: 26980 - DNA, 25 bp, Artificial
  probe
  misc_feature (1)..(25): SEQ ID NO: 4713; WAN0249MI_at; Start 29; Stop 53
tcaacttccttaaacgactagataa

SEQ ID NO: 26981 - DNA, 25 bp, Artificial
  probe
  misc_feature (1)..(25): SEQ ID NO: 4713; WAN0249MI_at; Start 88; Stop 112
gatgtgagaatgactgaatgtcact

SEQ ID NO: 26982 - DNA, 25 bp, Artificial
  probe
  misc_feature (1)..(25): SEQ ID NO: 4713; WAN0249MI_at; Start 217; Stop 241
caaataagaggtttcagctcatgtc

SEQ ID NO: 26983 - DNA, 25 bp, Artificial
  probe
  misc_feature (1)..(25): SEQ ID NO: 4713; WAN0249MI_at; Start 290; Stop 314
cgttgcgtccgaaagtctatccaga

SEQ ID NO: 26984 - DNA, 25 bp, Artificial
  probe
  misc_feature (1)..(25): SEQ ID NO: 4713; WAN0249MI_at; Start 173; Stop 197
gactattcataaaataggtgtataa

SEQ ID NO: 26985 - DNA, 25 bp, Artificial
  probe
  misc_feature (1)..(25): SEQ ID NO: 4713; WAN0249MI_at; Start 166; Stop 190
gacagttgactattcataaaatagg

SEQ ID NO: 26986 - DNA, 25 bp, Artificial
  probe
  misc_feature (1)..(25): SEQ ID NO: 4713; WAN0249MI_at; Start 241; Stop 265
cgactaaggttagaaatcttgtgta

SEQ ID NO: 26987 - DNA, 25 bp, Artificial
  probe
  misc_feature (1)..(25): SEQ ID NO: 4713; WAN0249MI_at; Start 99; Stop 123
gactgaatgtcacttaaaatggaaa

SEQ ID NO: 26988 - DNA, 25 bp, Artificial
  probe
  misc_feature (1)..(25): SEQ ID NO: 4713; WAN0249MI_at; Start 21; Stop 45
tactgaactcaacttccttaaacga

SEQ ID NO: 26989 - DNA, 25 bp, Artificial
  probe
  misc_feature (1)..(25): SEQ ID NO: 4713; WAN0249MI_at; Start 80; Stop 104
gcttttttgatgtgagaatgactga

SEQ ID NO: 26990 - DNA, 25 bp, Artificial
  probe
  misc_feature (1)..(25): SEQ ID NO: 4713; WAN0249MI_at; Start 266; Stop 290
taggcagttcattatctaatagagc

SEQ ID NO: 26991 - DNA, 25 bp, Artificial
  probe
  misc_feature (1)..(25): SEQ ID NO: 4848; WAN0249MJ_at; Start 88; Stop 112
tctaaccttagtcgacatgagctga

SEQ ID NO: 26992 - DNA, 25 bp, Artificial
  probe
  misc_feature (1)..(25): SEQ ID NO: 4848; WAN0249MJ_at; Start 93; Stop 117
ccttagtcgacatgagctgaaacct

SEQ ID NO: 26993 - DNA, 25 bp, Artificial
  probe
  misc_feature (1)..(25): SEQ ID NO: 4848; WAN0249MJ_at; Start 44; Stop 68
gacgcaacgctctattagataatga

SEQ ID NO: 26994 - DNA, 25 bp, Artificial
  probe
  misc_feature (1)..(25): SEQ ID NO: 4848; WAN0249MJ_at; Start 298; Stop 322
cgtttaaggaagttgagttcagtat

SEQ ID NO: 26995 - DNA, 25 bp, Artificial
  probe
  misc_feature (1)..(25): SEQ ID NO: 4848; WAN0249MJ_at; Start 150; Stop 174
cacctattttatgaatagtcaactg

SEQ ID NO: 26996 - DNA, 25 bp, Artificial
  probe
  misc_feature (1)..(25): SEQ ID NO: 4848; WAN0249MJ_at; Start 28; Stop 52
tctggatagactttcggacgcaacg

SEQ ID NO: 26997 - DNA, 25 bp, Artificial
  probe
  misc_feature (1)..(25): SEQ ID NO: 4848; WAN0249MJ_at; Start 67; Stop 91
gaactgcctatacacaagatttcta

SEQ ID NO: 26998 - DNA, 25 bp, Artificial
  probe
  misc_feature (1)..(25): SEQ ID NO: 4848; WAN0249MJ_at; Start 317; Stop 341
cagtatgtttaaagtctctgtccca

SEQ ID NO: 26999 - DNA, 25 bp, Artificial
  probe
  misc_feature (1)..(25): SEQ ID NO: 4848; WAN0249MJ_at; Start 32; Stop 56
gatagactttcggacgcaacgctct

SEQ ID NO: 27000 - DNA, 25 bp, Artificial
  probe
  misc_feature (1)..(25): SEQ ID NO: 4848; WAN0249MJ_at; Start 51; Stop 75
cgctctattagataatgaactgcct

SEQ ID NO: 27001 - DNA, 25 bp, Artificial
  probe
  misc_feature (1)..(25): SEQ ID NO: 4848; WAN0249MJ_at; Start 101; Stop 125
gacatgagctgaaacctcttatttg

SEQ ID NO: 27002 - DNA, 25 bp, Artificial
  probe
  misc_feature (1)..(25): SEQ ID NO: 4848; WAN0249MJ_at; Start 18; Stop 42
aagagccgtgtctggatagactttc

SEQ ID NO: 27003 - DNA, 25 bp, Artificial
  probe
  misc_feature (1)..(25): SEQ ID NO: 4848; WAN0249MJ_at; Start 115; Stop 139
cctcttatttgttaagtagttcaca

SEQ ID NO: 27004 - DNA, 25 bp, Artificial
  probe
  misc_feature (1)..(25): SEQ ID NO: 4848; WAN0249MJ_at; Start 277; Stop 301
ctgagcattcttttatctagtcgtt

SEQ ID NO: 27005 - DNA, 25 bp, Artificial
  probe
  misc_feature (1)..(25): SEQ ID NO: 4848; WAN0249MJ_at; Start 290; Stop 314
tatctagtcgtttaaggaagttgag

SEQ ID NO: 27006 - DNA, 25 bp, Artificial
  probe
  misc_feature (1)..(25): SEQ ID NO: 4848; WAN0249MJ_at; Start 238; Stop 262
tcagtcattctcacatcaaaaaagc

SEQ ID NO: 27007 - DNA, 25 bp, Artificial
  probe
  misc_feature (1)..(25): SEQ ID NO: 4848; WAN0249MJ_at; Start 60; Stop 84
agataatgaactgcctatacacaag

SEQ ID NO: 27008 - DNA, 25 bp, Artificial
  probe
  misc_feature (1)..(25): SEQ ID NO: 4848; WAN0249MJ_at; Start 84; Stop 108
gatttctaaccttagtcgacatgag

SEQ ID NO: 27009 - DNA, 25 bp, Artificial
  probe
  misc_feature (1)..(25): SEQ ID NO: 4848; WAN0249MJ_at; Start 77; Stop 101
tacacaagatttctaaccttagtcg

SEQ ID NO: 27010 - DNA, 25 bp, Artificial
  probe
  misc_feature (1)..(25): SEQ ID NO: 4848; WAN0249MJ_at; Start 30; Stop 54
tggatagactttcggacgcaacgct

SEQ ID NO: 27011 - DNA, 25 bp, Artificial
  probe
  misc_feature (1)..(25): SEQ ID NO: 4848; WAN0249MJ_at; Start 159; Stop 183
tatgaatagtcaactgtctttacag

SEQ ID NO: 27012 - DNA, 25 bp, Artificial
  probe
  misc_feature (1)..(25): SEQ ID NO: 4848; WAN0249MJ_at; Start 243; Stop 267
cattctcacatcaaaaaagcccaga

SEQ ID NO: 27013 - DNA, 25 bp, Artificial
  probe
  misc_feature (1)..(25): SEQ ID NO: 4848; WAN0249MJ_at; Start 41; Stop 65
tcggacgcaacgctctattagataa

SEQ ID NO: 27014 - DNA, 25 bp, Artificial
  probe
  misc_feature (1)..(25): SEQ ID NO: 4848; WAN0249MJ_at; Start 124; Stop 148
tgttaagtagttcacaaaatattat

SEQ ID NO: 27015 - DNA, 25 bp, Artificial
  probe
  misc_feature (1)..(25): SEQ ID NO: 4848; WAN0249MJ_at; Start 228; Stop 252
taagtgacattcagtcattctcaca

SEQ ID NO: 27016 - DNA, 25 bp, Artificial
  probe
  misc_feature (1)..(25): SEQ ID NO: 4848; WAN0249MJ_at; Start 212; Stop 236
ctctttctttccattttaagtgaca

SEQ ID NO: 27017 - DNA, 25 bp, Artificial
  probe
  misc_feature (1)..(25): SEQ ID NO: 4848; WAN0249MJ_at; Start 22; Stop 46
gccgtgtctggatagactttcggac

SEQ ID NO: 27018 - DNA, 25 bp, Artificial
  probe
  misc_feature (1)..(25): SEQ ID NO: 4848; WAN0249MJ_at; Start 308; Stop 332
agttgagttcagtatgtttaaagtc

SEQ ID NO: 27019 - DNA, 25 bp, Artificial
  probe
  misc_feature (1)..(25): SEQ ID NO: 4848; WAN0249MJ_at; Start 165; Stop 189
tagtcaactgtctttacagtaaaat

SEQ ID NO: 27020 - DNA, 25 bp, Artificial
  probe
  misc_feature (1)..(25): SEQ ID NO: 4848; WAN0249MJ_at; Start 106; Stop 130
gagctgaaacctcttatttgttaag

SEQ ID NO: 27021 - DNA, 25 bp, Artificial
  probe
  misc_feature (1)..(25): SEQ ID NO: 4848; WAN0249MJ_at; Start 233; Stop 257
gacattcagtcattctcacatcaaa

SEQ ID NO: 27022 - DNA, 25 bp, Artificial
  probe
  misc_feature (1)..(25): SEQ ID NO: 4848; WAN0249MJ_at; Start 96; Stop 120
tagtcgacatgagctgaaacctctt

SEQ ID NO: 27023 - DNA, 25 bp, Artificial
  probe
  misc_feature (1)..(25): SEQ ID NO: 4848; WAN0249MJ_at; Start 220; Stop 244
ttccattttaagtgacattcagtca

SEQ ID NO: 27024 - DNA, 25 bp, Artificial
  probe
  misc_feature (1)..(25): SEQ ID NO: 4848; WAN0249MJ_at; Start 36; Stop 60
gactttcggacgcaacgctctatta

SEQ ID NO: 27025 - DNA, 25 bp, Artificial
  probe
  misc_feature (1)..(25): SEQ ID NO: 3525; WAN0249MK_at; Start 43; Stop 67
cagatatagttgataatcaaggatt

SEQ ID NO: 27026 - DNA, 25 bp, Artificial
  probe
  misc_feature (1)..(25): SEQ ID NO: 3525; WAN0249MK_at; Start 68; Stop 92
tatagtatgaaaaagaggatcggcg

SEQ ID NO: 27027 - DNA, 25 bp, Artificial
  probe
  misc_feature (1)..(25): SEQ ID NO: 3525; WAN0249MK_at; Start 128; Stop 152
gtaacctagaaataagacaactgaa

SEQ ID NO: 27028 - DNA, 25 bp, Artificial
  probe
  misc_feature (1)..(25): SEQ ID NO: 3525; WAN0249MK_at; Start 83; Stop 107
aggatcggcgggtcctcttttgttg

SEQ ID NO: 27029 - DNA, 25 bp, Artificial
  probe
  misc_feature (1)..(25): SEQ ID NO: 3525; WAN0249MK_at; Start 73; Stop 97
tatgaaaaagaggatcggcgggtcc

SEQ ID NO: 27030 - DNA, 25 bp, Artificial
  probe
  misc_feature (1)..(25): SEQ ID NO: 3525; WAN0249MK_at; Start 126; Stop 150
cagtaacctagaaataagacaactg

SEQ ID NO: 27031 - DNA, 25 bp, Artificial
  probe
  misc_feature (1)..(25): SEQ ID NO: 3525; WAN0249MK_at; Start 140; Stop 164
taagacaactgaagctttactctat

SEQ ID NO: 27032 - DNA, 25 bp, Artificial
  probe
  misc_feature (1)..(25): SEQ ID NO: 3525; WAN0249MK_at; Start 75; Stop 99
tgaaaaagaggatcggcgggtcctc

SEQ ID NO: 27033 - DNA, 25 bp, Artificial
  probe
  misc_feature (1)..(25): SEQ ID NO: 3525; WAN0249MK_at; Start 124; Stop 148
ctcagtaacctagaaataagacaac

SEQ ID NO: 27034 - DNA, 25 bp, Artificial
  probe
  misc_feature (1)..(25): SEQ ID NO: 3525; WAN0249MK_at; Start 129; Stop 153
taacctagaaataagacaactgaag

SEQ ID NO: 27035 - DNA, 25 bp, Artificial
  probe
  misc_feature (1)..(25): SEQ ID NO: 3525; WAN0249MK_at; Start 130; Stop 154
aacctagaaataagacaactgaagc

SEQ ID NO: 27036 - DNA, 25 bp, Artificial
  probe
  misc_feature (1)..(25): SEQ ID NO: 3525; WAN0249MK_at; Start 137; Stop 161
aaataagacaactgaagctttactc

SEQ ID NO: 27037 - DNA, 25 bp, Artificial
  probe
  misc_feature (1)..(25): SEQ ID NO: 3525; WAN0249MK_at; Start 16; Stop 40
agtgctgttttgagatttcgattaa

SEQ ID NO: 27038 - DNA, 25 bp, Artificial
  probe
  misc_feature (1)..(25): SEQ ID NO: 3525; WAN0249MK_at; Start 31; Stop 55
tttcgattaaaacagatatagttga

SEQ ID NO: 27039 - DNA, 25 bp, Artificial
  probe
  misc_feature (1)..(25): SEQ ID NO: 3525; WAN0249MK_at; Start 87; Stop 111
tcggcgggtcctcttttgttgttga

SEQ ID NO: 27040 - DNA, 25 bp, Artificial
  probe
  misc_feature (1)..(25): SEQ ID NO: 3525; WAN0249MK_at; Start 34; Stop 58
cgattaaaacagatatagttgataa

SEQ ID NO: 27041 - DNA, 25 bp, Artificial
  probe
  misc_feature (1)..(25): SEQ ID NO: 3525; WAN0249MK_at; Start 1; Stop 25
gaaaagatgtttgaaagtgctgttt

SEQ ID NO: 27042 - DNA, 25 bp, Artificial
  probe
  misc_feature (1)..(25): SEQ ID NO: 3525; WAN0249MK_at; Start 54; Stop 78
gataatcaaggatttatagtatgaa

SEQ ID NO: 27043 - DNA, 25 bp, Artificial
  probe
  misc_feature (1)..(25): SEQ ID NO: 3525; WAN0249MK_at; Start 95; Stop 119
tcctcttttgttgttgaaaagataa

SEQ ID NO: 27044 - DNA, 25 bp, Artificial
  probe
  misc_feature (1)..(25): SEQ ID NO: 3525; WAN0249MK_at; Start 13; Stop 37
gaaagtgctgttttgagatttcgat

SEQ ID NO: 27045 - DNA, 25 bp, Artificial
  probe
  misc_feature (1)..(25): SEQ ID NO: 3525; WAN0249MK_at; Start 103; Stop 127
tgttgttgaaaagataaaaaactca

SEQ ID NO: 27046 - DNA, 25 bp, Artificial
  probe
  misc_feature (1)..(25): SEQ ID NO: 3525; WAN0249MK_at; Start 122; Stop 146
aactcagtaacctagaaataagaca

SEQ ID NO: 27047 - DNA, 25 bp, Artificial
  probe
  misc_feature (1)..(25): SEQ ID NO: 3525; WAN0249MK_at; Start 136; Stop 160
gaaataagacaactgaagctttact

SEQ ID NO: 27048 - DNA, 25 bp, Artificial
  probe
  misc_feature (1)..(25): SEQ ID NO: 3525; WAN0249MK_at; Start 74; Stop 98
atgaaaaagaggatcggcgggtcct

SEQ ID NO: 27049 - DNA, 25 bp, Artificial
  probe
  misc_feature (1)..(25): SEQ ID NO: 3525; WAN0249MK_at; Start 132; Stop 156
cctagaaataagacaactgaagctt

SEQ ID NO: 27050 - DNA, 25 bp, Artificial
  probe
  misc_feature (1)..(25): SEQ ID NO: 3525; WAN0249MK_at; Start 27; Stop 51
gagatttcgattaaaacagatatag

SEQ ID NO: 27051 - DNA, 25 bp, Artificial
  probe
  misc_feature (1)..(25): SEQ ID NO: 3525; WAN0249MK_at; Start 133; Stop 157
ctagaaataagacaactgaagcttt

SEQ ID NO: 27052 - DNA, 25 bp, Artificial
  probe
  misc_feature (1)..(25): SEQ ID NO: 3525; WAN0249MK_at; Start 125; Stop 149
tcagtaacctagaaataagacaact

SEQ ID NO: 27053 - DNA, 25 bp, Artificial
  probe
  misc_feature (1)..(25): SEQ ID NO: 3525; WAN0249MK_at; Start 138; Stop 162
aataagacaactgaagctttactct

SEQ ID NO: 27054 - DNA, 25 bp, Artificial
  probe
  misc_feature (1)..(25): SEQ ID NO: 3525; WAN0249MK_at; Start 6; Stop 30
gatgtttgaaagtgctgttttgaga

SEQ ID NO: 27055 - DNA, 25 bp, Artificial
  probe
  misc_feature (1)..(25): SEQ ID NO: 3525; WAN0249MK_at; Start 142; Stop 166
agacaactgaagctttactctatat

SEQ ID NO: 27056 - DNA, 25 bp, Artificial
  probe
  misc_feature (1)..(25): SEQ ID NO: 3525; WAN0249MK_at; Start 40; Stop 64
aaacagatatagttgataatcaagg

SEQ ID NO: 27057 - DNA, 25 bp, Artificial
  probe
  misc_feature (1)..(25): SEQ ID NO: 3525; WAN0249MK_at; Start 19; Stop 43
gctgttttgagatttcgattaaaac

SEQ ID NO: 27058 - DNA, 25 bp, Artificial
  probe
  misc_feature (1)..(25): SEQ ID NO: 3525; WAN0249MK_at; Start 69; Stop 93
atagtatgaaaaagaggatcggcgg

SEQ ID NO: 27059 - DNA, 25 bp, Artificial
  probe
  misc_feature (1)..(25): SEQ ID NO: 564; WAN0249ML_at; Start 19; Stop 43
gttgtcttatttctaggttactgag

SEQ ID NO: 27060 - DNA, 25 bp, Artificial
  probe
  misc_feature (1)..(25): SEQ ID NO: 564; WAN0249ML_at; Start 49; Stop 73
tatcttttcaacaacaaaagaggac

SEQ ID NO: 27061 - DNA, 25 bp, Artificial
  probe
  misc_feature (1)..(25): SEQ ID NO: 564; WAN0249ML_at; Start 128; Stop 152
taatcgaaatctcaaaacagcactt

SEQ ID NO: 27062 - DNA, 25 bp, Artificial
  probe
  misc_feature (1)..(25): SEQ ID NO: 564; WAN0249ML_at; Start 56; Stop 80
tcaacaacaaaagaggacccgccga

SEQ ID NO: 27063 - DNA, 25 bp, Artificial
  probe
  misc_feature (1)..(25): SEQ ID NO: 564; WAN0249ML_at; Start 137; Stop 161
tctcaaaacagcactttcaaacatc

SEQ ID NO: 27064 - DNA, 25 bp, Artificial
  probe
  misc_feature (1)..(25): SEQ ID NO: 564; WAN0249ML_at; Start 4; Stop 28
tagagtaaagcttcagttgtcttat

SEQ ID NO: 27065 - DNA, 25 bp, Artificial
  probe
  misc_feature (1)..(25): SEQ ID NO: 564; WAN0249ML_at; Start 103; Stop 127
ccttgattatcaactatatctgttt

SEQ ID NO: 27066 - DNA, 25 bp, Artificial
  probe
  misc_feature (1)..(25): SEQ ID NO: 564; WAN0249ML_at; Start 68; Stop 92
gaggacccgccgatcctctttttca

SEQ ID NO: 27067 - DNA, 25 bp, Artificial
  probe
  misc_feature (1)..(25): SEQ ID NO: 564; WAN0249ML_at; Start 126; Stop 150
tttaatcgaaatctcaaaacagcac

SEQ ID NO: 27068 - DNA, 25 bp, Artificial
  probe
  misc_feature (1)..(25): SEQ ID NO: 564; WAN0249ML_at; Start 13; Stop 37
gcttcagttgtcttatttctaggtt

SEQ ID NO: 27069 - DNA, 25 bp, Artificial
  probe
  misc_feature (1)..(25): SEQ ID NO: 564; WAN0249ML_at; Start 74; Stop 98
ccgccgatcctctttttcatactat

SEQ ID NO: 27070 - DNA, 25 bp, Artificial
  probe
  misc_feature (1)..(25): SEQ ID NO: 564; WAN0249ML_at; Start 15; Stop 39
ttcagttgtcttatttctaggttac

SEQ ID NO: 27071 - DNA, 25 bp, Artificial
  probe
  misc_feature (1)..(25): SEQ ID NO: 564; WAN0249ML_at; Start 1; Stop 25
atatagagtaaagcttcagttgtct

SEQ ID NO: 27072 - DNA, 25 bp, Artificial
  probe
  misc_feature (1)..(25): SEQ ID NO: 564; WAN0249ML_at; Start 6; Stop 30
gagtaaagcttcagttgtcttattt

SEQ ID NO: 27073 - DNA, 25 bp, Artificial
  probe
  misc_feature (1)..(25): SEQ ID NO: 564; WAN0249ML_at; Start 60; Stop 84
caacaaaagaggacccgccgatcct

SEQ ID NO: 27074 - DNA, 25 bp, Artificial
  probe
  misc_feature (1)..(25): SEQ ID NO: 564; WAN0249ML_at; Start 11; Stop 35
aagcttcagttgtcttatttctagg

SEQ ID NO: 27075 - DNA, 25 bp, Artificial
  probe
  misc_feature (1)..(25): SEQ ID NO: 564; WAN0249ML_at; Start 93; Stop 117
tactataaatccttgattatcaact

SEQ ID NO: 27076 - DNA, 25 bp, Artificial
  probe
  misc_feature (1)..(25): SEQ ID NO: 564; WAN0249ML_at; Start 37; Stop 61
tactgagttttttatcttttcaaca

SEQ ID NO: 27077 - DNA, 25 bp, Artificial
  probe
  misc_feature (1)..(25): SEQ ID NO: 564; WAN0249ML_at; Start 83; Stop 107
ctctttttcatactataaatccttg

SEQ ID NO: 27078 - DNA, 25 bp, Artificial
  probe
  misc_feature (1)..(25): SEQ ID NO: 564; WAN0249ML_at; Start 127; Stop 151
ttaatcgaaatctcaaaacagcact

SEQ ID NO: 27079 - DNA, 25 bp, Artificial
  probe
  misc_feature (1)..(25): SEQ ID NO: 564; WAN0249ML_at; Start 21; Stop 45
tgtcttatttctaggttactgagtt

SEQ ID NO: 27080 - DNA, 25 bp, Artificial
  probe
  misc_feature (1)..(25): SEQ ID NO: 564; WAN0249ML_at; Start 133; Stop 157
gaaatctcaaaacagcactttcaaa

SEQ ID NO: 27081 - DNA, 25 bp, Artificial
  probe
  misc_feature (1)..(25): SEQ ID NO: 564; WAN0249ML_at; Start 112; Stop 136
tcaactatatctgttttaatcgaaa

SEQ ID NO: 27082 - DNA, 25 bp, Artificial
  probe
  misc_feature (1)..(25): SEQ ID NO: 564; WAN0249ML_at; Start 57; Stop 81
caacaacaaaagaggacccgccgat

SEQ ID NO: 27083 - DNA, 25 bp, Artificial
  probe
  misc_feature (1)..(25): SEQ ID NO: 564; WAN0249ML_at; Start 119; Stop 143
tatctgttttaatcgaaatctcaaa

SEQ ID NO: 27084 - DNA, 25 bp, Artificial
  probe
  misc_feature (1)..(25): SEQ ID NO: 564; WAN0249ML_at; Start 70; Stop 94
ggacccgccgatcctctttttcata

SEQ ID NO: 27085 - DNA, 25 bp, Artificial
  probe
  misc_feature (1)..(25): SEQ ID NO: 564; WAN0249ML_at; Start 131; Stop 155
tcgaaatctcaaaacagcactttca

SEQ ID NO: 27086 - DNA, 25 bp, Artificial
  probe
  misc_feature (1)..(25): SEQ ID NO: 564; WAN0249ML_at; Start 139; Stop 163
tcaaaacagcactttcaaacatctt

SEQ ID NO: 27087 - DNA, 25 bp, Artificial
  probe
  misc_feature (1)..(25): SEQ ID NO: 564; WAN0249ML_at; Start 100; Stop 124
aatccttgattatcaactatatctg

SEQ ID NO: 27088 - DNA, 25 bp, Artificial
  probe
  misc_feature (1)..(25): SEQ ID NO: 564; WAN0249ML_at; Start 129; Stop 153
aatcgaaatctcaaaacagcacttt

SEQ ID NO: 27089 - DNA, 25 bp, Artificial
  probe
  misc_feature (1)..(25): SEQ ID NO: 564; WAN0249ML_at; Start 116; Stop 140
ctatatctgttttaatcgaaatctc

SEQ ID NO: 27090 - DNA, 25 bp, Artificial
  probe
  misc_feature (1)..(25): SEQ ID NO: 564; WAN0249ML_at; Start 2; Stop 26
tatagagtaaagcttcagttgtctt

SEQ ID NO: 27091 - DNA, 25 bp, Artificial
  probe
  misc_feature (1)..(25): SEQ ID NO: 564; WAN0249ML_at; Start 76; Stop 100
gccgatcctctttttcatactataa

SEQ ID NO: 27092 - DNA, 25 bp, Artificial
  probe
  misc_feature (1)..(25): SEQ ID NO: 564; WAN0249ML_at; Start 142; Stop 166
aaacagcactttcaaacatcttttc

SEQ ID NO: 27093 - DNA, 25 bp, Artificial
  probe
  misc_feature (1)..(25): SEQ ID NO: 498; WAN0249MM_at; Start 102; Stop 126
gtatttatctgttgacatattcaaa

SEQ ID NO: 27094 - DNA, 25 bp, Artificial
  probe
  misc_feature (1)..(25): SEQ ID NO: 498; WAN0249MM_at; Start 44; Stop 68
ttctttatccgaggagcgagaatcg

SEQ ID NO: 27095 - DNA, 25 bp, Artificial
  probe
  misc_feature (1)..(25): SEQ ID NO: 498; WAN0249MM_at; Start 51; Stop 75
tccgaggagcgagaatcgattatca

SEQ ID NO: 27096 - DNA, 25 bp, Artificial
  probe
  misc_feature (1)..(25): SEQ ID NO: 498; WAN0249MM_at; Start 234; Stop 258
caaagccgacagtatagtctggatg

SEQ ID NO: 27097 - DNA, 25 bp, Artificial
  probe
  misc_feature (1)..(25): SEQ ID NO: 498; WAN0249MM_at; Start 207; Stop 231
gccgaaaggcatgatttggtgaaat

SEQ ID NO: 27098 - DNA, 25 bp, Artificial
  probe
  misc_feature (1)..(25): SEQ ID NO: 498; WAN0249MM_at; Start 10; Stop 34
tctctcttatttcgtttatctagta

SEQ ID NO: 27099 - DNA, 25 bp, Artificial
  probe
  misc_feature (1)..(25): SEQ ID NO: 498; WAN0249MM_at; Start 192; Stop 216
tggtatagcccacgagccgaaaggc

SEQ ID NO: 27100 - DNA, 25 bp, Artificial
  probe
  misc_feature (1)..(25): SEQ ID NO: 498; WAN0249MM_at; Start 239; Stop 263
ccgacagtatagtctggatgaaaga

SEQ ID NO: 27101 - DNA, 25 bp, Artificial
  probe
  misc_feature (1)..(25): SEQ ID NO: 498; WAN0249MM_at; Start 142; Stop 166
catctgtaattgaataactatcttc

SEQ ID NO: 27102 - DNA, 25 bp, Artificial
  probe
  misc_feature (1)..(25): SEQ ID NO: 498; WAN0249MM_at; Start 210; Stop 234
gaaaggcatgatttggtgaaattcc

SEQ ID NO: 27103 - DNA, 25 bp, Artificial
  probe
  misc_feature (1)..(25): SEQ ID NO: 498; WAN0249MM_at; Start 183; Stop 207
ccctaccggtggtatagcccacgag

SEQ ID NO: 27104 - DNA, 25 bp, Artificial
  probe
  misc_feature (1)..(25): SEQ ID NO: 498; WAN0249MM_at; Start 270; Stop 294
aagtatatttgtgctttttgcgtgc

SEQ ID NO: 27105 - DNA, 25 bp, Artificial
  probe
  misc_feature (1)..(25): SEQ ID NO: 498; WAN0249MM_at; Start 47; Stop 71
tttatccgaggagcgagaatcgatt

SEQ ID NO: 27106 - DNA, 25 bp, Artificial
  probe
  misc_feature (1)..(25): SEQ ID NO: 498; WAN0249MM_at; Start 61; Stop 85
gagaatcgattatcacaaatacagt

SEQ ID NO: 27107 - DNA, 25 bp, Artificial
  probe
  misc_feature (1)..(25): SEQ ID NO: 498; WAN0249MM_at; Start 199; Stop 223
gcccacgagccgaaaggcatgattt

SEQ ID NO: 27108 - DNA, 25 bp, Artificial
  probe
  misc_feature (1)..(25): SEQ ID NO: 498; WAN0249MM_at; Start 54; Stop 78
gaggagcgagaatcgattatcacaa

SEQ ID NO: 27109 - DNA, 25 bp, Artificial
  probe
  misc_feature (1)..(25): SEQ ID NO: 498; WAN0249MM_at; Start 195; Stop 219
tatagcccacgagccgaaaggcatg

SEQ ID NO: 27110 - DNA, 25 bp, Artificial
  probe
  misc_feature (1)..(25): SEQ ID NO: 498; WAN0249MM_at; Start 67; Stop 91
cgattatcacaaatacagtatatca

SEQ ID NO: 27111 - DNA, 25 bp, Artificial
  probe
  misc_feature (1)..(25): SEQ ID NO: 498; WAN0249MM_at; Start 202; Stop 226
cacgagccgaaaggcatgatttggt

SEQ ID NO: 27112 - DNA, 25 bp, Artificial
  probe
  misc_feature (1)..(25): SEQ ID NO: 498; WAN0249MM_at; Start 275; Stop 299
tatttgtgctttttgcgtgctctga

SEQ ID NO: 27113 - DNA, 25 bp, Artificial
  probe
  misc_feature (1)..(25): SEQ ID NO: 498; WAN0249MM_at; Start 226; Stop 250
tgaaattccaaagccgacagtatag

SEQ ID NO: 27114 - DNA, 25 bp, Artificial
  probe
  misc_feature (1)..(25): SEQ ID NO: 498; WAN0249MM_at; Start 37; Stop 61
tcatattttctttatccgaggagcg

SEQ ID NO: 27115 - DNA, 25 bp, Artificial
  probe
  misc_feature (1)..(25): SEQ ID NO: 498; WAN0249MM_at; Start 224; Stop 248
ggtgaaattccaaagccgacagtat

SEQ ID NO: 27116 - DNA, 25 bp, Artificial
  probe
  misc_feature (1)..(25): SEQ ID NO: 498; WAN0249MM_at; Start 284; Stop 308
tttttgcgtgctctgaaatgattac

SEQ ID NO: 27117 - DNA, 25 bp, Artificial
  probe
  misc_feature (1)..(25): SEQ ID NO: 498; WAN0249MM_at; Start 251; Stop 275
tctggatgaaagaagataaaagtat

SEQ ID NO: 27118 - DNA, 25 bp, Artificial
  probe
  misc_feature (1)..(25): SEQ ID NO: 498; WAN0249MM_at; Start 219; Stop 243
gatttggtgaaattccaaagccgac

SEQ ID NO: 27119 - DNA, 25 bp, Artificial
  probe
  misc_feature (1)..(25): SEQ ID NO: 498; WAN0249MM_at; Start 243; Stop 267
cagtatagtctggatgaaagaagat

SEQ ID NO: 27120 - DNA, 25 bp, Artificial
  probe
  misc_feature (1)..(25): SEQ ID NO: 498; WAN0249MM_at; Start 111; Stop 135
tgttgacatattcaaaattaagtac

SEQ ID NO: 27121 - DNA, 25 bp, Artificial
  probe
  misc_feature (1)..(25): SEQ ID NO: 498; WAN0249MM_at; Start 231; Stop 255
ttccaaagccgacagtatagtctgg

SEQ ID NO: 27122 - DNA, 25 bp, Artificial
  probe
  misc_feature (1)..(25): SEQ ID NO: 498; WAN0249MM_at; Start 129; Stop 153
taagtactataatcatctgtaattg

SEQ ID NO: 27123 - DNA, 25 bp, Artificial
  probe
  misc_feature (1)..(25): SEQ ID NO: 498; WAN0249MM_at; Start 279; Stop 303
tgtgctttttgcgtgctctgaaatg

SEQ ID NO: 27124 - DNA, 25 bp, Artificial
  probe
  misc_feature (1)..(25): SEQ ID NO: 498; WAN0249MM_at; Start 76; Stop 100
caaatacagtatatcaaaaacaatc

SEQ ID NO: 27125 - DNA, 25 bp, Artificial
  probe
  misc_feature (1)..(25): SEQ ID NO: 498; WAN0249MM_at; Start 152; Stop 176
tgaataactatcttcagggcagggt

SEQ ID NO: 27126 - DNA, 25 bp, Artificial
  probe
  misc_feature (1)..(25): SEQ ID NO: 498; WAN0249MM_at; Start 40; Stop 64
tattttctttatccgaggagcgaga

SEQ ID NO: 27127 - DNA, 25 bp, Artificial
  probe
  misc_feature (1)..(25): SEQ ID NO: 3792; WAN0249MN_at; Start 56; Stop 80
agactatactgtcggctttggaatt

SEQ ID NO: 27128 - DNA, 25 bp, Artificial
  probe
  misc_feature (1)..(25): SEQ ID NO: 3792; WAN0249MN_at; Start 99; Stop 123
cggctcgtgggctataccaccggta

SEQ ID NO: 27129 - DNA, 25 bp, Artificial
  probe
  misc_feature (1)..(25): SEQ ID NO: 3792; WAN0249MN_at; Start 253; Stop 277
ctcggataaagaaaatatgatatac

SEQ ID NO: 27130 - DNA, 25 bp, Artificial
  probe
  misc_feature (1)..(25): SEQ ID NO: 3792; WAN0249MN_at; Start 62; Stop 86
tactgtcggctttggaatttcacca

SEQ ID NO: 27131 - DNA, 25 bp, Artificial
  probe
  misc_feature (1)..(25): SEQ ID NO: 3792; WAN0249MN_at; Start 238; Stop 262
aatcgattctcgctcctcggataaa

SEQ ID NO: 27132 - DNA, 25 bp, Artificial
  probe
  misc_feature (1)..(25): SEQ ID NO: 3792; WAN0249MN_at; Start 77; Stop 101
aatttcaccaaatcatgcctttcgg

SEQ ID NO: 27133 - DNA, 25 bp, Artificial
  probe
  misc_feature (1)..(25): SEQ ID NO: 3792; WAN0249MN_at; Start 41; Stop 65
tatcttctttcatccagactatact

SEQ ID NO: 27134 - DNA, 25 bp, Artificial
  probe
  misc_feature (1)..(25): SEQ ID NO: 3792; WAN0249MN_at; Start 135; Stop 159
cctgccctgaagatagttattcaat

SEQ ID NO: 27135 - DNA, 25 bp, Artificial
  probe
  misc_feature (1)..(25): SEQ ID NO: 3792; WAN0249MN_at; Start 15; Stop 39
gcacgcaaaaagcacaaatatactt

SEQ ID NO: 27136 - DNA, 25 bp, Artificial
  probe
  misc_feature (1)..(25): SEQ ID NO: 3792; WAN0249MN_at; Start 280; Stop 304
gataaacgaaataagagagaaggaa

SEQ ID NO: 27137 - DNA, 25 bp, Artificial
  probe
  misc_feature (1)..(25): SEQ ID NO: 3792; WAN0249MN_at; Start 90; Stop 114
catgcctttcggctcgtgggctata

SEQ ID NO: 27138 - DNA, 25 bp, Artificial
  probe
  misc_feature (1)..(25): SEQ ID NO: 3792; WAN0249MN_at; Start 249; Stop 273
gctcctcggataaagaaaatatgat

SEQ ID NO: 27139 - DNA, 25 bp, Artificial
  probe
  misc_feature (1)..(25): SEQ ID NO: 3792; WAN0249MN_at; Start 133; Stop 157
accctgccctgaagatagttattca

SEQ ID NO: 27140 - DNA, 25 bp, Artificial
  probe
  misc_feature (1)..(25): SEQ ID NO: 3792; WAN0249MN_at; Start 33; Stop 57
tatacttttatcttctttcatccag

SEQ ID NO: 27141 - DNA, 25 bp, Artificial
  probe
  misc_feature (1)..(25): SEQ ID NO: 3792; WAN0249MN_at; Start 60; Stop 84
tatactgtcggctttggaatttcac

SEQ ID NO: 27142 - DNA, 25 bp, Artificial
  probe
  misc_feature (1)..(25): SEQ ID NO: 3792; WAN0249MN_at; Start 85; Stop 109
caaatcatgcctttcggctcgtggg

SEQ ID NO: 27143 - DNA, 25 bp, Artificial
  probe
  misc_feature (1)..(25): SEQ ID NO: 3792; WAN0249MN_at; Start 232; Stop 256
tgtgataatcgattctcgctcctcg

SEQ ID NO: 27144 - DNA, 25 bp, Artificial
  probe
  misc_feature (1)..(25): SEQ ID NO: 3792; WAN0249MN_at; Start 69; Stop 93
ggctttggaatttcaccaaatcatg

SEQ ID NO: 27145 - DNA, 25 bp, Artificial
  probe
  misc_feature (1)..(25): SEQ ID NO: 3792; WAN0249MN_at; Start 175; Stop 199
tacttaattttgaatatgtcaacag

SEQ ID NO: 27146 - DNA, 25 bp, Artificial
  probe
  misc_feature (1)..(25): SEQ ID NO: 3792; WAN0249MN_at; Start 226; Stop 250
tgtatttgtgataatcgattctcgc

SEQ ID NO: 27147 - DNA, 25 bp, Artificial
  probe
  misc_feature (1)..(25): SEQ ID NO: 3792; WAN0249MN_at; Start 143; Stop 167
gaagatagttattcaattacagatg

SEQ ID NO: 27148 - DNA, 25 bp, Artificial
  probe
  misc_feature (1)..(25): SEQ ID NO: 3792; WAN0249MN_at; Start 242; Stop 266
gattctcgctcctcggataaagaaa

SEQ ID NO: 27149 - DNA, 25 bp, Artificial
  probe
  misc_feature (1)..(25): SEQ ID NO: 3792; WAN0249MN_at; Start 235; Stop 259
gataatcgattctcgctcctcggat

SEQ ID NO: 27150 - DNA, 25 bp, Artificial
  probe
  misc_feature (1)..(25): SEQ ID NO: 3792; WAN0249MN_at; Start 156; Stop 180
caattacagatgattatagtactta

SEQ ID NO: 27151 - DNA, 25 bp, Artificial
  probe
  misc_feature (1)..(25): SEQ ID NO: 3792; WAN0249MN_at; Start 10; Stop 34
tcagagcacgcaaaaagcacaaata

SEQ ID NO: 27152 - DNA, 25 bp, Artificial
  probe
  misc_feature (1)..(25): SEQ ID NO: 3792; WAN0249MN_at; Start 275; Stop 299
tactagataaacgaaataagagaga

SEQ ID NO: 27153 - DNA, 25 bp, Artificial
  probe
  misc_feature (1)..(25): SEQ ID NO: 3792; WAN0249MN_at; Start 2; Stop 26
taatcatttcagagcacgcaaaaag

SEQ ID NO: 27154 - DNA, 25 bp, Artificial
  probe
  misc_feature (1)..(25): SEQ ID NO: 3792; WAN0249MN_at; Start 183; Stop 207
tttgaatatgtcaacagataaatac

SEQ ID NO: 27155 - DNA, 25 bp, Artificial
  probe
  misc_feature (1)..(25): SEQ ID NO: 3792; WAN0249MN_at; Start 93; Stop 117
gcctttcggctcgtgggctatacca

SEQ ID NO: 27156 - DNA, 25 bp, Artificial
  probe
  misc_feature (1)..(25): SEQ ID NO: 3792; WAN0249MN_at; Start 219; Stop 243
gatatactgtatttgtgataatcga

SEQ ID NO: 27157 - DNA, 25 bp, Artificial
  probe
  misc_feature (1)..(25): SEQ ID NO: 3792; WAN0249MN_at; Start 247; Stop 271
tcgctcctcggataaagaaaatatg

SEQ ID NO: 27158 - DNA, 25 bp, Artificial
  probe
  misc_feature (1)..(25): SEQ ID NO: 3792; WAN0249MN_at; Start 87; Stop 111
aatcatgcctttcggctcgtgggct

SEQ ID NO: 27159 - DNA, 25 bp, Artificial
  probe
  misc_feature (1)..(25): SEQ ID NO: 3792; WAN0249MN_at; Start 6; Stop 30
catttcagagcacgcaaaaagcaca

SEQ ID NO: 27160 - DNA, 25 bp, Artificial
  probe
  misc_feature (1)..(25): SEQ ID NO: 3792; WAN0249MN_at; Start 102; Stop 126
ctcgtgggctataccaccggtaggg

SEQ ID NO: 27161 - DNA, 25 bp, Artificial
  probe
  misc_feature (1)..(25): SEQ ID NO: 2252; WAN0249MO_at; Start 10; Stop 34
taaggcaaattgttcagaactgaat

SEQ ID NO: 27162 - DNA, 25 bp, Artificial
  probe
  misc_feature (1)..(25): SEQ ID NO: 2252; WAN0249MO_at; Start 31; Stop 55
gaataaagctgacgttttgcttcta

SEQ ID NO: 27163 - DNA, 25 bp, Artificial
  probe
  misc_feature (1)..(25): SEQ ID NO: 2252; WAN0249MO_at; Start 35; Stop 59
aaagctgacgttttgcttctatcct

SEQ ID NO: 27164 - DNA, 25 bp, Artificial
  probe
  misc_feature (1)..(25): SEQ ID NO: 2252; WAN0249MO_at; Start 21; Stop 45
gttcagaactgaataaagctgacgt

SEQ ID NO: 27165 - DNA, 25 bp, Artificial
  probe
  misc_feature (1)..(25): SEQ ID NO: 2252; WAN0249MO_at; Start 23; Stop 47
tcagaactgaataaagctgacgttt

SEQ ID NO: 27166 - DNA, 25 bp, Artificial
  probe
  misc_feature (1)..(25): SEQ ID NO: 2252; WAN0249MO_at; Start 40; Stop 64
tgacgttttgcttctatcctttctt

SEQ ID NO: 27167 - DNA, 25 bp, Artificial
  probe
  misc_feature (1)..(25): SEQ ID NO: 2252; WAN0249MO_at; Start 72; Stop 96
tagtggataatgataatgaacaagg

SEQ ID NO: 27168 - DNA, 25 bp, Artificial
  probe
  misc_feature (1)..(25): SEQ ID NO: 2252; WAN0249MO_at; Start 26; Stop 50
gaactgaataaagctgacgttttgc

SEQ ID NO: 27169 - DNA, 25 bp, Artificial
  probe
  misc_feature (1)..(25): SEQ ID NO: 2252; WAN0249MO_at; Start 24; Stop 48
cagaactgaataaagctgacgtttt

SEQ ID NO: 27170 - DNA, 25 bp, Artificial
  probe
  misc_feature (1)..(25): SEQ ID NO: 2252; WAN0249MO_at; Start 4; Stop 28
gacacttaaggcaaattgttcagaa

SEQ ID NO: 27171 - DNA, 25 bp, Artificial
  probe
  misc_feature (1)..(25): SEQ ID NO: 2252; WAN0249MO_at; Start 99; Stop 123
ttcataaatctattataacaaagga

SEQ ID NO: 27172 - DNA, 25 bp, Artificial
  probe
  misc_feature (1)..(25): SEQ ID NO: 2252; WAN0249MO_at; Start 54; Stop 78
tatcctttctttgagttttagtgga

SEQ ID NO: 27173 - DNA, 25 bp, Artificial
  probe
  misc_feature (1)..(25): SEQ ID NO: 2252; WAN0249MO_at; Start 13; Stop 37
ggcaaattgttcagaactgaataaa

SEQ ID NO: 27174 - DNA, 25 bp, Artificial
  probe
  misc_feature (1)..(25): SEQ ID NO: 2252; WAN0249MO_at; Start 44; Stop 68
gttttgcttctatcctttctttgag

SEQ ID NO: 27175 - DNA, 25 bp, Artificial
  probe
  misc_feature (1)..(25): SEQ ID NO: 2252; WAN0249MO_at; Start 20; Stop 44
tgttcagaactgaataaagctgacg

SEQ ID NO: 27176 - DNA, 25 bp, Artificial
  probe
  misc_feature (1)..(25): SEQ ID NO: 2252; WAN0249MO_at; Start 77; Stop 101
gataatgataatgaacaaggtgttc

SEQ ID NO: 27177 - DNA, 25 bp, Artificial
  probe
  misc_feature (1)..(25): SEQ ID NO: 2252; WAN0249MO_at; Start 49; Stop 73
gcttctatcctttctttgagtttta

SEQ ID NO: 27178 - DNA, 25 bp, Artificial
  probe
  misc_feature (1)..(25): SEQ ID NO: 2252; WAN0249MO_at; Start 56; Stop 80
tcctttctttgagttttagtggata

SEQ ID NO: 27179 - DNA, 25 bp, Artificial
  probe
  misc_feature (1)..(25): SEQ ID NO: 2252; WAN0249MO_at; Start 29; Stop 53
ctgaataaagctgacgttttgcttc

SEQ ID NO: 27180 - DNA, 25 bp, Artificial
  probe
  misc_feature (1)..(25): SEQ ID NO: 2252; WAN0249MO_at; Start 6; Stop 30
cacttaaggcaaattgttcagaact

SEQ ID NO: 27181 - DNA, 25 bp, Artificial
  probe
  misc_feature (1)..(25): SEQ ID NO: 2252; WAN0249MO_at; Start 92; Stop 116
caaggtgttcataaatctattataa

SEQ ID NO: 27182 - DNA, 25 bp, Artificial
  probe
  misc_feature (1)..(25): SEQ ID NO: 2252; WAN0249MO_at; Start 8; Stop 32
cttaaggcaaattgttcagaactga

SEQ ID NO: 27183 - DNA, 25 bp, Artificial
  probe
  misc_feature (1)..(25): SEQ ID NO: 2252; WAN0249MO_at; Start 34; Stop 58
taaagctgacgttttgcttctatcc

SEQ ID NO: 27184 - DNA, 25 bp, Artificial
  probe
  misc_feature (1)..(25): SEQ ID NO: 2252; WAN0249MO_at; Start 15; Stop 39
caaattgttcagaactgaataaagc

SEQ ID NO: 27185 - DNA, 25 bp, Artificial
  probe
  misc_feature (1)..(25): SEQ ID NO: 2252; WAN0249MO_at; Start 58; Stop 82
ctttctttgagttttagtggataat

SEQ ID NO: 27186 - DNA, 25 bp, Artificial
  probe
  misc_feature (1)..(25): SEQ ID NO: 2252; WAN0249MO_at; Start 5; Stop 29
acacttaaggcaaattgttcagaac

SEQ ID NO: 27187 - DNA, 25 bp, Artificial
  probe
  misc_feature (1)..(25): SEQ ID NO: 2252; WAN0249MO_at; Start 38; Stop 62
gctgacgttttgcttctatcctttc

SEQ ID NO: 27188 - DNA, 25 bp, Artificial
  probe
  misc_feature (1)..(25): SEQ ID NO: 2252; WAN0249MO_at; Start 1; Stop 25
atggacacttaaggcaaattgttca

SEQ ID NO: 27189 - DNA, 25 bp, Artificial
  probe
  misc_feature (1)..(25): SEQ ID NO: 2252; WAN0249MO_at; Start 89; Stop 113
gaacaaggtgttcataaatctatta

SEQ ID NO: 27190 - DNA, 25 bp, Artificial
  probe
  misc_feature (1)..(25): SEQ ID NO: 2252; WAN0249MO_at; Start 3; Stop 27
ggacacttaaggcaaattgttcaga

SEQ ID NO: 27191 - DNA, 25 bp, Artificial
  probe
  misc_feature (1)..(25): SEQ ID NO: 2252; WAN0249MO_at; Start 27; Stop 51
aactgaataaagctgacgttttgct

SEQ ID NO: 27192 - DNA, 25 bp, Artificial
  probe
  misc_feature (1)..(25): SEQ ID NO: 2252; WAN0249MO_at; Start 75; Stop 99
tggataatgataatgaacaaggtgt

SEQ ID NO: 27193 - DNA, 25 bp, Artificial
  probe
  misc_feature (1)..(25): SEQ ID NO: 2252; WAN0249MO_at; Start 22; Stop 46
ttcagaactgaataaagctgacgtt

SEQ ID NO: 27194 - DNA, 25 bp, Artificial
  probe
  misc_feature (1)..(25): SEQ ID NO: 2252; WAN0249MO_at; Start 62; Stop 86
ctttgagttttagtggataatgata

SEQ ID NO: 27195 - DNA, 25 bp, Artificial
  probe
  misc_feature (1)..(25): SEQ ID NO: 4629; WAN0249MP_at; Start 44; Stop 68
tatccactaaaactcaaagaaagga

SEQ ID NO: 27196 - DNA, 25 bp, Artificial
  probe
  misc_feature (1)..(25): SEQ ID NO: 4629; WAN0249MP_at; Start 38; Stop 62
tatcattatccactaaaactcaaag

SEQ ID NO: 27197 - DNA, 25 bp, Artificial
  probe
  misc_feature (1)..(25): SEQ ID NO: 4629; WAN0249MP_at; Start 51; Stop 75
taaaactcaaagaaaggatagaagc

SEQ ID NO: 27198 - DNA, 25 bp, Artificial
  probe
  misc_feature (1)..(25): SEQ ID NO: 4629; WAN0249MP_at; Start 69; Stop 93
tagaagcaaaacgtcagctttattc

SEQ ID NO: 27199 - DNA, 25 bp, Artificial
  probe
  misc_feature (1)..(25): SEQ ID NO: 4629; WAN0249MP_at; Start 78; Stop 102
aacgtcagctttattcagttctgaa

SEQ ID NO: 27200 - DNA, 25 bp, Artificial
  probe
  misc_feature (1)..(25): SEQ ID NO: 4629; WAN0249MP_at; Start 40; Stop 64
tcattatccactaaaactcaaagaa

SEQ ID NO: 27201 - DNA, 25 bp, Artificial
  probe
  misc_feature (1)..(25): SEQ ID NO: 4629; WAN0249MP_at; Start 28; Stop 52
ccttgttcattatcattatccacta

SEQ ID NO: 27202 - DNA, 25 bp, Artificial
  probe
  misc_feature (1)..(25): SEQ ID NO: 4629; WAN0249MP_at; Start 67; Stop 91
gatagaagcaaaacgtcagctttat

SEQ ID NO: 27203 - DNA, 25 bp, Artificial
  probe
  misc_feature (1)..(25): SEQ ID NO: 4629; WAN0249MP_at; Start 89; Stop 113
tattcagttctgaacaatttgcctt

SEQ ID NO: 27204 - DNA, 25 bp, Artificial
  probe
  misc_feature (1)..(25): SEQ ID NO: 4629; WAN0249MP_at; Start 80; Stop 104
cgtcagctttattcagttctgaaca

SEQ ID NO: 27205 - DNA, 25 bp, Artificial
  probe
  misc_feature (1)..(25): SEQ ID NO: 4629; WAN0249MP_at; Start 63; Stop 87
aaaggatagaagcaaaacgtcagct

SEQ ID NO: 27206 - DNA, 25 bp, Artificial
  probe
  misc_feature (1)..(25): SEQ ID NO: 4629; WAN0249MP_at; Start 97; Stop 121
tctgaacaatttgccttaagtgtcc

SEQ ID NO: 27207 - DNA, 25 bp, Artificial
  probe
  misc_feature (1)..(25): SEQ ID NO: 4629; WAN0249MP_at; Start 74; Stop 98
gcaaaacgtcagctttattcagttc

SEQ ID NO: 27208 - DNA, 25 bp, Artificial
  probe
  misc_feature (1)..(25): SEQ ID NO: 4629; WAN0249MP_at; Start 62; Stop 86
gaaaggatagaagcaaaacgtcagc

SEQ ID NO: 27209 - DNA, 25 bp, Artificial
  probe
  misc_feature (1)..(25): SEQ ID NO: 4629; WAN0249MP_at; Start 26; Stop 50
caccttgttcattatcattatccac

SEQ ID NO: 27210 - DNA, 25 bp, Artificial
  probe
  misc_feature (1)..(25): SEQ ID NO: 4629; WAN0249MP_at; Start 47; Stop 71
ccactaaaactcaaagaaaggatag

SEQ ID NO: 27211 - DNA, 25 bp, Artificial
  probe
  misc_feature (1)..(25): SEQ ID NO: 4629; WAN0249MP_at; Start 56; Stop 80
ctcaaagaaaggatagaagcaaaac

SEQ ID NO: 27212 - DNA, 25 bp, Artificial
  probe
  misc_feature (1)..(25): SEQ ID NO: 4629; WAN0249MP_at; Start 92; Stop 116
tcagttctgaacaatttgccttaag

SEQ ID NO: 27213 - DNA, 25 bp, Artificial
  probe
  misc_feature (1)..(25): SEQ ID NO: 4629; WAN0249MP_at; Start 66; Stop 90
ggatagaagcaaaacgtcagcttta

SEQ ID NO: 27214 - DNA, 25 bp, Artificial
  probe
  misc_feature (1)..(25): SEQ ID NO: 4629; WAN0249MP_at; Start 48; Stop 72
cactaaaactcaaagaaaggataga

SEQ ID NO: 27215 - DNA, 25 bp, Artificial
  probe
  misc_feature (1)..(25): SEQ ID NO: 4629; WAN0249MP_at; Start 76; Stop 100
aaaacgtcagctttattcagttctg

SEQ ID NO: 27216 - DNA, 25 bp, Artificial
  probe
  misc_feature (1)..(25): SEQ ID NO: 4629; WAN0249MP_at; Start 65; Stop 89
aggatagaagcaaaacgtcagcttt

SEQ ID NO: 27217 - DNA, 25 bp, Artificial
  probe
  misc_feature (1)..(25): SEQ ID NO: 4629; WAN0249MP_at; Start 99; Stop 123
tgaacaatttgccttaagtgtccat

SEQ ID NO: 27218 - DNA, 25 bp, Artificial
  probe
  misc_feature (1)..(25): SEQ ID NO: 4629; WAN0249MP_at; Start 82; Stop 106
tcagctttattcagttctgaacaat

SEQ ID NO: 27219 - DNA, 25 bp, Artificial
  probe
  misc_feature (1)..(25): SEQ ID NO: 4629; WAN0249MP_at; Start 52; Stop 76
aaaactcaaagaaaggatagaagca

SEQ ID NO: 27220 - DNA, 25 bp, Artificial
  probe
  misc_feature (1)..(25): SEQ ID NO: 4629; WAN0249MP_at; Start 58; Stop 82
caaagaaaggatagaagcaaaacgt

SEQ ID NO: 27221 - DNA, 25 bp, Artificial
  probe
  misc_feature (1)..(25): SEQ ID NO: 4629; WAN0249MP_at; Start 71; Stop 95
gaagcaaaacgtcagctttattcag

SEQ ID NO: 27222 - DNA, 25 bp, Artificial
  probe
  misc_feature (1)..(25): SEQ ID NO: 4629; WAN0249MP_at; Start 2; Stop 26
cctttgttataatagatttatgaac

SEQ ID NO: 27223 - DNA, 25 bp, Artificial
  probe
  misc_feature (1)..(25): SEQ ID NO: 4629; WAN0249MP_at; Start 60; Stop 84
aagaaaggatagaagcaaaacgtca

SEQ ID NO: 27224 - DNA, 25 bp, Artificial
  probe
  misc_feature (1)..(25): SEQ ID NO: 4629; WAN0249MP_at; Start 23; Stop 47
gaacaccttgttcattatcattatc

SEQ ID NO: 27225 - DNA, 25 bp, Artificial
  probe
  misc_feature (1)..(25): SEQ ID NO: 4629; WAN0249MP_at; Start 11; Stop 35
taatagatttatgaacaccttgttc

SEQ ID NO: 27226 - DNA, 25 bp, Artificial
  probe
  misc_feature (1)..(25): SEQ ID NO: 4629; WAN0249MP_at; Start 87; Stop 111
tttattcagttctgaacaatttgcc

SEQ ID NO: 27227 - DNA, 25 bp, Artificial
  probe
  misc_feature (1)..(25): SEQ ID NO: 4629; WAN0249MP_at; Start 94; Stop 118
agttctgaacaatttgccttaagtg

SEQ ID NO: 27228 - DNA, 25 bp, Artificial
  probe
  misc_feature (1)..(25): SEQ ID NO: 4629; WAN0249MP_at; Start 54; Stop 78
aactcaaagaaaggatagaagcaaa

SEQ ID NO: 27229 - DNA, 25 bp, Artificial
  probe
  misc_feature (1)..(25): SEQ ID NO: 58; WAN0249MQ_at; Start 201; Stop 225
gaatagcgtgaattcagtgaatgaa

SEQ ID NO: 27230 - DNA, 25 bp, Artificial
  probe
  misc_feature (1)..(25): SEQ ID NO: 58; WAN0249MQ_at; Start 157; Stop 181
gacttggagtcaactcaaagttata

SEQ ID NO: 27231 - DNA, 25 bp, Artificial
  probe
  misc_feature (1)..(25): SEQ ID NO: 58; WAN0249MQ_at; Start 188; Stop 212
gataagtgagttagaatagcgtgaa

SEQ ID NO: 27232 - DNA, 25 bp, Artificial
  probe
  misc_feature (1)..(25): SEQ ID NO: 58; WAN0249MQ_at; Start 20; Stop 44
gggtactatcttatttggaatagag

SEQ ID NO: 27233 - DNA, 25 bp, Artificial
  probe
  misc_feature (1)..(25): SEQ ID NO: 58; WAN0249MQ_at; Start 70; Stop 94
caaaaattggtaagagaagagcatt

SEQ ID NO: 27234 - DNA, 25 bp, Artificial
  probe
  misc_feature (1)..(25): SEQ ID NO: 58; WAN0249MQ_at; Start 147; Stop 171
caaaatgcttgacttggagtcaact

SEQ ID NO: 27235 - DNA, 25 bp, Artificial
  probe
  misc_feature (1)..(25): SEQ ID NO: 58; WAN0249MQ_at; Start 150; Stop 174
aatgcttgacttggagtcaactcaa

SEQ ID NO: 27236 - DNA, 25 bp, Artificial
  probe
  misc_feature (1)..(25): SEQ ID NO: 58; WAN0249MQ_at; Start 90; Stop 114
gcattgtataaactccagatatatg

SEQ ID NO: 27237 - DNA, 25 bp, Artificial
  probe
  misc_feature (1)..(25): SEQ ID NO: 58; WAN0249MQ_at; Start 85; Stop 109
gaagagcattgtataaactccagat

SEQ ID NO: 27238 - DNA, 25 bp, Artificial
  probe
  misc_feature (1)..(25): SEQ ID NO: 58; WAN0249MQ_at; Start 88; Stop 112
gagcattgtataaactccagatata

SEQ ID NO: 27239 - DNA, 25 bp, Artificial
  probe
  misc_feature (1)..(25): SEQ ID NO: 58; WAN0249MQ_at; Start 29; Stop 53
cttatttggaatagagtaatttctt

SEQ ID NO: 27240 - DNA, 25 bp, Artificial
  probe
  misc_feature (1)..(25): SEQ ID NO: 58; WAN0249MQ_at; Start 73; Stop 97
aaattggtaagagaagagcattgta

SEQ ID NO: 27241 - DNA, 25 bp, Artificial
  probe
  misc_feature (1)..(25): SEQ ID NO: 58; WAN0249MQ_at; Start 145; Stop 169
tacaaaatgcttgacttggagtcaa

SEQ ID NO: 27242 - DNA, 25 bp, Artificial
  probe
  misc_feature (1)..(25): SEQ ID NO: 58; WAN0249MQ_at; Start 167; Stop 191
caactcaaagttatataataagata

SEQ ID NO: 27243 - DNA, 25 bp, Artificial
  probe
  misc_feature (1)..(25): SEQ ID NO: 58; WAN0249MQ_at; Start 141; Stop 165
tagatacaaaatgcttgacttggag

SEQ ID NO: 27244 - DNA, 25 bp, Artificial
  probe
  misc_feature (1)..(25): SEQ ID NO: 58; WAN0249MQ_at; Start 153; Stop 177
gcttgacttggagtcaactcaaagt

SEQ ID NO: 27245 - DNA, 25 bp, Artificial
  probe
  misc_feature (1)..(25): SEQ ID NO: 58; WAN0249MQ_at; Start 83; Stop 107
gagaagagcattgtataaactccag

SEQ ID NO: 27246 - DNA, 25 bp, Artificial
  probe
  misc_feature (1)..(25): SEQ ID NO: 58; WAN0249MQ_at; Start 101; Stop 125
actccagatatatgattgttaatga

SEQ ID NO: 27247 - DNA, 25 bp, Artificial
  probe
  misc_feature (1)..(25): SEQ ID NO: 58; WAN0249MQ_at; Start 15; Stop 39
tacttgggtactatcttatttggaa

SEQ ID NO: 27248 - DNA, 25 bp, Artificial
  probe
  misc_feature (1)..(25): SEQ ID NO: 58; WAN0249MQ_at; Start 199; Stop 223
tagaatagcgtgaattcagtgaatg

SEQ ID NO: 27249 - DNA, 25 bp, Artificial
  probe
  misc_feature (1)..(25): SEQ ID NO: 58; WAN0249MQ_at; Start 204; Stop 228
tagcgtgaattcagtgaatgaaatg

SEQ ID NO: 27250 - DNA, 25 bp, Artificial
  probe
  misc_feature (1)..(25): SEQ ID NO: 58; WAN0249MQ_at; Start 104; Stop 128
ccagatatatgattgttaatgataa

SEQ ID NO: 27251 - DNA, 25 bp, Artificial
  probe
  misc_feature (1)..(25): SEQ ID NO: 58; WAN0249MQ_at; Start 94; Stop 118
tgtataaactccagatatatgattg

SEQ ID NO: 27252 - DNA, 25 bp, Artificial
  probe
  misc_feature (1)..(25): SEQ ID NO: 58; WAN0249MQ_at; Start 161; Stop 185
tggagtcaactcaaagttatataat

SEQ ID NO: 27253 - DNA, 25 bp, Artificial
  probe
  misc_feature (1)..(25): SEQ ID NO: 58; WAN0249MQ_at; Start 194; Stop 218
tgagttagaatagcgtgaattcagt

SEQ ID NO: 27254 - DNA, 25 bp, Artificial
  probe
  misc_feature (1)..(25): SEQ ID NO: 58; WAN0249MQ_at; Start 143; Stop 167
gatacaaaatgcttgacttggagtc

SEQ ID NO: 27255 - DNA, 25 bp, Artificial
  probe
  misc_feature (1)..(25): SEQ ID NO: 58; WAN0249MQ_at; Start 135; Stop 159
ttcgattagatacaaaatgcttgac

SEQ ID NO: 27256 - DNA, 25 bp, Artificial
  probe
  misc_feature (1)..(25): SEQ ID NO: 58; WAN0249MQ_at; Start 67; Stop 91
tttcaaaaattggtaagagaagagc

SEQ ID NO: 27257 - DNA, 25 bp, Artificial
  probe
  misc_feature (1)..(25): SEQ ID NO: 58; WAN0249MQ_at; Start 185; Stop 209
taagataagtgagttagaatagcgt

SEQ ID NO: 27258 - DNA, 25 bp, Artificial
  probe
  misc_feature (1)..(25): SEQ ID NO: 58; WAN0249MQ_at; Start 6; Stop 30
agtgaaaaatacttgggtactatct

SEQ ID NO: 27259 - DNA, 25 bp, Artificial
  probe
  misc_feature (1)..(25): SEQ ID NO: 58; WAN0249MQ_at; Start 215; Stop 239
cagtgaatgaaatgagaggaggtta

SEQ ID NO: 27260 - DNA, 25 bp, Artificial
  probe
  misc_feature (1)..(25): SEQ ID NO: 58; WAN0249MQ_at; Start 210; Stop 234
gaattcagtgaatgaaatgagagga

SEQ ID NO: 27261 - DNA, 25 bp, Artificial
  probe
  misc_feature (1)..(25): SEQ ID NO: 58; WAN0249MQ_at; Start 219; Stop 243
gaatgaaatgagaggaggttagcgt

SEQ ID NO: 27262 - DNA, 25 bp, Artificial
  probe
  misc_feature (1)..(25): SEQ ID NO: 58; WAN0249MQ_at; Start 78; Stop 102
ggtaagagaagagcattgtataaac

SEQ ID NO: 27263 - DNA, 25 bp, Artificial
  probe
  misc_feature (1)..(25): SEQ ID NO: 365; WAN0249MR_at; Start 58; Stop 82
tattatataactttgagttgactcc

SEQ ID NO: 27264 - DNA, 25 bp, Artificial
  probe
  misc_feature (1)..(25): SEQ ID NO: 365; WAN0249MR_at; Start 65; Stop 89
taactttgagttgactccaagtcaa

SEQ ID NO: 27265 - DNA, 25 bp, Artificial
  probe
  misc_feature (1)..(25): SEQ ID NO: 365; WAN0249MR_at; Start 68; Stop 92
ctttgagttgactccaagtcaagca

SEQ ID NO: 27266 - DNA, 25 bp, Artificial
  probe
  misc_feature (1)..(25): SEQ ID NO: 365; WAN0249MR_at; Start 16; Stop 40
catttcattcactgaattcacgcta

SEQ ID NO: 27267 - DNA, 25 bp, Artificial
  probe
  misc_feature (1)..(25): SEQ ID NO: 365; WAN0249MR_at; Start 207; Stop 231
ccaaataagatagtacccaagtatt

SEQ ID NO: 27268 - DNA, 25 bp, Artificial
  probe
  misc_feature (1)..(25): SEQ ID NO: 365; WAN0249MR_at; Start 126; Stop 150
caatcatatatctggagtttataca

SEQ ID NO: 27269 - DNA, 25 bp, Artificial
  probe
  misc_feature (1)..(25): SEQ ID NO: 365; WAN0249MR_at; Start 80; Stop 104
tccaagtcaagcattttgtatctaa

SEQ ID NO: 27270 - DNA, 25 bp, Artificial
  probe
  misc_feature (1)..(25): SEQ ID NO: 365; WAN0249MR_at; Start 150; Stop 174
aatgctcttctcttaccaatttttg

SEQ ID NO: 27271 - DNA, 25 bp, Artificial
  probe
  misc_feature (1)..(25): SEQ ID NO: 365; WAN0249MR_at; Start 191; Stop 215
aagaaattactctattccaaataag

SEQ ID NO: 27272 - DNA, 25 bp, Artificial
  probe
  misc_feature (1)..(25): SEQ ID NO: 365; WAN0249MR_at; Start 29; Stop 53
gaattcacgctattctaactcactt

SEQ ID NO: 27273 - DNA, 25 bp, Artificial
  probe
  misc_feature (1)..(25): SEQ ID NO: 365; WAN0249MR_at; Start 63; Stop 87
tataactttgagttgactccaagtc

SEQ ID NO: 27274 - DNA, 25 bp, Artificial
  probe
  misc_feature (1)..(25): SEQ ID NO: 365; WAN0249MR_at; Start 139; Stop 163
ggagtttatacaatgctcttctctt

SEQ ID NO: 27275 - DNA, 25 bp, Artificial
  probe
  misc_feature (1)..(25): SEQ ID NO: 365; WAN0249MR_at; Start 90; Stop 114
gcattttgtatctaatcgaaaaatt

SEQ ID NO: 27276 - DNA, 25 bp, Artificial
  probe
  misc_feature (1)..(25): SEQ ID NO: 365; WAN0249MR_at; Start 214; Stop 238
agatagtacccaagtatttttcact

SEQ ID NO: 27277 - DNA, 25 bp, Artificial
  probe
  misc_feature (1)..(25): SEQ ID NO: 365; WAN0249MR_at; Start 205; Stop 229
ttccaaataagatagtacccaagta

SEQ ID NO: 27278 - DNA, 25 bp, Artificial
  probe
  misc_feature (1)..(25): SEQ ID NO: 365; WAN0249MR_at; Start 77; Stop 101
gactccaagtcaagcattttgtatc

SEQ ID NO: 27279 - DNA, 25 bp, Artificial
  probe
  misc_feature (1)..(25): SEQ ID NO: 365; WAN0249MR_at; Start 71; Stop 95
tgagttgactccaagtcaagcattt

SEQ ID NO: 27280 - DNA, 25 bp, Artificial
  probe
  misc_feature (1)..(25): SEQ ID NO: 365; WAN0249MR_at; Start 119; Stop 143
tcattaacaatcatatatctggagt

SEQ ID NO: 27281 - DNA, 25 bp, Artificial
  probe
  misc_feature (1)..(25): SEQ ID NO: 365; WAN0249MR_at; Start 21; Stop 45
cattcactgaattcacgctattcta

SEQ ID NO: 27282 - DNA, 25 bp, Artificial
  probe
  misc_feature (1)..(25): SEQ ID NO: 365; WAN0249MR_at; Start 85; Stop 109
gtcaagcattttgtatctaatcgaa

SEQ ID NO: 27283 - DNA, 25 bp, Artificial
  probe
  misc_feature (1)..(25): SEQ ID NO: 365; WAN0249MR_at; Start 76; Stop 100
tgactccaagtcaagcattttgtat

SEQ ID NO: 27284 - DNA, 25 bp, Artificial
  probe
  misc_feature (1)..(25): SEQ ID NO: 365; WAN0249MR_at; Start 212; Stop 236
taagatagtacccaagtatttttca

SEQ ID NO: 27285 - DNA, 25 bp, Artificial
  probe
  misc_feature (1)..(25): SEQ ID NO: 365; WAN0249MR_at; Start 107; Stop 131
gaaaaatttttatcattaacaatca

SEQ ID NO: 27286 - DNA, 25 bp, Artificial
  probe
  misc_feature (1)..(25): SEQ ID NO: 365; WAN0249MR_at; Start 5; Stop 29
taacctcctctcatttcattcactg

SEQ ID NO: 27287 - DNA, 25 bp, Artificial
  probe
  misc_feature (1)..(25): SEQ ID NO: 365; WAN0249MR_at; Start 33; Stop 57
tcacgctattctaactcacttatct

SEQ ID NO: 27288 - DNA, 25 bp, Artificial
  probe
  misc_feature (1)..(25): SEQ ID NO: 365; WAN0249MR_at; Start 132; Stop 156
tatatctggagtttatacaatgctc

SEQ ID NO: 27289 - DNA, 25 bp, Artificial
  probe
  misc_feature (1)..(25): SEQ ID NO: 365; WAN0249MR_at; Start 145; Stop 169
tatacaatgctcttctcttaccaat

SEQ ID NO: 27290 - DNA, 25 bp, Artificial
  probe
  misc_feature (1)..(25): SEQ ID NO: 365; WAN0249MR_at; Start 136; Stop 160
tctggagtttatacaatgctcttct

SEQ ID NO: 27291 - DNA, 25 bp, Artificial
  probe
  misc_feature (1)..(25): SEQ ID NO: 365; WAN0249MR_at; Start 87; Stop 111
caagcattttgtatctaatcgaaaa

SEQ ID NO: 27292 - DNA, 25 bp, Artificial
  probe
  misc_feature (1)..(25): SEQ ID NO: 365; WAN0249MR_at; Start 153; Stop 177
gctcttctcttaccaatttttgaaa

SEQ ID NO: 27293 - DNA, 25 bp, Artificial
  probe
  misc_feature (1)..(25): SEQ ID NO: 365; WAN0249MR_at; Start 24; Stop 48
tcactgaattcacgctattctaact

SEQ ID NO: 27294 - DNA, 25 bp, Artificial
  probe
  misc_feature (1)..(25): SEQ ID NO: 365; WAN0249MR_at; Start 36; Stop 60
cgctattctaactcacttatcttat

SEQ ID NO: 27295 - DNA, 25 bp, Artificial
  probe
  misc_feature (1)..(25): SEQ ID NO: 365; WAN0249MR_at; Start 203; Stop 227
tattccaaataagatagtacccaag

SEQ ID NO: 27296 - DNA, 25 bp, Artificial
  probe
  misc_feature (1)..(25): SEQ ID NO: 365; WAN0249MR_at; Start 130; Stop 154
catatatctggagtttatacaatgc

SEQ ID NO: 27297 - DNA, 25 bp, Artificial
  probe
  misc_feature (1)..(25): SEQ ID NO: 157; WAN0249MS_at; Start 135; Stop 159
ggcttaacggacagtcaaaggagaa

SEQ ID NO: 27298 - DNA, 25 bp, Artificial
  probe
  misc_feature (1)..(25): SEQ ID NO: 157; WAN0249MS_at; Start 5; Stop 29
cctccttgattaggttagtatatca

SEQ ID NO: 27299 - DNA, 25 bp, Artificial
  probe
  misc_feature (1)..(25): SEQ ID NO: 157; WAN0249MS_at; Start 2; Stop 26
aatcctccttgattaggttagtata

SEQ ID NO: 27300 - DNA, 25 bp, Artificial
  probe
  misc_feature (1)..(25): SEQ ID NO: 157; WAN0249MS_at; Start 4; Stop 28
tcctccttgattaggttagtatatc

SEQ ID NO: 27301 - DNA, 25 bp, Artificial
  probe
  misc_feature (1)..(25): SEQ ID NO: 157; WAN0249MS_at; Start 6; Stop 30
ctccttgattaggttagtatatcat

SEQ ID NO: 27302 - DNA, 25 bp, Artificial
  probe
  misc_feature (1)..(25): SEQ ID NO: 157; WAN0249MS_at; Start 3; Stop 27
atcctccttgattaggttagtatat

SEQ ID NO: 27303 - DNA, 25 bp, Artificial
  probe
  misc_feature (1)..(25): SEQ ID NO: 157; WAN0249MS_at; Start 1; Stop 25
aaatcctccttgattaggttagtat

SEQ ID NO: 27304 - DNA, 25 bp, Artificial
  probe
  misc_feature (1)..(25): SEQ ID NO: 157; WAN0249MS_at; Start 134; Stop 158
tggcttaacggacagtcaaaggaga

SEQ ID NO: 27305 - DNA, 25 bp, Artificial
  probe
  misc_feature (1)..(25): SEQ ID NO: 1893; WAN0249MT_at; Start 7; Stop 31
tctcctttgactgtccgttaagcca

SEQ ID NO: 27306 - DNA, 25 bp, Artificial
  probe
  misc_feature (1)..(25): SEQ ID NO: 1893; WAN0249MT_at; Start 139; Stop 163
tatactaacctaatcaaggaggatt

SEQ ID NO: 27307 - DNA, 25 bp, Artificial
  probe
  misc_feature (1)..(25): SEQ ID NO: 1893; WAN0249MT_at; Start 138; Stop 162
atatactaacctaatcaaggaggat

SEQ ID NO: 27308 - DNA, 25 bp, Artificial
  probe
  misc_feature (1)..(25): SEQ ID NO: 1893; WAN0249MT_at; Start 140; Stop 164
atactaacctaatcaaggaggattt

SEQ ID NO: 27309 - DNA, 25 bp, Artificial
  probe
  misc_feature (1)..(25): SEQ ID NO: 1893; WAN0249MT_at; Start 135; Stop 159
atgatatactaacctaatcaaggag

SEQ ID NO: 27310 - DNA, 25 bp, Artificial
  probe
  misc_feature (1)..(25): SEQ ID NO: 1893; WAN0249MT_at; Start 137; Stop 161
gatatactaacctaatcaaggagga

SEQ ID NO: 27311 - DNA, 25 bp, Artificial
  probe
  misc_feature (1)..(25): SEQ ID NO: 1893; WAN0249MT_at; Start 6; Stop 30
ttctcctttgactgtccgttaagcc

SEQ ID NO: 27312 - DNA, 25 bp, Artificial
  probe
  misc_feature (1)..(25): SEQ ID NO: 1893; WAN0249MT_at; Start 136; Stop 160
tgatatactaacctaatcaaggagg

SEQ ID NO: 27313 - DNA, 25 bp, Artificial
  probe
  misc_feature (1)..(25): SEQ ID NO: 401; WAN0249MU_at; Start 102; Stop 126
catatatgtggtatactagttatag

SEQ ID NO: 27314 - DNA, 25 bp, Artificial
  probe
  misc_feature (1)..(25): SEQ ID NO: 401; WAN0249MU_at; Start 72; Stop 96
gagagtgatgaaatacaaatgtaat

SEQ ID NO: 27315 - DNA, 25 bp, Artificial
  probe
  misc_feature (1)..(25): SEQ ID NO: 401; WAN0249MU_at; Start 133; Stop 157
ttaattgcttatatcgagtgagttc

SEQ ID NO: 27316 - DNA, 25 bp, Artificial
  probe
  misc_feature (1)..(25): SEQ ID NO: 401; WAN0249MU_at; Start 10; Stop 34
agtgggataaatttatctcactcat

SEQ ID NO: 27317 - DNA, 25 bp, Artificial
  probe
  misc_feature (1)..(25): SEQ ID NO: 401; WAN0249MU_at; Start 65; Stop 89
tataaaagagagtgatgaaatacaa

SEQ ID NO: 27318 - DNA, 25 bp, Artificial
  probe
  misc_feature (1)..(25): SEQ ID NO: 401; WAN0249MU_at; Start 13; Stop 37
gggataaatttatctcactcatttt

SEQ ID NO: 27319 - DNA, 25 bp, Artificial
  probe
  misc_feature (1)..(25): SEQ ID NO: 401; WAN0249MU_at; Start 156; Stop 180
tctcatattagtgaggaatttttaa

SEQ ID NO: 27320 - DNA, 25 bp, Artificial
  probe
  misc_feature (1)..(25): SEQ ID NO: 401; WAN0249MU_at; Start 55; Stop 79
tagaaggaaatataaaagagagtga

SEQ ID NO: 27321 - DNA, 25 bp, Artificial
  probe
  misc_feature (1)..(25): SEQ ID NO: 401; WAN0249MU_at; Start 93; Stop 117
taataggtacatatatgtggtatac

SEQ ID NO: 27322 - DNA, 25 bp, Artificial
  probe
  misc_feature (1)..(25): SEQ ID NO: 401; WAN0249MU_at; Start 38; Stop 62
taatttatgagatatgttagaagga

SEQ ID NO: 27323 - DNA, 25 bp, Artificial
  probe
  misc_feature (1)..(25): SEQ ID NO: 401; WAN0249MU_at; Start 134; Stop 158
taattgcttatatcgagtgagttct

SEQ ID NO: 27324 - DNA, 25 bp, Artificial
  probe
  misc_feature (1)..(25): SEQ ID NO: 401; WAN0249MU_at; Start 144; Stop 168
tatcgagtgagttctcatattagtg

SEQ ID NO: 27325 - DNA, 25 bp, Artificial
  probe
  misc_feature (1)..(25): SEQ ID NO: 401; WAN0249MU_at; Start 4; Stop 28
aaggtgagtgggataaatttatctc

SEQ ID NO: 27326 - DNA, 25 bp, Artificial
  probe
  misc_feature (1)..(25): SEQ ID NO: 401; WAN0249MU_at; Start 136; Stop 160
attgcttatatcgagtgagttctca

SEQ ID NO: 27327 - DNA, 25 bp, Artificial
  probe
  misc_feature (1)..(25): SEQ ID NO: 401; WAN0249MU_at; Start 148; Stop 172
gagtgagttctcatattagtgagga

SEQ ID NO: 27328 - DNA, 25 bp, Artificial
  probe
  misc_feature (1)..(25): SEQ ID NO: 401; WAN0249MU_at; Start 6; Stop 30
ggtgagtgggataaatttatctcac

SEQ ID NO: 27329 - DNA, 25 bp, Artificial
  probe
  misc_feature (1)..(25): SEQ ID NO: 401; WAN0249MU_at; Start 147; Stop 171
cgagtgagttctcatattagtgagg

SEQ ID NO: 27330 - DNA, 25 bp, Artificial
  probe
  misc_feature (1)..(25): SEQ ID NO: 401; WAN0249MU_at; Start 139; Stop 163
gcttatatcgagtgagttctcatat

SEQ ID NO: 27331 - DNA, 25 bp, Artificial
  probe
  misc_feature (1)..(25): SEQ ID NO: 401; WAN0249MU_at; Start 69; Stop 93
aaagagagtgatgaaatacaaatgt

SEQ ID NO: 27332 - DNA, 25 bp, Artificial
  probe
  misc_feature (1)..(25): SEQ ID NO: 401; WAN0249MU_at; Start 96; Stop 120
taggtacatatatgtggtatactag

SEQ ID NO: 27333 - DNA, 25 bp, Artificial
  probe
  misc_feature (1)..(25): SEQ ID NO: 401; WAN0249MU_at; Start 142; Stop 166
tatatcgagtgagttctcatattag

SEQ ID NO: 27334 - DNA, 25 bp, Artificial
  probe
  misc_feature (1)..(25): SEQ ID NO: 401; WAN0249MU_at; Start 98; Stop 122
ggtacatatatgtggtatactagtt

SEQ ID NO: 27335 - DNA, 25 bp, Artificial
  probe
  misc_feature (1)..(25): SEQ ID NO: 401; WAN0249MU_at; Start 151; Stop 175
tgagttctcatattagtgaggaatt

SEQ ID NO: 27336 - DNA, 25 bp, Artificial
  probe
  misc_feature (1)..(25): SEQ ID NO: 401; WAN0249MU_at; Start 129; Stop 153
gattttaattgcttatatcgagtga

SEQ ID NO: 27337 - DNA, 25 bp, Artificial
  probe
  misc_feature (1)..(25): SEQ ID NO: 401; WAN0249MU_at; Start 106; Stop 130
tatgtggtatactagttatagtaga

SEQ ID NO: 27338 - DNA, 25 bp, Artificial
  probe
  misc_feature (1)..(25): SEQ ID NO: 401; WAN0249MU_at; Start 138; Stop 162
tgcttatatcgagtgagttctcata

SEQ ID NO: 27339 - DNA, 25 bp, Artificial
  probe
  misc_feature (1)..(25): SEQ ID NO: 401; WAN0249MU_at; Start 135; Stop 159
aattgcttatatcgagtgagttctc

SEQ ID NO: 27340 - DNA, 25 bp, Artificial
  probe
  misc_feature (1)..(25): SEQ ID NO: 401; WAN0249MU_at; Start 81; Stop 105
gaaatacaaatgtaataggtacata

SEQ ID NO: 27341 - DNA, 25 bp, Artificial
  probe
  misc_feature (1)..(25): SEQ ID NO: 401; WAN0249MU_at; Start 52; Stop 76
tgttagaaggaaatataaaagagag

SEQ ID NO: 27342 - DNA, 25 bp, Artificial
  probe
  misc_feature (1)..(25): SEQ ID NO: 401; WAN0249MU_at; Start 146; Stop 170
tcgagtgagttctcatattagtgag

SEQ ID NO: 27343 - DNA, 25 bp, Artificial
  probe
  misc_feature (1)..(25): SEQ ID NO: 401; WAN0249MU_at; Start 116; Stop 140
actagttatagtagattttaattgc

SEQ ID NO: 27344 - DNA, 25 bp, Artificial
  probe
  misc_feature (1)..(25): SEQ ID NO: 401; WAN0249MU_at; Start 87; Stop 111
caaatgtaataggtacatatatgtg

SEQ ID NO: 27345 - DNA, 25 bp, Artificial
  probe
  misc_feature (1)..(25): SEQ ID NO: 401; WAN0249MU_at; Start 78; Stop 102
gatgaaatacaaatgtaataggtac

SEQ ID NO: 27346 - DNA, 25 bp, Artificial
  probe
  misc_feature (1)..(25): SEQ ID NO: 401; WAN0249MU_at; Start 67; Stop 91
taaaagagagtgatgaaatacaaat

SEQ ID NO: 27347 - DNA, 25 bp, Artificial
  probe
  misc_feature (1)..(25): SEQ ID NO: 4748; WAN0249MV_at; Start 100; Stop 124
catcactctcttttatatttccttc

SEQ ID NO: 27348 - DNA, 25 bp, Artificial
  probe
  misc_feature (1)..(25): SEQ ID NO: 4748; WAN0249MV_at; Start 2; Stop 26
taaaaattcctcactaatatgagaa

SEQ ID NO: 27349 - DNA, 25 bp, Artificial
  probe
  misc_feature (1)..(25): SEQ ID NO: 4748; WAN0249MV_at; Start 156; Stop 180
ataaatttatcccactcacctttct

SEQ ID NO: 27350 - DNA, 25 bp, Artificial
  probe
  misc_feature (1)..(25): SEQ ID NO: 4748; WAN0249MV_at; Start 32; Stop 56
tcgatataagcaattaaaatctact

SEQ ID NO: 27351 - DNA, 25 bp, Artificial
  probe
  misc_feature (1)..(25): SEQ ID NO: 4748; WAN0249MV_at; Start 56; Stop 80
tataactagtataccacatatatgt

SEQ ID NO: 27352 - DNA, 25 bp, Artificial
  probe
  misc_feature (1)..(25): SEQ ID NO: 4748; WAN0249MV_at; Start 59; Stop 83
aactagtataccacatatatgtacc

SEQ ID NO: 27353 - DNA, 25 bp, Artificial
  probe
  misc_feature (1)..(25): SEQ ID NO: 4748; WAN0249MV_at; Start 120; Stop 144
ccttctaacatatctcataaattaa

SEQ ID NO: 27354 - DNA, 25 bp, Artificial
  probe
  misc_feature (1)..(25): SEQ ID NO: 4748; WAN0249MV_at; Start 29; Stop 53
cactcgatataagcaattaaaatct

SEQ ID NO: 27355 - DNA, 25 bp, Artificial
  probe
  misc_feature (1)..(25): SEQ ID NO: 4748; WAN0249MV_at; Start 70; Stop 94
cacatatatgtacctattacatttg

SEQ ID NO: 27356 - DNA, 25 bp, Artificial
  probe
  misc_feature (1)..(25): SEQ ID NO: 4748; WAN0249MV_at; Start 87; Stop 111
tacatttgtatttcatcactctctt

SEQ ID NO: 27357 - DNA, 25 bp, Artificial
  probe
  misc_feature (1)..(25): SEQ ID NO: 4748; WAN0249MV_at; Start 48; Stop 72
aaatctactataactagtataccac

SEQ ID NO: 27358 - DNA, 25 bp, Artificial
  probe
  misc_feature (1)..(25): SEQ ID NO: 4748; WAN0249MV_at; Start 85; Stop 109
attacatttgtatttcatcactctc

SEQ ID NO: 27359 - DNA, 25 bp, Artificial
  probe
  misc_feature (1)..(25): SEQ ID NO: 4748; WAN0249MV_at; Start 24; Stop 48
gaactcactcgatataagcaattaa

SEQ ID NO: 27360 - DNA, 25 bp, Artificial
  probe
  misc_feature (1)..(25): SEQ ID NO: 4748; WAN0249MV_at; Start 27; Stop 51
ctcactcgatataagcaattaaaat

SEQ ID NO: 27361 - DNA, 25 bp, Artificial
  probe
  misc_feature (1)..(25): SEQ ID NO: 4748; WAN0249MV_at; Start 65; Stop 89
tataccacatatatgtacctattac

SEQ ID NO: 27362 - DNA, 25 bp, Artificial
  probe
  misc_feature (1)..(25): SEQ ID NO: 4748; WAN0249MV_at; Start 154; Stop 178
agataaatttatcccactcaccttt

SEQ ID NO: 27363 - DNA, 25 bp, Artificial
  probe
  misc_feature (1)..(25): SEQ ID NO: 4748; WAN0249MV_at; Start 25; Stop 49
aactcactcgatataagcaattaaa

SEQ ID NO: 27364 - DNA, 25 bp, Artificial
  probe
  misc_feature (1)..(25): SEQ ID NO: 4748; WAN0249MV_at; Start 115; Stop 139
tatttccttctaacatatctcataa

SEQ ID NO: 27365 - DNA, 25 bp, Artificial
  probe
  misc_feature (1)..(25): SEQ ID NO: 4748; WAN0249MV_at; Start 22; Stop 46
gagaactcactcgatataagcaatt

SEQ ID NO: 27366 - DNA, 25 bp, Artificial
  probe
  misc_feature (1)..(25): SEQ ID NO: 4748; WAN0249MV_at; Start 10; Stop 34
cctcactaatatgagaactcactcg

SEQ ID NO: 27367 - DNA, 25 bp, Artificial
  probe
  misc_feature (1)..(25): SEQ ID NO: 4748; WAN0249MV_at; Start 41; Stop 65
gcaattaaaatctactataactagt

SEQ ID NO: 27368 - DNA, 25 bp, Artificial
  probe
  misc_feature (1)..(25): SEQ ID NO: 4748; WAN0249MV_at; Start 23; Stop 47
agaactcactcgatataagcaatta

SEQ ID NO: 27369 - DNA, 25 bp, Artificial
  probe
  misc_feature (1)..(25): SEQ ID NO: 4748; WAN0249MV_at; Start 6; Stop 30
aattcctcactaatatgagaactca

SEQ ID NO: 27370 - DNA, 25 bp, Artificial
  probe
  misc_feature (1)..(25): SEQ ID NO: 4748; WAN0249MV_at; Start 144; Stop 168
aaaatgagtgagataaatttatccc

SEQ ID NO: 27371 - DNA, 25 bp, Artificial
  probe
  misc_feature (1)..(25): SEQ ID NO: 4748; WAN0249MV_at; Start 125; Stop 149
taacatatctcataaattaaaaatg

SEQ ID NO: 27372 - DNA, 25 bp, Artificial
  probe
  misc_feature (1)..(25): SEQ ID NO: 4748; WAN0249MV_at; Start 51; Stop 75
tctactataactagtataccacata

SEQ ID NO: 27373 - DNA, 25 bp, Artificial
  probe
  misc_feature (1)..(25): SEQ ID NO: 4748; WAN0249MV_at; Start 146; Stop 170
aatgagtgagataaatttatcccac

SEQ ID NO: 27374 - DNA, 25 bp, Artificial
  probe
  misc_feature (1)..(25): SEQ ID NO: 4748; WAN0249MV_at; Start 12; Stop 36
tcactaatatgagaactcactcgat

SEQ ID NO: 27375 - DNA, 25 bp, Artificial
  probe
  misc_feature (1)..(25): SEQ ID NO: 4748; WAN0249MV_at; Start 13; Stop 37
cactaatatgagaactcactcgata

SEQ ID NO: 27376 - DNA, 25 bp, Artificial
  probe
  misc_feature (1)..(25): SEQ ID NO: 4748; WAN0249MV_at; Start 153; Stop 177
gagataaatttatcccactcacctt

SEQ ID NO: 27377 - DNA, 25 bp, Artificial
  probe
  misc_feature (1)..(25): SEQ ID NO: 4748; WAN0249MV_at; Start 62; Stop 86
tagtataccacatatatgtacctat

SEQ ID NO: 27378 - DNA, 25 bp, Artificial
  probe
  misc_feature (1)..(25): SEQ ID NO: 4748; WAN0249MV_at; Start 19; Stop 43
tatgagaactcactcgatataagca

SEQ ID NO: 27379 - DNA, 25 bp, Artificial
  probe
  misc_feature (1)..(25): SEQ ID NO: 4748; WAN0249MV_at; Start 103; Stop 127
cactctcttttatatttccttctaa

SEQ ID NO: 27380 - DNA, 25 bp, Artificial
  probe
  misc_feature (1)..(25): SEQ ID NO: 4748; WAN0249MV_at; Start 21; Stop 45
tgagaactcactcgatataagcaat

SEQ ID NO: 27381 - DNA, 25 bp, Artificial
  probe
  misc_feature (1)..(25): SEQ ID NO: 4523; WAN0249MW_at; Start 350; Stop 374
gtgaataatttcaggaatccaggga

SEQ ID NO: 27382 - DNA, 25 bp, Artificial
  probe
  misc_feature (1)..(25): SEQ ID NO: 4523; WAN0249MW_at; Start 266; Stop 290
gacttacttagagattaagtaggtc

SEQ ID NO: 27383 - DNA, 25 bp, Artificial
  probe
  misc_feature (1)..(25): SEQ ID NO: 4523; WAN0249MW_at; Start 67; Stop 91
ccaaaacactaacaaaatagttgat

SEQ ID NO: 27384 - DNA, 25 bp, Artificial
  probe
  misc_feature (1)..(25): SEQ ID NO: 4523; WAN0249MW_at; Start 447; Stop 471
tttactctcaaaaatcccgtcatag

SEQ ID NO: 27385 - DNA, 25 bp, Artificial
  probe
  misc_feature (1)..(25): SEQ ID NO: 4523; WAN0249MW_at; Start 488; Stop 512
tgtctatgataccactacaacggga

SEQ ID NO: 27386 - DNA, 25 bp, Artificial
  probe
  misc_feature (1)..(25): SEQ ID NO: 4523; WAN0249MW_at; Start 478; Stop 502
acaagattattgtctatgataccac

SEQ ID NO: 27387 - DNA, 25 bp, Artificial
  probe
  misc_feature (1)..(25): SEQ ID NO: 4523; WAN0249MW_at; Start 413; Stop 437
tctaggcttaggctaaaatagttcc

SEQ ID NO: 27388 - DNA, 25 bp, Artificial
  probe
  misc_feature (1)..(25): SEQ ID NO: 4523; WAN0249MW_at; Start 558; Stop 582
tatagtattagcaaaagggatcact

SEQ ID NO: 27389 - DNA, 25 bp, Artificial
  probe
  misc_feature (1)..(25): SEQ ID NO: 4523; WAN0249MW_at; Start 515; Stop 539
tatttgataagactcgcttcgctcg

SEQ ID NO: 27390 - DNA, 25 bp, Artificial
  probe
  misc_feature (1)..(25): SEQ ID NO: 4523; WAN0249MW_at; Start 363; Stop 387
ggaatccagggaatttcatccctaa

SEQ ID NO: 27391 - DNA, 25 bp, Artificial
  probe
  misc_feature (1)..(25): SEQ ID NO: 4523; WAN0249MW_at; Start 173; Stop 197
gaattggcacgacgtttctacaagg

SEQ ID NO: 27392 - DNA, 25 bp, Artificial
  probe
  misc_feature (1)..(25): SEQ ID NO: 4523; WAN0249MW_at; Start 241; Stop 265
ccgtttttgccatgtctatttaggg

SEQ ID NO: 27393 - DNA, 25 bp, Artificial
  probe
  misc_feature (1)..(25): SEQ ID NO: 4523; WAN0249MW_at; Start 378; Stop 402
tcatccctaatttttgagcccctag

SEQ ID NO: 27394 - DNA, 25 bp, Artificial
  probe
  misc_feature (1)..(25): SEQ ID NO: 4523; WAN0249MW_at; Start 462; Stop 486
cccgtcatagacaataacaagatta

SEQ ID NO: 27395 - DNA, 25 bp, Artificial
  probe
  misc_feature (1)..(25): SEQ ID NO: 4523; WAN0249MW_at; Start 208; Stop 232
cctaacaataagtaagtcagcagtg

SEQ ID NO: 27396 - DNA, 25 bp, Artificial
  probe
  misc_feature (1)..(25): SEQ ID NO: 4523; WAN0249MW_at; Start 402; Stop 426
gctctttcatttctaggcttaggct

SEQ ID NO: 27397 - DNA, 25 bp, Artificial
  probe
  misc_feature (1)..(25): SEQ ID NO: 4523; WAN0249MW_at; Start 158; Stop 182
acttgtttatgtcgtgaattggcac

SEQ ID NO: 27398 - DNA, 25 bp, Artificial
  probe
  misc_feature (1)..(25): SEQ ID NO: 4523; WAN0249MW_at; Start 530; Stop 554
gcttcgctcgtaatagttttatcaa

SEQ ID NO: 27399 - DNA, 25 bp, Artificial
  probe
  misc_feature (1)..(25): SEQ ID NO: 4523; WAN0249MW_at; Start 183; Stop 207
gacgtttctacaaggtgccggaaca

SEQ ID NO: 27400 - DNA, 25 bp, Artificial
  probe
  misc_feature (1)..(25): SEQ ID NO: 4523; WAN0249MW_at; Start 522; Stop 546
taagactcgcttcgctcgtaatagt

SEQ ID NO: 27401 - DNA, 25 bp, Artificial
  probe
  misc_feature (1)..(25): SEQ ID NO: 4523; WAN0249MW_at; Start 197; Stop 221
gtgccggaacacctaacaataagta

SEQ ID NO: 27402 - DNA, 25 bp, Artificial
  probe
  misc_feature (1)..(25): SEQ ID NO: 4523; WAN0249MW_at; Start 125; Stop 149
ggctcaagcctatttaaaattgaat

SEQ ID NO: 27403 - DNA, 25 bp, Artificial
  probe
  misc_feature (1)..(25): SEQ ID NO: 4523; WAN0249MW_at; Start 568; Stop 592
gcaaaagggatcactatagaaatat

SEQ ID NO: 27404 - DNA, 25 bp, Artificial
  probe
  misc_feature (1)..(25): SEQ ID NO: 4523; WAN0249MW_at; Start 110; Stop 134
taaaataaaaacattggctcaagcc

SEQ ID NO: 27405 - DNA, 25 bp, Artificial
  probe
  misc_feature (1)..(25): SEQ ID NO: 4523; WAN0249MW_at; Start 393; Stop 417
gagcccctagctctttcatttctag

SEQ ID NO: 27406 - DNA, 25 bp, Artificial
  probe
  misc_feature (1)..(25): SEQ ID NO: 4523; WAN0249MW_at; Start 220; Stop 244
taagtcagcagtgagatatggccgt

SEQ ID NO: 27407 - DNA, 25 bp, Artificial
  probe
  misc_feature (1)..(25): SEQ ID NO: 4523; WAN0249MW_at; Start 18; Stop 42
tacaatggagtttttgttcaccctc

SEQ ID NO: 27408 - DNA, 25 bp, Artificial
  probe
  misc_feature (1)..(25): SEQ ID NO: 4523; WAN0249MW_at; Start 308; Stop 332
atatttcccttaattagtgcggacg

SEQ ID NO: 27409 - DNA, 25 bp, Artificial
  probe
  misc_feature (1)..(25): SEQ ID NO: 4523; WAN0249MW_at; Start 32; Stop 56
tgttcaccctctcttctttttgttc

SEQ ID NO: 27410 - DNA, 25 bp, Artificial
  probe
  misc_feature (1)..(25): SEQ ID NO: 4523; WAN0249MW_at; Start 508; Stop 532
cgggaaatatttgataagactcgct

SEQ ID NO: 27411 - DNA, 25 bp, Artificial
  probe
  misc_feature (1)..(25): SEQ ID NO: 4523; WAN0249MW_at; Start 325; Stop 349
tgcggacgggaggtgaaattatcct

SEQ ID NO: 27412 - DNA, 25 bp, Artificial
  probe
  misc_feature (1)..(25): SEQ ID NO: 4523; WAN0249MW_at; Start 227; Stop 251
gcagtgagatatggccgtttttgcc

SEQ ID NO: 27413 - DNA, 25 bp, Artificial
  probe
  misc_feature (1)..(25): SEQ ID NO: 4523; WAN0249MW_at; Start 494; Stop 518
tgataccactacaacgggaaatatt

SEQ ID NO: 27414 - DNA, 25 bp, Artificial
  probe
  misc_feature (1)..(25): SEQ ID NO: 4523; WAN0249MW_at; Start 333; Stop 357
ggaggtgaaattatcctgtgaataa

SEQ ID NO: 27415 - DNA, 25 bp, Artificial
  probe
  misc_feature (1)..(25): SEQ ID NO: 219; WAN0249MX_at; Start 53; Stop 77
agtgatcccttttgctaatactata

SEQ ID NO: 27416 - DNA, 25 bp, Artificial
  probe
  misc_feature (1)..(25): SEQ ID NO: 219; WAN0249MX_at; Start 37; Stop 61
gtttaaatatttctatagtgatccc

SEQ ID NO: 27417 - DNA, 25 bp, Artificial
  probe
  misc_feature (1)..(25): SEQ ID NO: 219; WAN0249MX_at; Start 579; Stop 603
gaacaaaaagaagagagggtgaaca

SEQ ID NO: 27418 - DNA, 25 bp, Artificial
  probe
  misc_feature (1)..(25): SEQ ID NO: 219; WAN0249MX_at; Start 279; Stop 303
tattcacaggataatttcacctccc

SEQ ID NO: 27419 - DNA, 25 bp, Artificial
  probe
  misc_feature (1)..(25): SEQ ID NO: 219; WAN0249MX_at; Start 239; Stop 263
gctcaaaaattagggatgaaattcc

SEQ ID NO: 27420 - DNA, 25 bp, Artificial
  probe
  misc_feature (1)..(25): SEQ ID NO: 219; WAN0249MX_at; Start 461; Stop 485
tcacgacataaacaagtaaaacgat

SEQ ID NO: 27421 - DNA, 25 bp, Artificial
  probe
  misc_feature (1)..(25): SEQ ID NO: 219; WAN0249MX_at; Start 210; Stop 234
gcctaagcctagaaatgaaagagct

SEQ ID NO: 27422 - DNA, 25 bp, Artificial
  probe
  misc_feature (1)..(25): SEQ ID NO: 219; WAN0249MX_at; Start 403; Stop 427
cactgctgacttacttattgttagg

SEQ ID NO: 27423 - DNA, 25 bp, Artificial
  probe
  misc_feature (1)..(25): SEQ ID NO: 219; WAN0249MX_at; Start 112; Stop 136
tatcaaatatttcccgttgtagtgg

SEQ ID NO: 27424 - DNA, 25 bp, Artificial
  probe
  misc_feature (1)..(25): SEQ ID NO: 219; WAN0249MX_at; Start 441; Stop 465
tgtagaaacgtcgtgccaattcacg

SEQ ID NO: 27425 - DNA, 25 bp, Artificial
  probe
  misc_feature (1)..(25): SEQ ID NO: 219; WAN0249MX_at; Start 123; Stop 147
tcccgttgtagtggtatcatagaca

SEQ ID NO: 27426 - DNA, 25 bp, Artificial
  probe
  misc_feature (1)..(25): SEQ ID NO: 219; WAN0249MX_at; Start 263; Stop 287
cctggattcctgaaattattcacag

SEQ ID NO: 27427 - DNA, 25 bp, Artificial
  probe
  misc_feature (1)..(25): SEQ ID NO: 219; WAN0249MX_at; Start 506; Stop 530
gagccaatgtttttattttacacta

SEQ ID NO: 27428 - DNA, 25 bp, Artificial
  probe
  misc_feature (1)..(25): SEQ ID NO: 219; WAN0249MX_at; Start 149; Stop 173
taatcttgttattgtctatgacggg

SEQ ID NO: 27429 - DNA, 25 bp, Artificial
  probe
  misc_feature (1)..(25): SEQ ID NO: 219; WAN0249MX_at; Start 453; Stop 477
gtgccaattcacgacataaacaagt

SEQ ID NO: 27430 - DNA, 25 bp, Artificial
  probe
  misc_feature (1)..(25): SEQ ID NO: 219; WAN0249MX_at; Start 164; Stop 188
ctatgacgggatttttgagagtaaa

SEQ ID NO: 27431 - DNA, 25 bp, Artificial
  probe
  misc_feature (1)..(25): SEQ ID NO: 219; WAN0249MX_at; Start 414; Stop 438
tacttattgttaggtgttccggcac

SEQ ID NO: 27432 - DNA, 25 bp, Artificial
  probe
  misc_feature (1)..(25): SEQ ID NO: 219; WAN0249MX_at; Start 363; Stop 387
gtaagtcccctaaatagacatggca

SEQ ID NO: 27433 - DNA, 25 bp, Artificial
  probe
  misc_feature (1)..(25): SEQ ID NO: 219; WAN0249MX_at; Start 337; Stop 361
tcaaaaaagacctacttaatctcta

SEQ ID NO: 27434 - DNA, 25 bp, Artificial
  probe
  misc_feature (1)..(25): SEQ ID NO: 219; WAN0249MX_at; Start 198; Stop 222
ggaactattttagcctaagcctaga

SEQ ID NO: 27435 - DNA, 25 bp, Artificial
  probe
  misc_feature (1)..(25): SEQ ID NO: 219; WAN0249MX_at; Start 591; Stop 615
gagagggtgaacaaaaactccattg

SEQ ID NO: 27436 - DNA, 25 bp, Artificial
  probe
  misc_feature (1)..(25): SEQ ID NO: 219; WAN0249MX_at; Start 91; Stop 115
tattacgagcgaagcgagtcttatc

SEQ ID NO: 27437 - DNA, 25 bp, Artificial
  probe
  misc_feature (1)..(25): SEQ ID NO: 219; WAN0249MX_at; Start 82; Stop 106
tgataaaactattacgagcgaagcg

SEQ ID NO: 27438 - DNA, 25 bp, Artificial
  probe
  misc_feature (1)..(25): SEQ ID NO: 219; WAN0249MX_at; Start 488; Stop 512
tcaattttaaataggcttgagccaa

SEQ ID NO: 27439 - DNA, 25 bp, Artificial
  probe
  misc_feature (1)..(25): SEQ ID NO: 219; WAN0249MX_at; Start 286; Stop 310
aggataatttcacctcccgtccgca

SEQ ID NO: 27440 - DNA, 25 bp, Artificial
  probe
  misc_feature (1)..(25): SEQ ID NO: 219; WAN0249MX_at; Start 372; Stop 396
ctaaatagacatggcaaaaacggcc

SEQ ID NO: 27441 - DNA, 25 bp, Artificial
  probe
  misc_feature (1)..(25): SEQ ID NO: 219; WAN0249MX_at; Start 103; Stop 127
agcgagtcttatcaaatatttcccg

SEQ ID NO: 27442 - DNA, 25 bp, Artificial
  probe
  misc_feature (1)..(25): SEQ ID NO: 219; WAN0249MX_at; Start 599; Stop 623
gaacaaaaactccattgtaagctaa

SEQ ID NO: 27443 - DNA, 25 bp, Artificial
  probe
  misc_feature (1)..(25): SEQ ID NO: 219; WAN0249MX_at; Start 133; Stop 157
gtggtatcatagacaataatcttgt

SEQ ID NO: 27444 - DNA, 25 bp, Artificial
  probe
  misc_feature (1)..(25): SEQ ID NO: 219; WAN0249MX_at; Start 252; Stop 276
ggatgaaattccctggattcctgaa

SEQ ID NO: 27445 - DNA, 25 bp, Artificial
  probe
  misc_feature (1)..(25): SEQ ID NO: 219; WAN0249MX_at; Start 303; Stop 327
cgtccgcactaattaagggaaatat

SEQ ID NO: 27446 - DNA, 25 bp, Artificial
  probe
  misc_feature (1)..(25): SEQ ID NO: 219; WAN0249MX_at; Start 356; Stop 380
tctctaagtaagtcccctaaataga

SEQ ID NO: 27447 - DNA, 25 bp, Artificial
  probe
  misc_feature (1)..(25): SEQ ID NO: 219; WAN0249MX_at; Start 428; Stop 452
tgttccggcaccttgtagaaacgtc

SEQ ID NO: 27448 - DNA, 25 bp, Artificial
  probe
  misc_feature (1)..(25): SEQ ID NO: 219; WAN0249MX_at; Start 387; Stop 411
aaaaacggccatatctcactgctga

SEQ ID NO: 27449 - DNA, 25 bp, Artificial
  probe
  misc_feature (1)..(25): SEQ ID NO: 4470; WAN0249MY_at; Start 23; Stop 47
tgacaatatgcctttttctaacttt

SEQ ID NO: 27450 - DNA, 25 bp, Artificial
  probe
  misc_feature (1)..(25): SEQ ID NO: 4470; WAN0249MY_at; Start 15; Stop 39
tagacacctgacaatatgccttttt

SEQ ID NO: 27451 - DNA, 25 bp, Artificial
  probe
  misc_feature (1)..(25): SEQ ID NO: 4470; WAN0249MY_at; Start 21; Stop 45
cctgacaatatgcctttttctaact

SEQ ID NO: 27452 - DNA, 25 bp, Artificial
  probe
  misc_feature (1)..(25): SEQ ID NO: 4470; WAN0249MY_at; Start 14; Stop 38
ttagacacctgacaatatgcctttt

SEQ ID NO: 27453 - DNA, 25 bp, Artificial
  probe
  misc_feature (1)..(25): SEQ ID NO: 4470; WAN0249MY_at; Start 20; Stop 44
acctgacaatatgcctttttctaac

SEQ ID NO: 27454 - DNA, 25 bp, Artificial
  probe
  misc_feature (1)..(25): SEQ ID NO: 4470; WAN0249MY_at; Start 16; Stop 40
agacacctgacaatatgcctttttc

SEQ ID NO: 27455 - DNA, 25 bp, Artificial
  probe
  misc_feature (1)..(25): SEQ ID NO: 4470; WAN0249MY_at; Start 24; Stop 48
gacaatatgcctttttctaacttta

SEQ ID NO: 27456 - DNA, 25 bp, Artificial
  probe
  misc_feature (1)..(25): SEQ ID NO: 4470; WAN0249MY_at; Start 22; Stop 46
ctgacaatatgcctttttctaactt

SEQ ID NO: 27457 - DNA, 25 bp, Artificial
  probe
  misc_feature (1)..(25): SEQ ID NO: 4470; WAN0249MY_at; Start 13; Stop 37
tttagacacctgacaatatgccttt

SEQ ID NO: 27458 - DNA, 25 bp, Artificial
  probe
  misc_feature (1)..(25): SEQ ID NO: 4470; WAN0249MY_at; Start 17; Stop 41
gacacctgacaatatgcctttttct

SEQ ID NO: 27459 - DNA, 25 bp, Artificial
  probe
  misc_feature (1)..(25): SEQ ID NO: 4470; WAN0249MY_at; Start 12; Stop 36
ttttagacacctgacaatatgcctt

SEQ ID NO: 27460 - DNA, 25 bp, Artificial
  probe
  misc_feature (1)..(25): SEQ ID NO: 4470; WAN0249MY_at; Start 18; Stop 42
acacctgacaatatgcctttttcta

SEQ ID NO: 27461 - DNA, 25 bp, Artificial
  probe
  misc_feature (1)..(25): SEQ ID NO: 4470; WAN0249MY_at; Start 19; Stop 43
cacctgacaatatgcctttttctaa

SEQ ID NO: 27462 - DNA, 25 bp, Artificial
  probe
  misc_feature (1)..(25): SEQ ID NO: 4485; WAN0249MZ_at; Start 35; Stop 59
tagaaaaaggcatattgtcaggtgt

SEQ ID NO: 27463 - DNA, 25 bp, Artificial
  probe
  misc_feature (1)..(25): SEQ ID NO: 4485; WAN0249MZ_at; Start 31; Stop 55
aagttagaaaaaggcatattgtcag

SEQ ID NO: 27464 - DNA, 25 bp, Artificial
  probe
  misc_feature (1)..(25): SEQ ID NO: 4485; WAN0249MZ_at; Start 36; Stop 60
agaaaaaggcatattgtcaggtgtc

SEQ ID NO: 27465 - DNA, 25 bp, Artificial
  probe
  misc_feature (1)..(25): SEQ ID NO: 4485; WAN0249MZ_at; Start 32; Stop 56
agttagaaaaaggcatattgtcagg

SEQ ID NO: 27466 - DNA, 25 bp, Artificial
  probe
  misc_feature (1)..(25): SEQ ID NO: 4485; WAN0249MZ_at; Start 37; Stop 61
gaaaaaggcatattgtcaggtgtct

SEQ ID NO: 27467 - DNA, 25 bp, Artificial
  probe
  misc_feature (1)..(25): SEQ ID NO: 4485; WAN0249MZ_at; Start 34; Stop 58
ttagaaaaaggcatattgtcaggtg

SEQ ID NO: 27468 - DNA, 25 bp, Artificial
  probe
  misc_feature (1)..(25): SEQ ID NO: 4485; WAN0249MZ_at; Start 38; Stop 62
aaaaaggcatattgtcaggtgtcta

SEQ ID NO: 27469 - DNA, 25 bp, Artificial
  probe
  misc_feature (1)..(25): SEQ ID NO: 4485; WAN0249MZ_at; Start 39; Stop 63
aaaaggcatattgtcaggtgtctaa

SEQ ID NO: 27470 - DNA, 25 bp, Artificial
  probe
  misc_feature (1)..(25): SEQ ID NO: 4485; WAN0249MZ_at; Start 41; Stop 65
aaggcatattgtcaggtgtctaaaa

SEQ ID NO: 27471 - DNA, 25 bp, Artificial
  probe
  misc_feature (1)..(25): SEQ ID NO: 4485; WAN0249MZ_at; Start 40; Stop 64
aaaggcatattgtcaggtgtctaaa

SEQ ID NO: 27472 - DNA, 25 bp, Artificial
  probe
  misc_feature (1)..(25): SEQ ID NO: 4485; WAN0249MZ_at; Start 33; Stop 57
gttagaaaaaggcatattgtcaggt

SEQ ID NO: 27473 - DNA, 25 bp, Artificial
  probe
  misc_feature (1)..(25): SEQ ID NO: 136; WAN0249N2_at; Start 105; Stop 129
aatgattttatgaaagggagtgaaa

SEQ ID NO: 27474 - DNA, 25 bp, Artificial
  probe
  misc_feature (1)..(25): SEQ ID NO: 136; WAN0249N2_at; Start 99; Stop 123
attaagaatgattttatgaaaggga

SEQ ID NO: 27475 - DNA, 25 bp, Artificial
  probe
  misc_feature (1)..(25): SEQ ID NO: 136; WAN0249N2_at; Start 81; Stop 105
tactctctttcgtttataattaaga

SEQ ID NO: 27476 - DNA, 25 bp, Artificial
  probe
  misc_feature (1)..(25): SEQ ID NO: 136; WAN0249N2_at; Start 104; Stop 128
gaatgattttatgaaagggagtgaa

SEQ ID NO: 27477 - DNA, 25 bp, Artificial
  probe
  misc_feature (1)..(25): SEQ ID NO: 136; WAN0249N2_at; Start 12; Stop 36
tttcattcagattatagattttatt

SEQ ID NO: 27478 - DNA, 25 bp, Artificial
  probe
  misc_feature (1)..(25): SEQ ID NO: 136; WAN0249N2_at; Start 100; Stop 124
ttaagaatgattttatgaaagggag

SEQ ID NO: 27479 - DNA, 25 bp, Artificial
  probe
  misc_feature (1)..(25): SEQ ID NO: 136; WAN0249N2_at; Start 8; Stop 32
cctttttcattcagattatagattt

SEQ ID NO: 27480 - DNA, 25 bp, Artificial
  probe
  misc_feature (1)..(25): SEQ ID NO: 136; WAN0249N2_at; Start 90; Stop 114
tcgtttataattaagaatgatttta

SEQ ID NO: 27481 - DNA, 25 bp, Artificial
  probe
  misc_feature (1)..(25): SEQ ID NO: 136; WAN0249N2_at; Start 86; Stop 110
tctttcgtttataattaagaatgat

SEQ ID NO: 27482 - DNA, 25 bp, Artificial
  probe
  misc_feature (1)..(25): SEQ ID NO: 136; WAN0249N2_at; Start 7; Stop 31
acctttttcattcagattatagatt

SEQ ID NO: 27483 - DNA, 25 bp, Artificial
  probe
  misc_feature (1)..(25): SEQ ID NO: 136; WAN0249N2_at; Start 3; Stop 27
agttacctttttcattcagattata

SEQ ID NO: 27484 - DNA, 25 bp, Artificial
  probe
  misc_feature (1)..(25): SEQ ID NO: 136; WAN0249N2_at; Start 102; Stop 126
aagaatgattttatgaaagggagtg

SEQ ID NO: 27485 - DNA, 25 bp, Artificial
  probe
  misc_feature (1)..(25): SEQ ID NO: 136; WAN0249N2_at; Start 50; Stop 74
atctatttccccaacgtatggtttg

SEQ ID NO: 27486 - DNA, 25 bp, Artificial
  probe
  misc_feature (1)..(25): SEQ ID NO: 136; WAN0249N2_at; Start 107; Stop 131
tgattttatgaaagggagtgaaaat

SEQ ID NO: 27487 - DNA, 25 bp, Artificial
  probe
  misc_feature (1)..(25): SEQ ID NO: 136; WAN0249N2_at; Start 85; Stop 109
ctctttcgtttataattaagaatga

SEQ ID NO: 27488 - DNA, 25 bp, Artificial
  probe
  misc_feature (1)..(25): SEQ ID NO: 136; WAN0249N2_at; Start 47; Stop 71
aagatctatttccccaacgtatggt

SEQ ID NO: 27489 - DNA, 25 bp, Artificial
  probe
  misc_feature (1)..(25): SEQ ID NO: 136; WAN0249N2_at; Start 64; Stop 88
cgtatggtttgaaaaattactctct

SEQ ID NO: 27490 - DNA, 25 bp, Artificial
  probe
  misc_feature (1)..(25): SEQ ID NO: 136; WAN0249N2_at; Start 87; Stop 111
ctttcgtttataattaagaatgatt

SEQ ID NO: 27491 - DNA, 25 bp, Artificial
  probe
  misc_feature (1)..(25): SEQ ID NO: 136; WAN0249N2_at; Start 4; Stop 28
gttacctttttcattcagattatag

SEQ ID NO: 27492 - DNA, 25 bp, Artificial
  probe
  misc_feature (1)..(25): SEQ ID NO: 136; WAN0249N2_at; Start 84; Stop 108
tctctttcgtttataattaagaatg

SEQ ID NO: 27493 - DNA, 25 bp, Artificial
  probe
  misc_feature (1)..(25): SEQ ID NO: 136; WAN0249N2_at; Start 103; Stop 127
agaatgattttatgaaagggagtga

SEQ ID NO: 27494 - DNA, 25 bp, Artificial
  probe
  misc_feature (1)..(25): SEQ ID NO: 136; WAN0249N2_at; Start 46; Stop 70
aaagatctatttccccaacgtatgg

SEQ ID NO: 27495 - DNA, 25 bp, Artificial
  probe
  misc_feature (1)..(25): SEQ ID NO: 136; WAN0249N2_at; Start 48; Stop 72
agatctatttccccaacgtatggtt

SEQ ID NO: 27496 - DNA, 25 bp, Artificial
  probe
  misc_feature (1)..(25): SEQ ID NO: 136; WAN0249N2_at; Start 83; Stop 107
ctctctttcgtttataattaagaat

SEQ ID NO: 27497 - DNA, 25 bp, Artificial
  probe
  misc_feature (1)..(25): SEQ ID NO: 136; WAN0249N2_at; Start 51; Stop 75
tctatttccccaacgtatggtttga

SEQ ID NO: 27498 - DNA, 25 bp, Artificial
  probe
  misc_feature (1)..(25): SEQ ID NO: 136; WAN0249N2_at; Start 9; Stop 33
ctttttcattcagattatagatttt

SEQ ID NO: 27499 - DNA, 25 bp, Artificial
  probe
  misc_feature (1)..(25): SEQ ID NO: 136; WAN0249N2_at; Start 2; Stop 26
aagttacctttttcattcagattat

SEQ ID NO: 27500 - DNA, 25 bp, Artificial
  probe
  misc_feature (1)..(25): SEQ ID NO: 136; WAN0249N2_at; Start 98; Stop 122
aattaagaatgattttatgaaaggg

SEQ ID NO: 27501 - DNA, 25 bp, Artificial
  probe
  misc_feature (1)..(25): SEQ ID NO: 136; WAN0249N2_at; Start 108; Stop 132
gattttatgaaagggagtgaaaata

SEQ ID NO: 27502 - DNA, 25 bp, Artificial
  probe
  misc_feature (1)..(25): SEQ ID NO: 136; WAN0249N2_at; Start 45; Stop 69
aaaagatctatttccccaacgtatg

SEQ ID NO: 27503 - DNA, 25 bp, Artificial
  probe
  misc_feature (1)..(25): SEQ ID NO: 136; WAN0249N2_at; Start 6; Stop 30
tacctttttcattcagattatagat

SEQ ID NO: 27504 - DNA, 25 bp, Artificial
  probe
  misc_feature (1)..(25): SEQ ID NO: 136; WAN0249N2_at; Start 101; Stop 125
taagaatgattttatgaaagggagt

SEQ ID NO: 27505 - DNA, 25 bp, Artificial
  probe
  misc_feature (1)..(25): SEQ ID NO: 136; WAN0249N2_at; Start 5; Stop 29
ttacctttttcattcagattataga

SEQ ID NO: 27506 - DNA, 25 bp, Artificial
  probe
  misc_feature (1)..(25): SEQ ID NO: 136; WAN0249N2_at; Start 106; Stop 130
atgattttatgaaagggagtgaaaa

SEQ ID NO: 27507 - DNA, 25 bp, Artificial
  probe
  misc_feature (1)..(25): SEQ ID NO: 4378; WAN0249N3_at; Start 25; Stop 49
tcattcttaattataaacgaaagag

SEQ ID NO: 27508 - DNA, 25 bp, Artificial
  probe
  misc_feature (1)..(25): SEQ ID NO: 4378; WAN0249N3_at; Start 5; Stop 29
tttcactccctttcataaaatcatt

SEQ ID NO: 27509 - DNA, 25 bp, Artificial
  probe
  misc_feature (1)..(25): SEQ ID NO: 4378; WAN0249N3_at; Start 60; Stop 84
caaaccatacgttggggaaatagat

SEQ ID NO: 27510 - DNA, 25 bp, Artificial
  probe
  misc_feature (1)..(25): SEQ ID NO: 4378; WAN0249N3_at; Start 23; Stop 47
aatcattcttaattataaacgaaag

SEQ ID NO: 27511 - DNA, 25 bp, Artificial
  probe
  misc_feature (1)..(25): SEQ ID NO: 4378; WAN0249N3_at; Start 12; Stop 36
ccctttcataaaatcattcttaatt

SEQ ID NO: 27512 - DNA, 25 bp, Artificial
  probe
  misc_feature (1)..(25): SEQ ID NO: 4378; WAN0249N3_at; Start 64; Stop 88
ccatacgttggggaaatagatcttt

SEQ ID NO: 27513 - DNA, 25 bp, Artificial
  probe
  misc_feature (1)..(25): SEQ ID NO: 4378; WAN0249N3_at; Start 97; Stop 121
taataaaatctataatctgaatgaa

SEQ ID NO: 27514 - DNA, 25 bp, Artificial
  probe
  misc_feature (1)..(25): SEQ ID NO: 4378; WAN0249N3_at; Start 99; Stop 123
ataaaatctataatctgaatgaaaa

SEQ ID NO: 27515 - DNA, 25 bp, Artificial
  probe
  misc_feature (1)..(25): SEQ ID NO: 4378; WAN0249N3_at; Start 65; Stop 89
catacgttggggaaatagatctttt

SEQ ID NO: 27516 - DNA, 25 bp, Artificial
  probe
  misc_feature (1)..(25): SEQ ID NO: 4378; WAN0249N3_at; Start 95; Stop 119
tataataaaatctataatctgaatg

SEQ ID NO: 27517 - DNA, 25 bp, Artificial
  probe
  misc_feature (1)..(25): SEQ ID NO: 4378; WAN0249N3_at; Start 103; Stop 127
aatctataatctgaatgaaaaaggt

SEQ ID NO: 27518 - DNA, 25 bp, Artificial
  probe
  misc_feature (1)..(25): SEQ ID NO: 4378; WAN0249N3_at; Start 102; Stop 126
aaatctataatctgaatgaaaaagg

SEQ ID NO: 27519 - DNA, 25 bp, Artificial
  probe
  misc_feature (1)..(25): SEQ ID NO: 4378; WAN0249N3_at; Start 10; Stop 34
ctccctttcataaaatcattcttaa

SEQ ID NO: 27520 - DNA, 25 bp, Artificial
  probe
  misc_feature (1)..(25): SEQ ID NO: 4378; WAN0249N3_at; Start 27; Stop 51
attcttaattataaacgaaagagag

SEQ ID NO: 27521 - DNA, 25 bp, Artificial
  probe
  misc_feature (1)..(25): SEQ ID NO: 4378; WAN0249N3_at; Start 9; Stop 33
actccctttcataaaatcattctta

SEQ ID NO: 27522 - DNA, 25 bp, Artificial
  probe
  misc_feature (1)..(25): SEQ ID NO: 4378; WAN0249N3_at; Start 8; Stop 32
cactccctttcataaaatcattctt

SEQ ID NO: 27523 - DNA, 25 bp, Artificial
  probe
  misc_feature (1)..(25): SEQ ID NO: 4378; WAN0249N3_at; Start 46; Stop 70
agagagtaatttttcaaaccatacg

SEQ ID NO: 27524 - DNA, 25 bp, Artificial
  probe
  misc_feature (1)..(25): SEQ ID NO: 4378; WAN0249N3_at; Start 93; Stop 117
ggtataataaaatctataatctgaa

SEQ ID NO: 27525 - DNA, 25 bp, Artificial
  probe
  misc_feature (1)..(25): SEQ ID NO: 4378; WAN0249N3_at; Start 29; Stop 53
tcttaattataaacgaaagagagta

SEQ ID NO: 27526 - DNA, 25 bp, Artificial
  probe
  misc_feature (1)..(25): SEQ ID NO: 4378; WAN0249N3_at; Start 26; Stop 50
cattcttaattataaacgaaagaga

SEQ ID NO: 27527 - DNA, 25 bp, Artificial
  probe
  misc_feature (1)..(25): SEQ ID NO: 4378; WAN0249N3_at; Start 91; Stop 115
ttggtataataaaatctataatctg

SEQ ID NO: 27528 - DNA, 25 bp, Artificial
  probe
  misc_feature (1)..(25): SEQ ID NO: 4378; WAN0249N3_at; Start 2; Stop 26
tattttcactccctttcataaaatc

SEQ ID NO: 27529 - DNA, 25 bp, Artificial
  probe
  misc_feature (1)..(25): SEQ ID NO: 4378; WAN0249N3_at; Start 7; Stop 31
tcactccctttcataaaatcattct

SEQ ID NO: 27530 - DNA, 25 bp, Artificial
  probe
  misc_feature (1)..(25): SEQ ID NO: 4378; WAN0249N3_at; Start 92; Stop 116
tggtataataaaatctataatctga

SEQ ID NO: 27531 - DNA, 25 bp, Artificial
  probe
  misc_feature (1)..(25): SEQ ID NO: 4378; WAN0249N3_at; Start 101; Stop 125
aaaatctataatctgaatgaaaaag

SEQ ID NO: 27532 - DNA, 25 bp, Artificial
  probe
  misc_feature (1)..(25): SEQ ID NO: 4378; WAN0249N3_at; Start 20; Stop 44
taaaatcattcttaattataaacga

SEQ ID NO: 27533 - DNA, 25 bp, Artificial
  probe
  misc_feature (1)..(25): SEQ ID NO: 4378; WAN0249N3_at; Start 11; Stop 35
tccctttcataaaatcattcttaat

SEQ ID NO: 27534 - DNA, 25 bp, Artificial
  probe
  misc_feature (1)..(25): SEQ ID NO: 4378; WAN0249N3_at; Start 100; Stop 124
taaaatctataatctgaatgaaaaa

SEQ ID NO: 27535 - DNA, 25 bp, Artificial
  probe
  misc_feature (1)..(25): SEQ ID NO: 4378; WAN0249N3_at; Start 4; Stop 28
ttttcactccctttcataaaatcat

SEQ ID NO: 27536 - DNA, 25 bp, Artificial
  probe
  misc_feature (1)..(25): SEQ ID NO: 4378; WAN0249N3_at; Start 98; Stop 122
aataaaatctataatctgaatgaaa

SEQ ID NO: 27537 - DNA, 25 bp, Artificial
  probe
  misc_feature (1)..(25): SEQ ID NO: 4378; WAN0249N3_at; Start 3; Stop 27
attttcactccctttcataaaatca

SEQ ID NO: 27538 - DNA, 25 bp, Artificial
  probe
  misc_feature (1)..(25): SEQ ID NO: 4378; WAN0249N3_at; Start 59; Stop 83
tcaaaccatacgttggggaaataga

SEQ ID NO: 27539 - DNA, 25 bp, Artificial
  probe
  misc_feature (1)..(25): SEQ ID NO: 4378; WAN0249N3_at; Start 13; Stop 37
cctttcataaaatcattcttaatta

SEQ ID NO: 27540 - DNA, 25 bp, Artificial
  probe
  misc_feature (1)..(25): SEQ ID NO: 4378; WAN0249N3_at; Start 6; Stop 30
ttcactccctttcataaaatcattc

SEQ ID NO: 27541 - DNA, 25 bp, Artificial
  probe
  misc_feature (1)..(25): SEQ ID NO: 3557; WAN0249N4_at; Start 16; Stop 40
aattacagatttctttcaccgcctt

SEQ ID NO: 27542 - DNA, 25 bp, Artificial
  probe
  misc_feature (1)..(25): SEQ ID NO: 3557; WAN0249N4_at; Start 9; Stop 33
tccttcaaattacagatttctttca

SEQ ID NO: 27543 - DNA, 25 bp, Artificial
  probe
  misc_feature (1)..(25): SEQ ID NO: 3557; WAN0249N4_at; Start 31; Stop 55
tcaccgccttttccattttgtggta

SEQ ID NO: 27544 - DNA, 25 bp, Artificial
  probe
  misc_feature (1)..(25): SEQ ID NO: 3557; WAN0249N4_at; Start 22; Stop 46
agatttctttcaccgccttttccat

SEQ ID NO: 27545 - DNA, 25 bp, Artificial
  probe
  misc_feature (1)..(25): SEQ ID NO: 3557; WAN0249N4_at; Start 2; Stop 26
aaggaaatccttcaaattacagatt

SEQ ID NO: 27546 - DNA, 25 bp, Artificial
  probe
  misc_feature (1)..(25): SEQ ID NO: 3557; WAN0249N4_at; Start 17; Stop 41
attacagatttctttcaccgccttt

SEQ ID NO: 27547 - DNA, 25 bp, Artificial
  probe
  misc_feature (1)..(25): SEQ ID NO: 3557; WAN0249N4_at; Start 6; Stop 30
aaatccttcaaattacagatttctt

SEQ ID NO: 27548 - DNA, 25 bp, Artificial
  probe
  misc_feature (1)..(25): SEQ ID NO: 3557; WAN0249N4_at; Start 4; Stop 28
ggaaatccttcaaattacagatttc

SEQ ID NO: 27549 - DNA, 25 bp, Artificial
  probe
  misc_feature (1)..(25): SEQ ID NO: 3557; WAN0249N4_at; Start 28; Stop 52
ctttcaccgccttttccattttgtg

SEQ ID NO: 27550 - DNA, 25 bp, Artificial
  probe
  misc_feature (1)..(25): SEQ ID NO: 3557; WAN0249N4_at; Start 15; Stop 39
aaattacagatttctttcaccgcct

SEQ ID NO: 27551 - DNA, 25 bp, Artificial
  probe
  misc_feature (1)..(25): SEQ ID NO: 3557; WAN0249N4_at; Start 32; Stop 56
caccgccttttccattttgtggtat

SEQ ID NO: 27552 - DNA, 25 bp, Artificial
  probe
  misc_feature (1)..(25): SEQ ID NO: 3557; WAN0249N4_at; Start 14; Stop 38
caaattacagatttctttcaccgcc

SEQ ID NO: 27553 - DNA, 25 bp, Artificial
  probe
  misc_feature (1)..(25): SEQ ID NO: 3557; WAN0249N4_at; Start 13; Stop 37
tcaaattacagatttctttcaccgc

SEQ ID NO: 27554 - DNA, 25 bp, Artificial
  probe
  misc_feature (1)..(25): SEQ ID NO: 3557; WAN0249N4_at; Start 3; Stop 27
aggaaatccttcaaattacagattt

SEQ ID NO: 27555 - DNA, 25 bp, Artificial
  probe
  misc_feature (1)..(25): SEQ ID NO: 3557; WAN0249N4_at; Start 1; Stop 25
gaaggaaatccttcaaattacagat

SEQ ID NO: 27556 - DNA, 25 bp, Artificial
  probe
  misc_feature (1)..(25): SEQ ID NO: 3557; WAN0249N4_at; Start 7; Stop 31
aatccttcaaattacagatttcttt

SEQ ID NO: 27557 - DNA, 25 bp, Artificial
  probe
  misc_feature (1)..(25): SEQ ID NO: 3557; WAN0249N4_at; Start 19; Stop 43
tacagatttctttcaccgccttttc

SEQ ID NO: 27558 - DNA, 25 bp, Artificial
  probe
  misc_feature (1)..(25): SEQ ID NO: 3557; WAN0249N4_at; Start 21; Stop 45
cagatttctttcaccgccttttcca

SEQ ID NO: 27559 - DNA, 25 bp, Artificial
  probe
  misc_feature (1)..(25): SEQ ID NO: 3557; WAN0249N4_at; Start 11; Stop 35
cttcaaattacagatttctttcacc

SEQ ID NO: 27560 - DNA, 25 bp, Artificial
  probe
  misc_feature (1)..(25): SEQ ID NO: 3557; WAN0249N4_at; Start 12; Stop 36
ttcaaattacagatttctttcaccg

SEQ ID NO: 27561 - DNA, 25 bp, Artificial
  probe
  misc_feature (1)..(25): SEQ ID NO: 3557; WAN0249N4_at; Start 8; Stop 32
atccttcaaattacagatttctttc

SEQ ID NO: 27562 - DNA, 25 bp, Artificial
  probe
  misc_feature (1)..(25): SEQ ID NO: 3557; WAN0249N4_at; Start 10; Stop 34
ccttcaaattacagatttctttcac

SEQ ID NO: 27563 - DNA, 25 bp, Artificial
  probe
  misc_feature (1)..(25): SEQ ID NO: 3557; WAN0249N4_at; Start 5; Stop 29
gaaatccttcaaattacagatttct

SEQ ID NO: 27564 - DNA, 25 bp, Artificial
  probe
  misc_feature (1)..(25): SEQ ID NO: 5938; WAN0249N5_at; Start 26; Stop 50
aggcggtgaaagaaatctgtaattt

SEQ ID NO: 27565 - DNA, 25 bp, Artificial
  probe
  misc_feature (1)..(25): SEQ ID NO: 5938; WAN0249N5_at; Start 27; Stop 51
ggcggtgaaagaaatctgtaatttg

SEQ ID NO: 27566 - DNA, 25 bp, Artificial
  probe
  misc_feature (1)..(25): SEQ ID NO: 5938; WAN0249N5_at; Start 33; Stop 57
gaaagaaatctgtaatttgaaggat

SEQ ID NO: 27567 - DNA, 25 bp, Artificial
  probe
  misc_feature (1)..(25): SEQ ID NO: 5938; WAN0249N5_at; Start 38; Stop 62
aaatctgtaatttgaaggatttcct

SEQ ID NO: 27568 - DNA, 25 bp, Artificial
  probe
  misc_feature (1)..(25): SEQ ID NO: 5938; WAN0249N5_at; Start 39; Stop 63
aatctgtaatttgaaggatttcctt

SEQ ID NO: 27569 - DNA, 25 bp, Artificial
  probe
  misc_feature (1)..(25): SEQ ID NO: 5938; WAN0249N5_at; Start 31; Stop 55
gtgaaagaaatctgtaatttgaagg

SEQ ID NO: 27570 - DNA, 25 bp, Artificial
  probe
  misc_feature (1)..(25): SEQ ID NO: 5938; WAN0249N5_at; Start 9; Stop 33
ataccacaaaatggaaaaggcggtg

SEQ ID NO: 27571 - DNA, 25 bp, Artificial
  probe
  misc_feature (1)..(25): SEQ ID NO: 5938; WAN0249N5_at; Start 34; Stop 58
aaagaaatctgtaatttgaaggatt

SEQ ID NO: 27572 - DNA, 25 bp, Artificial
  probe
  misc_feature (1)..(25): SEQ ID NO: 5938; WAN0249N5_at; Start 24; Stop 48
aaaggcggtgaaagaaatctgtaat

SEQ ID NO: 27573 - DNA, 25 bp, Artificial
  probe
  misc_feature (1)..(25): SEQ ID NO: 5938; WAN0249N5_at; Start 22; Stop 46
gaaaaggcggtgaaagaaatctgta

SEQ ID NO: 27574 - DNA, 25 bp, Artificial
  probe
  misc_feature (1)..(25): SEQ ID NO: 5938; WAN0249N5_at; Start 36; Stop 60
agaaatctgtaatttgaaggatttc

SEQ ID NO: 27575 - DNA, 25 bp, Artificial
  probe
  misc_feature (1)..(25): SEQ ID NO: 5938; WAN0249N5_at; Start 40; Stop 64
atctgtaatttgaaggatttccttc

SEQ ID NO: 27576 - DNA, 25 bp, Artificial
  probe
  misc_feature (1)..(25): SEQ ID NO: 5938; WAN0249N5_at; Start 28; Stop 52
gcggtgaaagaaatctgtaatttga

SEQ ID NO: 27577 - DNA, 25 bp, Artificial
  probe
  misc_feature (1)..(25): SEQ ID NO: 5938; WAN0249N5_at; Start 35; Stop 59
aagaaatctgtaatttgaaggattt

SEQ ID NO: 27578 - DNA, 25 bp, Artificial
  probe
  misc_feature (1)..(25): SEQ ID NO: 5938; WAN0249N5_at; Start 37; Stop 61
gaaatctgtaatttgaaggatttcc

SEQ ID NO: 27579 - DNA, 25 bp, Artificial
  probe
  misc_feature (1)..(25): SEQ ID NO: 5938; WAN0249N5_at; Start 20; Stop 44
tggaaaaggcggtgaaagaaatctg

SEQ ID NO: 27580 - DNA, 25 bp, Artificial
  probe
  misc_feature (1)..(25): SEQ ID NO: 5938; WAN0249N5_at; Start 29; Stop 53
cggtgaaagaaatctgtaatttgaa

SEQ ID NO: 27581 - DNA, 25 bp, Artificial
  probe
  misc_feature (1)..(25): SEQ ID NO: 5938; WAN0249N5_at; Start 10; Stop 34
taccacaaaatggaaaaggcggtga

SEQ ID NO: 27582 - DNA, 25 bp, Artificial
  probe
  misc_feature (1)..(25): SEQ ID NO: 5938; WAN0249N5_at; Start 25; Stop 49
aaggcggtgaaagaaatctgtaatt

SEQ ID NO: 27583 - DNA, 25 bp, Artificial
  probe
  misc_feature (1)..(25): SEQ ID NO: 5938; WAN0249N5_at; Start 30; Stop 54
ggtgaaagaaatctgtaatttgaag

SEQ ID NO: 27584 - DNA, 25 bp, Artificial
  probe
  misc_feature (1)..(25): SEQ ID NO: 5938; WAN0249N5_at; Start 32; Stop 56
tgaaagaaatctgtaatttgaagga

SEQ ID NO: 27585 - DNA, 25 bp, Artificial
  probe
  misc_feature (1)..(25): SEQ ID NO: 5938; WAN0249N5_at; Start 19; Stop 43
atggaaaaggcggtgaaagaaatct

SEQ ID NO: 27586 - DNA, 25 bp, Artificial
  probe
  misc_feature (1)..(25): SEQ ID NO: 4783; WAN0249N6_at; Start 4; Stop 28
gaaaatctagtgtcttgttctagtt

SEQ ID NO: 27587 - DNA, 25 bp, Artificial
  probe
  misc_feature (1)..(25): SEQ ID NO: 4783; WAN0249N6_at; Start 16; Stop 40
tcttgttctagttttcaattcaccc

SEQ ID NO: 27588 - DNA, 25 bp, Artificial
  probe
  misc_feature (1)..(25): SEQ ID NO: 4783; WAN0249N6_at; Start 15; Stop 39
gtcttgttctagttttcaattcacc

SEQ ID NO: 27589 - DNA, 25 bp, Artificial
  probe
  misc_feature (1)..(25): SEQ ID NO: 4783; WAN0249N6_at; Start 3; Stop 27
agaaaatctagtgtcttgttctagt

SEQ ID NO: 27590 - DNA, 25 bp, Artificial
  probe
  misc_feature (1)..(25): SEQ ID NO: 4783; WAN0249N6_at; Start 9; Stop 33
tctagtgtcttgttctagttttcaa

SEQ ID NO: 27591 - DNA, 25 bp, Artificial
  probe
  misc_feature (1)..(25): SEQ ID NO: 4783; WAN0249N6_at; Start 1; Stop 25
ttagaaaatctagtgtcttgttcta

SEQ ID NO: 27592 - DNA, 25 bp, Artificial
  probe
  misc_feature (1)..(25): SEQ ID NO: 4783; WAN0249N6_at; Start 8; Stop 32
atctagtgtcttgttctagttttca

SEQ ID NO: 27593 - DNA, 25 bp, Artificial
  probe
  misc_feature (1)..(25): SEQ ID NO: 4783; WAN0249N6_at; Start 7; Stop 31
aatctagtgtcttgttctagttttc

SEQ ID NO: 27594 - DNA, 25 bp, Artificial
  probe
  misc_feature (1)..(25): SEQ ID NO: 4783; WAN0249N6_at; Start 19; Stop 43
tgttctagttttcaattcaccctat

SEQ ID NO: 27595 - DNA, 25 bp, Artificial
  probe
  misc_feature (1)..(25): SEQ ID NO: 4783; WAN0249N6_at; Start 18; Stop 42
ttgttctagttttcaattcacccta

SEQ ID NO: 27596 - DNA, 25 bp, Artificial
  probe
  misc_feature (1)..(25): SEQ ID NO: 4783; WAN0249N6_at; Start 6; Stop 30
aaatctagtgtcttgttctagtttt

SEQ ID NO: 27597 - DNA, 25 bp, Artificial
  probe
  misc_feature (1)..(25): SEQ ID NO: 4783; WAN0249N6_at; Start 2; Stop 26
tagaaaatctagtgtcttgttctag

SEQ ID NO: 27598 - DNA, 25 bp, Artificial
  probe
  misc_feature (1)..(25): SEQ ID NO: 4783; WAN0249N6_at; Start 30; Stop 54
tcaattcaccctattttttgaaaga

SEQ ID NO: 27599 - DNA, 25 bp, Artificial
  probe
  misc_feature (1)..(25): SEQ ID NO: 4783; WAN0249N6_at; Start 11; Stop 35
tagtgtcttgttctagttttcaatt

SEQ ID NO: 27600 - DNA, 25 bp, Artificial
  probe
  misc_feature (1)..(25): SEQ ID NO: 4783; WAN0249N6_at; Start 14; Stop 38
tgtcttgttctagttttcaattcac

SEQ ID NO: 27601 - DNA, 25 bp, Artificial
  probe
  misc_feature (1)..(25): SEQ ID NO: 4783; WAN0249N6_at; Start 5; Stop 29
aaaatctagtgtcttgttctagttt

SEQ ID NO: 27602 - DNA, 25 bp, Artificial
  probe
  misc_feature (1)..(25): SEQ ID NO: 4783; WAN0249N6_at; Start 10; Stop 34
ctagtgtcttgttctagttttcaat

SEQ ID NO: 27603 - DNA, 25 bp, Artificial
  probe
  misc_feature (1)..(25): SEQ ID NO: 4783; WAN0249N6_at; Start 17; Stop 41
cttgttctagttttcaattcaccct

SEQ ID NO: 27604 - DNA, 25 bp, Artificial
  probe
  misc_feature (1)..(25): SEQ ID NO: 4783; WAN0249N6_at; Start 13; Stop 37
gtgtcttgttctagttttcaattca

SEQ ID NO: 27605 - DNA, 25 bp, Artificial
  probe
  misc_feature (1)..(25): SEQ ID NO: 4783; WAN0249N6_at; Start 12; Stop 36
agtgtcttgttctagttttcaattc

SEQ ID NO: 27606 - DNA, 25 bp, Artificial
  probe
  misc_feature (1)..(25): SEQ ID NO: 3719; WAN0249N7_at; Start 33; Stop 57
ttgaaaactagaacaagacactaga

SEQ ID NO: 27607 - DNA, 25 bp, Artificial
  probe
  misc_feature (1)..(25): SEQ ID NO: 3719; WAN0249N7_at; Start 31; Stop 55
aattgaaaactagaacaagacacta

SEQ ID NO: 27608 - DNA, 25 bp, Artificial
  probe
  misc_feature (1)..(25): SEQ ID NO: 3719; WAN0249N7_at; Start 34; Stop 58
tgaaaactagaacaagacactagat

SEQ ID NO: 27609 - DNA, 25 bp, Artificial
  probe
  misc_feature (1)..(25): SEQ ID NO: 3719; WAN0249N7_at; Start 23; Stop 47
atagggtgaattgaaaactagaaca

SEQ ID NO: 27610 - DNA, 25 bp, Artificial
  probe
  misc_feature (1)..(25): SEQ ID NO: 3719; WAN0249N7_at; Start 12; Stop 36
tctttcaaaaaatagggtgaattga

SEQ ID NO: 27611 - DNA, 25 bp, Artificial
  probe
  misc_feature (1)..(25): SEQ ID NO: 3719; WAN0249N7_at; Start 41; Stop 65
tagaacaagacactagattttctaa

SEQ ID NO: 27612 - DNA, 25 bp, Artificial
  probe
  misc_feature (1)..(25): SEQ ID NO: 3719; WAN0249N7_at; Start 32; Stop 56
attgaaaactagaacaagacactag

SEQ ID NO: 27613 - DNA, 25 bp, Artificial
  probe
  misc_feature (1)..(25): SEQ ID NO: 3719; WAN0249N7_at; Start 37; Stop 61
aaactagaacaagacactagatttt

SEQ ID NO: 27614 - DNA, 25 bp, Artificial
  probe
  misc_feature (1)..(25): SEQ ID NO: 3719; WAN0249N7_at; Start 25; Stop 49
agggtgaattgaaaactagaacaag

SEQ ID NO: 27615 - DNA, 25 bp, Artificial
  probe
  misc_feature (1)..(25): SEQ ID NO: 3719; WAN0249N7_at; Start 26; Stop 50
gggtgaattgaaaactagaacaaga

SEQ ID NO: 27616 - DNA, 25 bp, Artificial
  probe
  misc_feature (1)..(25): SEQ ID NO: 3719; WAN0249N7_at; Start 29; Stop 53
tgaattgaaaactagaacaagacac

SEQ ID NO: 27617 - DNA, 25 bp, Artificial
  probe
  misc_feature (1)..(25): SEQ ID NO: 3719; WAN0249N7_at; Start 27; Stop 51
ggtgaattgaaaactagaacaagac

SEQ ID NO: 27618 - DNA, 25 bp, Artificial
  probe
  misc_feature (1)..(25): SEQ ID NO: 3719; WAN0249N7_at; Start 36; Stop 60
aaaactagaacaagacactagattt

SEQ ID NO: 27619 - DNA, 25 bp, Artificial
  probe
  misc_feature (1)..(25): SEQ ID NO: 3719; WAN0249N7_at; Start 28; Stop 52
gtgaattgaaaactagaacaagaca

SEQ ID NO: 27620 - DNA, 25 bp, Artificial
  probe
  misc_feature (1)..(25): SEQ ID NO: 3719; WAN0249N7_at; Start 40; Stop 64
ctagaacaagacactagattttcta

SEQ ID NO: 27621 - DNA, 25 bp, Artificial
  probe
  misc_feature (1)..(25): SEQ ID NO: 3719; WAN0249N7_at; Start 35; Stop 59
gaaaactagaacaagacactagatt

SEQ ID NO: 27622 - DNA, 25 bp, Artificial
  probe
  misc_feature (1)..(25): SEQ ID NO: 3719; WAN0249N7_at; Start 7; Stop 31
tcacgtctttcaaaaaatagggtga

SEQ ID NO: 27623 - DNA, 25 bp, Artificial
  probe
  misc_feature (1)..(25): SEQ ID NO: 3719; WAN0249N7_at; Start 6; Stop 30
ctcacgtctttcaaaaaatagggtg

SEQ ID NO: 27624 - DNA, 25 bp, Artificial
  probe
  misc_feature (1)..(25): SEQ ID NO: 3719; WAN0249N7_at; Start 30; Stop 54
gaattgaaaactagaacaagacact

SEQ ID NO: 27625 - DNA, 25 bp, Artificial
  probe
  misc_feature (1)..(25): SEQ ID NO: 3719; WAN0249N7_at; Start 24; Stop 48
tagggtgaattgaaaactagaacaa

SEQ ID NO: 27626 - DNA, 25 bp, Artificial
  probe
  misc_feature (1)..(25): SEQ ID NO: 3719; WAN0249N7_at; Start 38; Stop 62
aactagaacaagacactagattttc

SEQ ID NO: 27627 - DNA, 25 bp, Artificial
  probe
  misc_feature (1)..(25): SEQ ID NO: 3719; WAN0249N7_at; Start 39; Stop 63
actagaacaagacactagattttct

SEQ ID NO: 27628 - DNA, 25 bp, Artificial
  probe
  misc_feature (1)..(25): SEQ ID NO: 542; WAN0249N8_at; Start 93; Stop 117
tatatgccctattccagtattttag

SEQ ID NO: 27629 - DNA, 25 bp, Artificial
  probe
  misc_feature (1)..(25): SEQ ID NO: 542; WAN0249N8_at; Start 70; Stop 94
taaaacacttgtctacgattaccta

SEQ ID NO: 27630 - DNA, 25 bp, Artificial
  probe
  misc_feature (1)..(25): SEQ ID NO: 542; WAN0249N8_at; Start 18; Stop 42
tatgtttagtgatgcttgctataca

SEQ ID NO: 27631 - DNA, 25 bp, Artificial
  probe
  misc_feature (1)..(25): SEQ ID NO: 542; WAN0249N8_at; Start 187; Stop 211
tagtgttttagtttcaatccgccat

SEQ ID NO: 27632 - DNA, 25 bp, Artificial
  probe
  misc_feature (1)..(25): SEQ ID NO: 542; WAN0249N8_at; Start 89; Stop 113
tacctatatgccctattccagtatt

SEQ ID NO: 27633 - DNA, 25 bp, Artificial
  probe
  misc_feature (1)..(25): SEQ ID NO: 542; WAN0249N8_at; Start 117; Stop 141
gaagcactgcatctatttttatcga

SEQ ID NO: 27634 - DNA, 25 bp, Artificial
  probe
  misc_feature (1)..(25): SEQ ID NO: 542; WAN0249N8_at; Start 80; Stop 104
gtctacgattacctatatgccctat

SEQ ID NO: 27635 - DNA, 25 bp, Artificial
  probe
  misc_feature (1)..(25): SEQ ID NO: 542; WAN0249N8_at; Start 123; Stop 147
ctgcatctatttttatcgaggttaa

SEQ ID NO: 27636 - DNA, 25 bp, Artificial
  probe
  misc_feature (1)..(25): SEQ ID NO: 542; WAN0249N8_at; Start 120; Stop 144
gcactgcatctatttttatcgaggt

SEQ ID NO: 27637 - DNA, 25 bp, Artificial
  probe
  misc_feature (1)..(25): SEQ ID NO: 542; WAN0249N8_at; Start 97; Stop 121
tgccctattccagtattttagaagc

SEQ ID NO: 27638 - DNA, 25 bp, Artificial
  probe
  misc_feature (1)..(25): SEQ ID NO: 542; WAN0249N8_at; Start 146; Stop 170
aaatctagcttttatagaaggtcta

SEQ ID NO: 27639 - DNA, 25 bp, Artificial
  probe
  misc_feature (1)..(25): SEQ ID NO: 542; WAN0249N8_at; Start 49; Stop 73
gatctcctgcgagacaatctataaa

SEQ ID NO: 27640 - DNA, 25 bp, Artificial
  probe
  misc_feature (1)..(25): SEQ ID NO: 542; WAN0249N8_at; Start 83; Stop 107
tacgattacctatatgccctattcc

SEQ ID NO: 27641 - DNA, 25 bp, Artificial
  probe
  misc_feature (1)..(25): SEQ ID NO: 542; WAN0249N8_at; Start 68; Stop 92
tataaaacacttgtctacgattacc

SEQ ID NO: 27642 - DNA, 25 bp, Artificial
  probe
  misc_feature (1)..(25): SEQ ID NO: 542; WAN0249N8_at; Start 56; Stop 80
tgcgagacaatctataaaacacttg

SEQ ID NO: 27643 - DNA, 25 bp, Artificial
  probe
  misc_feature (1)..(25): SEQ ID NO: 542; WAN0249N8_at; Start 138; Stop 162
tcgaggttaaatctagcttttatag

SEQ ID NO: 27644 - DNA, 25 bp, Artificial
  probe
  misc_feature (1)..(25): SEQ ID NO: 542; WAN0249N8_at; Start 63; Stop 87
caatctataaaacacttgtctacga

SEQ ID NO: 27645 - DNA, 25 bp, Artificial
  probe
  misc_feature (1)..(25): SEQ ID NO: 542; WAN0249N8_at; Start 78; Stop 102
ttgtctacgattacctatatgccct

SEQ ID NO: 27646 - DNA, 25 bp, Artificial
  probe
  misc_feature (1)..(25): SEQ ID NO: 542; WAN0249N8_at; Start 153; Stop 177
gcttttatagaaggtctatttaaga

SEQ ID NO: 27647 - DNA, 25 bp, Artificial
  probe
  misc_feature (1)..(25): SEQ ID NO: 542; WAN0249N8_at; Start 144; Stop 168
ttaaatctagcttttatagaaggtc

SEQ ID NO: 27648 - DNA, 25 bp, Artificial
  probe
  misc_feature (1)..(25): SEQ ID NO: 542; WAN0249N8_at; Start 105; Stop 129
tccagtattttagaagcactgcatc

SEQ ID NO: 27649 - DNA, 25 bp, Artificial
  probe
  misc_feature (1)..(25): SEQ ID NO: 542; WAN0249N8_at; Start 185; Stop 209
tgtagtgttttagtttcaatccgcc

SEQ ID NO: 27650 - DNA, 25 bp, Artificial
  probe
  misc_feature (1)..(25): SEQ ID NO: 542; WAN0249N8_at; Start 53; Stop 77
tcctgcgagacaatctataaaacac

SEQ ID NO: 27651 - DNA, 25 bp, Artificial
  probe
  misc_feature (1)..(25): SEQ ID NO: 542; WAN0249N8_at; Start 76; Stop 100
acttgtctacgattacctatatgcc

SEQ ID NO: 27652 - DNA, 25 bp, Artificial
  probe
  misc_feature (1)..(25): SEQ ID NO: 542; WAN0249N8_at; Start 165; Stop 189
ggtctatttaagaaatatattgtag

SEQ ID NO: 27653 - DNA, 25 bp, Artificial
  probe
  misc_feature (1)..(25): SEQ ID NO: 542; WAN0249N8_at; Start 186; Stop 210
gtagtgttttagtttcaatccgcca

SEQ ID NO: 27654 - DNA, 25 bp, Artificial
  probe
  misc_feature (1)..(25): SEQ ID NO: 542; WAN0249N8_at; Start 72; Stop 96
aaacacttgtctacgattacctata

SEQ ID NO: 27655 - DNA, 25 bp, Artificial
  probe
  misc_feature (1)..(25): SEQ ID NO: 542; WAN0249N8_at; Start 99; Stop 123
ccctattccagtattttagaagcac

SEQ ID NO: 27656 - DNA, 25 bp, Artificial
  probe
  misc_feature (1)..(25): SEQ ID NO: 542; WAN0249N8_at; Start 130; Stop 154
tatttttatcgaggttaaatctagc

SEQ ID NO: 27657 - DNA, 25 bp, Artificial
  probe
  misc_feature (1)..(25): SEQ ID NO: 542; WAN0249N8_at; Start 45; Stop 69
attagatctcctgcgagacaatcta

SEQ ID NO: 27658 - DNA, 25 bp, Artificial
  probe
  misc_feature (1)..(25): SEQ ID NO: 542; WAN0249N8_at; Start 102; Stop 126
tattccagtattttagaagcactgc

SEQ ID NO: 27659 - DNA, 25 bp, Artificial
  probe
  misc_feature (1)..(25): SEQ ID NO: 542; WAN0249N8_at; Start 86; Stop 110
gattacctatatgccctattccagt

SEQ ID NO: 27660 - DNA, 25 bp, Artificial
  probe
  misc_feature (1)..(25): SEQ ID NO: 542; WAN0249N8_at; Start 107; Stop 131
cagtattttagaagcactgcatcta

SEQ ID NO: 27661 - DNA, 25 bp, Artificial
  probe
  misc_feature (1)..(25): SEQ ID NO: 542; WAN0249N8_at; Start 51; Stop 75
tctcctgcgagacaatctataaaac

SEQ ID NO: 27662 - DNA, 25 bp, Artificial
  probe
  misc_feature (1)..(25): SEQ ID NO: 2471; WAN0249N9_at; Start 44; Stop 68
gaccttctataaaagctagatttaa

SEQ ID NO: 27663 - DNA, 25 bp, Artificial
  probe
  misc_feature (1)..(25): SEQ ID NO: 2471; WAN0249N9_at; Start 92; Stop 116
cttctaaaatactggaatagggcat

SEQ ID NO: 27664 - DNA, 25 bp, Artificial
  probe
  misc_feature (1)..(25): SEQ ID NO: 2471; WAN0249N9_at; Start 65; Stop 89
ttaacctcgataaaaatagatgcag

SEQ ID NO: 27665 - DNA, 25 bp, Artificial
  probe
  misc_feature (1)..(25): SEQ ID NO: 2471; WAN0249N9_at; Start 10; Stop 34
tgaaactaaaacactacaatatatt

SEQ ID NO: 27666 - DNA, 25 bp, Artificial
  probe
  misc_feature (1)..(25): SEQ ID NO: 2471; WAN0249N9_at; Start 49; Stop 73
tctataaaagctagatttaacctcg

SEQ ID NO: 27667 - DNA, 25 bp, Artificial
  probe
  misc_feature (1)..(25): SEQ ID NO: 2471; WAN0249N9_at; Start 2; Stop 26
tggcggattgaaactaaaacactac

SEQ ID NO: 27668 - DNA, 25 bp, Artificial
  probe
  misc_feature (1)..(25): SEQ ID NO: 2471; WAN0249N9_at; Start 122; Stop 146
taatcgtagacaagtgttttataga

SEQ ID NO: 27669 - DNA, 25 bp, Artificial
  probe
  misc_feature (1)..(25): SEQ ID NO: 2471; WAN0249N9_at; Start 134; Stop 158
agtgttttatagattgtctcgcagg

SEQ ID NO: 27670 - DNA, 25 bp, Artificial
  probe
  misc_feature (1)..(25): SEQ ID NO: 2471; WAN0249N9_at; Start 112; Stop 136
ggcatataggtaatcgtagacaagt

SEQ ID NO: 27671 - DNA, 25 bp, Artificial
  probe
  misc_feature (1)..(25): SEQ ID NO: 2471; WAN0249N9_at; Start 139; Stop 163
tttatagattgtctcgcaggagatc

SEQ ID NO: 27672 - DNA, 25 bp, Artificial
  probe
  misc_feature (1)..(25): SEQ ID NO: 2471; WAN0249N9_at; Start 94; Stop 118
tctaaaatactggaatagggcatat

SEQ ID NO: 27673 - DNA, 25 bp, Artificial
  probe
  misc_feature (1)..(25): SEQ ID NO: 2471; WAN0249N9_at; Start 118; Stop 142
taggtaatcgtagacaagtgtttta

SEQ ID NO: 27674 - DNA, 25 bp, Artificial
  probe
  misc_feature (1)..(25): SEQ ID NO: 2471; WAN0249N9_at; Start 62; Stop 86
gatttaacctcgataaaaatagatg

SEQ ID NO: 27675 - DNA, 25 bp, Artificial
  probe
  misc_feature (1)..(25): SEQ ID NO: 2471; WAN0249N9_at; Start 5; Stop 29
cggattgaaactaaaacactacaat

SEQ ID NO: 27676 - DNA, 25 bp, Artificial
  probe
  misc_feature (1)..(25): SEQ ID NO: 2471; WAN0249N9_at; Start 97; Stop 121
aaaatactggaatagggcatatagg

SEQ ID NO: 27677 - DNA, 25 bp, Artificial
  probe
  misc_feature (1)..(25): SEQ ID NO: 2471; WAN0249N9_at; Start 81; Stop 105
tagatgcagtgcttctaaaatactg

SEQ ID NO: 27678 - DNA, 25 bp, Artificial
  probe
  misc_feature (1)..(25): SEQ ID NO: 2471; WAN0249N9_at; Start 24; Stop 48
tacaatatatttcttaaatagacct

SEQ ID NO: 27679 - DNA, 25 bp, Artificial
  probe
  misc_feature (1)..(25): SEQ ID NO: 2471; WAN0249N9_at; Start 83; Stop 107
gatgcagtgcttctaaaatactgga

SEQ ID NO: 27680 - DNA, 25 bp, Artificial
  probe
  misc_feature (1)..(25): SEQ ID NO: 2471; WAN0249N9_at; Start 3; Stop 27
ggcggattgaaactaaaacactaca

SEQ ID NO: 27681 - DNA, 25 bp, Artificial
  probe
  misc_feature (1)..(25): SEQ ID NO: 2471; WAN0249N9_at; Start 106; Stop 130
gaatagggcatataggtaatcgtag

SEQ ID NO: 27682 - DNA, 25 bp, Artificial
  probe
  misc_feature (1)..(25): SEQ ID NO: 2471; WAN0249N9_at; Start 90; Stop 114
tgcttctaaaatactggaatagggc

SEQ ID NO: 27683 - DNA, 25 bp, Artificial
  probe
  misc_feature (1)..(25): SEQ ID NO: 2471; WAN0249N9_at; Start 86; Stop 110
gcagtgcttctaaaatactggaata

SEQ ID NO: 27684 - DNA, 25 bp, Artificial
  probe
  misc_feature (1)..(25): SEQ ID NO: 2471; WAN0249N9_at; Start 143; Stop 167
tagattgtctcgcaggagatctaat

SEQ ID NO: 27685 - DNA, 25 bp, Artificial
  probe
  misc_feature (1)..(25): SEQ ID NO: 2471; WAN0249N9_at; Start 141; Stop 165
tatagattgtctcgcaggagatcta

SEQ ID NO: 27686 - DNA, 25 bp, Artificial
  probe
  misc_feature (1)..(25): SEQ ID NO: 2471; WAN0249N9_at; Start 53; Stop 77
taaaagctagatttaacctcgataa

SEQ ID NO: 27687 - DNA, 25 bp, Artificial
  probe
  misc_feature (1)..(25): SEQ ID NO: 2471; WAN0249N9_at; Start 103; Stop 127
ctggaatagggcatataggtaatcg

SEQ ID NO: 27688 - DNA, 25 bp, Artificial
  probe
  misc_feature (1)..(25): SEQ ID NO: 2471; WAN0249N9_at; Start 109; Stop 133
tagggcatataggtaatcgtagaca

SEQ ID NO: 27689 - DNA, 25 bp, Artificial
  probe
  misc_feature (1)..(25): SEQ ID NO: 2471; WAN0249N9_at; Start 116; Stop 140
tataggtaatcgtagacaagtgttt

SEQ ID NO: 27690 - DNA, 25 bp, Artificial
  probe
  misc_feature (1)..(25): SEQ ID NO: 2471; WAN0249N9_at; Start 170; Stop 194
tgtatagcaagcatcactaaacata

SEQ ID NO: 27691 - DNA, 25 bp, Artificial
  probe
  misc_feature (1)..(25): SEQ ID NO: 2471; WAN0249N9_at; Start 38; Stop 62
taaatagaccttctataaaagctag

SEQ ID NO: 27692 - DNA, 25 bp, Artificial
  probe
  misc_feature (1)..(25): SEQ ID NO: 2471; WAN0249N9_at; Start 132; Stop 156
caagtgttttatagattgtctcgca

SEQ ID NO: 27693 - DNA, 25 bp, Artificial
  probe
  misc_feature (1)..(25): SEQ ID NO: 2471; WAN0249N9_at; Start 114; Stop 138
catataggtaatcgtagacaagtgt

SEQ ID NO: 27694 - DNA, 25 bp, Artificial
  probe
  misc_feature (1)..(25): SEQ ID NO: 2471; WAN0249N9_at; Start 171; Stop 195
gtatagcaagcatcactaaacatat

SEQ ID NO: 27695 - DNA, 25 bp, Artificial
  probe
  misc_feature (1)..(25): SEQ ID NO: 2471; WAN0249N9_at; Start 136; Stop 160
tgttttatagattgtctcgcaggag

SEQ ID NO: 27696 - DNA, 25 bp, Artificial
  probe
  misc_feature (1)..(25): SEQ ID NO: 186; WAN0249NA_at; Start 24; Stop 48
taaagaaacttggcaaaatcgcaat

SEQ ID NO: 27697 - DNA, 25 bp, Artificial
  probe
  misc_feature (1)..(25): SEQ ID NO: 186; WAN0249NA_at; Start 55; Stop 79
ctctgtgaaaatcatagagcaaact

SEQ ID NO: 27698 - DNA, 25 bp, Artificial
  probe
  misc_feature (1)..(25): SEQ ID NO: 186; WAN0249NA_at; Start 28; Stop 52
gaaacttggcaaaatcgcaatttaa

SEQ ID NO: 27699 - DNA, 25 bp, Artificial
  probe
  misc_feature (1)..(25): SEQ ID NO: 186; WAN0249NA_at; Start 15; Stop 39
ttagacgaataaagaaacttggcaa

SEQ ID NO: 27700 - DNA, 25 bp, Artificial
  probe
  misc_feature (1)..(25): SEQ ID NO: 186; WAN0249NA_at; Start 5; Stop 29
gactctacttttagacgaataaaga

SEQ ID NO: 27701 - DNA, 25 bp, Artificial
  probe
  misc_feature (1)..(25): SEQ ID NO: 186; WAN0249NA_at; Start 74; Stop 98
caaactaggaaaccagtcgcagagt

SEQ ID NO: 27702 - DNA, 25 bp, Artificial
  probe
  misc_feature (1)..(25): SEQ ID NO: 186; WAN0249NA_at; Start 23; Stop 47
ataaagaaacttggcaaaatcgcaa

SEQ ID NO: 27703 - DNA, 25 bp, Artificial
  probe
  misc_feature (1)..(25): SEQ ID NO: 186; WAN0249NA_at; Start 56; Stop 80
tctgtgaaaatcatagagcaaacta

SEQ ID NO: 27704 - DNA, 25 bp, Artificial
  probe
  misc_feature (1)..(25): SEQ ID NO: 186; WAN0249NA_at; Start 1; Stop 25
aacagactctacttttagacgaata

SEQ ID NO: 27705 - DNA, 25 bp, Artificial
  probe
  misc_feature (1)..(25): SEQ ID NO: 186; WAN0249NA_at; Start 14; Stop 38
tttagacgaataaagaaacttggca

SEQ ID NO: 27706 - DNA, 25 bp, Artificial
  probe
  misc_feature (1)..(25): SEQ ID NO: 186; WAN0249NA_at; Start 4; Stop 28
agactctacttttagacgaataaag

SEQ ID NO: 27707 - DNA, 25 bp, Artificial
  probe
  misc_feature (1)..(25): SEQ ID NO: 186; WAN0249NA_at; Start 77; Stop 101
actaggaaaccagtcgcagagtggt

SEQ ID NO: 27708 - DNA, 25 bp, Artificial
  probe
  misc_feature (1)..(25): SEQ ID NO: 186; WAN0249NA_at; Start 26; Stop 50
aagaaacttggcaaaatcgcaattt

SEQ ID NO: 27709 - DNA, 25 bp, Artificial
  probe
  misc_feature (1)..(25): SEQ ID NO: 186; WAN0249NA_at; Start 2; Stop 26
acagactctacttttagacgaataa

SEQ ID NO: 27710 - DNA, 25 bp, Artificial
  probe
  misc_feature (1)..(25): SEQ ID NO: 186; WAN0249NA_at; Start 27; Stop 51
agaaacttggcaaaatcgcaattta

SEQ ID NO: 27711 - DNA, 25 bp, Artificial
  probe
  misc_feature (1)..(25): SEQ ID NO: 186; WAN0249NA_at; Start 78; Stop 102
ctaggaaaccagtcgcagagtggtc

SEQ ID NO: 27712 - DNA, 25 bp, Artificial
  probe
  misc_feature (1)..(25): SEQ ID NO: 186; WAN0249NA_at; Start 29; Stop 53
aaacttggcaaaatcgcaatttaat

SEQ ID NO: 27713 - DNA, 25 bp, Artificial
  probe
  misc_feature (1)..(25): SEQ ID NO: 186; WAN0249NA_at; Start 20; Stop 44
cgaataaagaaacttggcaaaatcg

SEQ ID NO: 27714 - DNA, 25 bp, Artificial
  probe
  misc_feature (1)..(25): SEQ ID NO: 186; WAN0249NA_at; Start 76; Stop 100
aactaggaaaccagtcgcagagtgg

SEQ ID NO: 27715 - DNA, 25 bp, Artificial
  probe
  misc_feature (1)..(25): SEQ ID NO: 186; WAN0249NA_at; Start 3; Stop 27
cagactctacttttagacgaataaa

SEQ ID NO: 27716 - DNA, 25 bp, Artificial
  probe
  misc_feature (1)..(25): SEQ ID NO: 186; WAN0249NA_at; Start 75; Stop 99
aaactaggaaaccagtcgcagagtg

SEQ ID NO: 27717 - DNA, 25 bp, Artificial
  probe
  misc_feature (1)..(25): SEQ ID NO: 186; WAN0249NA_at; Start 22; Stop 46
aataaagaaacttggcaaaatcgca

SEQ ID NO: 27718 - DNA, 25 bp, Artificial
  probe
  misc_feature (1)..(25): SEQ ID NO: 186; WAN0249NA_at; Start 25; Stop 49
aaagaaacttggcaaaatcgcaatt

SEQ ID NO: 27719 - DNA, 25 bp, Artificial
  probe
  misc_feature (1)..(25): SEQ ID NO: 186; WAN0249NA_at; Start 21; Stop 45
gaataaagaaacttggcaaaatcgc

SEQ ID NO: 27720 - DNA, 25 bp, Artificial
  probe
  misc_feature (1)..(25): SEQ ID NO: 186; WAN0249NA_at; Start 16; Stop 40
tagacgaataaagaaacttggcaaa

SEQ ID NO: 27721 - DNA, 25 bp, Artificial
  probe
  misc_feature (1)..(25): SEQ ID NO: 3576; WAN0249NB_at; Start 56; Stop 80
ttgcgattttgccaagtttctttat

SEQ ID NO: 27722 - DNA, 25 bp, Artificial
  probe
  misc_feature (1)..(25): SEQ ID NO: 3576; WAN0249NB_at; Start 3; Stop 27
ccactctgcgactggtttcctagtt

SEQ ID NO: 27723 - DNA, 25 bp, Artificial
  probe
  misc_feature (1)..(25): SEQ ID NO: 3576; WAN0249NB_at; Start 52; Stop 76
taaattgcgattttgccaagtttct

SEQ ID NO: 27724 - DNA, 25 bp, Artificial
  probe
  misc_feature (1)..(25): SEQ ID NO: 3576; WAN0249NB_at; Start 65; Stop 89
tgccaagtttctttattcgtctaaa

SEQ ID NO: 27725 - DNA, 25 bp, Artificial
  probe
  misc_feature (1)..(25): SEQ ID NO: 3576; WAN0249NB_at; Start 2; Stop 26
accactctgcgactggtttcctagt

SEQ ID NO: 27726 - DNA, 25 bp, Artificial
  probe
  misc_feature (1)..(25): SEQ ID NO: 3576; WAN0249NB_at; Start 57; Stop 81
tgcgattttgccaagtttctttatt

SEQ ID NO: 27727 - DNA, 25 bp, Artificial
  probe
  misc_feature (1)..(25): SEQ ID NO: 3576; WAN0249NB_at; Start 58; Stop 82
gcgattttgccaagtttctttattc

SEQ ID NO: 27728 - DNA, 25 bp, Artificial
  probe
  misc_feature (1)..(25): SEQ ID NO: 3576; WAN0249NB_at; Start 76; Stop 100
tttattcgtctaaaagtagagtctg

SEQ ID NO: 27729 - DNA, 25 bp, Artificial
  probe
  misc_feature (1)..(25): SEQ ID NO: 3576; WAN0249NB_at; Start 59; Stop 83
cgattttgccaagtttctttattcg

SEQ ID NO: 27730 - DNA, 25 bp, Artificial
  probe
  misc_feature (1)..(25): SEQ ID NO: 3576; WAN0249NB_at; Start 5; Stop 29
actctgcgactggtttcctagtttg

SEQ ID NO: 27731 - DNA, 25 bp, Artificial
  probe
  misc_feature (1)..(25): SEQ ID NO: 3576; WAN0249NB_at; Start 50; Stop 74
attaaattgcgattttgccaagttt

SEQ ID NO: 27732 - DNA, 25 bp, Artificial
  probe
  misc_feature (1)..(25): SEQ ID NO: 3576; WAN0249NB_at; Start 51; Stop 75
ttaaattgcgattttgccaagtttc

SEQ ID NO: 27733 - DNA, 25 bp, Artificial
  probe
  misc_feature (1)..(25): SEQ ID NO: 3576; WAN0249NB_at; Start 23; Stop 47
tagtttgctctatgattttcacaga

SEQ ID NO: 27734 - DNA, 25 bp, Artificial
  probe
  misc_feature (1)..(25): SEQ ID NO: 3576; WAN0249NB_at; Start 74; Stop 98
tctttattcgtctaaaagtagagtc

SEQ ID NO: 27735 - DNA, 25 bp, Artificial
  probe
  misc_feature (1)..(25): SEQ ID NO: 3576; WAN0249NB_at; Start 53; Stop 77
aaattgcgattttgccaagtttctt

SEQ ID NO: 27736 - DNA, 25 bp, Artificial
  probe
  misc_feature (1)..(25): SEQ ID NO: 3576; WAN0249NB_at; Start 77; Stop 101
ttattcgtctaaaagtagagtctgt

SEQ ID NO: 27737 - DNA, 25 bp, Artificial
  probe
  misc_feature (1)..(25): SEQ ID NO: 3576; WAN0249NB_at; Start 78; Stop 102
tattcgtctaaaagtagagtctgtt

SEQ ID NO: 27738 - DNA, 25 bp, Artificial
  probe
  misc_feature (1)..(25): SEQ ID NO: 3576; WAN0249NB_at; Start 64; Stop 88
ttgccaagtttctttattcgtctaa

SEQ ID NO: 27739 - DNA, 25 bp, Artificial
  probe
  misc_feature (1)..(25): SEQ ID NO: 3576; WAN0249NB_at; Start 1; Stop 25
gaccactctgcgactggtttcctag

SEQ ID NO: 27740 - DNA, 25 bp, Artificial
  probe
  misc_feature (1)..(25): SEQ ID NO: 3576; WAN0249NB_at; Start 24; Stop 48
agtttgctctatgattttcacagag

SEQ ID NO: 27741 - DNA, 25 bp, Artificial
  probe
  misc_feature (1)..(25): SEQ ID NO: 3576; WAN0249NB_at; Start 75; Stop 99
ctttattcgtctaaaagtagagtct

SEQ ID NO: 27742 - DNA, 25 bp, Artificial
  probe
  misc_feature (1)..(25): SEQ ID NO: 3576; WAN0249NB_at; Start 63; Stop 87
tttgccaagtttctttattcgtcta

SEQ ID NO: 27743 - DNA, 25 bp, Artificial
  probe
  misc_feature (1)..(25): SEQ ID NO: 3576; WAN0249NB_at; Start 54; Stop 78
aattgcgattttgccaagtttcttt

SEQ ID NO: 27744 - DNA, 25 bp, Artificial
  probe
  misc_feature (1)..(25): SEQ ID NO: 3576; WAN0249NB_at; Start 4; Stop 28
cactctgcgactggtttcctagttt

SEQ ID NO: 27745 - DNA, 25 bp, Artificial
  probe
  misc_feature (1)..(25): SEQ ID NO: 3576; WAN0249NB_at; Start 55; Stop 79
attgcgattttgccaagtttcttta

SEQ ID NO: 27746 - DNA, 25 bp, Artificial
  probe
  misc_feature (1)..(25): SEQ ID NO: 4555; WAN0249NC_at; Start 16; Stop 40
attaattgttactattgaactttgt

SEQ ID NO: 27747 - DNA, 25 bp, Artificial
  probe
  misc_feature (1)..(25): SEQ ID NO: 4555; WAN0249NC_at; Start 28; Stop 52
tattgaactttgttaagaagaggta

SEQ ID NO: 27748 - DNA, 25 bp, Artificial
  probe
  misc_feature (1)..(25): SEQ ID NO: 4555; WAN0249NC_at; Start 24; Stop 48
ttactattgaactttgttaagaaga

SEQ ID NO: 27749 - DNA, 25 bp, Artificial
  probe
  misc_feature (1)..(25): SEQ ID NO: 4555; WAN0249NC_at; Start 27; Stop 51
ctattgaactttgttaagaagaggt

SEQ ID NO: 27750 - DNA, 25 bp, Artificial
  probe
  misc_feature (1)..(25): SEQ ID NO: 4555; WAN0249NC_at; Start 21; Stop 45
ttgttactattgaactttgttaaga

SEQ ID NO: 27751 - DNA, 25 bp, Artificial
  probe
  misc_feature (1)..(25): SEQ ID NO: 4555; WAN0249NC_at; Start 15; Stop 39
tattaattgttactattgaactttg

SEQ ID NO: 27752 - DNA, 25 bp, Artificial
  probe
  misc_feature (1)..(25): SEQ ID NO: 4555; WAN0249NC_at; Start 12; Stop 36
aaatattaattgttactattgaact

SEQ ID NO: 27753 - DNA, 25 bp, Artificial
  probe
  misc_feature (1)..(25): SEQ ID NO: 4555; WAN0249NC_at; Start 22; Stop 46
tgttactattgaactttgttaagaa

SEQ ID NO: 27754 - DNA, 25 bp, Artificial
  probe
  misc_feature (1)..(25): SEQ ID NO: 4555; WAN0249NC_at; Start 18; Stop 42
taattgttactattgaactttgtta

SEQ ID NO: 27755 - DNA, 25 bp, Artificial
  probe
  misc_feature (1)..(25): SEQ ID NO: 4555; WAN0249NC_at; Start 25; Stop 49
tactattgaactttgttaagaagag

SEQ ID NO: 27756 - DNA, 25 bp, Artificial
  probe
  misc_feature (1)..(25): SEQ ID NO: 4555; WAN0249NC_at; Start 26; Stop 50
actattgaactttgttaagaagagg

SEQ ID NO: 27757 - DNA, 25 bp, Artificial
  probe
  misc_feature (1)..(25): SEQ ID NO: 4555; WAN0249NC_at; Start 13; Stop 37
aatattaattgttactattgaactt

SEQ ID NO: 27758 - DNA, 25 bp, Artificial
  probe
  misc_feature (1)..(25): SEQ ID NO: 4555; WAN0249NC_at; Start 10; Stop 34
taaaatattaattgttactattgaa

SEQ ID NO: 27759 - DNA, 25 bp, Artificial
  probe
  misc_feature (1)..(25): SEQ ID NO: 4555; WAN0249NC_at; Start 20; Stop 44
attgttactattgaactttgttaag

SEQ ID NO: 27760 - DNA, 25 bp, Artificial
  probe
  misc_feature (1)..(25): SEQ ID NO: 4789; WAN0249ND_at; Start 19; Stop 43
caaagttcaatagtaacaattaata

SEQ ID NO: 27761 - DNA, 25 bp, Artificial
  probe
  misc_feature (1)..(25): SEQ ID NO: 4789; WAN0249ND_at; Start 13; Stop 37
tcttaacaaagttcaatagtaacaa

SEQ ID NO: 27762 - DNA, 25 bp, Artificial
  probe
  misc_feature (1)..(25): SEQ ID NO: 4789; WAN0249ND_at; Start 21; Stop 45
aagttcaatagtaacaattaatatt

SEQ ID NO: 27763 - DNA, 25 bp, Artificial
  probe
  misc_feature (1)..(25): SEQ ID NO: 4789; WAN0249ND_at; Start 8; Stop 32
cctcttcttaacaaagttcaatagt

SEQ ID NO: 27764 - DNA, 25 bp, Artificial
  probe
  misc_feature (1)..(25): SEQ ID NO: 4789; WAN0249ND_at; Start 18; Stop 42
acaaagttcaatagtaacaattaat

SEQ ID NO: 27765 - DNA, 25 bp, Artificial
  probe
  misc_feature (1)..(25): SEQ ID NO: 4789; WAN0249ND_at; Start 22; Stop 46
agttcaatagtaacaattaatattt

SEQ ID NO: 27766 - DNA, 25 bp, Artificial
  probe
  misc_feature (1)..(25): SEQ ID NO: 4789; WAN0249ND_at; Start 7; Stop 31
acctcttcttaacaaagttcaatag

SEQ ID NO: 27767 - DNA, 25 bp, Artificial
  probe
  misc_feature (1)..(25): SEQ ID NO: 4789; WAN0249ND_at; Start 10; Stop 34
tcttcttaacaaagttcaatagtaa

SEQ ID NO: 27768 - DNA, 25 bp, Artificial
  probe
  misc_feature (1)..(25): SEQ ID NO: 4789; WAN0249ND_at; Start 6; Stop 30
tacctcttcttaacaaagttcaata

SEQ ID NO: 27769 - DNA, 25 bp, Artificial
  probe
  misc_feature (1)..(25): SEQ ID NO: 4789; WAN0249ND_at; Start 20; Stop 44
aaagttcaatagtaacaattaatat

SEQ ID NO: 27770 - DNA, 25 bp, Artificial
  probe
  misc_feature (1)..(25): SEQ ID NO: 4789; WAN0249ND_at; Start 14; Stop 38
cttaacaaagttcaatagtaacaat

SEQ ID NO: 27771 - DNA, 25 bp, Artificial
  probe
  misc_feature (1)..(25): SEQ ID NO: 4789; WAN0249ND_at; Start 9; Stop 33
ctcttcttaacaaagttcaatagta

SEQ ID NO: 27772 - DNA, 25 bp, Artificial
  probe
  misc_feature (1)..(25): SEQ ID NO: 4789; WAN0249ND_at; Start 12; Stop 36
ttcttaacaaagttcaatagtaaca

SEQ ID NO: 27773 - DNA, 25 bp, Artificial
  probe
  misc_feature (1)..(25): SEQ ID NO: 4789; WAN0249ND_at; Start 16; Stop 40
taacaaagttcaatagtaacaatta

SEQ ID NO: 27774 - DNA, 25 bp, Artificial
  probe
  misc_feature (1)..(25): SEQ ID NO: 4769; WAN0249NE_at; Start 100; Stop 124
ccgatgtcaaatataaaaaagaagg

SEQ ID NO: 27775 - DNA, 25 bp, Artificial
  probe
  misc_feature (1)..(25): SEQ ID NO: 4769; WAN0249NE_at; Start 6; Stop 30
gaaatgcatatttaatgaaagataa

SEQ ID NO: 27776 - DNA, 25 bp, Artificial
  probe
  misc_feature (1)..(25): SEQ ID NO: 4769; WAN0249NE_at; Start 102; Stop 126
gatgtcaaatataaaaaagaaggtc

SEQ ID NO: 27777 - DNA, 25 bp, Artificial
  probe
  misc_feature (1)..(25): SEQ ID NO: 4769; WAN0249NE_at; Start 56; Stop 80
tgacaaaggaaacggtttcattgta

SEQ ID NO: 27778 - DNA, 25 bp, Artificial
  probe
  misc_feature (1)..(25): SEQ ID NO: 4769; WAN0249NE_at; Start 2; Stop 26
taatgaaatgcatatttaatgaaag

SEQ ID NO: 27779 - DNA, 25 bp, Artificial
  probe
  misc_feature (1)..(25): SEQ ID NO: 4769; WAN0249NE_at; Start 97; Stop 121
acaccgatgtcaaatataaaaaaga

SEQ ID NO: 27780 - DNA, 25 bp, Artificial
  probe
  misc_feature (1)..(25): SEQ ID NO: 4769; WAN0249NE_at; Start 8; Stop 32
aatgcatatttaatgaaagataaat

SEQ ID NO: 27781 - DNA, 25 bp, Artificial
  probe
  misc_feature (1)..(25): SEQ ID NO: 4769; WAN0249NE_at; Start 3; Stop 27
aatgaaatgcatatttaatgaaaga

SEQ ID NO: 27782 - DNA, 25 bp, Artificial
  probe
  misc_feature (1)..(25): SEQ ID NO: 4769; WAN0249NE_at; Start 95; Stop 119
tgacaccgatgtcaaatataaaaaa

SEQ ID NO: 27783 - DNA, 25 bp, Artificial
  probe
  misc_feature (1)..(25): SEQ ID NO: 4769; WAN0249NE_at; Start 101; Stop 125
cgatgtcaaatataaaaaagaaggt

SEQ ID NO: 27784 - DNA, 25 bp, Artificial
  probe
  misc_feature (1)..(25): SEQ ID NO: 4769; WAN0249NE_at; Start 103; Stop 127
atgtcaaatataaaaaagaaggtct

SEQ ID NO: 27785 - DNA, 25 bp, Artificial
  probe
  misc_feature (1)..(25): SEQ ID NO: 4769; WAN0249NE_at; Start 54; Stop 78
cttgacaaaggaaacggtttcattg

SEQ ID NO: 27786 - DNA, 25 bp, Artificial
  probe
  misc_feature (1)..(25): SEQ ID NO: 4769; WAN0249NE_at; Start 96; Stop 120
gacaccgatgtcaaatataaaaaag

SEQ ID NO: 27787 - DNA, 25 bp, Artificial
  probe
  misc_feature (1)..(25): SEQ ID NO: 4769; WAN0249NE_at; Start 1; Stop 25
ttaatgaaatgcatatttaatgaaa

SEQ ID NO: 27788 - DNA, 25 bp, Artificial
  probe
  misc_feature (1)..(25): SEQ ID NO: 4769; WAN0249NE_at; Start 99; Stop 123
accgatgtcaaatataaaaaagaag

SEQ ID NO: 27789 - DNA, 25 bp, Artificial
  probe
  misc_feature (1)..(25): SEQ ID NO: 4769; WAN0249NE_at; Start 68; Stop 92
cggtttcattgtataatgtaaacat

SEQ ID NO: 27790 - DNA, 25 bp, Artificial
  probe
  misc_feature (1)..(25): SEQ ID NO: 4769; WAN0249NE_at; Start 7; Stop 31
aaatgcatatttaatgaaagataaa

SEQ ID NO: 27791 - DNA, 25 bp, Artificial
  probe
  misc_feature (1)..(25): SEQ ID NO: 4769; WAN0249NE_at; Start 5; Stop 29
tgaaatgcatatttaatgaaagata

SEQ ID NO: 27792 - DNA, 25 bp, Artificial
  probe
  misc_feature (1)..(25): SEQ ID NO: 4769; WAN0249NE_at; Start 98; Stop 122
caccgatgtcaaatataaaaaagaa

SEQ ID NO: 27793 - DNA, 25 bp, Artificial
  probe
  misc_feature (1)..(25): SEQ ID NO: 4769; WAN0249NE_at; Start 4; Stop 28
atgaaatgcatatttaatgaaagat

SEQ ID NO: 27794 - DNA, 25 bp, Artificial
  probe
  misc_feature (1)..(25): SEQ ID NO: 525; WAN0249NF_at; Start 99; Stop 123
aatttatctttcattaaatatgcat

SEQ ID NO: 27795 - DNA, 25 bp, Artificial
  probe
  misc_feature (1)..(25): SEQ ID NO: 525; WAN0249NF_at; Start 13; Stop 37
ttttttatatttgacatcggtgtca

SEQ ID NO: 27796 - DNA, 25 bp, Artificial
  probe
  misc_feature (1)..(25): SEQ ID NO: 525; WAN0249NF_at; Start 101; Stop 125
tttatctttcattaaatatgcattt

SEQ ID NO: 27797 - DNA, 25 bp, Artificial
  probe
  misc_feature (1)..(25): SEQ ID NO: 525; WAN0249NF_at; Start 54; Stop 78
caatgaaaccgtttcctttgtcaag

SEQ ID NO: 27798 - DNA, 25 bp, Artificial
  probe
  misc_feature (1)..(25): SEQ ID NO: 525; WAN0249NF_at; Start 103; Stop 127
tatctttcattaaatatgcatttca

SEQ ID NO: 27799 - DNA, 25 bp, Artificial
  probe
  misc_feature (1)..(25): SEQ ID NO: 525; WAN0249NF_at; Start 5; Stop 29
agaccttcttttttatatttgacat

SEQ ID NO: 27800 - DNA, 25 bp, Artificial
  probe
  misc_feature (1)..(25): SEQ ID NO: 525; WAN0249NF_at; Start 7; Stop 31
accttcttttttatatttgacatcg

SEQ ID NO: 27801 - DNA, 25 bp, Artificial
  probe
  misc_feature (1)..(25): SEQ ID NO: 525; WAN0249NF_at; Start 104; Stop 128
atctttcattaaatatgcatttcat

SEQ ID NO: 27802 - DNA, 25 bp, Artificial
  probe
  misc_feature (1)..(25): SEQ ID NO: 525; WAN0249NF_at; Start 9; Stop 33
cttcttttttatatttgacatcggt

SEQ ID NO: 27803 - DNA, 25 bp, Artificial
  probe
  misc_feature (1)..(25): SEQ ID NO: 525; WAN0249NF_at; Start 106; Stop 130
ctttcattaaatatgcatttcatta

SEQ ID NO: 27804 - DNA, 25 bp, Artificial
  probe
  misc_feature (1)..(25): SEQ ID NO: 525; WAN0249NF_at; Start 11; Stop 35
tcttttttatatttgacatcggtgt

SEQ ID NO: 27805 - DNA, 25 bp, Artificial
  probe
  misc_feature (1)..(25): SEQ ID NO: 525; WAN0249NF_at; Start 6; Stop 30
gaccttcttttttatatttgacatc

SEQ ID NO: 27806 - DNA, 25 bp, Artificial
  probe
  misc_feature (1)..(25): SEQ ID NO: 525; WAN0249NF_at; Start 10; Stop 34
ttcttttttatatttgacatcggtg

SEQ ID NO: 27807 - DNA, 25 bp, Artificial
  probe
  misc_feature (1)..(25): SEQ ID NO: 525; WAN0249NF_at; Start 8; Stop 32
ccttcttttttatatttgacatcgg

SEQ ID NO: 27808 - DNA, 25 bp, Artificial
  probe
  misc_feature (1)..(25): SEQ ID NO: 525; WAN0249NF_at; Start 40; Stop 64
atgtttacattatacaatgaaaccg

SEQ ID NO: 27809 - DNA, 25 bp, Artificial
  probe
  misc_feature (1)..(25): SEQ ID NO: 525; WAN0249NF_at; Start 52; Stop 76
tacaatgaaaccgtttcctttgtca

SEQ ID NO: 27810 - DNA, 25 bp, Artificial
  probe
  misc_feature (1)..(25): SEQ ID NO: 525; WAN0249NF_at; Start 12; Stop 36
cttttttatatttgacatcggtgtc

SEQ ID NO: 27811 - DNA, 25 bp, Artificial
  probe
  misc_feature (1)..(25): SEQ ID NO: 525; WAN0249NF_at; Start 102; Stop 126
ttatctttcattaaatatgcatttc

SEQ ID NO: 27812 - DNA, 25 bp, Artificial
  probe
  misc_feature (1)..(25): SEQ ID NO: 525; WAN0249NF_at; Start 107; Stop 131
tttcattaaatatgcatttcattaa

SEQ ID NO: 27813 - DNA, 25 bp, Artificial
  probe
  misc_feature (1)..(25): SEQ ID NO: 525; WAN0249NF_at; Start 105; Stop 129
tctttcattaaatatgcatttcatt

SEQ ID NO: 27814 - DNA, 25 bp, Artificial
  probe
  misc_feature (1)..(25): SEQ ID NO: 3535; WAN0249NG_at; Start 18; Stop 42
ttatgtccaagtctctctattattt

SEQ ID NO: 27815 - DNA, 25 bp, Artificial
  probe
  misc_feature (1)..(25): SEQ ID NO: 3535; WAN0249NG_at; Start 15; Stop 39
tttttatgtccaagtctctctatta

SEQ ID NO: 27816 - DNA, 25 bp, Artificial
  probe
  misc_feature (1)..(25): SEQ ID NO: 3535; WAN0249NG_at; Start 22; Stop 46
gtccaagtctctctattatttctaa

SEQ ID NO: 27817 - DNA, 25 bp, Artificial
  probe
  misc_feature (1)..(25): SEQ ID NO: 3535; WAN0249NG_at; Start 23; Stop 47
tccaagtctctctattatttctaaa

SEQ ID NO: 27818 - DNA, 25 bp, Artificial
  probe
  misc_feature (1)..(25): SEQ ID NO: 3535; WAN0249NG_at; Start 25; Stop 49
caagtctctctattatttctaaatt

SEQ ID NO: 27819 - DNA, 25 bp, Artificial
  probe
  misc_feature (1)..(25): SEQ ID NO: 3535; WAN0249NG_at; Start 17; Stop 41
tttatgtccaagtctctctattatt

SEQ ID NO: 27820 - DNA, 25 bp, Artificial
  probe
  misc_feature (1)..(25): SEQ ID NO: 3535; WAN0249NG_at; Start 24; Stop 48
ccaagtctctctattatttctaaat

SEQ ID NO: 27821 - DNA, 25 bp, Artificial
  probe
  misc_feature (1)..(25): SEQ ID NO: 3535; WAN0249NG_at; Start 21; Stop 45
tgtccaagtctctctattatttcta

SEQ ID NO: 27822 - DNA, 25 bp, Artificial
  probe
  misc_feature (1)..(25): SEQ ID NO: 3535; WAN0249NG_at; Start 26; Stop 50
aagtctctctattatttctaaattt

SEQ ID NO: 27823 - DNA, 25 bp, Artificial
  probe
  misc_feature (1)..(25): SEQ ID NO: 3535; WAN0249NG_at; Start 27; Stop 51
agtctctctattatttctaaattta

SEQ ID NO: 27824 - DNA, 25 bp, Artificial
  probe
  misc_feature (1)..(25): SEQ ID NO: 3535; WAN0249NG_at; Start 20; Stop 44
atgtccaagtctctctattatttct

SEQ ID NO: 27825 - DNA, 25 bp, Artificial
  probe
  misc_feature (1)..(25): SEQ ID NO: 3535; WAN0249NG_at; Start 19; Stop 43
tatgtccaagtctctctattatttc

SEQ ID NO: 27826 - DNA, 25 bp, Artificial
  probe
  misc_feature (1)..(25): SEQ ID NO: 3535; WAN0249NG_at; Start 16; Stop 40
ttttatgtccaagtctctctattat

SEQ ID NO: 27827 - DNA, 25 bp, Artificial
  probe
  misc_feature (1)..(25): SEQ ID NO: 3230; WAN0249NH_at; Start 29; Stop 53
aatttagaaataatagagagacttg

SEQ ID NO: 27828 - DNA, 25 bp, Artificial
  probe
  misc_feature (1)..(25): SEQ ID NO: 3230; WAN0249NH_at; Start 30; Stop 54
atttagaaataatagagagacttgg

SEQ ID NO: 27829 - DNA, 25 bp, Artificial
  probe
  misc_feature (1)..(25): SEQ ID NO: 3230; WAN0249NH_at; Start 28; Stop 52
aaatttagaaataatagagagactt

SEQ ID NO: 27830 - DNA, 25 bp, Artificial
  probe
  misc_feature (1)..(25): SEQ ID NO: 3230; WAN0249NH_at; Start 33; Stop 57
tagaaataatagagagacttggaca

SEQ ID NO: 27831 - DNA, 25 bp, Artificial
  probe
  misc_feature (1)..(25): SEQ ID NO: 3230; WAN0249NH_at; Start 35; Stop 59
gaaataatagagagacttggacata

SEQ ID NO: 27832 - DNA, 25 bp, Artificial
  probe
  misc_feature (1)..(25): SEQ ID NO: 3230; WAN0249NH_at; Start 36; Stop 60
aaataatagagagacttggacataa

SEQ ID NO: 27833 - DNA, 25 bp, Artificial
  probe
  misc_feature (1)..(25): SEQ ID NO: 3230; WAN0249NH_at; Start 39; Stop 63
taatagagagacttggacataaaaa

SEQ ID NO: 27834 - DNA, 25 bp, Artificial
  probe
  misc_feature (1)..(25): SEQ ID NO: 3230; WAN0249NH_at; Start 38; Stop 62
ataatagagagacttggacataaaa

SEQ ID NO: 27835 - DNA, 25 bp, Artificial
  probe
  misc_feature (1)..(25): SEQ ID NO: 3230; WAN0249NH_at; Start 37; Stop 61
aataatagagagacttggacataaa

SEQ ID NO: 27836 - DNA, 25 bp, Artificial
  probe
  misc_feature (1)..(25): SEQ ID NO: 3230; WAN0249NH_at; Start 27; Stop 51
taaatttagaaataatagagagact

SEQ ID NO: 27837 - DNA, 25 bp, Artificial
  probe
  misc_feature (1)..(25): SEQ ID NO: 3230; WAN0249NH_at; Start 32; Stop 56
ttagaaataatagagagacttggac

SEQ ID NO: 27838 - DNA, 25 bp, Artificial
  probe
  misc_feature (1)..(25): SEQ ID NO: 3230; WAN0249NH_at; Start 34; Stop 58
agaaataatagagagacttggacat

SEQ ID NO: 27839 - DNA, 25 bp, Artificial
  probe
  misc_feature (1)..(25): SEQ ID NO: 3230; WAN0249NH_at; Start 31; Stop 55
tttagaaataatagagagacttgga

SEQ ID NO: 27840 - DNA, 25 bp, Artificial
  probe
  misc_feature (1)..(25): SEQ ID NO: 302; WAN0249NI_at; Start 58; Stop 82
catctaatttttgagtagatttttg

SEQ ID NO: 27841 - DNA, 25 bp, Artificial
  probe
  misc_feature (1)..(25): SEQ ID NO: 302; WAN0249NI_at; Start 52; Stop 76
tttaatcatctaatttttgagtaga

SEQ ID NO: 27842 - DNA, 25 bp, Artificial
  probe
  misc_feature (1)..(25): SEQ ID NO: 302; WAN0249NI_at; Start 12; Stop 36
caaagggacagatgtttttgtcctt

SEQ ID NO: 27843 - DNA, 25 bp, Artificial
  probe
  misc_feature (1)..(25): SEQ ID NO: 302; WAN0249NI_at; Start 1; Stop 25
aatttagtaaacaaagggacagatg

SEQ ID NO: 27844 - DNA, 25 bp, Artificial
  probe
  misc_feature (1)..(25): SEQ ID NO: 302; WAN0249NI_at; Start 51; Stop 75
ttttaatcatctaatttttgagtag

SEQ ID NO: 27845 - DNA, 25 bp, Artificial
  probe
  misc_feature (1)..(25): SEQ ID NO: 302; WAN0249NI_at; Start 2; Stop 26
atttagtaaacaaagggacagatgt

SEQ ID NO: 27846 - DNA, 25 bp, Artificial
  probe
  misc_feature (1)..(25): SEQ ID NO: 302; WAN0249NI_at; Start 49; Stop 73
tgttttaatcatctaatttttgagt

SEQ ID NO: 27847 - DNA, 25 bp, Artificial
  probe
  misc_feature (1)..(25): SEQ ID NO: 302; WAN0249NI_at; Start 54; Stop 78
taatcatctaatttttgagtagatt

SEQ ID NO: 27848 - DNA, 25 bp, Artificial
  probe
  misc_feature (1)..(25): SEQ ID NO: 302; WAN0249NI_at; Start 61; Stop 85
ctaatttttgagtagatttttgctc

SEQ ID NO: 27849 - DNA, 25 bp, Artificial
  probe
  misc_feature (1)..(25): SEQ ID NO: 302; WAN0249NI_at; Start 68; Stop 92
ttgagtagatttttgctcagaggtt

SEQ ID NO: 27850 - DNA, 25 bp, Artificial
  probe
  misc_feature (1)..(25): SEQ ID NO: 302; WAN0249NI_at; Start 69; Stop 93
tgagtagatttttgctcagaggttt

SEQ ID NO: 27851 - DNA, 25 bp, Artificial
  probe
  misc_feature (1)..(25): SEQ ID NO: 302; WAN0249NI_at; Start 15; Stop 39
agggacagatgtttttgtccttttg

SEQ ID NO: 27852 - DNA, 25 bp, Artificial
  probe
  misc_feature (1)..(25): SEQ ID NO: 302; WAN0249NI_at; Start 50; Stop 74
gttttaatcatctaatttttgagta

SEQ ID NO: 27853 - DNA, 25 bp, Artificial
  probe
  misc_feature (1)..(25): SEQ ID NO: 302; WAN0249NI_at; Start 53; Stop 77
ttaatcatctaatttttgagtagat

SEQ ID NO: 27854 - DNA, 25 bp, Artificial
  probe
  misc_feature (1)..(25): SEQ ID NO: 302; WAN0249NI_at; Start 59; Stop 83
atctaatttttgagtagatttttgc

SEQ ID NO: 27855 - DNA, 25 bp, Artificial
  probe
  misc_feature (1)..(25): SEQ ID NO: 302; WAN0249NI_at; Start 62; Stop 86
taatttttgagtagatttttgctca

SEQ ID NO: 27856 - DNA, 25 bp, Artificial
  probe
  misc_feature (1)..(25): SEQ ID NO: 302; WAN0249NI_at; Start 71; Stop 95
agtagatttttgctcagaggttttt

SEQ ID NO: 27857 - DNA, 25 bp, Artificial
  probe
  misc_feature (1)..(25): SEQ ID NO: 302; WAN0249NI_at; Start 47; Stop 71
gatgttttaatcatctaatttttga

SEQ ID NO: 27858 - DNA, 25 bp, Artificial
  probe
  misc_feature (1)..(25): SEQ ID NO: 302; WAN0249NI_at; Start 67; Stop 91
tttgagtagatttttgctcagaggt

SEQ ID NO: 27859 - DNA, 25 bp, Artificial
  probe
  misc_feature (1)..(25): SEQ ID NO: 302; WAN0249NI_at; Start 57; Stop 81
tcatctaatttttgagtagattttt

SEQ ID NO: 27860 - DNA, 25 bp, Artificial
  probe
  misc_feature (1)..(25): SEQ ID NO: 302; WAN0249NI_at; Start 63; Stop 87
aatttttgagtagatttttgctcag

SEQ ID NO: 27861 - DNA, 25 bp, Artificial
  probe
  misc_feature (1)..(25): SEQ ID NO: 302; WAN0249NI_at; Start 70; Stop 94
gagtagatttttgctcagaggtttt

SEQ ID NO: 27862 - DNA, 25 bp, Artificial
  probe
  misc_feature (1)..(25): SEQ ID NO: 302; WAN0249NI_at; Start 46; Stop 70
agatgttttaatcatctaatttttg

SEQ ID NO: 27863 - DNA, 25 bp, Artificial
  probe
  misc_feature (1)..(25): SEQ ID NO: 302; WAN0249NI_at; Start 11; Stop 35
acaaagggacagatgtttttgtcct

SEQ ID NO: 27864 - DNA, 25 bp, Artificial
  probe
  misc_feature (1)..(25): SEQ ID NO: 302; WAN0249NI_at; Start 64; Stop 88
atttttgagtagatttttgctcaga

SEQ ID NO: 27865 - DNA, 25 bp, Artificial
  probe
  misc_feature (1)..(25): SEQ ID NO: 302; WAN0249NI_at; Start 48; Stop 72
atgttttaatcatctaatttttgag

SEQ ID NO: 27866 - DNA, 25 bp, Artificial
  probe
  misc_feature (1)..(25): SEQ ID NO: 302; WAN0249NI_at; Start 55; Stop 79
aatcatctaatttttgagtagattt

SEQ ID NO: 27867 - DNA, 25 bp, Artificial
  probe
  misc_feature (1)..(25): SEQ ID NO: 302; WAN0249NI_at; Start 66; Stop 90
ttttgagtagatttttgctcagagg

SEQ ID NO: 27868 - DNA, 25 bp, Artificial
  probe
  misc_feature (1)..(25): SEQ ID NO: 302; WAN0249NI_at; Start 65; Stop 89
tttttgagtagatttttgctcagag

SEQ ID NO: 27869 - DNA, 25 bp, Artificial
  probe
  misc_feature (1)..(25): SEQ ID NO: 302; WAN0249NI_at; Start 60; Stop 84
tctaatttttgagtagatttttgct

SEQ ID NO: 27870 - DNA, 25 bp, Artificial
  probe
  misc_feature (1)..(25): SEQ ID NO: 64; WAN0249NJ_at; Start 6; Stop 30
cctctgagcaaaaatctactcaaaa

SEQ ID NO: 27871 - DNA, 25 bp, Artificial
  probe
  misc_feature (1)..(25): SEQ ID NO: 64; WAN0249NJ_at; Start 2; Stop 26
aaaacctctgagcaaaaatctactc

SEQ ID NO: 27872 - DNA, 25 bp, Artificial
  probe
  misc_feature (1)..(25): SEQ ID NO: 64; WAN0249NJ_at; Start 1; Stop 25
aaaaacctctgagcaaaaatctact

SEQ ID NO: 27873 - DNA, 25 bp, Artificial
  probe
  misc_feature (1)..(25): SEQ ID NO: 64; WAN0249NJ_at; Start 7; Stop 31
ctctgagcaaaaatctactcaaaaa

SEQ ID NO: 27874 - DNA, 25 bp, Artificial
  probe
  misc_feature (1)..(25): SEQ ID NO: 64; WAN0249NJ_at; Start 57; Stop 81
caaaaggacaaaaacatctgtccct

SEQ ID NO: 27875 - DNA, 25 bp, Artificial
  probe
  misc_feature (1)..(25): SEQ ID NO: 64; WAN0249NJ_at; Start 5; Stop 29
acctctgagcaaaaatctactcaaa

SEQ ID NO: 27876 - DNA, 25 bp, Artificial
  probe
  misc_feature (1)..(25): SEQ ID NO: 64; WAN0249NJ_at; Start 61; Stop 85
aggacaaaaacatctgtccctttgt

SEQ ID NO: 27877 - DNA, 25 bp, Artificial
  probe
  misc_feature (1)..(25): SEQ ID NO: 64; WAN0249NJ_at; Start 25; Stop 49
tcaaaaattagatgattaaaacatc

SEQ ID NO: 27878 - DNA, 25 bp, Artificial
  probe
  misc_feature (1)..(25): SEQ ID NO: 64; WAN0249NJ_at; Start 70; Stop 94
acatctgtccctttgtttactaaat

SEQ ID NO: 27879 - DNA, 25 bp, Artificial
  probe
  misc_feature (1)..(25): SEQ ID NO: 64; WAN0249NJ_at; Start 26; Stop 50
caaaaattagatgattaaaacatct

SEQ ID NO: 27880 - DNA, 25 bp, Artificial
  probe
  misc_feature (1)..(25): SEQ ID NO: 64; WAN0249NJ_at; Start 3; Stop 27
aaacctctgagcaaaaatctactca

SEQ ID NO: 27881 - DNA, 25 bp, Artificial
  probe
  misc_feature (1)..(25): SEQ ID NO: 64; WAN0249NJ_at; Start 4; Stop 28
aacctctgagcaaaaatctactcaa

SEQ ID NO: 27882 - DNA, 25 bp, Artificial
  probe
  misc_feature (1)..(25): SEQ ID NO: 64; WAN0249NJ_at; Start 22; Stop 46
tactcaaaaattagatgattaaaac

SEQ ID NO: 27883 - DNA, 25 bp, Artificial
  probe
  misc_feature (1)..(25): SEQ ID NO: 64; WAN0249NJ_at; Start 21; Stop 45
ctactcaaaaattagatgattaaaa

SEQ ID NO: 27884 - DNA, 25 bp, Artificial
  probe
  misc_feature (1)..(25): SEQ ID NO: 64; WAN0249NJ_at; Start 24; Stop 48
ctcaaaaattagatgattaaaacat

SEQ ID NO: 27885 - DNA, 25 bp, Artificial
  probe
  misc_feature (1)..(25): SEQ ID NO: 64; WAN0249NJ_at; Start 60; Stop 84
aaggacaaaaacatctgtccctttg

SEQ ID NO: 27886 - DNA, 25 bp, Artificial
  probe
  misc_feature (1)..(25): SEQ ID NO: 64; WAN0249NJ_at; Start 9; Stop 33
ctgagcaaaaatctactcaaaaatt

SEQ ID NO: 27887 - DNA, 25 bp, Artificial
  probe
  misc_feature (1)..(25): SEQ ID NO: 64; WAN0249NJ_at; Start 71; Stop 95
catctgtccctttgtttactaaatt

SEQ ID NO: 27888 - DNA, 25 bp, Artificial
  probe
  misc_feature (1)..(25): SEQ ID NO: 64; WAN0249NJ_at; Start 20; Stop 44
tctactcaaaaattagatgattaaa

SEQ ID NO: 27889 - DNA, 25 bp, Artificial
  probe
  misc_feature (1)..(25): SEQ ID NO: 64; WAN0249NJ_at; Start 23; Stop 47
actcaaaaattagatgattaaaaca

SEQ ID NO: 27890 - DNA, 25 bp, Artificial
  probe
  misc_feature (1)..(25): SEQ ID NO: 64; WAN0249NJ_at; Start 8; Stop 32
tctgagcaaaaatctactcaaaaat

SEQ ID NO: 27891 - DNA, 25 bp, Artificial
  probe
  misc_feature (1)..(25): SEQ ID NO: 295; WAN0249NK_at; Start 78; Stop 102
atattagaatgttcgtaatggagga

SEQ ID NO: 27892 - DNA, 25 bp, Artificial
  probe
  misc_feature (1)..(25): SEQ ID NO: 295; WAN0249NK_at; Start 77; Stop 101
aatattagaatgttcgtaatggagg

SEQ ID NO: 27893 - DNA, 25 bp, Artificial
  probe
  misc_feature (1)..(25): SEQ ID NO: 295; WAN0249NK_at; Start 67; Stop 91
attgtatagtaatattagaatgttc

SEQ ID NO: 27894 - DNA, 25 bp, Artificial
  probe
  misc_feature (1)..(25): SEQ ID NO: 295; WAN0249NK_at; Start 6; Stop 30
attttgtgaatttgtggatcttaaa

SEQ ID NO: 27895 - DNA, 25 bp, Artificial
  probe
  misc_feature (1)..(25): SEQ ID NO: 295; WAN0249NK_at; Start 16; Stop 40
tttgtggatcttaaataatttacta

SEQ ID NO: 27896 - DNA, 25 bp, Artificial
  probe
  misc_feature (1)..(25): SEQ ID NO: 295; WAN0249NK_at; Start 75; Stop 99
gtaatattagaatgttcgtaatgga

SEQ ID NO: 27897 - DNA, 25 bp, Artificial
  probe
  misc_feature (1)..(25): SEQ ID NO: 295; WAN0249NK_at; Start 80; Stop 104
attagaatgttcgtaatggaggact

SEQ ID NO: 27898 - DNA, 25 bp, Artificial
  probe
  misc_feature (1)..(25): SEQ ID NO: 295; WAN0249NK_at; Start 2; Stop 26
attaattttgtgaatttgtggatct

SEQ ID NO: 27899 - DNA, 25 bp, Artificial
  probe
  misc_feature (1)..(25): SEQ ID NO: 295; WAN0249NK_at; Start 76; Stop 100
taatattagaatgttcgtaatggag

SEQ ID NO: 27900 - DNA, 25 bp, Artificial
  probe
  misc_feature (1)..(25): SEQ ID NO: 295; WAN0249NK_at; Start 8; Stop 32
tttgtgaatttgtggatcttaaata

SEQ ID NO: 27901 - DNA, 25 bp, Artificial
  probe
  misc_feature (1)..(25): SEQ ID NO: 295; WAN0249NK_at; Start 15; Stop 39
atttgtggatcttaaataatttact

SEQ ID NO: 27902 - DNA, 25 bp, Artificial
  probe
  misc_feature (1)..(25): SEQ ID NO: 295; WAN0249NK_at; Start 13; Stop 37
gaatttgtggatcttaaataattta

SEQ ID NO: 27903 - DNA, 25 bp, Artificial
  probe
  misc_feature (1)..(25): SEQ ID NO: 295; WAN0249NK_at; Start 72; Stop 96
atagtaatattagaatgttcgtaat

SEQ ID NO: 27904 - DNA, 25 bp, Artificial
  probe
  misc_feature (1)..(25): SEQ ID NO: 295; WAN0249NK_at; Start 18; Stop 42
tgtggatcttaaataatttactaaa

SEQ ID NO: 27905 - DNA, 25 bp, Artificial
  probe
  misc_feature (1)..(25): SEQ ID NO: 295; WAN0249NK_at; Start 12; Stop 36
tgaatttgtggatcttaaataattt

SEQ ID NO: 27906 - DNA, 25 bp, Artificial
  probe
  misc_feature (1)..(25): SEQ ID NO: 295; WAN0249NK_at; Start 82; Stop 106
tagaatgttcgtaatggaggactga

SEQ ID NO: 27907 - DNA, 25 bp, Artificial
  probe
  misc_feature (1)..(25): SEQ ID NO: 295; WAN0249NK_at; Start 73; Stop 97
tagtaatattagaatgttcgtaatg

SEQ ID NO: 27908 - DNA, 25 bp, Artificial
  probe
  misc_feature (1)..(25): SEQ ID NO: 295; WAN0249NK_at; Start 17; Stop 41
ttgtggatcttaaataatttactaa

SEQ ID NO: 27909 - DNA, 25 bp, Artificial
  probe
  misc_feature (1)..(25): SEQ ID NO: 295; WAN0249NK_at; Start 68; Stop 92
ttgtatagtaatattagaatgttcg

SEQ ID NO: 27910 - DNA, 25 bp, Artificial
  probe
  misc_feature (1)..(25): SEQ ID NO: 295; WAN0249NK_at; Start 69; Stop 93
tgtatagtaatattagaatgttcgt

SEQ ID NO: 27911 - DNA, 25 bp, Artificial
  probe
  misc_feature (1)..(25): SEQ ID NO: 295; WAN0249NK_at; Start 11; Stop 35
gtgaatttgtggatcttaaataatt

SEQ ID NO: 27912 - DNA, 25 bp, Artificial
  probe
  misc_feature (1)..(25): SEQ ID NO: 295; WAN0249NK_at; Start 79; Stop 103
tattagaatgttcgtaatggaggac

SEQ ID NO: 27913 - DNA, 25 bp, Artificial
  probe
  misc_feature (1)..(25): SEQ ID NO: 295; WAN0249NK_at; Start 5; Stop 29
aattttgtgaatttgtggatcttaa

SEQ ID NO: 27914 - DNA, 25 bp, Artificial
  probe
  misc_feature (1)..(25): SEQ ID NO: 295; WAN0249NK_at; Start 74; Stop 98
agtaatattagaatgttcgtaatgg

SEQ ID NO: 27915 - DNA, 25 bp, Artificial
  probe
  misc_feature (1)..(25): SEQ ID NO: 295; WAN0249NK_at; Start 83; Stop 107
agaatgttcgtaatggaggactgaa

SEQ ID NO: 27916 - DNA, 25 bp, Artificial
  probe
  misc_feature (1)..(25): SEQ ID NO: 295; WAN0249NK_at; Start 81; Stop 105
ttagaatgttcgtaatggaggactg

SEQ ID NO: 27917 - DNA, 25 bp, Artificial
  probe
  misc_feature (1)..(25): SEQ ID NO: 295; WAN0249NK_at; Start 3; Stop 27
ttaattttgtgaatttgtggatctt

SEQ ID NO: 27918 - DNA, 25 bp, Artificial
  probe
  misc_feature (1)..(25): SEQ ID NO: 295; WAN0249NK_at; Start 10; Stop 34
tgtgaatttgtggatcttaaataat

SEQ ID NO: 27919 - DNA, 25 bp, Artificial
  probe
  misc_feature (1)..(25): SEQ ID NO: 295; WAN0249NK_at; Start 9; Stop 33
ttgtgaatttgtggatcttaaataa

SEQ ID NO: 27920 - DNA, 25 bp, Artificial
  probe
  misc_feature (1)..(25): SEQ ID NO: 295; WAN0249NK_at; Start 70; Stop 94
gtatagtaatattagaatgttcgta

SEQ ID NO: 27921 - DNA, 25 bp, Artificial
  probe
  misc_feature (1)..(25): SEQ ID NO: 295; WAN0249NK_at; Start 4; Stop 28
taattttgtgaatttgtggatctta

SEQ ID NO: 27922 - DNA, 25 bp, Artificial
  probe
  misc_feature (1)..(25): SEQ ID NO: 295; WAN0249NK_at; Start 1; Stop 25
aattaattttgtgaatttgtggatc

SEQ ID NO: 27923 - DNA, 25 bp, Artificial
  probe
  misc_feature (1)..(25): SEQ ID NO: 295; WAN0249NK_at; Start 71; Stop 95
tatagtaatattagaatgttcgtaa

SEQ ID NO: 27924 - DNA, 25 bp, Artificial
  probe
  misc_feature (1)..(25): SEQ ID NO: 295; WAN0249NK_at; Start 7; Stop 31
ttttgtgaatttgtggatcttaaat

SEQ ID NO: 27925 - DNA, 25 bp, Artificial
  probe
  misc_feature (1)..(25): SEQ ID NO: 4822; WAN0249NL_at; Start 1; Stop 25
ttcagtcctccattacgaacattct

SEQ ID NO: 27926 - DNA, 25 bp, Artificial
  probe
  misc_feature (1)..(25): SEQ ID NO: 4822; WAN0249NL_at; Start 3; Stop 27
cagtcctccattacgaacattctaa

SEQ ID NO: 27927 - DNA, 25 bp, Artificial
  probe
  misc_feature (1)..(25): SEQ ID NO: 4822; WAN0249NL_at; Start 82; Stop 106
agatccacaaattcacaaaattaat

SEQ ID NO: 27928 - DNA, 25 bp, Artificial
  probe
  misc_feature (1)..(25): SEQ ID NO: 4822; WAN0249NL_at; Start 72; Stop 96
aaattatttaagatccacaaattca

SEQ ID NO: 27929 - DNA, 25 bp, Artificial
  probe
  misc_feature (1)..(25): SEQ ID NO: 4822; WAN0249NL_at; Start 18; Stop 42
aacattctaatattactatacaata

SEQ ID NO: 27930 - DNA, 25 bp, Artificial
  probe
  misc_feature (1)..(25): SEQ ID NO: 4822; WAN0249NL_at; Start 66; Stop 90
tttagtaaattatttaagatccaca

SEQ ID NO: 27931 - DNA, 25 bp, Artificial
  probe
  misc_feature (1)..(25): SEQ ID NO: 4822; WAN0249NL_at; Start 15; Stop 39
acgaacattctaatattactataca

SEQ ID NO: 27932 - DNA, 25 bp, Artificial
  probe
  misc_feature (1)..(25): SEQ ID NO: 4822; WAN0249NL_at; Start 71; Stop 95
taaattatttaagatccacaaattc

SEQ ID NO: 27933 - DNA, 25 bp, Artificial
  probe
  misc_feature (1)..(25): SEQ ID NO: 4822; WAN0249NL_at; Start 2; Stop 26
tcagtcctccattacgaacattcta

SEQ ID NO: 27934 - DNA, 25 bp, Artificial
  probe
  misc_feature (1)..(25): SEQ ID NO: 4822; WAN0249NL_at; Start 69; Stop 93
agtaaattatttaagatccacaaat

SEQ ID NO: 27935 - DNA, 25 bp, Artificial
  probe
  misc_feature (1)..(25): SEQ ID NO: 4822; WAN0249NL_at; Start 79; Stop 103
ttaagatccacaaattcacaaaatt

SEQ ID NO: 27936 - DNA, 25 bp, Artificial
  probe
  misc_feature (1)..(25): SEQ ID NO: 4822; WAN0249NL_at; Start 73; Stop 97
aattatttaagatccacaaattcac

SEQ ID NO: 27937 - DNA, 25 bp, Artificial
  probe
  misc_feature (1)..(25): SEQ ID NO: 4822; WAN0249NL_at; Start 4; Stop 28
agtcctccattacgaacattctaat

SEQ ID NO: 27938 - DNA, 25 bp, Artificial
  probe
  misc_feature (1)..(25): SEQ ID NO: 4822; WAN0249NL_at; Start 9; Stop 33
tccattacgaacattctaatattac

SEQ ID NO: 27939 - DNA, 25 bp, Artificial
  probe
  misc_feature (1)..(25): SEQ ID NO: 4822; WAN0249NL_at; Start 14; Stop 38
tacgaacattctaatattactatac

SEQ ID NO: 27940 - DNA, 25 bp, Artificial
  probe
  misc_feature (1)..(25): SEQ ID NO: 4822; WAN0249NL_at; Start 10; Stop 34
ccattacgaacattctaatattact

SEQ ID NO: 27941 - DNA, 25 bp, Artificial
  probe
  misc_feature (1)..(25): SEQ ID NO: 4822; WAN0249NL_at; Start 80; Stop 104
taagatccacaaattcacaaaatta

SEQ ID NO: 27942 - DNA, 25 bp, Artificial
  probe
  misc_feature (1)..(25): SEQ ID NO: 4822; WAN0249NL_at; Start 83; Stop 107
gatccacaaattcacaaaattaatt

SEQ ID NO: 27943 - DNA, 25 bp, Artificial
  probe
  misc_feature (1)..(25): SEQ ID NO: 4822; WAN0249NL_at; Start 68; Stop 92
tagtaaattatttaagatccacaaa

SEQ ID NO: 27944 - DNA, 25 bp, Artificial
  probe
  misc_feature (1)..(25): SEQ ID NO: 4822; WAN0249NL_at; Start 11; Stop 35
cattacgaacattctaatattacta

SEQ ID NO: 27945 - DNA, 25 bp, Artificial
  probe
  misc_feature (1)..(25): SEQ ID NO: 4822; WAN0249NL_at; Start 5; Stop 29
gtcctccattacgaacattctaata

SEQ ID NO: 27946 - DNA, 25 bp, Artificial
  probe
  misc_feature (1)..(25): SEQ ID NO: 4822; WAN0249NL_at; Start 17; Stop 41
gaacattctaatattactatacaat

SEQ ID NO: 27947 - DNA, 25 bp, Artificial
  probe
  misc_feature (1)..(25): SEQ ID NO: 4822; WAN0249NL_at; Start 74; Stop 98
attatttaagatccacaaattcaca

SEQ ID NO: 27948 - DNA, 25 bp, Artificial
  probe
  misc_feature (1)..(25): SEQ ID NO: 4822; WAN0249NL_at; Start 6; Stop 30
tcctccattacgaacattctaatat

SEQ ID NO: 27949 - DNA, 25 bp, Artificial
  probe
  misc_feature (1)..(25): SEQ ID NO: 4822; WAN0249NL_at; Start 81; Stop 105
aagatccacaaattcacaaaattaa

SEQ ID NO: 27950 - DNA, 25 bp, Artificial
  probe
  misc_feature (1)..(25): SEQ ID NO: 4822; WAN0249NL_at; Start 7; Stop 31
cctccattacgaacattctaatatt

SEQ ID NO: 27951 - DNA, 25 bp, Artificial
  probe
  misc_feature (1)..(25): SEQ ID NO: 4822; WAN0249NL_at; Start 78; Stop 102
tttaagatccacaaattcacaaaat

SEQ ID NO: 27952 - DNA, 25 bp, Artificial
  probe
  misc_feature (1)..(25): SEQ ID NO: 4822; WAN0249NL_at; Start 8; Stop 32
ctccattacgaacattctaatatta

SEQ ID NO: 27953 - DNA, 25 bp, Artificial
  probe
  misc_feature (1)..(25): SEQ ID NO: 4822; WAN0249NL_at; Start 67; Stop 91
ttagtaaattatttaagatccacaa

SEQ ID NO: 27954 - DNA, 25 bp, Artificial
  probe
  misc_feature (1)..(25): SEQ ID NO: 4822; WAN0249NL_at; Start 16; Stop 40
cgaacattctaatattactatacaa

SEQ ID NO: 27955 - DNA, 25 bp, Artificial
  probe
  misc_feature (1)..(25): SEQ ID NO: 4822; WAN0249NL_at; Start 77; Stop 101
atttaagatccacaaattcacaaaa

SEQ ID NO: 27956 - DNA, 25 bp, Artificial
  probe
  misc_feature (1)..(25): SEQ ID NO: 4822; WAN0249NL_at; Start 76; Stop 100
tatttaagatccacaaattcacaaa

SEQ ID NO: 27957 - DNA, 25 bp, Artificial
  probe
  misc_feature (1)..(25): SEQ ID NO: 4822; WAN0249NL_at; Start 75; Stop 99
ttatttaagatccacaaattcacaa

SEQ ID NO: 27958 - DNA, 25 bp, Artificial
  probe
  misc_feature (1)..(25): SEQ ID NO: 4822; WAN0249NL_at; Start 13; Stop 37
ttacgaacattctaatattactata

SEQ ID NO: 27959 - DNA, 25 bp, Artificial
  probe
  misc_feature (1)..(25): SEQ ID NO: 4571; WAN0249NM_at; Start 62; Stop 86
tagcctccattcagtttctattgag

SEQ ID NO: 27960 - DNA, 25 bp, Artificial
  probe
  misc_feature (1)..(25): SEQ ID NO: 4571; WAN0249NM_at; Start 115; Stop 139
tgttcatgttcgatctaaggaagac

SEQ ID NO: 27961 - DNA, 25 bp, Artificial
  probe
  misc_feature (1)..(25): SEQ ID NO: 4571; WAN0249NM_at; Start 326; Stop 350
acaatgaaaattcggtgcgcacacc

SEQ ID NO: 27962 - DNA, 25 bp, Artificial
  probe
  misc_feature (1)..(25): SEQ ID NO: 4571; WAN0249NM_at; Start 301; Stop 325
ggctgattttgaaaatgaatttgaa

SEQ ID NO: 27963 - DNA, 25 bp, Artificial
  probe
  misc_feature (1)..(25): SEQ ID NO: 4571; WAN0249NM_at; Start 4; Stop 28
tgtttaattcttgaaaatcctagtg

SEQ ID NO: 27964 - DNA, 25 bp, Artificial
  probe
  misc_feature (1)..(25): SEQ ID NO: 4571; WAN0249NM_at; Start 239; Stop 263
tatttttgatcttcagggagcctgt

SEQ ID NO: 27965 - DNA, 25 bp, Artificial
  probe
  misc_feature (1)..(25): SEQ ID NO: 4571; WAN0249NM_at; Start 323; Stop 347
gaaacaatgaaaattcggtgcgcac

SEQ ID NO: 27966 - DNA, 25 bp, Artificial
  probe
  misc_feature (1)..(25): SEQ ID NO: 4571; WAN0249NM_at; Start 330; Stop 354
tgaaaattcggtgcgcacaccttac

SEQ ID NO: 27967 - DNA, 25 bp, Artificial
  probe
  misc_feature (1)..(25): SEQ ID NO: 4571; WAN0249NM_at; Start 352; Stop 376
tacagtgcagcttgttgttaaacaa

SEQ ID NO: 27968 - DNA, 25 bp, Artificial
  probe
  misc_feature (1)..(25): SEQ ID NO: 4571; WAN0249NM_at; Start 46; Stop 70
taaaataagttctgtttagcctcca

SEQ ID NO: 27969 - DNA, 25 bp, Artificial
  probe
  misc_feature (1)..(25): SEQ ID NO: 4571; WAN0249NM_at; Start 8; Stop 32
taattcttgaaaatcctagtggaaa

SEQ ID NO: 27970 - DNA, 25 bp, Artificial
  probe
  misc_feature (1)..(25): SEQ ID NO: 4571; WAN0249NM_at; Start 72; Stop 96
tcagtttctattgagttggatccaa

SEQ ID NO: 27971 - DNA, 25 bp, Artificial
  probe
  misc_feature (1)..(25): SEQ ID NO: 4571; WAN0249NM_at; Start 79; Stop 103
ctattgagttggatccaatttctaa

SEQ ID NO: 27972 - DNA, 25 bp, Artificial
  probe
  misc_feature (1)..(25): SEQ ID NO: 4571; WAN0249NM_at; Start 377; Stop 401
ggcagagatgtaaagggatagtccc

SEQ ID NO: 27973 - DNA, 25 bp, Artificial
  probe
  misc_feature (1)..(25): SEQ ID NO: 4571; WAN0249NM_at; Start 235; Stop 259
taactatttttgatcttcagggagc

SEQ ID NO: 27974 - DNA, 25 bp, Artificial
  probe
  misc_feature (1)..(25): SEQ ID NO: 4571; WAN0249NM_at; Start 320; Stop 344
tttgaaacaatgaaaattcggtgcg

SEQ ID NO: 27975 - DNA, 25 bp, Artificial
  probe
  misc_feature (1)..(25): SEQ ID NO: 4571; WAN0249NM_at; Start 286; Stop 310
gaagtagtgaaagtgggctgatttt

SEQ ID NO: 27976 - DNA, 25 bp, Artificial
  probe
  misc_feature (1)..(25): SEQ ID NO: 4571; WAN0249NM_at; Start 259; Stop 283
cctgtggtgattgtgaataggtggt

SEQ ID NO: 27977 - DNA, 25 bp, Artificial
  probe
  misc_feature (1)..(25): SEQ ID NO: 4571; WAN0249NM_at; Start 122; Stop 146
gttcgatctaaggaagacatggtca

SEQ ID NO: 27978 - DNA, 25 bp, Artificial
  probe
  misc_feature (1)..(25): SEQ ID NO: 4571; WAN0249NM_at; Start 347; Stop 371
caccttacagtgcagcttgttgtta

SEQ ID NO: 27979 - DNA, 25 bp, Artificial
  probe
  misc_feature (1)..(25): SEQ ID NO: 4571; WAN0249NM_at; Start 246; Stop 270
gatcttcagggagcctgtggtgatt

SEQ ID NO: 27980 - DNA, 25 bp, Artificial
  probe
  misc_feature (1)..(25): SEQ ID NO: 4571; WAN0249NM_at; Start 379; Stop 403
cagagatgtaaagggatagtccctt

SEQ ID NO: 27981 - DNA, 25 bp, Artificial
  probe
  misc_feature (1)..(25): SEQ ID NO: 4571; WAN0249NM_at; Start 358; Stop 382
gcagcttgttgttaaacaaggcaga

SEQ ID NO: 27982 - DNA, 25 bp, Artificial
  probe
  misc_feature (1)..(25): SEQ ID NO: 4571; WAN0249NM_at; Start 34; Stop 58
gatggagtgttctaaaataagttct

SEQ ID NO: 27983 - DNA, 25 bp, Artificial
  probe
  misc_feature (1)..(25): SEQ ID NO: 4571; WAN0249NM_at; Start 294; Stop 318
gaaagtgggctgattttgaaaatga

SEQ ID NO: 27984 - DNA, 25 bp, Artificial
  probe
  misc_feature (1)..(25): SEQ ID NO: 4571; WAN0249NM_at; Start 273; Stop 297
gaataggtggttggaagtagtgaaa

SEQ ID NO: 27985 - DNA, 25 bp, Artificial
  probe
  misc_feature (1)..(25): SEQ ID NO: 4571; WAN0249NM_at; Start 111; Stop 135
gacatgttcatgttcgatctaagga

SEQ ID NO: 27986 - DNA, 25 bp, Artificial
  probe
  misc_feature (1)..(25): SEQ ID NO: 4571; WAN0249NM_at; Start 51; Stop 75
taagttctgtttagcctccattcag

SEQ ID NO: 27987 - DNA, 25 bp, Artificial
  probe
  misc_feature (1)..(25): SEQ ID NO: 4571; WAN0249NM_at; Start 21; Stop 45
tcctagtggaaaagatggagtgttc

SEQ ID NO: 27988 - DNA, 25 bp, Artificial
  probe
  misc_feature (1)..(25): SEQ ID NO: 4571; WAN0249NM_at; Start 218; Stop 242
tcaacaaatcagaaaagtaactatt

SEQ ID NO: 27989 - DNA, 25 bp, Artificial
  probe
  misc_feature (1)..(25): SEQ ID NO: 4571; WAN0249NM_at; Start 205; Stop 229
tattaaaataagttcaacaaatcag

SEQ ID NO: 27990 - DNA, 25 bp, Artificial
  probe
  misc_feature (1)..(25): SEQ ID NO: 4571; WAN0249NM_at; Start 389; Stop 413
aagggatagtccctttataattgag

SEQ ID NO: 27991 - DNA, 25 bp, Artificial
  probe
  misc_feature (1)..(25): SEQ ID NO: 4571; WAN0249NM_at; Start 364; Stop 388
tgttgttaaacaaggcagagatgta

SEQ ID NO: 27992 - DNA, 25 bp, Artificial
  probe
  misc_feature (1)..(25): SEQ ID NO: 4571; WAN0249NM_at; Start 370; Stop 394
taaacaaggcagagatgtaaaggga

SEQ ID NO: 27993 - DNA, 25 bp, Artificial
  probe
  misc_feature (1)..(25): SEQ ID NO: 3300; WAN0249NN_at; Start 174; Stop 198
tagttacttttctgatttgttgaac

SEQ ID NO: 27994 - DNA, 25 bp, Artificial
  probe
  misc_feature (1)..(25): SEQ ID NO: 3300; WAN0249NN_at; Start 39; Stop 63
tgtttaacaacaagctgcactgtaa

SEQ ID NO: 27995 - DNA, 25 bp, Artificial
  probe
  misc_feature (1)..(25): SEQ ID NO: 3300; WAN0249NN_at; Start 13; Stop 37
gggactatccctttacatctctgcc

SEQ ID NO: 27996 - DNA, 25 bp, Artificial
  probe
  misc_feature (1)..(25): SEQ ID NO: 3300; WAN0249NN_at; Start 144; Stop 168
aatcaccacaggctccctgaagatc

SEQ ID NO: 27997 - DNA, 25 bp, Artificial
  probe
  misc_feature (1)..(25): SEQ ID NO: 3300; WAN0249NN_at; Start 130; Stop 154
aaccacctattcacaatcaccacag

SEQ ID NO: 27998 - DNA, 25 bp, Artificial
  probe
  misc_feature (1)..(25): SEQ ID NO: 3300; WAN0249NN_at; Start 43; Stop 67
taacaacaagctgcactgtaaggtg

SEQ ID NO: 27999 - DNA, 25 bp, Artificial
  probe
  misc_feature (1)..(25): SEQ ID NO: 3300; WAN0249NN_at; Start 26; Stop 50
tacatctctgccttgtttaacaaca

SEQ ID NO: 28000 - DNA, 25 bp, Artificial
  probe
  misc_feature (1)..(25): SEQ ID NO: 3300; WAN0249NN_at; Start 369; Stop 393
gaacactccatcttttccactagga

SEQ ID NO: 28001 - DNA, 25 bp, Artificial
  probe
  misc_feature (1)..(25): SEQ ID NO: 3300; WAN0249NN_at; Start 97; Stop 121
cattttcaaaatcagcccactttca

SEQ ID NO: 28002 - DNA, 25 bp, Artificial
  probe
  misc_feature (1)..(25): SEQ ID NO: 3300; WAN0249NN_at; Start 328; Stop 352
ctcaatagaaactgaatggaggcta

SEQ ID NO: 28003 - DNA, 25 bp, Artificial
  probe
  misc_feature (1)..(25): SEQ ID NO: 3300; WAN0249NN_at; Start 64; Stop 88
ggtgtgcgcaccgaattttcattgt

SEQ ID NO: 28004 - DNA, 25 bp, Artificial
  probe
  misc_feature (1)..(25): SEQ ID NO: 3300; WAN0249NN_at; Start 274; Stop 298
tgtcttccttagatcgaacatgaac

SEQ ID NO: 28005 - DNA, 25 bp, Artificial
  probe
  misc_feature (1)..(25): SEQ ID NO: 3300; WAN0249NN_at; Start 318; Stop 342
ttggatccaactcaatagaaactga

SEQ ID NO: 28006 - DNA, 25 bp, Artificial
  probe
  misc_feature (1)..(25): SEQ ID NO: 3300; WAN0249NN_at; Start 279; Stop 303
tccttagatcgaacatgaacatgtc

SEQ ID NO: 28007 - DNA, 25 bp, Artificial
  probe
  misc_feature (1)..(25): SEQ ID NO: 3300; WAN0249NN_at; Start 283; Stop 307
tagatcgaacatgaacatgtcccac

SEQ ID NO: 28008 - DNA, 25 bp, Artificial
  probe
  misc_feature (1)..(25): SEQ ID NO: 3300; WAN0249NN_at; Start 44; Stop 68
aacaacaagctgcactgtaaggtgt

SEQ ID NO: 28009 - DNA, 25 bp, Artificial
  probe
  misc_feature (1)..(25): SEQ ID NO: 3300; WAN0249NN_at; Start 104; Stop 128
aaaatcagcccactttcactacttc

SEQ ID NO: 28010 - DNA, 25 bp, Artificial
  probe
  misc_feature (1)..(25): SEQ ID NO: 3300; WAN0249NN_at; Start 324; Stop 348
ccaactcaatagaaactgaatggag

SEQ ID NO: 28011 - DNA, 25 bp, Artificial
  probe
  misc_feature (1)..(25): SEQ ID NO: 3300; WAN0249NN_at; Start 336; Stop 360
aaactgaatggaggctaaacagaac

SEQ ID NO: 28012 - DNA, 25 bp, Artificial
  probe
  misc_feature (1)..(25): SEQ ID NO: 3300; WAN0249NN_at; Start 60; Stop 84
gtaaggtgtgcgcaccgaattttca

SEQ ID NO: 28013 - DNA, 25 bp, Artificial
  probe
  misc_feature (1)..(25): SEQ ID NO: 3300; WAN0249NN_at; Start 157; Stop 181
tccctgaagatcaaaaatagttact

SEQ ID NO: 28014 - DNA, 25 bp, Artificial
  probe
  misc_feature (1)..(25): SEQ ID NO: 3300; WAN0249NN_at; Start 154; Stop 178
ggctccctgaagatcaaaaatagtt

SEQ ID NO: 28015 - DNA, 25 bp, Artificial
  probe
  misc_feature (1)..(25): SEQ ID NO: 3300; WAN0249NN_at; Start 1; Stop 25
ctcaattataaagggactatccctt

SEQ ID NO: 28016 - DNA, 25 bp, Artificial
  probe
  misc_feature (1)..(25): SEQ ID NO: 3300; WAN0249NN_at; Start 311; Stop 335
ttagaaattggatccaactcaatag

SEQ ID NO: 28017 - DNA, 25 bp, Artificial
  probe
  misc_feature (1)..(25): SEQ ID NO: 3300; WAN0249NN_at; Start 71; Stop 95
gcaccgaattttcattgtttcaaat

SEQ ID NO: 28018 - DNA, 25 bp, Artificial
  probe
  misc_feature (1)..(25): SEQ ID NO: 3300; WAN0249NN_at; Start 69; Stop 93
gcgcaccgaattttcattgtttcaa

SEQ ID NO: 28019 - DNA, 25 bp, Artificial
  probe
  misc_feature (1)..(25): SEQ ID NO: 3300; WAN0249NN_at; Start 150; Stop 174
cacaggctccctgaagatcaaaaat

SEQ ID NO: 28020 - DNA, 25 bp, Artificial
  probe
  misc_feature (1)..(25): SEQ ID NO: 3300; WAN0249NN_at; Start 90; Stop 114
tcaaattcattttcaaaatcagccc

SEQ ID NO: 28021 - DNA, 25 bp, Artificial
  probe
  misc_feature (1)..(25): SEQ ID NO: 3300; WAN0249NN_at; Start 354; Stop 378
acagaacttattttagaacactcca

SEQ ID NO: 28022 - DNA, 25 bp, Artificial
  probe
  misc_feature (1)..(25): SEQ ID NO: 3300; WAN0249NN_at; Start 341; Stop 365
gaatggaggctaaacagaacttatt

SEQ ID NO: 28023 - DNA, 25 bp, Artificial
  probe
  misc_feature (1)..(25): SEQ ID NO: 3300; WAN0249NN_at; Start 379; Stop 403
tcttttccactaggattttcaagaa

SEQ ID NO: 28024 - DNA, 25 bp, Artificial
  probe
  misc_feature (1)..(25): SEQ ID NO: 3300; WAN0249NN_at; Start 386; Stop 410
cactaggattttcaagaattaaaca

SEQ ID NO: 28025 - DNA, 25 bp, Artificial
  probe
  misc_feature (1)..(25): SEQ ID NO: 3300; WAN0249NN_at; Start 268; Stop 292
tgaccatgtcttccttagatcgaac

SEQ ID NO: 28026 - DNA, 25 bp, Artificial
  probe
  misc_feature (1)..(25): SEQ ID NO: 3300; WAN0249NN_at; Start 333; Stop 357
tagaaactgaatggaggctaaacag

SEQ ID NO: 28027 - DNA, 25 bp, Artificial
  probe
  misc_feature (1)..(25): SEQ ID NO: 4773; WAN0249NO_at; Start 11; Stop 35
ttactatagaagatataattttcta

SEQ ID NO: 28028 - DNA, 25 bp, Artificial
  probe
  misc_feature (1)..(25): SEQ ID NO: 4773; WAN0249NO_at; Start 47; Stop 71
cacagaactttaagaaaaagataat

SEQ ID NO: 28029 - DNA, 25 bp, Artificial
  probe
  misc_feature (1)..(25): SEQ ID NO: 4773; WAN0249NO_at; Start 44; Stop 68
tgacacagaactttaagaaaaagat

SEQ ID NO: 28030 - DNA, 25 bp, Artificial
  probe
  misc_feature (1)..(25): SEQ ID NO: 4773; WAN0249NO_at; Start 45; Stop 69
gacacagaactttaagaaaaagata

SEQ ID NO: 28031 - DNA, 25 bp, Artificial
  probe
  misc_feature (1)..(25): SEQ ID NO: 4773; WAN0249NO_at; Start 10; Stop 34
tttactatagaagatataattttct

SEQ ID NO: 28032 - DNA, 25 bp, Artificial
  probe
  misc_feature (1)..(25): SEQ ID NO: 4773; WAN0249NO_at; Start 2; Stop 26
taattgattttactatagaagatat

SEQ ID NO: 28033 - DNA, 25 bp, Artificial
  probe
  misc_feature (1)..(25): SEQ ID NO: 4773; WAN0249NO_at; Start 6; Stop 30
tgattttactatagaagatataatt

SEQ ID NO: 28034 - DNA, 25 bp, Artificial
  probe
  misc_feature (1)..(25): SEQ ID NO: 4773; WAN0249NO_at; Start 101; Stop 125
ataattcattaaaaagtatttggag

SEQ ID NO: 28035 - DNA, 25 bp, Artificial
  probe
  misc_feature (1)..(25): SEQ ID NO: 4773; WAN0249NO_at; Start 12; Stop 36
tactatagaagatataattttctaa

SEQ ID NO: 28036 - DNA, 25 bp, Artificial
  probe
  misc_feature (1)..(25): SEQ ID NO: 4773; WAN0249NO_at; Start 1; Stop 25
ttaattgattttactatagaagata

SEQ ID NO: 28037 - DNA, 25 bp, Artificial
  probe
  misc_feature (1)..(25): SEQ ID NO: 4773; WAN0249NO_at; Start 7; Stop 31
gattttactatagaagatataattt

SEQ ID NO: 28038 - DNA, 25 bp, Artificial
  probe
  misc_feature (1)..(25): SEQ ID NO: 4773; WAN0249NO_at; Start 57; Stop 81
taagaaaaagataattattgtagta

SEQ ID NO: 28039 - DNA, 25 bp, Artificial
  probe
  misc_feature (1)..(25): SEQ ID NO: 4773; WAN0249NO_at; Start 17; Stop 41
tagaagatataattttctaaattac

SEQ ID NO: 28040 - DNA, 25 bp, Artificial
  probe
  misc_feature (1)..(25): SEQ ID NO: 4773; WAN0249NO_at; Start 43; Stop 67
ctgacacagaactttaagaaaaaga

SEQ ID NO: 28041 - DNA, 25 bp, Artificial
  probe
  misc_feature (1)..(25): SEQ ID NO: 4773; WAN0249NO_at; Start 3; Stop 27
aattgattttactatagaagatata

SEQ ID NO: 28042 - DNA, 25 bp, Artificial
  probe
  misc_feature (1)..(25): SEQ ID NO: 4773; WAN0249NO_at; Start 100; Stop 124
tataattcattaaaaagtatttgga

SEQ ID NO: 28043 - DNA, 25 bp, Artificial
  probe
  misc_feature (1)..(25): SEQ ID NO: 4773; WAN0249NO_at; Start 4; Stop 28
attgattttactatagaagatataa

SEQ ID NO: 28044 - DNA, 25 bp, Artificial
  probe
  misc_feature (1)..(25): SEQ ID NO: 4773; WAN0249NO_at; Start 104; Stop 128
attcattaaaaagtatttggaggag

SEQ ID NO: 28045 - DNA, 25 bp, Artificial
  probe
  misc_feature (1)..(25): SEQ ID NO: 4773; WAN0249NO_at; Start 9; Stop 33
ttttactatagaagatataattttc

SEQ ID NO: 28046 - DNA, 25 bp, Artificial
  probe
  misc_feature (1)..(25): SEQ ID NO: 4773; WAN0249NO_at; Start 106; Stop 130
tcattaaaaagtatttggaggagga

SEQ ID NO: 28047 - DNA, 25 bp, Artificial
  probe
  misc_feature (1)..(25): SEQ ID NO: 4773; WAN0249NO_at; Start 5; Stop 29
ttgattttactatagaagatataat

SEQ ID NO: 28048 - DNA, 25 bp, Artificial
  probe
  misc_feature (1)..(25): SEQ ID NO: 299; WAN0249NP_at; Start 47; Stop 71
taaagaaattactacaataattatc

SEQ ID NO: 28049 - DNA, 25 bp, Artificial
  probe
  misc_feature (1)..(25): SEQ ID NO: 299; WAN0249NP_at; Start 106; Stop 130
aaattatatcttctatagtaaaatc

SEQ ID NO: 28050 - DNA, 25 bp, Artificial
  probe
  misc_feature (1)..(25): SEQ ID NO: 299; WAN0249NP_at; Start 9; Stop 33
ctcctccaaatactttttaatgaat

SEQ ID NO: 28051 - DNA, 25 bp, Artificial
  probe
  misc_feature (1)..(25): SEQ ID NO: 299; WAN0249NP_at; Start 48; Stop 72
aaagaaattactacaataattatct

SEQ ID NO: 28052 - DNA, 25 bp, Artificial
  probe
  misc_feature (1)..(25): SEQ ID NO: 299; WAN0249NP_at; Start 109; Stop 133
ttatatcttctatagtaaaatcaat

SEQ ID NO: 28053 - DNA, 25 bp, Artificial
  probe
  misc_feature (1)..(25): SEQ ID NO: 299; WAN0249NP_at; Start 103; Stop 127
agaaaattatatcttctatagtaaa

SEQ ID NO: 28054 - DNA, 25 bp, Artificial
  probe
  misc_feature (1)..(25): SEQ ID NO: 299; WAN0249NP_at; Start 13; Stop 37
tccaaatactttttaatgaattata

SEQ ID NO: 28055 - DNA, 25 bp, Artificial
  probe
  misc_feature (1)..(25): SEQ ID NO: 299; WAN0249NP_at; Start 70; Stop 94
tctttttcttaaagttctgtgtcag

SEQ ID NO: 28056 - DNA, 25 bp, Artificial
  probe
  misc_feature (1)..(25): SEQ ID NO: 299; WAN0249NP_at; Start 102; Stop 126
tagaaaattatatcttctatagtaa

SEQ ID NO: 28057 - DNA, 25 bp, Artificial
  probe
  misc_feature (1)..(25): SEQ ID NO: 299; WAN0249NP_at; Start 68; Stop 92
tatctttttcttaaagttctgtgtc

SEQ ID NO: 28058 - DNA, 25 bp, Artificial
  probe
  misc_feature (1)..(25): SEQ ID NO: 299; WAN0249NP_at; Start 66; Stop 90
attatctttttcttaaagttctgtg

SEQ ID NO: 28059 - DNA, 25 bp, Artificial
  probe
  misc_feature (1)..(25): SEQ ID NO: 299; WAN0249NP_at; Start 108; Stop 132
attatatcttctatagtaaaatcaa

SEQ ID NO: 28060 - DNA, 25 bp, Artificial
  probe
  misc_feature (1)..(25): SEQ ID NO: 299; WAN0249NP_at; Start 112; Stop 136
tatcttctatagtaaaatcaattaa

SEQ ID NO: 28061 - DNA, 25 bp, Artificial
  probe
  misc_feature (1)..(25): SEQ ID NO: 299; WAN0249NP_at; Start 69; Stop 93
atctttttcttaaagttctgtgtca

SEQ ID NO: 28062 - DNA, 25 bp, Artificial
  probe
  misc_feature (1)..(25): SEQ ID NO: 299; WAN0249NP_at; Start 56; Stop 80
tactacaataattatctttttctta

SEQ ID NO: 28063 - DNA, 25 bp, Artificial
  probe
  misc_feature (1)..(25): SEQ ID NO: 299; WAN0249NP_at; Start 111; Stop 135
atatcttctatagtaaaatcaatta

SEQ ID NO: 28064 - DNA, 25 bp, Artificial
  probe
  misc_feature (1)..(25): SEQ ID NO: 299; WAN0249NP_at; Start 7; Stop 31
tcctcctccaaatactttttaatga

SEQ ID NO: 28065 - DNA, 25 bp, Artificial
  probe
  misc_feature (1)..(25): SEQ ID NO: 299; WAN0249NP_at; Start 96; Stop 120
gtaatttagaaaattatatcttcta

SEQ ID NO: 28066 - DNA, 25 bp, Artificial
  probe
  misc_feature (1)..(25): SEQ ID NO: 299; WAN0249NP_at; Start 110; Stop 134
tatatcttctatagtaaaatcaatt

SEQ ID NO: 28067 - DNA, 25 bp, Artificial
  probe
  misc_feature (1)..(25): SEQ ID NO: 299; WAN0249NP_at; Start 12; Stop 36
ctccaaatactttttaatgaattat

SEQ ID NO: 28068 - DNA, 25 bp, Artificial
  probe
  misc_feature (1)..(25): SEQ ID NO: 299; WAN0249NP_at; Start 107; Stop 131
aattatatcttctatagtaaaatca

SEQ ID NO: 28069 - DNA, 25 bp, Artificial
  probe
  misc_feature (1)..(25): SEQ ID NO: 299; WAN0249NP_at; Start 104; Stop 128
gaaaattatatcttctatagtaaaa

SEQ ID NO: 28070 - DNA, 25 bp, Artificial
  probe
  misc_feature (1)..(25): SEQ ID NO: 5890; WAN0249NQ_at; Start 2; Stop 26
ttaactgtgaaataatttcatgaag

SEQ ID NO: 28071 - DNA, 25 bp, Artificial
  probe
  misc_feature (1)..(25): SEQ ID NO: 5890; WAN0249NQ_at; Start 1; Stop 25
tttaactgtgaaataatttcatgaa

SEQ ID NO: 28072 - DNA, 25 bp, Artificial
  probe
  misc_feature (1)..(25): SEQ ID NO: 5890; WAN0249NQ_at; Start 3; Stop 27
taactgtgaaataatttcatgaagg

SEQ ID NO: 28073 - DNA, 25 bp, Artificial
  probe
  misc_feature (1)..(25): SEQ ID NO: 5890; WAN0249NQ_at; Start 4; Stop 28
aactgtgaaataatttcatgaagga

SEQ ID NO: 28074 - DNA, 25 bp, Artificial
  probe
  misc_feature (1)..(25): SEQ ID NO: 4417; WAN0249NR_at; Start 24; Stop 48
tccttcatgaaattatttcacagtt

SEQ ID NO: 28075 - DNA, 25 bp, Artificial
  probe
  misc_feature (1)..(25): SEQ ID NO: 4417; WAN0249NR_at; Start 26; Stop 50
cttcatgaaattatttcacagttaa

SEQ ID NO: 28076 - DNA, 25 bp, Artificial
  probe
  misc_feature (1)..(25): SEQ ID NO: 4417; WAN0249NR_at; Start 25; Stop 49
ccttcatgaaattatttcacagtta

SEQ ID NO: 28077 - DNA, 25 bp, Artificial
  probe
  misc_feature (1)..(25): SEQ ID NO: 4417; WAN0249NR_at; Start 27; Stop 51
ttcatgaaattatttcacagttaaa

SEQ ID NO: 28078 - DNA, 25 bp, Artificial
  probe
  misc_feature (1)..(25): SEQ ID NO: 4627; WAN0249NS_at; Start 32; Stop 56
ccgtcattgatttaaaaatagtttg

SEQ ID NO: 28079 - DNA, 25 bp, Artificial
  probe
  misc_feature (1)..(25): SEQ ID NO: 4627; WAN0249NS_at; Start 34; Stop 58
gtcattgatttaaaaatagtttgct

SEQ ID NO: 28080 - DNA, 25 bp, Artificial
  probe
  misc_feature (1)..(25): SEQ ID NO: 4627; WAN0249NS_at; Start 48; Stop 72
aatagtttgctaactttactggcga

SEQ ID NO: 28081 - DNA, 25 bp, Artificial
  probe
  misc_feature (1)..(25): SEQ ID NO: 4627; WAN0249NS_at; Start 36; Stop 60
cattgatttaaaaatagtttgctaa

SEQ ID NO: 28082 - DNA, 25 bp, Artificial
  probe
  misc_feature (1)..(25): SEQ ID NO: 4627; WAN0249NS_at; Start 49; Stop 73
atagtttgctaactttactggcgaa

SEQ ID NO: 28083 - DNA, 25 bp, Artificial
  probe
  misc_feature (1)..(25): SEQ ID NO: 4627; WAN0249NS_at; Start 35; Stop 59
tcattgatttaaaaatagtttgcta

SEQ ID NO: 28084 - DNA, 25 bp, Artificial
  probe
  misc_feature (1)..(25): SEQ ID NO: 4627; WAN0249NS_at; Start 33; Stop 57
cgtcattgatttaaaaatagtttgc

SEQ ID NO: 28085 - DNA, 25 bp, Artificial
  probe
  misc_feature (1)..(25): SEQ ID NO: 4627; WAN0249NS_at; Start 50; Stop 74
tagtttgctaactttactggcgaaa

SEQ ID NO: 28086 - DNA, 25 bp, Artificial
  probe
  misc_feature (1)..(25): SEQ ID NO: 4627; WAN0249NS_at; Start 47; Stop 71
aaatagtttgctaactttactggcg

SEQ ID NO: 28087 - DNA, 25 bp, Artificial
  probe
  misc_feature (1)..(25): SEQ ID NO: 4412; WAN0249NT_at; Start 21; Stop 45
ttagcaaactatttttaaatcaatg

SEQ ID NO: 28088 - DNA, 25 bp, Artificial
  probe
  misc_feature (1)..(25): SEQ ID NO: 4412; WAN0249NT_at; Start 10; Stop 34
cgccagtaaagttagcaaactattt

SEQ ID NO: 28089 - DNA, 25 bp, Artificial
  probe
  misc_feature (1)..(25): SEQ ID NO: 4412; WAN0249NT_at; Start 25; Stop 49
caaactatttttaaatcaatgacgg

SEQ ID NO: 28090 - DNA, 25 bp, Artificial
  probe
  misc_feature (1)..(25): SEQ ID NO: 4412; WAN0249NT_at; Start 24; Stop 48
gcaaactatttttaaatcaatgacg

SEQ ID NO: 28091 - DNA, 25 bp, Artificial
  probe
  misc_feature (1)..(25): SEQ ID NO: 4412; WAN0249NT_at; Start 9; Stop 33
tcgccagtaaagttagcaaactatt

SEQ ID NO: 28092 - DNA, 25 bp, Artificial
  probe
  misc_feature (1)..(25): SEQ ID NO: 4412; WAN0249NT_at; Start 8; Stop 32
ttcgccagtaaagttagcaaactat

SEQ ID NO: 28093 - DNA, 25 bp, Artificial
  probe
  misc_feature (1)..(25): SEQ ID NO: 4412; WAN0249NT_at; Start 22; Stop 46
tagcaaactatttttaaatcaatga

SEQ ID NO: 28094 - DNA, 25 bp, Artificial
  probe
  misc_feature (1)..(25): SEQ ID NO: 4412; WAN0249NT_at; Start 23; Stop 47
agcaaactatttttaaatcaatgac

SEQ ID NO: 28095 - DNA, 25 bp, Artificial
  probe
  misc_feature (1)..(25): SEQ ID NO: 4412; WAN0249NT_at; Start 7; Stop 31
tttcgccagtaaagttagcaaacta

SEQ ID NO: 28096 - DNA, 25 bp, Artificial
  probe
  misc_feature (1)..(25): SEQ ID NO: 4483; WAN0249NU_at; Start 21; Stop 45
ttttacctgccaagagaccaataag

SEQ ID NO: 28097 - DNA, 25 bp, Artificial
  probe
  misc_feature (1)..(25): SEQ ID NO: 4483; WAN0249NU_at; Start 34; Stop 58
gagaccaataagacctccagcaata

SEQ ID NO: 28098 - DNA, 25 bp, Artificial
  probe
  misc_feature (1)..(25): SEQ ID NO: 4483; WAN0249NU_at; Start 35; Stop 59
agaccaataagacctccagcaataa

SEQ ID NO: 28099 - DNA, 25 bp, Artificial
  probe
  misc_feature (1)..(25): SEQ ID NO: 4483; WAN0249NU_at; Start 12; Stop 36
ttttagtgattttacctgccaagag

SEQ ID NO: 28100 - DNA, 25 bp, Artificial
  probe
  misc_feature (1)..(25): SEQ ID NO: 4483; WAN0249NU_at; Start 18; Stop 42
tgattttacctgccaagagaccaat

SEQ ID NO: 28101 - DNA, 25 bp, Artificial
  probe
  misc_feature (1)..(25): SEQ ID NO: 4483; WAN0249NU_at; Start 14; Stop 38
ttagtgattttacctgccaagagac

SEQ ID NO: 28102 - DNA, 25 bp, Artificial
  probe
  misc_feature (1)..(25): SEQ ID NO: 4483; WAN0249NU_at; Start 23; Stop 47
ttacctgccaagagaccaataagac

SEQ ID NO: 28103 - DNA, 25 bp, Artificial
  probe
  misc_feature (1)..(25): SEQ ID NO: 4483; WAN0249NU_at; Start 25; Stop 49
acctgccaagagaccaataagacct

SEQ ID NO: 28104 - DNA, 25 bp, Artificial
  probe
  misc_feature (1)..(25): SEQ ID NO: 4483; WAN0249NU_at; Start 33; Stop 57
agagaccaataagacctccagcaat

SEQ ID NO: 28105 - DNA, 25 bp, Artificial
  probe
  misc_feature (1)..(25): SEQ ID NO: 4483; WAN0249NU_at; Start 29; Stop 53
gccaagagaccaataagacctccag

SEQ ID NO: 28106 - DNA, 25 bp, Artificial
  probe
  misc_feature (1)..(25): SEQ ID NO: 4483; WAN0249NU_at; Start 26; Stop 50
cctgccaagagaccaataagacctc

SEQ ID NO: 28107 - DNA, 25 bp, Artificial
  probe
  misc_feature (1)..(25): SEQ ID NO: 4483; WAN0249NU_at; Start 16; Stop 40
agtgattttacctgccaagagacca

SEQ ID NO: 28108 - DNA, 25 bp, Artificial
  probe
  misc_feature (1)..(25): SEQ ID NO: 4483; WAN0249NU_at; Start 24; Stop 48
tacctgccaagagaccaataagacc

SEQ ID NO: 28109 - DNA, 25 bp, Artificial
  probe
  misc_feature (1)..(25): SEQ ID NO: 4483; WAN0249NU_at; Start 20; Stop 44
attttacctgccaagagaccaataa

SEQ ID NO: 28110 - DNA, 25 bp, Artificial
  probe
  misc_feature (1)..(25): SEQ ID NO: 4483; WAN0249NU_at; Start 19; Stop 43
gattttacctgccaagagaccaata

SEQ ID NO: 28111 - DNA, 25 bp, Artificial
  probe
  misc_feature (1)..(25): SEQ ID NO: 4483; WAN0249NU_at; Start 30; Stop 54
ccaagagaccaataagacctccagc

SEQ ID NO: 28112 - DNA, 25 bp, Artificial
  probe
  misc_feature (1)..(25): SEQ ID NO: 4483; WAN0249NU_at; Start 32; Stop 56
aagagaccaataagacctccagcaa

SEQ ID NO: 28113 - DNA, 25 bp, Artificial
  probe
  misc_feature (1)..(25): SEQ ID NO: 4483; WAN0249NU_at; Start 17; Stop 41
gtgattttacctgccaagagaccaa

SEQ ID NO: 28114 - DNA, 25 bp, Artificial
  probe
  misc_feature (1)..(25): SEQ ID NO: 4483; WAN0249NU_at; Start 28; Stop 52
tgccaagagaccaataagacctcca

SEQ ID NO: 28115 - DNA, 25 bp, Artificial
  probe
  misc_feature (1)..(25): SEQ ID NO: 4483; WAN0249NU_at; Start 15; Stop 39
tagtgattttacctgccaagagacc

SEQ ID NO: 28116 - DNA, 25 bp, Artificial
  probe
  misc_feature (1)..(25): SEQ ID NO: 4483; WAN0249NU_at; Start 22; Stop 46
tttacctgccaagagaccaataaga

SEQ ID NO: 28117 - DNA, 25 bp, Artificial
  probe
  misc_feature (1)..(25): SEQ ID NO: 4483; WAN0249NU_at; Start 27; Stop 51
ctgccaagagaccaataagacctcc

SEQ ID NO: 28118 - DNA, 25 bp, Artificial
  probe
  misc_feature (1)..(25): SEQ ID NO: 4483; WAN0249NU_at; Start 31; Stop 55
caagagaccaataagacctccagca

SEQ ID NO: 28119 - DNA, 25 bp, Artificial
  probe
  misc_feature (1)..(25): SEQ ID NO: 4483; WAN0249NU_at; Start 11; Stop 35
tttttagtgattttacctgccaaga

SEQ ID NO: 28120 - DNA, 25 bp, Artificial
  probe
  misc_feature (1)..(25): SEQ ID NO: 4483; WAN0249NU_at; Start 13; Stop 37
tttagtgattttacctgccaagaga

SEQ ID NO: 28121 - DNA, 25 bp, Artificial
  probe
  misc_feature (1)..(25): SEQ ID NO: 4806; WAN0249NV_at; Start 16; Stop 40
ttattggtctcttggcaggtaaaat

SEQ ID NO: 28122 - DNA, 25 bp, Artificial
  probe
  misc_feature (1)..(25): SEQ ID NO: 4806; WAN0249NV_at; Start 13; Stop 37
gtcttattggtctcttggcaggtaa

SEQ ID NO: 28123 - DNA, 25 bp, Artificial
  probe
  misc_feature (1)..(25): SEQ ID NO: 4806; WAN0249NV_at; Start 8; Stop 32
tggaggtcttattggtctcttggca

SEQ ID NO: 28124 - DNA, 25 bp, Artificial
  probe
  misc_feature (1)..(25): SEQ ID NO: 4806; WAN0249NV_at; Start 18; Stop 42
attggtctcttggcaggtaaaatca

SEQ ID NO: 28125 - DNA, 25 bp, Artificial
  probe
  misc_feature (1)..(25): SEQ ID NO: 4806; WAN0249NV_at; Start 17; Stop 41
tattggtctcttggcaggtaaaatc

SEQ ID NO: 28126 - DNA, 25 bp, Artificial
  probe
  misc_feature (1)..(25): SEQ ID NO: 4806; WAN0249NV_at; Start 25; Stop 49
tcttggcaggtaaaatcactaaaaa

SEQ ID NO: 28127 - DNA, 25 bp, Artificial
  probe
  misc_feature (1)..(25): SEQ ID NO: 4806; WAN0249NV_at; Start 24; Stop 48
ctcttggcaggtaaaatcactaaaa

SEQ ID NO: 28128 - DNA, 25 bp, Artificial
  probe
  misc_feature (1)..(25): SEQ ID NO: 4806; WAN0249NV_at; Start 4; Stop 28
ttgctggaggtcttattggtctctt

SEQ ID NO: 28129 - DNA, 25 bp, Artificial
  probe
  misc_feature (1)..(25): SEQ ID NO: 4806; WAN0249NV_at; Start 21; Stop 45
ggtctcttggcaggtaaaatcacta

SEQ ID NO: 28130 - DNA, 25 bp, Artificial
  probe
  misc_feature (1)..(25): SEQ ID NO: 4806; WAN0249NV_at; Start 10; Stop 34
gaggtcttattggtctcttggcagg

SEQ ID NO: 28131 - DNA, 25 bp, Artificial
  probe
  misc_feature (1)..(25): SEQ ID NO: 4806; WAN0249NV_at; Start 3; Stop 27
attgctggaggtcttattggtctct

SEQ ID NO: 28132 - DNA, 25 bp, Artificial
  probe
  misc_feature (1)..(25): SEQ ID NO: 4806; WAN0249NV_at; Start 20; Stop 44
tggtctcttggcaggtaaaatcact

SEQ ID NO: 28133 - DNA, 25 bp, Artificial
  probe
  misc_feature (1)..(25): SEQ ID NO: 4806; WAN0249NV_at; Start 6; Stop 30
gctggaggtcttattggtctcttgg

SEQ ID NO: 28134 - DNA, 25 bp, Artificial
  probe
  misc_feature (1)..(25): SEQ ID NO: 4806; WAN0249NV_at; Start 14; Stop 38
tcttattggtctcttggcaggtaaa

SEQ ID NO: 28135 - DNA, 25 bp, Artificial
  probe
  misc_feature (1)..(25): SEQ ID NO: 4806; WAN0249NV_at; Start 22; Stop 46
gtctcttggcaggtaaaatcactaa

SEQ ID NO: 28136 - DNA, 25 bp, Artificial
  probe
  misc_feature (1)..(25): SEQ ID NO: 4806; WAN0249NV_at; Start 1; Stop 25
ttattgctggaggtcttattggtct

SEQ ID NO: 28137 - DNA, 25 bp, Artificial
  probe
  misc_feature (1)..(25): SEQ ID NO: 4806; WAN0249NV_at; Start 11; Stop 35
aggtcttattggtctcttggcaggt

SEQ ID NO: 28138 - DNA, 25 bp, Artificial
  probe
  misc_feature (1)..(25): SEQ ID NO: 4806; WAN0249NV_at; Start 2; Stop 26
tattgctggaggtcttattggtctc

SEQ ID NO: 28139 - DNA, 25 bp, Artificial
  probe
  misc_feature (1)..(25): SEQ ID NO: 4806; WAN0249NV_at; Start 5; Stop 29
tgctggaggtcttattggtctcttg

SEQ ID NO: 28140 - DNA, 25 bp, Artificial
  probe
  misc_feature (1)..(25): SEQ ID NO: 4806; WAN0249NV_at; Start 19; Stop 43
ttggtctcttggcaggtaaaatcac

SEQ ID NO: 28141 - DNA, 25 bp, Artificial
  probe
  misc_feature (1)..(25): SEQ ID NO: 4806; WAN0249NV_at; Start 7; Stop 31
ctggaggtcttattggtctcttggc

SEQ ID NO: 28142 - DNA, 25 bp, Artificial
  probe
  misc_feature (1)..(25): SEQ ID NO: 4806; WAN0249NV_at; Start 12; Stop 36
ggtcttattggtctcttggcaggta

SEQ ID NO: 28143 - DNA, 25 bp, Artificial
  probe
  misc_feature (1)..(25): SEQ ID NO: 4806; WAN0249NV_at; Start 9; Stop 33
ggaggtcttattggtctcttggcag

SEQ ID NO: 28144 - DNA, 25 bp, Artificial
  probe
  misc_feature (1)..(25): SEQ ID NO: 4806; WAN0249NV_at; Start 23; Stop 47
tctcttggcaggtaaaatcactaaa

SEQ ID NO: 28145 - DNA, 25 bp, Artificial
  probe
  misc_feature (1)..(25): SEQ ID NO: 4806; WAN0249NV_at; Start 15; Stop 39
cttattggtctcttggcaggtaaaa

SEQ ID NO: 28146 - DNA, 25 bp, Artificial
  probe
  misc_feature (1)..(25): SEQ ID NO: 411; WAN0249NW_at; Start 212; Stop 236
taataacaatcgaaataattgactt

SEQ ID NO: 28147 - DNA, 25 bp, Artificial
  probe
  misc_feature (1)..(25): SEQ ID NO: 411; WAN0249NW_at; Start 13; Stop 37
gcatgatataacgacttttcctaaa

SEQ ID NO: 28148 - DNA, 25 bp, Artificial
  probe
  misc_feature (1)..(25): SEQ ID NO: 411; WAN0249NW_at; Start 59; Stop 83
cactacggagacaatatataaacaa

SEQ ID NO: 28149 - DNA, 25 bp, Artificial
  probe
  misc_feature (1)..(25): SEQ ID NO: 411; WAN0249NW_at; Start 106; Stop 130
gagggcgtgaatacagaatcaaatt

SEQ ID NO: 28150 - DNA, 25 bp, Artificial
  probe
  misc_feature (1)..(25): SEQ ID NO: 411; WAN0249NW_at; Start 102; Stop 126
tattgagggcgtgaatacagaatca

SEQ ID NO: 28151 - DNA, 25 bp, Artificial
  probe
  misc_feature (1)..(25): SEQ ID NO: 411; WAN0249NW_at; Start 93; Stop 117
tttaccgtctattgagggcgtgaat

SEQ ID NO: 28152 - DNA, 25 bp, Artificial
  probe
  misc_feature (1)..(25): SEQ ID NO: 411; WAN0249NW_at; Start 65; Stop 89
ggagacaatatataaacaattttct

SEQ ID NO: 28153 - DNA, 25 bp, Artificial
  probe
  misc_feature (1)..(25): SEQ ID NO: 411; WAN0249NW_at; Start 90; Stop 114
tattttaccgtctattgagggcgtg

SEQ ID NO: 28154 - DNA, 25 bp, Artificial
  probe
  misc_feature (1)..(25): SEQ ID NO: 411; WAN0249NW_at; Start 51; Stop 75
tataataacactacggagacaatat

SEQ ID NO: 28155 - DNA, 25 bp, Artificial
  probe
  misc_feature (1)..(25): SEQ ID NO: 411; WAN0249NW_at; Start 96; Stop 120
accgtctattgagggcgtgaataca

SEQ ID NO: 28156 - DNA, 25 bp, Artificial
  probe
  misc_feature (1)..(25): SEQ ID NO: 411; WAN0249NW_at; Start 119; Stop 143
cagaatcaaattcaagtctaaagat

SEQ ID NO: 28157 - DNA, 25 bp, Artificial
  probe
  misc_feature (1)..(25): SEQ ID NO: 411; WAN0249NW_at; Start 117; Stop 141
tacagaatcaaattcaagtctaaag

SEQ ID NO: 28158 - DNA, 25 bp, Artificial
  probe
  misc_feature (1)..(25): SEQ ID NO: 411; WAN0249NW_at; Start 114; Stop 138
gaatacagaatcaaattcaagtcta

SEQ ID NO: 28159 - DNA, 25 bp, Artificial
  probe
  misc_feature (1)..(25): SEQ ID NO: 411; WAN0249NW_at; Start 62; Stop 86
tacggagacaatatataaacaattt

SEQ ID NO: 28160 - DNA, 25 bp, Artificial
  probe
  misc_feature (1)..(25): SEQ ID NO: 411; WAN0249NW_at; Start 57; Stop 81
aacactacggagacaatatataaac

SEQ ID NO: 28161 - DNA, 25 bp, Artificial
  probe
  misc_feature (1)..(25): SEQ ID NO: 411; WAN0249NW_at; Start 100; Stop 124
tctattgagggcgtgaatacagaat

SEQ ID NO: 28162 - DNA, 25 bp, Artificial
  probe
  misc_feature (1)..(25): SEQ ID NO: 411; WAN0249NW_at; Start 16; Stop 40
tgatataacgacttttcctaaaatc

SEQ ID NO: 28163 - DNA, 25 bp, Artificial
  probe
  misc_feature (1)..(25): SEQ ID NO: 411; WAN0249NW_at; Start 124; Stop 148
tcaaattcaagtctaaagattatat

SEQ ID NO: 28164 - DNA, 25 bp, Artificial
  probe
  misc_feature (1)..(25): SEQ ID NO: 411; WAN0249NW_at; Start 87; Stop 111
tcttattttaccgtctattgagggc

SEQ ID NO: 28165 - DNA, 25 bp, Artificial
  probe
  misc_feature (1)..(25): SEQ ID NO: 411; WAN0249NW_at; Start 2; Stop 26
gaataggtatagcatgatataacga

SEQ ID NO: 28166 - DNA, 25 bp, Artificial
  probe
  misc_feature (1)..(25): SEQ ID NO: 411; WAN0249NW_at; Start 49; Stop 73
cgtataataacactacggagacaat

SEQ ID NO: 28167 - DNA, 25 bp, Artificial
  probe
  misc_feature (1)..(25): SEQ ID NO: 411; WAN0249NW_at; Start 218; Stop 242
caatcgaaataattgacttttctat

SEQ ID NO: 28168 - DNA, 25 bp, Artificial
  probe
  misc_feature (1)..(25): SEQ ID NO: 411; WAN0249NW_at; Start 92; Stop 116
ttttaccgtctattgagggcgtgaa

SEQ ID NO: 28169 - DNA, 25 bp, Artificial
  probe
  misc_feature (1)..(25): SEQ ID NO: 411; WAN0249NW_at; Start 44; Stop 68
tatttcgtataataacactacggag

SEQ ID NO: 28170 - DNA, 25 bp, Artificial
  probe
  misc_feature (1)..(25): SEQ ID NO: 411; WAN0249NW_at; Start 5; Stop 29
taggtatagcatgatataacgactt

SEQ ID NO: 28171 - DNA, 25 bp, Artificial
  probe
  misc_feature (1)..(25): SEQ ID NO: 411; WAN0249NW_at; Start 110; Stop 134
gcgtgaatacagaatcaaattcaag

SEQ ID NO: 28172 - DNA, 25 bp, Artificial
  probe
  misc_feature (1)..(25): SEQ ID NO: 411; WAN0249NW_at; Start 95; Stop 119
taccgtctattgagggcgtgaatac

SEQ ID NO: 28173 - DNA, 25 bp, Artificial
  probe
  misc_feature (1)..(25): SEQ ID NO: 411; WAN0249NW_at; Start 88; Stop 112
cttattttaccgtctattgagggcg

SEQ ID NO: 28174 - DNA, 25 bp, Artificial
  probe
  misc_feature (1)..(25): SEQ ID NO: 411; WAN0249NW_at; Start 169; Stop 193
taatagcaacaattaaagaatttga

SEQ ID NO: 28175 - DNA, 25 bp, Artificial
  probe
  misc_feature (1)..(25): SEQ ID NO: 411; WAN0249NW_at; Start 108; Stop 132
gggcgtgaatacagaatcaaattca

SEQ ID NO: 28176 - DNA, 25 bp, Artificial
  probe
  misc_feature (1)..(25): SEQ ID NO: 411; WAN0249NW_at; Start 9; Stop 33
tatagcatgatataacgacttttcc

SEQ ID NO: 28177 - DNA, 25 bp, Artificial
  probe
  misc_feature (1)..(25): SEQ ID NO: 411; WAN0249NW_at; Start 46; Stop 70
tttcgtataataacactacggagac

SEQ ID NO: 28178 - DNA, 25 bp, Artificial
  probe
  misc_feature (1)..(25): SEQ ID NO: 411; WAN0249NW_at; Start 101; Stop 125
ctattgagggcgtgaatacagaatc

SEQ ID NO: 28179 - DNA, 25 bp, Artificial
  probe
  misc_feature (1)..(25): SEQ ID NO: 411; WAN0249NW_at; Start 105; Stop 129
tgagggcgtgaatacagaatcaaat

SEQ ID NO: 28180 - DNA, 25 bp, Artificial
  probe
  misc_feature (1)..(25): SEQ ID NO: 531; WAN0249NX_at; Start 219; Stop 243
taggaaaagtcgttatatcatgcta

SEQ ID NO: 28181 - DNA, 25 bp, Artificial
  probe
  misc_feature (1)..(25): SEQ ID NO: 531; WAN0249NX_at; Start 176; Stop 200
tatatattgtctccgtagtgttatt

SEQ ID NO: 28182 - DNA, 25 bp, Artificial
  probe
  misc_feature (1)..(25): SEQ ID NO: 531; WAN0249NX_at; Start 182; Stop 206
ttgtctccgtagtgttattatacga

SEQ ID NO: 28183 - DNA, 25 bp, Artificial
  probe
  misc_feature (1)..(25): SEQ ID NO: 531; WAN0249NX_at; Start 139; Stop 163
tcacgccctcaatagacggtaaaat

SEQ ID NO: 28184 - DNA, 25 bp, Artificial
  probe
  misc_feature (1)..(25): SEQ ID NO: 531; WAN0249NX_at; Start 135; Stop 159
gtattcacgccctcaatagacggta

SEQ ID NO: 28185 - DNA, 25 bp, Artificial
  probe
  misc_feature (1)..(25): SEQ ID NO: 531; WAN0249NX_at; Start 136; Stop 160
tattcacgccctcaatagacggtaa

SEQ ID NO: 28186 - DNA, 25 bp, Artificial
  probe
  misc_feature (1)..(25): SEQ ID NO: 531; WAN0249NX_at; Start 172; Stop 196
tgtttatatattgtctccgtagtgt

SEQ ID NO: 28187 - DNA, 25 bp, Artificial
  probe
  misc_feature (1)..(25): SEQ ID NO: 531; WAN0249NX_at; Start 187; Stop 211
tccgtagtgttattatacgaaataa

SEQ ID NO: 28188 - DNA, 25 bp, Artificial
  probe
  misc_feature (1)..(25): SEQ ID NO: 531; WAN0249NX_at; Start 184; Stop 208
gtctccgtagtgttattatacgaaa

SEQ ID NO: 28189 - DNA, 25 bp, Artificial
  probe
  misc_feature (1)..(25): SEQ ID NO: 531; WAN0249NX_at; Start 142; Stop 166
cgccctcaatagacggtaaaataag

SEQ ID NO: 28190 - DNA, 25 bp, Artificial
  probe
  misc_feature (1)..(25): SEQ ID NO: 531; WAN0249NX_at; Start 8; Stop 32
taatatagaaaagtcaattatttcg

SEQ ID NO: 28191 - DNA, 25 bp, Artificial
  probe
  misc_feature (1)..(25): SEQ ID NO: 531; WAN0249NX_at; Start 166; Stop 190
gaaaattgtttatatattgtctccg

SEQ ID NO: 28192 - DNA, 25 bp, Artificial
  probe
  misc_feature (1)..(25): SEQ ID NO: 531; WAN0249NX_at; Start 126; Stop 150
tttgattctgtattcacgccctcaa

SEQ ID NO: 28193 - DNA, 25 bp, Artificial
  probe
  misc_feature (1)..(25): SEQ ID NO: 531; WAN0249NX_at; Start 129; Stop 153
gattctgtattcacgccctcaatag

SEQ ID NO: 28194 - DNA, 25 bp, Artificial
  probe
  misc_feature (1)..(25): SEQ ID NO: 531; WAN0249NX_at; Start 214; Stop 238
gattttaggaaaagtcgttatatca

SEQ ID NO: 28195 - DNA, 25 bp, Artificial
  probe
  misc_feature (1)..(25): SEQ ID NO: 531; WAN0249NX_at; Start 223; Stop 247
aaaagtcgttatatcatgctatacc

SEQ ID NO: 28196 - DNA, 25 bp, Artificial
  probe
  misc_feature (1)..(25): SEQ ID NO: 531; WAN0249NX_at; Start 101; Stop 125
taaaaatataatctttagacttgaa

SEQ ID NO: 28197 - DNA, 25 bp, Artificial
  probe
  misc_feature (1)..(25): SEQ ID NO: 531; WAN0249NX_at; Start 221; Stop 245
ggaaaagtcgttatatcatgctata

SEQ ID NO: 28198 - DNA, 25 bp, Artificial
  probe
  misc_feature (1)..(25): SEQ ID NO: 531; WAN0249NX_at; Start 123; Stop 147
gaatttgattctgtattcacgccct

SEQ ID NO: 28199 - DNA, 25 bp, Artificial
  probe
  misc_feature (1)..(25): SEQ ID NO: 531; WAN0249NX_at; Start 140; Stop 164
cacgccctcaatagacggtaaaata

SEQ ID NO: 28200 - DNA, 25 bp, Artificial
  probe
  misc_feature (1)..(25): SEQ ID NO: 531; WAN0249NX_at; Start 191; Stop 215
tagtgttattatacgaaataaaaga

SEQ ID NO: 28201 - DNA, 25 bp, Artificial
  probe
  misc_feature (1)..(25): SEQ ID NO: 531; WAN0249NX_at; Start 137; Stop 161
attcacgccctcaatagacggtaaa

SEQ ID NO: 28202 - DNA, 25 bp, Artificial
  probe
  misc_feature (1)..(25): SEQ ID NO: 531; WAN0249NX_at; Start 15; Stop 39
gaaaagtcaattatttcgattgtta

SEQ ID NO: 28203 - DNA, 25 bp, Artificial
  probe
  misc_feature (1)..(25): SEQ ID NO: 531; WAN0249NX_at; Start 229; Stop 253
cgttatatcatgctatacctattct

SEQ ID NO: 28204 - DNA, 25 bp, Artificial
  probe
  misc_feature (1)..(25): SEQ ID NO: 531; WAN0249NX_at; Start 225; Stop 249
aagtcgttatatcatgctataccta

SEQ ID NO: 28205 - DNA, 25 bp, Artificial
  probe
  misc_feature (1)..(25): SEQ ID NO: 531; WAN0249NX_at; Start 138; Stop 162
ttcacgccctcaatagacggtaaaa

SEQ ID NO: 28206 - DNA, 25 bp, Artificial
  probe
  misc_feature (1)..(25): SEQ ID NO: 531; WAN0249NX_at; Start 217; Stop 241
tttaggaaaagtcgttatatcatgc

SEQ ID NO: 28207 - DNA, 25 bp, Artificial
  probe
  misc_feature (1)..(25): SEQ ID NO: 531; WAN0249NX_at; Start 111; Stop 135
atctttagacttgaatttgattctg

SEQ ID NO: 28208 - DNA, 25 bp, Artificial
  probe
  misc_feature (1)..(25): SEQ ID NO: 531; WAN0249NX_at; Start 124; Stop 148
aatttgattctgtattcacgccctc

SEQ ID NO: 28209 - DNA, 25 bp, Artificial
  probe
  misc_feature (1)..(25): SEQ ID NO: 531; WAN0249NX_at; Start 143; Stop 167
gccctcaatagacggtaaaataaga

SEQ ID NO: 28210 - DNA, 25 bp, Artificial
  probe
  misc_feature (1)..(25): SEQ ID NO: 531; WAN0249NX_at; Start 58; Stop 82
aaatcaaattctttaattgttgcta

SEQ ID NO: 28211 - DNA, 25 bp, Artificial
  probe
  misc_feature (1)..(25): SEQ ID NO: 531; WAN0249NX_at; Start 180; Stop 204
tattgtctccgtagtgttattatac

SEQ ID NO: 28212 - DNA, 25 bp, Artificial
  probe
  misc_feature (1)..(25): SEQ ID NO: 531; WAN0249NX_at; Start 169; Stop 193
aattgtttatatattgtctccgtag

SEQ ID NO: 28213 - DNA, 25 bp, Artificial
  probe
  misc_feature (1)..(25): SEQ ID NO: 531; WAN0249NX_at; Start 134; Stop 158
tgtattcacgccctcaatagacggt

SEQ ID NO: 28214 - DNA, 25 bp, Artificial
  probe
  misc_feature (1)..(25): SEQ ID NO: 3229; WAN0249NY_at; Start 182; Stop 206
catgaaaccaaggcttttcctgttt

SEQ ID NO: 28215 - DNA, 25 bp, Artificial
  probe
  misc_feature (1)..(25): SEQ ID NO: 3229; WAN0249NY_at; Start 189; Stop 213
ccaaggcttttcctgttttatgtag

SEQ ID NO: 28216 - DNA, 25 bp, Artificial
  probe
  misc_feature (1)..(25): SEQ ID NO: 3229; WAN0249NY_at; Start 21; Stop 45
ctatttcgcgtttgaactgtacctc

SEQ ID NO: 28217 - DNA, 25 bp, Artificial
  probe
  misc_feature (1)..(25): SEQ ID NO: 3229; WAN0249NY_at; Start 23; Stop 47
atttcgcgtttgaactgtacctcaa

SEQ ID NO: 28218 - DNA, 25 bp, Artificial
  probe
  misc_feature (1)..(25): SEQ ID NO: 3229; WAN0249NY_at; Start 180; Stop 204
gccatgaaaccaaggcttttcctgt

SEQ ID NO: 28219 - DNA, 25 bp, Artificial
  probe
  misc_feature (1)..(25): SEQ ID NO: 3229; WAN0249NY_at; Start 83; Stop 107
tttgttaagaaaagaccttcaatca

SEQ ID NO: 28220 - DNA, 25 bp, Artificial
  probe
  misc_feature (1)..(25): SEQ ID NO: 3229; WAN0249NY_at; Start 88; Stop 112
taagaaaagaccttcaatcatttaa

SEQ ID NO: 28221 - DNA, 25 bp, Artificial
  probe
  misc_feature (1)..(25): SEQ ID NO: 3229; WAN0249NY_at; Start 89; Stop 113
aagaaaagaccttcaatcatttaag

SEQ ID NO: 28222 - DNA, 25 bp, Artificial
  probe
  misc_feature (1)..(25): SEQ ID NO: 3229; WAN0249NY_at; Start 18; Stop 42
acgctatttcgcgtttgaactgtac

SEQ ID NO: 28223 - DNA, 25 bp, Artificial
  probe
  misc_feature (1)..(25): SEQ ID NO: 3229; WAN0249NY_at; Start 20; Stop 44
gctatttcgcgtttgaactgtacct

SEQ ID NO: 28224 - DNA, 25 bp, Artificial
  probe
  misc_feature (1)..(25): SEQ ID NO: 3229; WAN0249NY_at; Start 22; Stop 46
tatttcgcgtttgaactgtacctca

SEQ ID NO: 28225 - DNA, 25 bp, Artificial
  probe
  misc_feature (1)..(25): SEQ ID NO: 3229; WAN0249NY_at; Start 26; Stop 50
tcgcgtttgaactgtacctcaaaag

SEQ ID NO: 28226 - DNA, 25 bp, Artificial
  probe
  misc_feature (1)..(25): SEQ ID NO: 3229; WAN0249NY_at; Start 194; Stop 218
gcttttcctgttttatgtagatgtt

SEQ ID NO: 28227 - DNA, 25 bp, Artificial
  probe
  misc_feature (1)..(25): SEQ ID NO: 3229; WAN0249NY_at; Start 84; Stop 108
ttgttaagaaaagaccttcaatcat

SEQ ID NO: 28228 - DNA, 25 bp, Artificial
  probe
  misc_feature (1)..(25): SEQ ID NO: 3229; WAN0249NY_at; Start 16; Stop 40
aaacgctatttcgcgtttgaactgt

SEQ ID NO: 28229 - DNA, 25 bp, Artificial
  probe
  misc_feature (1)..(25): SEQ ID NO: 3229; WAN0249NY_at; Start 193; Stop 217
ggcttttcctgttttatgtagatgt

SEQ ID NO: 28230 - DNA, 25 bp, Artificial
  probe
  misc_feature (1)..(25): SEQ ID NO: 3229; WAN0249NY_at; Start 85; Stop 109
tgttaagaaaagaccttcaatcatt

SEQ ID NO: 28231 - DNA, 25 bp, Artificial
  probe
  misc_feature (1)..(25): SEQ ID NO: 3229; WAN0249NY_at; Start 192; Stop 216
aggcttttcctgttttatgtagatg

SEQ ID NO: 28232 - DNA, 25 bp, Artificial
  probe
  misc_feature (1)..(25): SEQ ID NO: 3229; WAN0249NY_at; Start 15; Stop 39
aaaacgctatttcgcgtttgaactg

SEQ ID NO: 28233 - DNA, 25 bp, Artificial
  probe
  misc_feature (1)..(25): SEQ ID NO: 3229; WAN0249NY_at; Start 19; Stop 43
cgctatttcgcgtttgaactgtacc

SEQ ID NO: 28234 - DNA, 25 bp, Artificial
  probe
  misc_feature (1)..(25): SEQ ID NO: 3229; WAN0249NY_at; Start 25; Stop 49
ttcgcgtttgaactgtacctcaaaa

SEQ ID NO: 28235 - DNA, 25 bp, Artificial
  probe
  misc_feature (1)..(25): SEQ ID NO: 3229; WAN0249NY_at; Start 179; Stop 203
agccatgaaaccaaggcttttcctg

SEQ ID NO: 28236 - DNA, 25 bp, Artificial
  probe
  misc_feature (1)..(25): SEQ ID NO: 3229; WAN0249NY_at; Start 198; Stop 222
ttcctgttttatgtagatgtttaca

SEQ ID NO: 28237 - DNA, 25 bp, Artificial
  probe
  misc_feature (1)..(25): SEQ ID NO: 3229; WAN0249NY_at; Start 197; Stop 221
tttcctgttttatgtagatgtttac

SEQ ID NO: 28238 - DNA, 25 bp, Artificial
  probe
  misc_feature (1)..(25): SEQ ID NO: 3229; WAN0249NY_at; Start 87; Stop 111
ttaagaaaagaccttcaatcattta

SEQ ID NO: 28239 - DNA, 25 bp, Artificial
  probe
  misc_feature (1)..(25): SEQ ID NO: 3229; WAN0249NY_at; Start 195; Stop 219
cttttcctgttttatgtagatgttt

SEQ ID NO: 28240 - DNA, 25 bp, Artificial
  probe
  misc_feature (1)..(25): SEQ ID NO: 3229; WAN0249NY_at; Start 199; Stop 223
tcctgttttatgtagatgtttacac

SEQ ID NO: 28241 - DNA, 25 bp, Artificial
  probe
  misc_feature (1)..(25): SEQ ID NO: 3229; WAN0249NY_at; Start 181; Stop 205
ccatgaaaccaaggcttttcctgtt

SEQ ID NO: 28242 - DNA, 25 bp, Artificial
  probe
  misc_feature (1)..(25): SEQ ID NO: 3229; WAN0249NY_at; Start 178; Stop 202
aagccatgaaaccaaggcttttcct

SEQ ID NO: 28243 - DNA, 25 bp, Artificial
  probe
  misc_feature (1)..(25): SEQ ID NO: 3229; WAN0249NY_at; Start 24; Stop 48
tttcgcgtttgaactgtacctcaaa

SEQ ID NO: 28244 - DNA, 25 bp, Artificial
  probe
  misc_feature (1)..(25): SEQ ID NO: 3229; WAN0249NY_at; Start 115; Stop 139
aaaatgtacatctagatttatagcc

SEQ ID NO: 28245 - DNA, 25 bp, Artificial
  probe
  misc_feature (1)..(25): SEQ ID NO: 3229; WAN0249NY_at; Start 190; Stop 214
caaggcttttcctgttttatgtaga

SEQ ID NO: 28246 - DNA, 25 bp, Artificial
  probe
  misc_feature (1)..(25): SEQ ID NO: 3229; WAN0249NY_at; Start 191; Stop 215
aaggcttttcctgttttatgtagat

SEQ ID NO: 28247 - DNA, 25 bp, Artificial
  probe
  misc_feature (1)..(25): SEQ ID NO: 3229; WAN0249NY_at; Start 27; Stop 51
cgcgtttgaactgtacctcaaaagt

SEQ ID NO: 28248 - DNA, 25 bp, Artificial
  probe
  misc_feature (1)..(25): SEQ ID NO: 4239; WAN0249NZ_at; Start 4; Stop 28
taaacatctacataaaacaggaaaa

SEQ ID NO: 28249 - DNA, 25 bp, Artificial
  probe
  misc_feature (1)..(25): SEQ ID NO: 4239; WAN0249NZ_at; Start 117; Stop 141
tgattgaaggtcttttcttaacaaa

SEQ ID NO: 28250 - DNA, 25 bp, Artificial
  probe
  misc_feature (1)..(25): SEQ ID NO: 4239; WAN0249NZ_at; Start 178; Stop 202
tgaggtacagttcaaacgcgaaata

SEQ ID NO: 28251 - DNA, 25 bp, Artificial
  probe
  misc_feature (1)..(25): SEQ ID NO: 4239; WAN0249NZ_at; Start 180; Stop 204
aggtacagttcaaacgcgaaatagc

SEQ ID NO: 28252 - DNA, 25 bp, Artificial
  probe
  misc_feature (1)..(25): SEQ ID NO: 4239; WAN0249NZ_at; Start 183; Stop 207
tacagttcaaacgcgaaatagcgtt

SEQ ID NO: 28253 - DNA, 25 bp, Artificial
  probe
  misc_feature (1)..(25): SEQ ID NO: 4239; WAN0249NZ_at; Start 11; Stop 35
ctacataaaacaggaaaagccttgg

SEQ ID NO: 28254 - DNA, 25 bp, Artificial
  probe
  misc_feature (1)..(25): SEQ ID NO: 4239; WAN0249NZ_at; Start 85; Stop 109
ggctataaatctagatgtacatttt

SEQ ID NO: 28255 - DNA, 25 bp, Artificial
  probe
  misc_feature (1)..(25): SEQ ID NO: 4239; WAN0249NZ_at; Start 174; Stop 198
cttttgaggtacagttcaaacgcga

SEQ ID NO: 28256 - DNA, 25 bp, Artificial
  probe
  misc_feature (1)..(25): SEQ ID NO: 4239; WAN0249NZ_at; Start 5; Stop 29
aaacatctacataaaacaggaaaag

SEQ ID NO: 28257 - DNA, 25 bp, Artificial
  probe
  misc_feature (1)..(25): SEQ ID NO: 4239; WAN0249NZ_at; Start 7; Stop 31
acatctacataaaacaggaaaagcc

SEQ ID NO: 28258 - DNA, 25 bp, Artificial
  probe
  misc_feature (1)..(25): SEQ ID NO: 4239; WAN0249NZ_at; Start 8; Stop 32
catctacataaaacaggaaaagcct

SEQ ID NO: 28259 - DNA, 25 bp, Artificial
  probe
  misc_feature (1)..(25): SEQ ID NO: 4239; WAN0249NZ_at; Start 9; Stop 33
atctacataaaacaggaaaagcctt

SEQ ID NO: 28260 - DNA, 25 bp, Artificial
  probe
  misc_feature (1)..(25): SEQ ID NO: 4239; WAN0249NZ_at; Start 176; Stop 200
tttgaggtacagttcaaacgcgaaa

SEQ ID NO: 28261 - DNA, 25 bp, Artificial
  probe
  misc_feature (1)..(25): SEQ ID NO: 4239; WAN0249NZ_at; Start 182; Stop 206
gtacagttcaaacgcgaaatagcgt

SEQ ID NO: 28262 - DNA, 25 bp, Artificial
  probe
  misc_feature (1)..(25): SEQ ID NO: 4239; WAN0249NZ_at; Start 1; Stop 25
gtgtaaacatctacataaaacagga

SEQ ID NO: 28263 - DNA, 25 bp, Artificial
  probe
  misc_feature (1)..(25): SEQ ID NO: 4239; WAN0249NZ_at; Start 2; Stop 26
tgtaaacatctacataaaacaggaa

SEQ ID NO: 28264 - DNA, 25 bp, Artificial
  probe
  misc_feature (1)..(25): SEQ ID NO: 4239; WAN0249NZ_at; Start 116; Stop 140
atgattgaaggtcttttcttaacaa

SEQ ID NO: 28265 - DNA, 25 bp, Artificial
  probe
  misc_feature (1)..(25): SEQ ID NO: 4239; WAN0249NZ_at; Start 112; Stop 136
ttaaatgattgaaggtcttttctta

SEQ ID NO: 28266 - DNA, 25 bp, Artificial
  probe
  misc_feature (1)..(25): SEQ ID NO: 4239; WAN0249NZ_at; Start 111; Stop 135
cttaaatgattgaaggtcttttctt

SEQ ID NO: 28267 - DNA, 25 bp, Artificial
  probe
  misc_feature (1)..(25): SEQ ID NO: 4239; WAN0249NZ_at; Start 175; Stop 199
ttttgaggtacagttcaaacgcgaa

SEQ ID NO: 28268 - DNA, 25 bp, Artificial
  probe
  misc_feature (1)..(25): SEQ ID NO: 4239; WAN0249NZ_at; Start 173; Stop 197
acttttgaggtacagttcaaacgcg

SEQ ID NO: 28269 - DNA, 25 bp, Artificial
  probe
  misc_feature (1)..(25): SEQ ID NO: 4239; WAN0249NZ_at; Start 21; Stop 45
caggaaaagccttggtttcatggct

SEQ ID NO: 28270 - DNA, 25 bp, Artificial
  probe
  misc_feature (1)..(25): SEQ ID NO: 4239; WAN0249NZ_at; Start 113; Stop 137
taaatgattgaaggtcttttcttaa

SEQ ID NO: 28271 - DNA, 25 bp, Artificial
  probe
  misc_feature (1)..(25): SEQ ID NO: 4239; WAN0249NZ_at; Start 3; Stop 27
gtaaacatctacataaaacaggaaa

SEQ ID NO: 28272 - DNA, 25 bp, Artificial
  probe
  misc_feature (1)..(25): SEQ ID NO: 4239; WAN0249NZ_at; Start 181; Stop 205
ggtacagttcaaacgcgaaatagcg

SEQ ID NO: 28273 - DNA, 25 bp, Artificial
  probe
  misc_feature (1)..(25): SEQ ID NO: 4239; WAN0249NZ_at; Start 22; Stop 46
aggaaaagccttggtttcatggctt

SEQ ID NO: 28274 - DNA, 25 bp, Artificial
  probe
  misc_feature (1)..(25): SEQ ID NO: 4239; WAN0249NZ_at; Start 6; Stop 30
aacatctacataaaacaggaaaagc

SEQ ID NO: 28275 - DNA, 25 bp, Artificial
  probe
  misc_feature (1)..(25): SEQ ID NO: 4239; WAN0249NZ_at; Start 19; Stop 43
aacaggaaaagccttggtttcatgg

SEQ ID NO: 28276 - DNA, 25 bp, Artificial
  probe
  misc_feature (1)..(25): SEQ ID NO: 4239; WAN0249NZ_at; Start 10; Stop 34
tctacataaaacaggaaaagccttg

SEQ ID NO: 28277 - DNA, 25 bp, Artificial
  probe
  misc_feature (1)..(25): SEQ ID NO: 4239; WAN0249NZ_at; Start 179; Stop 203
gaggtacagttcaaacgcgaaatag

SEQ ID NO: 28278 - DNA, 25 bp, Artificial
  probe
  misc_feature (1)..(25): SEQ ID NO: 4239; WAN0249NZ_at; Start 115; Stop 139
aatgattgaaggtcttttcttaaca

SEQ ID NO: 28279 - DNA, 25 bp, Artificial
  probe
  misc_feature (1)..(25): SEQ ID NO: 4239; WAN0249NZ_at; Start 20; Stop 44
acaggaaaagccttggtttcatggc

SEQ ID NO: 28280 - DNA, 25 bp, Artificial
  probe
  misc_feature (1)..(25): SEQ ID NO: 4239; WAN0249NZ_at; Start 185; Stop 209
cagttcaaacgcgaaatagcgtttt

SEQ ID NO: 28281 - DNA, 25 bp, Artificial
  probe
  misc_feature (1)..(25): SEQ ID NO: 4239; WAN0249NZ_at; Start 177; Stop 201
ttgaggtacagttcaaacgcgaaat

SEQ ID NO: 28282 - DNA, 25 bp, Artificial
  probe
  misc_feature (1)..(25): SEQ ID NO: 6255; WAN0249O2_at; Start 37; Stop 61
agcaaaaaaagccctatattataag

SEQ ID NO: 28283 - DNA, 25 bp, Artificial
  probe
  misc_feature (1)..(25): SEQ ID NO: 6255; WAN0249O2_at; Start 8; Stop 32
gcaaattgcacgacaatttttaaaa

SEQ ID NO: 28284 - DNA, 25 bp, Artificial
  probe
  misc_feature (1)..(25): SEQ ID NO: 6255; WAN0249O2_at; Start 3; Stop 27
acacggcaaattgcacgacaatttt

SEQ ID NO: 28285 - DNA, 25 bp, Artificial
  probe
  misc_feature (1)..(25): SEQ ID NO: 6255; WAN0249O2_at; Start 48; Stop 72
ccctatattataaggcttttcctgt

SEQ ID NO: 28286 - DNA, 25 bp, Artificial
  probe
  misc_feature (1)..(25): SEQ ID NO: 6255; WAN0249O2_at; Start 5; Stop 29
acggcaaattgcacgacaattttta

SEQ ID NO: 28287 - DNA, 25 bp, Artificial
  probe
  misc_feature (1)..(25): SEQ ID NO: 6255; WAN0249O2_at; Start 51; Stop 75
tatattataaggcttttcctgttgt

SEQ ID NO: 28288 - DNA, 25 bp, Artificial
  probe
  misc_feature (1)..(25): SEQ ID NO: 6255; WAN0249O2_at; Start 49; Stop 73
cctatattataaggcttttcctgtt

SEQ ID NO: 28289 - DNA, 25 bp, Artificial
  probe
  misc_feature (1)..(25): SEQ ID NO: 6255; WAN0249O2_at; Start 53; Stop 77
tattataaggcttttcctgttgtat

SEQ ID NO: 28290 - DNA, 25 bp, Artificial
  probe
  misc_feature (1)..(25): SEQ ID NO: 6255; WAN0249O2_at; Start 7; Stop 31
ggcaaattgcacgacaatttttaaa

SEQ ID NO: 28291 - DNA, 25 bp, Artificial
  probe
  misc_feature (1)..(25): SEQ ID NO: 6255; WAN0249O2_at; Start 52; Stop 76
atattataaggcttttcctgttgta

SEQ ID NO: 28292 - DNA, 25 bp, Artificial
  probe
  misc_feature (1)..(25): SEQ ID NO: 6255; WAN0249O2_at; Start 6; Stop 30
cggcaaattgcacgacaatttttaa

SEQ ID NO: 28293 - DNA, 25 bp, Artificial
  probe
  misc_feature (1)..(25): SEQ ID NO: 6255; WAN0249O2_at; Start 46; Stop 70
agccctatattataaggcttttcct

SEQ ID NO: 28294 - DNA, 25 bp, Artificial
  probe
  misc_feature (1)..(25): SEQ ID NO: 6255; WAN0249O2_at; Start 50; Stop 74
ctatattataaggcttttcctgttg

SEQ ID NO: 28295 - DNA, 25 bp, Artificial
  probe
  misc_feature (1)..(25): SEQ ID NO: 6255; WAN0249O2_at; Start 47; Stop 71
gccctatattataaggcttttcctg

SEQ ID NO: 28296 - DNA, 25 bp, Artificial
  probe
  misc_feature (1)..(25): SEQ ID NO: 6255; WAN0249O2_at; Start 4; Stop 28
cacggcaaattgcacgacaattttt

SEQ ID NO: 28297 - DNA, 25 bp, Artificial
  probe
  misc_feature (1)..(25): SEQ ID NO: 6255; WAN0249O2_at; Start 2; Stop 26
aacacggcaaattgcacgacaattt

SEQ ID NO: 28298 - DNA, 25 bp, Artificial
  probe
  misc_feature (1)..(25): SEQ ID NO: 6255; WAN0249O2_at; Start 9; Stop 33
caaattgcacgacaatttttaaaag

SEQ ID NO: 28299 - DNA, 25 bp, Artificial
  probe
  misc_feature (1)..(25): SEQ ID NO: 6255; WAN0249O2_at; Start 1; Stop 25
aaacacggcaaattgcacgacaatt

SEQ ID NO: 28300 - DNA, 25 bp, Artificial
  probe
  misc_feature (1)..(25): SEQ ID NO: 7352; WAN0249O3_at; Start 9; Stop 33
caacaggaaaagccttataatatag

SEQ ID NO: 28301 - DNA, 25 bp, Artificial
  probe
  misc_feature (1)..(25): SEQ ID NO: 7352; WAN0249O3_at; Start 22; Stop 46
cttataatatagggctttttttgct

SEQ ID NO: 28302 - DNA, 25 bp, Artificial
  probe
  misc_feature (1)..(25): SEQ ID NO: 7352; WAN0249O3_at; Start 58; Stop 82
aattgtcgtgcaatttgccgtgttt

SEQ ID NO: 28303 - DNA, 25 bp, Artificial
  probe
  misc_feature (1)..(25): SEQ ID NO: 7352; WAN0249O3_at; Start 50; Stop 74
cttttaaaaattgtcgtgcaatttg

SEQ ID NO: 28304 - DNA, 25 bp, Artificial
  probe
  misc_feature (1)..(25): SEQ ID NO: 7352; WAN0249O3_at; Start 6; Stop 30
atacaacaggaaaagccttataata

SEQ ID NO: 28305 - DNA, 25 bp, Artificial
  probe
  misc_feature (1)..(25): SEQ ID NO: 7352; WAN0249O3_at; Start 51; Stop 75
ttttaaaaattgtcgtgcaatttgc

SEQ ID NO: 28306 - DNA, 25 bp, Artificial
  probe
  misc_feature (1)..(25): SEQ ID NO: 7352; WAN0249O3_at; Start 12; Stop 36
caggaaaagccttataatatagggc

SEQ ID NO: 28307 - DNA, 25 bp, Artificial
  probe
  misc_feature (1)..(25): SEQ ID NO: 7352; WAN0249O3_at; Start 53; Stop 77
ttaaaaattgtcgtgcaatttgccg

SEQ ID NO: 28308 - DNA, 25 bp, Artificial
  probe
  misc_feature (1)..(25): SEQ ID NO: 7352; WAN0249O3_at; Start 57; Stop 81
aaattgtcgtgcaatttgccgtgtt

SEQ ID NO: 28309 - DNA, 25 bp, Artificial
  probe
  misc_feature (1)..(25): SEQ ID NO: 7352; WAN0249O3_at; Start 8; Stop 32
acaacaggaaaagccttataatata

SEQ ID NO: 28310 - DNA, 25 bp, Artificial
  probe
  misc_feature (1)..(25): SEQ ID NO: 7352; WAN0249O3_at; Start 54; Stop 78
taaaaattgtcgtgcaatttgccgt

SEQ ID NO: 28311 - DNA, 25 bp, Artificial
  probe
  misc_feature (1)..(25): SEQ ID NO: 7352; WAN0249O3_at; Start 55; Stop 79
aaaaattgtcgtgcaatttgccgtg

SEQ ID NO: 28312 - DNA, 25 bp, Artificial
  probe
  misc_feature (1)..(25): SEQ ID NO: 7352; WAN0249O3_at; Start 56; Stop 80
aaaattgtcgtgcaatttgccgtgt

SEQ ID NO: 28313 - DNA, 25 bp, Artificial
  probe
  misc_feature (1)..(25): SEQ ID NO: 7352; WAN0249O3_at; Start 13; Stop 37
aggaaaagccttataatatagggct

SEQ ID NO: 28314 - DNA, 25 bp, Artificial
  probe
  misc_feature (1)..(25): SEQ ID NO: 7352; WAN0249O3_at; Start 10; Stop 34
aacaggaaaagccttataatatagg

SEQ ID NO: 28315 - DNA, 25 bp, Artificial
  probe
  misc_feature (1)..(25): SEQ ID NO: 7352; WAN0249O3_at; Start 52; Stop 76
tttaaaaattgtcgtgcaatttgcc

SEQ ID NO: 28316 - DNA, 25 bp, Artificial
  probe
  misc_feature (1)..(25): SEQ ID NO: 7352; WAN0249O3_at; Start 7; Stop 31
tacaacaggaaaagccttataatat

SEQ ID NO: 28317 - DNA, 25 bp, Artificial
  probe
  misc_feature (1)..(25): SEQ ID NO: 7352; WAN0249O3_at; Start 11; Stop 35
acaggaaaagccttataatataggg

SEQ ID NO: 28318 - DNA, 25 bp, Artificial
  probe
  misc_feature (1)..(25): SEQ ID NO: 4539; WAN0249O4_at; Start 116; Stop 140
accataaactaagcttatataccca

SEQ ID NO: 28319 - DNA, 25 bp, Artificial
  probe
  misc_feature (1)..(25): SEQ ID NO: 4539; WAN0249O4_at; Start 84; Stop 108
ttaaatcataatccaacaccaattt

SEQ ID NO: 28320 - DNA, 25 bp, Artificial
  probe
  misc_feature (1)..(25): SEQ ID NO: 4539; WAN0249O4_at; Start 144; Stop 168
cacaaaaagtcctctttccactatt

SEQ ID NO: 28321 - DNA, 25 bp, Artificial
  probe
  misc_feature (1)..(25): SEQ ID NO: 4539; WAN0249O4_at; Start 97; Stop 121
caacaccaattttacaaataccata

SEQ ID NO: 28322 - DNA, 25 bp, Artificial
  probe
  misc_feature (1)..(25): SEQ ID NO: 4539; WAN0249O4_at; Start 117; Stop 141
ccataaactaagcttatatacccaa

SEQ ID NO: 28323 - DNA, 25 bp, Artificial
  probe
  misc_feature (1)..(25): SEQ ID NO: 4539; WAN0249O4_at; Start 143; Stop 167
acacaaaaagtcctctttccactat

SEQ ID NO: 28324 - DNA, 25 bp, Artificial
  probe
  misc_feature (1)..(25): SEQ ID NO: 4539; WAN0249O4_at; Start 112; Stop 136
aaataccataaactaagcttatata

SEQ ID NO: 28325 - DNA, 25 bp, Artificial
  probe
  misc_feature (1)..(25): SEQ ID NO: 4539; WAN0249O4_at; Start 95; Stop 119
tccaacaccaattttacaaatacca

SEQ ID NO: 28326 - DNA, 25 bp, Artificial
  probe
  misc_feature (1)..(25): SEQ ID NO: 4539; WAN0249O4_at; Start 108; Stop 132
ttacaaataccataaactaagctta

SEQ ID NO: 28327 - DNA, 25 bp, Artificial
  probe
  misc_feature (1)..(25): SEQ ID NO: 4539; WAN0249O4_at; Start 114; Stop 138
ataccataaactaagcttatatacc

SEQ ID NO: 28328 - DNA, 25 bp, Artificial
  probe
  misc_feature (1)..(25): SEQ ID NO: 4539; WAN0249O4_at; Start 96; Stop 120
ccaacaccaattttacaaataccat

SEQ ID NO: 28329 - DNA, 25 bp, Artificial
  probe
  misc_feature (1)..(25): SEQ ID NO: 4539; WAN0249O4_at; Start 110; Stop 134
acaaataccataaactaagcttata

SEQ ID NO: 28330 - DNA, 25 bp, Artificial
  probe
  misc_feature (1)..(25): SEQ ID NO: 4539; WAN0249O4_at; Start 156; Stop 180
tctttccactattttagaaagagaa

SEQ ID NO: 28331 - DNA, 25 bp, Artificial
  probe
  misc_feature (1)..(25): SEQ ID NO: 4539; WAN0249O4_at; Start 113; Stop 137
aataccataaactaagcttatatac

SEQ ID NO: 28332 - DNA, 25 bp, Artificial
  probe
  misc_feature (1)..(25): SEQ ID NO: 4539; WAN0249O4_at; Start 92; Stop 116
taatccaacaccaattttacaaata

SEQ ID NO: 28333 - DNA, 25 bp, Artificial
  probe
  misc_feature (1)..(25): SEQ ID NO: 4539; WAN0249O4_at; Start 111; Stop 135
caaataccataaactaagcttatat

SEQ ID NO: 28334 - DNA, 25 bp, Artificial
  probe
  misc_feature (1)..(25): SEQ ID NO: 4539; WAN0249O4_at; Start 89; Stop 113
tcataatccaacaccaattttacaa

SEQ ID NO: 28335 - DNA, 25 bp, Artificial
  probe
  misc_feature (1)..(25): SEQ ID NO: 4539; WAN0249O4_at; Start 88; Stop 112
atcataatccaacaccaattttaca

SEQ ID NO: 28336 - DNA, 25 bp, Artificial
  probe
  misc_feature (1)..(25): SEQ ID NO: 4539; WAN0249O4_at; Start 85; Stop 109
taaatcataatccaacaccaatttt

SEQ ID NO: 28337 - DNA, 25 bp, Artificial
  probe
  misc_feature (1)..(25): SEQ ID NO: 4539; WAN0249O4_at; Start 109; Stop 133
tacaaataccataaactaagcttat

SEQ ID NO: 28338 - DNA, 25 bp, Artificial
  probe
  misc_feature (1)..(25): SEQ ID NO: 4539; WAN0249O4_at; Start 115; Stop 139
taccataaactaagcttatataccc

SEQ ID NO: 28339 - DNA, 25 bp, Artificial
  probe
  misc_feature (1)..(25): SEQ ID NO: 4539; WAN0249O4_at; Start 91; Stop 115
ataatccaacaccaattttacaaat

SEQ ID NO: 28340 - DNA, 25 bp, Artificial
  probe
  misc_feature (1)..(25): SEQ ID NO: 4539; WAN0249O4_at; Start 87; Stop 111
aatcataatccaacaccaattttac

SEQ ID NO: 28341 - DNA, 25 bp, Artificial
  probe
  misc_feature (1)..(25): SEQ ID NO: 4539; WAN0249O4_at; Start 86; Stop 110
aaatcataatccaacaccaatttta

SEQ ID NO: 28342 - DNA, 25 bp, Artificial
  probe
  misc_feature (1)..(25): SEQ ID NO: 4539; WAN0249O4_at; Start 90; Stop 114
cataatccaacaccaattttacaaa

SEQ ID NO: 28343 - DNA, 25 bp, Artificial
  probe
  misc_feature (1)..(25): SEQ ID NO: 166; WAN0249O5_at; Start 70; Stop 94
tgggtatataagcttagtttatggt

SEQ ID NO: 28344 - DNA, 25 bp, Artificial
  probe
  misc_feature (1)..(25): SEQ ID NO: 166; WAN0249O5_at; Start 75; Stop 99
atataagcttagtttatggtatttg

SEQ ID NO: 28345 - DNA, 25 bp, Artificial
  probe
  misc_feature (1)..(25): SEQ ID NO: 166; WAN0249O5_at; Start 61; Stop 85
tttgtgttttgggtatataagctta

SEQ ID NO: 28346 - DNA, 25 bp, Artificial
  probe
  misc_feature (1)..(25): SEQ ID NO: 166; WAN0249O5_at; Start 30; Stop 54
ttctctttctaaaatagtggaaaga

SEQ ID NO: 28347 - DNA, 25 bp, Artificial
  probe
  misc_feature (1)..(25): SEQ ID NO: 166; WAN0249O5_at; Start 100; Stop 124
taaaattggtgttggattatgattt

SEQ ID NO: 28348 - DNA, 25 bp, Artificial
  probe
  misc_feature (1)..(25): SEQ ID NO: 166; WAN0249O5_at; Start 77; Stop 101
ataagcttagtttatggtatttgta

SEQ ID NO: 28349 - DNA, 25 bp, Artificial
  probe
  misc_feature (1)..(25): SEQ ID NO: 166; WAN0249O5_at; Start 43; Stop 67
atagtggaaagaggactttttgtgt

SEQ ID NO: 28350 - DNA, 25 bp, Artificial
  probe
  misc_feature (1)..(25): SEQ ID NO: 166; WAN0249O5_at; Start 91; Stop 115
tggtatttgtaaaattggtgttgga

SEQ ID NO: 28351 - DNA, 25 bp, Artificial
  probe
  misc_feature (1)..(25): SEQ ID NO: 166; WAN0249O5_at; Start 95; Stop 119
atttgtaaaattggtgttggattat

SEQ ID NO: 28352 - DNA, 25 bp, Artificial
  probe
  misc_feature (1)..(25): SEQ ID NO: 166; WAN0249O5_at; Start 96; Stop 120
tttgtaaaattggtgttggattatg

SEQ ID NO: 28353 - DNA, 25 bp, Artificial
  probe
  misc_feature (1)..(25): SEQ ID NO: 166; WAN0249O5_at; Start 69; Stop 93
ttgggtatataagcttagtttatgg

SEQ ID NO: 28354 - DNA, 25 bp, Artificial
  probe
  misc_feature (1)..(25): SEQ ID NO: 166; WAN0249O5_at; Start 76; Stop 100
tataagcttagtttatggtatttgt

SEQ ID NO: 28355 - DNA, 25 bp, Artificial
  probe
  misc_feature (1)..(25): SEQ ID NO: 166; WAN0249O5_at; Start 32; Stop 56
ctctttctaaaatagtggaaagagg

SEQ ID NO: 28356 - DNA, 25 bp, Artificial
  probe
  misc_feature (1)..(25): SEQ ID NO: 166; WAN0249O5_at; Start 99; Stop 123
gtaaaattggtgttggattatgatt

SEQ ID NO: 28357 - DNA, 25 bp, Artificial
  probe
  misc_feature (1)..(25): SEQ ID NO: 166; WAN0249O5_at; Start 97; Stop 121
ttgtaaaattggtgttggattatga

SEQ ID NO: 28358 - DNA, 25 bp, Artificial
  probe
  misc_feature (1)..(25): SEQ ID NO: 166; WAN0249O5_at; Start 98; Stop 122
tgtaaaattggtgttggattatgat

SEQ ID NO: 28359 - DNA, 25 bp, Artificial
  probe
  misc_feature (1)..(25): SEQ ID NO: 166; WAN0249O5_at; Start 89; Stop 113
tatggtatttgtaaaattggtgttg

SEQ ID NO: 28360 - DNA, 25 bp, Artificial
  probe
  misc_feature (1)..(25): SEQ ID NO: 166; WAN0249O5_at; Start 33; Stop 57
tctttctaaaatagtggaaagagga

SEQ ID NO: 28361 - DNA, 25 bp, Artificial
  probe
  misc_feature (1)..(25): SEQ ID NO: 166; WAN0249O5_at; Start 78; Stop 102
taagcttagtttatggtatttgtaa

SEQ ID NO: 28362 - DNA, 25 bp, Artificial
  probe
  misc_feature (1)..(25): SEQ ID NO: 166; WAN0249O5_at; Start 94; Stop 118
tatttgtaaaattggtgttggatta

SEQ ID NO: 28363 - DNA, 25 bp, Artificial
  probe
  misc_feature (1)..(25): SEQ ID NO: 166; WAN0249O5_at; Start 63; Stop 87
tgtgttttgggtatataagcttagt

SEQ ID NO: 28364 - DNA, 25 bp, Artificial
  probe
  misc_feature (1)..(25): SEQ ID NO: 166; WAN0249O5_at; Start 31; Stop 55
tctctttctaaaatagtggaaagag

SEQ ID NO: 28365 - DNA, 25 bp, Artificial
  probe
  misc_feature (1)..(25): SEQ ID NO: 166; WAN0249O5_at; Start 42; Stop 66
aatagtggaaagaggactttttgtg

SEQ ID NO: 28366 - DNA, 25 bp, Artificial
  probe
  misc_feature (1)..(25): SEQ ID NO: 166; WAN0249O5_at; Start 71; Stop 95
gggtatataagcttagtttatggta

SEQ ID NO: 28367 - DNA, 25 bp, Artificial
  probe
  misc_feature (1)..(25): SEQ ID NO: 166; WAN0249O5_at; Start 73; Stop 97
gtatataagcttagtttatggtatt

SEQ ID NO: 28368 - DNA, 25 bp, Artificial
  probe
  misc_feature (1)..(25): SEQ ID NO: 166; WAN0249O5_at; Start 74; Stop 98
tatataagcttagtttatggtattt

SEQ ID NO: 28369 - DNA, 25 bp, Artificial
  probe
  misc_feature (1)..(25): SEQ ID NO: 166; WAN0249O5_at; Start 72; Stop 96
ggtatataagcttagtttatggtat

SEQ ID NO: 28370 - DNA, 25 bp, Artificial
  probe
  misc_feature (1)..(25): SEQ ID NO: 166; WAN0249O5_at; Start 68; Stop 92
tttgggtatataagcttagtttatg

SEQ ID NO: 28371 - DNA, 25 bp, Artificial
  probe
  misc_feature (1)..(25): SEQ ID NO: 166; WAN0249O5_at; Start 62; Stop 86
ttgtgttttgggtatataagcttag

SEQ ID NO: 28372 - DNA, 25 bp, Artificial
  probe
  misc_feature (1)..(25): SEQ ID NO: 166; WAN0249O5_at; Start 90; Stop 114
atggtatttgtaaaattggtgttgg

SEQ ID NO: 28373 - DNA, 25 bp, Artificial
  probe
  misc_feature (1)..(25): SEQ ID NO: 528; WAN0249O6_at; Start 162; Stop 186
tcaatacaaaccgtgaagtttcggc

SEQ ID NO: 28374 - DNA, 25 bp, Artificial
  probe
  misc_feature (1)..(25): SEQ ID NO: 528; WAN0249O6_at; Start 141; Stop 165
cacctgcttaattgcgcgggttcaa

SEQ ID NO: 28375 - DNA, 25 bp, Artificial
  probe
  misc_feature (1)..(25): SEQ ID NO: 528; WAN0249O6_at; Start 124; Stop 148
agttagagcgagttgcccacctgct

SEQ ID NO: 28376 - DNA, 25 bp, Artificial
  probe
  misc_feature (1)..(25): SEQ ID NO: 528; WAN0249O6_at; Start 15; Stop 39
gctgtggtgtacgacttcacactta

SEQ ID NO: 28377 - DNA, 25 bp, Artificial
  probe
  misc_feature (1)..(25): SEQ ID NO: 528; WAN0249O6_at; Start 109; Stop 133
cacggaaacagcttcagttagagcg

SEQ ID NO: 28378 - DNA, 25 bp, Artificial
  probe
  misc_feature (1)..(25): SEQ ID NO: 528; WAN0249O6_at; Start 70; Stop 94
gggaaacaaaagtcttctaacagca

SEQ ID NO: 28379 - DNA, 25 bp, Artificial
  probe
  misc_feature (1)..(25): SEQ ID NO: 528; WAN0249O6_at; Start 134; Stop 158
agttgcccacctgcttaattgcgcg

SEQ ID NO: 28380 - DNA, 25 bp, Artificial
  probe
  misc_feature (1)..(25): SEQ ID NO: 528; WAN0249O6_at; Start 117; Stop 141
cagcttcagttagagcgagttgccc

SEQ ID NO: 28381 - DNA, 25 bp, Artificial
  probe
  misc_feature (1)..(25): SEQ ID NO: 528; WAN0249O6_at; Start 76; Stop 100
caaaagtcttctaacagcatgtagg

SEQ ID NO: 28382 - DNA, 25 bp, Artificial
  probe
  misc_feature (1)..(25): SEQ ID NO: 528; WAN0249O6_at; Start 2; Stop 26
taaatatagaaacgctgtggtgtac

SEQ ID NO: 28383 - DNA, 25 bp, Artificial
  probe
  misc_feature (1)..(25): SEQ ID NO: 528; WAN0249O6_at; Start 171; Stop 195
accgtgaagtttcggcaccaataca

SEQ ID NO: 28384 - DNA, 25 bp, Artificial
  probe
  misc_feature (1)..(25): SEQ ID NO: 528; WAN0249O6_at; Start 129; Stop 153
gagcgagttgcccacctgcttaatt

SEQ ID NO: 28385 - DNA, 25 bp, Artificial
  probe
  misc_feature (1)..(25): SEQ ID NO: 528; WAN0249O6_at; Start 19; Stop 43
tggtgtacgacttcacacttaagtg

SEQ ID NO: 28386 - DNA, 25 bp, Artificial
  probe
  misc_feature (1)..(25): SEQ ID NO: 528; WAN0249O6_at; Start 92; Stop 116
gcatgtaggccgtctcacacggaaa

SEQ ID NO: 28387 - DNA, 25 bp, Artificial
  probe
  misc_feature (1)..(25): SEQ ID NO: 528; WAN0249O6_at; Start 152; Stop 176
ttgcgcgggttcaatacaaaccgtg

SEQ ID NO: 28388 - DNA, 25 bp, Artificial
  probe
  misc_feature (1)..(25): SEQ ID NO: 528; WAN0249O6_at; Start 176; Stop 200
gaagtttcggcaccaatacagcttt

SEQ ID NO: 28389 - DNA, 25 bp, Artificial
  probe
  misc_feature (1)..(25): SEQ ID NO: 528; WAN0249O6_at; Start 6; Stop 30
tatagaaacgctgtggtgtacgact

SEQ ID NO: 28390 - DNA, 25 bp, Artificial
  probe
  misc_feature (1)..(25): SEQ ID NO: 528; WAN0249O6_at; Start 40; Stop 64
agtgttgaccgactattttttgtat

SEQ ID NO: 28391 - DNA, 25 bp, Artificial
  probe
  misc_feature (1)..(25): SEQ ID NO: 528; WAN0249O6_at; Start 168; Stop 192
caaaccgtgaagtttcggcaccaat

SEQ ID NO: 28392 - DNA, 25 bp, Artificial
  probe
  misc_feature (1)..(25): SEQ ID NO: 528; WAN0249O6_at; Start 10; Stop 34
gaaacgctgtggtgtacgacttcac

SEQ ID NO: 28393 - DNA, 25 bp, Artificial
  probe
  misc_feature (1)..(25): SEQ ID NO: 528; WAN0249O6_at; Start 82; Stop 106
tcttctaacagcatgtaggccgtct

SEQ ID NO: 28394 - DNA, 25 bp, Artificial
  probe
  misc_feature (1)..(25): SEQ ID NO: 528; WAN0249O6_at; Start 183; Stop 207
cggcaccaatacagcttttttcttt

SEQ ID NO: 28395 - DNA, 25 bp, Artificial
  probe
  misc_feature (1)..(25): SEQ ID NO: 528; WAN0249O6_at; Start 87; Stop 111
taacagcatgtaggccgtctcacac

SEQ ID NO: 28396 - DNA, 25 bp, Artificial
  probe
  misc_feature (1)..(25): SEQ ID NO: 528; WAN0249O6_at; Start 149; Stop 173
taattgcgcgggttcaatacaaacc

SEQ ID NO: 28397 - DNA, 25 bp, Artificial
  probe
  misc_feature (1)..(25): SEQ ID NO: 528; WAN0249O6_at; Start 95; Stop 119
tgtaggccgtctcacacggaaacag

SEQ ID NO: 28398 - DNA, 25 bp, Artificial
  probe
  misc_feature (1)..(25): SEQ ID NO: 528; WAN0249O6_at; Start 79; Stop 103
aagtcttctaacagcatgtaggccg

SEQ ID NO: 28399 - DNA, 25 bp, Artificial
  probe
  misc_feature (1)..(25): SEQ ID NO: 528; WAN0249O6_at; Start 155; Stop 179
cgcgggttcaatacaaaccgtgaag

SEQ ID NO: 28400 - DNA, 25 bp, Artificial
  probe
  misc_feature (1)..(25): SEQ ID NO: 528; WAN0249O6_at; Start 166; Stop 190
tacaaaccgtgaagtttcggcacca

SEQ ID NO: 28401 - DNA, 25 bp, Artificial
  probe
  misc_feature (1)..(25): SEQ ID NO: 528; WAN0249O6_at; Start 137; Stop 161
tgcccacctgcttaattgcgcgggt

SEQ ID NO: 28402 - DNA, 25 bp, Artificial
  probe
  misc_feature (1)..(25): SEQ ID NO: 528; WAN0249O6_at; Start 121; Stop 145
ttcagttagagcgagttgcccacct

SEQ ID NO: 28403 - DNA, 25 bp, Artificial
  probe
  misc_feature (1)..(25): SEQ ID NO: 528; WAN0249O6_at; Start 102; Stop 126
cgtctcacacggaaacagcttcagt

SEQ ID NO: 28404 - DNA, 25 bp, Artificial
  probe
  misc_feature (1)..(25): SEQ ID NO: 528; WAN0249O6_at; Start 27; Stop 51
gacttcacacttaagtgttgaccga

SEQ ID NO: 28405 - DNA, 25 bp, Artificial
  probe
  misc_feature (1)..(25): SEQ ID NO: 528; WAN0249O6_at; Start 32; Stop 56
cacacttaagtgttgaccgactatt

SEQ ID NO: 28406 - DNA, 25 bp, Artificial
  probe
  misc_feature (1)..(25): SEQ ID NO: 528; WAN0249O6_at; Start 112; Stop 136
ggaaacagcttcagttagagcgagt

SEQ ID NO: 28407 - DNA, 25 bp, Artificial
  probe
  misc_feature (1)..(25): SEQ ID NO: 120; WAN0249O7_at; Start 183; Stop 207
tacaccacagcgtttctatatttat

SEQ ID NO: 28408 - DNA, 25 bp, Artificial
  probe
  misc_feature (1)..(25): SEQ ID NO: 120; WAN0249O7_at; Start 176; Stop 200
gaagtcgtacaccacagcgtttcta

SEQ ID NO: 28409 - DNA, 25 bp, Artificial
  probe
  misc_feature (1)..(25): SEQ ID NO: 120; WAN0249O7_at; Start 43; Stop 67
ttgaacccgcgcaattaagcaggtg

SEQ ID NO: 28410 - DNA, 25 bp, Artificial
  probe
  misc_feature (1)..(25): SEQ ID NO: 120; WAN0249O7_at; Start 179; Stop 203
gtcgtacaccacagcgtttctatat

SEQ ID NO: 28411 - DNA, 25 bp, Artificial
  probe
  misc_feature (1)..(25): SEQ ID NO: 120; WAN0249O7_at; Start 173; Stop 197
tgtgaagtcgtacaccacagcgttt

SEQ ID NO: 28412 - DNA, 25 bp, Artificial
  probe
  misc_feature (1)..(25): SEQ ID NO: 120; WAN0249O7_at; Start 8; Stop 32
aaagctgtattggtgccgaaacttc

SEQ ID NO: 28413 - DNA, 25 bp, Artificial
  probe
  misc_feature (1)..(25): SEQ ID NO: 120; WAN0249O7_at; Start 66; Stop 90
tgggcaactcgctctaactgaagct

SEQ ID NO: 28414 - DNA, 25 bp, Artificial
  probe
  misc_feature (1)..(25): SEQ ID NO: 120; WAN0249O7_at; Start 165; Stop 189
cacttaagtgtgaagtcgtacacca

SEQ ID NO: 28415 - DNA, 25 bp, Artificial
  probe
  misc_feature (1)..(25): SEQ ID NO: 120; WAN0249O7_at; Start 13; Stop 37
tgtattggtgccgaaacttcacggt

SEQ ID NO: 28416 - DNA, 25 bp, Artificial
  probe
  misc_feature (1)..(25): SEQ ID NO: 120; WAN0249O7_at; Start 98; Stop 122
tgtgagacggcctacatgctgttag

SEQ ID NO: 28417 - DNA, 25 bp, Artificial
  probe
  misc_feature (1)..(25): SEQ ID NO: 120; WAN0249O7_at; Start 92; Stop 116
tttccgtgtgagacggcctacatgc

SEQ ID NO: 28418 - DNA, 25 bp, Artificial
  probe
  misc_feature (1)..(25): SEQ ID NO: 120; WAN0249O7_at; Start 152; Stop 176
aatagtcggtcaacacttaagtgtg

SEQ ID NO: 28419 - DNA, 25 bp, Artificial
  probe
  misc_feature (1)..(25): SEQ ID NO: 120; WAN0249O7_at; Start 103; Stop 127
gacggcctacatgctgttagaagac

SEQ ID NO: 28420 - DNA, 25 bp, Artificial
  probe
  misc_feature (1)..(25): SEQ ID NO: 120; WAN0249O7_at; Start 4; Stop 28
gaaaaaagctgtattggtgccgaaa

SEQ ID NO: 28421 - DNA, 25 bp, Artificial
  probe
  misc_feature (1)..(25): SEQ ID NO: 120; WAN0249O7_at; Start 50; Stop 74
cgcgcaattaagcaggtgggcaact

SEQ ID NO: 28422 - DNA, 25 bp, Artificial
  probe
  misc_feature (1)..(25): SEQ ID NO: 120; WAN0249O7_at; Start 68; Stop 92
ggcaactcgctctaactgaagctgt

SEQ ID NO: 28423 - DNA, 25 bp, Artificial
  probe
  misc_feature (1)..(25): SEQ ID NO: 120; WAN0249O7_at; Start 35; Stop 59
ggtttgtattgaacccgcgcaatta

SEQ ID NO: 28424 - DNA, 25 bp, Artificial
  probe
  misc_feature (1)..(25): SEQ ID NO: 120; WAN0249O7_at; Start 108; Stop 132
cctacatgctgttagaagacttttg

SEQ ID NO: 28425 - DNA, 25 bp, Artificial
  probe
  misc_feature (1)..(25): SEQ ID NO: 120; WAN0249O7_at; Start 46; Stop 70
aacccgcgcaattaagcaggtgggc

SEQ ID NO: 28426 - DNA, 25 bp, Artificial
  probe
  misc_feature (1)..(25): SEQ ID NO: 120; WAN0249O7_at; Start 101; Stop 125
gagacggcctacatgctgttagaag

SEQ ID NO: 28427 - DNA, 25 bp, Artificial
  probe
  misc_feature (1)..(25): SEQ ID NO: 120; WAN0249O7_at; Start 114; Stop 138
tgctgttagaagacttttgtttccc

SEQ ID NO: 28428 - DNA, 25 bp, Artificial
  probe
  misc_feature (1)..(25): SEQ ID NO: 120; WAN0249O7_at; Start 75; Stop 99
cgctctaactgaagctgtttccgtg

SEQ ID NO: 28429 - DNA, 25 bp, Artificial
  probe
  misc_feature (1)..(25): SEQ ID NO: 120; WAN0249O7_at; Start 54; Stop 78
caattaagcaggtgggcaactcgct

SEQ ID NO: 28430 - DNA, 25 bp, Artificial
  probe
  misc_feature (1)..(25): SEQ ID NO: 120; WAN0249O7_at; Start 85; Stop 109
gaagctgtttccgtgtgagacggcc

SEQ ID NO: 28431 - DNA, 25 bp, Artificial
  probe
  misc_feature (1)..(25): SEQ ID NO: 120; WAN0249O7_at; Start 63; Stop 87
aggtgggcaactcgctctaactgaa

SEQ ID NO: 28432 - DNA, 25 bp, Artificial
  probe
  misc_feature (1)..(25): SEQ ID NO: 120; WAN0249O7_at; Start 88; Stop 112
gctgtttccgtgtgagacggcctac

SEQ ID NO: 28433 - DNA, 25 bp, Artificial
  probe
  misc_feature (1)..(25): SEQ ID NO: 120; WAN0249O7_at; Start 22; Stop 46
gccgaaacttcacggtttgtattga

SEQ ID NO: 28434 - DNA, 25 bp, Artificial
  probe
  misc_feature (1)..(25): SEQ ID NO: 120; WAN0249O7_at; Start 139; Stop 163
taataatacaaaaaatagtcggtca

SEQ ID NO: 28435 - DNA, 25 bp, Artificial
  probe
  misc_feature (1)..(25): SEQ ID NO: 120; WAN0249O7_at; Start 82; Stop 106
actgaagctgtttccgtgtgagacg

SEQ ID NO: 28436 - DNA, 25 bp, Artificial
  probe
  misc_feature (1)..(25): SEQ ID NO: 120; WAN0249O7_at; Start 18; Stop 42
tggtgccgaaacttcacggtttgta

SEQ ID NO: 28437 - DNA, 25 bp, Artificial
  probe
  misc_feature (1)..(25): SEQ ID NO: 120; WAN0249O7_at; Start 32; Stop 56
cacggtttgtattgaacccgcgcaa

SEQ ID NO: 28438 - DNA, 25 bp, Artificial
  probe
  misc_feature (1)..(25): SEQ ID NO: 120; WAN0249O7_at; Start 59; Stop 83
aagcaggtgggcaactcgctctaac

SEQ ID NO: 28439 - DNA, 25 bp, Artificial
  probe
  misc_feature (1)..(25): SEQ ID NO: 120; WAN0249O7_at; Start 169; Stop 193
taagtgtgaagtcgtacaccacagc

SEQ ID NO: 28440 - DNA, 25 bp, Artificial
  probe
  misc_feature (1)..(25): SEQ ID NO: 120; WAN0249O7_at; Start 1; Stop 25
aaagaaaaaagctgtattggtgccg

SEQ ID NO: 28441 - DNA, 25 bp, Artificial
  probe
  misc_feature (1)..(25): SEQ ID NO: 445; WAN0249O8_at; Start 17; Stop 41
gtggatttgagtagaatgactcatc

SEQ ID NO: 28442 - DNA, 25 bp, Artificial
  probe
  misc_feature (1)..(25): SEQ ID NO: 445; WAN0249O8_at; Start 2; Stop 26
gcagtcctttctaacgtggatttga

SEQ ID NO: 28443 - DNA, 25 bp, Artificial
  probe
  misc_feature (1)..(25): SEQ ID NO: 445; WAN0249O8_at; Start 3; Stop 27
cagtcctttctaacgtggatttgag

SEQ ID NO: 28444 - DNA, 25 bp, Artificial
  probe
  misc_feature (1)..(25): SEQ ID NO: 445; WAN0249O8_at; Start 7; Stop 31
cctttctaacgtggatttgagtaga

SEQ ID NO: 28445 - DNA, 25 bp, Artificial
  probe
  misc_feature (1)..(25): SEQ ID NO: 445; WAN0249O8_at; Start 4; Stop 28
agtcctttctaacgtggatttgagt

SEQ ID NO: 28446 - DNA, 25 bp, Artificial
  probe
  misc_feature (1)..(25): SEQ ID NO: 445; WAN0249O8_at; Start 43; Stop 67
actatatcttactatgtccattcta

SEQ ID NO: 28447 - DNA, 25 bp, Artificial
  probe
  misc_feature (1)..(25): SEQ ID NO: 445; WAN0249O8_at; Start 16; Stop 40
cgtggatttgagtagaatgactcat

SEQ ID NO: 28448 - DNA, 25 bp, Artificial
  probe
  misc_feature (1)..(25): SEQ ID NO: 445; WAN0249O8_at; Start 28; Stop 52
tagaatgactcatctactatatctt

SEQ ID NO: 28449 - DNA, 25 bp, Artificial
  probe
  misc_feature (1)..(25): SEQ ID NO: 445; WAN0249O8_at; Start 21; Stop 45
atttgagtagaatgactcatctact

SEQ ID NO: 28450 - DNA, 25 bp, Artificial
  probe
  misc_feature (1)..(25): SEQ ID NO: 445; WAN0249O8_at; Start 34; Stop 58
gactcatctactatatcttactatg

SEQ ID NO: 28451 - DNA, 25 bp, Artificial
  probe
  misc_feature (1)..(25): SEQ ID NO: 445; WAN0249O8_at; Start 33; Stop 57
tgactcatctactatatcttactat

SEQ ID NO: 28452 - DNA, 25 bp, Artificial
  probe
  misc_feature (1)..(25): SEQ ID NO: 445; WAN0249O8_at; Start 5; Stop 29
gtcctttctaacgtggatttgagta

SEQ ID NO: 28453 - DNA, 25 bp, Artificial
  probe
  misc_feature (1)..(25): SEQ ID NO: 445; WAN0249O8_at; Start 22; Stop 46
tttgagtagaatgactcatctacta

SEQ ID NO: 28454 - DNA, 25 bp, Artificial
  probe
  misc_feature (1)..(25): SEQ ID NO: 445; WAN0249O8_at; Start 18; Stop 42
tggatttgagtagaatgactcatct

SEQ ID NO: 28455 - DNA, 25 bp, Artificial
  probe
  misc_feature (1)..(25): SEQ ID NO: 445; WAN0249O8_at; Start 8; Stop 32
ctttctaacgtggatttgagtagaa

SEQ ID NO: 28456 - DNA, 25 bp, Artificial
  probe
  misc_feature (1)..(25): SEQ ID NO: 445; WAN0249O8_at; Start 38; Stop 62
catctactatatcttactatgtcca

SEQ ID NO: 28457 - DNA, 25 bp, Artificial
  probe
  misc_feature (1)..(25): SEQ ID NO: 445; WAN0249O8_at; Start 12; Stop 36
ctaacgtggatttgagtagaatgac

SEQ ID NO: 28458 - DNA, 25 bp, Artificial
  probe
  misc_feature (1)..(25): SEQ ID NO: 445; WAN0249O8_at; Start 40; Stop 64
tctactatatcttactatgtccatt

SEQ ID NO: 28459 - DNA, 25 bp, Artificial
  probe
  misc_feature (1)..(25): SEQ ID NO: 445; WAN0249O8_at; Start 6; Stop 30
tcctttctaacgtggatttgagtag

SEQ ID NO: 28460 - DNA, 25 bp, Artificial
  probe
  misc_feature (1)..(25): SEQ ID NO: 445; WAN0249O8_at; Start 24; Stop 48
tgagtagaatgactcatctactata

SEQ ID NO: 28461 - DNA, 25 bp, Artificial
  probe
  misc_feature (1)..(25): SEQ ID NO: 445; WAN0249O8_at; Start 1; Stop 25
agcagtcctttctaacgtggatttg

SEQ ID NO: 28462 - DNA, 25 bp, Artificial
  probe
  misc_feature (1)..(25): SEQ ID NO: 445; WAN0249O8_at; Start 20; Stop 44
gatttgagtagaatgactcatctac

SEQ ID NO: 28463 - DNA, 25 bp, Artificial
  probe
  misc_feature (1)..(25): SEQ ID NO: 445; WAN0249O8_at; Start 15; Stop 39
acgtggatttgagtagaatgactca

SEQ ID NO: 28464 - DNA, 25 bp, Artificial
  probe
  misc_feature (1)..(25): SEQ ID NO: 445; WAN0249O8_at; Start 31; Stop 55
aatgactcatctactatatcttact

SEQ ID NO: 28465 - DNA, 25 bp, Artificial
  probe
  misc_feature (1)..(25): SEQ ID NO: 445; WAN0249O8_at; Start 11; Stop 35
tctaacgtggatttgagtagaatga

SEQ ID NO: 28466 - DNA, 25 bp, Artificial
  probe
  misc_feature (1)..(25): SEQ ID NO: 445; WAN0249O8_at; Start 25; Stop 49
gagtagaatgactcatctactatat

SEQ ID NO: 28467 - DNA, 25 bp, Artificial
  probe
  misc_feature (1)..(25): SEQ ID NO: 445; WAN0249O8_at; Start 30; Stop 54
gaatgactcatctactatatcttac

SEQ ID NO: 28468 - DNA, 25 bp, Artificial
  probe
  misc_feature (1)..(25): SEQ ID NO: 445; WAN0249O8_at; Start 42; Stop 66
tactatatcttactatgtccattct

SEQ ID NO: 28469 - DNA, 25 bp, Artificial
  probe
  misc_feature (1)..(25): SEQ ID NO: 445; WAN0249O8_at; Start 19; Stop 43
ggatttgagtagaatgactcatcta

SEQ ID NO: 28470 - DNA, 25 bp, Artificial
  probe
  misc_feature (1)..(25): SEQ ID NO: 445; WAN0249O8_at; Start 9; Stop 33
tttctaacgtggatttgagtagaat

SEQ ID NO: 28471 - DNA, 25 bp, Artificial
  probe
  misc_feature (1)..(25): SEQ ID NO: 445; WAN0249O8_at; Start 14; Stop 38
aacgtggatttgagtagaatgactc

SEQ ID NO: 28472 - DNA, 25 bp, Artificial
  probe
  misc_feature (1)..(25): SEQ ID NO: 445; WAN0249O8_at; Start 27; Stop 51
gtagaatgactcatctactatatct

SEQ ID NO: 28473 - DNA, 25 bp, Artificial
  probe
  misc_feature (1)..(25): SEQ ID NO: 445; WAN0249O8_at; Start 13; Stop 37
taacgtggatttgagtagaatgact

SEQ ID NO: 28474 - DNA, 25 bp, Artificial
  probe
  misc_feature (1)..(25): SEQ ID NO: 445; WAN0249O8_at; Start 37; Stop 61
tcatctactatatcttactatgtcc

SEQ ID NO: 28475 - DNA, 25 bp, Artificial
  probe
  misc_feature (1)..(25): SEQ ID NO: 4489; WAN0249O9_at; Start 17; Stop 41
agatatagtagatgagtcattctac

SEQ ID NO: 28476 - DNA, 25 bp, Artificial
  probe
  misc_feature (1)..(25): SEQ ID NO: 4489; WAN0249O9_at; Start 14; Stop 38
gtaagatatagtagatgagtcattc

SEQ ID NO: 28477 - DNA, 25 bp, Artificial
  probe
  misc_feature (1)..(25): SEQ ID NO: 4489; WAN0249O9_at; Start 7; Stop 31
ggacatagtaagatatagtagatga

SEQ ID NO: 28478 - DNA, 25 bp, Artificial
  probe
  misc_feature (1)..(25): SEQ ID NO: 4489; WAN0249O9_at; Start 36; Stop 60
ttctactcaaatccacgttagaaag

SEQ ID NO: 28479 - DNA, 25 bp, Artificial
  probe
  misc_feature (1)..(25): SEQ ID NO: 4489; WAN0249O9_at; Start 1; Stop 25
tagaatggacatagtaagatatagt

SEQ ID NO: 28480 - DNA, 25 bp, Artificial
  probe
  misc_feature (1)..(25): SEQ ID NO: 4489; WAN0249O9_at; Start 30; Stop 54
gagtcattctactcaaatccacgtt

SEQ ID NO: 28481 - DNA, 25 bp, Artificial
  probe
  misc_feature (1)..(25): SEQ ID NO: 4489; WAN0249O9_at; Start 33; Stop 57
tcattctactcaaatccacgttaga

SEQ ID NO: 28482 - DNA, 25 bp, Artificial
  probe
  misc_feature (1)..(25): SEQ ID NO: 4489; WAN0249O9_at; Start 41; Stop 65
ctcaaatccacgttagaaaggactg

SEQ ID NO: 28483 - DNA, 25 bp, Artificial
  probe
  misc_feature (1)..(25): SEQ ID NO: 4489; WAN0249O9_at; Start 34; Stop 58
cattctactcaaatccacgttagaa

SEQ ID NO: 28484 - DNA, 25 bp, Artificial
  probe
  misc_feature (1)..(25): SEQ ID NO: 4489; WAN0249O9_at; Start 20; Stop 44
tatagtagatgagtcattctactca

SEQ ID NO: 28485 - DNA, 25 bp, Artificial
  probe
  misc_feature (1)..(25): SEQ ID NO: 4489; WAN0249O9_at; Start 8; Stop 32
gacatagtaagatatagtagatgag

SEQ ID NO: 28486 - DNA, 25 bp, Artificial
  probe
  misc_feature (1)..(25): SEQ ID NO: 4489; WAN0249O9_at; Start 28; Stop 52
atgagtcattctactcaaatccacg

SEQ ID NO: 28487 - DNA, 25 bp, Artificial
  probe
  misc_feature (1)..(25): SEQ ID NO: 4489; WAN0249O9_at; Start 27; Stop 51
gatgagtcattctactcaaatccac

SEQ ID NO: 28488 - DNA, 25 bp, Artificial
  probe
  misc_feature (1)..(25): SEQ ID NO: 4489; WAN0249O9_at; Start 31; Stop 55
agtcattctactcaaatccacgtta

SEQ ID NO: 28489 - DNA, 25 bp, Artificial
  probe
  misc_feature (1)..(25): SEQ ID NO: 4489; WAN0249O9_at; Start 25; Stop 49
tagatgagtcattctactcaaatcc

SEQ ID NO: 28490 - DNA, 25 bp, Artificial
  probe
  misc_feature (1)..(25): SEQ ID NO: 4489; WAN0249O9_at; Start 26; Stop 50
agatgagtcattctactcaaatcca

SEQ ID NO: 28491 - DNA, 25 bp, Artificial
  probe
  misc_feature (1)..(25): SEQ ID NO: 4489; WAN0249O9_at; Start 32; Stop 56
gtcattctactcaaatccacgttag

SEQ ID NO: 28492 - DNA, 25 bp, Artificial
  probe
  misc_feature (1)..(25): SEQ ID NO: 4489; WAN0249O9_at; Start 24; Stop 48
gtagatgagtcattctactcaaatc

SEQ ID NO: 28493 - DNA, 25 bp, Artificial
  probe
  misc_feature (1)..(25): SEQ ID NO: 4489; WAN0249O9_at; Start 22; Stop 46
tagtagatgagtcattctactcaaa

SEQ ID NO: 28494 - DNA, 25 bp, Artificial
  probe
  misc_feature (1)..(25): SEQ ID NO: 4489; WAN0249O9_at; Start 6; Stop 30
tggacatagtaagatatagtagatg

SEQ ID NO: 28495 - DNA, 25 bp, Artificial
  probe
  misc_feature (1)..(25): SEQ ID NO: 4489; WAN0249O9_at; Start 37; Stop 61
tctactcaaatccacgttagaaagg

SEQ ID NO: 28496 - DNA, 25 bp, Artificial
  probe
  misc_feature (1)..(25): SEQ ID NO: 4489; WAN0249O9_at; Start 16; Stop 40
aagatatagtagatgagtcattcta

SEQ ID NO: 28497 - DNA, 25 bp, Artificial
  probe
  misc_feature (1)..(25): SEQ ID NO: 4489; WAN0249O9_at; Start 29; Stop 53
tgagtcattctactcaaatccacgt

SEQ ID NO: 28498 - DNA, 25 bp, Artificial
  probe
  misc_feature (1)..(25): SEQ ID NO: 4489; WAN0249O9_at; Start 15; Stop 39
taagatatagtagatgagtcattct

SEQ ID NO: 28499 - DNA, 25 bp, Artificial
  probe
  misc_feature (1)..(25): SEQ ID NO: 4489; WAN0249O9_at; Start 10; Stop 34
catagtaagatatagtagatgagtc

SEQ ID NO: 28500 - DNA, 25 bp, Artificial
  probe
  misc_feature (1)..(25): SEQ ID NO: 4489; WAN0249O9_at; Start 39; Stop 63
tactcaaatccacgttagaaaggac

SEQ ID NO: 28501 - DNA, 25 bp, Artificial
  probe
  misc_feature (1)..(25): SEQ ID NO: 4489; WAN0249O9_at; Start 40; Stop 64
actcaaatccacgttagaaaggact

SEQ ID NO: 28502 - DNA, 25 bp, Artificial
  probe
  misc_feature (1)..(25): SEQ ID NO: 4489; WAN0249O9_at; Start 43; Stop 67
caaatccacgttagaaaggactgct

SEQ ID NO: 28503 - DNA, 25 bp, Artificial
  probe
  misc_feature (1)..(25): SEQ ID NO: 4489; WAN0249O9_at; Start 4; Stop 28
aatggacatagtaagatatagtaga

SEQ ID NO: 28504 - DNA, 25 bp, Artificial
  probe
  misc_feature (1)..(25): SEQ ID NO: 4489; WAN0249O9_at; Start 12; Stop 36
tagtaagatatagtagatgagtcat

SEQ ID NO: 28505 - DNA, 25 bp, Artificial
  probe
  misc_feature (1)..(25): SEQ ID NO: 4489; WAN0249O9_at; Start 42; Stop 66
tcaaatccacgttagaaaggactgc

SEQ ID NO: 28506 - DNA, 25 bp, Artificial
  probe
  misc_feature (1)..(25): SEQ ID NO: 4489; WAN0249O9_at; Start 18; Stop 42
gatatagtagatgagtcattctact

SEQ ID NO: 28507 - DNA, 25 bp, Artificial
  probe
  misc_feature (1)..(25): SEQ ID NO: 4489; WAN0249O9_at; Start 3; Stop 27
gaatggacatagtaagatatagtag

SEQ ID NO: 28508 - DNA, 25 bp, Artificial
  probe
  misc_feature (1)..(25): SEQ ID NO: 4489; WAN0249O9_at; Start 38; Stop 62
ctactcaaatccacgttagaaagga

SEQ ID NO: 28509 - DNA, 25 bp, Artificial
  probe
  misc_feature (1)..(25): SEQ ID NO: 4781; WAN0249OA_at; Start 26; Stop 50
ggcttcccttagaaccacatctagg

SEQ ID NO: 28510 - DNA, 25 bp, Artificial
  probe
  misc_feature (1)..(25): SEQ ID NO: 4781; WAN0249OA_at; Start 73; Stop 97
ataagtatcactcctttacaatacg

SEQ ID NO: 28511 - DNA, 25 bp, Artificial
  probe
  misc_feature (1)..(25): SEQ ID NO: 4781; WAN0249OA_at; Start 85; Stop 109
cctttacaatacgtgtaacacgtgt

SEQ ID NO: 28512 - DNA, 25 bp, Artificial
  probe
  misc_feature (1)..(25): SEQ ID NO: 4781; WAN0249OA_at; Start 22; Stop 46
aattggcttcccttagaaccacatc

SEQ ID NO: 28513 - DNA, 25 bp, Artificial
  probe
  misc_feature (1)..(25): SEQ ID NO: 4781; WAN0249OA_at; Start 66; Stop 90
tagaataataagtatcactccttta

SEQ ID NO: 28514 - DNA, 25 bp, Artificial
  probe
  misc_feature (1)..(25): SEQ ID NO: 4781; WAN0249OA_at; Start 9; Stop 33
ataggtatgaataaattggcttccc

SEQ ID NO: 28515 - DNA, 25 bp, Artificial
  probe
  misc_feature (1)..(25): SEQ ID NO: 4781; WAN0249OA_at; Start 12; Stop 36
ggtatgaataaattggcttccctta

SEQ ID NO: 28516 - DNA, 25 bp, Artificial
  probe
  misc_feature (1)..(25): SEQ ID NO: 4781; WAN0249OA_at; Start 82; Stop 106
actcctttacaatacgtgtaacacg

SEQ ID NO: 28517 - DNA, 25 bp, Artificial
  probe
  misc_feature (1)..(25): SEQ ID NO: 4781; WAN0249OA_at; Start 32; Stop 56
ccttagaaccacatctaggggcttt

SEQ ID NO: 28518 - DNA, 25 bp, Artificial
  probe
  misc_feature (1)..(25): SEQ ID NO: 4781; WAN0249OA_at; Start 87; Stop 111
tttacaatacgtgtaacacgtgtta

SEQ ID NO: 28519 - DNA, 25 bp, Artificial
  probe
  misc_feature (1)..(25): SEQ ID NO: 4781; WAN0249OA_at; Start 84; Stop 108
tcctttacaatacgtgtaacacgtg

SEQ ID NO: 28520 - DNA, 25 bp, Artificial
  probe
  misc_feature (1)..(25): SEQ ID NO: 4781; WAN0249OA_at; Start 8; Stop 32
aataggtatgaataaattggcttcc

SEQ ID NO: 28521 - DNA, 25 bp, Artificial
  probe
  misc_feature (1)..(25): SEQ ID NO: 4781; WAN0249OA_at; Start 10; Stop 34
taggtatgaataaattggcttccct

SEQ ID NO: 28522 - DNA, 25 bp, Artificial
  probe
  misc_feature (1)..(25): SEQ ID NO: 4781; WAN0249OA_at; Start 25; Stop 49
tggcttcccttagaaccacatctag

SEQ ID NO: 28523 - DNA, 25 bp, Artificial
  probe
  misc_feature (1)..(25): SEQ ID NO: 4781; WAN0249OA_at; Start 43; Stop 67
catctaggggcttttatgtataata

SEQ ID NO: 28524 - DNA, 25 bp, Artificial
  probe
  misc_feature (1)..(25): SEQ ID NO: 4781; WAN0249OA_at; Start 13; Stop 37
gtatgaataaattggcttcccttag

SEQ ID NO: 28525 - DNA, 25 bp, Artificial
  probe
  misc_feature (1)..(25): SEQ ID NO: 4781; WAN0249OA_at; Start 24; Stop 48
ttggcttcccttagaaccacatcta

SEQ ID NO: 28526 - DNA, 25 bp, Artificial
  probe
  misc_feature (1)..(25): SEQ ID NO: 4781; WAN0249OA_at; Start 75; Stop 99
aagtatcactcctttacaatacgtg

SEQ ID NO: 28527 - DNA, 25 bp, Artificial
  probe
  misc_feature (1)..(25): SEQ ID NO: 4781; WAN0249OA_at; Start 27; Stop 51
gcttcccttagaaccacatctaggg

SEQ ID NO: 28528 - DNA, 25 bp, Artificial
  probe
  misc_feature (1)..(25): SEQ ID NO: 4781; WAN0249OA_at; Start 63; Stop 87
taatagaataataagtatcactcct

SEQ ID NO: 28529 - DNA, 25 bp, Artificial
  probe
  misc_feature (1)..(25): SEQ ID NO: 4781; WAN0249OA_at; Start 80; Stop 104
tcactcctttacaatacgtgtaaca

SEQ ID NO: 28530 - DNA, 25 bp, Artificial
  probe
  misc_feature (1)..(25): SEQ ID NO: 4781; WAN0249OA_at; Start 76; Stop 100
agtatcactcctttacaatacgtgt

SEQ ID NO: 28531 - DNA, 25 bp, Artificial
  probe
  misc_feature (1)..(25): SEQ ID NO: 4781; WAN0249OA_at; Start 77; Stop 101
gtatcactcctttacaatacgtgta

SEQ ID NO: 28532 - DNA, 25 bp, Artificial
  probe
  misc_feature (1)..(25): SEQ ID NO: 4781; WAN0249OA_at; Start 74; Stop 98
taagtatcactcctttacaatacgt

SEQ ID NO: 28533 - DNA, 25 bp, Artificial
  probe
  misc_feature (1)..(25): SEQ ID NO: 4781; WAN0249OA_at; Start 37; Stop 61
gaaccacatctaggggcttttatgt

SEQ ID NO: 28534 - DNA, 25 bp, Artificial
  probe
  misc_feature (1)..(25): SEQ ID NO: 4781; WAN0249OA_at; Start 68; Stop 92
gaataataagtatcactcctttaca

SEQ ID NO: 28535 - DNA, 25 bp, Artificial
  probe
  misc_feature (1)..(25): SEQ ID NO: 4781; WAN0249OA_at; Start 81; Stop 105
cactcctttacaatacgtgtaacac

SEQ ID NO: 28536 - DNA, 25 bp, Artificial
  probe
  misc_feature (1)..(25): SEQ ID NO: 4781; WAN0249OA_at; Start 16; Stop 40
tgaataaattggcttcccttagaac

SEQ ID NO: 28537 - DNA, 25 bp, Artificial
  probe
  misc_feature (1)..(25): SEQ ID NO: 4781; WAN0249OA_at; Start 4; Stop 28
gaaaaataggtatgaataaattggc

SEQ ID NO: 28538 - DNA, 25 bp, Artificial
  probe
  misc_feature (1)..(25): SEQ ID NO: 4781; WAN0249OA_at; Start 78; Stop 102
tatcactcctttacaatacgtgtaa

SEQ ID NO: 28539 - DNA, 25 bp, Artificial
  probe
  misc_feature (1)..(25): SEQ ID NO: 4781; WAN0249OA_at; Start 89; Stop 113
tacaatacgtgtaacacgtgttata

SEQ ID NO: 28540 - DNA, 25 bp, Artificial
  probe
  misc_feature (1)..(25): SEQ ID NO: 4781; WAN0249OA_at; Start 50; Stop 74
gggcttttatgtataatagaataat

SEQ ID NO: 28541 - DNA, 25 bp, Artificial
  probe
  misc_feature (1)..(25): SEQ ID NO: 4781; WAN0249OA_at; Start 21; Stop 45
aaattggcttcccttagaaccacat

SEQ ID NO: 28542 - DNA, 25 bp, Artificial
  probe
  misc_feature (1)..(25): SEQ ID NO: 4781; WAN0249OA_at; Start 14; Stop 38
tatgaataaattggcttcccttaga

SEQ ID NO: 28543 - DNA, 25 bp, Artificial
  probe
  misc_feature (1)..(25): SEQ ID NO: 4540; WAN0249OB_at; Start 6; Stop 30
cacgtgttacacgtattgtaaagga

SEQ ID NO: 28544 - DNA, 25 bp, Artificial
  probe
  misc_feature (1)..(25): SEQ ID NO: 4540; WAN0249OB_at; Start 86; Stop 110
gccaatttattcatacctatttttc

SEQ ID NO: 28545 - DNA, 25 bp, Artificial
  probe
  misc_feature (1)..(25): SEQ ID NO: 4540; WAN0249OB_at; Start 62; Stop 86
cccctagatgtggttctaagggaag

SEQ ID NO: 28546 - DNA, 25 bp, Artificial
  probe
  misc_feature (1)..(25): SEQ ID NO: 4540; WAN0249OB_at; Start 15; Stop 39
cacgtattgtaaaggagtgatactt

SEQ ID NO: 28547 - DNA, 25 bp, Artificial
  probe
  misc_feature (1)..(25): SEQ ID NO: 4540; WAN0249OB_at; Start 83; Stop 107
gaagccaatttattcatacctattt

SEQ ID NO: 28548 - DNA, 25 bp, Artificial
  probe
  misc_feature (1)..(25): SEQ ID NO: 4540; WAN0249OB_at; Start 66; Stop 90
tagatgtggttctaagggaagccaa

SEQ ID NO: 28549 - DNA, 25 bp, Artificial
  probe
  misc_feature (1)..(25): SEQ ID NO: 4540; WAN0249OB_at; Start 59; Stop 83
aagcccctagatgtggttctaaggg

SEQ ID NO: 28550 - DNA, 25 bp, Artificial
  probe
  misc_feature (1)..(25): SEQ ID NO: 4540; WAN0249OB_at; Start 8; Stop 32
cgtgttacacgtattgtaaaggagt

SEQ ID NO: 28551 - DNA, 25 bp, Artificial
  probe
  misc_feature (1)..(25): SEQ ID NO: 4540; WAN0249OB_at; Start 17; Stop 41
cgtattgtaaaggagtgatacttat

SEQ ID NO: 28552 - DNA, 25 bp, Artificial
  probe
  misc_feature (1)..(25): SEQ ID NO: 4540; WAN0249OB_at; Start 63; Stop 87
ccctagatgtggttctaagggaagc

SEQ ID NO: 28553 - DNA, 25 bp, Artificial
  probe
  misc_feature (1)..(25): SEQ ID NO: 4540; WAN0249OB_at; Start 47; Stop 71
tattatacataaaagcccctagatg

SEQ ID NO: 28554 - DNA, 25 bp, Artificial
  probe
  misc_feature (1)..(25): SEQ ID NO: 4540; WAN0249OB_at; Start 74; Stop 98
gttctaagggaagccaatttattca

SEQ ID NO: 28555 - DNA, 25 bp, Artificial
  probe
  misc_feature (1)..(25): SEQ ID NO: 4540; WAN0249OB_at; Start 81; Stop 105
gggaagccaatttattcatacctat

SEQ ID NO: 28556 - DNA, 25 bp, Artificial
  probe
  misc_feature (1)..(25): SEQ ID NO: 4540; WAN0249OB_at; Start 79; Stop 103
aagggaagccaatttattcatacct

SEQ ID NO: 28557 - DNA, 25 bp, Artificial
  probe
  misc_feature (1)..(25): SEQ ID NO: 4540; WAN0249OB_at; Start 13; Stop 37
tacacgtattgtaaaggagtgatac

SEQ ID NO: 28558 - DNA, 25 bp, Artificial
  probe
  misc_feature (1)..(25): SEQ ID NO: 4540; WAN0249OB_at; Start 44; Stop 68
ttctattatacataaaagcccctag

SEQ ID NO: 28559 - DNA, 25 bp, Artificial
  probe
  misc_feature (1)..(25): SEQ ID NO: 4540; WAN0249OB_at; Start 56; Stop 80
taaaagcccctagatgtggttctaa

SEQ ID NO: 28560 - DNA, 25 bp, Artificial
  probe
  misc_feature (1)..(25): SEQ ID NO: 4540; WAN0249OB_at; Start 28; Stop 52
ggagtgatacttattattctattat

SEQ ID NO: 28561 - DNA, 25 bp, Artificial
  probe
  misc_feature (1)..(25): SEQ ID NO: 4540; WAN0249OB_at; Start 58; Stop 82
aaagcccctagatgtggttctaagg

SEQ ID NO: 28562 - DNA, 25 bp, Artificial
  probe
  misc_feature (1)..(25): SEQ ID NO: 4540; WAN0249OB_at; Start 53; Stop 77
acataaaagcccctagatgtggttc

SEQ ID NO: 28563 - DNA, 25 bp, Artificial
  probe
  misc_feature (1)..(25): SEQ ID NO: 4540; WAN0249OB_at; Start 60; Stop 84
agcccctagatgtggttctaaggga

SEQ ID NO: 28564 - DNA, 25 bp, Artificial
  probe
  misc_feature (1)..(25): SEQ ID NO: 4540; WAN0249OB_at; Start 42; Stop 66
tattctattatacataaaagcccct

SEQ ID NO: 28565 - DNA, 25 bp, Artificial
  probe
  misc_feature (1)..(25): SEQ ID NO: 4540; WAN0249OB_at; Start 61; Stop 85
gcccctagatgtggttctaagggaa

SEQ ID NO: 28566 - DNA, 25 bp, Artificial
  probe
  misc_feature (1)..(25): SEQ ID NO: 4540; WAN0249OB_at; Start 1; Stop 25
tataacacgtgttacacgtattgta

SEQ ID NO: 28567 - DNA, 25 bp, Artificial
  probe
  misc_feature (1)..(25): SEQ ID NO: 4540; WAN0249OB_at; Start 24; Stop 48
taaaggagtgatacttattattcta

SEQ ID NO: 28568 - DNA, 25 bp, Artificial
  probe
  misc_feature (1)..(25): SEQ ID NO: 4540; WAN0249OB_at; Start 65; Stop 89
ctagatgtggttctaagggaagcca

SEQ ID NO: 28569 - DNA, 25 bp, Artificial
  probe
  misc_feature (1)..(25): SEQ ID NO: 4540; WAN0249OB_at; Start 10; Stop 34
tgttacacgtattgtaaaggagtga

SEQ ID NO: 28570 - DNA, 25 bp, Artificial
  probe
  misc_feature (1)..(25): SEQ ID NO: 4540; WAN0249OB_at; Start 22; Stop 46
tgtaaaggagtgatacttattattc

SEQ ID NO: 28571 - DNA, 25 bp, Artificial
  probe
  misc_feature (1)..(25): SEQ ID NO: 4540; WAN0249OB_at; Start 64; Stop 88
cctagatgtggttctaagggaagcc

SEQ ID NO: 28572 - DNA, 25 bp, Artificial
  probe
  misc_feature (1)..(25): SEQ ID NO: 4540; WAN0249OB_at; Start 54; Stop 78
cataaaagcccctagatgtggttct

SEQ ID NO: 28573 - DNA, 25 bp, Artificial
  probe
  misc_feature (1)..(25): SEQ ID NO: 4540; WAN0249OB_at; Start 68; Stop 92
gatgtggttctaagggaagccaatt

SEQ ID NO: 28574 - DNA, 25 bp, Artificial
  probe
  misc_feature (1)..(25): SEQ ID NO: 4540; WAN0249OB_at; Start 57; Stop 81
aaaagcccctagatgtggttctaag

SEQ ID NO: 28575 - DNA, 25 bp, Artificial
  probe
  misc_feature (1)..(25): SEQ ID NO: 4540; WAN0249OB_at; Start 76; Stop 100
tctaagggaagccaatttattcata

SEQ ID NO: 28576 - DNA, 25 bp, Artificial
  probe
  misc_feature (1)..(25): SEQ ID NO: 4540; WAN0249OB_at; Start 78; Stop 102
taagggaagccaatttattcatacc

SEQ ID NO: 28577 - DNA, 25 bp, Artificial
  probe
  misc_feature (1)..(25): SEQ ID NO: 3646; WAN0249OC_at; Start 26; Stop 50
gtcaataaaaaagcacgtccacttg

SEQ ID NO: 28578 - DNA, 25 bp, Artificial
  probe
  misc_feature (1)..(25): SEQ ID NO: 3646; WAN0249OC_at; Start 241; Stop 265
tatttccgagcaatcggggcgatta

SEQ ID NO: 28579 - DNA, 25 bp, Artificial
  probe
  misc_feature (1)..(25): SEQ ID NO: 3646; WAN0249OC_at; Start 161; Stop 185
ccaagggtttaaatgaggtaatatg

SEQ ID NO: 28580 - DNA, 25 bp, Artificial
  probe
  misc_feature (1)..(25): SEQ ID NO: 3646; WAN0249OC_at; Start 32; Stop 56
aaaaaagcacgtccacttgtgctag

SEQ ID NO: 28581 - DNA, 25 bp, Artificial
  probe
  misc_feature (1)..(25): SEQ ID NO: 3646; WAN0249OC_at; Start 8; Stop 32
cgtggtatcgtggtaatagtcaata

SEQ ID NO: 28582 - DNA, 25 bp, Artificial
  probe
  misc_feature (1)..(25): SEQ ID NO: 3646; WAN0249OC_at; Start 229; Stop 253
tctattttagcatatttccgagcaa

SEQ ID NO: 28583 - DNA, 25 bp, Artificial
  probe
  misc_feature (1)..(25): SEQ ID NO: 3646; WAN0249OC_at; Start 234; Stop 258
tttagcatatttccgagcaatcggg

SEQ ID NO: 28584 - DNA, 25 bp, Artificial
  probe
  misc_feature (1)..(25): SEQ ID NO: 3646; WAN0249OC_at; Start 266; Stop 290
aagagtcgcatagaaagaggacaaa

SEQ ID NO: 28585 - DNA, 25 bp, Artificial
  probe
  misc_feature (1)..(25): SEQ ID NO: 3646; WAN0249OC_at; Start 216; Stop 240
taagatggtagtatctattttagca

SEQ ID NO: 28586 - DNA, 25 bp, Artificial
  probe
  misc_feature (1)..(25): SEQ ID NO: 3646; WAN0249OC_at; Start 15; Stop 39
tcgtggtaatagtcaataaaaaagc

SEQ ID NO: 28587 - DNA, 25 bp, Artificial
  probe
  misc_feature (1)..(25): SEQ ID NO: 3646; WAN0249OC_at; Start 227; Stop 251
tatctattttagcatatttccgagc

SEQ ID NO: 28588 - DNA, 25 bp, Artificial
  probe
  misc_feature (1)..(25): SEQ ID NO: 3646; WAN0249OC_at; Start 233; Stop 257
ttttagcatatttccgagcaatcgg

SEQ ID NO: 28589 - DNA, 25 bp, Artificial
  probe
  misc_feature (1)..(25): SEQ ID NO: 3646; WAN0249OC_at; Start 257; Stop 281
gggcgattaaagagtcgcatagaaa

SEQ ID NO: 28590 - DNA, 25 bp, Artificial
  probe
  misc_feature (1)..(25): SEQ ID NO: 3646; WAN0249OC_at; Start 123; Stop 147
gaaatgaagaaatcagacttttaag

SEQ ID NO: 28591 - DNA, 25 bp, Artificial
  probe
  misc_feature (1)..(25): SEQ ID NO: 3646; WAN0249OC_at; Start 175; Stop 199
gaggtaatatggtataattaggaca

SEQ ID NO: 28592 - DNA, 25 bp, Artificial
  probe
  misc_feature (1)..(25): SEQ ID NO: 3646; WAN0249OC_at; Start 6; Stop 30
agcgtggtatcgtggtaatagtcaa

SEQ ID NO: 28593 - DNA, 25 bp, Artificial
  probe
  misc_feature (1)..(25): SEQ ID NO: 3646; WAN0249OC_at; Start 49; Stop 73
tgtgctagttactcgcctattgatt

SEQ ID NO: 28594 - DNA, 25 bp, Artificial
  probe
  misc_feature (1)..(25): SEQ ID NO: 3646; WAN0249OC_at; Start 42; Stop 66
gtccacttgtgctagttactcgcct

SEQ ID NO: 28595 - DNA, 25 bp, Artificial
  probe
  misc_feature (1)..(25): SEQ ID NO: 3646; WAN0249OC_at; Start 4; Stop 28
taagcgtggtatcgtggtaatagtc

SEQ ID NO: 28596 - DNA, 25 bp, Artificial
  probe
  misc_feature (1)..(25): SEQ ID NO: 3646; WAN0249OC_at; Start 24; Stop 48
tagtcaataaaaaagcacgtccact

SEQ ID NO: 28597 - DNA, 25 bp, Artificial
  probe
  misc_feature (1)..(25): SEQ ID NO: 3646; WAN0249OC_at; Start 28; Stop 52
caataaaaaagcacgtccacttgtg

SEQ ID NO: 28598 - DNA, 25 bp, Artificial
  probe
  misc_feature (1)..(25): SEQ ID NO: 3646; WAN0249OC_at; Start 191; Stop 215
attaggacataaaataattttgtgg

SEQ ID NO: 28599 - DNA, 25 bp, Artificial
  probe
  misc_feature (1)..(25): SEQ ID NO: 3646; WAN0249OC_at; Start 56; Stop 80
gttactcgcctattgattttataga

SEQ ID NO: 28600 - DNA, 25 bp, Artificial
  probe
  misc_feature (1)..(25): SEQ ID NO: 3646; WAN0249OC_at; Start 263; Stop 287
ttaaagagtcgcatagaaagaggac

SEQ ID NO: 28601 - DNA, 25 bp, Artificial
  probe
  misc_feature (1)..(25): SEQ ID NO: 3646; WAN0249OC_at; Start 206; Stop 230
aattttgtggtaagatggtagtatc

SEQ ID NO: 28602 - DNA, 25 bp, Artificial
  probe
  misc_feature (1)..(25): SEQ ID NO: 3646; WAN0249OC_at; Start 69; Stop 93
tgattttatagatttattagccctt

SEQ ID NO: 28603 - DNA, 25 bp, Artificial
  probe
  misc_feature (1)..(25): SEQ ID NO: 3646; WAN0249OC_at; Start 21; Stop 45
taatagtcaataaaaaagcacgtcc

SEQ ID NO: 28604 - DNA, 25 bp, Artificial
  probe
  misc_feature (1)..(25): SEQ ID NO: 3646; WAN0249OC_at; Start 116; Stop 140
tttatgagaaatgaagaaatcagac

SEQ ID NO: 28605 - DNA, 25 bp, Artificial
  probe
  misc_feature (1)..(25): SEQ ID NO: 3646; WAN0249OC_at; Start 18; Stop 42
tggtaatagtcaataaaaaagcacg

SEQ ID NO: 28606 - DNA, 25 bp, Artificial
  probe
  misc_feature (1)..(25): SEQ ID NO: 3646; WAN0249OC_at; Start 45; Stop 69
cacttgtgctagttactcgcctatt

SEQ ID NO: 28607 - DNA, 25 bp, Artificial
  probe
  misc_feature (1)..(25): SEQ ID NO: 3646; WAN0249OC_at; Start 156; Stop 180
tgataccaagggtttaaatgaggta

SEQ ID NO: 28608 - DNA, 25 bp, Artificial
  probe
  misc_feature (1)..(25): SEQ ID NO: 3646; WAN0249OC_at; Start 39; Stop 63
cacgtccacttgtgctagttactcg

SEQ ID NO: 28609 - DNA, 25 bp, Artificial
  probe
  misc_feature (1)..(25): SEQ ID NO: 3646; WAN0249OC_at; Start 130; Stop 154
agaaatcagacttttaagaaaatca

SEQ ID NO: 28610 - DNA, 25 bp, Artificial
  probe
  misc_feature (1)..(25): SEQ ID NO: 3646; WAN0249OC_at; Start 260; Stop 284
cgattaaagagtcgcatagaaagag

SEQ ID NO: 28611 - DNA, 25 bp, Artificial
  probe
  misc_feature (1)..(25): SEQ ID NO: 5922; WAN0249OD_at; Start 207; Stop 231
taaatctataaaatcaataggcgag

SEQ ID NO: 28612 - DNA, 25 bp, Artificial
  probe
  misc_feature (1)..(25): SEQ ID NO: 5922; WAN0249OD_at; Start 4; Stop 28
gtcctctttctatgcgactctttaa

SEQ ID NO: 28613 - DNA, 25 bp, Artificial
  probe
  misc_feature (1)..(25): SEQ ID NO: 5922; WAN0249OD_at; Start 29; Stop 53
tcgccccgattgctcggaaatatgc

SEQ ID NO: 28614 - DNA, 25 bp, Artificial
  probe
  misc_feature (1)..(25): SEQ ID NO: 5922; WAN0249OD_at; Start 26; Stop 50
taatcgccccgattgctcggaaata

SEQ ID NO: 28615 - DNA, 25 bp, Artificial
  probe
  misc_feature (1)..(25): SEQ ID NO: 5922; WAN0249OD_at; Start 42; Stop 66
tcggaaatatgctaaaatagatact

SEQ ID NO: 28616 - DNA, 25 bp, Artificial
  probe
  misc_feature (1)..(25): SEQ ID NO: 5922; WAN0249OD_at; Start 266; Stop 290
tattaccacgataccacgcttaatc

SEQ ID NO: 28617 - DNA, 25 bp, Artificial
  probe
  misc_feature (1)..(25): SEQ ID NO: 5922; WAN0249OD_at; Start 198; Stop 222
aagggctaataaatctataaaatca

SEQ ID NO: 28618 - DNA, 25 bp, Artificial
  probe
  misc_feature (1)..(25): SEQ ID NO: 5922; WAN0249OD_at; Start 111; Stop 135
tacctcatttaaacccttggtatca

SEQ ID NO: 28619 - DNA, 25 bp, Artificial
  probe
  misc_feature (1)..(25): SEQ ID NO: 5922; WAN0249OD_at; Start 224; Stop 248
taggcgagtaactagcacaagtgga

SEQ ID NO: 28620 - DNA, 25 bp, Artificial
  probe
  misc_feature (1)..(25): SEQ ID NO: 5922; WAN0249OD_at; Start 33; Stop 57
cccgattgctcggaaatatgctaaa

SEQ ID NO: 28621 - DNA, 25 bp, Artificial
  probe
  misc_feature (1)..(25): SEQ ID NO: 5922; WAN0249OD_at; Start 90; Stop 114
tatgtcctaattataccatattacc

SEQ ID NO: 28622 - DNA, 25 bp, Artificial
  probe
  misc_feature (1)..(25): SEQ ID NO: 5922; WAN0249OD_at; Start 259; Stop 283
tattgactattaccacgataccacg

SEQ ID NO: 28623 - DNA, 25 bp, Artificial
  probe
  misc_feature (1)..(25): SEQ ID NO: 5922; WAN0249OD_at; Start 169; Stop 193
tcataaaaatcaatataaaaagccc

SEQ ID NO: 28624 - DNA, 25 bp, Artificial
  probe
  misc_feature (1)..(25): SEQ ID NO: 5922; WAN0249OD_at; Start 232; Stop 256
taactagcacaagtggacgtgcttt

SEQ ID NO: 28625 - DNA, 25 bp, Artificial
  probe
  misc_feature (1)..(25): SEQ ID NO: 5922; WAN0249OD_at; Start 1; Stop 25
tttgtcctctttctatgcgactctt

SEQ ID NO: 28626 - DNA, 25 bp, Artificial
  probe
  misc_feature (1)..(25): SEQ ID NO: 5922; WAN0249OD_at; Start 220; Stop 244
tcaataggcgagtaactagcacaag

SEQ ID NO: 28627 - DNA, 25 bp, Artificial
  probe
  misc_feature (1)..(25): SEQ ID NO: 5922; WAN0249OD_at; Start 12; Stop 36
tctatgcgactctttaatcgccccg

SEQ ID NO: 28628 - DNA, 25 bp, Artificial
  probe
  misc_feature (1)..(25): SEQ ID NO: 5922; WAN0249OD_at; Start 239; Stop 263
cacaagtggacgtgcttttttattg

SEQ ID NO: 28629 - DNA, 25 bp, Artificial
  probe
  misc_feature (1)..(25): SEQ ID NO: 5922; WAN0249OD_at; Start 35; Stop 59
cgattgctcggaaatatgctaaaat

SEQ ID NO: 28630 - DNA, 25 bp, Artificial
  probe
  misc_feature (1)..(25): SEQ ID NO: 5922; WAN0249OD_at; Start 137; Stop 161
tgattttcttaaaagtctgatttct

SEQ ID NO: 28631 - DNA, 25 bp, Artificial
  probe
  misc_feature (1)..(25): SEQ ID NO: 5922; WAN0249OD_at; Start 151; Stop 175
gtctgatttcttcatttctcataaa

SEQ ID NO: 28632 - DNA, 25 bp, Artificial
  probe
  misc_feature (1)..(25): SEQ ID NO: 5922; WAN0249OD_at; Start 229; Stop 253
gagtaactagcacaagtggacgtgc

SEQ ID NO: 28633 - DNA, 25 bp, Artificial
  probe
  misc_feature (1)..(25): SEQ ID NO: 5922; WAN0249OD_at; Start 51; Stop 75
tgctaaaatagatactaccatctta

SEQ ID NO: 28634 - DNA, 25 bp, Artificial
  probe
  misc_feature (1)..(25): SEQ ID NO: 5922; WAN0249OD_at; Start 211; Stop 235
tctataaaatcaataggcgagtaac

SEQ ID NO: 28635 - DNA, 25 bp, Artificial
  probe
  misc_feature (1)..(25): SEQ ID NO: 5922; WAN0249OD_at; Start 76; Stop 100
ccacaaaattattttatgtcctaat

SEQ ID NO: 28636 - DNA, 25 bp, Artificial
  probe
  misc_feature (1)..(25): SEQ ID NO: 5922; WAN0249OD_at; Start 263; Stop 287
gactattaccacgataccacgctta

SEQ ID NO: 28637 - DNA, 25 bp, Artificial
  probe
  misc_feature (1)..(25): SEQ ID NO: 5922; WAN0249OD_at; Start 217; Stop 241
aaatcaataggcgagtaactagcac

SEQ ID NO: 28638 - DNA, 25 bp, Artificial
  probe
  misc_feature (1)..(25): SEQ ID NO: 5922; WAN0249OD_at; Start 39; Stop 63
tgctcggaaatatgctaaaatagat

SEQ ID NO: 28639 - DNA, 25 bp, Artificial
  probe
  misc_feature (1)..(25): SEQ ID NO: 5922; WAN0249OD_at; Start 106; Stop 130
catattacctcatttaaacccttgg

SEQ ID NO: 28640 - DNA, 25 bp, Artificial
  probe
  misc_feature (1)..(25): SEQ ID NO: 5922; WAN0249OD_at; Start 226; Stop 250
ggcgagtaactagcacaagtggacg

SEQ ID NO: 28641 - DNA, 25 bp, Artificial
  probe
  misc_feature (1)..(25): SEQ ID NO: 5922; WAN0249OD_at; Start 16; Stop 40
tgcgactctttaatcgccccgattg

SEQ ID NO: 28642 - DNA, 25 bp, Artificial
  probe
  misc_feature (1)..(25): SEQ ID NO: 5922; WAN0249OD_at; Start 252; Stop 276
gcttttttattgactattaccacga

SEQ ID NO: 28643 - DNA, 25 bp, Artificial
  probe
  misc_feature (1)..(25): SEQ ID NO: 5922; WAN0249OD_at; Start 61; Stop 85
gatactaccatcttaccacaaaatt

SEQ ID NO: 28644 - DNA, 25 bp, Artificial
  probe
  misc_feature (1)..(25): SEQ ID NO: 5922; WAN0249OD_at; Start 241; Stop 265
caagtggacgtgcttttttattgac

SEQ ID NO: 28645 - DNA, 25 bp, Artificial
  probe
  misc_feature (1)..(25): SEQ ID NO: 415; WAN0249OE_at; Start 13; Stop 37
tgagtcatttaagactgcctttttg

SEQ ID NO: 28646 - DNA, 25 bp, Artificial
  probe
  misc_feature (1)..(25): SEQ ID NO: 415; WAN0249OE_at; Start 2; Stop 26
gaattcaatattgagtcatttaaga

SEQ ID NO: 28647 - DNA, 25 bp, Artificial
  probe
  misc_feature (1)..(25): SEQ ID NO: 415; WAN0249OE_at; Start 16; Stop 40
gtcatttaagactgcctttttgaac

SEQ ID NO: 28648 - DNA, 25 bp, Artificial
  probe
  misc_feature (1)..(25): SEQ ID NO: 415; WAN0249OE_at; Start 7; Stop 31
caatattgagtcatttaagactgcc

SEQ ID NO: 28649 - DNA, 25 bp, Artificial
  probe
  misc_feature (1)..(25): SEQ ID NO: 415; WAN0249OE_at; Start 6; Stop 30
tcaatattgagtcatttaagactgc

SEQ ID NO: 28650 - DNA, 25 bp, Artificial
  probe
  misc_feature (1)..(25): SEQ ID NO: 415; WAN0249OE_at; Start 22; Stop 46
taagactgcctttttgaacagttgc

SEQ ID NO: 28651 - DNA, 25 bp, Artificial
  probe
  misc_feature (1)..(25): SEQ ID NO: 415; WAN0249OE_at; Start 31; Stop 55
ctttttgaacagttgctagaaatgt

SEQ ID NO: 28652 - DNA, 25 bp, Artificial
  probe
  misc_feature (1)..(25): SEQ ID NO: 415; WAN0249OE_at; Start 36; Stop 60
tgaacagttgctagaaatgtagagg

SEQ ID NO: 28653 - DNA, 25 bp, Artificial
  probe
  misc_feature (1)..(25): SEQ ID NO: 415; WAN0249OE_at; Start 21; Stop 45
ttaagactgcctttttgaacagttg

SEQ ID NO: 28654 - DNA, 25 bp, Artificial
  probe
  misc_feature (1)..(25): SEQ ID NO: 415; WAN0249OE_at; Start 29; Stop 53
gcctttttgaacagttgctagaaat

SEQ ID NO: 28655 - DNA, 25 bp, Artificial
  probe
  misc_feature (1)..(25): SEQ ID NO: 415; WAN0249OE_at; Start 12; Stop 36
ttgagtcatttaagactgccttttt

SEQ ID NO: 28656 - DNA, 25 bp, Artificial
  probe
  misc_feature (1)..(25): SEQ ID NO: 415; WAN0249OE_at; Start 3; Stop 27
aattcaatattgagtcatttaagac

SEQ ID NO: 28657 - DNA, 25 bp, Artificial
  probe
  misc_feature (1)..(25): SEQ ID NO: 415; WAN0249OE_at; Start 33; Stop 57
ttttgaacagttgctagaaatgtag

SEQ ID NO: 28658 - DNA, 25 bp, Artificial
  probe
  misc_feature (1)..(25): SEQ ID NO: 415; WAN0249OE_at; Start 28; Stop 52
tgcctttttgaacagttgctagaaa

SEQ ID NO: 28659 - DNA, 25 bp, Artificial
  probe
  misc_feature (1)..(25): SEQ ID NO: 415; WAN0249OE_at; Start 11; Stop 35
attgagtcatttaagactgcctttt

SEQ ID NO: 28660 - DNA, 25 bp, Artificial
  probe
  misc_feature (1)..(25): SEQ ID NO: 415; WAN0249OE_at; Start 19; Stop 43
atttaagactgcctttttgaacagt

SEQ ID NO: 28661 - DNA, 25 bp, Artificial
  probe
  misc_feature (1)..(25): SEQ ID NO: 415; WAN0249OE_at; Start 8; Stop 32
aatattgagtcatttaagactgcct

SEQ ID NO: 28662 - DNA, 25 bp, Artificial
  probe
  misc_feature (1)..(25): SEQ ID NO: 415; WAN0249OE_at; Start 15; Stop 39
agtcatttaagactgcctttttgaa

SEQ ID NO: 28663 - DNA, 25 bp, Artificial
  probe
  misc_feature (1)..(25): SEQ ID NO: 415; WAN0249OE_at; Start 5; Stop 29
ttcaatattgagtcatttaagactg

SEQ ID NO: 28664 - DNA, 25 bp, Artificial
  probe
  misc_feature (1)..(25): SEQ ID NO: 415; WAN0249OE_at; Start 9; Stop 33
atattgagtcatttaagactgcctt

SEQ ID NO: 28665 - DNA, 25 bp, Artificial
  probe
  misc_feature (1)..(25): SEQ ID NO: 415; WAN0249OE_at; Start 37; Stop 61
gaacagttgctagaaatgtagaggt

SEQ ID NO: 28666 - DNA, 25 bp, Artificial
  probe
  misc_feature (1)..(25): SEQ ID NO: 415; WAN0249OE_at; Start 24; Stop 48
agactgcctttttgaacagttgcta

SEQ ID NO: 28667 - DNA, 25 bp, Artificial
  probe
  misc_feature (1)..(25): SEQ ID NO: 415; WAN0249OE_at; Start 10; Stop 34
tattgagtcatttaagactgccttt

SEQ ID NO: 28668 - DNA, 25 bp, Artificial
  probe
  misc_feature (1)..(25): SEQ ID NO: 415; WAN0249OE_at; Start 32; Stop 56
tttttgaacagttgctagaaatgta

SEQ ID NO: 28669 - DNA, 25 bp, Artificial
  probe
  misc_feature (1)..(25): SEQ ID NO: 415; WAN0249OE_at; Start 25; Stop 49
gactgcctttttgaacagttgctag

SEQ ID NO: 28670 - DNA, 25 bp, Artificial
  probe
  misc_feature (1)..(25): SEQ ID NO: 415; WAN0249OE_at; Start 26; Stop 50
actgcctttttgaacagttgctaga

SEQ ID NO: 28671 - DNA, 25 bp, Artificial
  probe
  misc_feature (1)..(25): SEQ ID NO: 415; WAN0249OE_at; Start 27; Stop 51
ctgcctttttgaacagttgctagaa

SEQ ID NO: 28672 - DNA, 25 bp, Artificial
  probe
  misc_feature (1)..(25): SEQ ID NO: 415; WAN0249OE_at; Start 30; Stop 54
cctttttgaacagttgctagaaatg

SEQ ID NO: 28673 - DNA, 25 bp, Artificial
  probe
  misc_feature (1)..(25): SEQ ID NO: 415; WAN0249OE_at; Start 34; Stop 58
tttgaacagttgctagaaatgtaga

SEQ ID NO: 28674 - DNA, 25 bp, Artificial
  probe
  misc_feature (1)..(25): SEQ ID NO: 415; WAN0249OE_at; Start 17; Stop 41
tcatttaagactgcctttttgaaca

SEQ ID NO: 28675 - DNA, 25 bp, Artificial
  probe
  misc_feature (1)..(25): SEQ ID NO: 415; WAN0249OE_at; Start 23; Stop 47
aagactgcctttttgaacagttgct

SEQ ID NO: 28676 - DNA, 25 bp, Artificial
  probe
  misc_feature (1)..(25): SEQ ID NO: 415; WAN0249OE_at; Start 35; Stop 59
ttgaacagttgctagaaatgtagag

SEQ ID NO: 28677 - DNA, 25 bp, Artificial
  probe
  misc_feature (1)..(25): SEQ ID NO: 415; WAN0249OE_at; Start 14; Stop 38
gagtcatttaagactgcctttttga

SEQ ID NO: 28678 - DNA, 25 bp, Artificial
  probe
  misc_feature (1)..(25): SEQ ID NO: 415; WAN0249OE_at; Start 38; Stop 62
aacagttgctagaaatgtagaggta

SEQ ID NO: 28679 - DNA, 25 bp, Artificial
  probe
  misc_feature (1)..(25): SEQ ID NO: 4465; WAN0249OF_at; Start 28; Stop 52
aaaaggcagtcttaaatgactcaat

SEQ ID NO: 28680 - DNA, 25 bp, Artificial
  probe
  misc_feature (1)..(25): SEQ ID NO: 4465; WAN0249OF_at; Start 13; Stop 37
tctagcaactgttcaaaaaggcagt

SEQ ID NO: 28681 - DNA, 25 bp, Artificial
  probe
  misc_feature (1)..(25): SEQ ID NO: 4465; WAN0249OF_at; Start 22; Stop 46
tgttcaaaaaggcagtcttaaatga

SEQ ID NO: 28682 - DNA, 25 bp, Artificial
  probe
  misc_feature (1)..(25): SEQ ID NO: 4465; WAN0249OF_at; Start 29; Stop 53
aaaggcagtcttaaatgactcaata

SEQ ID NO: 28683 - DNA, 25 bp, Artificial
  probe
  misc_feature (1)..(25): SEQ ID NO: 4465; WAN0249OF_at; Start 23; Stop 47
gttcaaaaaggcagtcttaaatgac

SEQ ID NO: 28684 - DNA, 25 bp, Artificial
  probe
  misc_feature (1)..(25): SEQ ID NO: 4465; WAN0249OF_at; Start 27; Stop 51
aaaaaggcagtcttaaatgactcaa

SEQ ID NO: 28685 - DNA, 25 bp, Artificial
  probe
  misc_feature (1)..(25): SEQ ID NO: 4465; WAN0249OF_at; Start 36; Stop 60
gtcttaaatgactcaatattgaatt

SEQ ID NO: 28686 - DNA, 25 bp, Artificial
  probe
  misc_feature (1)..(25): SEQ ID NO: 4465; WAN0249OF_at; Start 37; Stop 61
tcttaaatgactcaatattgaattc

SEQ ID NO: 28687 - DNA, 25 bp, Artificial
  probe
  misc_feature (1)..(25): SEQ ID NO: 4465; WAN0249OF_at; Start 5; Stop 29
tctacatttctagcaactgttcaaa

SEQ ID NO: 28688 - DNA, 25 bp, Artificial
  probe
  misc_feature (1)..(25): SEQ ID NO: 4465; WAN0249OF_at; Start 12; Stop 36
ttctagcaactgttcaaaaaggcag

SEQ ID NO: 28689 - DNA, 25 bp, Artificial
  probe
  misc_feature (1)..(25): SEQ ID NO: 4465; WAN0249OF_at; Start 24; Stop 48
ttcaaaaaggcagtcttaaatgact

SEQ ID NO: 28690 - DNA, 25 bp, Artificial
  probe
  misc_feature (1)..(25): SEQ ID NO: 4465; WAN0249OF_at; Start 11; Stop 35
tttctagcaactgttcaaaaaggca

SEQ ID NO: 28691 - DNA, 25 bp, Artificial
  probe
  misc_feature (1)..(25): SEQ ID NO: 4465; WAN0249OF_at; Start 4; Stop 28
ctctacatttctagcaactgttcaa

SEQ ID NO: 28692 - DNA, 25 bp, Artificial
  probe
  misc_feature (1)..(25): SEQ ID NO: 4465; WAN0249OF_at; Start 6; Stop 30
ctacatttctagcaactgttcaaaa

SEQ ID NO: 28693 - DNA, 25 bp, Artificial
  probe
  misc_feature (1)..(25): SEQ ID NO: 4465; WAN0249OF_at; Start 32; Stop 56
ggcagtcttaaatgactcaatattg

SEQ ID NO: 28694 - DNA, 25 bp, Artificial
  probe
  misc_feature (1)..(25): SEQ ID NO: 4465; WAN0249OF_at; Start 18; Stop 42
caactgttcaaaaaggcagtcttaa

SEQ ID NO: 28695 - DNA, 25 bp, Artificial
  probe
  misc_feature (1)..(25): SEQ ID NO: 4465; WAN0249OF_at; Start 10; Stop 34
atttctagcaactgttcaaaaaggc

SEQ ID NO: 28696 - DNA, 25 bp, Artificial
  probe
  misc_feature (1)..(25): SEQ ID NO: 4465; WAN0249OF_at; Start 31; Stop 55
aggcagtcttaaatgactcaatatt

SEQ ID NO: 28697 - DNA, 25 bp, Artificial
  probe
  misc_feature (1)..(25): SEQ ID NO: 4465; WAN0249OF_at; Start 7; Stop 31
tacatttctagcaactgttcaaaaa

SEQ ID NO: 28698 - DNA, 25 bp, Artificial
  probe
  misc_feature (1)..(25): SEQ ID NO: 4465; WAN0249OF_at; Start 8; Stop 32
acatttctagcaactgttcaaaaag

SEQ ID NO: 28699 - DNA, 25 bp, Artificial
  probe
  misc_feature (1)..(25): SEQ ID NO: 4465; WAN0249OF_at; Start 9; Stop 33
catttctagcaactgttcaaaaagg

SEQ ID NO: 28700 - DNA, 25 bp, Artificial
  probe
  misc_feature (1)..(25): SEQ ID NO: 4465; WAN0249OF_at; Start 38; Stop 62
cttaaatgactcaatattgaattct

SEQ ID NO: 28701 - DNA, 25 bp, Artificial
  probe
  misc_feature (1)..(25): SEQ ID NO: 4465; WAN0249OF_at; Start 35; Stop 59
agtcttaaatgactcaatattgaat

SEQ ID NO: 28702 - DNA, 25 bp, Artificial
  probe
  misc_feature (1)..(25): SEQ ID NO: 4465; WAN0249OF_at; Start 25; Stop 49
tcaaaaaggcagtcttaaatgactc

SEQ ID NO: 28703 - DNA, 25 bp, Artificial
  probe
  misc_feature (1)..(25): SEQ ID NO: 4465; WAN0249OF_at; Start 20; Stop 44
actgttcaaaaaggcagtcttaaat

SEQ ID NO: 28704 - DNA, 25 bp, Artificial
  probe
  misc_feature (1)..(25): SEQ ID NO: 4465; WAN0249OF_at; Start 26; Stop 50
caaaaaggcagtcttaaatgactca

SEQ ID NO: 28705 - DNA, 25 bp, Artificial
  probe
  misc_feature (1)..(25): SEQ ID NO: 4465; WAN0249OF_at; Start 3; Stop 27
cctctacatttctagcaactgttca

SEQ ID NO: 28706 - DNA, 25 bp, Artificial
  probe
  misc_feature (1)..(25): SEQ ID NO: 4465; WAN0249OF_at; Start 17; Stop 41
gcaactgttcaaaaaggcagtctta

SEQ ID NO: 28707 - DNA, 25 bp, Artificial
  probe
  misc_feature (1)..(25): SEQ ID NO: 4465; WAN0249OF_at; Start 15; Stop 39
tagcaactgttcaaaaaggcagtct

SEQ ID NO: 28708 - DNA, 25 bp, Artificial
  probe
  misc_feature (1)..(25): SEQ ID NO: 4465; WAN0249OF_at; Start 16; Stop 40
agcaactgttcaaaaaggcagtctt

SEQ ID NO: 28709 - DNA, 25 bp, Artificial
  probe
  misc_feature (1)..(25): SEQ ID NO: 4465; WAN0249OF_at; Start 34; Stop 58
cagtcttaaatgactcaatattgaa

SEQ ID NO: 28710 - DNA, 25 bp, Artificial
  probe
  misc_feature (1)..(25): SEQ ID NO: 4465; WAN0249OF_at; Start 33; Stop 57
gcagtcttaaatgactcaatattga

SEQ ID NO: 28711 - DNA, 25 bp, Artificial
  probe
  misc_feature (1)..(25): SEQ ID NO: 4465; WAN0249OF_at; Start 14; Stop 38
ctagcaactgttcaaaaaggcagtc

SEQ ID NO: 28712 - DNA, 25 bp, Artificial
  probe
  misc_feature (1)..(25): SEQ ID NO: 4465; WAN0249OF_at; Start 30; Stop 54
aaggcagtcttaaatgactcaatat

SEQ ID NO: 28713 - DNA, 25 bp, Artificial
  probe
  misc_feature (1)..(25): SEQ ID NO: 3738; WAN0249OG_at; Start 64; Stop 88
tacttttgatagactagtatctagt

SEQ ID NO: 28714 - DNA, 25 bp, Artificial
  probe
  misc_feature (1)..(25): SEQ ID NO: 3738; WAN0249OG_at; Start 4; Stop 28
ttagctaatagttctatgattttca

SEQ ID NO: 28715 - DNA, 25 bp, Artificial
  probe
  misc_feature (1)..(25): SEQ ID NO: 3738; WAN0249OG_at; Start 69; Stop 93
ttgatagactagtatctagtttttg

SEQ ID NO: 28716 - DNA, 25 bp, Artificial
  probe
  misc_feature (1)..(25): SEQ ID NO: 3738; WAN0249OG_at; Start 6; Stop 30
agctaatagttctatgattttcaaa

SEQ ID NO: 28717 - DNA, 25 bp, Artificial
  probe
  misc_feature (1)..(25): SEQ ID NO: 3738; WAN0249OG_at; Start 17; Stop 41
ctatgattttcaaaaaatttccaat

SEQ ID NO: 28718 - DNA, 25 bp, Artificial
  probe
  misc_feature (1)..(25): SEQ ID NO: 3738; WAN0249OG_at; Start 1; Stop 25
ggattagctaatagttctatgattt

SEQ ID NO: 28719 - DNA, 25 bp, Artificial
  probe
  misc_feature (1)..(25): SEQ ID NO: 3738; WAN0249OG_at; Start 63; Stop 87
ctacttttgatagactagtatctag

SEQ ID NO: 28720 - DNA, 25 bp, Artificial
  probe
  misc_feature (1)..(25): SEQ ID NO: 3738; WAN0249OG_at; Start 68; Stop 92
tttgatagactagtatctagttttt

SEQ ID NO: 28721 - DNA, 25 bp, Artificial
  probe
  misc_feature (1)..(25): SEQ ID NO: 3738; WAN0249OG_at; Start 66; Stop 90
cttttgatagactagtatctagttt

SEQ ID NO: 28722 - DNA, 25 bp, Artificial
  probe
  misc_feature (1)..(25): SEQ ID NO: 3738; WAN0249OG_at; Start 19; Stop 43
atgattttcaaaaaatttccaatca

SEQ ID NO: 28723 - DNA, 25 bp, Artificial
  probe
  misc_feature (1)..(25): SEQ ID NO: 3738; WAN0249OG_at; Start 67; Stop 91
ttttgatagactagtatctagtttt

SEQ ID NO: 28724 - DNA, 25 bp, Artificial
  probe
  misc_feature (1)..(25): SEQ ID NO: 3738; WAN0249OG_at; Start 61; Stop 85
tcctacttttgatagactagtatct

SEQ ID NO: 28725 - DNA, 25 bp, Artificial
  probe
  misc_feature (1)..(25): SEQ ID NO: 3738; WAN0249OG_at; Start 58; Stop 82
ctttcctacttttgatagactagta

SEQ ID NO: 28726 - DNA, 25 bp, Artificial
  probe
  misc_feature (1)..(25): SEQ ID NO: 3738; WAN0249OG_at; Start 5; Stop 29
tagctaatagttctatgattttcaa

SEQ ID NO: 28727 - DNA, 25 bp, Artificial
  probe
  misc_feature (1)..(25): SEQ ID NO: 3738; WAN0249OG_at; Start 10; Stop 34
aatagttctatgattttcaaaaaat

SEQ ID NO: 28728 - DNA, 25 bp, Artificial
  probe
  misc_feature (1)..(25): SEQ ID NO: 3738; WAN0249OG_at; Start 20; Stop 44
tgattttcaaaaaatttccaatcaa

SEQ ID NO: 28729 - DNA, 25 bp, Artificial
  probe
  misc_feature (1)..(25): SEQ ID NO: 3738; WAN0249OG_at; Start 15; Stop 39
ttctatgattttcaaaaaatttcca

SEQ ID NO: 28730 - DNA, 25 bp, Artificial
  probe
  misc_feature (1)..(25): SEQ ID NO: 3738; WAN0249OG_at; Start 73; Stop 97
tagactagtatctagtttttgaaaa

SEQ ID NO: 28731 - DNA, 25 bp, Artificial
  probe
  misc_feature (1)..(25): SEQ ID NO: 3738; WAN0249OG_at; Start 8; Stop 32
ctaatagttctatgattttcaaaaa

SEQ ID NO: 28732 - DNA, 25 bp, Artificial
  probe
  misc_feature (1)..(25): SEQ ID NO: 3738; WAN0249OG_at; Start 72; Stop 96
atagactagtatctagtttttgaaa

SEQ ID NO: 28733 - DNA, 25 bp, Artificial
  probe
  misc_feature (1)..(25): SEQ ID NO: 3738; WAN0249OG_at; Start 9; Stop 33
taatagttctatgattttcaaaaaa

SEQ ID NO: 28734 - DNA, 25 bp, Artificial
  probe
  misc_feature (1)..(25): SEQ ID NO: 3738; WAN0249OG_at; Start 60; Stop 84
ttcctacttttgatagactagtatc

SEQ ID NO: 28735 - DNA, 25 bp, Artificial
  probe
  misc_feature (1)..(25): SEQ ID NO: 3738; WAN0249OG_at; Start 65; Stop 89
acttttgatagactagtatctagtt

SEQ ID NO: 28736 - DNA, 25 bp, Artificial
  probe
  misc_feature (1)..(25): SEQ ID NO: 3738; WAN0249OG_at; Start 16; Stop 40
tctatgattttcaaaaaatttccaa

SEQ ID NO: 28737 - DNA, 25 bp, Artificial
  probe
  misc_feature (1)..(25): SEQ ID NO: 3738; WAN0249OG_at; Start 3; Stop 27
attagctaatagttctatgattttc

SEQ ID NO: 28738 - DNA, 25 bp, Artificial
  probe
  misc_feature (1)..(25): SEQ ID NO: 3738; WAN0249OG_at; Start 71; Stop 95
gatagactagtatctagtttttgaa

SEQ ID NO: 28739 - DNA, 25 bp, Artificial
  probe
  misc_feature (1)..(25): SEQ ID NO: 3738; WAN0249OG_at; Start 62; Stop 86
cctacttttgatagactagtatcta

SEQ ID NO: 28740 - DNA, 25 bp, Artificial
  probe
  misc_feature (1)..(25): SEQ ID NO: 3738; WAN0249OG_at; Start 2; Stop 26
gattagctaatagttctatgatttt

SEQ ID NO: 28741 - DNA, 25 bp, Artificial
  probe
  misc_feature (1)..(25): SEQ ID NO: 3738; WAN0249OG_at; Start 57; Stop 81
cctttcctacttttgatagactagt

SEQ ID NO: 28742 - DNA, 25 bp, Artificial
  probe
  misc_feature (1)..(25): SEQ ID NO: 3738; WAN0249OG_at; Start 18; Stop 42
tatgattttcaaaaaatttccaatc

SEQ ID NO: 28743 - DNA, 25 bp, Artificial
  probe
  misc_feature (1)..(25): SEQ ID NO: 3738; WAN0249OG_at; Start 56; Stop 80
ccctttcctacttttgatagactag

SEQ ID NO: 28744 - DNA, 25 bp, Artificial
  probe
  misc_feature (1)..(25): SEQ ID NO: 3738; WAN0249OG_at; Start 7; Stop 31
gctaatagttctatgattttcaaaa

SEQ ID NO: 28745 - DNA, 25 bp, Artificial
  probe
  misc_feature (1)..(25): SEQ ID NO: 3738; WAN0249OG_at; Start 59; Stop 83
tttcctacttttgatagactagtat

SEQ ID NO: 28746 - DNA, 25 bp, Artificial
  probe
  misc_feature (1)..(25): SEQ ID NO: 3738; WAN0249OG_at; Start 70; Stop 94
tgatagactagtatctagtttttga

SEQ ID NO: 28747 - DNA, 25 bp, Artificial
  probe
  misc_feature (1)..(25): SEQ ID NO: 5915; WAN0249OH_at; Start 21; Stop 45
aaactagatactagtctatcaaaag

SEQ ID NO: 28748 - DNA, 25 bp, Artificial
  probe
  misc_feature (1)..(25): SEQ ID NO: 5915; WAN0249OH_at; Start 69; Stop 93
gattggaaattttttgaaaatcata

SEQ ID NO: 28749 - DNA, 25 bp, Artificial
  probe
  misc_feature (1)..(25): SEQ ID NO: 5915; WAN0249OH_at; Start 68; Stop 92
tgattggaaattttttgaaaatcat

SEQ ID NO: 28750 - DNA, 25 bp, Artificial
  probe
  misc_feature (1)..(25): SEQ ID NO: 5915; WAN0249OH_at; Start 70; Stop 94
attggaaattttttgaaaatcatag

SEQ ID NO: 28751 - DNA, 25 bp, Artificial
  probe
  misc_feature (1)..(25): SEQ ID NO: 5915; WAN0249OH_at; Start 85; Stop 109
aaaatcatagaactattagctaatc

SEQ ID NO: 28752 - DNA, 25 bp, Artificial
  probe
  misc_feature (1)..(25): SEQ ID NO: 5915; WAN0249OH_at; Start 25; Stop 49
tagatactagtctatcaaaagtagg

SEQ ID NO: 28753 - DNA, 25 bp, Artificial
  probe
  misc_feature (1)..(25): SEQ ID NO: 5915; WAN0249OH_at; Start 30; Stop 54
actagtctatcaaaagtaggaaagg

SEQ ID NO: 28754 - DNA, 25 bp, Artificial
  probe
  misc_feature (1)..(25): SEQ ID NO: 5915; WAN0249OH_at; Start 72; Stop 96
tggaaattttttgaaaatcatagaa

SEQ ID NO: 28755 - DNA, 25 bp, Artificial
  probe
  misc_feature (1)..(25): SEQ ID NO: 5915; WAN0249OH_at; Start 17; Stop 41
tcaaaaactagatactagtctatca

SEQ ID NO: 28756 - DNA, 25 bp, Artificial
  probe
  misc_feature (1)..(25): SEQ ID NO: 5915; WAN0249OH_at; Start 24; Stop 48
ctagatactagtctatcaaaagtag

SEQ ID NO: 28757 - DNA, 25 bp, Artificial
  probe
  misc_feature (1)..(25): SEQ ID NO: 5915; WAN0249OH_at; Start 31; Stop 55
ctagtctatcaaaagtaggaaaggg

SEQ ID NO: 28758 - DNA, 25 bp, Artificial
  probe
  misc_feature (1)..(25): SEQ ID NO: 5915; WAN0249OH_at; Start 80; Stop 104
ttttgaaaatcatagaactattagc

SEQ ID NO: 28759 - DNA, 25 bp, Artificial
  probe
  misc_feature (1)..(25): SEQ ID NO: 5915; WAN0249OH_at; Start 14; Stop 38
ttttcaaaaactagatactagtcta

SEQ ID NO: 28760 - DNA, 25 bp, Artificial
  probe
  misc_feature (1)..(25): SEQ ID NO: 5915; WAN0249OH_at; Start 81; Stop 105
tttgaaaatcatagaactattagct

SEQ ID NO: 28761 - DNA, 25 bp, Artificial
  probe
  misc_feature (1)..(25): SEQ ID NO: 5915; WAN0249OH_at; Start 20; Stop 44
aaaactagatactagtctatcaaaa

SEQ ID NO: 28762 - DNA, 25 bp, Artificial
  probe
  misc_feature (1)..(25): SEQ ID NO: 5915; WAN0249OH_at; Start 76; Stop 100
aattttttgaaaatcatagaactat

SEQ ID NO: 28763 - DNA, 25 bp, Artificial
  probe
  misc_feature (1)..(25): SEQ ID NO: 5915; WAN0249OH_at; Start 78; Stop 102
ttttttgaaaatcatagaactatta

SEQ ID NO: 28764 - DNA, 25 bp, Artificial
  probe
  misc_feature (1)..(25): SEQ ID NO: 5915; WAN0249OH_at; Start 71; Stop 95
ttggaaattttttgaaaatcataga

SEQ ID NO: 28765 - DNA, 25 bp, Artificial
  probe
  misc_feature (1)..(25): SEQ ID NO: 5915; WAN0249OH_at; Start 77; Stop 101
attttttgaaaatcatagaactatt

SEQ ID NO: 28766 - DNA, 25 bp, Artificial
  probe
  misc_feature (1)..(25): SEQ ID NO: 5915; WAN0249OH_at; Start 19; Stop 43
aaaaactagatactagtctatcaaa

SEQ ID NO: 28767 - DNA, 25 bp, Artificial
  probe
  misc_feature (1)..(25): SEQ ID NO: 5915; WAN0249OH_at; Start 15; Stop 39
tttcaaaaactagatactagtctat

SEQ ID NO: 28768 - DNA, 25 bp, Artificial
  probe
  misc_feature (1)..(25): SEQ ID NO: 5915; WAN0249OH_at; Start 79; Stop 103
tttttgaaaatcatagaactattag

SEQ ID NO: 28769 - DNA, 25 bp, Artificial
  probe
  misc_feature (1)..(25): SEQ ID NO: 5915; WAN0249OH_at; Start 18; Stop 42
caaaaactagatactagtctatcaa

SEQ ID NO: 28770 - DNA, 25 bp, Artificial
  probe
  misc_feature (1)..(25): SEQ ID NO: 5915; WAN0249OH_at; Start 29; Stop 53
tactagtctatcaaaagtaggaaag

SEQ ID NO: 28771 - DNA, 25 bp, Artificial
  probe
  misc_feature (1)..(25): SEQ ID NO: 5915; WAN0249OH_at; Start 28; Stop 52
atactagtctatcaaaagtaggaaa

SEQ ID NO: 28772 - DNA, 25 bp, Artificial
  probe
  misc_feature (1)..(25): SEQ ID NO: 5915; WAN0249OH_at; Start 26; Stop 50
agatactagtctatcaaaagtagga

SEQ ID NO: 28773 - DNA, 25 bp, Artificial
  probe
  misc_feature (1)..(25): SEQ ID NO: 5915; WAN0249OH_at; Start 16; Stop 40
ttcaaaaactagatactagtctatc

SEQ ID NO: 28774 - DNA, 25 bp, Artificial
  probe
  misc_feature (1)..(25): SEQ ID NO: 5915; WAN0249OH_at; Start 23; Stop 47
actagatactagtctatcaaaagta

SEQ ID NO: 28775 - DNA, 25 bp, Artificial
  probe
  misc_feature (1)..(25): SEQ ID NO: 5915; WAN0249OH_at; Start 82; Stop 106
ttgaaaatcatagaactattagcta

SEQ ID NO: 28776 - DNA, 25 bp, Artificial
  probe
  misc_feature (1)..(25): SEQ ID NO: 5915; WAN0249OH_at; Start 27; Stop 51
gatactagtctatcaaaagtaggaa

SEQ ID NO: 28777 - DNA, 25 bp, Artificial
  probe
  misc_feature (1)..(25): SEQ ID NO: 5915; WAN0249OH_at; Start 86; Stop 110
aaatcatagaactattagctaatcc

SEQ ID NO: 28778 - DNA, 25 bp, Artificial
  probe
  misc_feature (1)..(25): SEQ ID NO: 5915; WAN0249OH_at; Start 22; Stop 46
aactagatactagtctatcaaaagt

SEQ ID NO: 28779 - DNA, 25 bp, Artificial
  probe
  misc_feature (1)..(25): SEQ ID NO: 5915; WAN0249OH_at; Start 83; Stop 107
tgaaaatcatagaactattagctaa

SEQ ID NO: 28780 - DNA, 25 bp, Artificial
  probe
  misc_feature (1)..(25): SEQ ID NO: 5915; WAN0249OH_at; Start 84; Stop 108
gaaaatcatagaactattagctaat

SEQ ID NO: 28781 - DNA, 25 bp, Artificial
  probe
  misc_feature (1)..(25): SEQ ID NO: 80; WAN0249OI_at; Start 45; Stop 69
tttagcgatggcatatcccaaacat

SEQ ID NO: 28782 - DNA, 25 bp, Artificial
  probe
  misc_feature (1)..(25): SEQ ID NO: 80; WAN0249OI_at; Start 46; Stop 70
ttagcgatggcatatcccaaacatc

SEQ ID NO: 28783 - DNA, 25 bp, Artificial
  probe
  misc_feature (1)..(25): SEQ ID NO: 80; WAN0249OI_at; Start 50; Stop 74
cgatggcatatcccaaacatcgtaa

SEQ ID NO: 28784 - DNA, 25 bp, Artificial
  probe
  misc_feature (1)..(25): SEQ ID NO: 80; WAN0249OI_at; Start 33; Stop 57
aatcgaggtttttttagcgatggca

SEQ ID NO: 28785 - DNA, 25 bp, Artificial
  probe
  misc_feature (1)..(25): SEQ ID NO: 80; WAN0249OI_at; Start 52; Stop 76
atggcatatcccaaacatcgtaata

SEQ ID NO: 28786 - DNA, 25 bp, Artificial
  probe
  misc_feature (1)..(25): SEQ ID NO: 80; WAN0249OI_at; Start 37; Stop 61
gaggtttttttagcgatggcatatc

SEQ ID NO: 28787 - DNA, 25 bp, Artificial
  probe
  misc_feature (1)..(25): SEQ ID NO: 80; WAN0249OI_at; Start 41; Stop 65
tttttttagcgatggcatatcccaa

SEQ ID NO: 28788 - DNA, 25 bp, Artificial
  probe
  misc_feature (1)..(25): SEQ ID NO: 80; WAN0249OI_at; Start 58; Stop 82
tatcccaaacatcgtaatattctac

SEQ ID NO: 28789 - DNA, 25 bp, Artificial
  probe
  misc_feature (1)..(25): SEQ ID NO: 80; WAN0249OI_at; Start 4; Stop 28
agctcccattagggagctaaaaaat

SEQ ID NO: 28790 - DNA, 25 bp, Artificial
  probe
  misc_feature (1)..(25): SEQ ID NO: 80; WAN0249OI_at; Start 54; Stop 78
ggcatatcccaaacatcgtaatatt

SEQ ID NO: 28791 - DNA, 25 bp, Artificial
  probe
  misc_feature (1)..(25): SEQ ID NO: 80; WAN0249OI_at; Start 51; Stop 75
gatggcatatcccaaacatcgtaat

SEQ ID NO: 28792 - DNA, 25 bp, Artificial
  probe
  misc_feature (1)..(25): SEQ ID NO: 80; WAN0249OI_at; Start 42; Stop 66
ttttttagcgatggcatatcccaaa

SEQ ID NO: 28793 - DNA, 25 bp, Artificial
  probe
  misc_feature (1)..(25): SEQ ID NO: 80; WAN0249OI_at; Start 39; Stop 63
ggtttttttagcgatggcatatccc

SEQ ID NO: 28794 - DNA, 25 bp, Artificial
  probe
  misc_feature (1)..(25): SEQ ID NO: 80; WAN0249OI_at; Start 36; Stop 60
cgaggtttttttagcgatggcatat

SEQ ID NO: 28795 - DNA, 25 bp, Artificial
  probe
  misc_feature (1)..(25): SEQ ID NO: 80; WAN0249OI_at; Start 47; Stop 71
tagcgatggcatatcccaaacatcg

SEQ ID NO: 28796 - DNA, 25 bp, Artificial
  probe
  misc_feature (1)..(25): SEQ ID NO: 80; WAN0249OI_at; Start 31; Stop 55
caaatcgaggtttttttagcgatgg

SEQ ID NO: 28797 - DNA, 25 bp, Artificial
  probe
  misc_feature (1)..(25): SEQ ID NO: 80; WAN0249OI_at; Start 59; Stop 83
atcccaaacatcgtaatattctact

SEQ ID NO: 28798 - DNA, 25 bp, Artificial
  probe
  misc_feature (1)..(25): SEQ ID NO: 80; WAN0249OI_at; Start 40; Stop 64
gtttttttagcgatggcatatccca

SEQ ID NO: 28799 - DNA, 25 bp, Artificial
  probe
  misc_feature (1)..(25): SEQ ID NO: 80; WAN0249OI_at; Start 35; Stop 59
tcgaggtttttttagcgatggcata

SEQ ID NO: 28800 - DNA, 25 bp, Artificial
  probe
  misc_feature (1)..(25): SEQ ID NO: 80; WAN0249OI_at; Start 43; Stop 67
tttttagcgatggcatatcccaaac

SEQ ID NO: 28801 - DNA, 25 bp, Artificial
  probe
  misc_feature (1)..(25): SEQ ID NO: 80; WAN0249OI_at; Start 57; Stop 81
atatcccaaacatcgtaatattcta

SEQ ID NO: 28802 - DNA, 25 bp, Artificial
  probe
  misc_feature (1)..(25): SEQ ID NO: 80; WAN0249OI_at; Start 44; Stop 68
ttttagcgatggcatatcccaaaca

SEQ ID NO: 28803 - DNA, 25 bp, Artificial
  probe
  misc_feature (1)..(25): SEQ ID NO: 80; WAN0249OI_at; Start 34; Stop 58
atcgaggtttttttagcgatggcat

SEQ ID NO: 28804 - DNA, 25 bp, Artificial
  probe
  misc_feature (1)..(25): SEQ ID NO: 80; WAN0249OI_at; Start 30; Stop 54
ccaaatcgaggtttttttagcgatg

SEQ ID NO: 28805 - DNA, 25 bp, Artificial
  probe
  misc_feature (1)..(25): SEQ ID NO: 80; WAN0249OI_at; Start 5; Stop 29
gctcccattagggagctaaaaaata

SEQ ID NO: 28806 - DNA, 25 bp, Artificial
  probe
  misc_feature (1)..(25): SEQ ID NO: 80; WAN0249OI_at; Start 55; Stop 79
gcatatcccaaacatcgtaatattc

SEQ ID NO: 28807 - DNA, 25 bp, Artificial
  probe
  misc_feature (1)..(25): SEQ ID NO: 80; WAN0249OI_at; Start 56; Stop 80
catatcccaaacatcgtaatattct

SEQ ID NO: 28808 - DNA, 25 bp, Artificial
  probe
  misc_feature (1)..(25): SEQ ID NO: 80; WAN0249OI_at; Start 53; Stop 77
tggcatatcccaaacatcgtaatat

SEQ ID NO: 28809 - DNA, 25 bp, Artificial
  probe
  misc_feature (1)..(25): SEQ ID NO: 80; WAN0249OI_at; Start 48; Stop 72
agcgatggcatatcccaaacatcgt

SEQ ID NO: 28810 - DNA, 25 bp, Artificial
  probe
  misc_feature (1)..(25): SEQ ID NO: 80; WAN0249OI_at; Start 38; Stop 62
aggtttttttagcgatggcatatcc

SEQ ID NO: 28811 - DNA, 25 bp, Artificial
  probe
  misc_feature (1)..(25): SEQ ID NO: 80; WAN0249OI_at; Start 49; Stop 73
gcgatggcatatcccaaacatcgta

SEQ ID NO: 28812 - DNA, 25 bp, Artificial
  probe
  misc_feature (1)..(25): SEQ ID NO: 479; WAN0249OJ_at; Start 2; Stop 26
gtagaatattacgatgtttgggata

SEQ ID NO: 28813 - DNA, 25 bp, Artificial
  probe
  misc_feature (1)..(25): SEQ ID NO: 479; WAN0249OJ_at; Start 22; Stop 46
ggatatgccatcgctaaaaaaacct

SEQ ID NO: 28814 - DNA, 25 bp, Artificial
  probe
  misc_feature (1)..(25): SEQ ID NO: 479; WAN0249OJ_at; Start 12; Stop 36
acgatgtttgggatatgccatcgct

SEQ ID NO: 28815 - DNA, 25 bp, Artificial
  probe
  misc_feature (1)..(25): SEQ ID NO: 479; WAN0249OJ_at; Start 15; Stop 39
atgtttgggatatgccatcgctaaa

SEQ ID NO: 28816 - DNA, 25 bp, Artificial
  probe
  misc_feature (1)..(25): SEQ ID NO: 479; WAN0249OJ_at; Start 29; Stop 53
ccatcgctaaaaaaacctcgatttg

SEQ ID NO: 28817 - DNA, 25 bp, Artificial
  probe
  misc_feature (1)..(25): SEQ ID NO: 479; WAN0249OJ_at; Start 14; Stop 38
gatgtttgggatatgccatcgctaa

SEQ ID NO: 28818 - DNA, 25 bp, Artificial
  probe
  misc_feature (1)..(25): SEQ ID NO: 479; WAN0249OJ_at; Start 13; Stop 37
cgatgtttgggatatgccatcgcta

SEQ ID NO: 28819 - DNA, 25 bp, Artificial
  probe
  misc_feature (1)..(25): SEQ ID NO: 479; WAN0249OJ_at; Start 26; Stop 50
atgccatcgctaaaaaaacctcgat

SEQ ID NO: 28820 - DNA, 25 bp, Artificial
  probe
  misc_feature (1)..(25): SEQ ID NO: 479; WAN0249OJ_at; Start 17; Stop 41
gtttgggatatgccatcgctaaaaa

SEQ ID NO: 28821 - DNA, 25 bp, Artificial
  probe
  misc_feature (1)..(25): SEQ ID NO: 479; WAN0249OJ_at; Start 1; Stop 25
agtagaatattacgatgtttgggat

SEQ ID NO: 28822 - DNA, 25 bp, Artificial
  probe
  misc_feature (1)..(25): SEQ ID NO: 479; WAN0249OJ_at; Start 56; Stop 80
attttttagctccctaatgggagct

SEQ ID NO: 28823 - DNA, 25 bp, Artificial
  probe
  misc_feature (1)..(25): SEQ ID NO: 479; WAN0249OJ_at; Start 18; Stop 42
tttgggatatgccatcgctaaaaaa

SEQ ID NO: 28824 - DNA, 25 bp, Artificial
  probe
  misc_feature (1)..(25): SEQ ID NO: 479; WAN0249OJ_at; Start 20; Stop 44
tgggatatgccatcgctaaaaaaac

SEQ ID NO: 28825 - DNA, 25 bp, Artificial
  probe
  misc_feature (1)..(25): SEQ ID NO: 479; WAN0249OJ_at; Start 16; Stop 40
tgtttgggatatgccatcgctaaaa

SEQ ID NO: 28826 - DNA, 25 bp, Artificial
  probe
  misc_feature (1)..(25): SEQ ID NO: 479; WAN0249OJ_at; Start 9; Stop 33
attacgatgtttgggatatgccatc

SEQ ID NO: 28827 - DNA, 25 bp, Artificial
  probe
  misc_feature (1)..(25): SEQ ID NO: 479; WAN0249OJ_at; Start 24; Stop 48
atatgccatcgctaaaaaaacctcg

SEQ ID NO: 28828 - DNA, 25 bp, Artificial
  probe
  misc_feature (1)..(25): SEQ ID NO: 479; WAN0249OJ_at; Start 27; Stop 51
tgccatcgctaaaaaaacctcgatt

SEQ ID NO: 28829 - DNA, 25 bp, Artificial
  probe
  misc_feature (1)..(25): SEQ ID NO: 479; WAN0249OJ_at; Start 3; Stop 27
tagaatattacgatgtttgggatat

SEQ ID NO: 28830 - DNA, 25 bp, Artificial
  probe
  misc_feature (1)..(25): SEQ ID NO: 479; WAN0249OJ_at; Start 19; Stop 43
ttgggatatgccatcgctaaaaaaa

SEQ ID NO: 28831 - DNA, 25 bp, Artificial
  probe
  misc_feature (1)..(25): SEQ ID NO: 479; WAN0249OJ_at; Start 23; Stop 47
gatatgccatcgctaaaaaaacctc

SEQ ID NO: 28832 - DNA, 25 bp, Artificial
  probe
  misc_feature (1)..(25): SEQ ID NO: 479; WAN0249OJ_at; Start 6; Stop 30
aatattacgatgtttgggatatgcc

SEQ ID NO: 28833 - DNA, 25 bp, Artificial
  probe
  misc_feature (1)..(25): SEQ ID NO: 479; WAN0249OJ_at; Start 55; Stop 79
tattttttagctccctaatgggagc

SEQ ID NO: 28834 - DNA, 25 bp, Artificial
  probe
  misc_feature (1)..(25): SEQ ID NO: 479; WAN0249OJ_at; Start 25; Stop 49
tatgccatcgctaaaaaaacctcga

SEQ ID NO: 28835 - DNA, 25 bp, Artificial
  probe
  misc_feature (1)..(25): SEQ ID NO: 479; WAN0249OJ_at; Start 5; Stop 29
gaatattacgatgtttgggatatgc

SEQ ID NO: 28836 - DNA, 25 bp, Artificial
  probe
  misc_feature (1)..(25): SEQ ID NO: 479; WAN0249OJ_at; Start 30; Stop 54
catcgctaaaaaaacctcgatttgg

SEQ ID NO: 28837 - DNA, 25 bp, Artificial
  probe
  misc_feature (1)..(25): SEQ ID NO: 479; WAN0249OJ_at; Start 8; Stop 32
tattacgatgtttgggatatgccat

SEQ ID NO: 28838 - DNA, 25 bp, Artificial
  probe
  misc_feature (1)..(25): SEQ ID NO: 479; WAN0249OJ_at; Start 11; Stop 35
tacgatgtttgggatatgccatcgc

SEQ ID NO: 28839 - DNA, 25 bp, Artificial
  probe
  misc_feature (1)..(25): SEQ ID NO: 479; WAN0249OJ_at; Start 7; Stop 31
atattacgatgtttgggatatgcca

SEQ ID NO: 28840 - DNA, 25 bp, Artificial
  probe
  misc_feature (1)..(25): SEQ ID NO: 479; WAN0249OJ_at; Start 4; Stop 28
agaatattacgatgtttgggatatg

SEQ ID NO: 28841 - DNA, 25 bp, Artificial
  probe
  misc_feature (1)..(25): SEQ ID NO: 479; WAN0249OJ_at; Start 21; Stop 45
gggatatgccatcgctaaaaaaacc

SEQ ID NO: 28842 - DNA, 25 bp, Artificial
  probe
  misc_feature (1)..(25): SEQ ID NO: 479; WAN0249OJ_at; Start 10; Stop 34
ttacgatgtttgggatatgccatcg

SEQ ID NO: 28843 - DNA, 25 bp, Artificial
  probe
  misc_feature (1)..(25): SEQ ID NO: 217; WAN0249OK_at; Start 24; Stop 48
taaaagcgtaaaagacaagacatga

SEQ ID NO: 28844 - DNA, 25 bp, Artificial
  probe
  misc_feature (1)..(25): SEQ ID NO: 217; WAN0249OK_at; Start 21; Stop 45
gaataaaagcgtaaaagacaagaca

SEQ ID NO: 28845 - DNA, 25 bp, Artificial
  probe
  misc_feature (1)..(25): SEQ ID NO: 217; WAN0249OK_at; Start 25; Stop 49
aaaagcgtaaaagacaagacatgag

SEQ ID NO: 28846 - DNA, 25 bp, Artificial
  probe
  misc_feature (1)..(25): SEQ ID NO: 217; WAN0249OK_at; Start 19; Stop 43
tagaataaaagcgtaaaagacaaga

SEQ ID NO: 28847 - DNA, 25 bp, Artificial
  probe
  misc_feature (1)..(25): SEQ ID NO: 217; WAN0249OK_at; Start 26; Stop 50
aaagcgtaaaagacaagacatgagc

SEQ ID NO: 28848 - DNA, 25 bp, Artificial
  probe
  misc_feature (1)..(25): SEQ ID NO: 217; WAN0249OK_at; Start 22; Stop 46
aataaaagcgtaaaagacaagacat

SEQ ID NO: 28849 - DNA, 25 bp, Artificial
  probe
  misc_feature (1)..(25): SEQ ID NO: 217; WAN0249OK_at; Start 27; Stop 51
aagcgtaaaagacaagacatgagca

SEQ ID NO: 28850 - DNA, 25 bp, Artificial
  probe
  misc_feature (1)..(25): SEQ ID NO: 217; WAN0249OK_at; Start 28; Stop 52
agcgtaaaagacaagacatgagcag

SEQ ID NO: 28851 - DNA, 25 bp, Artificial
  probe
  misc_feature (1)..(25): SEQ ID NO: 217; WAN0249OK_at; Start 23; Stop 47
ataaaagcgtaaaagacaagacatg

SEQ ID NO: 28852 - DNA, 25 bp, Artificial
  probe
  misc_feature (1)..(25): SEQ ID NO: 3305; WAN0249OL_at; Start 21; Stop 45
catgtcttgtcttttacgcttttat

SEQ ID NO: 28853 - DNA, 25 bp, Artificial
  probe
  misc_feature (1)..(25): SEQ ID NO: 3305; WAN0249OL_at; Start 18; Stop 42
gctcatgtcttgtcttttacgcttt

SEQ ID NO: 28854 - DNA, 25 bp, Artificial
  probe
  misc_feature (1)..(25): SEQ ID NO: 3305; WAN0249OL_at; Start 25; Stop 49
tcttgtcttttacgcttttattcta

SEQ ID NO: 28855 - DNA, 25 bp, Artificial
  probe
  misc_feature (1)..(25): SEQ ID NO: 3305; WAN0249OL_at; Start 20; Stop 44
tcatgtcttgtcttttacgctttta

SEQ ID NO: 28856 - DNA, 25 bp, Artificial
  probe
  misc_feature (1)..(25): SEQ ID NO: 3305; WAN0249OL_at; Start 16; Stop 40
ctgctcatgtcttgtcttttacgct

SEQ ID NO: 28857 - DNA, 25 bp, Artificial
  probe
  misc_feature (1)..(25): SEQ ID NO: 3305; WAN0249OL_at; Start 22; Stop 46
atgtcttgtcttttacgcttttatt

SEQ ID NO: 28858 - DNA, 25 bp, Artificial
  probe
  misc_feature (1)..(25): SEQ ID NO: 3305; WAN0249OL_at; Start 19; Stop 43
ctcatgtcttgtcttttacgctttt

SEQ ID NO: 28859 - DNA, 25 bp, Artificial
  probe
  misc_feature (1)..(25): SEQ ID NO: 3305; WAN0249OL_at; Start 23; Stop 47
tgtcttgtcttttacgcttttattc

SEQ ID NO: 28860 - DNA, 25 bp, Artificial
  probe
  misc_feature (1)..(25): SEQ ID NO: 3305; WAN0249OL_at; Start 17; Stop 41
tgctcatgtcttgtcttttacgctt

SEQ ID NO: 28861 - DNA, 25 bp, Artificial
  probe
  misc_feature (1)..(25): SEQ ID NO: 3577; WAN0249OM_at; Start 26; Stop 50
tatagagaaataaaggggactagcc

SEQ ID NO: 28862 - DNA, 25 bp, Artificial
  probe
  misc_feature (1)..(25): SEQ ID NO: 3577; WAN0249OM_at; Start 27; Stop 51
atagagaaataaaggggactagcct

SEQ ID NO: 28863 - DNA, 25 bp, Artificial
  probe
  misc_feature (1)..(25): SEQ ID NO: 3577; WAN0249OM_at; Start 10; Stop 34
tccaaataactgtttttatagagaa

SEQ ID NO: 28864 - DNA, 25 bp, Artificial
  probe
  misc_feature (1)..(25): SEQ ID NO: 3577; WAN0249OM_at; Start 8; Stop 32
actccaaataactgtttttatagag

SEQ ID NO: 28865 - DNA, 25 bp, Artificial
  probe
  misc_feature (1)..(25): SEQ ID NO: 3577; WAN0249OM_at; Start 9; Stop 33
ctccaaataactgtttttatagaga

SEQ ID NO: 28866 - DNA, 25 bp, Artificial
  probe
  misc_feature (1)..(25): SEQ ID NO: 3577; WAN0249OM_at; Start 25; Stop 49
ttatagagaaataaaggggactagc

SEQ ID NO: 28867 - DNA, 25 bp, Artificial
  probe
  misc_feature (1)..(25): SEQ ID NO: 3577; WAN0249OM_at; Start 12; Stop 36
caaataactgtttttatagagaaat

SEQ ID NO: 28868 - DNA, 25 bp, Artificial
  probe
  misc_feature (1)..(25): SEQ ID NO: 462; WAN0249ON_at; Start 1; Stop 25
aggctagtcccctttatttctctat

SEQ ID NO: 28869 - DNA, 25 bp, Artificial
  probe
  misc_feature (1)..(25): SEQ ID NO: 462; WAN0249ON_at; Start 18; Stop 42
ttctctataaaaacagttatttgga

SEQ ID NO: 28870 - DNA, 25 bp, Artificial
  probe
  misc_feature (1)..(25): SEQ ID NO: 462; WAN0249ON_at; Start 19; Stop 43
tctctataaaaacagttatttggag

SEQ ID NO: 28871 - DNA, 25 bp, Artificial
  probe
  misc_feature (1)..(25): SEQ ID NO: 462; WAN0249ON_at; Start 20; Stop 44
ctctataaaaacagttatttggagt

SEQ ID NO: 28872 - DNA, 25 bp, Artificial
  probe
  misc_feature (1)..(25): SEQ ID NO: 462; WAN0249ON_at; Start 16; Stop 40
atttctctataaaaacagttatttg

SEQ ID NO: 28873 - DNA, 25 bp, Artificial
  probe
  misc_feature (1)..(25): SEQ ID NO: 462; WAN0249ON_at; Start 2; Stop 26
ggctagtcccctttatttctctata

SEQ ID NO: 28874 - DNA, 25 bp, Artificial
  probe
  misc_feature (1)..(25): SEQ ID NO: 462; WAN0249ON_at; Start 3; Stop 27
gctagtcccctttatttctctataa

SEQ ID NO: 28875 - DNA, 25 bp, Artificial
  probe
  misc_feature (1)..(25): SEQ ID NO: 227; WAN0249OO_at; Start 17; Stop 41
tagtcaactgggtttctttgcttat

SEQ ID NO: 28876 - DNA, 25 bp, Artificial
  probe
  misc_feature (1)..(25): SEQ ID NO: 227; WAN0249OO_at; Start 66; Stop 90
aagggctagtggtgtttaccatgga

SEQ ID NO: 28877 - DNA, 25 bp, Artificial
  probe
  misc_feature (1)..(25): SEQ ID NO: 227; WAN0249OO_at; Start 69; Stop 93
ggctagtggtgtttaccatggagct

SEQ ID NO: 28878 - DNA, 25 bp, Artificial
  probe
  misc_feature (1)..(25): SEQ ID NO: 227; WAN0249OO_at; Start 5; Stop 29
tgaactcagttgtagtcaactgggt

SEQ ID NO: 28879 - DNA, 25 bp, Artificial
  probe
  misc_feature (1)..(25): SEQ ID NO: 227; WAN0249OO_at; Start 72; Stop 96
tagtggtgtttaccatggagctctt

SEQ ID NO: 28880 - DNA, 25 bp, Artificial
  probe
  misc_feature (1)..(25): SEQ ID NO: 227; WAN0249OO_at; Start 13; Stop 37
gttgtagtcaactgggtttctttgc

SEQ ID NO: 28881 - DNA, 25 bp, Artificial
  probe
  misc_feature (1)..(25): SEQ ID NO: 227; WAN0249OO_at; Start 74; Stop 98
gtggtgtttaccatggagctcttag

SEQ ID NO: 28882 - DNA, 25 bp, Artificial
  probe
  misc_feature (1)..(25): SEQ ID NO: 227; WAN0249OO_at; Start 50; Stop 74
aattgatagaaaggtaaagggctag

SEQ ID NO: 28883 - DNA, 25 bp, Artificial
  probe
  misc_feature (1)..(25): SEQ ID NO: 227; WAN0249OO_at; Start 52; Stop 76
ttgatagaaaggtaaagggctagtg

SEQ ID NO: 28884 - DNA, 25 bp, Artificial
  probe
  misc_feature (1)..(25): SEQ ID NO: 227; WAN0249OO_at; Start 7; Stop 31
aactcagttgtagtcaactgggttt

SEQ ID NO: 28885 - DNA, 25 bp, Artificial
  probe
  misc_feature (1)..(25): SEQ ID NO: 227; WAN0249OO_at; Start 18; Stop 42
agtcaactgggtttctttgcttatt

SEQ ID NO: 28886 - DNA, 25 bp, Artificial
  probe
  misc_feature (1)..(25): SEQ ID NO: 227; WAN0249OO_at; Start 6; Stop 30
gaactcagttgtagtcaactgggtt

SEQ ID NO: 28887 - DNA, 25 bp, Artificial
  probe
  misc_feature (1)..(25): SEQ ID NO: 227; WAN0249OO_at; Start 11; Stop 35
cagttgtagtcaactgggtttcttt

SEQ ID NO: 28888 - DNA, 25 bp, Artificial
  probe
  misc_feature (1)..(25): SEQ ID NO: 227; WAN0249OO_at; Start 3; Stop 27
gatgaactcagttgtagtcaactgg

SEQ ID NO: 28889 - DNA, 25 bp, Artificial
  probe
  misc_feature (1)..(25): SEQ ID NO: 227; WAN0249OO_at; Start 9; Stop 33
ctcagttgtagtcaactgggtttct

SEQ ID NO: 28890 - DNA, 25 bp, Artificial
  probe
  misc_feature (1)..(25): SEQ ID NO: 227; WAN0249OO_at; Start 77; Stop 101
gtgtttaccatggagctcttagtat

SEQ ID NO: 28891 - DNA, 25 bp, Artificial
  probe
  misc_feature (1)..(25): SEQ ID NO: 227; WAN0249OO_at; Start 8; Stop 32
actcagttgtagtcaactgggtttc

SEQ ID NO: 28892 - DNA, 25 bp, Artificial
  probe
  misc_feature (1)..(25): SEQ ID NO: 227; WAN0249OO_at; Start 4; Stop 28
atgaactcagttgtagtcaactggg

SEQ ID NO: 28893 - DNA, 25 bp, Artificial
  probe
  misc_feature (1)..(25): SEQ ID NO: 227; WAN0249OO_at; Start 71; Stop 95
ctagtggtgtttaccatggagctct

SEQ ID NO: 28894 - DNA, 25 bp, Artificial
  probe
  misc_feature (1)..(25): SEQ ID NO: 227; WAN0249OO_at; Start 70; Stop 94
gctagtggtgtttaccatggagctc

SEQ ID NO: 28895 - DNA, 25 bp, Artificial
  probe
  misc_feature (1)..(25): SEQ ID NO: 227; WAN0249OO_at; Start 78; Stop 102
tgtttaccatggagctcttagtatc

SEQ ID NO: 28896 - DNA, 25 bp, Artificial
  probe
  misc_feature (1)..(25): SEQ ID NO: 227; WAN0249OO_at; Start 10; Stop 34
tcagttgtagtcaactgggtttctt

SEQ ID NO: 28897 - DNA, 25 bp, Artificial
  probe
  misc_feature (1)..(25): SEQ ID NO: 227; WAN0249OO_at; Start 75; Stop 99
tggtgtttaccatggagctcttagt

SEQ ID NO: 28898 - DNA, 25 bp, Artificial
  probe
  misc_feature (1)..(25): SEQ ID NO: 227; WAN0249OO_at; Start 76; Stop 100
ggtgtttaccatggagctcttagta

SEQ ID NO: 28899 - DNA, 25 bp, Artificial
  probe
  misc_feature (1)..(25): SEQ ID NO: 227; WAN0249OO_at; Start 51; Stop 75
attgatagaaaggtaaagggctagt

SEQ ID NO: 28900 - DNA, 25 bp, Artificial
  probe
  misc_feature (1)..(25): SEQ ID NO: 227; WAN0249OO_at; Start 65; Stop 89
aaagggctagtggtgtttaccatgg

SEQ ID NO: 28901 - DNA, 25 bp, Artificial
  probe
  misc_feature (1)..(25): SEQ ID NO: 227; WAN0249OO_at; Start 14; Stop 38
ttgtagtcaactgggtttctttgct

SEQ ID NO: 28902 - DNA, 25 bp, Artificial
  probe
  misc_feature (1)..(25): SEQ ID NO: 227; WAN0249OO_at; Start 16; Stop 40
gtagtcaactgggtttctttgctta

SEQ ID NO: 28903 - DNA, 25 bp, Artificial
  probe
  misc_feature (1)..(25): SEQ ID NO: 227; WAN0249OO_at; Start 73; Stop 97
agtggtgtttaccatggagctctta

SEQ ID NO: 28904 - DNA, 25 bp, Artificial
  probe
  misc_feature (1)..(25): SEQ ID NO: 227; WAN0249OO_at; Start 12; Stop 36
agttgtagtcaactgggtttctttg

SEQ ID NO: 28905 - DNA, 25 bp, Artificial
  probe
  misc_feature (1)..(25): SEQ ID NO: 227; WAN0249OO_at; Start 31; Stop 55
tctttgcttattttagaaaaattga

SEQ ID NO: 28906 - DNA, 25 bp, Artificial
  probe
  misc_feature (1)..(25): SEQ ID NO: 227; WAN0249OO_at; Start 36; Stop 60
gcttattttagaaaaattgatagaa

SEQ ID NO: 28907 - DNA, 25 bp, Artificial
  probe
  misc_feature (1)..(25): SEQ ID NO: 227; WAN0249OO_at; Start 64; Stop 88
taaagggctagtggtgtttaccatg

SEQ ID NO: 28908 - DNA, 25 bp, Artificial
  probe
  misc_feature (1)..(25): SEQ ID NO: 227; WAN0249OO_at; Start 1; Stop 25
aagatgaactcagttgtagtcaact

SEQ ID NO: 28909 - DNA, 25 bp, Artificial
  probe
  misc_feature (1)..(25): SEQ ID NO: 3624; WAN0249OP_at; Start 1; Stop 25
gatactaagagctccatggtaaaca

SEQ ID NO: 28910 - DNA, 25 bp, Artificial
  probe
  misc_feature (1)..(25): SEQ ID NO: 3624; WAN0249OP_at; Start 75; Stop 99
cccagttgactacaactgagttcat

SEQ ID NO: 28911 - DNA, 25 bp, Artificial
  probe
  misc_feature (1)..(25): SEQ ID NO: 3624; WAN0249OP_at; Start 66; Stop 90
gcaaagaaacccagttgactacaac

SEQ ID NO: 28912 - DNA, 25 bp, Artificial
  probe
  misc_feature (1)..(25): SEQ ID NO: 3624; WAN0249OP_at; Start 65; Stop 89
agcaaagaaacccagttgactacaa

SEQ ID NO: 28913 - DNA, 25 bp, Artificial
  probe
  misc_feature (1)..(25): SEQ ID NO: 3624; WAN0249OP_at; Start 27; Stop 51
cactagccctttacctttctatcaa

SEQ ID NO: 28914 - DNA, 25 bp, Artificial
  probe
  misc_feature (1)..(25): SEQ ID NO: 3624; WAN0249OP_at; Start 8; Stop 32
agagctccatggtaaacaccactag

SEQ ID NO: 28915 - DNA, 25 bp, Artificial
  probe
  misc_feature (1)..(25): SEQ ID NO: 3624; WAN0249OP_at; Start 13; Stop 37
tccatggtaaacaccactagccctt

SEQ ID NO: 28916 - DNA, 25 bp, Artificial
  probe
  misc_feature (1)..(25): SEQ ID NO: 3624; WAN0249OP_at; Start 14; Stop 38
ccatggtaaacaccactagcccttt

SEQ ID NO: 28917 - DNA, 25 bp, Artificial
  probe
  misc_feature (1)..(25): SEQ ID NO: 3624; WAN0249OP_at; Start 10; Stop 34
agctccatggtaaacaccactagcc

SEQ ID NO: 28918 - DNA, 25 bp, Artificial
  probe
  misc_feature (1)..(25): SEQ ID NO: 3624; WAN0249OP_at; Start 70; Stop 94
agaaacccagttgactacaactgag

SEQ ID NO: 28919 - DNA, 25 bp, Artificial
  probe
  misc_feature (1)..(25): SEQ ID NO: 3624; WAN0249OP_at; Start 28; Stop 52
actagccctttacctttctatcaat

SEQ ID NO: 28920 - DNA, 25 bp, Artificial
  probe
  misc_feature (1)..(25): SEQ ID NO: 3624; WAN0249OP_at; Start 61; Stop 85
aataagcaaagaaacccagttgact

SEQ ID NO: 28921 - DNA, 25 bp, Artificial
  probe
  misc_feature (1)..(25): SEQ ID NO: 3624; WAN0249OP_at; Start 5; Stop 29
ctaagagctccatggtaaacaccac

SEQ ID NO: 28922 - DNA, 25 bp, Artificial
  probe
  misc_feature (1)..(25): SEQ ID NO: 3624; WAN0249OP_at; Start 68; Stop 92
aaagaaacccagttgactacaactg

SEQ ID NO: 28923 - DNA, 25 bp, Artificial
  probe
  misc_feature (1)..(25): SEQ ID NO: 3624; WAN0249OP_at; Start 67; Stop 91
caaagaaacccagttgactacaact

SEQ ID NO: 28924 - DNA, 25 bp, Artificial
  probe
  misc_feature (1)..(25): SEQ ID NO: 3624; WAN0249OP_at; Start 15; Stop 39
catggtaaacaccactagcccttta

SEQ ID NO: 28925 - DNA, 25 bp, Artificial
  probe
  misc_feature (1)..(25): SEQ ID NO: 3624; WAN0249OP_at; Start 63; Stop 87
taagcaaagaaacccagttgactac

SEQ ID NO: 28926 - DNA, 25 bp, Artificial
  probe
  misc_feature (1)..(25): SEQ ID NO: 3624; WAN0249OP_at; Start 7; Stop 31
aagagctccatggtaaacaccacta

SEQ ID NO: 28927 - DNA, 25 bp, Artificial
  probe
  misc_feature (1)..(25): SEQ ID NO: 3624; WAN0249OP_at; Start 77; Stop 101
cagttgactacaactgagttcatct

SEQ ID NO: 28928 - DNA, 25 bp, Artificial
  probe
  misc_feature (1)..(25): SEQ ID NO: 3624; WAN0249OP_at; Start 76; Stop 100
ccagttgactacaactgagttcatc

SEQ ID NO: 28929 - DNA, 25 bp, Artificial
  probe
  misc_feature (1)..(25): SEQ ID NO: 3624; WAN0249OP_at; Start 72; Stop 96
aaacccagttgactacaactgagtt

SEQ ID NO: 28930 - DNA, 25 bp, Artificial
  probe
  misc_feature (1)..(25): SEQ ID NO: 3624; WAN0249OP_at; Start 73; Stop 97
aacccagttgactacaactgagttc

SEQ ID NO: 28931 - DNA, 25 bp, Artificial
  probe
  misc_feature (1)..(25): SEQ ID NO: 3624; WAN0249OP_at; Start 71; Stop 95
gaaacccagttgactacaactgagt

SEQ ID NO: 28932 - DNA, 25 bp, Artificial
  probe
  misc_feature (1)..(25): SEQ ID NO: 3624; WAN0249OP_at; Start 3; Stop 27
tactaagagctccatggtaaacacc

SEQ ID NO: 28933 - DNA, 25 bp, Artificial
  probe
  misc_feature (1)..(25): SEQ ID NO: 3624; WAN0249OP_at; Start 69; Stop 93
aagaaacccagttgactacaactga

SEQ ID NO: 28934 - DNA, 25 bp, Artificial
  probe
  misc_feature (1)..(25): SEQ ID NO: 3624; WAN0249OP_at; Start 78; Stop 102
agttgactacaactgagttcatctt

SEQ ID NO: 28935 - DNA, 25 bp, Artificial
  probe
  misc_feature (1)..(25): SEQ ID NO: 3624; WAN0249OP_at; Start 48; Stop 72
tcaatttttctaaaataagcaaaga

SEQ ID NO: 28936 - DNA, 25 bp, Artificial
  probe
  misc_feature (1)..(25): SEQ ID NO: 3624; WAN0249OP_at; Start 29; Stop 53
ctagccctttacctttctatcaatt

SEQ ID NO: 28937 - DNA, 25 bp, Artificial
  probe
  misc_feature (1)..(25): SEQ ID NO: 3624; WAN0249OP_at; Start 2; Stop 26
atactaagagctccatggtaaacac

SEQ ID NO: 28938 - DNA, 25 bp, Artificial
  probe
  misc_feature (1)..(25): SEQ ID NO: 3624; WAN0249OP_at; Start 74; Stop 98
acccagttgactacaactgagttca

SEQ ID NO: 28939 - DNA, 25 bp, Artificial
  probe
  misc_feature (1)..(25): SEQ ID NO: 3624; WAN0249OP_at; Start 9; Stop 33
gagctccatggtaaacaccactagc

SEQ ID NO: 28940 - DNA, 25 bp, Artificial
  probe
  misc_feature (1)..(25): SEQ ID NO: 3624; WAN0249OP_at; Start 6; Stop 30
taagagctccatggtaaacaccact

SEQ ID NO: 28941 - DNA, 25 bp, Artificial
  probe
  misc_feature (1)..(25): SEQ ID NO: 3624; WAN0249OP_at; Start 4; Stop 28
actaagagctccatggtaaacacca

SEQ ID NO: 28942 - DNA, 25 bp, Artificial
  probe
  misc_feature (1)..(25): SEQ ID NO: 3624; WAN0249OP_at; Start 62; Stop 86
ataagcaaagaaacccagttgacta

SEQ ID NO: 28943 - DNA, 25 bp, Artificial
  probe
  misc_feature (1)..(25): SEQ ID NO: 3825; WAN0249OQ_at; Start 23; Stop 47
tctcaagtctctactaaactactat

SEQ ID NO: 28944 - DNA, 25 bp, Artificial
  probe
  misc_feature (1)..(25): SEQ ID NO: 3825; WAN0249OQ_at; Start 22; Stop 46
ttctcaagtctctactaaactacta

SEQ ID NO: 28945 - DNA, 25 bp, Artificial
  probe
  misc_feature (1)..(25): SEQ ID NO: 3825; WAN0249OQ_at; Start 27; Stop 51
aagtctctactaaactactatttct

SEQ ID NO: 28946 - DNA, 25 bp, Artificial
  probe
  misc_feature (1)..(25): SEQ ID NO: 3825; WAN0249OQ_at; Start 25; Stop 49
tcaagtctctactaaactactattt

SEQ ID NO: 28947 - DNA, 25 bp, Artificial
  probe
  misc_feature (1)..(25): SEQ ID NO: 3825; WAN0249OQ_at; Start 17; Stop 41
gctttttctcaagtctctactaaac

SEQ ID NO: 28948 - DNA, 25 bp, Artificial
  probe
  misc_feature (1)..(25): SEQ ID NO: 3825; WAN0249OQ_at; Start 14; Stop 38
taggctttttctcaagtctctacta

SEQ ID NO: 28949 - DNA, 25 bp, Artificial
  probe
  misc_feature (1)..(25): SEQ ID NO: 3825; WAN0249OQ_at; Start 15; Stop 39
aggctttttctcaagtctctactaa

SEQ ID NO: 28950 - DNA, 25 bp, Artificial
  probe
  misc_feature (1)..(25): SEQ ID NO: 3825; WAN0249OQ_at; Start 32; Stop 56
tctactaaactactatttctaaaca

SEQ ID NO: 28951 - DNA, 25 bp, Artificial
  probe
  misc_feature (1)..(25): SEQ ID NO: 3825; WAN0249OQ_at; Start 30; Stop 54
tctctactaaactactatttctaaa

SEQ ID NO: 28952 - DNA, 25 bp, Artificial
  probe
  misc_feature (1)..(25): SEQ ID NO: 3825; WAN0249OQ_at; Start 26; Stop 50
caagtctctactaaactactatttc

SEQ ID NO: 28953 - DNA, 25 bp, Artificial
  probe
  misc_feature (1)..(25): SEQ ID NO: 3825; WAN0249OQ_at; Start 28; Stop 52
agtctctactaaactactatttcta

SEQ ID NO: 28954 - DNA, 25 bp, Artificial
  probe
  misc_feature (1)..(25): SEQ ID NO: 3825; WAN0249OQ_at; Start 16; Stop 40
ggctttttctcaagtctctactaaa

SEQ ID NO: 28955 - DNA, 25 bp, Artificial
  probe
  misc_feature (1)..(25): SEQ ID NO: 3825; WAN0249OQ_at; Start 29; Stop 53
gtctctactaaactactatttctaa

SEQ ID NO: 28956 - DNA, 25 bp, Artificial
  probe
  misc_feature (1)..(25): SEQ ID NO: 3825; WAN0249OQ_at; Start 18; Stop 42
ctttttctcaagtctctactaaact

SEQ ID NO: 28957 - DNA, 25 bp, Artificial
  probe
  misc_feature (1)..(25): SEQ ID NO: 3825; WAN0249OQ_at; Start 21; Stop 45
tttctcaagtctctactaaactact

SEQ ID NO: 28958 - DNA, 25 bp, Artificial
  probe
  misc_feature (1)..(25): SEQ ID NO: 3825; WAN0249OQ_at; Start 20; Stop 44
ttttctcaagtctctactaaactac

SEQ ID NO: 28959 - DNA, 25 bp, Artificial
  probe
  misc_feature (1)..(25): SEQ ID NO: 3825; WAN0249OQ_at; Start 13; Stop 37
gtaggctttttctcaagtctctact

SEQ ID NO: 28960 - DNA, 25 bp, Artificial
  probe
  misc_feature (1)..(25): SEQ ID NO: 3825; WAN0249OQ_at; Start 19; Stop 43
tttttctcaagtctctactaaacta

SEQ ID NO: 28961 - DNA, 25 bp, Artificial
  probe
  misc_feature (1)..(25): SEQ ID NO: 3825; WAN0249OQ_at; Start 24; Stop 48
ctcaagtctctactaaactactatt

SEQ ID NO: 28962 - DNA, 25 bp, Artificial
  probe
  misc_feature (1)..(25): SEQ ID NO: 4487; WAN0249OR_at; Start 67; Stop 91
ttagtagagacttgagaaaaagcct

SEQ ID NO: 28963 - DNA, 25 bp, Artificial
  probe
  misc_feature (1)..(25): SEQ ID NO: 4487; WAN0249OR_at; Start 63; Stop 87
tagtttagtagagacttgagaaaaa

SEQ ID NO: 28964 - DNA, 25 bp, Artificial
  probe
  misc_feature (1)..(25): SEQ ID NO: 4487; WAN0249OR_at; Start 69; Stop 93
agtagagacttgagaaaaagcctac

SEQ ID NO: 28965 - DNA, 25 bp, Artificial
  probe
  misc_feature (1)..(25): SEQ ID NO: 4487; WAN0249OR_at; Start 60; Stop 84
tagtagtttagtagagacttgagaa

SEQ ID NO: 28966 - DNA, 25 bp, Artificial
  probe
  misc_feature (1)..(25): SEQ ID NO: 4487; WAN0249OR_at; Start 66; Stop 90
tttagtagagacttgagaaaaagcc

SEQ ID NO: 28967 - DNA, 25 bp, Artificial
  probe
  misc_feature (1)..(25): SEQ ID NO: 4487; WAN0249OR_at; Start 65; Stop 89
gtttagtagagacttgagaaaaagc

SEQ ID NO: 28968 - DNA, 25 bp, Artificial
  probe
  misc_feature (1)..(25): SEQ ID NO: 4487; WAN0249OR_at; Start 64; Stop 88
agtttagtagagacttgagaaaaag

SEQ ID NO: 28969 - DNA, 25 bp, Artificial
  probe
  misc_feature (1)..(25): SEQ ID NO: 4487; WAN0249OR_at; Start 62; Stop 86
gtagtttagtagagacttgagaaaa

SEQ ID NO: 28970 - DNA, 25 bp, Artificial
  probe
  misc_feature (1)..(25): SEQ ID NO: 4487; WAN0249OR_at; Start 68; Stop 92
tagtagagacttgagaaaaagccta

SEQ ID NO: 28971 - DNA, 25 bp, Artificial
  probe
  misc_feature (1)..(25): SEQ ID NO: 4487; WAN0249OR_at; Start 61; Stop 85
agtagtttagtagagacttgagaaa

SEQ ID NO: 28972 - DNA, 25 bp, Artificial
  probe
  misc_feature (1)..(25): SEQ ID NO: 533; WAN0249OS_at; Start 79; Stop 103
gccattattctagagaaatgttatt

SEQ ID NO: 28973 - DNA, 25 bp, Artificial
  probe
  misc_feature (1)..(25): SEQ ID NO: 533; WAN0249OS_at; Start 5; Stop 29
gaaagagcagttgaaaaattactgc

SEQ ID NO: 28974 - DNA, 25 bp, Artificial
  probe
  misc_feature (1)..(25): SEQ ID NO: 533; WAN0249OS_at; Start 75; Stop 99
ttttgccattattctagagaaatgt

SEQ ID NO: 28975 - DNA, 25 bp, Artificial
  probe
  misc_feature (1)..(25): SEQ ID NO: 533; WAN0249OS_at; Start 105; Stop 129
cacagattgactaaaaggagacaca

SEQ ID NO: 28976 - DNA, 25 bp, Artificial
  probe
  misc_feature (1)..(25): SEQ ID NO: 533; WAN0249OS_at; Start 100; Stop 124
tatttcacagattgactaaaaggag

SEQ ID NO: 28977 - DNA, 25 bp, Artificial
  probe
  misc_feature (1)..(25): SEQ ID NO: 533; WAN0249OS_at; Start 33; Stop 57
tttgttacactagatagaaagactg

SEQ ID NO: 28978 - DNA, 25 bp, Artificial
  probe
  misc_feature (1)..(25): SEQ ID NO: 533; WAN0249OS_at; Start 97; Stop 121
tgttatttcacagattgactaaaag

SEQ ID NO: 28979 - DNA, 25 bp, Artificial
  probe
  misc_feature (1)..(25): SEQ ID NO: 533; WAN0249OS_at; Start 42; Stop 66
ctagatagaaagactgtaaaggata

SEQ ID NO: 28980 - DNA, 25 bp, Artificial
  probe
  misc_feature (1)..(25): SEQ ID NO: 533; WAN0249OS_at; Start 40; Stop 64
cactagatagaaagactgtaaagga

SEQ ID NO: 28981 - DNA, 25 bp, Artificial
  probe
  misc_feature (1)..(25): SEQ ID NO: 533; WAN0249OS_at; Start 50; Stop 74
aaagactgtaaaggataatctggct

SEQ ID NO: 28982 - DNA, 25 bp, Artificial
  probe
  misc_feature (1)..(25): SEQ ID NO: 533; WAN0249OS_at; Start 72; Stop 96
gctttttgccattattctagagaaa

SEQ ID NO: 28983 - DNA, 25 bp, Artificial
  probe
  misc_feature (1)..(25): SEQ ID NO: 533; WAN0249OS_at; Start 59; Stop 83
aaaggataatctggctttttgccat

SEQ ID NO: 28984 - DNA, 25 bp, Artificial
  probe
  misc_feature (1)..(25): SEQ ID NO: 533; WAN0249OS_at; Start 51; Stop 75
aagactgtaaaggataatctggctt

SEQ ID NO: 28985 - DNA, 25 bp, Artificial
  probe
  misc_feature (1)..(25): SEQ ID NO: 533; WAN0249OS_at; Start 53; Stop 77
gactgtaaaggataatctggctttt

SEQ ID NO: 28986 - DNA, 25 bp, Artificial
  probe
  misc_feature (1)..(25): SEQ ID NO: 533; WAN0249OS_at; Start 2; Stop 26
taagaaagagcagttgaaaaattac

SEQ ID NO: 28987 - DNA, 25 bp, Artificial
  probe
  misc_feature (1)..(25): SEQ ID NO: 533; WAN0249OS_at; Start 104; Stop 128
tcacagattgactaaaaggagacac

SEQ ID NO: 28988 - DNA, 25 bp, Artificial
  probe
  misc_feature (1)..(25): SEQ ID NO: 533; WAN0249OS_at; Start 9; Stop 33
gagcagttgaaaaattactgctttt

SEQ ID NO: 28989 - DNA, 25 bp, Artificial
  probe
  misc_feature (1)..(25): SEQ ID NO: 533; WAN0249OS_at; Start 91; Stop 115
gagaaatgttatttcacagattgac

SEQ ID NO: 28990 - DNA, 25 bp, Artificial
  probe
  misc_feature (1)..(25): SEQ ID NO: 533; WAN0249OS_at; Start 93; Stop 117
gaaatgttatttcacagattgacta

SEQ ID NO: 28991 - DNA, 25 bp, Artificial
  probe
  misc_feature (1)..(25): SEQ ID NO: 533; WAN0249OS_at; Start 103; Stop 127
ttcacagattgactaaaaggagaca

SEQ ID NO: 28992 - DNA, 25 bp, Artificial
  probe
  misc_feature (1)..(25): SEQ ID NO: 533; WAN0249OS_at; Start 84; Stop 108
tattctagagaaatgttatttcaca

SEQ ID NO: 28993 - DNA, 25 bp, Artificial
  probe
  misc_feature (1)..(25): SEQ ID NO: 533; WAN0249OS_at; Start 45; Stop 69
gatagaaagactgtaaaggataatc

SEQ ID NO: 28994 - DNA, 25 bp, Artificial
  probe
  misc_feature (1)..(25): SEQ ID NO: 533; WAN0249OS_at; Start 31; Stop 55
tttttgttacactagatagaaagac

SEQ ID NO: 28995 - DNA, 25 bp, Artificial
  probe
  misc_feature (1)..(25): SEQ ID NO: 533; WAN0249OS_at; Start 28; Stop 52
gcttttttgttacactagatagaaa

SEQ ID NO: 28996 - DNA, 25 bp, Artificial
  probe
  misc_feature (1)..(25): SEQ ID NO: 533; WAN0249OS_at; Start 35; Stop 59
tgttacactagatagaaagactgta

SEQ ID NO: 28997 - DNA, 25 bp, Artificial
  probe
  misc_feature (1)..(25): SEQ ID NO: 533; WAN0249OS_at; Start 71; Stop 95
ggctttttgccattattctagagaa

SEQ ID NO: 28998 - DNA, 25 bp, Artificial
  probe
  misc_feature (1)..(25): SEQ ID NO: 533; WAN0249OS_at; Start 102; Stop 126
tttcacagattgactaaaaggagac

SEQ ID NO: 28999 - DNA, 25 bp, Artificial
  probe
  misc_feature (1)..(25): SEQ ID NO: 533; WAN0249OS_at; Start 38; Stop 62
tacactagatagaaagactgtaaag

SEQ ID NO: 29000 - DNA, 25 bp, Artificial
  probe
  misc_feature (1)..(25): SEQ ID NO: 533; WAN0249OS_at; Start 25; Stop 49
actgcttttttgttacactagatag

SEQ ID NO: 29001 - DNA, 25 bp, Artificial
  probe
  misc_feature (1)..(25): SEQ ID NO: 533; WAN0249OS_at; Start 47; Stop 71
tagaaagactgtaaaggataatctg

SEQ ID NO: 29002 - DNA, 25 bp, Artificial
  probe
  misc_feature (1)..(25): SEQ ID NO: 533; WAN0249OS_at; Start 58; Stop 82
taaaggataatctggctttttgcca

SEQ ID NO: 29003 - DNA, 25 bp, Artificial
  probe
  misc_feature (1)..(25): SEQ ID NO: 533; WAN0249OS_at; Start 62; Stop 86
ggataatctggctttttgccattat

SEQ ID NO: 29004 - DNA, 25 bp, Artificial
  probe
  misc_feature (1)..(25): SEQ ID NO: 533; WAN0249OS_at; Start 49; Stop 73
gaaagactgtaaaggataatctggc

SEQ ID NO: 29005 - DNA, 25 bp, Artificial
  probe
  misc_feature (1)..(25): SEQ ID NO: 533; WAN0249OS_at; Start 21; Stop 45
aattactgcttttttgttacactag

SEQ ID NO: 29006 - DNA, 25 bp, Artificial
  probe
  misc_feature (1)..(25): SEQ ID NO: 4732; WAN0249OT_at; Start 13; Stop 37
tagtcaatctgtgaaataacatttc

SEQ ID NO: 29007 - DNA, 25 bp, Artificial
  probe
  misc_feature (1)..(25): SEQ ID NO: 4732; WAN0249OT_at; Start 31; Stop 55
acatttctctagaataatggcaaaa

SEQ ID NO: 29008 - DNA, 25 bp, Artificial
  probe
  misc_feature (1)..(25): SEQ ID NO: 4732; WAN0249OT_at; Start 42; Stop 66
gaataatggcaaaaagccagattat

SEQ ID NO: 29009 - DNA, 25 bp, Artificial
  probe
  misc_feature (1)..(25): SEQ ID NO: 4732; WAN0249OT_at; Start 40; Stop 64
tagaataatggcaaaaagccagatt

SEQ ID NO: 29010 - DNA, 25 bp, Artificial
  probe
  misc_feature (1)..(25): SEQ ID NO: 4732; WAN0249OT_at; Start 8; Stop 32
ccttttagtcaatctgtgaaataac

SEQ ID NO: 29011 - DNA, 25 bp, Artificial
  probe
  misc_feature (1)..(25): SEQ ID NO: 4732; WAN0249OT_at; Start 94; Stop 118
caaaaaagcagtaatttttcaactg

SEQ ID NO: 29012 - DNA, 25 bp, Artificial
  probe
  misc_feature (1)..(25): SEQ ID NO: 4732; WAN0249OT_at; Start 64; Stop 88
tatcctttacagtctttctatctag

SEQ ID NO: 29013 - DNA, 25 bp, Artificial
  probe
  misc_feature (1)..(25): SEQ ID NO: 4732; WAN0249OT_at; Start 37; Stop 61
ctctagaataatggcaaaaagccag

SEQ ID NO: 29014 - DNA, 25 bp, Artificial
  probe
  misc_feature (1)..(25): SEQ ID NO: 4732; WAN0249OT_at; Start 71; Stop 95
tacagtctttctatctagtgtaaca

SEQ ID NO: 29015 - DNA, 25 bp, Artificial
  probe
  misc_feature (1)..(25): SEQ ID NO: 4732; WAN0249OT_at; Start 84; Stop 108
tctagtgtaacaaaaaagcagtaat

SEQ ID NO: 29016 - DNA, 25 bp, Artificial
  probe
  misc_feature (1)..(25): SEQ ID NO: 4732; WAN0249OT_at; Start 66; Stop 90
tcctttacagtctttctatctagtg

SEQ ID NO: 29017 - DNA, 25 bp, Artificial
  probe
  misc_feature (1)..(25): SEQ ID NO: 4732; WAN0249OT_at; Start 15; Stop 39
gtcaatctgtgaaataacatttctc

SEQ ID NO: 29018 - DNA, 25 bp, Artificial
  probe
  misc_feature (1)..(25): SEQ ID NO: 4732; WAN0249OT_at; Start 2; Stop 26
gtgtctccttttagtcaatctgtga

SEQ ID NO: 29019 - DNA, 25 bp, Artificial
  probe
  misc_feature (1)..(25): SEQ ID NO: 4732; WAN0249OT_at; Start 27; Stop 51
aataacatttctctagaataatggc

SEQ ID NO: 29020 - DNA, 25 bp, Artificial
  probe
  misc_feature (1)..(25): SEQ ID NO: 4732; WAN0249OT_at; Start 85; Stop 109
ctagtgtaacaaaaaagcagtaatt

SEQ ID NO: 29021 - DNA, 25 bp, Artificial
  probe
  misc_feature (1)..(25): SEQ ID NO: 4732; WAN0249OT_at; Start 1; Stop 25
tgtgtctccttttagtcaatctgtg

SEQ ID NO: 29022 - DNA, 25 bp, Artificial
  probe
  misc_feature (1)..(25): SEQ ID NO: 4732; WAN0249OT_at; Start 80; Stop 104
tctatctagtgtaacaaaaaagcag

SEQ ID NO: 29023 - DNA, 25 bp, Artificial
  probe
  misc_feature (1)..(25): SEQ ID NO: 4732; WAN0249OT_at; Start 3; Stop 27
tgtctccttttagtcaatctgtgaa

SEQ ID NO: 29024 - DNA, 25 bp, Artificial
  probe
  misc_feature (1)..(25): SEQ ID NO: 4732; WAN0249OT_at; Start 17; Stop 41
caatctgtgaaataacatttctcta

SEQ ID NO: 29025 - DNA, 25 bp, Artificial
  probe
  misc_feature (1)..(25): SEQ ID NO: 4732; WAN0249OT_at; Start 101; Stop 125
gcagtaatttttcaactgctctttc

SEQ ID NO: 29026 - DNA, 25 bp, Artificial
  probe
  misc_feature (1)..(25): SEQ ID NO: 4732; WAN0249OT_at; Start 73; Stop 97
cagtctttctatctagtgtaacaaa

SEQ ID NO: 29027 - DNA, 25 bp, Artificial
  probe
  misc_feature (1)..(25): SEQ ID NO: 4732; WAN0249OT_at; Start 29; Stop 53
taacatttctctagaataatggcaa

SEQ ID NO: 29028 - DNA, 25 bp, Artificial
  probe
  misc_feature (1)..(25): SEQ ID NO: 4732; WAN0249OT_at; Start 6; Stop 30
ctccttttagtcaatctgtgaaata

SEQ ID NO: 29029 - DNA, 25 bp, Artificial
  probe
  misc_feature (1)..(25): SEQ ID NO: 4732; WAN0249OT_at; Start 97; Stop 121
aaaagcagtaatttttcaactgctc

SEQ ID NO: 29030 - DNA, 25 bp, Artificial
  probe
  misc_feature (1)..(25): SEQ ID NO: 4732; WAN0249OT_at; Start 75; Stop 99
gtctttctatctagtgtaacaaaaa

SEQ ID NO: 29031 - DNA, 25 bp, Artificial
  probe
  misc_feature (1)..(25): SEQ ID NO: 4732; WAN0249OT_at; Start 4; Stop 28
gtctccttttagtcaatctgtgaaa

SEQ ID NO: 29032 - DNA, 25 bp, Artificial
  probe
  misc_feature (1)..(25): SEQ ID NO: 4732; WAN0249OT_at; Start 45; Stop 69
taatggcaaaaagccagattatcct

SEQ ID NO: 29033 - DNA, 25 bp, Artificial
  probe
  misc_feature (1)..(25): SEQ ID NO: 4732; WAN0249OT_at; Start 104; Stop 128
gtaatttttcaactgctctttctta

SEQ ID NO: 29034 - DNA, 25 bp, Artificial
  probe
  misc_feature (1)..(25): SEQ ID NO: 4732; WAN0249OT_at; Start 20; Stop 44
tctgtgaaataacatttctctagaa

SEQ ID NO: 29035 - DNA, 25 bp, Artificial
  probe
  misc_feature (1)..(25): SEQ ID NO: 4732; WAN0249OT_at; Start 36; Stop 60
tctctagaataatggcaaaaagcca

SEQ ID NO: 29036 - DNA, 25 bp, Artificial
  probe
  misc_feature (1)..(25): SEQ ID NO: 4732; WAN0249OT_at; Start 81; Stop 105
ctatctagtgtaacaaaaaagcagt

SEQ ID NO: 29037 - DNA, 25 bp, Artificial
  probe
  misc_feature (1)..(25): SEQ ID NO: 4732; WAN0249OT_at; Start 49; Stop 73
ggcaaaaagccagattatcctttac

SEQ ID NO: 29038 - DNA, 25 bp, Artificial
  probe
  misc_feature (1)..(25): SEQ ID NO: 4732; WAN0249OT_at; Start 35; Stop 59
ttctctagaataatggcaaaaagcc

SEQ ID NO: 29039 - DNA, 25 bp, Artificial
  probe
  misc_feature (1)..(25): SEQ ID NO: 4732; WAN0249OT_at; Start 39; Stop 63
ctagaataatggcaaaaagccagat

SEQ ID NO: 29040 - DNA, 25 bp, Artificial
  probe
  misc_feature (1)..(25): SEQ ID NO: 7372; WAN0249OU_at; Start 50; Stop 74
aaatcatagaaaaaagcatagtatc

SEQ ID NO: 29041 - DNA, 25 bp, Artificial
  probe
  misc_feature (1)..(25): SEQ ID NO: 7372; WAN0249OU_at; Start 49; Stop 73
aaaatcatagaaaaaagcatagtat

SEQ ID NO: 29042 - DNA, 25 bp, Artificial
  probe
  misc_feature (1)..(25): SEQ ID NO: 7372; WAN0249OU_at; Start 46; Stop 70
atgaaaatcatagaaaaaagcatag

SEQ ID NO: 29043 - DNA, 25 bp, Artificial
  probe
  misc_feature (1)..(25): SEQ ID NO: 7372; WAN0249OU_at; Start 45; Stop 69
aatgaaaatcatagaaaaaagcata

SEQ ID NO: 29044 - DNA, 25 bp, Artificial
  probe
  misc_feature (1)..(25): SEQ ID NO: 7372; WAN0249OU_at; Start 41; Stop 65
actcaatgaaaatcatagaaaaaag

SEQ ID NO: 29045 - DNA, 25 bp, Artificial
  probe
  misc_feature (1)..(25): SEQ ID NO: 7372; WAN0249OU_at; Start 42; Stop 66
ctcaatgaaaatcatagaaaaaagc

SEQ ID NO: 29046 - DNA, 25 bp, Artificial
  probe
  misc_feature (1)..(25): SEQ ID NO: 7372; WAN0249OU_at; Start 47; Stop 71
tgaaaatcatagaaaaaagcatagt

SEQ ID NO: 29047 - DNA, 25 bp, Artificial
  probe
  misc_feature (1)..(25): SEQ ID NO: 7372; WAN0249OU_at; Start 48; Stop 72
gaaaatcatagaaaaaagcatagta

SEQ ID NO: 29048 - DNA, 25 bp, Artificial
  probe
  misc_feature (1)..(25): SEQ ID NO: 7343; WAN0249OV_at; Start 148; Stop 172
tgcattgagaaatctgcgactcgct

SEQ ID NO: 29049 - DNA, 25 bp, Artificial
  probe
  misc_feature (1)..(25): SEQ ID NO: 7343; WAN0249OV_at; Start 145; Stop 169
ctatgcattgagaaatctgcgactc

SEQ ID NO: 29050 - DNA, 25 bp, Artificial
  probe
  misc_feature (1)..(25): SEQ ID NO: 7343; WAN0249OV_at; Start 147; Stop 171
atgcattgagaaatctgcgactcgc

SEQ ID NO: 29051 - DNA, 25 bp, Artificial
  probe
  misc_feature (1)..(25): SEQ ID NO: 7343; WAN0249OV_at; Start 126; Stop 150
tttgcccaattcctcaaagctatgc

SEQ ID NO: 29052 - DNA, 25 bp, Artificial
  probe
  misc_feature (1)..(25): SEQ ID NO: 7343; WAN0249OV_at; Start 234; Stop 258
tttacagagtactaaatataagatt

SEQ ID NO: 29053 - DNA, 25 bp, Artificial
  probe
  misc_feature (1)..(25): SEQ ID NO: 7343; WAN0249OV_at; Start 143; Stop 167
agctatgcattgagaaatctgcgac

SEQ ID NO: 29054 - DNA, 25 bp, Artificial
  probe
  misc_feature (1)..(25): SEQ ID NO: 7343; WAN0249OV_at; Start 136; Stop 160
tcctcaaagctatgcattgagaaat

SEQ ID NO: 29055 - DNA, 25 bp, Artificial
  probe
  misc_feature (1)..(25): SEQ ID NO: 7343; WAN0249OV_at; Start 140; Stop 164
caaagctatgcattgagaaatctgc

SEQ ID NO: 29056 - DNA, 25 bp, Artificial
  probe
  misc_feature (1)..(25): SEQ ID NO: 7343; WAN0249OV_at; Start 137; Stop 161
cctcaaagctatgcattgagaaatc

SEQ ID NO: 29057 - DNA, 25 bp, Artificial
  probe
  misc_feature (1)..(25): SEQ ID NO: 7343; WAN0249OV_at; Start 149; Stop 173
gcattgagaaatctgcgactcgctt

SEQ ID NO: 29058 - DNA, 25 bp, Artificial
  probe
  misc_feature (1)..(25): SEQ ID NO: 7343; WAN0249OV_at; Start 131; Stop 155
ccaattcctcaaagctatgcattga

SEQ ID NO: 29059 - DNA, 25 bp, Artificial
  probe
  misc_feature (1)..(25): SEQ ID NO: 7343; WAN0249OV_at; Start 146; Stop 170
tatgcattgagaaatctgcgactcg

SEQ ID NO: 29060 - DNA, 25 bp, Artificial
  probe
  misc_feature (1)..(25): SEQ ID NO: 7343; WAN0249OV_at; Start 144; Stop 168
gctatgcattgagaaatctgcgact

SEQ ID NO: 29061 - DNA, 25 bp, Artificial
  probe
  misc_feature (1)..(25): SEQ ID NO: 7343; WAN0249OV_at; Start 168; Stop 192
tcgcttcctagtttaaagttgctct

SEQ ID NO: 29062 - DNA, 25 bp, Artificial
  probe
  misc_feature (1)..(25): SEQ ID NO: 7343; WAN0249OV_at; Start 132; Stop 156
caattcctcaaagctatgcattgag

SEQ ID NO: 29063 - DNA, 25 bp, Artificial
  probe
  misc_feature (1)..(25): SEQ ID NO: 7343; WAN0249OV_at; Start 150; Stop 174
cattgagaaatctgcgactcgcttc

SEQ ID NO: 29064 - DNA, 25 bp, Artificial
  probe
  misc_feature (1)..(25): SEQ ID NO: 7343; WAN0249OV_at; Start 133; Stop 157
aattcctcaaagctatgcattgaga

SEQ ID NO: 29065 - DNA, 25 bp, Artificial
  probe
  misc_feature (1)..(25): SEQ ID NO: 7343; WAN0249OV_at; Start 151; Stop 175
attgagaaatctgcgactcgcttcc

SEQ ID NO: 29066 - DNA, 25 bp, Artificial
  probe
  misc_feature (1)..(25): SEQ ID NO: 7343; WAN0249OV_at; Start 99; Stop 123
ctatgcgtttttctatatcaaagac

SEQ ID NO: 29067 - DNA, 25 bp, Artificial
  probe
  misc_feature (1)..(25): SEQ ID NO: 7343; WAN0249OV_at; Start 123; Stop 147
ctttttgcccaattcctcaaagcta

SEQ ID NO: 29068 - DNA, 25 bp, Artificial
  probe
  misc_feature (1)..(25): SEQ ID NO: 7343; WAN0249OV_at; Start 121; Stop 145
gactttttgcccaattcctcaaagc

SEQ ID NO: 29069 - DNA, 25 bp, Artificial
  probe
  misc_feature (1)..(25): SEQ ID NO: 7343; WAN0249OV_at; Start 167; Stop 191
ctcgcttcctagtttaaagttgctc

SEQ ID NO: 29070 - DNA, 25 bp, Artificial
  probe
  misc_feature (1)..(25): SEQ ID NO: 7343; WAN0249OV_at; Start 127; Stop 151
ttgcccaattcctcaaagctatgca

SEQ ID NO: 29071 - DNA, 25 bp, Artificial
  probe
  misc_feature (1)..(25): SEQ ID NO: 7343; WAN0249OV_at; Start 120; Stop 144
agactttttgcccaattcctcaaag

SEQ ID NO: 29072 - DNA, 25 bp, Artificial
  probe
  misc_feature (1)..(25): SEQ ID NO: 7343; WAN0249OV_at; Start 238; Stop 262
cagagtactaaatataagatttaac

SEQ ID NO: 29073 - DNA, 25 bp, Artificial
  probe
  misc_feature (1)..(25): SEQ ID NO: 7343; WAN0249OV_at; Start 142; Stop 166
aagctatgcattgagaaatctgcga

SEQ ID NO: 29074 - DNA, 25 bp, Artificial
  probe
  misc_feature (1)..(25): SEQ ID NO: 7343; WAN0249OV_at; Start 117; Stop 141
caaagactttttgcccaattcctca

SEQ ID NO: 29075 - DNA, 25 bp, Artificial
  probe
  misc_feature (1)..(25): SEQ ID NO: 7343; WAN0249OV_at; Start 102; Stop 126
tgcgtttttctatatcaaagacttt

SEQ ID NO: 29076 - DNA, 25 bp, Artificial
  probe
  misc_feature (1)..(25): SEQ ID NO: 7343; WAN0249OV_at; Start 169; Stop 193
cgcttcctagtttaaagttgctctt

SEQ ID NO: 29077 - DNA, 25 bp, Artificial
  probe
  misc_feature (1)..(25): SEQ ID NO: 7343; WAN0249OV_at; Start 128; Stop 152
tgcccaattcctcaaagctatgcat

SEQ ID NO: 29078 - DNA, 25 bp, Artificial
  probe
  misc_feature (1)..(25): SEQ ID NO: 7343; WAN0249OV_at; Start 139; Stop 163
tcaaagctatgcattgagaaatctg

SEQ ID NO: 29079 - DNA, 25 bp, Artificial
  probe
  misc_feature (1)..(25): SEQ ID NO: 7343; WAN0249OV_at; Start 141; Stop 165
aaagctatgcattgagaaatctgcg

SEQ ID NO: 29080 - DNA, 25 bp, Artificial
  probe
  misc_feature (1)..(25): SEQ ID NO: 7343; WAN0249OV_at; Start 125; Stop 149
ttttgcccaattcctcaaagctatg

SEQ ID NO: 29081 - DNA, 25 bp, Artificial
  probe
  misc_feature (1)..(25): SEQ ID NO: 7343; WAN0249OV_at; Start 129; Stop 153
gcccaattcctcaaagctatgcatt

SEQ ID NO: 29082 - DNA, 25 bp, Artificial
  probe
  misc_feature (1)..(25): SEQ ID NO: 6269; WAN0249OW_at; Start 36; Stop 60
gaaataaggagaggaagcccatgga

SEQ ID NO: 29083 - DNA, 25 bp, Artificial
  probe
  misc_feature (1)..(25): SEQ ID NO: 6269; WAN0249OW_at; Start 42; Stop 66
aggagaggaagcccatggaagaaga

SEQ ID NO: 29084 - DNA, 25 bp, Artificial
  probe
  misc_feature (1)..(25): SEQ ID NO: 6269; WAN0249OW_at; Start 34; Stop 58
aggaaataaggagaggaagcccatg

SEQ ID NO: 29085 - DNA, 25 bp, Artificial
  probe
  misc_feature (1)..(25): SEQ ID NO: 6269; WAN0249OW_at; Start 35; Stop 59
ggaaataaggagaggaagcccatgg

SEQ ID NO: 29086 - DNA, 25 bp, Artificial
  probe
  misc_feature (1)..(25): SEQ ID NO: 6269; WAN0249OW_at; Start 39; Stop 63
ataaggagaggaagcccatggaaga

SEQ ID NO: 29087 - DNA, 25 bp, Artificial
  probe
  misc_feature (1)..(25): SEQ ID NO: 6269; WAN0249OW_at; Start 32; Stop 56
ttaggaaataaggagaggaagccca

SEQ ID NO: 29088 - DNA, 25 bp, Artificial
  probe
  misc_feature (1)..(25): SEQ ID NO: 6269; WAN0249OW_at; Start 40; Stop 64
taaggagaggaagcccatggaagaa

SEQ ID NO: 29089 - DNA, 25 bp, Artificial
  probe
  misc_feature (1)..(25): SEQ ID NO: 6269; WAN0249OW_at; Start 38; Stop 62
aataaggagaggaagcccatggaag

SEQ ID NO: 29090 - DNA, 25 bp, Artificial
  probe
  misc_feature (1)..(25): SEQ ID NO: 6269; WAN0249OW_at; Start 41; Stop 65
aaggagaggaagcccatggaagaag

SEQ ID NO: 29091 - DNA, 25 bp, Artificial
  probe
  misc_feature (1)..(25): SEQ ID NO: 6269; WAN0249OW_at; Start 33; Stop 57
taggaaataaggagaggaagcccat

SEQ ID NO: 29092 - DNA, 25 bp, Artificial
  probe
  misc_feature (1)..(25): SEQ ID NO: 6269; WAN0249OW_at; Start 37; Stop 61
aaataaggagaggaagcccatggaa

SEQ ID NO: 29093 - DNA, 25 bp, Artificial
  probe
  misc_feature (1)..(25): SEQ ID NO: 6252; WAN0249OX_at; Start 153; Stop 177
gatcccctaattgattcgttcacat

SEQ ID NO: 29094 - DNA, 25 bp, Artificial
  probe
  misc_feature (1)..(25): SEQ ID NO: 6252; WAN0249OX_at; Start 52; Stop 76
tattttgattatgaaacttgagaga

SEQ ID NO: 29095 - DNA, 25 bp, Artificial
  probe
  misc_feature (1)..(25): SEQ ID NO: 6252; WAN0249OX_at; Start 23; Stop 47
gtttatggagctatagatacagtca

SEQ ID NO: 29096 - DNA, 25 bp, Artificial
  probe
  misc_feature (1)..(25): SEQ ID NO: 6252; WAN0249OX_at; Start 86; Stop 110
cttgtatagtggattgaatatggaa

SEQ ID NO: 29097 - DNA, 25 bp, Artificial
  probe
  misc_feature (1)..(25): SEQ ID NO: 6252; WAN0249OX_at; Start 101; Stop 125
gaatatggaataatacaatacaact

SEQ ID NO: 29098 - DNA, 25 bp, Artificial
  probe
  misc_feature (1)..(25): SEQ ID NO: 6252; WAN0249OX_at; Start 141; Stop 165
taaaatgctttagatcccctaattg

SEQ ID NO: 29099 - DNA, 25 bp, Artificial
  probe
  misc_feature (1)..(25): SEQ ID NO: 6252; WAN0249OX_at; Start 92; Stop 116
tagtggattgaatatggaataatac

SEQ ID NO: 29100 - DNA, 25 bp, Artificial
  probe
  misc_feature (1)..(25): SEQ ID NO: 6252; WAN0249OX_at; Start 158; Stop 182
cctaattgattcgttcacattctat

SEQ ID NO: 29101 - DNA, 25 bp, Artificial
  probe
  misc_feature (1)..(25): SEQ ID NO: 6252; WAN0249OX_at; Start 73; Stop 97
gagaaatattcatcttgtatagtgg

SEQ ID NO: 29102 - DNA, 25 bp, Artificial
  probe
  misc_feature (1)..(25): SEQ ID NO: 6252; WAN0249OX_at; Start 66; Stop 90
aacttgagagaaatattcatcttgt

SEQ ID NO: 29103 - DNA, 25 bp, Artificial
  probe
  misc_feature (1)..(25): SEQ ID NO: 6252; WAN0249OX_at; Start 63; Stop 87
tgaaacttgagagaaatattcatct

SEQ ID NO: 29104 - DNA, 25 bp, Artificial
  probe
  misc_feature (1)..(25): SEQ ID NO: 6252; WAN0249OX_at; Start 114; Stop 138
tacaatacaacttataaaacattgg

SEQ ID NO: 29105 - DNA, 25 bp, Artificial
  probe
  misc_feature (1)..(25): SEQ ID NO: 6252; WAN0249OX_at; Start 18; Stop 42
gatttgtttatggagctatagatac

SEQ ID NO: 29106 - DNA, 25 bp, Artificial
  probe
  misc_feature (1)..(25): SEQ ID NO: 6252; WAN0249OX_at; Start 168; Stop 192
tcgttcacattctattacaatctac

SEQ ID NO: 29107 - DNA, 25 bp, Artificial
  probe
  misc_feature (1)..(25): SEQ ID NO: 6252; WAN0249OX_at; Start 79; Stop 103
tattcatcttgtatagtggattgaa

SEQ ID NO: 29108 - DNA, 25 bp, Artificial
  probe
  misc_feature (1)..(25): SEQ ID NO: 6252; WAN0249OX_at; Start 138; Stop 162
gtataaaatgctttagatcccctaa

SEQ ID NO: 29109 - DNA, 25 bp, Artificial
  probe
  misc_feature (1)..(25): SEQ ID NO: 6252; WAN0249OX_at; Start 137; Stop 161
ggtataaaatgctttagatccccta

SEQ ID NO: 29110 - DNA, 25 bp, Artificial
  probe
  misc_feature (1)..(25): SEQ ID NO: 6252; WAN0249OX_at; Start 25; Stop 49
ttatggagctatagatacagtcatt

SEQ ID NO: 29111 - DNA, 25 bp, Artificial
  probe
  misc_feature (1)..(25): SEQ ID NO: 6252; WAN0249OX_at; Start 133; Stop 157
cattggtataaaatgctttagatcc

SEQ ID NO: 29112 - DNA, 25 bp, Artificial
  probe
  misc_feature (1)..(25): SEQ ID NO: 6252; WAN0249OX_at; Start 75; Stop 99
gaaatattcatcttgtatagtggat

SEQ ID NO: 29113 - DNA, 25 bp, Artificial
  probe
  misc_feature (1)..(25): SEQ ID NO: 6252; WAN0249OX_at; Start 155; Stop 179
tcccctaattgattcgttcacattc

SEQ ID NO: 29114 - DNA, 25 bp, Artificial
  probe
  misc_feature (1)..(25): SEQ ID NO: 6252; WAN0249OX_at; Start 135; Stop 159
ttggtataaaatgctttagatcccc

SEQ ID NO: 29115 - DNA, 25 bp, Artificial
  probe
  misc_feature (1)..(25): SEQ ID NO: 6252; WAN0249OX_at; Start 6; Stop 30
gactgtatctatgatttgtttatgg

SEQ ID NO: 29116 - DNA, 25 bp, Artificial
  probe
  misc_feature (1)..(25): SEQ ID NO: 6252; WAN0249OX_at; Start 151; Stop 175
tagatcccctaattgattcgttcac

SEQ ID NO: 29117 - DNA, 25 bp, Artificial
  probe
  misc_feature (1)..(25): SEQ ID NO: 6252; WAN0249OX_at; Start 38; Stop 62
gatacagtcatttttattttgatta

SEQ ID NO: 29118 - DNA, 25 bp, Artificial
  probe
  misc_feature (1)..(25): SEQ ID NO: 6252; WAN0249OX_at; Start 164; Stop 188
tgattcgttcacattctattacaat

SEQ ID NO: 29119 - DNA, 25 bp, Artificial
  probe
  misc_feature (1)..(25): SEQ ID NO: 6252; WAN0249OX_at; Start 11; Stop 35
tatctatgatttgtttatggagcta

SEQ ID NO: 29120 - DNA, 25 bp, Artificial
  probe
  misc_feature (1)..(25): SEQ ID NO: 6252; WAN0249OX_at; Start 188; Stop 212
tctactataataaaatgatgagagt

SEQ ID NO: 29121 - DNA, 25 bp, Artificial
  probe
  misc_feature (1)..(25): SEQ ID NO: 6252; WAN0249OX_at; Start 83; Stop 107
catcttgtatagtggattgaatatg

SEQ ID NO: 29122 - DNA, 25 bp, Artificial
  probe
  misc_feature (1)..(25): SEQ ID NO: 6252; WAN0249OX_at; Start 173; Stop 197
cacattctattacaatctactataa

SEQ ID NO: 29123 - DNA, 25 bp, Artificial
  probe
  misc_feature (1)..(25): SEQ ID NO: 6252; WAN0249OX_at; Start 22; Stop 46
tgtttatggagctatagatacagtc

SEQ ID NO: 29124 - DNA, 25 bp, Artificial
  probe
  misc_feature (1)..(25): SEQ ID NO: 6252; WAN0249OX_at; Start 147; Stop 171
gctttagatcccctaattgattcgt

SEQ ID NO: 29125 - DNA, 25 bp, Artificial
  probe
  misc_feature (1)..(25): SEQ ID NO: 6252; WAN0249OX_at; Start 116; Stop 140
caatacaacttataaaacattggta

SEQ ID NO: 29126 - DNA, 25 bp, Artificial
  probe
  misc_feature (1)..(25): SEQ ID NO: 6252; WAN0249OX_at; Start 143; Stop 167
aaatgctttagatcccctaattgat

SEQ ID NO: 29127 - DNA, 25 bp, Artificial
  probe
  misc_feature (1)..(25): SEQ ID NO: 6267; WAN0249OY_at; Start 209; Stop 233
atgagatgctgccttaaccgtgata

SEQ ID NO: 29128 - DNA, 25 bp, Artificial
  probe
  misc_feature (1)..(25): SEQ ID NO: 6267; WAN0249OY_at; Start 205; Stop 229
tttaatgagatgctgccttaaccgt

SEQ ID NO: 29129 - DNA, 25 bp, Artificial
  probe
  misc_feature (1)..(25): SEQ ID NO: 6267; WAN0249OY_at; Start 102; Stop 126
aactatttataatcggctctctgta

SEQ ID NO: 29130 - DNA, 25 bp, Artificial
  probe
  misc_feature (1)..(25): SEQ ID NO: 6267; WAN0249OY_at; Start 201; Stop 225
catatttaatgagatgctgccttaa

SEQ ID NO: 29131 - DNA, 25 bp, Artificial
  probe
  misc_feature (1)..(25): SEQ ID NO: 6267; WAN0249OY_at; Start 196; Stop 220
tatttcatatttaatgagatgctgc

SEQ ID NO: 29132 - DNA, 25 bp, Artificial
  probe
  misc_feature (1)..(25): SEQ ID NO: 6267; WAN0249OY_at; Start 96; Stop 120
taagttaactatttataatcggctc

SEQ ID NO: 29133 - DNA, 25 bp, Artificial
  probe
  misc_feature (1)..(25): SEQ ID NO: 6267; WAN0249OY_at; Start 68; Stop 92
cagtctactatatataaccaatcta

SEQ ID NO: 29134 - DNA, 25 bp, Artificial
  probe
  misc_feature (1)..(25): SEQ ID NO: 6267; WAN0249OY_at; Start 207; Stop 231
taatgagatgctgccttaaccgtga

SEQ ID NO: 29135 - DNA, 25 bp, Artificial
  probe
  misc_feature (1)..(25): SEQ ID NO: 6267; WAN0249OY_at; Start 108; Stop 132
ttataatcggctctctgtaacaaaa

SEQ ID NO: 29136 - DNA, 25 bp, Artificial
  probe
  misc_feature (1)..(25): SEQ ID NO: 6267; WAN0249OY_at; Start 101; Stop 125
taactatttataatcggctctctgt

SEQ ID NO: 29137 - DNA, 25 bp, Artificial
  probe
  misc_feature (1)..(25): SEQ ID NO: 6267; WAN0249OY_at; Start 112; Stop 136
aatcggctctctgtaacaaaattaa

SEQ ID NO: 29138 - DNA, 25 bp, Artificial
  probe
  misc_feature (1)..(25): SEQ ID NO: 6267; WAN0249OY_at; Start 206; Stop 230
ttaatgagatgctgccttaaccgtg

SEQ ID NO: 29139 - DNA, 25 bp, Artificial
  probe
  misc_feature (1)..(25): SEQ ID NO: 6267; WAN0249OY_at; Start 85; Stop 109
ccaatctatcctaagttaactattt

SEQ ID NO: 29140 - DNA, 25 bp, Artificial
  probe
  misc_feature (1)..(25): SEQ ID NO: 6267; WAN0249OY_at; Start 100; Stop 124
ttaactatttataatcggctctctg

SEQ ID NO: 29141 - DNA, 25 bp, Artificial
  probe
  misc_feature (1)..(25): SEQ ID NO: 6267; WAN0249OY_at; Start 82; Stop 106
taaccaatctatcctaagttaacta

SEQ ID NO: 29142 - DNA, 25 bp, Artificial
  probe
  misc_feature (1)..(25): SEQ ID NO: 6267; WAN0249OY_at; Start 200; Stop 224
tcatatttaatgagatgctgcctta

SEQ ID NO: 29143 - DNA, 25 bp, Artificial
  probe
  misc_feature (1)..(25): SEQ ID NO: 6267; WAN0249OY_at; Start 232; Stop 256
taatatctaatcatcaataaacaaa

SEQ ID NO: 29144 - DNA, 25 bp, Artificial
  probe
  misc_feature (1)..(25): SEQ ID NO: 6267; WAN0249OY_at; Start 106; Stop 130
atttataatcggctctctgtaacaa

SEQ ID NO: 29145 - DNA, 25 bp, Artificial
  probe
  misc_feature (1)..(25): SEQ ID NO: 6267; WAN0249OY_at; Start 80; Stop 104
tataaccaatctatcctaagttaac

SEQ ID NO: 29146 - DNA, 25 bp, Artificial
  probe
  misc_feature (1)..(25): SEQ ID NO: 6267; WAN0249OY_at; Start 98; Stop 122
agttaactatttataatcggctctc

SEQ ID NO: 29147 - DNA, 25 bp, Artificial
  probe
  misc_feature (1)..(25): SEQ ID NO: 6267; WAN0249OY_at; Start 110; Stop 134
ataatcggctctctgtaacaaaatt

SEQ ID NO: 29148 - DNA, 25 bp, Artificial
  probe
  misc_feature (1)..(25): SEQ ID NO: 6267; WAN0249OY_at; Start 198; Stop 222
tttcatatttaatgagatgctgcct

SEQ ID NO: 29149 - DNA, 25 bp, Artificial
  probe
  misc_feature (1)..(25): SEQ ID NO: 6267; WAN0249OY_at; Start 107; Stop 131
tttataatcggctctctgtaacaaa

SEQ ID NO: 29150 - DNA, 25 bp, Artificial
  probe
  misc_feature (1)..(25): SEQ ID NO: 6267; WAN0249OY_at; Start 103; Stop 127
actatttataatcggctctctgtaa

SEQ ID NO: 29151 - DNA, 25 bp, Artificial
  probe
  misc_feature (1)..(25): SEQ ID NO: 6267; WAN0249OY_at; Start 204; Stop 228
atttaatgagatgctgccttaaccg

SEQ ID NO: 29152 - DNA, 25 bp, Artificial
  probe
  misc_feature (1)..(25): SEQ ID NO: 6267; WAN0249OY_at; Start 71; Stop 95
tctactatatataaccaatctatcc

SEQ ID NO: 29153 - DNA, 25 bp, Artificial
  probe
  misc_feature (1)..(25): SEQ ID NO: 6267; WAN0249OY_at; Start 113; Stop 137
atcggctctctgtaacaaaattaaa

SEQ ID NO: 29154 - DNA, 25 bp, Artificial
  probe
  misc_feature (1)..(25): SEQ ID NO: 6267; WAN0249OY_at; Start 78; Stop 102
tatataaccaatctatcctaagtta

SEQ ID NO: 29155 - DNA, 25 bp, Artificial
  probe
  misc_feature (1)..(25): SEQ ID NO: 6267; WAN0249OY_at; Start 76; Stop 100
tatatataaccaatctatcctaagt

SEQ ID NO: 29156 - DNA, 25 bp, Artificial
  probe
  misc_feature (1)..(25): SEQ ID NO: 6267; WAN0249OY_at; Start 203; Stop 227
tatttaatgagatgctgccttaacc

SEQ ID NO: 29157 - DNA, 25 bp, Artificial
  probe
  misc_feature (1)..(25): SEQ ID NO: 6267; WAN0249OY_at; Start 230; Stop 254
gataatatctaatcatcaataaaca

SEQ ID NO: 29158 - DNA, 25 bp, Artificial
  probe
  misc_feature (1)..(25): SEQ ID NO: 6267; WAN0249OY_at; Start 210; Stop 234
tgagatgctgccttaaccgtgataa

SEQ ID NO: 29159 - DNA, 25 bp, Artificial
  probe
  misc_feature (1)..(25): SEQ ID NO: 6267; WAN0249OY_at; Start 111; Stop 135
taatcggctctctgtaacaaaatta

SEQ ID NO: 29160 - DNA, 25 bp, Artificial
  probe
  misc_feature (1)..(25): SEQ ID NO: 6267; WAN0249OY_at; Start 109; Stop 133
tataatcggctctctgtaacaaaat

SEQ ID NO: 29161 - DNA, 25 bp, Artificial
  probe
  misc_feature (1)..(25): SEQ ID NO: 7342; WAN0249OZ_at; Start 95; Stop 119
gatactatgcttttttctatgattt

SEQ ID NO: 29162 - DNA, 25 bp, Artificial
  probe
  misc_feature (1)..(25): SEQ ID NO: 7342; WAN0249OZ_at; Start 98; Stop 122
actatgcttttttctatgattttca

SEQ ID NO: 29163 - DNA, 25 bp, Artificial
  probe
  misc_feature (1)..(25): SEQ ID NO: 7342; WAN0249OZ_at; Start 99; Stop 123
ctatgcttttttctatgattttcat

SEQ ID NO: 29164 - DNA, 25 bp, Artificial
  probe
  misc_feature (1)..(25): SEQ ID NO: 7342; WAN0249OZ_at; Start 103; Stop 127
gcttttttctatgattttcattgag

SEQ ID NO: 29165 - DNA, 25 bp, Artificial
  probe
  misc_feature (1)..(25): SEQ ID NO: 7342; WAN0249OZ_at; Start 100; Stop 124
tatgcttttttctatgattttcatt

SEQ ID NO: 29166 - DNA, 25 bp, Artificial
  probe
  misc_feature (1)..(25): SEQ ID NO: 7342; WAN0249OZ_at; Start 101; Stop 125
atgcttttttctatgattttcattg

SEQ ID NO: 29167 - DNA, 25 bp, Artificial
  probe
  misc_feature (1)..(25): SEQ ID NO: 7342; WAN0249OZ_at; Start 96; Stop 120
atactatgcttttttctatgatttt

SEQ ID NO: 29168 - DNA, 25 bp, Artificial
  probe
  misc_feature (1)..(25): SEQ ID NO: 7342; WAN0249OZ_at; Start 97; Stop 121
tactatgcttttttctatgattttc

SEQ ID NO: 29169 - DNA, 25 bp, Artificial
  probe
  misc_feature (1)..(25): SEQ ID NO: 7342; WAN0249OZ_at; Start 104; Stop 128
cttttttctatgattttcattgagt

SEQ ID NO: 29170 - DNA, 25 bp, Artificial
  probe
  misc_feature (1)..(25): SEQ ID NO: 7732; WAN0249P2_at; Start 155; Stop 179
taacttaggatagattggttatata

SEQ ID NO: 29171 - DNA, 25 bp, Artificial
  probe
  misc_feature (1)..(25): SEQ ID NO: 7732; WAN0249P2_at; Start 120; Stop 144
tttaattttgttacagagagccgat

SEQ ID NO: 29172 - DNA, 25 bp, Artificial
  probe
  misc_feature (1)..(25): SEQ ID NO: 7732; WAN0249P2_at; Start 163; Stop 187
gatagattggttatatatagtagac

SEQ ID NO: 29173 - DNA, 25 bp, Artificial
  probe
  misc_feature (1)..(25): SEQ ID NO: 7732; WAN0249P2_at; Start 36; Stop 60
ggcagcatctcattaaatatgaaat

SEQ ID NO: 29174 - DNA, 25 bp, Artificial
  probe
  misc_feature (1)..(25): SEQ ID NO: 7732; WAN0249P2_at; Start 151; Stop 175
tagttaacttaggatagattggtta

SEQ ID NO: 29175 - DNA, 25 bp, Artificial
  probe
  misc_feature (1)..(25): SEQ ID NO: 7732; WAN0249P2_at; Start 24; Stop 48
tatcacggttaaggcagcatctcat

SEQ ID NO: 29176 - DNA, 25 bp, Artificial
  probe
  misc_feature (1)..(25): SEQ ID NO: 7732; WAN0249P2_at; Start 148; Stop 172
aaatagttaacttaggatagattgg

SEQ ID NO: 29177 - DNA, 25 bp, Artificial
  probe
  misc_feature (1)..(25): SEQ ID NO: 7732; WAN0249P2_at; Start 28; Stop 52
acggttaaggcagcatctcattaaa

SEQ ID NO: 29178 - DNA, 25 bp, Artificial
  probe
  misc_feature (1)..(25): SEQ ID NO: 7732; WAN0249P2_at; Start 126; Stop 150
tttgttacagagagccgattataaa

SEQ ID NO: 29179 - DNA, 25 bp, Artificial
  probe
  misc_feature (1)..(25): SEQ ID NO: 7732; WAN0249P2_at; Start 127; Stop 151
ttgttacagagagccgattataaat

SEQ ID NO: 29180 - DNA, 25 bp, Artificial
  probe
  misc_feature (1)..(25): SEQ ID NO: 7732; WAN0249P2_at; Start 29; Stop 53
cggttaaggcagcatctcattaaat

SEQ ID NO: 29181 - DNA, 25 bp, Artificial
  probe
  misc_feature (1)..(25): SEQ ID NO: 7732; WAN0249P2_at; Start 38; Stop 62
cagcatctcattaaatatgaaataa

SEQ ID NO: 29182 - DNA, 25 bp, Artificial
  probe
  misc_feature (1)..(25): SEQ ID NO: 7732; WAN0249P2_at; Start 123; Stop 147
aattttgttacagagagccgattat

SEQ ID NO: 29183 - DNA, 25 bp, Artificial
  probe
  misc_feature (1)..(25): SEQ ID NO: 7732; WAN0249P2_at; Start 33; Stop 57
taaggcagcatctcattaaatatga

SEQ ID NO: 29184 - DNA, 25 bp, Artificial
  probe
  misc_feature (1)..(25): SEQ ID NO: 7732; WAN0249P2_at; Start 26; Stop 50
tcacggttaaggcagcatctcatta

SEQ ID NO: 29185 - DNA, 25 bp, Artificial
  probe
  misc_feature (1)..(25): SEQ ID NO: 7732; WAN0249P2_at; Start 165; Stop 189
tagattggttatatatagtagactg

SEQ ID NO: 29186 - DNA, 25 bp, Artificial
  probe
  misc_feature (1)..(25): SEQ ID NO: 7732; WAN0249P2_at; Start 3; Stop 27
tgtttattgatgattagatattatc

SEQ ID NO: 29187 - DNA, 25 bp, Artificial
  probe
  misc_feature (1)..(25): SEQ ID NO: 7732; WAN0249P2_at; Start 135; Stop 159
gagagccgattataaatagttaact

SEQ ID NO: 29188 - DNA, 25 bp, Artificial
  probe
  misc_feature (1)..(25): SEQ ID NO: 7732; WAN0249P2_at; Start 131; Stop 155
tacagagagccgattataaatagtt

SEQ ID NO: 29189 - DNA, 25 bp, Artificial
  probe
  misc_feature (1)..(25): SEQ ID NO: 7732; WAN0249P2_at; Start 137; Stop 161
gagccgattataaatagttaactta

SEQ ID NO: 29190 - DNA, 25 bp, Artificial
  probe
  misc_feature (1)..(25): SEQ ID NO: 7732; WAN0249P2_at; Start 138; Stop 162
agccgattataaatagttaacttag

SEQ ID NO: 29191 - DNA, 25 bp, Artificial
  probe
  misc_feature (1)..(25): SEQ ID NO: 7732; WAN0249P2_at; Start 124; Stop 148
attttgttacagagagccgattata

SEQ ID NO: 29192 - DNA, 25 bp, Artificial
  probe
  misc_feature (1)..(25): SEQ ID NO: 7732; WAN0249P2_at; Start 122; Stop 146
taattttgttacagagagccgatta

SEQ ID NO: 29193 - DNA, 25 bp, Artificial
  probe
  misc_feature (1)..(25): SEQ ID NO: 7732; WAN0249P2_at; Start 133; Stop 157
cagagagccgattataaatagttaa

SEQ ID NO: 29194 - DNA, 25 bp, Artificial
  probe
  misc_feature (1)..(25): SEQ ID NO: 7732; WAN0249P2_at; Start 141; Stop 165
cgattataaatagttaacttaggat

SEQ ID NO: 29195 - DNA, 25 bp, Artificial
  probe
  misc_feature (1)..(25): SEQ ID NO: 7732; WAN0249P2_at; Start 30; Stop 54
ggttaaggcagcatctcattaaata

SEQ ID NO: 29196 - DNA, 25 bp, Artificial
  probe
  misc_feature (1)..(25): SEQ ID NO: 7732; WAN0249P2_at; Start 23; Stop 47
ttatcacggttaaggcagcatctca

SEQ ID NO: 29197 - DNA, 25 bp, Artificial
  probe
  misc_feature (1)..(25): SEQ ID NO: 7732; WAN0249P2_at; Start 132; Stop 156
acagagagccgattataaatagtta

SEQ ID NO: 29198 - DNA, 25 bp, Artificial
  probe
  misc_feature (1)..(25): SEQ ID NO: 7732; WAN0249P2_at; Start 130; Stop 154
ttacagagagccgattataaatagt

SEQ ID NO: 29199 - DNA, 25 bp, Artificial
  probe
  misc_feature (1)..(25): SEQ ID NO: 7732; WAN0249P2_at; Start 27; Stop 51
cacggttaaggcagcatctcattaa

SEQ ID NO: 29200 - DNA, 25 bp, Artificial
  probe
  misc_feature (1)..(25): SEQ ID NO: 7732; WAN0249P2_at; Start 32; Stop 56
ttaaggcagcatctcattaaatatg

SEQ ID NO: 29201 - DNA, 25 bp, Artificial
  probe
  misc_feature (1)..(25): SEQ ID NO: 7732; WAN0249P2_at; Start 125; Stop 149
ttttgttacagagagccgattataa

SEQ ID NO: 29202 - DNA, 25 bp, Artificial
  probe
  misc_feature (1)..(25): SEQ ID NO: 7732; WAN0249P2_at; Start 34; Stop 58
aaggcagcatctcattaaatatgaa

SEQ ID NO: 29203 - DNA, 25 bp, Artificial
  probe
  misc_feature (1)..(25): SEQ ID NO: 7732; WAN0249P2_at; Start 121; Stop 145
ttaattttgttacagagagccgatt

SEQ ID NO: 29204 - DNA, 25 bp, Artificial
  probe
  misc_feature (1)..(25): SEQ ID NO: 6288; WAN0249P3_at; Start 52; Stop 76
ttttataatagattccctgcgaaac

SEQ ID NO: 29205 - DNA, 25 bp, Artificial
  probe
  misc_feature (1)..(25): SEQ ID NO: 6288; WAN0249P3_at; Start 47; Stop 71
tacccttttataatagattccctgc

SEQ ID NO: 29206 - DNA, 25 bp, Artificial
  probe
  misc_feature (1)..(25): SEQ ID NO: 6288; WAN0249P3_at; Start 54; Stop 78
ttataatagattccctgcgaaacaa

SEQ ID NO: 29207 - DNA, 25 bp, Artificial
  probe
  misc_feature (1)..(25): SEQ ID NO: 6288; WAN0249P3_at; Start 48; Stop 72
acccttttataatagattccctgcg

SEQ ID NO: 29208 - DNA, 25 bp, Artificial
  probe
  misc_feature (1)..(25): SEQ ID NO: 6288; WAN0249P3_at; Start 51; Stop 75
cttttataatagattccctgcgaaa

SEQ ID NO: 29209 - DNA, 25 bp, Artificial
  probe
  misc_feature (1)..(25): SEQ ID NO: 6288; WAN0249P3_at; Start 40; Stop 64
caatacttacccttttataatagat

SEQ ID NO: 29210 - DNA, 25 bp, Artificial
  probe
  misc_feature (1)..(25): SEQ ID NO: 6288; WAN0249P3_at; Start 39; Stop 63
gcaatacttacccttttataataga

SEQ ID NO: 29211 - DNA, 25 bp, Artificial
  probe
  misc_feature (1)..(25): SEQ ID NO: 6288; WAN0249P3_at; Start 37; Stop 61
ttgcaatacttacccttttataata

SEQ ID NO: 29212 - DNA, 25 bp, Artificial
  probe
  misc_feature (1)..(25): SEQ ID NO: 6288; WAN0249P3_at; Start 53; Stop 77
tttataatagattccctgcgaaaca

SEQ ID NO: 29213 - DNA, 25 bp, Artificial
  probe
  misc_feature (1)..(25): SEQ ID NO: 6288; WAN0249P3_at; Start 57; Stop 81
taatagattccctgcgaaacaaaat

SEQ ID NO: 29214 - DNA, 25 bp, Artificial
  probe
  misc_feature (1)..(25): SEQ ID NO: 6288; WAN0249P3_at; Start 49; Stop 73
cccttttataatagattccctgcga

SEQ ID NO: 29215 - DNA, 25 bp, Artificial
  probe
  misc_feature (1)..(25): SEQ ID NO: 6288; WAN0249P3_at; Start 50; Stop 74
ccttttataatagattccctgcgaa

SEQ ID NO: 29216 - DNA, 25 bp, Artificial
  probe
  misc_feature (1)..(25): SEQ ID NO: 6288; WAN0249P3_at; Start 38; Stop 62
tgcaatacttacccttttataatag

SEQ ID NO: 29217 - DNA, 25 bp, Artificial
  probe
  misc_feature (1)..(25): SEQ ID NO: 7369; WAN0249P4_at; Start 144; Stop 168
ctatacaattgtaaaaaagtgagat

SEQ ID NO: 29218 - DNA, 25 bp, Artificial
  probe
  misc_feature (1)..(25): SEQ ID NO: 7369; WAN0249P4_at; Start 115; Stop 139
tagagatgcactattctagttttaa

SEQ ID NO: 29219 - DNA, 25 bp, Artificial
  probe
  misc_feature (1)..(25): SEQ ID NO: 7369; WAN0249P4_at; Start 142; Stop 166
cactatacaattgtaaaaaagtgag

SEQ ID NO: 29220 - DNA, 25 bp, Artificial
  probe
  misc_feature (1)..(25): SEQ ID NO: 7369; WAN0249P4_at; Start 156; Stop 180
aaaaaagtgagatatataatccctc

SEQ ID NO: 29221 - DNA, 25 bp, Artificial
  probe
  misc_feature (1)..(25): SEQ ID NO: 7369; WAN0249P4_at; Start 176; Stop 200
ccctcattttatgcggaaaatatat

SEQ ID NO: 29222 - DNA, 25 bp, Artificial
  probe
  misc_feature (1)..(25): SEQ ID NO: 7369; WAN0249P4_at; Start 122; Stop 146
gcactattctagttttaatccacta

SEQ ID NO: 29223 - DNA, 25 bp, Artificial
  probe
  misc_feature (1)..(25): SEQ ID NO: 7369; WAN0249P4_at; Start 211; Stop 235
gatttatcattatccaatttgaatg

SEQ ID NO: 29224 - DNA, 25 bp, Artificial
  probe
  misc_feature (1)..(25): SEQ ID NO: 7369; WAN0249P4_at; Start 157; Stop 181
aaaaagtgagatatataatccctca

SEQ ID NO: 29225 - DNA, 25 bp, Artificial
  probe
  misc_feature (1)..(25): SEQ ID NO: 7369; WAN0249P4_at; Start 133; Stop 157
gttttaatccactatacaattgtaa

SEQ ID NO: 29226 - DNA, 25 bp, Artificial
  probe
  misc_feature (1)..(25): SEQ ID NO: 7369; WAN0249P4_at; Start 154; Stop 178
gtaaaaaagtgagatatataatccc

SEQ ID NO: 29227 - DNA, 25 bp, Artificial
  probe
  misc_feature (1)..(25): SEQ ID NO: 7369; WAN0249P4_at; Start 185; Stop 209
tatgcggaaaatatatttggtttct

SEQ ID NO: 29228 - DNA, 25 bp, Artificial
  probe
  misc_feature (1)..(25): SEQ ID NO: 7369; WAN0249P4_at; Start 188; Stop 212
gcggaaaatatatttggtttctaga

SEQ ID NO: 29229 - DNA, 25 bp, Artificial
  probe
  misc_feature (1)..(25): SEQ ID NO: 7369; WAN0249P4_at; Start 166; Stop 190
gatatataatccctcattttatgcg

SEQ ID NO: 29230 - DNA, 25 bp, Artificial
  probe
  misc_feature (1)..(25): SEQ ID NO: 7369; WAN0249P4_at; Start 180; Stop 204
cattttatgcggaaaatatatttgg

SEQ ID NO: 29231 - DNA, 25 bp, Artificial
  probe
  misc_feature (1)..(25): SEQ ID NO: 7369; WAN0249P4_at; Start 117; Stop 141
gagatgcactattctagttttaatc

SEQ ID NO: 29232 - DNA, 25 bp, Artificial
  probe
  misc_feature (1)..(25): SEQ ID NO: 7369; WAN0249P4_at; Start 175; Stop 199
tccctcattttatgcggaaaatata

SEQ ID NO: 29233 - DNA, 25 bp, Artificial
  probe
  misc_feature (1)..(25): SEQ ID NO: 7369; WAN0249P4_at; Start 171; Stop 195
ataatccctcattttatgcggaaaa

SEQ ID NO: 29234 - DNA, 25 bp, Artificial
  probe
  misc_feature (1)..(25): SEQ ID NO: 7369; WAN0249P4_at; Start 159; Stop 183
aaagtgagatatataatccctcatt

SEQ ID NO: 29235 - DNA, 25 bp, Artificial
  probe
  misc_feature (1)..(25): SEQ ID NO: 7369; WAN0249P4_at; Start 147; Stop 171
tacaattgtaaaaaagtgagatata

SEQ ID NO: 29236 - DNA, 25 bp, Artificial
  probe
  misc_feature (1)..(25): SEQ ID NO: 7369; WAN0249P4_at; Start 113; Stop 137
agtagagatgcactattctagtttt

SEQ ID NO: 29237 - DNA, 25 bp, Artificial
  probe
  misc_feature (1)..(25): SEQ ID NO: 7369; WAN0249P4_at; Start 164; Stop 188
gagatatataatccctcattttatg

SEQ ID NO: 29238 - DNA, 25 bp, Artificial
  probe
  misc_feature (1)..(25): SEQ ID NO: 7369; WAN0249P4_at; Start 140; Stop 164
tccactatacaattgtaaaaaagtg

SEQ ID NO: 29239 - DNA, 25 bp, Artificial
  probe
  misc_feature (1)..(25): SEQ ID NO: 7369; WAN0249P4_at; Start 23; Stop 47
tattttactcacactaaattatagt

SEQ ID NO: 29240 - DNA, 25 bp, Artificial
  probe
  misc_feature (1)..(25): SEQ ID NO: 7369; WAN0249P4_at; Start 203; Stop 227
ggtttctagatttatcattatccaa

SEQ ID NO: 29241 - DNA, 25 bp, Artificial
  probe
  misc_feature (1)..(25): SEQ ID NO: 7369; WAN0249P4_at; Start 170; Stop 194
tataatccctcattttatgcggaaa

SEQ ID NO: 29242 - DNA, 25 bp, Artificial
  probe
  misc_feature (1)..(25): SEQ ID NO: 7369; WAN0249P4_at; Start 207; Stop 231
tctagatttatcattatccaatttg

SEQ ID NO: 29243 - DNA, 25 bp, Artificial
  probe
  misc_feature (1)..(25): SEQ ID NO: 7369; WAN0249P4_at; Start 172; Stop 196
taatccctcattttatgcggaaaat

SEQ ID NO: 29244 - DNA, 25 bp, Artificial
  probe
  misc_feature (1)..(25): SEQ ID NO: 7369; WAN0249P4_at; Start 153; Stop 177
tgtaaaaaagtgagatatataatcc

SEQ ID NO: 29245 - DNA, 25 bp, Artificial
  probe
  misc_feature (1)..(25): SEQ ID NO: 7369; WAN0249P4_at; Start 11; Stop 35
cctttattattatattttactcaca

SEQ ID NO: 29246 - DNA, 25 bp, Artificial
  probe
  misc_feature (1)..(25): SEQ ID NO: 7369; WAN0249P4_at; Start 30; Stop 54
ctcacactaaattatagtaaaatga

SEQ ID NO: 29247 - DNA, 25 bp, Artificial
  probe
  misc_feature (1)..(25): SEQ ID NO: 7369; WAN0249P4_at; Start 218; Stop 242
cattatccaatttgaatgacaataa

SEQ ID NO: 29248 - DNA, 25 bp, Artificial
  probe
  misc_feature (1)..(25): SEQ ID NO: 7369; WAN0249P4_at; Start 119; Stop 143
gatgcactattctagttttaatcca

SEQ ID NO: 29249 - DNA, 25 bp, Artificial
  probe
  misc_feature (1)..(25): SEQ ID NO: 7369; WAN0249P4_at; Start 173; Stop 197
aatccctcattttatgcggaaaata

SEQ ID NO: 29250 - DNA, 25 bp, Artificial
  probe
  misc_feature (1)..(25): SEQ ID NO: 7369; WAN0249P4_at; Start 168; Stop 192
tatataatccctcattttatgcgga

SEQ ID NO: 29251 - DNA, 25 bp, Artificial
  probe
  misc_feature (1)..(25): SEQ ID NO: 7373; WAN0249P5_at; Start 40; Stop 64
cttttttgcggtacgacgggcatgt

SEQ ID NO: 29252 - DNA, 25 bp, Artificial
  probe
  misc_feature (1)..(25): SEQ ID NO: 7373; WAN0249P5_at; Start 37; Stop 61
tggcttttttgcggtacgacgggca

SEQ ID NO: 29253 - DNA, 25 bp, Artificial
  probe
  misc_feature (1)..(25): SEQ ID NO: 7373; WAN0249P5_at; Start 78; Stop 102
tgtaagtcctcagcctgactatcgt

SEQ ID NO: 29254 - DNA, 25 bp, Artificial
  probe
  misc_feature (1)..(25): SEQ ID NO: 7373; WAN0249P5_at; Start 75; Stop 99
aggtgtaagtcctcagcctgactat

SEQ ID NO: 29255 - DNA, 25 bp, Artificial
  probe
  misc_feature (1)..(25): SEQ ID NO: 7373; WAN0249P5_at; Start 77; Stop 101
gtgtaagtcctcagcctgactatcg

SEQ ID NO: 29256 - DNA, 25 bp, Artificial
  probe
  misc_feature (1)..(25): SEQ ID NO: 7373; WAN0249P5_at; Start 76; Stop 100
ggtgtaagtcctcagcctgactatc

SEQ ID NO: 29257 - DNA, 25 bp, Artificial
  probe
  misc_feature (1)..(25): SEQ ID NO: 7373; WAN0249P5_at; Start 39; Stop 63
gcttttttgcggtacgacgggcatg

SEQ ID NO: 29258 - DNA, 25 bp, Artificial
  probe
  misc_feature (1)..(25): SEQ ID NO: 7373; WAN0249P5_at; Start 74; Stop 98
gaggtgtaagtcctcagcctgacta

SEQ ID NO: 29259 - DNA, 25 bp, Artificial
  probe
  misc_feature (1)..(25): SEQ ID NO: 7373; WAN0249P5_at; Start 79; Stop 103
gtaagtcctcagcctgactatcgtg

SEQ ID NO: 29260 - DNA, 25 bp, Artificial
  probe
  misc_feature (1)..(25): SEQ ID NO: 6281; WAN0249P6_at; Start 14; Stop 38
ttgtttcgcagggaatctattataa

SEQ ID NO: 29261 - DNA, 25 bp, Artificial
  probe
  misc_feature (1)..(25): SEQ ID NO: 6281; WAN0249P6_at; Start 20; Stop 44
cgcagggaatctattataaaagggt

SEQ ID NO: 29262 - DNA, 25 bp, Artificial
  probe
  misc_feature (1)..(25): SEQ ID NO: 6281; WAN0249P6_at; Start 16; Stop 40
gtttcgcagggaatctattataaaa

SEQ ID NO: 29263 - DNA, 25 bp, Artificial
  probe
  misc_feature (1)..(25): SEQ ID NO: 6281; WAN0249P6_at; Start 28; Stop 52
atctattataaaagggtaagtattg

SEQ ID NO: 29264 - DNA, 25 bp, Artificial
  probe
  misc_feature (1)..(25): SEQ ID NO: 6281; WAN0249P6_at; Start 19; Stop 43
tcgcagggaatctattataaaaggg

SEQ ID NO: 29265 - DNA, 25 bp, Artificial
  probe
  misc_feature (1)..(25): SEQ ID NO: 6281; WAN0249P6_at; Start 15; Stop 39
tgtttcgcagggaatctattataaa

SEQ ID NO: 29266 - DNA, 25 bp, Artificial
  probe
  misc_feature (1)..(25): SEQ ID NO: 6281; WAN0249P6_at; Start 21; Stop 45
gcagggaatctattataaaagggta

SEQ ID NO: 29267 - DNA, 25 bp, Artificial
  probe
  misc_feature (1)..(25): SEQ ID NO: 6281; WAN0249P6_at; Start 11; Stop 35
attttgtttcgcagggaatctatta

SEQ ID NO: 29268 - DNA, 25 bp, Artificial
  probe
  misc_feature (1)..(25): SEQ ID NO: 6281; WAN0249P6_at; Start 31; Stop 55
tattataaaagggtaagtattgcaa

SEQ ID NO: 29269 - DNA, 25 bp, Artificial
  probe
  misc_feature (1)..(25): SEQ ID NO: 6281; WAN0249P6_at; Start 17; Stop 41
tttcgcagggaatctattataaaag

SEQ ID NO: 29270 - DNA, 25 bp, Artificial
  probe
  misc_feature (1)..(25): SEQ ID NO: 6281; WAN0249P6_at; Start 30; Stop 54
ctattataaaagggtaagtattgca

SEQ ID NO: 29271 - DNA, 25 bp, Artificial
  probe
  misc_feature (1)..(25): SEQ ID NO: 6281; WAN0249P6_at; Start 18; Stop 42
ttcgcagggaatctattataaaagg

SEQ ID NO: 29272 - DNA, 25 bp, Artificial
  probe
  misc_feature (1)..(25): SEQ ID NO: 6281; WAN0249P6_at; Start 29; Stop 53
tctattataaaagggtaagtattgc

SEQ ID NO: 29273 - DNA, 25 bp, Artificial
  probe
  misc_feature (1)..(25): SEQ ID NO: 6294; WAN0249P7_at; Start 56; Stop 80
aagtgtttagaaatatagtaaaatg

SEQ ID NO: 29274 - DNA, 25 bp, Artificial
  probe
  misc_feature (1)..(25): SEQ ID NO: 6294; WAN0249P7_at; Start 4; Stop 28
gatgttattttcaaatatttagaaa

SEQ ID NO: 29275 - DNA, 25 bp, Artificial
  probe
  misc_feature (1)..(25): SEQ ID NO: 6294; WAN0249P7_at; Start 2; Stop 26
tagatgttattttcaaatatttaga

SEQ ID NO: 29276 - DNA, 25 bp, Artificial
  probe
  misc_feature (1)..(25): SEQ ID NO: 6294; WAN0249P7_at; Start 52; Stop 76
ttctaagtgtttagaaatatagtaa

SEQ ID NO: 29277 - DNA, 25 bp, Artificial
  probe
  misc_feature (1)..(25): SEQ ID NO: 6294; WAN0249P7_at; Start 53; Stop 77
tctaagtgtttagaaatatagtaaa

SEQ ID NO: 29278 - DNA, 25 bp, Artificial
  probe
  misc_feature (1)..(25): SEQ ID NO: 6294; WAN0249P7_at; Start 3; Stop 27
agatgttattttcaaatatttagaa

SEQ ID NO: 29279 - DNA, 25 bp, Artificial
  probe
  misc_feature (1)..(25): SEQ ID NO: 6294; WAN0249P7_at; Start 51; Stop 75
tttctaagtgtttagaaatatagta

SEQ ID NO: 29280 - DNA, 25 bp, Artificial
  probe
  misc_feature (1)..(25): SEQ ID NO: 6271; WAN0249P8_at; Start 32; Stop 56
gtaatggggggctatttcaacttca

SEQ ID NO: 29281 - DNA, 25 bp, Artificial
  probe
  misc_feature (1)..(25): SEQ ID NO: 6271; WAN0249P8_at; Start 52; Stop 76
cttcaacctactataatacagaaaa

SEQ ID NO: 29282 - DNA, 25 bp, Artificial
  probe
  misc_feature (1)..(25): SEQ ID NO: 6271; WAN0249P8_at; Start 47; Stop 71
ttcaacttcaacctactataataca

SEQ ID NO: 29283 - DNA, 25 bp, Artificial
  probe
  misc_feature (1)..(25): SEQ ID NO: 6271; WAN0249P8_at; Start 27; Stop 51
ttagagtaatggggggctatttcaa

SEQ ID NO: 29284 - DNA, 25 bp, Artificial
  probe
  misc_feature (1)..(25): SEQ ID NO: 6271; WAN0249P8_at; Start 29; Stop 53
agagtaatggggggctatttcaact

SEQ ID NO: 29285 - DNA, 25 bp, Artificial
  probe
  misc_feature (1)..(25): SEQ ID NO: 6271; WAN0249P8_at; Start 8; Stop 32
agcattttataacaacgttttagag

SEQ ID NO: 29286 - DNA, 25 bp, Artificial
  probe
  misc_feature (1)..(25): SEQ ID NO: 6271; WAN0249P8_at; Start 51; Stop 75
acttcaacctactataatacagaaa

SEQ ID NO: 29287 - DNA, 25 bp, Artificial
  probe
  misc_feature (1)..(25): SEQ ID NO: 6271; WAN0249P8_at; Start 26; Stop 50
tttagagtaatggggggctatttca

SEQ ID NO: 29288 - DNA, 25 bp, Artificial
  probe
  misc_feature (1)..(25): SEQ ID NO: 6271; WAN0249P8_at; Start 54; Stop 78
tcaacctactataatacagaaaaaa

SEQ ID NO: 29289 - DNA, 25 bp, Artificial
  probe
  misc_feature (1)..(25): SEQ ID NO: 6271; WAN0249P8_at; Start 48; Stop 72
tcaacttcaacctactataatacag

SEQ ID NO: 29290 - DNA, 25 bp, Artificial
  probe
  misc_feature (1)..(25): SEQ ID NO: 6271; WAN0249P8_at; Start 53; Stop 77
ttcaacctactataatacagaaaaa

SEQ ID NO: 29291 - DNA, 25 bp, Artificial
  probe
  misc_feature (1)..(25): SEQ ID NO: 6271; WAN0249P8_at; Start 49; Stop 73
caacttcaacctactataatacaga

SEQ ID NO: 29292 - DNA, 25 bp, Artificial
  probe
  misc_feature (1)..(25): SEQ ID NO: 6271; WAN0249P8_at; Start 28; Stop 52
tagagtaatggggggctatttcaac

SEQ ID NO: 29293 - DNA, 25 bp, Artificial
  probe
  misc_feature (1)..(25): SEQ ID NO: 6271; WAN0249P8_at; Start 33; Stop 57
taatggggggctatttcaacttcaa

SEQ ID NO: 29294 - DNA, 25 bp, Artificial
  probe
  misc_feature (1)..(25): SEQ ID NO: 6271; WAN0249P8_at; Start 50; Stop 74
aacttcaacctactataatacagaa

SEQ ID NO: 29295 - DNA, 25 bp, Artificial
  probe
  misc_feature (1)..(25): SEQ ID NO: 7067; WAN0249P9_at; Start 56; Stop 80
acatgcccgtcgtaccgcaaaaaag

SEQ ID NO: 29296 - DNA, 25 bp, Artificial
  probe
  misc_feature (1)..(25): SEQ ID NO: 7067; WAN0249P9_at; Start 22; Stop 46
tagtcaggctgaggacttacacctc

SEQ ID NO: 29297 - DNA, 25 bp, Artificial
  probe
  misc_feature (1)..(25): SEQ ID NO: 7067; WAN0249P9_at; Start 20; Stop 44
gatagtcaggctgaggacttacacc

SEQ ID NO: 29298 - DNA, 25 bp, Artificial
  probe
  misc_feature (1)..(25): SEQ ID NO: 7067; WAN0249P9_at; Start 17; Stop 41
cacgatagtcaggctgaggacttac

SEQ ID NO: 29299 - DNA, 25 bp, Artificial
  probe
  misc_feature (1)..(25): SEQ ID NO: 7067; WAN0249P9_at; Start 21; Stop 45
atagtcaggctgaggacttacacct

SEQ ID NO: 29300 - DNA, 25 bp, Artificial
  probe
  misc_feature (1)..(25): SEQ ID NO: 7067; WAN0249P9_at; Start 57; Stop 81
catgcccgtcgtaccgcaaaaaagc

SEQ ID NO: 29301 - DNA, 25 bp, Artificial
  probe
  misc_feature (1)..(25): SEQ ID NO: 7067; WAN0249P9_at; Start 19; Stop 43
cgatagtcaggctgaggacttacac

SEQ ID NO: 29302 - DNA, 25 bp, Artificial
  probe
  misc_feature (1)..(25): SEQ ID NO: 7067; WAN0249P9_at; Start 59; Stop 83
tgcccgtcgtaccgcaaaaaagcca

SEQ ID NO: 29303 - DNA, 25 bp, Artificial
  probe
  misc_feature (1)..(25): SEQ ID NO: 7067; WAN0249P9_at; Start 18; Stop 42
acgatagtcaggctgaggacttaca

SEQ ID NO: 29304 - DNA, 25 bp, Artificial
  probe
  misc_feature (1)..(25): SEQ ID NO: 7063; WAN0249PA_at; Start 118; Stop 142
gatttctcaatgcatagctttgagg

SEQ ID NO: 29305 - DNA, 25 bp, Artificial
  probe
  misc_feature (1)..(25): SEQ ID NO: 7063; WAN0249PA_at; Start 90; Stop 114
gcaactttaaactaggaagcgagtc

SEQ ID NO: 29306 - DNA, 25 bp, Artificial
  probe
  misc_feature (1)..(25): SEQ ID NO: 7063; WAN0249PA_at; Start 126; Stop 150
aatgcatagctttgaggaattgggc

SEQ ID NO: 29307 - DNA, 25 bp, Artificial
  probe
  misc_feature (1)..(25): SEQ ID NO: 7063; WAN0249PA_at; Start 107; Stop 131
agcgagtcgcagatttctcaatgca

SEQ ID NO: 29308 - DNA, 25 bp, Artificial
  probe
  misc_feature (1)..(25): SEQ ID NO: 7063; WAN0249PA_at; Start 110; Stop 134
gagtcgcagatttctcaatgcatag

SEQ ID NO: 29309 - DNA, 25 bp, Artificial
  probe
  misc_feature (1)..(25): SEQ ID NO: 7063; WAN0249PA_at; Start 159; Stop 183
tttgatatagaaaaacgcatagtat

SEQ ID NO: 29310 - DNA, 25 bp, Artificial
  probe
  misc_feature (1)..(25): SEQ ID NO: 7063; WAN0249PA_at; Start 106; Stop 130
aagcgagtcgcagatttctcaatgc

SEQ ID NO: 29311 - DNA, 25 bp, Artificial
  probe
  misc_feature (1)..(25): SEQ ID NO: 7063; WAN0249PA_at; Start 130; Stop 154
catagctttgaggaattgggcaaaa

SEQ ID NO: 29312 - DNA, 25 bp, Artificial
  probe
  misc_feature (1)..(25): SEQ ID NO: 7063; WAN0249PA_at; Start 113; Stop 137
tcgcagatttctcaatgcatagctt

SEQ ID NO: 29313 - DNA, 25 bp, Artificial
  probe
  misc_feature (1)..(25): SEQ ID NO: 7063; WAN0249PA_at; Start 139; Stop 163
gaggaattgggcaaaaagtctttga

SEQ ID NO: 29314 - DNA, 25 bp, Artificial
  probe
  misc_feature (1)..(25): SEQ ID NO: 7063; WAN0249PA_at; Start 93; Stop 117
actttaaactaggaagcgagtcgca

SEQ ID NO: 29315 - DNA, 25 bp, Artificial
  probe
  misc_feature (1)..(25): SEQ ID NO: 7063; WAN0249PA_at; Start 128; Stop 152
tgcatagctttgaggaattgggcaa

SEQ ID NO: 29316 - DNA, 25 bp, Artificial
  probe
  misc_feature (1)..(25): SEQ ID NO: 7063; WAN0249PA_at; Start 135; Stop 159
ctttgaggaattgggcaaaaagtct

SEQ ID NO: 29317 - DNA, 25 bp, Artificial
  probe
  misc_feature (1)..(25): SEQ ID NO: 7063; WAN0249PA_at; Start 111; Stop 135
agtcgcagatttctcaatgcatagc

SEQ ID NO: 29318 - DNA, 25 bp, Artificial
  probe
  misc_feature (1)..(25): SEQ ID NO: 7063; WAN0249PA_at; Start 99; Stop 123
aactaggaagcgagtcgcagatttc

SEQ ID NO: 29319 - DNA, 25 bp, Artificial
  probe
  misc_feature (1)..(25): SEQ ID NO: 7063; WAN0249PA_at; Start 101; Stop 125
ctaggaagcgagtcgcagatttctc

SEQ ID NO: 29320 - DNA, 25 bp, Artificial
  probe
  misc_feature (1)..(25): SEQ ID NO: 7063; WAN0249PA_at; Start 140; Stop 164
aggaattgggcaaaaagtctttgat

SEQ ID NO: 29321 - DNA, 25 bp, Artificial
  probe
  misc_feature (1)..(25): SEQ ID NO: 7063; WAN0249PA_at; Start 112; Stop 136
gtcgcagatttctcaatgcatagct

SEQ ID NO: 29322 - DNA, 25 bp, Artificial
  probe
  misc_feature (1)..(25): SEQ ID NO: 7063; WAN0249PA_at; Start 156; Stop 180
gtctttgatatagaaaaacgcatag

SEQ ID NO: 29323 - DNA, 25 bp, Artificial
  probe
  misc_feature (1)..(25): SEQ ID NO: 7063; WAN0249PA_at; Start 132; Stop 156
tagctttgaggaattgggcaaaaag

SEQ ID NO: 29324 - DNA, 25 bp, Artificial
  probe
  misc_feature (1)..(25): SEQ ID NO: 7063; WAN0249PA_at; Start 105; Stop 129
gaagcgagtcgcagatttctcaatg

SEQ ID NO: 29325 - DNA, 25 bp, Artificial
  probe
  misc_feature (1)..(25): SEQ ID NO: 7063; WAN0249PA_at; Start 102; Stop 126
taggaagcgagtcgcagatttctca

SEQ ID NO: 29326 - DNA, 25 bp, Artificial
  probe
  misc_feature (1)..(25): SEQ ID NO: 7063; WAN0249PA_at; Start 104; Stop 128
ggaagcgagtcgcagatttctcaat

SEQ ID NO: 29327 - DNA, 25 bp, Artificial
  probe
  misc_feature (1)..(25): SEQ ID NO: 7063; WAN0249PA_at; Start 124; Stop 148
tcaatgcatagctttgaggaattgg

SEQ ID NO: 29328 - DNA, 25 bp, Artificial
  probe
  misc_feature (1)..(25): SEQ ID NO: 7063; WAN0249PA_at; Start 21; Stop 45
aatcttatatttagtactctgtaaa

SEQ ID NO: 29329 - DNA, 25 bp, Artificial
  probe
  misc_feature (1)..(25): SEQ ID NO: 7063; WAN0249PA_at; Start 115; Stop 139
gcagatttctcaatgcatagctttg

SEQ ID NO: 29330 - DNA, 25 bp, Artificial
  probe
  misc_feature (1)..(25): SEQ ID NO: 7063; WAN0249PA_at; Start 129; Stop 153
gcatagctttgaggaattgggcaaa

SEQ ID NO: 29331 - DNA, 25 bp, Artificial
  probe
  misc_feature (1)..(25): SEQ ID NO: 7063; WAN0249PA_at; Start 88; Stop 112
gagcaactttaaactaggaagcgag

SEQ ID NO: 29332 - DNA, 25 bp, Artificial
  probe
  misc_feature (1)..(25): SEQ ID NO: 7063; WAN0249PA_at; Start 153; Stop 177
aaagtctttgatatagaaaaacgca

SEQ ID NO: 29333 - DNA, 25 bp, Artificial
  probe
  misc_feature (1)..(25): SEQ ID NO: 7063; WAN0249PA_at; Start 116; Stop 140
cagatttctcaatgcatagctttga

SEQ ID NO: 29334 - DNA, 25 bp, Artificial
  probe
  misc_feature (1)..(25): SEQ ID NO: 7063; WAN0249PA_at; Start 108; Stop 132
gcgagtcgcagatttctcaatgcat

SEQ ID NO: 29335 - DNA, 25 bp, Artificial
  probe
  misc_feature (1)..(25): SEQ ID NO: 7063; WAN0249PA_at; Start 91; Stop 115
caactttaaactaggaagcgagtcg

SEQ ID NO: 29336 - DNA, 25 bp, Artificial
  probe
  misc_feature (1)..(25): SEQ ID NO: 7063; WAN0249PA_at; Start 158; Stop 182
ctttgatatagaaaaacgcatagta

SEQ ID NO: 29337 - DNA, 25 bp, Artificial
  probe
  misc_feature (1)..(25): SEQ ID NO: 7063; WAN0249PA_at; Start 86; Stop 110
aagagcaactttaaactaggaagcg

SEQ ID NO: 29338 - DNA, 25 bp, Artificial
  probe
  misc_feature (1)..(25): SEQ ID NO: 7361; WAN0249PB_at; Start 31; Stop 55
ctaactttattatatagtgtattga

SEQ ID NO: 29339 - DNA, 25 bp, Artificial
  probe
  misc_feature (1)..(25): SEQ ID NO: 7361; WAN0249PB_at; Start 9; Stop 33
catagactttcctccttatttccta

SEQ ID NO: 29340 - DNA, 25 bp, Artificial
  probe
  misc_feature (1)..(25): SEQ ID NO: 7361; WAN0249PB_at; Start 2; Stop 26
cttctcccatagactttcctcctta

SEQ ID NO: 29341 - DNA, 25 bp, Artificial
  probe
  misc_feature (1)..(25): SEQ ID NO: 7361; WAN0249PB_at; Start 6; Stop 30
tcccatagactttcctccttatttc

SEQ ID NO: 29342 - DNA, 25 bp, Artificial
  probe
  misc_feature (1)..(25): SEQ ID NO: 7361; WAN0249PB_at; Start 5; Stop 29
ctcccatagactttcctccttattt

SEQ ID NO: 29343 - DNA, 25 bp, Artificial
  probe
  misc_feature (1)..(25): SEQ ID NO: 7361; WAN0249PB_at; Start 1; Stop 25
tcttctcccatagactttcctcctt

SEQ ID NO: 29344 - DNA, 25 bp, Artificial
  probe
  misc_feature (1)..(25): SEQ ID NO: 7361; WAN0249PB_at; Start 30; Stop 54
cctaactttattatatagtgtattg

SEQ ID NO: 29345 - DNA, 25 bp, Artificial
  probe
  misc_feature (1)..(25): SEQ ID NO: 7361; WAN0249PB_at; Start 3; Stop 27
ttctcccatagactttcctccttat

SEQ ID NO: 29346 - DNA, 25 bp, Artificial
  probe
  misc_feature (1)..(25): SEQ ID NO: 7361; WAN0249PB_at; Start 4; Stop 28
tctcccatagactttcctccttatt

SEQ ID NO: 29347 - DNA, 25 bp, Artificial
  probe
  misc_feature (1)..(25): SEQ ID NO: 7361; WAN0249PB_at; Start 8; Stop 32
ccatagactttcctccttatttcct

SEQ ID NO: 29348 - DNA, 25 bp, Artificial
  probe
  misc_feature (1)..(25): SEQ ID NO: 6260; WAN0249PC_at; Start 40; Stop 64
gctttcgtgatggaaagcgattctc

SEQ ID NO: 29349 - DNA, 25 bp, Artificial
  probe
  misc_feature (1)..(25): SEQ ID NO: 6260; WAN0249PC_at; Start 42; Stop 66
tttcgtgatggaaagcgattctcgt

SEQ ID NO: 29350 - DNA, 25 bp, Artificial
  probe
  misc_feature (1)..(25): SEQ ID NO: 6260; WAN0249PC_at; Start 225; Stop 249
tcttgtaatgagttaagcaacattc

SEQ ID NO: 29351 - DNA, 25 bp, Artificial
  probe
  misc_feature (1)..(25): SEQ ID NO: 6260; WAN0249PC_at; Start 36; Stop 60
tctagctttcgtgatggaaagcgat

SEQ ID NO: 29352 - DNA, 25 bp, Artificial
  probe
  misc_feature (1)..(25): SEQ ID NO: 6260; WAN0249PC_at; Start 32; Stop 56
gagatctagctttcgtgatggaaag

SEQ ID NO: 29353 - DNA, 25 bp, Artificial
  probe
  misc_feature (1)..(25): SEQ ID NO: 6260; WAN0249PC_at; Start 3; Stop 27
cccgacttgataacatcattttgac

SEQ ID NO: 29354 - DNA, 25 bp, Artificial
  probe
  misc_feature (1)..(25): SEQ ID NO: 6260; WAN0249PC_at; Start 44; Stop 68
tcgtgatggaaagcgattctcgttc

SEQ ID NO: 29355 - DNA, 25 bp, Artificial
  probe
  misc_feature (1)..(25): SEQ ID NO: 6260; WAN0249PC_at; Start 29; Stop 53
aatgagatctagctttcgtgatgga

SEQ ID NO: 29356 - DNA, 25 bp, Artificial
  probe
  misc_feature (1)..(25): SEQ ID NO: 6260; WAN0249PC_at; Start 16; Stop 40
catcattttgacgaatgagatctag

SEQ ID NO: 29357 - DNA, 25 bp, Artificial
  probe
  misc_feature (1)..(25): SEQ ID NO: 6260; WAN0249PC_at; Start 295; Stop 319
gataaatcaataaaaagagagggga

SEQ ID NO: 29358 - DNA, 25 bp, Artificial
  probe
  misc_feature (1)..(25): SEQ ID NO: 6260; WAN0249PC_at; Start 10; Stop 34
tgataacatcattttgacgaatgag

SEQ ID NO: 29359 - DNA, 25 bp, Artificial
  probe
  misc_feature (1)..(25): SEQ ID NO: 6260; WAN0249PC_at; Start 21; Stop 45
ttttgacgaatgagatctagctttc

SEQ ID NO: 29360 - DNA, 25 bp, Artificial
  probe
  misc_feature (1)..(25): SEQ ID NO: 6260; WAN0249PC_at; Start 28; Stop 52
gaatgagatctagctttcgtgatgg

SEQ ID NO: 29361 - DNA, 25 bp, Artificial
  probe
  misc_feature (1)..(25): SEQ ID NO: 6260; WAN0249PC_at; Start 34; Stop 58
gatctagctttcgtgatggaaagcg

SEQ ID NO: 29362 - DNA, 25 bp, Artificial
  probe
  misc_feature (1)..(25): SEQ ID NO: 6260; WAN0249PC_at; Start 228; Stop 252
tgtaatgagttaagcaacattcttg

SEQ ID NO: 29363 - DNA, 25 bp, Artificial
  probe
  misc_feature (1)..(25): SEQ ID NO: 6260; WAN0249PC_at; Start 233; Stop 257
tgagttaagcaacattcttgcaatc

SEQ ID NO: 29364 - DNA, 25 bp, Artificial
  probe
  misc_feature (1)..(25): SEQ ID NO: 6260; WAN0249PC_at; Start 22; Stop 46
tttgacgaatgagatctagctttcg

SEQ ID NO: 29365 - DNA, 25 bp, Artificial
  probe
  misc_feature (1)..(25): SEQ ID NO: 6260; WAN0249PC_at; Start 13; Stop 37
taacatcattttgacgaatgagatc

SEQ ID NO: 29366 - DNA, 25 bp, Artificial
  probe
  misc_feature (1)..(25): SEQ ID NO: 6260; WAN0249PC_at; Start 19; Stop 43
cattttgacgaatgagatctagctt

SEQ ID NO: 29367 - DNA, 25 bp, Artificial
  probe
  misc_feature (1)..(25): SEQ ID NO: 6260; WAN0249PC_at; Start 41; Stop 65
ctttcgtgatggaaagcgattctcg

SEQ ID NO: 29368 - DNA, 25 bp, Artificial
  probe
  misc_feature (1)..(25): SEQ ID NO: 6260; WAN0249PC_at; Start 252; Stop 276
gcaatctattttactttatatcaca

SEQ ID NO: 29369 - DNA, 25 bp, Artificial
  probe
  misc_feature (1)..(25): SEQ ID NO: 6260; WAN0249PC_at; Start 1; Stop 25
aacccgacttgataacatcattttg

SEQ ID NO: 29370 - DNA, 25 bp, Artificial
  probe
  misc_feature (1)..(25): SEQ ID NO: 6260; WAN0249PC_at; Start 222; Stop 246
tcatcttgtaatgagttaagcaaca

SEQ ID NO: 29371 - DNA, 25 bp, Artificial
  probe
  misc_feature (1)..(25): SEQ ID NO: 6260; WAN0249PC_at; Start 31; Stop 55
tgagatctagctttcgtgatggaaa

SEQ ID NO: 29372 - DNA, 25 bp, Artificial
  probe
  misc_feature (1)..(25): SEQ ID NO: 6260; WAN0249PC_at; Start 272; Stop 296
tcacaattaattagtcaaatattga

SEQ ID NO: 29373 - DNA, 25 bp, Artificial
  probe
  misc_feature (1)..(25): SEQ ID NO: 6260; WAN0249PC_at; Start 218; Stop 242
gttatcatcttgtaatgagttaagc

SEQ ID NO: 29374 - DNA, 25 bp, Artificial
  probe
  misc_feature (1)..(25): SEQ ID NO: 6260; WAN0249PC_at; Start 38; Stop 62
tagctttcgtgatggaaagcgattc

SEQ ID NO: 29375 - DNA, 25 bp, Artificial
  probe
  misc_feature (1)..(25): SEQ ID NO: 6260; WAN0249PC_at; Start 230; Stop 254
taatgagttaagcaacattcttgca

SEQ ID NO: 29376 - DNA, 25 bp, Artificial
  probe
  misc_feature (1)..(25): SEQ ID NO: 6260; WAN0249PC_at; Start 18; Stop 42
tcattttgacgaatgagatctagct

SEQ ID NO: 29377 - DNA, 25 bp, Artificial
  probe
  misc_feature (1)..(25): SEQ ID NO: 6260; WAN0249PC_at; Start 6; Stop 30
gacttgataacatcattttgacgaa

SEQ ID NO: 29378 - DNA, 25 bp, Artificial
  probe
  misc_feature (1)..(25): SEQ ID NO: 6260; WAN0249PC_at; Start 263; Stop 287
tactttatatcacaattaattagtc

SEQ ID NO: 29379 - DNA, 25 bp, Artificial
  probe
  misc_feature (1)..(25): SEQ ID NO: 6260; WAN0249PC_at; Start 25; Stop 49
gacgaatgagatctagctttcgtga

SEQ ID NO: 29380 - DNA, 25 bp, Artificial
  probe
  misc_feature (1)..(25): SEQ ID NO: 6260; WAN0249PC_at; Start 236; Stop 260
gttaagcaacattcttgcaatctat

SEQ ID NO: 29381 - DNA, 25 bp, Artificial
  probe
  misc_feature (1)..(25): SEQ ID NO: 6260; WAN0249PC_at; Start 241; Stop 265
gcaacattcttgcaatctattttac

SEQ ID NO: 29382 - DNA, 25 bp, Artificial
  probe
  misc_feature (1)..(25): SEQ ID NO: 6277; WAN0249PD_at; Start 208; Stop 232
tgagtataagttttccttagagaaa

SEQ ID NO: 29383 - DNA, 25 bp, Artificial
  probe
  misc_feature (1)..(25): SEQ ID NO: 6277; WAN0249PD_at; Start 4; Stop 28
taaaaactagcttaatactcttcga

SEQ ID NO: 29384 - DNA, 25 bp, Artificial
  probe
  misc_feature (1)..(25): SEQ ID NO: 6277; WAN0249PD_at; Start 3; Stop 27
ctaaaaactagcttaatactcttcg

SEQ ID NO: 29385 - DNA, 25 bp, Artificial
  probe
  misc_feature (1)..(25): SEQ ID NO: 6254; WAN0249PE_at; Start 11; Stop 35
tgtatgaataggtgagagttgggat

SEQ ID NO: 29386 - DNA, 25 bp, Artificial
  probe
  misc_feature (1)..(25): SEQ ID NO: 6254; WAN0249PE_at; Start 152; Stop 176
cattgagtatttgtcaataaacaat

SEQ ID NO: 29387 - DNA, 25 bp, Artificial
  probe
  misc_feature (1)..(25): SEQ ID NO: 6254; WAN0249PE_at; Start 153; Stop 177
attgagtatttgtcaataaacaatc

SEQ ID NO: 29388 - DNA, 25 bp, Artificial
  probe
  misc_feature (1)..(25): SEQ ID NO: 6254; WAN0249PE_at; Start 9; Stop 33
tttgtatgaataggtgagagttggg

SEQ ID NO: 29389 - DNA, 25 bp, Artificial
  probe
  misc_feature (1)..(25): SEQ ID NO: 6254; WAN0249PE_at; Start 18; Stop 42
ataggtgagagttgggattgttttt

SEQ ID NO: 29390 - DNA, 25 bp, Artificial
  probe
  misc_feature (1)..(25): SEQ ID NO: 6254; WAN0249PE_at; Start 8; Stop 32
ctttgtatgaataggtgagagttgg

SEQ ID NO: 29391 - DNA, 25 bp, Artificial
  probe
  misc_feature (1)..(25): SEQ ID NO: 6254; WAN0249PE_at; Start 163; Stop 187
tgtcaataaacaatcacttctcacg

SEQ ID NO: 29392 - DNA, 25 bp, Artificial
  probe
  misc_feature (1)..(25): SEQ ID NO: 6254; WAN0249PE_at; Start 165; Stop 189
tcaataaacaatcacttctcacgat

SEQ ID NO: 29393 - DNA, 25 bp, Artificial
  probe
  misc_feature (1)..(25): SEQ ID NO: 6254; WAN0249PE_at; Start 20; Stop 44
aggtgagagttgggattgtttttat

SEQ ID NO: 29394 - DNA, 25 bp, Artificial
  probe
  misc_feature (1)..(25): SEQ ID NO: 6254; WAN0249PE_at; Start 164; Stop 188
gtcaataaacaatcacttctcacga

SEQ ID NO: 29395 - DNA, 25 bp, Artificial
  probe
  misc_feature (1)..(25): SEQ ID NO: 6254; WAN0249PE_at; Start 155; Stop 179
tgagtatttgtcaataaacaatcac

SEQ ID NO: 29396 - DNA, 25 bp, Artificial
  probe
  misc_feature (1)..(25): SEQ ID NO: 6254; WAN0249PE_at; Start 5; Stop 29
ttcctttgtatgaataggtgagagt

SEQ ID NO: 29397 - DNA, 25 bp, Artificial
  probe
  misc_feature (1)..(25): SEQ ID NO: 6254; WAN0249PE_at; Start 3; Stop 27
aattcctttgtatgaataggtgaga

SEQ ID NO: 29398 - DNA, 25 bp, Artificial
  probe
  misc_feature (1)..(25): SEQ ID NO: 6254; WAN0249PE_at; Start 166; Stop 190
caataaacaatcacttctcacgata

SEQ ID NO: 29399 - DNA, 25 bp, Artificial
  probe
  misc_feature (1)..(25): SEQ ID NO: 6254; WAN0249PE_at; Start 162; Stop 186
ttgtcaataaacaatcacttctcac

SEQ ID NO: 29400 - DNA, 25 bp, Artificial
  probe
  misc_feature (1)..(25): SEQ ID NO: 6254; WAN0249PE_at; Start 157; Stop 181
agtatttgtcaataaacaatcactt

SEQ ID NO: 29401 - DNA, 25 bp, Artificial
  probe
  misc_feature (1)..(25): SEQ ID NO: 6254; WAN0249PE_at; Start 4; Stop 28
attcctttgtatgaataggtgagag

SEQ ID NO: 29402 - DNA, 25 bp, Artificial
  probe
  misc_feature (1)..(25): SEQ ID NO: 6254; WAN0249PE_at; Start 17; Stop 41
aataggtgagagttgggattgtttt

SEQ ID NO: 29403 - DNA, 25 bp, Artificial
  probe
  misc_feature (1)..(25): SEQ ID NO: 6254; WAN0249PE_at; Start 150; Stop 174
ttcattgagtatttgtcaataaaca

SEQ ID NO: 29404 - DNA, 25 bp, Artificial
  probe
  misc_feature (1)..(25): SEQ ID NO: 6254; WAN0249PE_at; Start 12; Stop 36
gtatgaataggtgagagttgggatt

SEQ ID NO: 29405 - DNA, 25 bp, Artificial
  probe
  misc_feature (1)..(25): SEQ ID NO: 6254; WAN0249PE_at; Start 159; Stop 183
tatttgtcaataaacaatcacttct

SEQ ID NO: 29406 - DNA, 25 bp, Artificial
  probe
  misc_feature (1)..(25): SEQ ID NO: 6254; WAN0249PE_at; Start 161; Stop 185
tttgtcaataaacaatcacttctca

SEQ ID NO: 29407 - DNA, 25 bp, Artificial
  probe
  misc_feature (1)..(25): SEQ ID NO: 6254; WAN0249PE_at; Start 10; Stop 34
ttgtatgaataggtgagagttggga

SEQ ID NO: 29408 - DNA, 25 bp, Artificial
  probe
  misc_feature (1)..(25): SEQ ID NO: 6254; WAN0249PE_at; Start 1; Stop 25
aaaattcctttgtatgaataggtga

SEQ ID NO: 29409 - DNA, 25 bp, Artificial
  probe
  misc_feature (1)..(25): SEQ ID NO: 6254; WAN0249PE_at; Start 156; Stop 180
gagtatttgtcaataaacaatcact

SEQ ID NO: 29410 - DNA, 25 bp, Artificial
  probe
  misc_feature (1)..(25): SEQ ID NO: 6254; WAN0249PE_at; Start 6; Stop 30
tcctttgtatgaataggtgagagtt

SEQ ID NO: 29411 - DNA, 25 bp, Artificial
  probe
  misc_feature (1)..(25): SEQ ID NO: 6254; WAN0249PE_at; Start 151; Stop 175
tcattgagtatttgtcaataaacaa

SEQ ID NO: 29412 - DNA, 25 bp, Artificial
  probe
  misc_feature (1)..(25): SEQ ID NO: 6254; WAN0249PE_at; Start 160; Stop 184
atttgtcaataaacaatcacttctc

SEQ ID NO: 29413 - DNA, 25 bp, Artificial
  probe
  misc_feature (1)..(25): SEQ ID NO: 6254; WAN0249PE_at; Start 158; Stop 182
gtatttgtcaataaacaatcacttc

SEQ ID NO: 29414 - DNA, 25 bp, Artificial
  probe
  misc_feature (1)..(25): SEQ ID NO: 6254; WAN0249PE_at; Start 2; Stop 26
aaattcctttgtatgaataggtgag

SEQ ID NO: 29415 - DNA, 25 bp, Artificial
  probe
  misc_feature (1)..(25): SEQ ID NO: 6254; WAN0249PE_at; Start 19; Stop 43
taggtgagagttgggattgttttta

SEQ ID NO: 29416 - DNA, 25 bp, Artificial
  probe
  misc_feature (1)..(25): SEQ ID NO: 6254; WAN0249PE_at; Start 7; Stop 31
cctttgtatgaataggtgagagttg

SEQ ID NO: 29417 - DNA, 25 bp, Artificial
  probe
  misc_feature (1)..(25): SEQ ID NO: 6254; WAN0249PE_at; Start 13; Stop 37
tatgaataggtgagagttgggattg

SEQ ID NO: 29418 - DNA, 25 bp, Artificial
  probe
  misc_feature (1)..(25): SEQ ID NO: 6254; WAN0249PE_at; Start 154; Stop 178
ttgagtatttgtcaataaacaatca

SEQ ID NO: 29419 - DNA, 25 bp, Artificial
  probe
  misc_feature (1)..(25): SEQ ID NO: 7375; WAN0249PF_at; Start 51; Stop 75
gatataaagtaaaatagattgcaag

SEQ ID NO: 29420 - DNA, 25 bp, Artificial
  probe
  misc_feature (1)..(25): SEQ ID NO: 7375; WAN0249PF_at; Start 71; Stop 95
gcaagaatgttgcttaactcattac

SEQ ID NO: 29421 - DNA, 25 bp, Artificial
  probe
  misc_feature (1)..(25): SEQ ID NO: 7375; WAN0249PF_at; Start 37; Stop 61
gactaattaattgtgatataaagta

SEQ ID NO: 29422 - DNA, 25 bp, Artificial
  probe
  misc_feature (1)..(25): SEQ ID NO: 7375; WAN0249PF_at; Start 64; Stop 88
atagattgcaagaatgttgcttaac

SEQ ID NO: 29423 - DNA, 25 bp, Artificial
  probe
  misc_feature (1)..(25): SEQ ID NO: 7375; WAN0249PF_at; Start 62; Stop 86
aaatagattgcaagaatgttgctta

SEQ ID NO: 29424 - DNA, 25 bp, Artificial
  probe
  misc_feature (1)..(25): SEQ ID NO: 7375; WAN0249PF_at; Start 72; Stop 96
caagaatgttgcttaactcattaca

SEQ ID NO: 29425 - DNA, 25 bp, Artificial
  probe
  misc_feature (1)..(25): SEQ ID NO: 7375; WAN0249PF_at; Start 60; Stop 84
taaaatagattgcaagaatgttgct

SEQ ID NO: 29426 - DNA, 25 bp, Artificial
  probe
  misc_feature (1)..(25): SEQ ID NO: 7375; WAN0249PF_at; Start 101; Stop 125
gataactttccattttccattcaaa

SEQ ID NO: 29427 - DNA, 25 bp, Artificial
  probe
  misc_feature (1)..(25): SEQ ID NO: 7375; WAN0249PF_at; Start 109; Stop 133
tccattttccattcaaattgatact

SEQ ID NO: 29428 - DNA, 25 bp, Artificial
  probe
  misc_feature (1)..(25): SEQ ID NO: 7375; WAN0249PF_at; Start 78; Stop 102
tgttgcttaactcattacaagatga

SEQ ID NO: 29429 - DNA, 25 bp, Artificial
  probe
  misc_feature (1)..(25): SEQ ID NO: 7375; WAN0249PF_at; Start 29; Stop 53
caatatttgactaattaattgtgat

SEQ ID NO: 29430 - DNA, 25 bp, Artificial
  probe
  misc_feature (1)..(25): SEQ ID NO: 7375; WAN0249PF_at; Start 55; Stop 79
taaagtaaaatagattgcaagaatg

SEQ ID NO: 29431 - DNA, 25 bp, Artificial
  probe
  misc_feature (1)..(25): SEQ ID NO: 7375; WAN0249PF_at; Start 87; Stop 111
actcattacaagatgataactttcc

SEQ ID NO: 29432 - DNA, 25 bp, Artificial
  probe
  misc_feature (1)..(25): SEQ ID NO: 7375; WAN0249PF_at; Start 104; Stop 128
aactttccattttccattcaaattg

SEQ ID NO: 29433 - DNA, 25 bp, Artificial
  probe
  misc_feature (1)..(25): SEQ ID NO: 7375; WAN0249PF_at; Start 88; Stop 112
ctcattacaagatgataactttcca

SEQ ID NO: 29434 - DNA, 25 bp, Artificial
  probe
  misc_feature (1)..(25): SEQ ID NO: 7375; WAN0249PF_at; Start 98; Stop 122
gatgataactttccattttccattc

SEQ ID NO: 29435 - DNA, 25 bp, Artificial
  probe
  misc_feature (1)..(25): SEQ ID NO: 7375; WAN0249PF_at; Start 79; Stop 103
gttgcttaactcattacaagatgat

SEQ ID NO: 29436 - DNA, 25 bp, Artificial
  probe
  misc_feature (1)..(25): SEQ ID NO: 7375; WAN0249PF_at; Start 75; Stop 99
gaatgttgcttaactcattacaaga

SEQ ID NO: 29437 - DNA, 25 bp, Artificial
  probe
  misc_feature (1)..(25): SEQ ID NO: 7375; WAN0249PF_at; Start 111; Stop 135
cattttccattcaaattgatactca

SEQ ID NO: 29438 - DNA, 25 bp, Artificial
  probe
  misc_feature (1)..(25): SEQ ID NO: 7375; WAN0249PF_at; Start 95; Stop 119
caagatgataactttccattttcca

SEQ ID NO: 29439 - DNA, 25 bp, Artificial
  probe
  misc_feature (1)..(25): SEQ ID NO: 7375; WAN0249PF_at; Start 114; Stop 138
tttccattcaaattgatactcaatg

SEQ ID NO: 29440 - DNA, 25 bp, Artificial
  probe
  misc_feature (1)..(25): SEQ ID NO: 7375; WAN0249PF_at; Start 69; Stop 93
ttgcaagaatgttgcttaactcatt

SEQ ID NO: 29441 - DNA, 25 bp, Artificial
  probe
  misc_feature (1)..(25): SEQ ID NO: 7375; WAN0249PF_at; Start 116; Stop 140
tccattcaaattgatactcaatgaa

SEQ ID NO: 29442 - DNA, 25 bp, Artificial
  probe
  misc_feature (1)..(25): SEQ ID NO: 7375; WAN0249PF_at; Start 5; Stop 29
tcccctctctttttattgatttatc

SEQ ID NO: 29443 - DNA, 25 bp, Artificial
  probe
  misc_feature (1)..(25): SEQ ID NO: 7375; WAN0249PF_at; Start 67; Stop 91
gattgcaagaatgttgcttaactca

SEQ ID NO: 29444 - DNA, 25 bp, Artificial
  probe
  misc_feature (1)..(25): SEQ ID NO: 7375; WAN0249PF_at; Start 90; Stop 114
cattacaagatgataactttccatt

SEQ ID NO: 29445 - DNA, 25 bp, Artificial
  probe
  misc_feature (1)..(25): SEQ ID NO: 7375; WAN0249PF_at; Start 74; Stop 98
agaatgttgcttaactcattacaag

SEQ ID NO: 29446 - DNA, 25 bp, Artificial
  probe
  misc_feature (1)..(25): SEQ ID NO: 7375; WAN0249PF_at; Start 83; Stop 107
cttaactcattacaagatgataact

SEQ ID NO: 29447 - DNA, 25 bp, Artificial
  probe
  misc_feature (1)..(25): SEQ ID NO: 7375; WAN0249PF_at; Start 65; Stop 89
tagattgcaagaatgttgcttaact

SEQ ID NO: 29448 - DNA, 25 bp, Artificial
  probe
  misc_feature (1)..(25): SEQ ID NO: 7375; WAN0249PF_at; Start 59; Stop 83
gtaaaatagattgcaagaatgttgc

SEQ ID NO: 29449 - DNA, 25 bp, Artificial
  probe
  misc_feature (1)..(25): SEQ ID NO: 7375; WAN0249PF_at; Start 81; Stop 105
tgcttaactcattacaagatgataa

SEQ ID NO: 29450 - DNA, 25 bp, Artificial
  probe
  misc_feature (1)..(25): SEQ ID NO: 7375; WAN0249PF_at; Start 82; Stop 106
gcttaactcattacaagatgataac

SEQ ID NO: 29451 - DNA, 25 bp, Artificial
  probe
  misc_feature (1)..(25): SEQ ID NO: 7375; WAN0249PF_at; Start 48; Stop 72
tgtgatataaagtaaaatagattgc

SEQ ID NO: 29452 - DNA, 25 bp, Artificial
  probe
  misc_feature (1)..(25): SEQ ID NO: 7375; WAN0249PF_at; Start 93; Stop 117
tacaagatgataactttccattttc

SEQ ID NO: 29453 - DNA, 25 bp, Artificial
  probe
  misc_feature (1)..(25): SEQ ID NO: 7368; WAN0249PG_at; Start 74; Stop 98
ctaaatatttgaaaataacatctat

SEQ ID NO: 29454 - DNA, 25 bp, Artificial
  probe
  misc_feature (1)..(25): SEQ ID NO: 7368; WAN0249PG_at; Start 22; Stop 46
tttactatatttctaaacacttaga

SEQ ID NO: 29455 - DNA, 25 bp, Artificial
  probe
  misc_feature (1)..(25): SEQ ID NO: 7368; WAN0249PG_at; Start 73; Stop 97
tctaaatatttgaaaataacatcta

SEQ ID NO: 29456 - DNA, 25 bp, Artificial
  probe
  misc_feature (1)..(25): SEQ ID NO: 7368; WAN0249PG_at; Start 24; Stop 48
tactatatttctaaacacttagaaa

SEQ ID NO: 29457 - DNA, 25 bp, Artificial
  probe
  misc_feature (1)..(25): SEQ ID NO: 7368; WAN0249PG_at; Start 72; Stop 96
ttctaaatatttgaaaataacatct

SEQ ID NO: 29458 - DNA, 25 bp, Artificial
  probe
  misc_feature (1)..(25): SEQ ID NO: 7368; WAN0249PG_at; Start 71; Stop 95
tttctaaatatttgaaaataacatc

SEQ ID NO: 29459 - DNA, 25 bp, Artificial
  probe
  misc_feature (1)..(25): SEQ ID NO: 7368; WAN0249PG_at; Start 25; Stop 49
actatatttctaaacacttagaaat

SEQ ID NO: 29460 - DNA, 25 bp, Artificial
  probe
  misc_feature (1)..(25): SEQ ID NO: 7368; WAN0249PG_at; Start 23; Stop 47
ttactatatttctaaacacttagaa

SEQ ID NO: 29461 - DNA, 25 bp, Artificial
  probe
  misc_feature (1)..(25): SEQ ID NO: 4580; WAN0249PH_at; Start 26; Stop 50
tcattttgaaatctatttaccccac

SEQ ID NO: 29462 - DNA, 25 bp, Artificial
  probe
  misc_feature (1)..(25): SEQ ID NO: 4580; WAN0249PH_at; Start 1; Stop 25
tcaaacctgataggatgcgttttta

SEQ ID NO: 29463 - DNA, 25 bp, Artificial
  probe
  misc_feature (1)..(25): SEQ ID NO: 4580; WAN0249PH_at; Start 4; Stop 28
aacctgataggatgcgtttttatca

SEQ ID NO: 29464 - DNA, 25 bp, Artificial
  probe
  misc_feature (1)..(25): SEQ ID NO: 4580; WAN0249PH_at; Start 2; Stop 26
caaacctgataggatgcgtttttat

SEQ ID NO: 29465 - DNA, 25 bp, Artificial
  probe
  misc_feature (1)..(25): SEQ ID NO: 4580; WAN0249PH_at; Start 3; Stop 27
aaacctgataggatgcgtttttatc

SEQ ID NO: 29466 - DNA, 25 bp, Artificial
  probe
  misc_feature (1)..(25): SEQ ID NO: 4840; WAN0249PI_at; Start 74; Stop 98
tgcaattgacacagttgttgcgact

SEQ ID NO: 29467 - DNA, 25 bp, Artificial
  probe
  misc_feature (1)..(25): SEQ ID NO: 4840; WAN0249PI_at; Start 53; Stop 77
tatactttcttactaaattggtgca

SEQ ID NO: 29468 - DNA, 25 bp, Artificial
  probe
  misc_feature (1)..(25): SEQ ID NO: 4840; WAN0249PI_at; Start 83; Stop 107
cacagttgttgcgactttagtcgct

SEQ ID NO: 29469 - DNA, 25 bp, Artificial
  probe
  misc_feature (1)..(25): SEQ ID NO: 4840; WAN0249PI_at; Start 269; Stop 293
ggacaaatcgaggatagtcaaatcg

SEQ ID NO: 29470 - DNA, 25 bp, Artificial
  probe
  misc_feature (1)..(25): SEQ ID NO: 4840; WAN0249PI_at; Start 3; Stop 27
cgaaagaattactatacttatacag
